United States Patent Application Publication US 2005/0255487 A1 - sequence listing, part 54

SEQ ID NO: 1478889 - RNA, 19 nt, Homo sapiens
  misc_RNA (1)...(19): siRNA sense strand
gaccuucgccaccggugaa

SEQ ID NO: 1478890 - RNA, 19 nt, Homo sapiens
  misc_RNA (1)...(19): siRNA sense strand
ugucaagggcgucuucuuc

SEQ ID NO: 1478891 - RNA, 19 nt, Homo sapiens
  misc_RNA (1)...(19): siRNA sense strand
gcagccacuuugaggacau

SEQ ID NO: 1478892 - RNA, 19 nt, Homo sapiens
  misc_RNA (1)...(19): siRNA sense strand
gcacccucaucgacauugg

SEQ ID NO: 1478893 - RNA, 19 nt, Homo sapiens
  misc_RNA (1)...(19): siRNA sense strand
gacgcacccucaucgacau

SEQ ID NO: 1478894 - RNA, 19 nt, Homo sapiens
  misc_RNA (1)...(19): siRNA sense strand
caagaucugcggugacaua

SEQ ID NO: 1478895 - RNA, 19 nt, Homo sapiens
  misc_RNA (1)...(19): siRNA sense strand
gaacgaccguggcgucucu

SEQ ID NO: 1478896 - RNA, 19 nt, Homo sapiens
  misc_RNA (1)...(19): siRNA sense strand
caagagacgcuacaacauc

SEQ ID NO: 1478897 - RNA, 19 nt, Homo sapiens
  misc_RNA (1)...(19): siRNA sense strand
aagagacgcuacaacauca

SEQ ID NO: 1478898 - RNA, 19 nt, Homo sapiens
  misc_RNA (1)...(19): siRNA sense strand
gcaagagacgcuacaacau

SEQ ID NO: 1478899 - RNA, 19 nt, Homo sapiens
  misc_RNA (1)...(19): siRNA sense strand
ccaaguuccuccacaagca

SEQ ID NO: 1478900 - RNA, 19 nt, Homo sapiens
  misc_RNA (1)...(19): siRNA sense strand
gagcagauucggcggauca

SEQ ID NO: 1478901 - RNA, 19 nt, Homo sapiens
  misc_RNA (1)...(19): siRNA sense strand
gaucugcggugacauacac

SEQ ID NO: 1478902 - RNA, 19 nt, Homo sapiens
  misc_RNA (1)...(19): siRNA sense strand
caugugcucuuuccagauc

SEQ ID NO: 1478903 - RNA, 19 nt, Homo sapiens
  misc_RNA (1)...(19): siRNA sense strand
ccgccaaagccaagaaaua

SEQ ID NO: 1478904 - RNA, 19 nt, Homo sapiens
  misc_RNA (1)...(19): siRNA sense strand
caucuaugguuucuacgau

SEQ ID NO: 1478905 - RNA, 19 nt, Homo sapiens
  misc_RNA (1)...(19): siRNA sense strand
gaccuucugcgacuauuug

SEQ ID NO: 1478906 - RNA, 19 nt, Homo sapiens
  misc_RNA (1)...(19): siRNA sense strand
cagcaucaaccgcaucuau

SEQ ID NO: 1478907 - RNA, 19 nt, Homo sapiens
  misc_RNA (1)...(19): siRNA sense strand
gccugcugcuggccuauaa

SEQ ID NO: 1478908 - RNA, 19 nt, Homo sapiens
  misc_RNA (1)...(19): siRNA sense strand
caacaucaaacuguggaaa

SEQ ID NO: 1478909 - RNA, 19 nt, Homo sapiens
  misc_RNA (1)...(19): siRNA sense strand
gagcaacuaccucuuucug

SEQ ID NO: 1478910 - RNA, 19 nt, Homo sapiens
  misc_RNA (1)...(19): siRNA sense strand
ucuaugguuucuacgauga

SEQ ID NO: 1478911 - RNA, 19 nt, Homo sapiens
  misc_RNA (1)...(19): siRNA sense strand
ccgcaucuaugguuucuac

SEQ ID NO: 1478912 - RNA, 19 nt, Homo sapiens
  misc_RNA (1)...(19): siRNA sense strand
ugacauacacggccaguac

SEQ ID NO: 1478913 - RNA, 19 nt, Homo sapiens
  misc_RNA (1)...(19): siRNA sense strand
gaccguggcgucucuuuua

SEQ ID NO: 1478914 - RNA, 19 nt, Homo sapiens
  misc_RNA (1)...(19): siRNA sense strand
gagacgcuacaacaucaaa

SEQ ID NO: 1478915 - RNA, 19 nt, Homo sapiens
  misc_RNA (1)...(19): siRNA sense strand
ccgaggugguggccaaguu

SEQ ID NO: 1478916 - RNA, 19 nt, Homo sapiens
  misc_RNA (1)...(19): siRNA sense strand
gcaucaaccgcaucuaugg

SEQ ID NO: 1478917 - RNA, 19 nt, Homo sapiens
  misc_RNA (1)...(19): siRNA sense strand
uuucucagcucccaacuac

SEQ ID NO: 1478918 - RNA, 19 nt, Homo sapiens
  misc_RNA (1)...(19): siRNA sense strand
auguacagcugacagagaa

SEQ ID NO: 1478919 - RNA, 19 nt, Homo sapiens
  misc_RNA (1)...(19): siRNA sense strand
cugcuggccuauaagauca

SEQ ID NO: 1478920 - RNA, 19 nt, Homo sapiens
  misc_RNA (1)...(19): siRNA sense strand
gcugcuggccuauaagauc

SEQ ID NO: 1478921 - RNA, 19 nt, Homo sapiens
  misc_RNA (1)...(19): siRNA sense strand
cgccaaagccaagaaauag

SEQ ID NO: 1478922 - RNA, 19 nt, Homo sapiens
  misc_RNA (1)...(19): siRNA sense strand
gaaguacgggcaguucagu

SEQ ID NO: 1478923 - RNA, 19 nt, Homo sapiens
  misc_RNA (1)...(19): siRNA sense strand
cggcagcuggugacacuuu

SEQ ID NO: 1478924 - RNA, 19 nt, Homo sapiens
  misc_RNA (1)...(19): siRNA sense strand
uggccuauaagaucaagua

SEQ ID NO: 1478925 - RNA, 19 nt, Homo sapiens
  misc_RNA (1)...(19): siRNA sense strand
ggaaguacgggcaguucag

SEQ ID NO: 1478926 - RNA, 19 nt, Homo sapiens
  misc_RNA (1)...(19): siRNA sense strand
cuacgaccuucugcgacua

SEQ ID NO: 1478927 - RNA, 19 nt, Homo sapiens
  misc_RNA (1)...(19): siRNA sense strand
gcaucuaugguuucuacga

SEQ ID NO: 1478928 - RNA, 19 nt, Homo sapiens
  misc_RNA (1)...(19): siRNA sense strand
uggcgucucuuuuaccuuu

SEQ ID NO: 1478929 - RNA, 19 nt, Homo sapiens
  misc_RNA (1)...(19): siRNA sense strand
gcacgacuuggaccucauc

SEQ ID NO: 1478930 - RNA, 19 nt, Homo sapiens
  misc_RNA (1)...(19): siRNA sense strand
uggccaaguuccuccacaa

SEQ ID NO: 1478931 - RNA, 19 nt, Homo sapiens
  misc_RNA (1)...(19): siRNA sense strand
ugcaagagacgcuacaaca

SEQ ID NO: 1478932 - RNA, 19 nt, Homo sapiens
  misc_RNA (1)...(19): siRNA sense strand
guggcgaguuugacaaugc

SEQ ID NO: 1478933 - RNA, 19 nt, Homo sapiens
  misc_RNA (1)...(19): siRNA sense strand
ucucagcucccaacuacug

SEQ ID NO: 1478934 - RNA, 19 nt, Homo sapiens
  misc_RNA (1)...(19): siRNA sense strand
cucaagaucugcggugaca

SEQ ID NO: 1478935 - RNA, 19 nt, Homo sapiens
  misc_RNA (1)...(19): siRNA sense strand
caaccuggacucgaucauc

SEQ ID NO: 1478936 - RNA, 19 nt, Homo sapiens
  misc_RNA (1)...(19): siRNA sense strand
cccaagaacuccuuuaaua

SEQ ID NO: 1478937 - RNA, 19 nt, Homo sapiens
  misc_RNA (1)...(19): siRNA sense strand
ggauuaaccuggacaacaa

SEQ ID NO: 1478938 - RNA, 19 nt, Homo sapiens
  misc_RNA (1)...(19): siRNA sense strand
caucugcccucuacuguga

SEQ ID NO: 1478939 - RNA, 19 nt, Homo sapiens
  misc_RNA (1)...(19): siRNA sense strand
gaacaccuguaccucaaca

SEQ ID NO: 1478940 - RNA, 19 nt, Homo sapiens
  misc_RNA (1)...(19): siRNA sense strand
guaacaagauugagaccau

SEQ ID NO: 1478941 - RNA, 19 nt, Homo sapiens
  misc_RNA (1)...(19): siRNA sense strand
caagaacuccuuuaauauc

SEQ ID NO: 1478942 - RNA, 19 nt, Homo sapiens
  misc_RNA (1)...(19): siRNA sense strand
ccaagaacuccuuuaauau

SEQ ID NO: 1478943 - RNA, 19 nt, Homo sapiens
  misc_RNA (1)...(19): siRNA sense strand
ccgcauccauuaccucuau

SEQ ID NO: 1478944 - RNA, 19 nt, Homo sapiens
  misc_RNA (1)...(19): siRNA sense strand
agaacaacuucaucacuga

SEQ ID NO: 1478945 - RNA, 19 nt, Homo sapiens
  misc_RNA (1)...(19): siRNA sense strand
ucauucggcuuaacuacaa

SEQ ID NO: 1478946 - RNA, 19 nt, Homo sapiens
  misc_RNA (1)...(19): siRNA sense strand
cacaacauccugagaaaga

SEQ ID NO: 1478947 - RNA, 19 nt, Homo sapiens
  misc_RNA (1)...(19): siRNA sense strand
uucaagagcuuucccaauc

SEQ ID NO: 1478948 - RNA, 19 nt, Homo sapiens
  misc_RNA (1)...(19): siRNA sense strand
caacaauagcaucgagaaa

SEQ ID NO: 1478949 - RNA, 19 nt, Homo sapiens
  misc_RNA (1)...(19): siRNA sense strand
ccacaggccugcgauggau

SEQ ID NO: 1478950 - RNA, 19 nt, Homo sapiens
  misc_RNA (1)...(19): siRNA sense strand
caaccuggcccacaacauc

SEQ ID NO: 1478951 - RNA, 19 nt, Homo sapiens
  misc_RNA (1)...(19): siRNA sense strand
gacaguaacaagauugaga

SEQ ID NO: 1478952 - RNA, 19 nt, Homo sapiens
  misc_RNA (1)...(19): siRNA sense strand
agaagaaccaguuggaaga

SEQ ID NO: 1478953 - RNA, 19 nt, Homo sapiens
  misc_RNA (1)...(19): siRNA sense strand
ggagaagaaccaguuggaa

SEQ ID NO: 1478954 - RNA, 19 nt, Homo sapiens
  misc_RNA (1)...(19): siRNA sense strand
ccuaacggauacuucaaga

SEQ ID NO: 1478955 - RNA, 19 nt, Homo sapiens
  misc_RNA (1)...(19): siRNA sense strand
ucaagagcuuucccaaucu

SEQ ID NO: 1478956 - RNA, 19 nt, Homo sapiens
  misc_RNA (1)...(19): siRNA sense strand
ggauggaaacuacuugaag

SEQ ID NO: 1478957 - RNA, 19 nt, Homo sapiens
  misc_RNA (1)...(19): siRNA sense strand
uggaacaccuguaccucaa

SEQ ID NO: 1478958 - RNA, 19 nt, Homo sapiens
  misc_RNA (1)...(19): siRNA sense strand
agauugagaccaucccuaa

SEQ ID NO: 1478959 - RNA, 19 nt, Homo sapiens
  misc_RNA (1)...(19): siRNA sense strand
cccacaacauccugagaaa

SEQ ID NO: 1478960 - RNA, 19 nt, Homo sapiens
  misc_RNA (1)...(19): siRNA sense strand
gaaccacaucuccagaauc

SEQ ID NO: 1478961 - RNA, 19 nt, Homo sapiens
  misc_RNA (1)...(19): siRNA sense strand
gcccaaggccagccaacaa

SEQ ID NO: 1478962 - RNA, 19 nt, Homo sapiens
  misc_RNA (1)...(19): siRNA sense strand
agaaccacaucuccagaau

SEQ ID NO: 1478963 - RNA, 19 nt, Homo sapiens
  misc_RNA (1)...(19): siRNA sense strand
caacggaacccagauuugc

SEQ ID NO: 1478964 - RNA, 19 nt, Homo sapiens
  misc_RNA (1)...(19): siRNA sense strand
gcccacaacauccugagaa

SEQ ID NO: 1478965 - RNA, 19 nt, Homo sapiens
  misc_RNA (1)...(19): siRNA sense strand
ccaucuaucuucccugacu

SEQ ID NO: 1478966 - RNA, 19 nt, Homo sapiens
  misc_RNA (1)...(19): siRNA sense strand
gcgaaaggucccugucauc

SEQ ID NO: 1478967 - RNA, 19 nt, Homo sapiens
  misc_RNA (1)...(19): siRNA sense strand
ccuggacaguaacaagauu

SEQ ID NO: 1478968 - RNA, 19 nt, Homo sapiens
  misc_RNA (1)...(19): siRNA sense strand
gaagaaccaguuggaagag

SEQ ID NO: 1478969 - RNA, 19 nt, Homo sapiens
  misc_RNA (1)...(19): siRNA sense strand
gcggcuggauggaaacuac

SEQ ID NO: 1478970 - RNA, 19 nt, Homo sapiens
  misc_RNA (1)...(19): siRNA sense strand
cagaaccacaucuccagaa

SEQ ID NO: 1478971 - RNA, 19 nt, Homo sapiens
  misc_RNA (1)...(19): siRNA sense strand
acaggccugcgauggauua

SEQ ID NO: 1478972 - RNA, 19 nt, Homo sapiens
  misc_RNA (1)...(19): siRNA sense strand
agagggugcuggagaaacu

SEQ ID NO: 1478973 - RNA, 19 nt, Homo sapiens
  misc_RNA (1)...(19): siRNA sense strand
ccaacaagacgaccaagac

SEQ ID NO: 1478974 - RNA, 19 nt, Homo sapiens
  misc_RNA (1)...(19): siRNA sense strand
ucaacggaacccagauuug

SEQ ID NO: 1478975 - RNA, 19 nt, Homo sapiens
  misc_RNA (1)...(19): siRNA sense strand
acaacaggaucagcagugu

SEQ ID NO: 1478976 - RNA, 19 nt, Homo sapiens
  misc_RNA (1)...(19): siRNA sense strand
ccaaggccagccaacaaga

SEQ ID NO: 1478977 - RNA, 19 nt, Homo sapiens
  misc_RNA (1)...(19): siRNA sense strand
acaauagcaucgagaaaau

SEQ ID NO: 1478978 - RNA, 19 nt, Homo sapiens
  misc_RNA (1)...(19): siRNA sense strand
ccuccaggcccuccaucua

SEQ ID NO: 1478979 - RNA, 19 nt, Homo sapiens
  misc_RNA (1)...(19): siRNA sense strand
acaacaauagcaucgagaa

SEQ ID NO: 1478980 - RNA, 19 nt, Homo sapiens
  misc_RNA (1)...(19): siRNA sense strand
ccucccacuucucaucuug

SEQ ID NO: 1478981 - RNA, 19 nt, Homo sapiens
  misc_RNA (1)...(19): siRNA sense strand
aaccacaucuccagaaucc

SEQ ID NO: 1478982 - RNA, 19 nt, Homo sapiens
  misc_RNA (1)...(19): siRNA sense strand
agcucuaccuggacaguaa

SEQ ID NO: 1478983 - RNA, 19 nt, Homo sapiens
  misc_RNA (1)...(19): siRNA sense strand
acggauacuucaagagcuu

SEQ ID NO: 1478984 - RNA, 19 nt, Homo sapiens
  misc_RNA (1)...(19): siRNA sense strand
ccagaacaacuucaucacu

SEQ ID NO: 1478985 - RNA, 19 nt, Homo sapiens
  misc_RNA (1)...(19): siRNA sense strand
ugcaguccguggucaucua

SEQ ID NO: 1478986 - RNA, 19 nt, Homo sapiens
  misc_RNA (1)...(19): siRNA sense strand
ccgcuggaccucaugaugu

SEQ ID NO: 1478987 - RNA, 19 nt, Homo sapiens
  misc_RNA (1)...(19): siRNA sense strand
accuguaccucaacaacaa

SEQ ID NO: 1478988 - RNA, 19 nt, Homo sapiens
  misc_RNA (1)...(19): siRNA sense strand
ucugcccucuacugugaua

SEQ ID NO: 1478989 - RNA, 19 nt, Homo sapiens
  misc_RNA (1)...(19): siRNA sense strand
gccaacaagacgaccaaga

SEQ ID NO: 1478990 - RNA, 19 nt, Homo sapiens
  misc_RNA (1)...(19): siRNA sense strand
ggccugcgauggauuaacc

SEQ ID NO: 1478991 - RNA, 19 nt, Homo sapiens
  misc_RNA (1)...(19): siRNA sense strand
acaacauccugagaaagau

SEQ ID NO: 1478992 - RNA, 19 nt, Homo sapiens
  misc_RNA (1)...(19): siRNA sense strand
caccuuccauggccucaag

SEQ ID NO: 1478993 - RNA, 19 nt, Homo sapiens
  misc_RNA (1)...(19): siRNA sense strand
uggcaaagcugaagaagua

SEQ ID NO: 1478994 - RNA, 19 nt, Homo sapiens
  misc_RNA (1)...(19): siRNA sense strand
ggaaagagaaggcggauaa

SEQ ID NO: 1478995 - RNA, 19 nt, Homo sapiens
  misc_RNA (1)...(19): siRNA sense strand
ggaagaagaagaugaagaa

SEQ ID NO: 1478996 - RNA, 19 nt, Homo sapiens
  misc_RNA (1)...(19): siRNA sense strand
gcacugugauagagaaaug

SEQ ID NO: 1478997 - RNA, 19 nt, Homo sapiens
  misc_RNA (1)...(19): siRNA sense strand
agaagaagaugaagaagau

SEQ ID NO: 1478998 - RNA, 19 nt, Homo sapiens
  misc_RNA (1)...(19): siRNA sense strand
gaaggauguugcugacuau

SEQ ID NO: 1478999 - RNA, 19 nt, Homo sapiens
  misc_RNA (1)...(19): siRNA sense strand
gcagagaagagcauaagaa

SEQ ID NO: 1479000 - RNA, 19 nt, Homo sapiens
  misc_RNA (1)...(19): siRNA sense strand
gauaaagugcacugugaua

SEQ ID NO: 1479001 - RNA, 19 nt, Homo sapiens
  misc_RNA (1)...(19): siRNA sense strand
gaagaaguaugagaaggau

SEQ ID NO: 1479002 - RNA, 19 nt, Homo sapiens
  misc_RNA (1)...(19): siRNA sense strand
agaaggauguugcugacua

SEQ ID NO: 1479003 - RNA, 19 nt, Homo sapiens
  misc_RNA (1)...(19): siRNA sense strand
cggauaaagugcacuguga

SEQ ID NO: 1479004 - RNA, 19 nt, Homo sapiens
  misc_RNA (1)...(19): siRNA sense strand
gggaaaagauggaagaaga

SEQ ID NO: 1479005 - RNA, 19 nt, Homo sapiens
  misc_RNA (1)...(19): siRNA sense strand
ggugagauguggaauaacu

SEQ ID NO: 1479006 - RNA, 19 nt, Homo sapiens
  misc_RNA (1)...(19): siRNA sense strand
ggauguugcugacuauaag

SEQ ID NO: 1479007 - RNA, 19 nt, Homo sapiens
  misc_RNA (1)...(19): siRNA sense strand
cagagaagagcauaagaaa

SEQ ID NO: 1479008 - RNA, 19 nt, Homo sapiens
  misc_RNA (1)...(19): siRNA sense strand
agagaaggaggaugaauaa

SEQ ID NO: 1479009 - RNA, 19 nt, Homo sapiens
  misc_RNA (1)...(19): siRNA sense strand
ugggugagauguggaauaa

SEQ ID NO: 1479010 - RNA, 19 nt, Homo sapiens
  misc_RNA (1)...(19): siRNA sense strand
gauggaagaagaagaugaa

SEQ ID NO: 1479011 - RNA, 19 nt, Homo sapiens
  misc_RNA (1)...(19): siRNA sense strand
ucacuaagguggcaaagcu

SEQ ID NO: 1479012 - RNA, 19 nt, Homo sapiens
  misc_RNA (1)...(19): siRNA sense strand
gaaagagaaggcggauaaa

SEQ ID NO: 1479013 - RNA, 19 nt, Homo sapiens
  misc_RNA (1)...(19): siRNA sense strand
aagagaaggaggaugaaua

SEQ ID NO: 1479014 - RNA, 19 nt, Homo sapiens
  misc_RNA (1)...(19): siRNA sense strand
cagaggucccugucaauuu

SEQ ID NO: 1479015 - RNA, 19 nt, Homo sapiens
  misc_RNA (1)...(19): siRNA sense strand
ugagauguggaauaacuua

SEQ ID NO: 1479016 - RNA, 19 nt, Homo sapiens
  misc_RNA (1)...(19): siRNA sense strand
ucugagagguggaagacaa

SEQ ID NO: 1479017 - RNA, 19 nt, Homo sapiens
  misc_RNA (1)...(19): siRNA sense strand
aaaggccacugucuggauu

SEQ ID NO: 1479018 - RNA, 19 nt, Homo sapiens
  misc_RNA (1)...(19): siRNA sense strand
uaaagugcacugugauaga

SEQ ID NO: 1479019 - RNA, 19 nt, Homo sapiens
  misc_RNA (1)...(19): siRNA sense strand
gcaagaacgauccuaaugc

SEQ ID NO: 1479020 - RNA, 19 nt, Homo sapiens
  misc_RNA (1)...(19): siRNA sense strand
caaagcugaagaaguauga

SEQ ID NO: 1479021 - RNA, 19 nt, Homo sapiens
  misc_RNA (1)...(19): siRNA sense strand
gauagagaaaugaaggauu

SEQ ID NO: 1479022 - RNA, 19 nt, Homo sapiens
  misc_RNA (1)...(19): siRNA sense strand
gaggcaagaacgauccuaa

SEQ ID NO: 1479023 - RNA, 19 nt, Homo sapiens
  misc_RNA (1)...(19): siRNA sense strand
gagaaaugaaggauuaugg

SEQ ID NO: 1479024 - RNA, 19 nt, Homo sapiens
  misc_RNA (1)...(19): siRNA sense strand
gaaaguuggacggcacaaa

SEQ ID NO: 1479025 - RNA, 19 nt, Homo sapiens
  misc_RNA (1)...(19): siRNA sense strand
gccacugucuggauucuuc

SEQ ID NO: 1479026 - RNA, 19 nt, Homo sapiens
  misc_RNA (1)...(19): siRNA sense strand
ggcaagaacgauccuaaug

SEQ ID NO: 1479027 - RNA, 19 nt, Homo sapiens
  misc_RNA (1)...(19): siRNA sense strand
cacaaacccuggcaucucu

SEQ ID NO: 1479028 - RNA, 19 nt, Homo sapiens
  misc_RNA (1)...(19): siRNA sense strand
gcacaaaagguccugcuaa

SEQ ID NO: 1479029 - RNA, 19 nt, Homo sapiens
  misc_RNA (1)...(19): siRNA sense strand
gaaaagcagccuuauguca

SEQ ID NO: 1479030 - RNA, 19 nt, Homo sapiens
  misc_RNA (1)...(19): siRNA sense strand
ugaagaaguaugagaagga

SEQ ID NO: 1479031 - RNA, 19 nt, Homo sapiens
  misc_RNA (1)...(19): siRNA sense strand
ccagaggucccugucaauu

SEQ ID NO: 1479032 - RNA, 19 nt, Homo sapiens
  misc_RNA (1)...(19): siRNA sense strand
gaagagaaggaggaugaau

SEQ ID NO: 1479033 - RNA, 19 nt, Homo sapiens
  misc_RNA (1)...(19): siRNA sense strand
aaagauggaagaagaagau

SEQ ID NO: 1479034 - RNA, 19 nt, Homo sapiens
  misc_RNA (1)...(19): siRNA sense strand
gcaaagcugaagaaguaug

SEQ ID NO: 1479035 - RNA, 19 nt, Homo sapiens
  misc_RNA (1)...(19): siRNA sense strand
agagaaggcggauaaagug

SEQ ID NO: 1479036 - RNA, 19 nt, Homo sapiens
  misc_RNA (1)...(19): siRNA sense strand
cacaaaagguccugcuaaa

SEQ ID NO: 1479037 - RNA, 19 nt, Homo sapiens
  misc_RNA (1)...(19): siRNA sense strand
gagauguggaauaacuuaa

SEQ ID NO: 1479038 - RNA, 19 nt, Homo sapiens
  misc_RNA (1)...(19): siRNA sense strand
gauucuuccuguucuguuc

SEQ ID NO: 1479039 - RNA, 19 nt, Homo sapiens
  misc_RNA (1)...(19): siRNA sense strand
aaagugcacugugauagag

SEQ ID NO: 1479040 - RNA, 19 nt, Homo sapiens
  misc_RNA (1)...(19): siRNA sense strand
aagaagaagaugaagaaga

SEQ ID NO: 1479041 - RNA, 19 nt, Homo sapiens
  misc_RNA (1)...(19): siRNA sense strand
caaaagguccugcuaaagu

SEQ ID NO: 1479042 - RNA, 19 nt, Homo sapiens
  misc_RNA (1)...(19): siRNA sense strand
aagagaaggcggauaaagu

SEQ ID NO: 1479043 - RNA, 19 nt, Homo sapiens
  misc_RNA (1)...(19): siRNA sense strand
aggaagagaaggaggauga

SEQ ID NO: 1479044 - RNA, 19 nt, Homo sapiens
  misc_RNA (1)...(19): siRNA sense strand
aaaagguccugcuaaaguu

SEQ ID NO: 1479045 - RNA, 19 nt, Homo sapiens
  misc_RNA (1)...(19): siRNA sense strand
agaggucccugucaauuuu

SEQ ID NO: 1479046 - RNA, 19 nt, Homo sapiens
  misc_RNA (1)...(19): siRNA sense strand
ggauaaagugcacugugau

SEQ ID NO: 1479047 - RNA, 19 nt, Homo sapiens
  misc_RNA (1)...(19): siRNA sense strand
ggaagagaaggaggaugaa

SEQ ID NO: 1479048 - RNA, 19 nt, Homo sapiens
  misc_RNA (1)...(19): siRNA sense strand
ggggcaagaugucugcuuu

SEQ ID NO: 1479049 - RNA, 19 nt, Homo sapiens
  misc_RNA (1)...(19): siRNA sense strand
agaaguaugagaaggaugu

SEQ ID NO: 1479050 - RNA, 19 nt, Homo sapiens
  misc_RNA (1)...(19): siRNA sense strand
aaagcagccuuaugucacu

SEQ ID NO: 1479051 - RNA, 19 nt, Homo sapiens
  misc_RNA (1)...(19): siRNA sense strand
gugaaaagcagccuuaugu

SEQ ID NO: 1479052 - RNA, 19 nt, Homo sapiens
  misc_RNA (1)...(19): siRNA sense strand
agaaaugaaggauuaugga

SEQ ID NO: 1479053 - RNA, 19 nt, Homo sapiens
  misc_RNA (1)...(19): siRNA sense strand
acuauaagucgaaaggaaa

SEQ ID NO: 1479054 - RNA, 19 nt, Homo sapiens
  misc_RNA (1)...(19): siRNA sense strand
ggaaaagauggaagaagaa

SEQ ID NO: 1479055 - RNA, 19 nt, Homo sapiens
  misc_RNA (1)...(19): siRNA sense strand
gcuaaaguugccugggaaa

SEQ ID NO: 1479056 - RNA, 19 nt, Homo sapiens
  misc_RNA (1)...(19): siRNA sense strand
caagaucaaauccacaaac

SEQ ID NO: 1479057 - RNA, 19 nt, Homo sapiens
  misc_RNA (1)...(19): siRNA sense strand
ugaagaagauggggaggaa

SEQ ID NO: 1479058 - RNA, 19 nt, Homo sapiens
  misc_RNA (1)...(19): siRNA sense strand
gaagaagaugaagaagaug

SEQ ID NO: 1479059 - RNA, 19 nt, Homo sapiens
  misc_RNA (1)...(19): siRNA sense strand
ccacaaacccuggcaucuc

SEQ ID NO: 1479060 - RNA, 19 nt, Homo sapiens
  misc_RNA (1)...(19): siRNA sense strand
uaagucgaaaggaaaguug

SEQ ID NO: 1479061 - RNA, 19 nt, Homo sapiens
  misc_RNA (1)...(19): siRNA sense strand
gaagaagaagaugaagaag

SEQ ID NO: 1479062 - RNA, 19 nt, Homo sapiens
  misc_RNA (1)...(19): siRNA sense strand
gagagguggaagacaaugu

SEQ ID NO: 1479063 - RNA, 19 nt, Homo sapiens
  misc_RNA (1)...(19): siRNA sense strand
caaugucugggaaagagaa

SEQ ID NO: 1479064 - RNA, 19 nt, Homo sapiens
  misc_RNA (1)...(19): siRNA sense strand
ggcaagaugucugcuuuug

SEQ ID NO: 1479065 - RNA, 19 nt, Homo sapiens
  misc_RNA (1)...(19): siRNA sense strand
gaaacuaaggggcaagaug

SEQ ID NO: 1479066 - RNA, 19 nt, Homo sapiens
  misc_RNA (1)...(19): siRNA sense strand
gaaguaugagaaggauguu

SEQ ID NO: 1479067 - RNA, 19 nt, Homo sapiens
  misc_RNA (1)...(19): siRNA sense strand
caaacccuggcaucucuau

SEQ ID NO: 1479068 - RNA, 19 nt, Homo sapiens
  misc_RNA (1)...(19): siRNA sense strand
aaaguugccugggaaaaga

SEQ ID NO: 1479069 - RNA, 19 nt, Homo sapiens
  misc_RNA (1)...(19): siRNA sense strand
aggauguugcugacuauaa

SEQ ID NO: 1479070 - RNA, 19 nt, Homo sapiens
  misc_RNA (1)...(19): siRNA sense strand
aaacugagguggagaauua

SEQ ID NO: 1479071 - RNA, 19 nt, Homo sapiens
  misc_RNA (1)...(19): siRNA sense strand
gagaauuacuggauugaua

SEQ ID NO: 1479072 - RNA, 19 nt, Homo sapiens
  misc_RNA (1)...(19): siRNA sense strand
ugaagacgcuguauauuau

SEQ ID NO: 1479073 - RNA, 19 nt, Homo sapiens
  misc_RNA (1)...(19): siRNA sense strand
cagaauagcucuccaaagc

SEQ ID NO: 1479074 - RNA, 19 nt, Homo sapiens
  misc_RNA (1)...(19): siRNA sense strand
gaaauuaccaucagcucaa

SEQ ID NO: 1479075 - RNA, 19 nt, Homo sapiens
  misc_RNA (1)...(19): siRNA sense strand
gcuaucagcuacuuucuca

SEQ ID NO: 1479076 - RNA, 19 nt, Homo sapiens
  misc_RNA (1)...(19): siRNA sense strand
caacagcucagaaugacua

SEQ ID NO: 1479077 - RNA, 19 nt, Homo sapiens
  misc_RNA (1)...(19): siRNA sense strand
caaugcaguugcucuguuu

SEQ ID NO: 1479078 - RNA, 19 nt, Homo sapiens
  misc_RNA (1)...(19): siRNA sense strand
cugaagacgcuguauauua

SEQ ID NO: 1479079 - RNA, 19 nt, Homo sapiens
  misc_RNA (1)...(19): siRNA sense strand
uaacaauucuuucccuauc

SEQ ID NO: 1479080 - RNA, 19 nt, Homo sapiens
  misc_RNA (1)...(19): siRNA sense strand
ccacucaauucuacugauu

SEQ ID NO: 1479081 - RNA, 19 nt, Homo sapiens
  misc_RNA (1)...(19): siRNA sense strand
aaacauacuugucugagau

SEQ ID NO: 1479082 - RNA, 19 nt, Homo sapiens
  misc_RNA (1)...(19): siRNA sense strand
ggaauaauuugugccagau

SEQ ID NO: 1479083 - RNA, 19 nt, Homo sapiens
  misc_RNA (1)...(19): siRNA sense strand
ugacuccucugaucauguu

SEQ ID NO: 1479084 - RNA, 19 nt, Homo sapiens
  misc_RNA (1)...(19): siRNA sense strand
cagcuucgacuucaucuuu

SEQ ID NO: 1479085 - RNA, 19 nt, Homo sapiens
  misc_RNA (1)...(19): siRNA sense strand
gacuucaucuuuacccaaa

SEQ ID NO: 1479086 - RNA, 19 nt, Homo sapiens
  misc_RNA (1)...(19): siRNA sense strand
aaagugaauugucgccauu

SEQ ID NO: 1479087 - RNA, 19 nt, Homo sapiens
  misc_RNA (1)...(19): siRNA sense strand
caacaucugcacuguguau

SEQ ID NO: 1479088 - RNA, 19 nt, Homo sapiens
  misc_RNA (1)...(19): siRNA sense strand
gguggagaauuacuggauu

SEQ ID NO: 1479089 - RNA, 19 nt, Homo sapiens
  misc_RNA (1)...(19): siRNA sense strand
caguugcucuguuuaucua

SEQ ID NO: 1479090 - RNA, 19 nt, Homo sapiens
  misc_RNA (1)...(19): siRNA sense strand
gauugugacuccucugauc

SEQ ID NO: 1479091 - RNA, 19 nt, Homo sapiens
  misc_RNA (1)...(19): siRNA sense strand
gcucaaccucccuaaguuu

SEQ ID NO: 1479092 - RNA, 19 nt, Homo sapiens
  misc_RNA (1)...(19): siRNA sense strand
gcuacuuucucauucucua

SEQ ID NO: 1479093 - RNA, 19 nt, Homo sapiens
  misc_RNA (1)...(19): siRNA sense strand
caauucuacugauucaaga

SEQ ID NO: 1479094 - RNA, 19 nt, Homo sapiens
  misc_RNA (1)...(19): siRNA sense strand
ucaaugcaguugcucuguu

SEQ ID NO: 1479095 - RNA, 19 nt, Homo sapiens
  misc_RNA (1)...(19): siRNA sense strand
gaagcaacagcucagaaug

SEQ ID NO: 1479096 - RNA, 19 nt, Homo sapiens
  misc_RNA (1)...(19): siRNA sense strand
guggagaauuacuggauug

SEQ ID NO: 1479097 - RNA, 19 nt, Homo sapiens
  misc_RNA (1)...(19): siRNA sense strand
uaucagcuacuuucucauu

SEQ ID NO: 1479098 - RNA, 19 nt, Homo sapiens
  misc_RNA (1)...(19): siRNA sense strand
uaaggcaguuuccacaagu

SEQ ID NO: 1479099 - RNA, 19 nt, Homo sapiens
  misc_RNA (1)...(19): siRNA sense strand
caucugcacuguguauugu

SEQ ID NO: 1479100 - RNA, 19 nt, Homo sapiens
  misc_RNA (1)...(19): siRNA sense strand
uccaaagccucaugauguu

SEQ ID NO: 1479101 - RNA, 19 nt, Homo sapiens
  misc_RNA (1)...(19): siRNA sense strand
ucauugguaucauugcaaa

SEQ ID NO: 1479102 - RNA, 19 nt, Homo sapiens
  misc_RNA (1)...(19): siRNA sense strand
gagaagcaacagcucagaa

SEQ ID NO: 1479103 - RNA, 19 nt, Homo sapiens
  misc_RNA (1)...(19): siRNA sense strand
gcucaguuucuucuacuuu

SEQ ID NO: 1479104 - RNA, 19 nt, Homo sapiens
  misc_RNA (1)...(19): siRNA sense strand
gagacacacccuacacaug

SEQ ID NO: 1479105 - RNA, 19 nt, Homo sapiens
  misc_RNA (1)...(19): siRNA sense strand
ccaaagccucaugauguua

SEQ ID NO: 1479106 - RNA, 19 nt, Homo sapiens
  misc_RNA (1)...(19): siRNA sense strand
aagcaacagcucagaauga

SEQ ID NO: 1479107 - RNA, 19 nt, Homo sapiens
  misc_RNA (1)...(19): siRNA sense strand
gaagacgcuguauauuaug

SEQ ID NO: 1479108 - RNA, 19 nt, Homo sapiens
  misc_RNA (1)...(19): siRNA sense strand
guaacaauucuuucccuau

SEQ ID NO: 1479109 - RNA, 19 nt, Homo sapiens
  misc_RNA (1)...(19): siRNA sense strand
ggcuauacaugcagcugaa

SEQ ID NO: 1479110 - RNA, 19 nt, Homo sapiens
  misc_RNA (1)...(19): siRNA sense strand
aauaauuugugccagauca

SEQ ID NO: 1479111 - RNA, 19 nt, Homo sapiens
  misc_RNA (1)...(19): siRNA sense strand
gcaucaacaucugcacugu

SEQ ID NO: 1479112 - RNA, 19 nt, Homo sapiens
  misc_RNA (1)...(19): siRNA sense strand
cacagcauguucugcauca

SEQ ID NO: 1479113 - RNA, 19 nt, Homo sapiens
  misc_RNA (1)...(19): siRNA sense strand
ccauuucucaucaccuuaa

SEQ ID NO: 1479114 - RNA, 19 nt, Homo sapiens
  misc_RNA (1)...(19): siRNA sense strand
auacuugucugagaucaau

SEQ ID NO: 1479115 - RNA, 19 nt, Homo sapiens
  misc_RNA (1)...(19): siRNA sense strand
cugaguguauccagaauag

SEQ ID NO: 1479116 - RNA, 19 nt, Homo sapiens
  misc_RNA (1)...(19): siRNA sense strand
cuaccuguccaacauguuu

SEQ ID NO: 1479117 - RNA, 19 nt, Homo sapiens
  misc_RNA (1)...(19): siRNA sense strand
ucugcacuguguauuguaa

SEQ ID NO: 1479118 - RNA, 19 nt, Homo sapiens
  misc_RNA (1)...(19): siRNA sense strand
cuccaaagccucaugaugu

SEQ ID NO: 1479119 - RNA, 19 nt, Homo sapiens
  misc_RNA (1)...(19): siRNA sense strand
ugcaaaugguuucaucaug

SEQ ID NO: 1479120 - RNA, 19 nt, Homo sapiens
  misc_RNA (1)...(19): siRNA sense strand
gcaguugcucuguuuaucu

SEQ ID NO: 1479121 - RNA, 19 nt, Homo sapiens
  misc_RNA (1)...(19): siRNA sense strand
gaauugucgccauuucuca

SEQ ID NO: 1479122 - RNA, 19 nt, Homo sapiens
  misc_RNA (1)...(19): siRNA sense strand
ccucaugauguuagaaauu

SEQ ID NO: 1479123 - RNA, 19 nt, Homo sapiens
  misc_RNA (1)...(19): siRNA sense strand
gccagccacucaauucuac

SEQ ID NO: 1479124 - RNA, 19 nt, Homo sapiens
  misc_RNA (1)...(19): siRNA sense strand
cagcucaaccucccuaagu

SEQ ID NO: 1479125 - RNA, 19 nt, Homo sapiens
  misc_RNA (1)...(19): siRNA sense strand
caaagccucaugauguuag

SEQ ID NO: 1479126 - RNA, 19 nt, Homo sapiens
  misc_RNA (1)...(19): siRNA sense strand
gggauugugacuccucuga

SEQ ID NO: 1479127 - RNA, 19 nt, Homo sapiens
  misc_RNA (1)...(19): siRNA sense strand
cugauccucucucucaaga

SEQ ID NO: 1479128 - RNA, 19 nt, Homo sapiens
  misc_RNA (1)...(19): siRNA sense strand
ucaauucuacugauucaag

SEQ ID NO: 1479129 - RNA, 19 nt, Homo sapiens
  misc_RNA (1)...(19): siRNA sense strand
acucaauucuacugauuca

SEQ ID NO: 1479130 - RNA, 19 nt, Homo sapiens
  misc_RNA (1)...(19): siRNA sense strand
cgccauuucucaucaccuu

SEQ ID NO: 1479131 - RNA, 19 nt, Homo sapiens
  misc_RNA (1)...(19): siRNA sense strand
agauaacccugggcugaga

SEQ ID NO: 1479132 - RNA, 19 nt, Homo sapiens
  misc_RNA (1)...(19): siRNA sense strand
uugauacccuggcuucugu

SEQ ID NO: 1479133 - RNA, 19 nt, Homo sapiens
  misc_RNA (1)...(19): siRNA sense strand
cgcuguauauuaugcauuc

SEQ ID NO: 1479134 - RNA, 19 nt, Homo sapiens
  misc_RNA (1)...(19): siRNA sense strand
uuaucuaccuguccaacau

SEQ ID NO: 1479135 - RNA, 19 nt, Homo sapiens
  misc_RNA (1)...(19): siRNA sense strand
cuacacaugggaagcaaug

SEQ ID NO: 1479136 - RNA, 19 nt, Homo sapiens
  misc_RNA (1)...(19): siRNA sense strand
gaucauguucauccugaca

SEQ ID NO: 1479137 - RNA, 19 nt, Homo sapiens
  misc_RNA (1)...(19): siRNA sense strand
auaaggcaguuuccacaag

SEQ ID NO: 1479138 - RNA, 19 nt, Homo sapiens
  misc_RNA (1)...(19): siRNA sense strand
ucagcuacuuucucauucu

SEQ ID NO: 1479139 - RNA, 19 nt, Homo sapiens
  misc_RNA (1)...(19): siRNA sense strand
cugcugauccucucucuca

SEQ ID NO: 1479140 - RNA, 19 nt, Homo sapiens
  misc_RNA (1)...(19): siRNA sense strand
agaagcaacagcucagaau

SEQ ID NO: 1479141 - RNA, 19 nt, Homo sapiens
  misc_RNA (1)...(19): siRNA sense strand
uggcuguccguguuuauuu

SEQ ID NO: 1479142 - RNA, 19 nt, Homo sapiens
  misc_RNA (1)...(19): siRNA sense strand
ucaguuucuucuacuuugu

SEQ ID NO: 1479143 - RNA, 19 nt, Homo sapiens
  misc_RNA (1)...(19): siRNA sense strand
ggcuguccguguuuauuuc

SEQ ID NO: 1479144 - RNA, 19 nt, Homo sapiens
  misc_RNA (1)...(19): siRNA sense strand
caguuuuacuugcugaaua

SEQ ID NO: 1479145 - RNA, 19 nt, Homo sapiens
  misc_RNA (1)...(19): siRNA sense strand
aucaacaucugcacugugu

SEQ ID NO: 1479146 - RNA, 19 nt, Homo sapiens
  misc_RNA (1)...(19): siRNA sense strand
cucaguuucuucuacuuug

SEQ ID NO: 1479147 - RNA, 19 nt, Homo sapiens
  misc_RNA (1)...(19): siRNA sense strand
caaacugagguggagaauu

SEQ ID NO: 1479148 - RNA, 19 nt, Homo sapiens
  misc_RNA (1)...(19): siRNA sense strand
ccucauugguaucauugca

SEQ ID NO: 1479149 - RNA, 19 nt, Homo sapiens
  misc_RNA (1)...(19): siRNA sense strand
agcuucgacuucaucuuua

SEQ ID NO: 1479150 - RNA, 19 nt, Homo sapiens
  misc_RNA (1)...(19): siRNA sense strand
gauaacccugggcugagaa

SEQ ID NO: 1479151 - RNA, 19 nt, Homo sapiens
  misc_RNA (1)...(19): siRNA sense strand
ggagaauuacuggauugau

SEQ ID NO: 1479152 - RNA, 19 nt, Homo sapiens
  misc_RNA (1)...(19): siRNA sense strand
gcucuccaaagccucauga

SEQ ID NO: 1479153 - RNA, 19 nt, Homo sapiens
  misc_RNA (1)...(19): siRNA sense strand
ggcuucagcuucgacuuca

SEQ ID NO: 1479154 - RNA, 19 nt, Homo sapiens
  misc_RNA (1)...(19): siRNA sense strand
gaauaauuugugccagauc

SEQ ID NO: 1479155 - RNA, 19 nt, Homo sapiens
  misc_RNA (1)...(19): siRNA sense strand
aaaacauacuugucugaga

SEQ ID NO: 1479156 - RNA, 19 nt, Homo sapiens
  misc_RNA (1)...(19): siRNA sense strand
uuuauuuccuucagucaca

SEQ ID NO: 1479157 - RNA, 19 nt, Homo sapiens
  misc_RNA (1)...(19): siRNA sense strand
aaugagcgcuuuacuaaua

SEQ ID NO: 1479158 - RNA, 19 nt, Homo sapiens
  misc_RNA (1)...(19): siRNA sense strand
ggacgaggccuacccauaa

SEQ ID NO: 1479159 - RNA, 19 nt, Homo sapiens
  misc_RNA (1)...(19): siRNA sense strand
ccaauuggaugcauauaug

SEQ ID NO: 1479160 - RNA, 19 nt, Homo sapiens
  misc_RNA (1)...(19): siRNA sense strand
ccaccaagaugucucuaaa

SEQ ID NO: 1479161 - RNA, 19 nt, Homo sapiens
  misc_RNA (1)...(19): siRNA sense strand
cgaaugggcuuaagaagag

SEQ ID NO: 1479162 - RNA, 19 nt, Homo sapiens
  misc_RNA (1)...(19): siRNA sense strand
caagaugucucuaaaugag

SEQ ID NO: 1479163 - RNA, 19 nt, Homo sapiens
  misc_RNA (1)...(19): siRNA sense strand
cuaauaugcugaagaacaa

SEQ ID NO: 1479164 - RNA, 19 nt, Homo sapiens
  misc_RNA (1)...(19): siRNA sense strand
uaaagcagcgccuggguaa

SEQ ID NO: 1479165 - RNA, 19 nt, Homo sapiens
  misc_RNA (1)...(19): siRNA sense strand
gcauauaugucgaaaacaa

SEQ ID NO: 1479166 - RNA, 19 nt, Homo sapiens
  misc_RNA (1)...(19): siRNA sense strand
ugaguuggaugccuacaug

SEQ ID NO: 1479167 - RNA, 19 nt, Homo sapiens
  misc_RNA (1)...(19): siRNA sense strand
gggcuucgaugcagcaaca

SEQ ID NO: 1479168 - RNA, 19 nt, Homo sapiens
  misc_RNA (1)...(19): siRNA sense strand
gcagacagaucccgaaacc

SEQ ID NO: 1479169 - RNA, 19 nt, Homo sapiens
  misc_RNA (1)...(19): siRNA sense strand
aagaagaggugguguucga

SEQ ID NO: 1479170 - RNA, 19 nt, Homo sapiens
  misc_RNA (1)...(19): siRNA sense strand
agacagaucccgaaaccaa

SEQ ID NO: 1479171 - RNA, 19 nt, Homo sapiens
  misc_RNA (1)...(19): siRNA sense strand
ccaaggagcagcuggacaa

SEQ ID NO: 1479172 - RNA, 19 nt, Homo sapiens
  misc_RNA (1)...(19): siRNA sense strand
acaccuggaugcugaguug

SEQ ID NO: 1479173 - RNA, 19 nt, Homo sapiens
  misc_RNA (1)...(19): siRNA sense strand
accaagaugucucuaaaug

SEQ ID NO: 1479174 - RNA, 19 nt, Homo sapiens
  misc_RNA (1)...(19): siRNA sense strand
ccaagaugucucuaaauga

SEQ ID NO: 1479175 - RNA, 19 nt, Homo sapiens
  misc_RNA (1)...(19): siRNA sense strand
gacgaggccuacccauaau

SEQ ID NO: 1479176 - RNA, 19 nt, Homo sapiens
  misc_RNA (1)...(19): siRNA sense strand
gcagcuggacaaccaauug

SEQ ID NO: 1479177 - RNA, 19 nt, Homo sapiens
  misc_RNA (1)...(19): siRNA sense strand
acaaccaauuggaugcaua

SEQ ID NO: 1479178 - RNA, 19 nt, Homo sapiens
  misc_RNA (1)...(19): siRNA sense strand
cgccgaaaguugugcuaaa

SEQ ID NO: 1479179 - RNA, 19 nt, Homo sapiens
  misc_RNA (1)...(19): siRNA sense strand
cccagcagauggagaauag

SEQ ID NO: 1479180 - RNA, 19 nt, Homo sapiens
  misc_RNA (1)...(19): siRNA sense strand
caaccaauuggaugcauau

SEQ ID NO: 1479181 - RNA, 19 nt, Homo sapiens
  misc_RNA (1)...(19): siRNA sense strand
ccgaaugggcuuaagaaga

SEQ ID NO: 1479182 - RNA, 19 nt, Homo sapiens
  misc_RNA (1)...(19): siRNA sense strand
ggaugcauauaugucgaaa

SEQ ID NO: 1479183 - RNA, 19 nt, Homo sapiens
  misc_RNA (1)...(19): siRNA sense strand
gccaccagaacccuacuua

SEQ ID NO: 1479184 - RNA, 19 nt, Homo sapiens
  misc_RNA (1)...(19): siRNA sense strand
aaacagccgacgccaguga

SEQ ID NO: 1479185 - RNA, 19 nt, Homo sapiens
  misc_RNA (1)...(19): siRNA sense strand
aagcagcgccuggguaaga

SEQ ID NO: 1479186 - RNA, 19 nt, Homo sapiens
  misc_RNA (1)...(19): siRNA sense strand
gcgcagacagaucccgaaa

SEQ ID NO: 1479187 - RNA, 19 nt, Homo sapiens
  misc_RNA (1)...(19): siRNA sense strand
caggcagcauuaaaacuua

SEQ ID NO: 1479188 - RNA, 19 nt, Homo sapiens
  misc_RNA (1)...(19): siRNA sense strand
acuaauaugcugaagaaca

SEQ ID NO: 1479189 - RNA, 19 nt, Homo sapiens
  misc_RNA (1)...(19): siRNA sense strand
gccgaaaguugugcuaaaa

SEQ ID NO: 1479190 - RNA, 19 nt, Homo sapiens
  misc_RNA (1)...(19): siRNA sense strand
cagccgacgccagugaaua

SEQ ID NO: 1479191 - RNA, 19 nt, Homo sapiens
  misc_RNA (1)...(19): siRNA sense strand
aggagcagcuggacaacca

SEQ ID NO: 1479192 - RNA, 19 nt, Homo sapiens
  misc_RNA (1)...(19): siRNA sense strand
gccagugccagaaacagaa

SEQ ID NO: 1479193 - RNA, 19 nt, Homo sapiens
  misc_RNA (1)...(19): siRNA sense strand
cgacgccagugaauauucg

SEQ ID NO: 1479194 - RNA, 19 nt, Homo sapiens
  misc_RNA (1)...(19): siRNA sense strand
gcccagcagauggagaaua

SEQ ID NO: 1479195 - RNA, 19 nt, Homo sapiens
  misc_RNA (1)...(19): siRNA sense strand
gcagcaacaacagcagcua

SEQ ID NO: 1479196 - RNA, 19 nt, Homo sapiens
  misc_RNA (1)...(19): siRNA sense strand
gaucccgaaaccaaugauu

SEQ ID NO: 1479197 - RNA, 19 nt, Homo sapiens
  misc_RNA (1)...(19): siRNA sense strand
caauuggaugcauauaugu

SEQ ID NO: 1479198 - RNA, 19 nt, Homo sapiens
  misc_RNA (1)...(19): siRNA sense strand
ggacaaccaauuggaugca

SEQ ID NO: 1479199 - RNA, 19 nt, Homo sapiens
  misc_RNA (1)...(19): siRNA sense strand
ccuagggcguggagcuaug

SEQ ID NO: 1479200 - RNA, 19 nt, Homo sapiens
  misc_RNA (1)...(19): siRNA sense strand
acgguuaggccgacccaua

SEQ ID NO: 1479201 - RNA, 19 nt, Homo sapiens
  misc_RNA (1)...(19): siRNA sense strand
gcacagucagcgccgaaag

SEQ ID NO: 1479202 - RNA, 19 nt, Homo sapiens
  misc_RNA (1)...(19): siRNA sense strand
gacagaucccgaaaccaau

SEQ ID NO: 1479203 - RNA, 19 nt, Homo sapiens
  misc_RNA (1)...(19): siRNA sense strand
agucagcgccgaaaguugu

SEQ ID NO: 1479204 - RNA, 19 nt, Homo sapiens
  misc_RNA (1)...(19): siRNA sense strand
gacaaccaauuggaugcau

SEQ ID NO: 1479205 - RNA, 19 nt, Homo sapiens
  misc_RNA (1)...(19): siRNA sense strand
gcuagccagugccagaaac

SEQ ID NO: 1479206 - RNA, 19 nt, Homo sapiens
  misc_RNA (1)...(19): siRNA sense strand
gcccuguauugaccaagga

SEQ ID NO: 1479207 - RNA, 19 nt, Homo sapiens
  misc_RNA (1)...(19): siRNA sense strand
aggacgaggccuacccaua

SEQ ID NO: 1479208 - RNA, 19 nt, Homo sapiens
  misc_RNA (1)...(19): siRNA sense strand
gagcuucgcuugcaagaau

SEQ ID NO: 1479209 - RNA, 19 nt, Homo sapiens
  misc_RNA (1)...(19): siRNA sense strand
ucaaagcggucaucacaga

SEQ ID NO: 1479210 - RNA, 19 nt, Homo sapiens
  misc_RNA (1)...(19): siRNA sense strand
gaaccaagcuucguaucca

SEQ ID NO: 1479211 - RNA, 19 nt, Homo sapiens
  misc_RNA (1)...(19): siRNA sense strand
gcauaacaaccauacaauu

SEQ ID NO: 1479212 - RNA, 19 nt, Homo sapiens
  misc_RNA (1)...(19): siRNA sense strand
gcuauuggcucagcugguu

SEQ ID NO: 1479213 - RNA, 19 nt, Homo sapiens
  misc_RNA (1)...(19): siRNA sense strand
gagaggagcuucgcuugca

SEQ ID NO: 1479214 - RNA, 19 nt, Homo sapiens
  misc_RNA (1)...(19): siRNA sense strand
gcucaaagcggucaucaca

SEQ ID NO: 1479215 - RNA, 19 nt, Homo sapiens
  misc_RNA (1)...(19): siRNA sense strand
gaugaagcauucccucagu

SEQ ID NO: 1479216 - RNA, 19 nt, Homo sapiens
  misc_RNA (1)...(19): siRNA sense strand
cuggcuggcuccuucuuua

SEQ ID NO: 1479217 - RNA, 19 nt, Homo sapiens
  misc_RNA (1)...(19): siRNA sense strand
gcaccucgcugggacugau

SEQ ID NO: 1479218 - RNA, 19 nt, Homo sapiens
  misc_RNA (1)...(19): siRNA sense strand
uuccauggcugcauaacaa

SEQ ID NO: 1479219 - RNA, 19 nt, Homo sapiens
  misc_RNA (1)...(19): siRNA sense strand
gcacuuucgcuacauuuca

SEQ ID NO: 1479220 - RNA, 19 nt, Homo sapiens
  misc_RNA (1)...(19): siRNA sense strand
ugaagcauucccucaguuu

SEQ ID NO: 1479221 - RNA, 19 nt, Homo sapiens
  misc_RNA (1)...(19): siRNA sense strand
cgagucgacuugcucaaag

SEQ ID NO: 1479222 - RNA, 19 nt, Homo sapiens
  misc_RNA (1)...(19): siRNA sense strand
uggcugcacucaucaccuu

SEQ ID NO: 1479223 - RNA, 19 nt, Homo sapiens
  misc_RNA (1)...(19): siRNA sense strand
uaauccagcuuuggcacuu

SEQ ID NO: 1479224 - RNA, 19 nt, Homo sapiens
  misc_RNA (1)...(19): siRNA sense strand
gaggccgucugcuccuuuc

SEQ ID NO: 1479225 - RNA, 19 nt, Homo sapiens
  misc_RNA (1)...(19): siRNA sense strand
uguauuuaauccagcuuug

SEQ ID NO: 1479226 - RNA, 19 nt, Homo sapiens
  misc_RNA (1)...(19): siRNA sense strand
cgucugcuccuuucucuuc

SEQ ID NO: 1479227 - RNA, 19 nt, Homo sapiens
  misc_RNA (1)...(19): siRNA sense strand
ccugcuggcugcacucauc

SEQ ID NO: 1479228 - RNA, 19 nt, Homo sapiens
  misc_RNA (1)...(19): siRNA sense strand
cugcauaacaaccauacaa

SEQ ID NO: 1479229 - RNA, 19 nt, Homo sapiens
  misc_RNA (1)...(19): siRNA sense strand
gcaggaggaagucuaacag

SEQ ID NO: 1479230 - RNA, 19 nt, Homo sapiens
  misc_RNA (1)...(19): siRNA sense strand
uuguggagcuugggucuga

SEQ ID NO: 1479231 - RNA, 19 nt, Homo sapiens
  misc_RNA (1)...(19): siRNA sense strand
gcuccuucuuuagguauau

SEQ ID NO: 1479232 - RNA, 19 nt, Homo sapiens
  misc_RNA (1)...(19): siRNA sense strand
ggaaguccgaaccaagcuu

SEQ ID NO: 1479233 - RNA, 19 nt, Homo sapiens
  misc_RNA (1)...(19): siRNA sense strand
gcgugaugaugcagaugau

SEQ ID NO: 1479234 - RNA, 19 nt, Homo sapiens
  misc_RNA (1)...(19): siRNA sense strand
uuccuuccauggcugcaua

SEQ ID NO: 1479235 - RNA, 19 nt, Homo sapiens
  misc_RNA (1)...(19): siRNA sense strand
gcuggcuccuucuuuaggu

SEQ ID NO: 1479236 - RNA, 19 nt, Homo sapiens
  misc_RNA (1)...(19): siRNA sense strand
gcgcucugcugcacuucca

SEQ ID NO: 1479237 - RNA, 19 nt, Homo sapiens
  misc_RNA (1)...(19): siRNA sense strand
gaagcauucccucaguuuu

SEQ ID NO: 1479238 - RNA, 19 nt, Homo sapiens
  misc_RNA (1)...(19): siRNA sense strand
caggagcuguauuuaaucc

SEQ ID NO: 1479239 - RNA, 19 nt, Homo sapiens
  misc_RNA (1)...(19): siRNA sense strand
uaugcaggaggaagucuaa

SEQ ID NO: 1479240 - RNA, 19 nt, Homo sapiens
  misc_RNA (1)...(19): siRNA sense strand
ggucuaugcaggaggaagu

SEQ ID NO: 1479241 - RNA, 19 nt, Homo sapiens
  misc_RNA (1)...(19): siRNA sense strand
gaaauuaccugauguucca

SEQ ID NO: 1479242 - RNA, 19 nt, Homo sapiens
  misc_RNA (1)...(19): siRNA sense strand
cagcugaggucacuucuuu

SEQ ID NO: 1479243 - RNA, 19 nt, Homo sapiens
  misc_RNA (1)...(19): siRNA sense strand
gaagcugacucuagacuca

SEQ ID NO: 1479244 - RNA, 19 nt, Homo sapiens
  misc_RNA (1)...(19): siRNA sense strand
gcacaggccuuuggagaug

SEQ ID NO: 1479245 - RNA, 19 nt, Homo sapiens
  misc_RNA (1)...(19): siRNA sense strand
aaacccagcuguucaguuc

SEQ ID NO: 1479246 - RNA, 19 nt, Homo sapiens
  misc_RNA (1)...(19): siRNA sense strand
cagaggaaauuaccugaug

SEQ ID NO: 1479247 - RNA, 19 nt, Homo sapiens
  misc_RNA (1)...(19): siRNA sense strand
cagugaggcuguauacaaa

SEQ ID NO: 1479248 - RNA, 19 nt, Homo sapiens
  misc_RNA (1)...(19): siRNA sense strand
gcuggaggcuguccuuaug

SEQ ID NO: 1479249 - RNA, 19 nt, Homo sapiens
  misc_RNA (1)...(19): siRNA sense strand
gggagaagcuaucauuggu

SEQ ID NO: 1479250 - RNA, 19 nt, Homo sapiens
  misc_RNA (1)...(19): siRNA sense strand
ggacaccaacaccuucuuu

SEQ ID NO: 1479251 - RNA, 19 nt, Homo sapiens
  misc_RNA (1)...(19): siRNA sense strand
gaaucagggucuucuuugg

SEQ ID NO: 1479252 - RNA, 19 nt, Homo sapiens
  misc_RNA (1)...(19): siRNA sense strand
uauacaaacucgcugaauc

SEQ ID NO: 1479253 - RNA, 19 nt, Homo sapiens
  misc_RNA (1)...(19): siRNA sense strand
agaccucccuggcucagua

SEQ ID NO: 1479254 - RNA, 19 nt, Homo sapiens
  misc_RNA (1)...(19): siRNA sense strand
ccagugaggcuguauacaa

SEQ ID NO: 1479255 - RNA, 19 nt, Homo sapiens
  misc_RNA (1)...(19): siRNA sense strand
cagccuaucuacuggagaa

SEQ ID NO: 1479256 - RNA, 19 nt, Homo sapiens
  misc_RNA (1)...(19): siRNA sense strand
ucccugagcuggaacaguu

SEQ ID NO: 1479257 - RNA, 19 nt, Homo sapiens
  misc_RNA (1)...(19): siRNA sense strand
caacuacuaucaggugaag

SEQ ID NO: 1479258 - RNA, 19 nt, Homo sapiens
  misc_RNA (1)...(19): siRNA sense strand
gcugggagaagcuaucauu

SEQ ID NO: 1479259 - RNA, 19 nt, Homo sapiens
  misc_RNA (1)...(19): siRNA sense strand
caucaucauuguuggagau

SEQ ID NO: 1479260 - RNA, 19 nt, Homo sapiens
  misc_RNA (1)...(19): siRNA sense strand
cuaccugacugcccguuug

SEQ ID NO: 1479261 - RNA, 19 nt, Homo sapiens
  misc_RNA (1)...(19): siRNA sense strand
gacacuaucaagagguaua

SEQ ID NO: 1479262 - RNA, 19 nt, Homo sapiens
  misc_RNA (1)...(19): siRNA sense strand
cuacaggacacuaucaaga

SEQ ID NO: 1479263 - RNA, 19 nt, Homo sapiens
  misc_RNA (1)...(19): siRNA sense strand
gaugaagggacuauuccaa

SEQ ID NO: 1479264 - RNA, 19 nt, Homo sapiens
  misc_RNA (1)...(19): siRNA sense strand
gaggaaauuaccugauguu

SEQ ID NO: 1479265 - RNA, 19 nt, Homo sapiens
  misc_RNA (1)...(19): siRNA sense strand
gaugagguagccaccauug

SEQ ID NO: 1479266 - RNA, 19 nt, Homo sapiens
  misc_RNA (1)...(19): siRNA sense strand
augaugaugugaccuuuga

SEQ ID NO: 1479267 - RNA, 19 nt, Homo sapiens
  misc_RNA (1)...(19): siRNA sense strand
auauguggcugcugaugaa

SEQ ID NO: 1479268 - RNA, 19 nt, Homo sapiens
  misc_RNA (1)...(19): siRNA sense strand
gcuggcaucaucauuguug

SEQ ID NO: 1479269 - RNA, 19 nt, Homo sapiens
  misc_RNA (1)...(19): siRNA sense strand
accaacaccuucuuucugu

SEQ ID NO: 1479270 - RNA, 19 nt, Homo sapiens
  misc_RNA (1)...(19): siRNA sense strand
ugaaucagggucuucuuug

SEQ ID NO: 1479271 - RNA, 19 nt, Homo sapiens
  misc_RNA (1)...(19): siRNA sense strand
gcaggccagugaggcugua

SEQ ID NO: 1479272 - RNA, 19 nt, Homo sapiens
  misc_RNA (1)...(19): siRNA sense strand
ugaagggacuauuccaaaa

SEQ ID NO: 1479273 - RNA, 19 nt, Homo sapiens
  misc_RNA (1)...(19): siRNA sense strand
gacuggaccuacagagaca

SEQ ID NO: 1479274 - RNA, 19 nt, Homo sapiens
  misc_RNA (1)...(19): siRNA sense strand
ggagaugagauccuuaagg

SEQ ID NO: 1479275 - RNA, 19 nt, Homo sapiens
  misc_RNA (1)...(19): siRNA sense strand
auacaaacucgcugaauca

SEQ ID NO: 1479276 - RNA, 19 nt, Homo sapiens
  misc_RNA (1)...(19): siRNA sense strand
acucaaaggagcuauaugu

SEQ ID NO: 1479277 - RNA, 19 nt, Homo sapiens
  misc_RNA (1)...(19): siRNA sense strand
gcuguucaguuccacucaa

SEQ ID NO: 1479278 - RNA, 19 nt, Homo sapiens
  misc_RNA (1)...(19): siRNA sense strand
cgugacggcuggcaucauc

SEQ ID NO: 1479279 - RNA, 19 nt, Homo sapiens
  misc_RNA (1)...(19): siRNA sense strand
gcaacuacuaucaggugaa

SEQ ID NO: 1479280 - RNA, 19 nt, Homo sapiens
  misc_RNA (1)...(19): siRNA sense strand
cggcuggcaucaucauugu

SEQ ID NO: 1479281 - RNA, 19 nt, Homo sapiens
  misc_RNA (1)...(19): siRNA sense strand
aggugaagcugacucuaga

SEQ ID NO: 1479282 - RNA, 19 nt, Homo sapiens
  misc_RNA (1)...(19): siRNA sense strand
cacauaccguccagccuau

SEQ ID NO: 1479283 - RNA, 19 nt, Homo sapiens
  misc_RNA (1)...(19): siRNA sense strand
gcagaggaaauuaccugau

SEQ ID NO: 1479284 - RNA, 19 nt, Homo sapiens
  misc_RNA (1)...(19): siRNA sense strand
ugaccgaggauacacauca

SEQ ID NO: 1479285 - RNA, 19 nt, Homo sapiens
  misc_RNA (1)...(19): siRNA sense strand
aggacacuaucaagaggua

SEQ ID NO: 1479286 - RNA, 19 nt, Homo sapiens
  misc_RNA (1)...(19): siRNA sense strand
agaggaaauuaccugaugu

SEQ ID NO: 1479287 - RNA, 19 nt, Homo sapiens
  misc_RNA (1)...(19): siRNA sense strand
ggaaggcugggagaagcua

SEQ ID NO: 1479288 - RNA, 19 nt, Homo sapiens
  misc_RNA (1)...(19): siRNA sense strand
ccuguagccucugcccuuu

SEQ ID NO: 1479289 - RNA, 19 nt, Homo sapiens
  misc_RNA (1)...(19): siRNA sense strand
uauauguggcugcugauga

SEQ ID NO: 1479290 - RNA, 19 nt, Homo sapiens
  misc_RNA (1)...(19): siRNA sense strand
uggucaaccuuucagauuc

SEQ ID NO: 1479291 - RNA, 19 nt, Homo sapiens
  misc_RNA (1)...(19): siRNA sense strand
uguagccucugcccuuuca

SEQ ID NO: 1479292 - RNA, 19 nt, Homo sapiens
  misc_RNA (1)...(19): siRNA sense strand
ccacucaaaggagcuauau

SEQ ID NO: 1479293 - RNA, 19 nt, Homo sapiens
  misc_RNA (1)...(19): siRNA sense strand
ggucaaccuuucagauucc

SEQ ID NO: 1479294 - RNA, 19 nt, Homo sapiens
  misc_RNA (1)...(19): siRNA sense strand
agacucagaggaagaagga

SEQ ID NO: 1479295 - RNA, 19 nt, Homo sapiens
  misc_RNA (1)...(19): siRNA sense strand
ugagguagccaccauugca

SEQ ID NO: 1479296 - RNA, 19 nt, Homo sapiens
  misc_RNA (1)...(19): siRNA sense strand
cagcugugcagaggaaauu

SEQ ID NO: 1479297 - RNA, 19 nt, Homo sapiens
  misc_RNA (1)...(19): siRNA sense strand
ccgaaacgucuaccucuuc

SEQ ID NO: 1479298 - RNA, 19 nt, Homo sapiens
  misc_RNA (1)...(19): siRNA sense strand
gcugaggucacuucuuucu

SEQ ID NO: 1479299 - RNA, 19 nt, Homo sapiens
  misc_RNA (1)...(19): siRNA sense strand
caggugaagcugacucuag

SEQ ID NO: 1479300 - RNA, 19 nt, Homo sapiens
  misc_RNA (1)...(19): siRNA sense strand
gugaggcuguauacaaacu

SEQ ID NO: 1479301 - RNA, 19 nt, Homo sapiens
  misc_RNA (1)...(19): siRNA sense strand
caccaacaccuucuuucug

SEQ ID NO: 1479302 - RNA, 19 nt, Homo sapiens
  misc_RNA (1)...(19): siRNA sense strand
gagcuggaacaguuucuac

SEQ ID NO: 1479303 - RNA, 19 nt, Homo sapiens
  misc_RNA (1)...(19): siRNA sense strand
gucagcuguuugucccaua

SEQ ID NO: 1479304 - RNA, 19 nt, Homo sapiens
  misc_RNA (1)...(19): siRNA sense strand
ccuaucuacuggagaacga

SEQ ID NO: 1479305 - RNA, 19 nt, Homo sapiens
  misc_RNA (1)...(19): siRNA sense strand
cuggucaaccuuucagauu

SEQ ID NO: 1479306 - RNA, 19 nt, Homo sapiens
  misc_RNA (1)...(19): siRNA sense strand
gaagaagaggagcggaacu

SEQ ID NO: 1479307 - RNA, 19 nt, Homo sapiens
  misc_RNA (1)...(19): siRNA sense strand
caggcccacuuuggacgua

SEQ ID NO: 1479308 - RNA, 19 nt, Homo sapiens
  misc_RNA (1)...(19): siRNA sense strand
acacaguggugaucgacua

SEQ ID NO: 1479309 - RNA, 19 nt, Homo sapiens
  misc_RNA (1)...(19): siRNA sense strand
gggcuuggauggagcaaag

SEQ ID NO: 1479310 - RNA, 19 nt, Homo sapiens
  misc_RNA (1)...(19): siRNA sense strand
caaaggagagcccggacaa

SEQ ID NO: 1479311 - RNA, 19 nt, Homo sapiens
  misc_RNA (1)...(19): siRNA sense strand
uggaguaccuggaaagaag

SEQ ID NO: 1479312 - RNA, 19 nt, Homo sapiens
  misc_RNA (1)...(19): siRNA sense strand
gagcgagcguggagagaag

SEQ ID NO: 1479313 - RNA, 19 nt, Homo sapiens
  misc_RNA (1)...(19): siRNA sense strand
caguggugaucgacuauga

SEQ ID NO: 1479314 - RNA, 19 nt, Homo sapiens
  misc_RNA (1)...(19): siRNA sense strand
gggaagcuccauccgaaug

SEQ ID NO: 1479315 - RNA, 19 nt, Homo sapiens
  misc_RNA (1)...(19): siRNA sense strand
gaagcuccauccgaaugug

SEQ ID NO: 1479316 - RNA, 19 nt, Homo sapiens
  misc_RNA (1)...(19): siRNA sense strand
ggagaaguuggacggacua

SEQ ID NO: 1479317 - RNA, 19 nt, Homo sapiens
  misc_RNA (1)...(19): siRNA sense strand
cggcaagccugggagaaga

SEQ ID NO: 1479318 - RNA, 19 nt, Homo sapiens
  misc_RNA (1)...(19): siRNA sense strand
gagacacaguggugaucga

SEQ ID NO: 1479319 - RNA, 19 nt, Homo sapiens
  misc_RNA (1)...(19): siRNA sense strand
ggagcgagcguggagagaa

SEQ ID NO: 1479320 - RNA, 19 nt, Homo sapiens
  misc_RNA (1)...(19): siRNA sense strand
aggaaucgauggagagaag

SEQ ID NO: 1479321 - RNA, 19 nt, Homo sapiens
  misc_RNA (1)...(19): siRNA sense strand
ggaagcuccauccgaaugu

SEQ ID NO: 1479322 - RNA, 19 nt, Homo sapiens
  misc_RNA (1)...(19): siRNA sense strand
ggagaccaaggacaagaug

SEQ ID NO: 1479323 - RNA, 19 nt, Homo sapiens
  misc_RNA (1)...(19): siRNA sense strand
agccaggacuagaugguuu

SEQ ID NO: 1479324 - RNA, 19 nt, Homo sapiens
  misc_RNA (1)...(19): siRNA sense strand
caagggugagccuggagua

SEQ ID NO: 1479325 - RNA, 19 nt, Homo sapiens
  misc_RNA (1)...(19): siRNA sense strand
cgaugggccuccagggaau

SEQ ID NO: 1479326 - RNA, 19 nt, Homo sapiens
  misc_RNA (1)...(19): siRNA sense strand
gagccuggaguaccuggaa

SEQ ID NO: 1479327 - RNA, 19 nt, Homo sapiens
  misc_RNA (1)...(19): siRNA sense strand
ggacuuccaggcccgaaag

SEQ ID NO: 1479328 - RNA, 19 nt, Homo sapiens
  misc_RNA (1)...(19): siRNA sense strand
aaggagagcccggacaaga

SEQ ID NO: 1479329 - RNA, 19 nt, Homo sapiens
  misc_RNA (1)...(19): siRNA sense strand
gggugcaccaggagacuuu

SEQ ID NO: 1479330 - RNA, 19 nt, Homo sapiens
  misc_RNA (1)...(19): siRNA sense strand
gagccaggacuagaugguu

SEQ ID NO: 1479331 - RNA, 19 nt, Homo sapiens
  misc_RNA (1)...(19): siRNA sense strand
uggcgacacugggaaagau

SEQ ID NO: 1479332 - RNA, 19 nt, Homo sapiens
  misc_RNA (1)...(19): siRNA sense strand
gaacagguuuccagaugaa

SEQ ID NO: 1479333 - RNA, 19 nt, Homo sapiens
  misc_RNA (1)...(19): siRNA sense strand
gagaacagguuuccagaug

SEQ ID NO: 1479334 - RNA, 19 nt, Homo sapiens
  misc_RNA (1)...(19): siRNA sense strand
caaugugacucgcuauuau

SEQ ID NO: 1479335 - RNA, 19 nt, Homo sapiens
  misc_RNA (1)...(19): siRNA sense strand
ggacugugcucugccaaug

SEQ ID NO: 1479336 - RNA, 19 nt, Homo sapiens
  misc_RNA (1)...(19): siRNA sense strand
gaaauaacgcggagaucug

SEQ ID NO: 1479337 - RNA, 19 nt, Homo sapiens
  misc_RNA (1)...(19): siRNA sense strand
ccaaugugacucgcuauua

SEQ ID NO: 1479338 - RNA, 19 nt, Homo sapiens
  misc_RNA (1)...(19): siRNA sense strand
gggcaacgccaacaauuuc

SEQ ID NO: 1479339 - RNA, 19 nt, Homo sapiens
  misc_RNA (1)...(19): siRNA sense strand
ggaaauaacgcggagaucu

SEQ ID NO: 1479340 - RNA, 19 nt, Homo sapiens
  misc_RNA (1)...(19): siRNA sense strand
cagaugaagcuacuuguau

SEQ ID NO: 1479341 - RNA, 19 nt, Homo sapiens
  misc_RNA (1)...(19): siRNA sense strand
guggagggaaugacaauaa

SEQ ID NO: 1479342 - RNA, 19 nt, Homo sapiens
  misc_RNA (1)...(19): siRNA sense strand
gaugcuugcuggaggauag

SEQ ID NO: 1479343 - RNA, 19 nt, Homo sapiens
  misc_RNA (1)...(19): siRNA sense strand
gggcccuacuucuccguua

SEQ ID NO: 1479344 - RNA, 19 nt, Homo sapiens
  misc_RNA (1)...(19): siRNA sense strand
gugacucgcuauuauuuua

SEQ ID NO: 1479345 - RNA, 19 nt, Homo sapiens
  misc_RNA (1)...(19): siRNA sense strand
agaugaagcuacuuguaug

SEQ ID NO: 1479346 - RNA, 19 nt, Homo sapiens
  misc_RNA (1)...(19): siRNA sense strand
agaacagguuuccagauga

SEQ ID NO: 1479347 - RNA, 19 nt, Homo sapiens
  misc_RNA (1)...(19): siRNA sense strand
ccagaugaagcuacuugua

SEQ ID NO: 1479348 - RNA, 19 nt, Homo sapiens
  misc_RNA (1)...(19): siRNA sense strand
gagggcaacgccaacaauu

SEQ ID NO: 1479349 - RNA, 19 nt, Homo sapiens
  misc_RNA (1)...(19): siRNA sense strand
gggaaugacaauaacuuug

SEQ ID NO: 1479350 - RNA, 19 nt, Homo sapiens
  misc_RNA (1)...(19): siRNA sense strand
gagggaaugacaauaacuu

SEQ ID NO: 1479351 - RNA, 19 nt, Homo sapiens
  misc_RNA (1)...(19): siRNA sense strand
ggaaccggauugagaacag

SEQ ID NO: 1479352 - RNA, 19 nt, Homo sapiens
  misc_RNA (1)...(19): siRNA sense strand
uaaucuaaguuccaugaca

SEQ ID NO: 1479353 - RNA, 19 nt, Homo sapiens
  misc_RNA (1)...(19): siRNA sense strand
gcaacgccaacaauuucua

SEQ ID NO: 1479354 - RNA, 19 nt, Homo sapiens
  misc_RNA (1)...(19): siRNA sense strand
cagaaccugugaugcuuuc

SEQ ID NO: 1479355 - RNA, 19 nt, Homo sapiens
  misc_RNA (1)...(19): siRNA sense strand
aaucuaaguuccaugacau

SEQ ID NO: 1479356 - RNA, 19 nt, Homo sapiens
  misc_RNA (1)...(19): siRNA sense strand
uagcagggaggauugcaaa

SEQ ID NO: 1479357 - RNA, 19 nt, Homo sapiens
  misc_RNA (1)...(19): siRNA sense strand
caggagccaacaggaaaua

SEQ ID NO: 1479358 - RNA, 19 nt, Homo sapiens
  misc_RNA (1)...(19): siRNA sense strand
aaaagaagaugccaaagcu

SEQ ID NO: 1479359 - RNA, 19 nt, Homo sapiens
  misc_RNA (1)...(19): siRNA sense strand
cagggaggauugcaaacgu

SEQ ID NO: 1479360 - RNA, 19 nt, Homo sapiens
  misc_RNA (1)...(19): siRNA sense strand
gaugaagcuacuuguaugg

SEQ ID NO: 1479361 - RNA, 19 nt, Homo sapiens
  misc_RNA (1)...(19): siRNA sense strand
gccaaugugacucgcuauu

SEQ ID NO: 1479362 - RNA, 19 nt, Homo sapiens
  misc_RNA (1)...(19): siRNA sense strand
aaugugacucgcuauuauu

SEQ ID NO: 1479363 - RNA, 19 nt, Homo sapiens
  misc_RNA (1)...(19): siRNA sense strand
cugggaggcuugcgacgau

SEQ ID NO: 1479364 - RNA, 19 nt, Homo sapiens
  misc_RNA (1)...(19): siRNA sense strand
aaauaacgcggagaucugu

SEQ ID NO: 1479365 - RNA, 19 nt, Homo sapiens
  misc_RNA (1)...(19): siRNA sense strand
ggacaaugaugcucaccua

SEQ ID NO: 1479366 - RNA, 19 nt, Homo sapiens
  misc_RNA (1)...(19): siRNA sense strand
gcgaguggcucaacaaguu

SEQ ID NO: 1479367 - RNA, 19 nt, Homo sapiens
  misc_RNA (1)...(19): siRNA sense strand
caagaaagcccagguauug

SEQ ID NO: 1479368 - RNA, 19 nt, Homo sapiens
  misc_RNA (1)...(19): siRNA sense strand
ucugaaagcuguuccuauu

SEQ ID NO: 1479369 - RNA, 19 nt, Homo sapiens
  misc_RNA (1)...(19): siRNA sense strand
uaggagaggugaccaaaga

SEQ ID NO: 1479370 - RNA, 19 nt, Homo sapiens
  misc_RNA (1)...(19): siRNA sense strand
guuaaagggugacaacaug

SEQ ID NO: 1479371 - RNA, 19 nt, Homo sapiens
  misc_RNA (1)...(19): siRNA sense strand
gggaacuccugcuacauga

SEQ ID NO: 1479372 - RNA, 19 nt, Homo sapiens
  misc_RNA (1)...(19): siRNA sense strand
gaggugauguacucauuca

SEQ ID NO: 1479373 - RNA, 19 nt, Homo sapiens
  misc_RNA (1)...(19): siRNA sense strand
ggagugaaguacugcaaag

SEQ ID NO: 1479374 - RNA, 19 nt, Homo sapiens
  misc_RNA (1)...(19): siRNA sense strand
gaacgccgagggcuacgua

SEQ ID NO: 1479375 - RNA, 19 nt, Homo sapiens
  misc_RNA (1)...(19): siRNA sense strand
cgccagagccggacaauga

SEQ ID NO: 1479376 - RNA, 19 nt, Homo sapiens
  misc_RNA (1)...(19): siRNA sense strand
cgucguacgugcucaagaa

SEQ ID NO: 1479377 - RNA, 19 nt, Homo sapiens
  misc_RNA (1)...(19): siRNA sense strand
ggaacggagugaaguacug

SEQ ID NO: 1479378 - RNA, 19 nt, Homo sapiens
  misc_RNA (1)...(19): siRNA sense strand
ccacaaauaccacuacauc

SEQ ID NO: 1479379 - RNA, 19 nt, Homo sapiens
  misc_RNA (1)...(19): siRNA sense strand
ucucugaggucuggcauaa

SEQ ID NO: 1479380 - RNA, 19 nt, Homo sapiens
  misc_RNA (1)...(19): siRNA sense strand
ggacuuaucacugcccauu

SEQ ID NO: 1479381 - RNA, 19 nt, Homo sapiens
  misc_RNA (1)...(19): siRNA sense strand
ucugaggucuggcauaaga

SEQ ID NO: 1479382 - RNA, 19 nt, Homo sapiens
  misc_RNA (1)...(19): siRNA sense strand
gcaggacacccaagaguuc

SEQ ID NO: 1479383 - RNA, 19 nt, Homo sapiens
  misc_RNA (1)...(19): siRNA sense strand
gaccacagcaccauucaug

SEQ ID NO: 1479384 - RNA, 19 nt, Homo sapiens
  misc_RNA (1)...(19): siRNA sense strand
ucaacaaguucaacaccuu

SEQ ID NO: 1479385 - RNA, 19 nt, Homo sapiens
  misc_RNA (1)...(19): siRNA sense strand
gugauguacucauucaaga

SEQ ID NO: 1479386 - RNA, 19 nt, Homo sapiens
  misc_RNA (1)...(19): siRNA sense strand
gaugaaggaccgcaaguuc

SEQ ID NO: 1479387 - RNA, 19 nt, Homo sapiens
  misc_RNA (1)...(19): siRNA sense strand
gggcuccucuuccaaguuc

SEQ ID NO: 1479388 - RNA, 19 nt, Homo sapiens
  misc_RNA (1)...(19): siRNA sense strand
gccagaacgugaucaaugg

SEQ ID NO: 1479389 - RNA, 19 nt, Homo sapiens
  misc_RNA (1)...(19): siRNA sense strand
ugacucaguucuucuugga

SEQ ID NO: 1479390 - RNA, 19 nt, Homo sapiens
  misc_RNA (1)...(19): siRNA sense strand
caucccagaucaccaccua

SEQ ID NO: 1479391 - RNA, 19 nt, Homo sapiens
  misc_RNA (1)...(19): siRNA sense strand
ggacgaggacgcugaugug

SEQ ID NO: 1479392 - RNA, 19 nt, Homo sapiens
  misc_RNA (1)...(19): siRNA sense strand
uaaagggugacaacaugua

SEQ ID NO: 1479393 - RNA, 19 nt, Homo sapiens
  misc_RNA (1)...(19): siRNA sense strand
cgucaucucagacaucuuu

SEQ ID NO: 1479394 - RNA, 19 nt, Homo sapiens
  misc_RNA (1)...(19): siRNA sense strand
agaaggagcggaugaagga

SEQ ID NO: 1479395 - RNA, 19 nt, Homo sapiens
  misc_RNA (1)...(19): siRNA sense strand
ugaaagcuguuccuauugc

SEQ ID NO: 1479396 - RNA, 19 nt, Homo sapiens
  misc_RNA (1)...(19): siRNA sense strand
gaucgacaccuucaucaag

SEQ ID NO: 1479397 - RNA, 19 nt, Homo sapiens
  misc_RNA (1)...(19): siRNA sense strand
cuuugccgcugaugaguua

SEQ ID NO: 1479398 - RNA, 19 nt, Homo sapiens
  misc_RNA (1)...(19): siRNA sense strand
gaccggagcccaucagaag

SEQ ID NO: 1479399 - RNA, 19 nt, Homo sapiens
  misc_RNA (1)...(19): siRNA sense strand
agaggaugaugaccugaaa

SEQ ID NO: 1479400 - RNA, 19 nt, Homo sapiens
  misc_RNA (1)...(19): siRNA sense strand
ucaagaaagcccagguauu

SEQ ID NO: 1479401 - RNA, 19 nt, Homo sapiens
  misc_RNA (1)...(19): siRNA sense strand
gcucaagaaagcccaggua

SEQ ID NO: 1479402 - RNA, 19 nt, Homo sapiens
  misc_RNA (1)...(19): siRNA sense strand
ugaaggagagucugaguca

SEQ ID NO: 1479403 - RNA, 19 nt, Homo sapiens
  misc_RNA (1)...(19): siRNA sense strand
gaguacauccgacgguuug

SEQ ID NO: 1479404 - RNA, 19 nt, Homo sapiens
  misc_RNA (1)...(19): siRNA sense strand
guacaaacucggagcaagu

SEQ ID NO: 1479405 - RNA, 19 nt, Homo sapiens
  misc_RNA (1)...(19): siRNA sense strand
ugaagaaccucgggaacuc

SEQ ID NO: 1479406 - RNA, 19 nt, Homo sapiens
  misc_RNA (1)...(19): siRNA sense strand
gagugcacaucccagauca

SEQ ID NO: 1479407 - RNA, 19 nt, Homo sapiens
  misc_RNA (1)...(19): siRNA sense strand
ggaguacauccgacgguuu

SEQ ID NO: 1479408 - RNA, 19 nt, Homo sapiens
  misc_RNA (1)...(19): siRNA sense strand
gcugugagcgguguaagaa

SEQ ID NO: 1479409 - RNA, 19 nt, Homo sapiens
  misc_RNA (1)...(19): siRNA sense strand
cgagugacacggaugagaa

SEQ ID NO: 1479410 - RNA, 19 nt, Homo sapiens
  misc_RNA (1)...(19): siRNA sense strand
acaaauaccacuacaucga

SEQ ID NO: 1479411 - RNA, 19 nt, Homo sapiens
  misc_RNA (1)...(19): siRNA sense strand
cuauugcuguggcugauga

SEQ ID NO: 1479412 - RNA, 19 nt, Homo sapiens
  misc_RNA (1)...(19): siRNA sense strand
caaaggaagcggccauguc

SEQ ID NO: 1479413 - RNA, 19 nt, Homo sapiens
  misc_RNA (1)...(19): siRNA sense strand
cgaguuugaugaccaguac

SEQ ID NO: 1479414 - RNA, 19 nt, Homo sapiens
  misc_RNA (1)...(19): siRNA sense strand
gauguacucauucaagauc

SEQ ID NO: 1479415 - RNA, 19 nt, Homo sapiens
  misc_RNA (1)...(19): siRNA sense strand
cugccuugcugccuucuuu

SEQ ID NO: 1479416 - RNA, 19 nt, Homo sapiens
  misc_RNA (1)...(19): siRNA sense strand
gaaagcuguuccuauugcu

SEQ ID NO: 1479417 - RNA, 19 nt, Homo sapiens
  misc_RNA (1)...(19): siRNA sense strand
gagugacacggaugagaaa

SEQ ID NO: 1479418 - RNA, 19 nt, Homo sapiens
  misc_RNA (1)...(19): siRNA sense strand
gaacuccugcuacaugaac

SEQ ID NO: 1479419 - RNA, 19 nt, Homo sapiens
  misc_RNA (1)...(19): siRNA sense strand
gagaucgacaccuucauca

SEQ ID NO: 1479420 - RNA, 19 nt, Homo sapiens
  misc_RNA (1)...(19): siRNA sense strand
uauguuggcugcggagaau

SEQ ID NO: 1479421 - RNA, 19 nt, Homo sapiens
  misc_RNA (1)...(19): siRNA sense strand
ggagugcacaucccagauc

SEQ ID NO: 1479422 - RNA, 19 nt, Homo sapiens
  misc_RNA (1)...(19): siRNA sense strand
ggaugaaggaccgcaaguu

SEQ ID NO: 1479423 - RNA, 19 nt, Homo sapiens
  misc_RNA (1)...(19): siRNA sense strand
auaagaaacggccaagcua

SEQ ID NO: 1479424 - RNA, 19 nt, Homo sapiens
  misc_RNA (1)...(19): siRNA sense strand
ggccuggugcgcacagaua

SEQ ID NO: 1479425 - RNA, 19 nt, Homo sapiens
  misc_RNA (1)...(19): siRNA sense strand
ggcgucaucuacugcauca

SEQ ID NO: 1479426 - RNA, 19 nt, Homo sapiens
  misc_RNA (1)...(19): siRNA sense strand
ggcacgaggugauguacuc

SEQ ID NO: 1479427 - RNA, 19 nt, Homo sapiens
  misc_RNA (1)...(19): siRNA sense strand
ucagccaucuaccagaaug

SEQ ID NO: 1479428 - RNA, 19 nt, Homo sapiens
  misc_RNA (1)...(19): siRNA sense strand
gaaagcccagguauugagu

SEQ ID NO: 1479429 - RNA, 19 nt, Homo sapiens
  misc_RNA (1)...(19): siRNA sense strand
gcucgggacucagauucga

SEQ ID NO: 1479430 - RNA, 19 nt, Homo sapiens
  misc_RNA (1)...(19): siRNA sense strand
gcccucaccuugacuccau

SEQ ID NO: 1479431 - RNA, 19 nt, Homo sapiens
  misc_RNA (1)...(19): siRNA sense strand
acgaggugauguacucauu

SEQ ID NO: 1479432 - RNA, 19 nt, Homo sapiens
  misc_RNA (1)...(19): siRNA sense strand
ggcacuacaucgccuacug

SEQ ID NO: 1479433 - RNA, 19 nt, Homo sapiens
  misc_RNA (1)...(19): siRNA sense strand
uuugacggcuccauucuca

SEQ ID NO: 1479434 - RNA, 19 nt, Homo sapiens
  misc_RNA (1)...(19): siRNA sense strand
acgagacgguggugcagaa

SEQ ID NO: 1479435 - RNA, 19 nt, Homo sapiens
  misc_RNA (1)...(19): siRNA sense strand
ggacuugcugcucaaaucu

SEQ ID NO: 1479436 - RNA, 19 nt, Homo sapiens
  misc_RNA (1)...(19): siRNA sense strand
ccacagcaccauucaugca

SEQ ID NO: 1479437 - RNA, 19 nt, Homo sapiens
  misc_RNA (1)...(19): siRNA sense strand
gggcagugguacgaguuug

SEQ ID NO: 1479438 - RNA, 19 nt, Homo sapiens
  misc_RNA (1)...(19): siRNA sense strand
gagcugcugaucccagaug

SEQ ID NO: 1479439 - RNA, 19 nt, Homo sapiens
  misc_RNA (1)...(19): siRNA sense strand
ggugauguacucauucaag

SEQ ID NO: 1479440 - RNA, 19 nt, Homo sapiens
  misc_RNA (1)...(19): siRNA sense strand
cauccgacgguuuguggua

SEQ ID NO: 1479441 - RNA, 19 nt, Homo sapiens
  misc_RNA (1)...(19): siRNA sense strand
cauaagaaacggccaagcu

SEQ ID NO: 1479442 - RNA, 19 nt, Homo sapiens
  misc_RNA (1)...(19): siRNA sense strand
gaagcagggagcugacuac

SEQ ID NO: 1479443 - RNA, 19 nt, Homo sapiens
  misc_RNA (1)...(19): siRNA sense strand
cgagaucgacaccuucauc

SEQ ID NO: 1479444 - RNA, 19 nt, Homo sapiens
  misc_RNA (1)...(19): siRNA sense strand
gauccugugcauucaccua

SEQ ID NO: 1479445 - RNA, 19 nt, Homo sapiens
  misc_RNA (1)...(19): siRNA sense strand
auucagccaucuaccagaa

SEQ ID NO: 1479446 - RNA, 19 nt, Homo sapiens
  misc_RNA (1)...(19): siRNA sense strand
ggaacuccugcuacaugaa

SEQ ID NO: 1479447 - RNA, 19 nt, Homo sapiens
  misc_RNA (1)...(19): siRNA sense strand
gcugacuacgggcagauuu

SEQ ID NO: 1479448 - RNA, 19 nt, Homo sapiens
  misc_RNA (1)...(19): siRNA sense strand
gcuacguacucuucuacag

SEQ ID NO: 1479449 - RNA, 19 nt, Homo sapiens
  misc_RNA (1)...(19): siRNA sense strand
cauaggagaggugaccaaa

SEQ ID NO: 1479450 - RNA, 19 nt, Homo sapiens
  misc_RNA (1)...(19): siRNA sense strand
acuugcugcucaaaucuaa

SEQ ID NO: 1479451 - RNA, 19 nt, Homo sapiens
  misc_RNA (1)...(19): siRNA sense strand
cgggaacuccugcuacaug

SEQ ID NO: 1479452 - RNA, 19 nt, Homo sapiens
  misc_RNA (1)...(19): siRNA sense strand
cccgagauccugugcauuc

SEQ ID NO: 1479453 - RNA, 19 nt, Homo sapiens
  misc_RNA (1)...(19): siRNA sense strand
gaaacguuccaggacuuau

SEQ ID NO: 1479454 - RNA, 19 nt, Homo sapiens
  misc_RNA (1)...(19): siRNA sense strand
caucuuugacggcuccauu

SEQ ID NO: 1479455 - RNA, 19 nt, Homo sapiens
  misc_RNA (1)...(19): siRNA sense strand
ugaggucuggcauaagaaa

SEQ ID NO: 1479456 - RNA, 19 nt, Homo sapiens
  misc_RNA (1)...(19): siRNA sense strand
gaugaaggagagucugagu

SEQ ID NO: 1479457 - RNA, 19 nt, Homo sapiens
  misc_RNA (1)...(19): siRNA sense strand
ggauugcacaggucaaagg

SEQ ID NO: 1479458 - RNA, 19 nt, Homo sapiens
  misc_RNA (1)...(19): siRNA sense strand
cgacaccuucaucaaguug

SEQ ID NO: 1479459 - RNA, 19 nt, Homo sapiens
  misc_RNA (1)...(19): siRNA sense strand
cgagggcuacguacucuuc

SEQ ID NO: 1479460 - RNA, 19 nt, Homo sapiens
  misc_RNA (1)...(19): siRNA sense strand
ugccagaacgugaucaaug

SEQ ID NO: 1479461 - RNA, 19 nt, Homo sapiens
  misc_RNA (1)...(19): siRNA sense strand
cagaggaugaugaccugaa

SEQ ID NO: 1479462 - RNA, 19 nt, Homo sapiens
  misc_RNA (1)...(19): siRNA sense strand
ugaagcagggagcugacua

SEQ ID NO: 1479463 - RNA, 19 nt, Homo sapiens
  misc_RNA (1)...(19): siRNA sense strand
ucugggagcaccuguacaa

SEQ ID NO: 1479464 - RNA, 19 nt, Homo sapiens
  misc_RNA (1)...(19): siRNA sense strand
aggacuugcugcucaaauc

SEQ ID NO: 1479465 - RNA, 19 nt, Homo sapiens
  misc_RNA (1)...(19): siRNA sense strand
gauaugagcucaaccuuca

SEQ ID NO: 1479466 - RNA, 19 nt, Homo sapiens
  misc_RNA (1)...(19): siRNA sense strand
ugacggaaauuaugcguaa

SEQ ID NO: 1479467 - RNA, 19 nt, Homo sapiens
  misc_RNA (1)...(19): siRNA sense strand
gaaauuaugcguaacaacu

SEQ ID NO: 1479468 - RNA, 19 nt, Homo sapiens
  misc_RNA (1)...(19): siRNA sense strand
caacaagacuacacagaac

SEQ ID NO: 1479469 - RNA, 19 nt, Homo sapiens
  misc_RNA (1)...(19): siRNA sense strand
cgaacgaggugacggaaau

SEQ ID NO: 1479470 - RNA, 19 nt, Homo sapiens
  misc_RNA (1)...(19): siRNA sense strand
gaccaacuccuggauauga

SEQ ID NO: 1479471 - RNA, 19 nt, Homo sapiens
  misc_RNA (1)...(19): siRNA sense strand
gcugggagaacauccguua

SEQ ID NO: 1479472 - RNA, 19 nt, Homo sapiens
  misc_RNA (1)...(19): siRNA sense strand
cagaccaacuccuggauau

SEQ ID NO: 1479473 - RNA, 19 nt, Homo sapiens
  misc_RNA (1)...(19): siRNA sense strand
ucaacaagacuacacagaa

SEQ ID NO: 1479474 - RNA, 19 nt, Homo sapiens
  misc_RNA (1)...(19): siRNA sense strand
gagcucaaccuucaacaag

SEQ ID NO: 1479475 - RNA, 19 nt, Homo sapiens
  misc_RNA (1)...(19): siRNA sense strand
gcagcagcguucagaccaa

SEQ ID NO: 1479476 - RNA, 19 nt, Homo sapiens
  misc_RNA (1)...(19): siRNA sense strand
gaacgaggugacggaaauu

SEQ ID NO: 1479477 - RNA, 19 nt, Homo sapiens
  misc_RNA (1)...(19): siRNA sense strand
gcucaaccuucaacaagac

SEQ ID NO: 1479478 - RNA, 19 nt, Homo sapiens
  misc_RNA (1)...(19): siRNA sense strand
ucagaccaacuccuggaua

SEQ ID NO: 1479479 - RNA, 19 nt, Homo sapiens
  misc_RNA (1)...(19): siRNA sense strand
cgaggugacggaaauuaug

SEQ ID NO: 1479480 - RNA, 19 nt, Homo sapiens
  misc_RNA (1)...(19): siRNA sense strand
gugugaagcuggccgaacu

SEQ ID NO: 1479481 - RNA, 19 nt, Homo sapiens
  misc_RNA (1)...(19): siRNA sense strand
guaacaacuucggcaaggu

SEQ ID NO: 1479482 - RNA, 19 nt, Homo sapiens
  misc_RNA (1)...(19): siRNA sense strand
aagaagugcugggagaaca

SEQ ID NO: 1479483 - RNA, 19 nt, Homo sapiens
  misc_RNA (1)...(19): siRNA sense strand
cggaaauuaugcguaacaa

SEQ ID NO: 1479484 - RNA, 19 nt, Homo sapiens
  misc_RNA (1)...(19): siRNA sense strand
gaagaagugcugggagaac

SEQ ID NO: 1479485 - RNA, 19 nt, Homo sapiens
  misc_RNA (1)...(19): siRNA sense strand
aauuaugcguaacaacuuc

SEQ ID NO: 1479486 - RNA, 19 nt, Homo sapiens
  misc_RNA (1)...(19): siRNA sense strand
guugguguccugcucauca

SEQ ID NO: 1479487 - RNA, 19 nt, Homo sapiens
  misc_RNA (1)...(19): siRNA sense strand
ggaaauuaugcguaacaac

SEQ ID NO: 1479488 - RNA, 19 nt, Homo sapiens
  misc_RNA (1)...(19): siRNA sense strand
gaagugcugggagaacauc

SEQ ID NO: 1479489 - RNA, 19 nt, Homo sapiens
  misc_RNA (1)...(19): siRNA sense strand
ggcaagagcuuccuacaga

SEQ ID NO: 1479490 - RNA, 19 nt, Homo sapiens
  misc_RNA (1)...(19): siRNA sense strand
gcaagagcuuccuacagaa

SEQ ID NO: 1479491 - RNA, 19 nt, Homo sapiens
  misc_RNA (1)...(19): siRNA sense strand
caucuucccugccaucuuc

SEQ ID NO: 1479492 - RNA, 19 nt, Homo sapiens
  misc_RNA (1)...(19): siRNA sense strand
uccagcggcuucucucuua

SEQ ID NO: 1479493 - RNA, 19 nt, Homo sapiens
  misc_RNA (1)...(19): siRNA sense strand
ggucaucggugccacaucu

SEQ ID NO: 1479494 - RNA, 19 nt, Homo sapiens
  misc_RNA (1)...(19): siRNA sense strand
caacauccugggcaucuuu

SEQ ID NO: 1479495 - RNA, 19 nt, Homo sapiens
  misc_RNA (1)...(19): siRNA sense strand
uaauugcagucaucuacaa

SEQ ID NO: 1479496 - RNA, 19 nt, Homo sapiens
  misc_RNA (1)...(19): siRNA sense strand
ggagaaggagccugcaaga

SEQ ID NO: 1479497 - RNA, 19 nt, Homo sapiens
  misc_RNA (1)...(19): siRNA sense strand
agaagaagaugcagcacau

SEQ ID NO: 1479498 - RNA, 19 nt, Homo sapiens
  misc_RNA (1)...(19): siRNA sense strand
guccaucgcugucauguac

SEQ ID NO: 1479499 - RNA, 19 nt, Homo sapiens
  misc_RNA (1)...(19): siRNA sense strand
caagagcuuccuacagaaa

SEQ ID NO: 1479500 - RNA, 19 nt, Homo sapiens
  misc_RNA (1)...(19): siRNA sense strand
agaaggagccugcaagauc

SEQ ID NO: 1479501 - RNA, 19 nt, Homo sapiens
  misc_RNA (1)...(19): siRNA sense strand
ccucagcaaugccaucaug

SEQ ID NO: 1479502 - RNA, 19 nt, Homo sapiens
  misc_RNA (1)...(19): siRNA sense strand
agucugagcugccacuugu

SEQ ID NO: 1479503 - RNA, 19 nt, Homo sapiens
  misc_RNA (1)...(19): siRNA sense strand
caacaccacaggcaacuuc

SEQ ID NO: 1479504 - RNA, 19 nt, Homo sapiens
  misc_RNA (1)...(19): siRNA sense strand
ccagcuaccuguacaucau

SEQ ID NO: 1479505 - RNA, 19 nt, Homo sapiens
  misc_RNA (1)...(19): siRNA sense strand
gcaagguggacccguuuga

SEQ ID NO: 1479506 - RNA, 19 nt, Homo sapiens
  misc_RNA (1)...(19): siRNA sense strand
gaggugcugcccaucuaua

SEQ ID NO: 1479507 - RNA, 19 nt, Homo sapiens
  misc_RNA (1)...(19): siRNA sense strand
gagccacacuucacugacu

SEQ ID NO: 1479508 - RNA, 19 nt, Homo sapiens
  misc_RNA (1)...(19): siRNA sense strand
ccgaggugcugcccaucua

SEQ ID NO: 1479509 - RNA, 19 nt, Homo sapiens
  misc_RNA (1)...(19): siRNA sense strand
gaaucaugcccacggagaa

SEQ ID NO: 1479510 - RNA, 19 nt, Homo sapiens
  misc_RNA (1)...(19): siRNA sense strand
ucaacucacagacagcaua

SEQ ID NO: 1479511 - RNA, 19 nt, Homo sapiens
  misc_RNA (1)...(19): siRNA sense strand
gcaaggagccacacuucac

SEQ ID NO: 1479512 - RNA, 19 nt, Homo sapiens
  misc_RNA (1)...(19): siRNA sense strand
ccaucacgcuccagaacau

SEQ ID NO: 1479513 - RNA, 19 nt, Homo sapiens
  misc_RNA (1)...(19): siRNA sense strand
ucggcuaccucaccuucua

SEQ ID NO: 1479514 - RNA, 19 nt, Homo sapiens
  misc_RNA (1)...(19): siRNA sense strand
gcaugguguucuuccuaau

SEQ ID NO: 1479515 - RNA, 19 nt, Homo sapiens
  misc_RNA (1)...(19): siRNA sense strand
ggaggcgccuuugcagaca

SEQ ID NO: 1479516 - RNA, 19 nt, Homo sapiens
  misc_RNA (1)...(19): siRNA sense strand
ugcaugguguucuuccuaa

SEQ ID NO: 1479517 - RNA, 19 nt, Homo sapiens
  misc_RNA (1)...(19): siRNA sense strand
ugagcuucaucaucauuga

SEQ ID NO: 1479518 - RNA, 19 nt, Homo sapiens
  misc_RNA (1)...(19): siRNA sense strand
ccuaugccauggccaauac

SEQ ID NO: 1479519 - RNA, 19 nt, Homo sapiens
  misc_RNA (1)...(19): siRNA sense strand
caaccugcuggucaucuuu

SEQ ID NO: 1479520 - RNA, 19 nt, Homo sapiens
  misc_RNA (1)...(19): siRNA sense strand
cggagcugcugcacaccua

SEQ ID NO: 1479521 - RNA, 19 nt, Homo sapiens
  misc_RNA (1)...(19): siRNA sense strand
ugagcugccacuugucaua

SEQ ID NO: 1479522 - RNA, 19 nt, Homo sapiens
  misc_RNA (1)...(19): siRNA sense strand
cagcaaggagccacacuuc

SEQ ID NO: 1479523 - RNA, 19 nt, Homo sapiens
  misc_RNA (1)...(19): siRNA sense strand
ucggagccauguccagcua

SEQ ID NO: 1479524 - RNA, 19 nt, Homo sapiens
  misc_RNA (1)...(19): siRNA sense strand
gagaaggagccugcaagau

SEQ ID NO: 1479525 - RNA, 19 nt, Homo sapiens
  misc_RNA (1)...(19): siRNA sense strand
ucaaccugcuggucaucuu

SEQ ID NO: 1479526 - RNA, 19 nt, Homo sapiens
  misc_RNA (1)...(19): siRNA sense strand
guaucaaccugcuggucau

SEQ ID NO: 1479527 - RNA, 19 nt, Homo sapiens
  misc_RNA (1)...(19): siRNA sense strand
ccguuggccugcucacuug

SEQ ID NO: 1479528 - RNA, 19 nt, Homo sapiens
  misc_RNA (1)...(19): siRNA sense strand
aauacgggcauuauccuuu

SEQ ID NO: 1479529 - RNA, 19 nt, Homo sapiens
  misc_RNA (1)...(19): siRNA sense strand
gcauggaggaaaccacuag

SEQ ID NO: 1479530 - RNA, 19 nt, Homo sapiens
  misc_RNA (1)...(19): siRNA sense strand
ggccugcucacuuguauca

SEQ ID NO: 1479531 - RNA, 19 nt, Homo sapiens
  misc_RNA (1)...(19): siRNA sense strand
gcucacagugcccaucguu

SEQ ID NO: 1479532 - RNA, 19 nt, Homo sapiens
  misc_RNA (1)...(19): siRNA sense strand
cagcaagguggacccguuu

SEQ ID NO: 1479533 - RNA, 19 nt, Homo sapiens
  misc_RNA (1)...(19): siRNA sense strand
cuuccuggcugcccucuuc

SEQ ID NO: 1479534 - RNA, 19 nt, Homo sapiens
  misc_RNA (1)...(19): siRNA sense strand
cuacuucacgcucaacuca

SEQ ID NO: 1479535 - RNA, 19 nt, Homo sapiens
  misc_RNA (1)...(19): siRNA sense strand
caugguguucuuccuaauu

SEQ ID NO: 1479536 - RNA, 19 nt, Homo sapiens
  misc_RNA (1)...(19): siRNA sense strand
ggaugucaguguucaaccu

SEQ ID NO: 1479537 - RNA, 19 nt, Homo sapiens
  misc_RNA (1)...(19): siRNA sense strand
ucgccuugcucuccagcua

SEQ ID NO: 1479538 - RNA, 19 nt, Homo sapiens
  misc_RNA (1)...(19): siRNA sense strand
ucauacagaccuuccugaa

SEQ ID NO: 1479539 - RNA, 19 nt, Homo sapiens
  misc_RNA (1)...(19): siRNA sense strand
guacaugaacgggaacuac

SEQ ID NO: 1479540 - RNA, 19 nt, Homo sapiens
  misc_RNA (1)...(19): siRNA sense strand
ucaaggaccccuccaagaa

SEQ ID NO: 1479541 - RNA, 19 nt, Homo sapiens
  misc_RNA (1)...(19): siRNA sense strand
gcugggcuaccgugccuuu

SEQ ID NO: 1479542 - RNA, 19 nt, Homo sapiens
  misc_RNA (1)...(19): siRNA sense strand
ggagggcaagagcuuccua

SEQ ID NO: 1479543 - RNA, 19 nt, Homo sapiens
  misc_RNA (1)...(19): siRNA sense strand
ucacagugcccaucguucu

SEQ ID NO: 1479544 - RNA, 19 nt, Homo sapiens
  misc_RNA (1)...(19): siRNA sense strand
caucuauacugagcucaag

SEQ ID NO: 1479545 - RNA, 19 nt, Homo sapiens
  misc_RNA (1)...(19): siRNA sense strand
guauggagggcaagagcuu

SEQ ID NO: 1479546 - RNA, 19 nt, Homo sapiens
  misc_RNA (1)...(19): siRNA sense strand
acguggagaucgugaagga

SEQ ID NO: 1479547 - RNA, 19 nt, Homo sapiens
  misc_RNA (1)...(19): siRNA sense strand
augguguucuuccuaauug

SEQ ID NO: 1479548 - RNA, 19 nt, Homo sapiens
  misc_RNA (1)...(19): siRNA sense strand
ccauccaccugcuacucaa

SEQ ID NO: 1479549 - RNA, 19 nt, Homo sapiens
  misc_RNA (1)...(19): siRNA sense strand
caucuucuacuuccgaauc

SEQ ID NO: 1479550 - RNA, 19 nt, Homo sapiens
  misc_RNA (1)...(19): siRNA sense strand
gcugcggcaugugcuuauu

SEQ ID NO: 1479551 - RNA, 19 nt, Homo sapiens
  misc_RNA (1)...(19): siRNA sense strand
ccagcuacuucacgcucaa

SEQ ID NO: 1479552 - RNA, 19 nt, Homo sapiens
  misc_RNA (1)...(19): siRNA sense strand
uguacaucaucaagucuga

SEQ ID NO: 1479553 - RNA, 19 nt, Homo sapiens
  misc_RNA (1)...(19): siRNA sense strand
gcauuauccuuuuccuguu

SEQ ID NO: 1479554 - RNA, 19 nt, Homo sapiens
  misc_RNA (1)...(19): siRNA sense strand
cugaugaccaugagcuuga

SEQ ID NO: 1479555 - RNA, 19 nt, Homo sapiens
  misc_RNA (1)...(19): siRNA sense strand
caauacgggcauuauccuu

SEQ ID NO: 1479556 - RNA, 19 nt, Homo sapiens
  misc_RNA (1)...(19): siRNA sense strand
ucccugccaucuucuacuu

SEQ ID NO: 1479557 - RNA, 19 nt, Homo sapiens
  misc_RNA (1)...(19): siRNA sense strand
ccaacauccugggcaucuu

SEQ ID NO: 1479558 - RNA, 19 nt, Homo sapiens
  misc_RNA (1)...(19): siRNA sense strand
gccguuggccugcucacuu

SEQ ID NO: 1479559 - RNA, 19 nt, Homo sapiens
  misc_RNA (1)...(19): siRNA sense strand
cauucgggaugucaguguu

SEQ ID NO: 1479560 - RNA, 19 nt, Homo sapiens
  misc_RNA (1)...(19): siRNA sense strand
uggagaucgugaaggagaa

SEQ ID NO: 1479561 - RNA, 19 nt, Homo sapiens
  misc_RNA (1)...(19): siRNA sense strand
ugguaauccuugucucugu

SEQ ID NO: 1479562 - RNA, 19 nt, Homo sapiens
  misc_RNA (1)...(19): siRNA sense strand
ggaggcagcugggaagaaa

SEQ ID NO: 1479563 - RNA, 19 nt, Homo sapiens
  misc_RNA (1)...(19): siRNA sense strand
uugcagagcucuuugauga

SEQ ID NO: 1479564 - RNA, 19 nt, Homo sapiens
  misc_RNA (1)...(19): siRNA sense strand
cauaugaagugcugucuga

SEQ ID NO: 1479565 - RNA, 19 nt, Homo sapiens
  misc_RNA (1)...(19): siRNA sense strand
auaaagaguuugcugagaa

SEQ ID NO: 1479566 - RNA, 19 nt, Homo sapiens
  misc_RNA (1)...(19): siRNA sense strand
ucaauggugucccagauga

SEQ ID NO: 1479567 - RNA, 19 nt, Homo sapiens
  misc_RNA (1)...(19): siRNA sense strand
gaagugcguccgcugauga

SEQ ID NO: 1479568 - RNA, 19 nt, Homo sapiens
  misc_RNA (1)...(19): siRNA sense strand
gacaggaacuggcccaucu

SEQ ID NO: 1479569 - RNA, 19 nt, Homo sapiens
  misc_RNA (1)...(19): siRNA sense strand
ugaagucagucacaaucaa

SEQ ID NO: 1479570 - RNA, 19 nt, Homo sapiens
  misc_RNA (1)...(19): siRNA sense strand
gggccuggcuucaccuuca

SEQ ID NO: 1479571 - RNA, 19 nt, Homo sapiens
  misc_RNA (1)...(19): siRNA sense strand
uaaagaguuugcugagaag

SEQ ID NO: 1479572 - RNA, 19 nt, Homo sapiens
  misc_RNA (1)...(19): siRNA sense strand
gaagucagucacaaucaau

SEQ ID NO: 1479573 - RNA, 19 nt, Homo sapiens
  misc_RNA (1)...(19): siRNA sense strand
ggagguggccgaggcauau

SEQ ID NO: 1479574 - RNA, 19 nt, Homo sapiens
  misc_RNA (1)...(19): siRNA sense strand
agaguuugcugagaagaaa

SEQ ID NO: 1479575 - RNA, 19 nt, Homo sapiens
  misc_RNA (1)...(19): siRNA sense strand
gagcagcagccgucaguca

SEQ ID NO: 1479576 - RNA, 19 nt, Homo sapiens
  misc_RNA (1)...(19): siRNA sense strand
aaacccagauaauaaagag

SEQ ID NO: 1479577 - RNA, 19 nt, Homo sapiens
  misc_RNA (1)...(19): siRNA sense strand
aauaaagaguuugcugaga

SEQ ID NO: 1479578 - RNA, 19 nt, Homo sapiens
  misc_RNA (1)...(19): siRNA sense strand
ggagauuuacgaccgcuau

SEQ ID NO: 1479579 - RNA, 19 nt, Homo sapiens
  misc_RNA (1)...(19): siRNA sense strand
cgaagugcguccgcugaug

SEQ ID NO: 1479580 - RNA, 19 nt, Homo sapiens
  misc_RNA (1)...(19): siRNA sense strand
cuacaucuaccaccuuugu

SEQ ID NO: 1479581 - RNA, 19 nt, Homo sapiens
  misc_RNA (1)...(19): siRNA sense strand
agcacaagcgggagauuua

SEQ ID NO: 1479582 - RNA, 19 nt, Homo sapiens
  misc_RNA (1)...(19): siRNA sense strand
ccaaggcccagcaccaaga

SEQ ID NO: 1479583 - RNA, 19 nt, Homo sapiens
  misc_RNA (1)...(19): siRNA sense strand
aaucaauggugucccagau

SEQ ID NO: 1479584 - RNA, 19 nt, Homo sapiens
  misc_RNA (1)...(19): siRNA sense strand
ccaguggcacccagacaaa

SEQ ID NO: 1479585 - RNA, 19 nt, Homo sapiens
  misc_RNA (1)...(19): siRNA sense strand
ggccgaggcauaugaagug

SEQ ID NO: 1479586 - RNA, 19 nt, Homo sapiens
  misc_RNA (1)...(19): siRNA sense strand
cccagauaauaaagaguuu

SEQ ID NO: 1479587 - RNA, 19 nt, Homo sapiens
  misc_RNA (1)...(19): siRNA sense strand
gggcugacagggacaggaa

SEQ ID NO: 1479588 - RNA, 19 nt, Homo sapiens
  misc_RNA (1)...(19): siRNA sense strand
gauuucuccuccucaucuu

SEQ ID NO: 1479589 - RNA, 19 nt, Homo sapiens
  misc_RNA (1)...(19): siRNA sense strand
cagcagccgucagucacuu

SEQ ID NO: 1479590 - RNA, 19 nt, Homo sapiens
  misc_RNA (1)...(19): siRNA sense strand
gaggaugggcagcugaagu

SEQ ID NO: 1479591 - RNA, 19 nt, Homo sapiens
  misc_RNA (1)...(19): siRNA sense strand
gcacaagcgggagauuuac

SEQ ID NO: 1479592 - RNA, 19 nt, Homo sapiens
  misc_RNA (1)...(19): siRNA sense strand
gcaaccaaacgcaguccau

SEQ ID NO: 1479593 - RNA, 19 nt, Homo sapiens
  misc_RNA (1)...(19): siRNA sense strand
gcugagaagaaauuuaagg

SEQ ID NO: 1479594 - RNA, 19 nt, Homo sapiens
  misc_RNA (1)...(19): siRNA sense strand
aagcacaagcgggagauuu

SEQ ID NO: 1479595 - RNA, 19 nt, Homo sapiens
  misc_RNA (1)...(19): siRNA sense strand
ucccugggcacuccgauuu

SEQ ID NO: 1479596 - RNA, 19 nt, Homo sapiens
  misc_RNA (1)...(19): siRNA sense strand
ucaaagcgccaaucucaua

SEQ ID NO: 1479597 - RNA, 19 nt, Homo sapiens
  misc_RNA (1)...(19): siRNA sense strand
gcagggcgguauugcugua

SEQ ID NO: 1479598 - RNA, 19 nt, Homo sapiens
  misc_RNA (1)...(19): siRNA sense strand
gacaggagccuacagcaaa

SEQ ID NO: 1479599 - RNA, 19 nt, Homo sapiens
  misc_RNA (1)...(19): siRNA sense strand
gcaggaguaccaucuauau

SEQ ID NO: 1479600 - RNA, 19 nt, Homo sapiens
  misc_RNA (1)...(19): siRNA sense strand
gaacaugcagggcgguauu

SEQ ID NO: 1479601 - RNA, 19 nt, Homo sapiens
  misc_RNA (1)...(19): siRNA sense strand
gcgccaaucucauaaguac

SEQ ID NO: 1479602 - RNA, 19 nt, Homo sapiens
  misc_RNA (1)...(19): siRNA sense strand
gaaaacagcacucuggauu

SEQ ID NO: 1479603 - RNA, 19 nt, Homo sapiens
  misc_RNA (1)...(19): siRNA sense strand
acucacagguggcauuuga

SEQ ID NO: 1479604 - RNA, 19 nt, Homo sapiens
  misc_RNA (1)...(19): siRNA sense strand
gaagaugaacacccacaau

SEQ ID NO: 1479605 - RNA, 19 nt, Homo sapiens
  misc_RNA (1)...(19): siRNA sense strand
ggcauuugauggcuucauu

SEQ ID NO: 1479606 - RNA, 19 nt, Homo sapiens
  misc_RNA (1)...(19): siRNA sense strand
aaacagcacucuggauuac

SEQ ID NO: 1479607 - RNA, 19 nt, Homo sapiens
  misc_RNA (1)...(19): siRNA sense strand
gaacgugacccugcugugu

SEQ ID NO: 1479608 - RNA, 19 nt, Homo sapiens
  misc_RNA (1)...(19): siRNA sense strand
guacaggugcuaugguuau

SEQ ID NO: 1479609 - RNA, 19 nt, Homo sapiens
  misc_RNA (1)...(19): siRNA sense strand
cuccaaggcuggugaguga

SEQ ID NO: 1479610 - RNA, 19 nt, Homo sapiens
  misc_RNA (1)...(19): siRNA sense strand
uaaggaaggagaagaugaa

SEQ ID NO: 1479611 - RNA, 19 nt, Homo sapiens
  misc_RNA (1)...(19): siRNA sense strand
aaucaaagcgccaaucuca

SEQ ID NO: 1479612 - RNA, 19 nt, Homo sapiens
  misc_RNA (1)...(19): siRNA sense strand
guaaggaaggagaagauga

SEQ ID NO: 1479613 - RNA, 19 nt, Homo sapiens
  misc_RNA (1)...(19): siRNA sense strand
caaagcgccaaucucauaa

SEQ ID NO: 1479614 - RNA, 19 nt, Homo sapiens
  misc_RNA (1)...(19): siRNA sense strand
agggagggaugcacacuuu

SEQ ID NO: 1479615 - RNA, 19 nt, Homo sapiens
  misc_RNA (1)...(19): siRNA sense strand
uuugauggcuucauucugu

SEQ ID NO: 1479616 - RNA, 19 nt, Homo sapiens
  misc_RNA (1)...(19): siRNA sense strand
gggaugcacacuuuccuuu

SEQ ID NO: 1479617 - RNA, 19 nt, Homo sapiens
  misc_RNA (1)...(19): siRNA sense strand
uaagaagccaucacucuca

SEQ ID NO: 1479618 - RNA, 19 nt, Homo sapiens
  misc_RNA (1)...(19): siRNA sense strand
gaaugugaccauccagugu

SEQ ID NO: 1479619 - RNA, 19 nt, Homo sapiens
  misc_RNA (1)...(19): siRNA sense strand
cagcaaacccacccucuca

SEQ ID NO: 1479620 - RNA, 19 nt, Homo sapiens
  misc_RNA (1)...(19): siRNA sense strand
gagggaaugugaccaucca

SEQ ID NO: 1479621 - RNA, 19 nt, Homo sapiens
  misc_RNA (1)...(19): siRNA sense strand
caggaguaccaucuauaua

SEQ ID NO: 1479622 - RNA, 19 nt, Homo sapiens
  misc_RNA (1)...(19): siRNA sense strand
ggaaggagaagaugaacac

SEQ ID NO: 1479623 - RNA, 19 nt, Homo sapiens
  misc_RNA (1)...(19): siRNA sense strand
auaaguaccaggcugaauu

SEQ ID NO: 1479624 - RNA, 19 nt, Homo sapiens
  misc_RNA (1)...(19): siRNA sense strand
gaugcacacuuuccuuuug

SEQ ID NO: 1479625 - RNA, 19 nt, Homo sapiens
  misc_RNA (1)...(19): siRNA sense strand
ucacgguccugaucugucu

SEQ ID NO: 1479626 - RNA, 19 nt, Homo sapiens
  misc_RNA (1)...(19): siRNA sense strand
cgguauugcuguaucuaug

SEQ ID NO: 1479627 - RNA, 19 nt, Homo sapiens
  misc_RNA (1)...(19): siRNA sense strand
ggucccagguguuucuaag

SEQ ID NO: 1479628 - RNA, 19 nt, Homo sapiens
  misc_RNA (1)...(19): siRNA sense strand
uaaguaccaggcugaauuc

SEQ ID NO: 1479629 - RNA, 19 nt, Homo sapiens
  misc_RNA (1)...(19): siRNA sense strand
ucacagguggcauuugaug

SEQ ID NO: 1479630 - RNA, 19 nt, Homo sapiens
  misc_RNA (1)...(19): siRNA sense strand
ucguacaggugcuaugguu

SEQ ID NO: 1479631 - RNA, 19 nt, Homo sapiens
  misc_RNA (1)...(19): siRNA sense strand
ugacaggagccuacagcaa

SEQ ID NO: 1479632 - RNA, 19 nt, Homo sapiens
  misc_RNA (1)...(19): siRNA sense strand
uguggucucuacccaguga

SEQ ID NO: 1479633 - RNA, 19 nt, Homo sapiens
  misc_RNA (1)...(19): siRNA sense strand
aagaugaacacccacaaug

SEQ ID NO: 1479634 - RNA, 19 nt, Homo sapiens
  misc_RNA (1)...(19): siRNA sense strand
gaccauccagugugacuca

SEQ ID NO: 1479635 - RNA, 19 nt, Homo sapiens
  misc_RNA (1)...(19): siRNA sense strand
aggaguaccaucuauauag

SEQ ID NO: 1479636 - RNA, 19 nt, Homo sapiens
  misc_RNA (1)...(19): siRNA sense strand
acaguggccucaggagaga

SEQ ID NO: 1479637 - RNA, 19 nt, Homo sapiens
  misc_RNA (1)...(19): siRNA sense strand
acgcaggaguaccaucuau

SEQ ID NO: 1479638 - RNA, 19 nt, Homo sapiens
  misc_RNA (1)...(19): siRNA sense strand
gggcgguauugcuguaucu

SEQ ID NO: 1479639 - RNA, 19 nt, Homo sapiens
  misc_RNA (1)...(19): siRNA sense strand
aaaacagcacucuggauua

SEQ ID NO: 1479640 - RNA, 19 nt, Homo sapiens
  misc_RNA (1)...(19): siRNA sense strand
gccaaucucauaaguacca

SEQ ID NO: 1479641 - RNA, 19 nt, Homo sapiens
  misc_RNA (1)...(19): siRNA sense strand
aagcgccaaucucauaagu

SEQ ID NO: 1479642 - RNA, 19 nt, Homo sapiens
  misc_RNA (1)...(19): siRNA sense strand
ugacucacagguggcauuu

SEQ ID NO: 1479643 - RNA, 19 nt, Homo sapiens
  misc_RNA (1)...(19): siRNA sense strand
ucuaagaagccaucacucu

SEQ ID NO: 1479644 - RNA, 19 nt, Homo sapiens
  misc_RNA (1)...(19): siRNA sense strand
gauggcuucauucugugua

SEQ ID NO: 1479645 - RNA, 19 nt, Homo sapiens
  misc_RNA (1)...(19): siRNA sense strand
gcgguauugcuguaucuau

SEQ ID NO: 1479646 - RNA, 19 nt, Homo sapiens
  misc_RNA (1)...(19): siRNA sense strand
cgcaggaguaccaucuaua

SEQ ID NO: 1479647 - RNA, 19 nt, Homo sapiens
  misc_RNA (1)...(19): siRNA sense strand
gcauuugauggcuucauuc

SEQ ID NO: 1479648 - RNA, 19 nt, Homo sapiens
  misc_RNA (1)...(19): siRNA sense strand
ggacggacuucucacguuu

SEQ ID NO: 1479649 - RNA, 19 nt, Homo sapiens
  misc_RNA (1)...(19): siRNA sense strand
ggacaucggcccauuucua

SEQ ID NO: 1479650 - RNA, 19 nt, Homo sapiens
  misc_RNA (1)...(19): siRNA sense strand
caaaguaccagucuuauag

SEQ ID NO: 1479651 - RNA, 19 nt, Homo sapiens
  misc_RNA (1)...(19): siRNA sense strand
ucagauagacacuuucuuu

SEQ ID NO: 1479652 - RNA, 19 nt, Homo sapiens
  misc_RNA (1)...(19): siRNA sense strand
gcucugaugucggcuauga

SEQ ID NO: 1479653 - RNA, 19 nt, Homo sapiens
  misc_RNA (1)...(19): siRNA sense strand
ggcaucagauagacacuuu

SEQ ID NO: 1479654 - RNA, 19 nt, Homo sapiens
  misc_RNA (1)...(19): siRNA sense strand
ggacuucucacguuuguuc

SEQ ID NO: 1479655 - RNA, 19 nt, Homo sapiens
  misc_RNA (1)...(19): siRNA sense strand
guucagaugcuauuacuau

SEQ ID NO: 1479656 - RNA, 19 nt, Homo sapiens
  misc_RNA (1)...(19): siRNA sense strand
ucaaaguaccagucuuaua

SEQ ID NO: 1479657 - RNA, 19 nt, Homo sapiens
  misc_RNA (1)...(19): siRNA sense strand
gaucccagccucucaccua

SEQ ID NO: 1479658 - RNA, 19 nt, Homo sapiens
  misc_RNA (1)...(19): siRNA sense strand
gaggaguaccgucuggaua

SEQ ID NO: 1479659 - RNA, 19 nt, Homo sapiens
  misc_RNA (1)...(19): siRNA sense strand
gaacgugacccugcugugu

SEQ ID NO: 1479660 - RNA, 19 nt, Homo sapiens
  misc_RNA (1)...(19): siRNA sense strand
cgauaccgcugcuacuaug

SEQ ID NO: 1479661 - RNA, 19 nt, Homo sapiens
  misc_RNA (1)...(19): siRNA sense strand
ugagccagccucugugaua

SEQ ID NO: 1479662 - RNA, 19 nt, Homo sapiens
  misc_RNA (1)...(19): siRNA sense strand
ggacugaucccugacauac

SEQ ID NO: 1479663 - RNA, 19 nt, Homo sapiens
  misc_RNA (1)...(19): siRNA sense strand
agucaaaguaccagucuua

SEQ ID NO: 1479664 - RNA, 19 nt, Homo sapiens
  misc_RNA (1)...(19): siRNA sense strand
ucacguuuguucuuguuga

SEQ ID NO: 1479665 - RNA, 19 nt, Homo sapiens
  misc_RNA (1)...(19): siRNA sense strand
cagaugcuauuacuauuac

SEQ ID NO: 1479666 - RNA, 19 nt, Homo sapiens
  misc_RNA (1)...(19): siRNA sense strand
ggaggaaauucucaaugcu

SEQ ID NO: 1479667 - RNA, 19 nt, Homo sapiens
  misc_RNA (1)...(19): siRNA sense strand
gcagguggagguucagaug

SEQ ID NO: 1479668 - RNA, 19 nt, Homo sapiens
  misc_RNA (1)...(19): siRNA sense strand
gagccagccucugugauag

SEQ ID NO: 1479669 - RNA, 19 nt, Homo sapiens
  misc_RNA (1)...(19): siRNA sense strand
aagggaaccuccagcugaa

SEQ ID NO: 1479670 - RNA, 19 nt, Homo sapiens
  misc_RNA (1)...(19): siRNA sense strand
gcuauuacuauuacaggaa

SEQ ID NO: 1479671 - RNA, 19 nt, Homo sapiens
  misc_RNA (1)...(19): siRNA sense strand
caggcugaauucuccauga

SEQ ID NO: 1479672 - RNA, 19 nt, Homo sapiens
  misc_RNA (1)...(19): siRNA sense strand
ugacauauucguucuguac

SEQ ID NO: 1479673 - RNA, 19 nt, Homo sapiens
  misc_RNA (1)...(19): siRNA sense strand
ggaguaccgucuggauaag

SEQ ID NO: 1479674 - RNA, 19 nt, Homo sapiens
  misc_RNA (1)...(19): siRNA sense strand
gcgauaccgcugcuacuau

SEQ ID NO: 1479675 - RNA, 19 nt, Homo sapiens
  misc_RNA (1)...(19): siRNA sense strand
ucucaaugcugccgugaag

SEQ ID NO: 1479676 - RNA, 19 nt, Homo sapiens
  misc_RNA (1)...(19): siRNA sense strand
ucagucauggcaucagaua

SEQ ID NO: 1479677 - RNA, 19 nt, Homo sapiens
  misc_RNA (1)...(19): siRNA sense strand
ggagguucagaugcuauua

SEQ ID NO: 1479678 - RNA, 19 nt, Homo sapiens
  misc_RNA (1)...(19): siRNA sense strand
aggaguaccgucuggauaa

SEQ ID NO: 1479679 - RNA, 19 nt, Homo sapiens
  misc_RNA (1)...(19): siRNA sense strand
gguggagguucagaugcua

SEQ ID NO: 1479680 - RNA, 19 nt, Homo sapiens
  misc_RNA (1)...(19): siRNA sense strand
ugacauccaggaggaaauu

SEQ ID NO: 1479681 - RNA, 19 nt, Homo sapiens
  misc_RNA (1)...(19): siRNA sense strand
acauauucguucuguacaa

SEQ ID NO: 1479682 - RNA, 19 nt, Homo sapiens
  misc_RNA (1)...(19): siRNA sense strand
uggacggacuucucacguu

SEQ ID NO: 1479683 - RNA, 19 nt, Homo sapiens
  misc_RNA (1)...(19): siRNA sense strand
gacaucggcccauuucuac

SEQ ID NO: 1479684 - RNA, 19 nt, Homo sapiens
  misc_RNA (1)...(19): siRNA sense strand
cauauucguucuguacaag

SEQ ID NO: 1479685 - RNA, 19 nt, Homo sapiens
  misc_RNA (1)...(19): siRNA sense strand
ucaaugcugccgugaagga

SEQ ID NO: 1479686 - RNA, 19 nt, Homo sapiens
  misc_RNA (1)...(19): siRNA sense strand
aggaggaaauucucaaugc

SEQ ID NO: 1479687 - RNA, 19 nt, Homo sapiens
  misc_RNA (1)...(19): siRNA sense strand
agucauggcaucagauaga

SEQ ID NO: 1479688 - RNA, 19 nt, Homo sapiens
  misc_RNA (1)...(19): siRNA sense strand
ugucagucauggcaucaga

SEQ ID NO: 1479689 - RNA, 19 nt, Homo sapiens
  misc_RNA (1)...(19): siRNA sense strand
gaagcccucccuccugauc

SEQ ID NO: 1479690 - RNA, 19 nt, Homo sapiens
  misc_RNA (1)...(19): siRNA sense strand
ggcgauaccgcugcuacua

SEQ ID NO: 1479691 - RNA, 19 nt, Homo sapiens
  misc_RNA (1)...(19): siRNA sense strand
cacaggacaucggcccauu

SEQ ID NO: 1479692 - RNA, 19 nt, Homo sapiens
  misc_RNA (1)...(19): siRNA sense strand
ucucacguuuguucuuguu

SEQ ID NO: 1479693 - RNA, 19 nt, Homo sapiens
  misc_RNA (1)...(19): siRNA sense strand
aaaguaccagucuuauaga

SEQ ID NO: 1479694 - RNA, 19 nt, Homo sapiens
  misc_RNA (1)...(19): siRNA sense strand
caaggccaaguuccacauu

SEQ ID NO: 1479695 - RNA, 19 nt, Homo sapiens
  misc_RNA (1)...(19): siRNA sense strand
ucccaggcgugucuaggaa

SEQ ID NO: 1479696 - RNA, 19 nt, Homo sapiens
  misc_RNA (1)...(19): siRNA sense strand
gacaucggcaucagagcaa

SEQ ID NO: 1479697 - RNA, 19 nt, Homo sapiens
  misc_RNA (1)...(19): siRNA sense strand
gguggaaccuaccgaugcu

SEQ ID NO: 1479698 - RNA, 19 nt, Homo sapiens
  misc_RNA (1)...(19): siRNA sense strand
auagacaccaggcugaauu

SEQ ID NO: 1479699 - RNA, 19 nt, Homo sapiens
  misc_RNA (1)...(19): siRNA sense strand
acacuggacggacuucuca

SEQ ID NO: 1479700 - RNA, 19 nt, Homo sapiens
  misc_RNA (1)...(19): siRNA sense strand
gagccaaggccaaguucca

SEQ ID NO: 1479701 - RNA, 19 nt, Homo sapiens
  misc_RNA (1)...(19): siRNA sense strand
caggacaucggcccauuuc

SEQ ID NO: 1479702 - RNA, 19 nt, Homo sapiens
  misc_RNA (1)...(19): siRNA sense strand
cuucucacguuuguucuug

SEQ ID NO: 1479703 - RNA, 19 nt, Homo sapiens
  misc_RNA (1)...(19): siRNA sense strand
aaaugugacccuccagugu

SEQ ID NO: 1479704 - RNA, 19 nt, Homo sapiens
  misc_RNA (1)...(19): siRNA sense strand
cgcugugucuaaagucaaa

SEQ ID NO: 1479705 - RNA, 19 nt, Homo sapiens
  misc_RNA (1)...(19): siRNA sense strand
caggaggaaauucucaaug

SEQ ID NO: 1479706 - RNA, 19 nt, Homo sapiens
  misc_RNA (1)...(19): siRNA sense strand
cacagaagcuccccaaagg

SEQ ID NO: 1479707 - RNA, 19 nt, Homo sapiens
  misc_RNA (1)...(19): siRNA sense strand
caucagauagacacuuucu

SEQ ID NO: 1479708 - RNA, 19 nt, Homo sapiens
  misc_RNA (1)...(19): siRNA sense strand
gcagaacccacucuuuuag

SEQ ID NO: 1479709 - RNA, 19 nt, Homo sapiens
  misc_RNA (1)...(19): siRNA sense strand
cgagcgaggugaagaaguu

SEQ ID NO: 1479710 - RNA, 19 nt, Homo sapiens
  misc_RNA (1)...(19): siRNA sense strand
ggagaacuaugagaaugug

SEQ ID NO: 1479711 - RNA, 19 nt, Homo sapiens
  misc_RNA (1)...(19): siRNA sense strand
ucaucgagguggacgagua

SEQ ID NO: 1479712 - RNA, 19 nt, Homo sapiens
  misc_RNA (1)...(19): siRNA sense strand
cagcacagccggcucauca

SEQ ID NO: 1479713 - RNA, 19 nt, Homo sapiens
  misc_RNA (1)...(19): siRNA sense strand
accacgagcugaccuuuga

SEQ ID NO: 1479714 - RNA, 19 nt, Homo sapiens
  misc_RNA (1)...(19): siRNA sense strand
guucauggccgaccucauc

SEQ ID NO: 1479715 - RNA, 19 nt, Homo sapiens
  misc_RNA (1)...(19): siRNA sense strand
ccaacugcaucuaccuuca

SEQ ID NO: 1479716 - RNA, 19 nt, Homo sapiens
  misc_RNA (1)...(19): siRNA sense strand
gcacagccggcucaucauc

SEQ ID NO: 1479717 - RNA, 19 nt, Homo sapiens
  misc_RNA (1)...(19): siRNA sense strand
ccggagaacuaugagaaug

SEQ ID NO: 1479718 - RNA, 19 nt, Homo sapiens
  misc_RNA (1)...(19): siRNA sense strand
ugaagccggagaacuauga

SEQ ID NO: 1479719 - RNA, 19 nt, Homo sapiens
  misc_RNA (1)...(19): siRNA sense strand
gccuucaccuucuacaaca

SEQ ID NO: 1479720 - RNA, 19 nt, Homo sapiens
  misc_RNA (1)...(19): siRNA sense strand
uggccgaccucaucaagca

SEQ ID NO: 1479721 - RNA, 19 nt, Homo sapiens
  misc_RNA (1)...(19): siRNA sense strand
gcaggacuuuuacuacuuc

SEQ ID NO: 1479722 - RNA, 19 nt, Homo sapiens
  misc_RNA (1)...(19): siRNA sense strand
caaccacgagcugaccuuu

SEQ ID NO: 1479723 - RNA, 19 nt, Homo sapiens
  misc_RNA (1)...(19): siRNA sense strand
ggacggaccccauccagau

SEQ ID NO: 1479724 - RNA, 19 nt, Homo sapiens
  misc_RNA (1)...(19): siRNA sense strand
gcugaagccggagaacuau

SEQ ID NO: 1479725 - RNA, 19 nt, Homo sapiens
  misc_RNA (1)...(19): siRNA sense strand
gaccaacugcaucuaccuu

SEQ ID NO: 1479726 - RNA, 19 nt, Homo sapiens
  misc_RNA (1)...(19): siRNA sense strand
ucaucaagcaggacuuuua

SEQ ID NO: 1479727 - RNA, 19 nt, Homo sapiens
  misc_RNA (1)...(19): siRNA sense strand
guacggcgacgugcugauc

SEQ ID NO: 1479728 - RNA, 19 nt, Homo sapiens
  misc_RNA (1)...(19): siRNA sense strand
ccacccaggccuucaccuu

SEQ ID NO: 1479729 - RNA, 19 nt, Homo sapiens
  misc_RNA (1)...(19): siRNA sense strand
gcaaccacgagcugaccuu

SEQ ID NO: 1479730 - RNA, 19 nt, Homo sapiens
  misc_RNA (1)...(19): siRNA sense strand
cgagcgaggugaagaaguu

SEQ ID NO: 1479731 - RNA, 19 nt, Homo sapiens
  misc_RNA (1)...(19): siRNA sense strand
ggagaacuaugagaaugug

SEQ ID NO: 1479732 - RNA, 19 nt, Homo sapiens
  misc_RNA (1)...(19): siRNA sense strand
ucaucgagguggacgagua

SEQ ID NO: 1479733 - RNA, 19 nt, Homo sapiens
  misc_RNA (1)...(19): siRNA sense strand
cagcacagccggcucauca

SEQ ID NO: 1479734 - RNA, 19 nt, Homo sapiens
  misc_RNA (1)...(19): siRNA sense strand
accacgagcugaccuuuga

SEQ ID NO: 1479735 - RNA, 19 nt, Homo sapiens
  misc_RNA (1)...(19): siRNA sense strand
guucauggccgaccucauc

SEQ ID NO: 1479736 - RNA, 19 nt, Homo sapiens
  misc_RNA (1)...(19): siRNA sense strand
ccaacugcaucuaccuuca

SEQ ID NO: 1479737 - RNA, 19 nt, Homo sapiens
  misc_RNA (1)...(19): siRNA sense strand
gcacagccggcucaucauc

SEQ ID NO: 1479738 - RNA, 19 nt, Homo sapiens
  misc_RNA (1)...(19): siRNA sense strand
ccggagaacuaugagaaug

SEQ ID NO: 1479739 - RNA, 19 nt, Homo sapiens
  misc_RNA (1)...(19): siRNA sense strand
ugaagccggagaacuauga

SEQ ID NO: 1479740 - RNA, 19 nt, Homo sapiens
  misc_RNA (1)...(19): siRNA sense strand
gccuucaccuucuacaaca

SEQ ID NO: 1479741 - RNA, 19 nt, Homo sapiens
  misc_RNA (1)...(19): siRNA sense strand
uggccgaccucaucaagca

SEQ ID NO: 1479742 - RNA, 19 nt, Homo sapiens
  misc_RNA (1)...(19): siRNA sense strand
gcaggacuuuuacuacuuc

SEQ ID NO: 1479743 - RNA, 19 nt, Homo sapiens
  misc_RNA (1)...(19): siRNA sense strand
caaccacgagcugaccuuu

SEQ ID NO: 1479744 - RNA, 19 nt, Homo sapiens
  misc_RNA (1)...(19): siRNA sense strand
ggacggaccccauccagau

SEQ ID NO: 1479745 - RNA, 19 nt, Homo sapiens
  misc_RNA (1)...(19): siRNA sense strand
gcugaagccggagaacuau

SEQ ID NO: 1479746 - RNA, 19 nt, Homo sapiens
  misc_RNA (1)...(19): siRNA sense strand
gaccaacugcaucuaccuu

SEQ ID NO: 1479747 - RNA, 19 nt, Homo sapiens
  misc_RNA (1)...(19): siRNA sense strand
ucaucaagcaggacuuuua

SEQ ID NO: 1479748 - RNA, 19 nt, Homo sapiens
  misc_RNA (1)...(19): siRNA sense strand
guacggcgacgugcugauc

SEQ ID NO: 1479749 - RNA, 19 nt, Homo sapiens
  misc_RNA (1)...(19): siRNA sense strand
ccacccaggccuucaccuu

SEQ ID NO: 1479750 - RNA, 19 nt, Homo sapiens
  misc_RNA (1)...(19): siRNA sense strand
gcaaccacgagcugaccuu

SEQ ID NO: 1479751 - RNA, 19 nt, Homo sapiens
  misc_RNA (1)...(19): siRNA sense strand
gggaaggacuggcacaagu

SEQ ID NO: 1479752 - RNA, 19 nt, Homo sapiens
  misc_RNA (1)...(19): siRNA sense strand
gcuccuacaucuacgagaa

SEQ ID NO: 1479753 - RNA, 19 nt, Homo sapiens
  misc_RNA (1)...(19): siRNA sense strand
cacaagcccugcuauggaa

SEQ ID NO: 1479754 - RNA, 19 nt, Homo sapiens
  misc_RNA (1)...(19): siRNA sense strand
ggaaggacuggcacaaguu

SEQ ID NO: 1479755 - RNA, 19 nt, Homo sapiens
  misc_RNA (1)...(19): siRNA sense strand
ccacaagcccugcuaugga

SEQ ID NO: 1479756 - RNA, 19 nt, Homo sapiens
  misc_RNA (1)...(19): siRNA sense strand
gcagcaagaagguguacuu

SEQ ID NO: 1479757 - RNA, 19 nt, Homo sapiens
  misc_RNA (1)...(19): siRNA sense strand
gaaggacuggcacaaguuc

SEQ ID NO: 1479758 - RNA, 19 nt, Homo sapiens
  misc_RNA (1)...(19): siRNA sense strand
ugacgucucugggcaagga

SEQ ID NO: 1479759 - RNA, 19 nt, Homo sapiens
  misc_RNA (1)...(19): siRNA sense strand
gcgacaagaccguguacuu

SEQ ID NO: 1479760 - RNA, 19 nt, Homo sapiens
  misc_RNA (1)...(19): siRNA sense strand
cgacaagaccguguacuuc

SEQ ID NO: 1479761 - RNA, 19 nt, Homo sapiens
  misc_RNA (1)...(19): siRNA sense strand
gcacaaguucugccucaag

SEQ ID NO: 1479762 - RNA, 19 nt, Homo sapiens
  misc_RNA (1)...(19): siRNA sense strand
ggaagccguucugccacaa

SEQ ID NO: 1479763 - RNA, 19 nt, Homo sapiens
  misc_RNA (1)...(19): siRNA sense strand
gugggcagcuacaucuaug

SEQ ID NO: 1479764 - RNA, 19 nt, Homo sapiens
  misc_RNA (1)...(19): siRNA sense strand
cacaaguucugccucaagu

SEQ ID NO: 1479765 - RNA, 19 nt, Homo sapiens
  misc_RNA (1)...(19): siRNA sense strand
ugcgagcgcugcagcaaga

SEQ ID NO: 1479766 - RNA, 19 nt, Homo sapiens
  misc_RNA (1)...(19): siRNA sense strand
ggugggcagcuacaucuau

SEQ ID NO: 1479767 - RNA, 19 nt, Homo sapiens
  misc_RNA (1)...(19): siRNA sense strand
gugcuacgccacccuguuc

SEQ ID NO: 1479768 - RNA, 19 nt, Homo sapiens
  misc_RNA (1)...(19): siRNA sense strand
ugaaagagauugacuauga

SEQ ID NO: 1479769 - RNA, 19 nt, Homo sapiens
  misc_RNA (1)...(19): siRNA sense strand
gaccauggaugauuuaaau

SEQ ID NO: 1479770 - RNA, 19 nt, Homo sapiens
  misc_RNA (1)...(19): siRNA sense strand
ugaaagcccugccuuguga

SEQ ID NO: 1479771 - RNA, 19 nt, Homo sapiens
  misc_RNA (1)...(19): siRNA sense strand
gaagacaaguuagaauuca

SEQ ID NO: 1479772 - RNA, 19 nt, Homo sapiens
  misc_RNA (1)...(19): siRNA sense strand
gcuguaaccucuguaagua

SEQ ID NO: 1479773 - RNA, 19 nt, Homo sapiens
  misc_RNA (1)...(19): siRNA sense strand
gggaggagguuaugaagga

SEQ ID NO: 1479774 - RNA, 19 nt, Homo sapiens
  misc_RNA (1)...(19): siRNA sense strand
ucaaugauguuuccugcua

SEQ ID NO: 1479775 - RNA, 19 nt, Homo sapiens
  misc_RNA (1)...(19): siRNA sense strand
gcucaucgauuccacauca

SEQ ID NO: 1479776 - RNA, 19 nt, Homo sapiens
  misc_RNA (1)...(19): siRNA sense strand
gaaagagauugacuaugau

SEQ ID NO: 1479777 - RNA, 19 nt, Homo sapiens
  misc_RNA (1)...(19): siRNA sense strand
ugagauagggcuccgauua

SEQ ID NO: 1479778 - RNA, 19 nt, Homo sapiens
  misc_RNA (1)...(19): siRNA sense strand
agaaauauccggagaaguu

SEQ ID NO: 1479779 - RNA, 19 nt, Homo sapiens
  misc_RNA (1)...(19): siRNA sense strand
ggugauaccucaacaaacu

SEQ ID NO: 1479780 - RNA, 19 nt, Homo sapiens
  misc_RNA (1)...(19): siRNA sense strand
gaaaaucuaucucgaagug

SEQ ID NO: 1479781 - RNA, 19 nt, Homo sapiens
  misc_RNA (1)...(19): siRNA sense strand
ugaguaaagugguacauau

SEQ ID NO: 1479782 - RNA, 19 nt, Homo sapiens
  misc_RNA (1)...(19): siRNA sense strand
ggauugacccuguuccuaa

SEQ ID NO: 1479783 - RNA, 19 nt, Homo sapiens
  misc_RNA (1)...(19): siRNA sense strand
ggucacugcuuaaaugaga

SEQ ID NO: 1479784 - RNA, 19 nt, Homo sapiens
  misc_RNA (1)...(19): siRNA sense strand
agaagaccauggaugauuu

SEQ ID NO: 1479785 - RNA, 19 nt, Homo sapiens
  misc_RNA (1)...(19): siRNA sense strand
gaagaccauggaugauuua

SEQ ID NO: 1479786 - RNA, 19 nt, Homo sapiens
  misc_RNA (1)...(19): siRNA sense strand
ggaggagucuuugacaguu

SEQ ID NO: 1479787 - RNA, 19 nt, Homo sapiens
  misc_RNA (1)...(19): siRNA sense strand
gcuaugguacuucgaauuu

SEQ ID NO: 1479788 - RNA, 19 nt, Homo sapiens
  misc_RNA (1)...(19): siRNA sense strand
ccucaaggauuuagagaug

SEQ ID NO: 1479789 - RNA, 19 nt, Homo sapiens
  misc_RNA (1)...(19): siRNA sense strand
gaauccaucuucucaacau

SEQ ID NO: 1479790 - RNA, 19 nt, Homo sapiens
  misc_RNA (1)...(19): siRNA sense strand
cgagauggcuaaauauguc

SEQ ID NO: 1479791 - RNA, 19 nt, Homo sapiens
  misc_RNA (1)...(19): siRNA sense strand
guaaagugguacauaugga

SEQ ID NO: 1479792 - RNA, 19 nt, Homo sapiens
  misc_RNA (1)...(19): siRNA sense strand
gaugaaagagauugacuau

SEQ ID NO: 1479793 - RNA, 19 nt, Homo sapiens
  misc_RNA (1)...(19): siRNA sense strand
gagcugaggccgauucuuc

SEQ ID NO: 1479794 - RNA, 19 nt, Homo sapiens
  misc_RNA (1)...(19): siRNA sense strand
ugagacuggucacugcuua

SEQ ID NO: 1479795 - RNA, 19 nt, Homo sapiens
  misc_RNA (1)...(19): siRNA sense strand
ggucagugauguccuaaag

SEQ ID NO: 1479796 - RNA, 19 nt, Homo sapiens
  misc_RNA (1)...(19): siRNA sense strand
gauguggugugucucaaug

SEQ ID NO: 1479797 - RNA, 19 nt, Homo sapiens
  misc_RNA (1)...(19): siRNA sense strand
gagauagggcuccgauuau

SEQ ID NO: 1479798 - RNA, 19 nt, Homo sapiens
  misc_RNA (1)...(19): siRNA sense strand
acaguaggcuggauucuag

SEQ ID NO: 1479799 - RNA, 19 nt, Homo sapiens
  misc_RNA (1)...(19): siRNA sense strand
caaucaagaucacccacaa

SEQ ID NO: 1479800 - RNA, 19 nt, Homo sapiens
  misc_RNA (1)...(19): siRNA sense strand
cagaagacaaguuagaauu

SEQ ID NO: 1479801 - RNA, 19 nt, Homo sapiens
  misc_RNA (1)...(19): siRNA sense strand
gaaugaagaacaagcuaug

SEQ ID NO: 1479802 - RNA, 19 nt, Homo sapiens
  misc_RNA (1)...(19): siRNA sense strand
cgaccagugugccaugaaa

SEQ ID NO: 1479803 - RNA, 19 nt, Homo sapiens
  misc_RNA (1)...(19): siRNA sense strand
caauuucuuuggcuucuug

SEQ ID NO: 1479804 - RNA, 19 nt, Homo sapiens
  misc_RNA (1)...(19): siRNA sense strand
caauugagaugggccaaau

SEQ ID NO: 1479805 - RNA, 19 nt, Homo sapiens
  misc_RNA (1)...(19): siRNA sense strand
agagaugaguaaaguggua

SEQ ID NO: 1479806 - RNA, 19 nt, Homo sapiens
  misc_RNA (1)...(19): siRNA sense strand
aaaggucagugauguccua

SEQ ID NO: 1479807 - RNA, 19 nt, Homo sapiens
  misc_RNA (1)...(19): siRNA sense strand
ugaccgggcugcauugugu

SEQ ID NO: 1479808 - RNA, 19 nt, Homo sapiens
  misc_RNA (1)...(19): siRNA sense strand
cagacgcccuguacaauca

SEQ ID NO: 1479809 - RNA, 19 nt, Homo sapiens
  misc_RNA (1)...(19): siRNA sense strand
gcauuggucuuggcaaaca

SEQ ID NO: 1479810 - RNA, 19 nt, Homo sapiens
  misc_RNA (1)...(19): siRNA sense strand
ugaagaacaagcuauggua

SEQ ID NO: 1479811 - RNA, 19 nt, Homo sapiens
  misc_RNA (1)...(19): siRNA sense strand
gccagaagaccauggauga

SEQ ID NO: 1479812 - RNA, 19 nt, Homo sapiens
  misc_RNA (1)...(19): siRNA sense strand
agacaaaugugacaaaaga

SEQ ID NO: 1479813 - RNA, 19 nt, Homo sapiens
  misc_RNA (1)...(19): siRNA sense strand
ggcuaaauauguccaagga

SEQ ID NO: 1479814 - RNA, 19 nt, Homo sapiens
  misc_RNA (1)...(19): siRNA sense strand
gcucugagaucaccuucca

SEQ ID NO: 1479815 - RNA, 19 nt, Homo sapiens
  misc_RNA (1)...(19): siRNA sense strand
agaccuaagugacaagaga

SEQ ID NO: 1479816 - RNA, 19 nt, Homo sapiens
  misc_RNA (1)...(19): siRNA sense strand
gaggagucuuugacaguug

SEQ ID NO: 1479817 - RNA, 19 nt, Homo sapiens
  misc_RNA (1)...(19): siRNA sense strand
agauagggcuccgauuauu

SEQ ID NO: 1479818 - RNA, 19 nt, Homo sapiens
  misc_RNA (1)...(19): siRNA sense strand
ccacccacuucucgucuuu

SEQ ID NO: 1479819 - RNA, 19 nt, Homo sapiens
  misc_RNA (1)...(19): siRNA sense strand
gcucagaaguggacaaaau

SEQ ID NO: 1479820 - RNA, 19 nt, Homo sapiens
  misc_RNA (1)...(19): siRNA sense strand
aaacaucccuagcaugcau

SEQ ID NO: 1479821 - RNA, 19 nt, Homo sapiens
  misc_RNA (1)...(19): siRNA sense strand
gaaggcaucgcagugcuaa

SEQ ID NO: 1479822 - RNA, 19 nt, Homo sapiens
  misc_RNA (1)...(19): siRNA sense strand
gaauuugccacaucugaau

SEQ ID NO: 1479823 - RNA, 19 nt, Homo sapiens
  misc_RNA (1)...(19): siRNA sense strand
gaaguucaacagcagaaug

SEQ ID NO: 1479824 - RNA, 19 nt, Homo sapiens
  misc_RNA (1)...(19): siRNA sense strand
auaccaagcucaagaaugc

SEQ ID NO: 1479825 - RNA, 19 nt, Homo sapiens
  misc_RNA (1)...(19): siRNA sense strand
agaacaagcuaugguacuu

SEQ ID NO: 1479826 - RNA, 19 nt, Homo sapiens
  misc_RNA (1)...(19): siRNA sense strand
caaaagauguggugugucu

SEQ ID NO: 1479827 - RNA, 19 nt, Homo sapiens
  misc_RNA (1)...(19): siRNA sense strand
ugagcaaccugucccuaga

SEQ ID NO: 1479828 - RNA, 19 nt, Homo sapiens
  misc_RNA (1)...(19): siRNA sense strand
aagcauuggucuuggcaaa

SEQ ID NO: 1479829 - RNA, 19 nt, Homo sapiens
  misc_RNA (1)...(19): siRNA sense strand
cagaagaccauggaugauu

SEQ ID NO: 1479830 - RNA, 19 nt, Homo sapiens
  misc_RNA (1)...(19): siRNA sense strand
gaucacauccugccuccau

SEQ ID NO: 1479831 - RNA, 19 nt, Homo sapiens
  misc_RNA (1)...(19): siRNA sense strand
gccaagugcucugagauca

SEQ ID NO: 1479832 - RNA, 19 nt, Homo sapiens
  misc_RNA (1)...(19): siRNA sense strand
auggcgagauggcuaaaua

SEQ ID NO: 1479833 - RNA, 19 nt, Homo sapiens
  misc_RNA (1)...(19): siRNA sense strand
uaaauuugagcaccucuga

SEQ ID NO: 1479834 - RNA, 19 nt, Homo sapiens
  misc_RNA (1)...(19): siRNA sense strand
guacgacacggacagaaau

SEQ ID NO: 1479835 - RNA, 19 nt, Homo sapiens
  misc_RNA (1)...(19): siRNA sense strand
gcagacgcccuguacaauc

SEQ ID NO: 1479836 - RNA, 19 nt, Homo sapiens
  misc_RNA (1)...(19): siRNA sense strand
gaaauauccggagaaguuc

SEQ ID NO: 1479837 - RNA, 19 nt, Homo sapiens
  misc_RNA (1)...(19): siRNA sense strand
ccacuucucgucuuuguca

SEQ ID NO: 1479838 - RNA, 19 nt, Homo sapiens
  misc_RNA (1)...(19): siRNA sense strand
caagaucacccacaagaac

SEQ ID NO: 1479839 - RNA, 19 nt, Homo sapiens
  misc_RNA (1)...(19): siRNA sense strand
gaacaagcuaugguacuuc

SEQ ID NO: 1479840 - RNA, 19 nt, Homo sapiens
  misc_RNA (1)...(19): siRNA sense strand
gaguaaagugguacauaug

SEQ ID NO: 1479841 - RNA, 19 nt, Homo sapiens
  misc_RNA (1)...(19): siRNA sense strand
gauagggcuccgauuauuc

SEQ ID NO: 1479842 - RNA, 19 nt, Homo sapiens
  misc_RNA (1)...(19): siRNA sense strand
ugaugcgaguggcugaaua

SEQ ID NO: 1479843 - RNA, 19 nt, Homo sapiens
  misc_RNA (1)...(19): siRNA sense strand
caagagacuggaagugguu

SEQ ID NO: 1479844 - RNA, 19 nt, Homo sapiens
  misc_RNA (1)...(19): siRNA sense strand
gagagaaauauccggagaa

SEQ ID NO: 1479845 - RNA, 19 nt, Homo sapiens
  misc_RNA (1)...(19): siRNA sense strand
gaucuggcucgaugccuaa

SEQ ID NO: 1479846 - RNA, 19 nt, Homo sapiens
  misc_RNA (1)...(19): siRNA sense strand
gagaugccauuggguacga

SEQ ID NO: 1479847 - RNA, 19 nt, Homo sapiens
  misc_RNA (1)...(19): siRNA sense strand
acuggucacugcuuaaaug

SEQ ID NO: 1479848 - RNA, 19 nt, Homo sapiens
  misc_RNA (1)...(19): siRNA sense strand
gagcaaccugucccuagaa

SEQ ID NO: 1479849 - RNA, 19 nt, Homo sapiens
  misc_RNA (1)...(19): siRNA sense strand
gcgagauggcuaaauaugu

SEQ ID NO: 1479850 - RNA, 19 nt, Homo sapiens
  misc_RNA (1)...(19): siRNA sense strand
ggagaugaugaaagagauu

SEQ ID NO: 1479851 - RNA, 19 nt, Homo sapiens
  misc_RNA (1)...(19): siRNA sense strand
gcuuaaaugagacaaaugu

SEQ ID NO: 1479852 - RNA, 19 nt, Homo sapiens
  misc_RNA (1)...(19): siRNA sense strand
uggcguggaugccucuauu

SEQ ID NO: 1479853 - RNA, 19 nt, Homo sapiens
  misc_RNA (1)...(19): siRNA sense strand
uggauaauguucccagaca

SEQ ID NO: 1479854 - RNA, 19 nt, Homo sapiens
  misc_RNA (1)...(19): siRNA sense strand
cuaauaagccccagugauu

SEQ ID NO: 1479855 - RNA, 19 nt, Homo sapiens
  misc_RNA (1)...(19): siRNA sense strand
ucagugauguccuaaagcu

SEQ ID NO: 1479856 - RNA, 19 nt, Homo sapiens
  misc_RNA (1)...(19): siRNA sense strand
ccacaucaugcgagagaaa

SEQ ID NO: 1479857 - RNA, 19 nt, Homo sapiens
  misc_RNA (1)...(19): siRNA sense strand
gacaaaagauguggugugu

SEQ ID NO: 1479858 - RNA, 19 nt, Homo sapiens
  misc_RNA (1)...(19): siRNA sense strand
guaccagaccuaagugaca

SEQ ID NO: 1479859 - RNA, 19 nt, Homo sapiens
  misc_RNA (1)...(19): siRNA sense strand
gagaaguucaacagcagaa

SEQ ID NO: 1479860 - RNA, 19 nt, Homo sapiens
  misc_RNA (1)...(19): siRNA sense strand
gauguuuccugcuacuuuu

SEQ ID NO: 1479861 - RNA, 19 nt, Homo sapiens
  misc_RNA (1)...(19): siRNA sense strand
ggcacuguuucaauccuuu

SEQ ID NO: 1479862 - RNA, 19 nt, Homo sapiens
  misc_RNA (1)...(19): siRNA sense strand
ggccagaagacaaguuaga

SEQ ID NO: 1479863 - RNA, 19 nt, Homo sapiens
  misc_RNA (1)...(19): siRNA sense strand
caugcaaauugacggagaa

SEQ ID NO: 1479864 - RNA, 19 nt, Homo sapiens
  misc_RNA (1)...(19): siRNA sense strand
ggauaucuaugggaucaac

SEQ ID NO: 1479865 - RNA, 19 nt, Homo sapiens
  misc_RNA (1)...(19): siRNA sense strand
caagcuaugguacuucgaa

SEQ ID NO: 1479866 - RNA, 19 nt, Homo sapiens
  misc_RNA (1)...(19): siRNA sense strand
gauggucuguggaggugau

SEQ ID NO: 1479867 - RNA, 19 nt, Homo sapiens
  misc_RNA (1)...(19): siRNA sense strand
guacgagggauuccagcaa

SEQ ID NO: 1479868 - RNA, 19 nt, Homo sapiens
  misc_RNA (1)...(19): siRNA sense strand
gcuacaagcuggagaauga

SEQ ID NO: 1479869 - RNA, 19 nt, Homo sapiens
  misc_RNA (1)...(19): siRNA sense strand
cuacagaucuccaaugaaa

SEQ ID NO: 1479870 - RNA, 19 nt, Homo sapiens
  misc_RNA (1)...(19): siRNA sense strand
ggaaacagcuauguggaaa

SEQ ID NO: 1479871 - RNA, 19 nt, Homo sapiens
  misc_RNA (1)...(19): siRNA sense strand
ggaguuggaucucucagaa

SEQ ID NO: 1479872 - RNA, 19 nt, Homo sapiens
  misc_RNA (1)...(19): siRNA sense strand
gaucucaucuacaacuuug

SEQ ID NO: 1479873 - RNA, 19 nt, Homo sapiens
  misc_RNA (1)...(19): siRNA sense strand
gaggucaucuccaaauaug

SEQ ID NO: 1479874 - RNA, 19 nt, Homo sapiens
  misc_RNA (1)...(19): siRNA sense strand
cagccaagcucuaugucua

SEQ ID NO: 1479875 - RNA, 19 nt, Homo sapiens
  misc_RNA (1)...(19): siRNA sense strand
gagcaggcauggucucuuc

SEQ ID NO: 1479876 - RNA, 19 nt, Homo sapiens
  misc_RNA (1)...(19): siRNA sense strand
ccacacaccucuccuugga

SEQ ID NO: 1479877 - RNA, 19 nt, Homo sapiens
  misc_RNA (1)...(19): siRNA sense strand
ucaaugagcucugcacugu

SEQ ID NO: 1479878 - RNA, 19 nt, Homo sapiens
  misc_RNA (1)...(19): siRNA sense strand
ggaauaacccucccacaca

SEQ ID NO: 1479879 - RNA, 19 nt, Homo sapiens
  misc_RNA (1)...(19): siRNA sense strand
gaucagggccauuaggaaa

SEQ ID NO: 1479880 - RNA, 19 nt, Homo sapiens
  misc_RNA (1)...(19): siRNA sense strand
aaacaaaggacgcauagug

SEQ ID NO: 1479881 - RNA, 19 nt, Homo sapiens
  misc_RNA (1)...(19): siRNA sense strand
ggcauggucucuucuacuu

SEQ ID NO: 1479882 - RNA, 19 nt, Homo sapiens
  misc_RNA (1)...(19): siRNA sense strand
agacggacauuuccucuuc

SEQ ID NO: 1479883 - RNA, 19 nt, Homo sapiens
  misc_RNA (1)...(19): siRNA sense strand
ggacgaagaggaagaagca

SEQ ID NO: 1479884 - RNA, 19 nt, Homo sapiens
  misc_RNA (1)...(19): siRNA sense strand
cacuacagaucuccaauga

SEQ ID NO: 1479885 - RNA, 19 nt, Homo sapiens
  misc_RNA (1)...(19): siRNA sense strand
gcucugcacuguucucaag

SEQ ID NO: 1479886 - RNA, 19 nt, Homo sapiens
  misc_RNA (1)...(19): siRNA sense strand
caggaugccuuccgagaug

SEQ ID NO: 1479887 - RNA, 19 nt, Homo sapiens
  misc_RNA (1)...(19): siRNA sense strand
gagguuaacaggcgcauug

SEQ ID NO: 1479888 - RNA, 19 nt, Homo sapiens
  misc_RNA (1)...(19): siRNA sense strand
cauagugucaccaucguua

SEQ ID NO: 1479889 - RNA, 19 nt, Homo sapiens
  misc_RNA (1)...(19): siRNA sense strand
gaaccuggcaaacagauca

SEQ ID NO: 1479890 - RNA, 19 nt, Homo sapiens
  misc_RNA (1)...(19): siRNA sense strand
ggaugaugaugacgaagau

SEQ ID NO: 1479891 - RNA, 19 nt, Homo sapiens
  misc_RNA (1)...(19): siRNA sense strand
caucguuacugucagaaga

SEQ ID NO: 1479892 - RNA, 19 nt, Homo sapiens
  misc_RNA (1)...(19): siRNA sense strand
ggaggaggaggaagaagaa

SEQ ID NO: 1479893 - RNA, 19 nt, Homo sapiens
  misc_RNA (1)...(19): siRNA sense strand
augagaagcuguucgaaga

SEQ ID NO: 1479894 - RNA, 19 nt, Homo sapiens
  misc_RNA (1)...(19): siRNA sense strand
ggucagugcaugagaagaa

SEQ ID NO: 1479895 - RNA, 19 nt, Homo sapiens
  misc_RNA (1)...(19): siRNA sense strand
gaaccuggaaccuggcaaa

SEQ ID NO: 1479896 - RNA, 19 nt, Homo sapiens
  misc_RNA (1)...(19): siRNA sense strand
cuccaaauaugcaauguug

SEQ ID NO: 1479897 - RNA, 19 nt, Homo sapiens
  misc_RNA (1)...(19): siRNA sense strand
gcugccaccucacagauga

SEQ ID NO: 1479898 - RNA, 19 nt, Homo sapiens
  misc_RNA (1)...(19): siRNA sense strand
aaugagcccucugggaaua

SEQ ID NO: 1479899 - RNA, 19 nt, Homo sapiens
  misc_RNA (1)...(19): siRNA sense strand
aaaggucagugcaugagaa

SEQ ID NO: 1479900 - RNA, 19 nt, Homo sapiens
  misc_RNA (1)...(19): siRNA sense strand
gcuagagauugaagcuuug

SEQ ID NO: 1479901 - RNA, 19 nt, Homo sapiens
  misc_RNA (1)...(19): siRNA sense strand
ggaagaaagcccugugucu

SEQ ID NO: 1479902 - RNA, 19 nt, Homo sapiens
  misc_RNA (1)...(19): siRNA sense strand
gcgacuaugugagcugaaa

SEQ ID NO: 1479903 - RNA, 19 nt, Homo sapiens
  misc_RNA (1)...(19): siRNA sense strand
gcccuucaccacugucuua

SEQ ID NO: 1479904 - RNA, 19 nt, Homo sapiens
  misc_RNA (1)...(19): siRNA sense strand
ucuuugagcuagagauuga

SEQ ID NO: 1479905 - RNA, 19 nt, Homo sapiens
  misc_RNA (1)...(19): siRNA sense strand
gaagaagcagcagcaggua

SEQ ID NO: 1479906 - RNA, 19 nt, Homo sapiens
  misc_RNA (1)...(19): siRNA sense strand
cgaggagagugaugaggaa

SEQ ID NO: 1479907 - RNA, 19 nt, Homo sapiens
  misc_RNA (1)...(19): siRNA sense strand
ggugagggcccuaguggaa

SEQ ID NO: 1479908 - RNA, 19 nt, Homo sapiens
  misc_RNA (1)...(19): siRNA sense strand
gagaagcuguucgaagagu

SEQ ID NO: 1479909 - RNA, 19 nt, Homo sapiens
  misc_RNA (1)...(19): siRNA sense strand
ggaaggagaagaagcaaac

SEQ ID NO: 1479910 - RNA, 19 nt, Homo sapiens
  misc_RNA (1)...(19): siRNA sense strand
aaugagcucugcacuguuc

SEQ ID NO: 1479911 - RNA, 19 nt, Homo sapiens
  misc_RNA (1)...(19): siRNA sense strand
caaaggacgcauaguguca

SEQ ID NO: 1479912 - RNA, 19 nt, Homo sapiens
  misc_RNA (1)...(19): siRNA sense strand
acuaucagauccuguguug

SEQ ID NO: 1479913 - RNA, 19 nt, Homo sapiens
  misc_RNA (1)...(19): siRNA sense strand
ggagcgacgucaccucgau

SEQ ID NO: 1479914 - RNA, 19 nt, Homo sapiens
  misc_RNA (1)...(19): siRNA sense strand
gcuggaugaugaugacgaa

SEQ ID NO: 1479915 - RNA, 19 nt, Homo sapiens
  misc_RNA (1)...(19): siRNA sense strand
gaagaagcaaacaggauca

SEQ ID NO: 1479916 - RNA, 19 nt, Homo sapiens
  misc_RNA (1)...(19): siRNA sense strand
gagaagaagcaaacaggau

SEQ ID NO: 1479917 - RNA, 19 nt, Homo sapiens
  misc_RNA (1)...(19): siRNA sense strand
ucaccacugucuuagagaa

SEQ ID NO: 1479918 - RNA, 19 nt, Homo sapiens
  misc_RNA (1)...(19): siRNA sense strand
ugaaagcaauggagaacag

SEQ ID NO: 1479919 - RNA, 19 nt, Homo sapiens
  misc_RNA (1)...(19): siRNA sense strand
gcagcaacgugcccacucu

SEQ ID NO: 1479920 - RNA, 19 nt, Homo sapiens
  misc_RNA (1)...(19): siRNA sense strand
acaaugcgauccagaagag

SEQ ID NO: 1479921 - RNA, 19 nt, Homo sapiens
  misc_RNA (1)...(19): siRNA sense strand
ggcggcagauccagcguuu

SEQ ID NO: 1479922 - RNA, 19 nt, Homo sapiens
  misc_RNA (1)...(19): siRNA sense strand
ugagacagaugacgaagac

SEQ ID NO: 1479923 - RNA, 19 nt, Homo sapiens
  misc_RNA (1)...(19): siRNA sense strand
ggagagugaugaggaagag

SEQ ID NO: 1479924 - RNA, 19 nt, Homo sapiens
  misc_RNA (1)...(19): siRNA sense strand
aguuggaucucucagaauu

SEQ ID NO: 1479925 - RNA, 19 nt, Homo sapiens
  misc_RNA (1)...(19): siRNA sense strand
ucaggaggaugaugaagag

SEQ ID NO: 1479926 - RNA, 19 nt, Homo sapiens
  misc_RNA (1)...(19): siRNA sense strand
gcaggagggucaggaggau

SEQ ID NO: 1479927 - RNA, 19 nt, Homo sapiens
  misc_RNA (1)...(19): siRNA sense strand
ucaccucgaucucaucuac

SEQ ID NO: 1479928 - RNA, 19 nt, Homo sapiens
  misc_RNA (1)...(19): siRNA sense strand
aaacagcuauguggaaagg

SEQ ID NO: 1479929 - RNA, 19 nt, Homo sapiens
  misc_RNA (1)...(19): siRNA sense strand
ccucacagaugacuauagg

SEQ ID NO: 1479930 - RNA, 19 nt, Homo sapiens
  misc_RNA (1)...(19): siRNA sense strand
caacgugcccacucucugu

SEQ ID NO: 1479931 - RNA, 19 nt, Homo sapiens
  misc_RNA (1)...(19): siRNA sense strand
guucgaagaguuccuugaa

SEQ ID NO: 1479932 - RNA, 19 nt, Homo sapiens
  misc_RNA (1)...(19): siRNA sense strand
ccugauaccuucccugacu

SEQ ID NO: 1479933 - RNA, 19 nt, Homo sapiens
  misc_RNA (1)...(19): siRNA sense strand
ugagggcccuaguggaaug

SEQ ID NO: 1479934 - RNA, 19 nt, Homo sapiens
  misc_RNA (1)...(19): siRNA sense strand
gcaggcauggucucuucua

SEQ ID NO: 1479935 - RNA, 19 nt, Homo sapiens
  misc_RNA (1)...(19): siRNA sense strand
gugaggagggcgagagaaa

SEQ ID NO: 1479936 - RNA, 19 nt, Homo sapiens
  misc_RNA (1)...(19): siRNA sense strand
caccaucguuacugucaga

SEQ ID NO: 1479937 - RNA, 19 nt, Homo sapiens
  misc_RNA (1)...(19): siRNA sense strand
gcaaaacaaaggacgcaua

SEQ ID NO: 1479938 - RNA, 19 nt, Homo sapiens
  misc_RNA (1)...(19): siRNA sense strand
agaagcagcagcagguaaa

SEQ ID NO: 1479939 - RNA, 19 nt, Homo sapiens
  misc_RNA (1)...(19): siRNA sense strand
ggaggaggaucuggaacag

SEQ ID NO: 1479940 - RNA, 19 nt, Homo sapiens
  misc_RNA (1)...(19): siRNA sense strand
ggaggaggccacagauucu

SEQ ID NO: 1479941 - RNA, 19 nt, Homo sapiens
  misc_RNA (1)...(19): siRNA sense strand
gaaaaggaguuggaucucu

SEQ ID NO: 1479942 - RNA, 19 nt, Homo sapiens
  misc_RNA (1)...(19): siRNA sense strand
guaaagauggagacaagag

SEQ ID NO: 1479943 - RNA, 19 nt, Homo sapiens
  misc_RNA (1)...(19): siRNA sense strand
ggaggacgaagaggaagaa

SEQ ID NO: 1479944 - RNA, 19 nt, Homo sapiens
  misc_RNA (1)...(19): siRNA sense strand
gaggaggaggccacagauu

SEQ ID NO: 1479945 - RNA, 19 nt, Homo sapiens
  misc_RNA (1)...(19): siRNA sense strand
guggucccauuccucuaua

SEQ ID NO: 1479946 - RNA, 19 nt, Homo sapiens
  misc_RNA (1)...(19): siRNA sense strand
gaagcuguucgaagaguuc

SEQ ID NO: 1479947 - RNA, 19 nt, Homo sapiens
  misc_RNA (1)...(19): siRNA sense strand
ccagagcugagacagauga

SEQ ID NO: 1479948 - RNA, 19 nt, Homo sapiens
  misc_RNA (1)...(19): siRNA sense strand
cccgaagccuccuuggauu

SEQ ID NO: 1479949 - RNA, 19 nt, Homo sapiens
  misc_RNA (1)...(19): siRNA sense strand
aagcugauccgccucuuug

SEQ ID NO: 1479950 - RNA, 19 nt, Homo sapiens
  misc_RNA (1)...(19): siRNA sense strand
aagaaagcccugugucuca

SEQ ID NO: 1479951 - RNA, 19 nt, Homo sapiens
  misc_RNA (1)...(19): siRNA sense strand
ggaggaggaggaggaagaa

SEQ ID NO: 1479952 - RNA, 19 nt, Homo sapiens
  misc_RNA (1)...(19): siRNA sense strand
ccaccucacagaugacuau

SEQ ID NO: 1479953 - RNA, 19 nt, Homo sapiens
  misc_RNA (1)...(19): siRNA sense strand
ggucaucuccaaauaugca

SEQ ID NO: 1479954 - RNA, 19 nt, Homo sapiens
  misc_RNA (1)...(19): siRNA sense strand
ggaucagggccauuaggaa

SEQ ID NO: 1479955 - RNA, 19 nt, Homo sapiens
  misc_RNA (1)...(19): siRNA sense strand
ggaggaggaagaagaagag

SEQ ID NO: 1479956 - RNA, 19 nt, Homo sapiens
  misc_RNA (1)...(19): siRNA sense strand
gcaagaaaugcuacaagcu

SEQ ID NO: 1479957 - RNA, 19 nt, Homo sapiens
  misc_RNA (1)...(19): siRNA sense strand
aggcacgguugaagcguaa

SEQ ID NO: 1479958 - RNA, 19 nt, Homo sapiens
  misc_RNA (1)...(19): siRNA sense strand
gcaaaggucagugcaugag

SEQ ID NO: 1479959 - RNA, 19 nt, Homo sapiens
  misc_RNA (1)...(19): siRNA sense strand
gguggucccauuccucuau

SEQ ID NO: 1479960 - RNA, 19 nt, Homo sapiens
  misc_RNA (1)...(19): siRNA sense strand
ccuggaaccuggcaaacag

SEQ ID NO: 1479961 - RNA, 19 nt, Homo sapiens
  misc_RNA (1)...(19): siRNA sense strand
acccugagguggucccauu

SEQ ID NO: 1479962 - RNA, 19 nt, Homo sapiens
  misc_RNA (1)...(19): siRNA sense strand
cuccagagcugagacagau

SEQ ID NO: 1479963 - RNA, 19 nt, Homo sapiens
  misc_RNA (1)...(19): siRNA sense strand
ugaggucaucuccaaauau

SEQ ID NO: 1479964 - RNA, 19 nt, Homo sapiens
  misc_RNA (1)...(19): siRNA sense strand
ggaugugcuucgggcugua

SEQ ID NO: 1479965 - RNA, 19 nt, Homo sapiens
  misc_RNA (1)...(19): siRNA sense strand
gaggaagaaagcccugugu

SEQ ID NO: 1479966 - RNA, 19 nt, Homo sapiens
  misc_RNA (1)...(19): siRNA sense strand
ccuugaacuuuguaagaug

SEQ ID NO: 1479967 - RNA, 19 nt, Homo sapiens
  misc_RNA (1)...(19): siRNA sense strand
ggcaaaggucagugcauga

SEQ ID NO: 1479968 - RNA, 19 nt, Homo sapiens
  misc_RNA (1)...(19): siRNA sense strand
gccaggagcugucccacua

SEQ ID NO: 1479969 - RNA, 19 nt, Homo sapiens
  misc_RNA (1)...(19): siRNA sense strand
gcagaaggaugagaaauac

SEQ ID NO: 1479970 - RNA, 19 nt, Homo sapiens
  misc_RNA (1)...(19): siRNA sense strand
cagcugaucuugcccuauc

SEQ ID NO: 1479971 - RNA, 19 nt, Homo sapiens
  misc_RNA (1)...(19): siRNA sense strand
gcucaaggagaaccagaua

SEQ ID NO: 1479972 - RNA, 19 nt, Homo sapiens
  misc_RNA (1)...(19): siRNA sense strand
cggaggagcagaaggauga

SEQ ID NO: 1479973 - RNA, 19 nt, Homo sapiens
  misc_RNA (1)...(19): siRNA sense strand
ucaugaagaaggcaagaaa

SEQ ID NO: 1479974 - RNA, 19 nt, Homo sapiens
  misc_RNA (1)...(19): siRNA sense strand
ucaaggagaaccagauauc

SEQ ID NO: 1479975 - RNA, 19 nt, Homo sapiens
  misc_RNA (1)...(19): siRNA sense strand
agcagaaggaugagaaaua

SEQ ID NO: 1479976 - RNA, 19 nt, Homo sapiens
  misc_RNA (1)...(19): siRNA sense strand
ucucagaagaggaacuuaa

SEQ ID NO: 1479977 - RNA, 19 nt, Homo sapiens
  misc_RNA (1)...(19): siRNA sense strand
ggaccagcaagcccaaaga

SEQ ID NO: 1479978 - RNA, 19 nt, Homo sapiens
  misc_RNA (1)...(19): siRNA sense strand
ggagcagaaggaugagaaa

SEQ ID NO: 1479979 - RNA, 19 nt, Homo sapiens
  misc_RNA (1)...(19): siRNA sense strand
ggccagcugucuccugaag

SEQ ID NO: 1479980 - RNA, 19 nt, Homo sapiens
  misc_RNA (1)...(19): siRNA sense strand
gaccuuugacccucgaaga

SEQ ID NO: 1479981 - RNA, 19 nt, Homo sapiens
  misc_RNA (1)...(19): siRNA sense strand
gagcagaaggaugagaaau

SEQ ID NO: 1479982 - RNA, 19 nt, Homo sapiens
  misc_RNA (1)...(19): siRNA sense strand
cccagccaaucaugaagaa

SEQ ID NO: 1479983 - RNA, 19 nt, Homo sapiens
  misc_RNA (1)...(19): siRNA sense strand
agaaggaugagaaauacug

SEQ ID NO: 1479984 - RNA, 19 nt, Homo sapiens
  misc_RNA (1)...(19): siRNA sense strand
gaacccgacccagcugauc

SEQ ID NO: 1479985 - RNA, 19 nt, Homo sapiens
  misc_RNA (1)...(19): siRNA sense strand
guucggcgauguggaguac

SEQ ID NO: 1479986 - RNA, 19 nt, Homo sapiens
  misc_RNA (1)...(19): siRNA sense strand
gcucagcucugguacuuua

SEQ ID NO: 1479987 - RNA, 19 nt, Homo sapiens
  misc_RNA (1)...(19): siRNA sense strand
gauaauccauuuccuaagg

SEQ ID NO: 1479988 - RNA, 19 nt, Homo sapiens
  misc_RNA (1)...(19): siRNA sense strand
gggaaggccuggucugaug

SEQ ID NO: 1479989 - RNA, 19 nt, Homo sapiens
  misc_RNA (1)...(19): siRNA sense strand
gcagauaauccauuuccua

SEQ ID NO: 1479990 - RNA, 19 nt, Homo sapiens
  misc_RNA (1)...(19): siRNA sense strand
gcauggaccugguagagau

SEQ ID NO: 1479991 - RNA, 19 nt, Homo sapiens
  misc_RNA (1)...(19): siRNA sense strand
ggaaaucucggcguuacua

SEQ ID NO: 1479992 - RNA, 19 nt, Homo sapiens
  misc_RNA (1)...(19): siRNA sense strand
ccacaugucuggcugucuu

SEQ ID NO: 1479993 - RNA, 19 nt, Homo sapiens
  misc_RNA (1)...(19): siRNA sense strand
gugauucucuguugaacuu

SEQ ID NO: 1479994 - RNA, 19 nt, Homo sapiens
  misc_RNA (1)...(19): siRNA sense strand
cagcaaggcucaggaggaa

SEQ ID NO: 1479995 - RNA, 19 nt, Homo sapiens
  misc_RNA (1)...(19): siRNA sense strand
cagauaauccauuuccuaa

SEQ ID NO: 1479996 - RNA, 19 nt, Homo sapiens
  misc_RNA (1)...(19): siRNA sense strand
caucacagcccagcagaua

SEQ ID NO: 1479997 - RNA, 19 nt, Homo sapiens
  misc_RNA (1)...(19): siRNA sense strand
gagguggucuugcacuuca

SEQ ID NO: 1479998 - RNA, 19 nt, Homo sapiens
  misc_RNA (1)...(19): siRNA sense strand
gaugggagguggucuugca

SEQ ID NO: 1479999 - RNA, 19 nt, Homo sapiens
  misc_RNA (1)...(19): siRNA sense strand
gaaccgaguacaccuacaa

SEQ ID NO: 1480000 - RNA, 19 nt, Homo sapiens
  misc_RNA (1)...(19): siRNA sense strand
ggccaucaaucucucauca

SEQ ID NO: 1480001 - RNA, 19 nt, Homo sapiens
  misc_RNA (1)...(19): siRNA sense strand
ucauugcccucuucucuga

SEQ ID NO: 1480002 - RNA, 19 nt, Homo sapiens
  misc_RNA (1)...(19): siRNA sense strand
gaaaccaauuaccgacugu

SEQ ID NO: 1480003 - RNA, 19 nt, Homo sapiens
  misc_RNA (1)...(19): siRNA sense strand
gguauuggaccgauuguau

SEQ ID NO: 1480004 - RNA, 19 nt, Homo sapiens
  misc_RNA (1)...(19): siRNA sense strand
ccacacgccuggccaucaa

SEQ ID NO: 1480005 - RNA, 19 nt, Homo sapiens
  misc_RNA (1)...(19): siRNA sense strand
uaugagugauucucuguug

SEQ ID NO: 1480006 - RNA, 19 nt, Homo sapiens
  misc_RNA (1)...(19): siRNA sense strand
gaggaaaucucggcguuac

SEQ ID NO: 1480007 - RNA, 19 nt, Homo sapiens
  misc_RNA (1)...(19): siRNA sense strand
cugaggguguccuguauaa

SEQ ID NO: 1480008 - RNA, 19 nt, Homo sapiens
  misc_RNA (1)...(19): siRNA sense strand
ggaagcggcagaaacauag

SEQ ID NO: 1480009 - RNA, 19 nt, Homo sapiens
  misc_RNA (1)...(19): siRNA sense strand
gcucugguacuuuauguug

SEQ ID NO: 1480010 - RNA, 19 nt, Homo sapiens
  misc_RNA (1)...(19): siRNA sense strand
cccagcagauaauccauuu

SEQ ID NO: 1480011 - RNA, 19 nt, Homo sapiens
  misc_RNA (1)...(19): siRNA sense strand
ucacugaggguguccugua

SEQ ID NO: 1480012 - RNA, 19 nt, Homo sapiens
  misc_RNA (1)...(19): siRNA sense strand
uaaagaaggaauucagcaa

SEQ ID NO: 1480013 - RNA, 19 nt, Homo sapiens
  misc_RNA (1)...(19): siRNA sense strand
ggccuggucugaugacaca

SEQ ID NO: 1480014 - RNA, 19 nt, Homo sapiens
  misc_RNA (1)...(19): siRNA sense strand
ccagugaugcucaaacaga

SEQ ID NO: 1480015 - RNA, 19 nt, Homo sapiens
  misc_RNA (1)...(19): siRNA sense strand
ggauuacucuguggaaggu

SEQ ID NO: 1480016 - RNA, 19 nt, Homo sapiens
  misc_RNA (1)...(19): siRNA sense strand
gacguucccucccuugaca

SEQ ID NO: 1480017 - RNA, 19 nt, Homo sapiens
  misc_RNA (1)...(19): siRNA sense strand
caacaucugcgugaguuug

SEQ ID NO: 1480018 - RNA, 19 nt, Homo sapiens
  misc_RNA (1)...(19): siRNA sense strand
gcaaggcucaggaggaaag

SEQ ID NO: 1480019 - RNA, 19 nt, Homo sapiens
  misc_RNA (1)...(19): siRNA sense strand
ggaaggccuggucugauga

SEQ ID NO: 1480020 - RNA, 19 nt, Homo sapiens
  misc_RNA (1)...(19): siRNA sense strand
cggcucagcucugguacuu

SEQ ID NO: 1480021 - RNA, 19 nt, Homo sapiens
  misc_RNA (1)...(19): siRNA sense strand
gggagguggucuugcacuu

SEQ ID NO: 1480022 - RNA, 19 nt, Homo sapiens
  misc_RNA (1)...(19): siRNA sense strand
gcugggcucaugaagagua

SEQ ID NO: 1480023 - RNA, 19 nt, Homo sapiens
  misc_RNA (1)...(19): siRNA sense strand
uggaagcggcagaaacaua

SEQ ID NO: 1480024 - RNA, 19 nt, Homo sapiens
  misc_RNA (1)...(19): siRNA sense strand
guagcucuguggguaaaga

SEQ ID NO: 1480025 - RNA, 19 nt, Homo sapiens
  misc_RNA (1)...(19): siRNA sense strand
ucacagcccagcagauaau

SEQ ID NO: 1480026 - RNA, 19 nt, Homo sapiens
  misc_RNA (1)...(19): siRNA sense strand
caucagccagguuucauug

SEQ ID NO: 1480027 - RNA, 19 nt, Homo sapiens
  misc_RNA (1)...(19): siRNA sense strand
gcaucagccagguuucauu

SEQ ID NO: 1480028 - RNA, 19 nt, Homo sapiens
  misc_RNA (1)...(19): siRNA sense strand
agucggagcugcagauugc

SEQ ID NO: 1480029 - RNA, 19 nt, Homo sapiens
  misc_RNA (1)...(19): siRNA sense strand
ccaauuaccgacuguaugc

SEQ ID NO: 1480030 - RNA, 19 nt, Homo sapiens
  misc_RNA (1)...(19): siRNA sense strand
guauuggaccgauuguaug

SEQ ID NO: 1480031 - RNA, 19 nt, Homo sapiens
  misc_RNA (1)...(19): siRNA sense strand
caccuacaaugcaggaauc

SEQ ID NO: 1480032 - RNA, 19 nt, Homo sapiens
  misc_RNA (1)...(19): siRNA sense strand
gcugcagauugcccucauu

SEQ ID NO: 1480033 - RNA, 19 nt, Homo sapiens
  misc_RNA (1)...(19): siRNA sense strand
gaacuuccugcaacaucug

SEQ ID NO: 1480034 - RNA, 19 nt, Homo sapiens
  misc_RNA (1)...(19): siRNA sense strand
ugaacuuccugcaacaucu

SEQ ID NO: 1480035 - RNA, 19 nt, Homo sapiens
  misc_RNA (1)...(19): siRNA sense strand
ugagugauucucuguugaa

SEQ ID NO: 1480036 - RNA, 19 nt, Homo sapiens
  misc_RNA (1)...(19): siRNA sense strand
caaggauuacucuguggaa

SEQ ID NO: 1480037 - RNA, 19 nt, Homo sapiens
  misc_RNA (1)...(19): siRNA sense strand
cuacucugggcaaggauua

SEQ ID NO: 1480038 - RNA, 19 nt, Homo sapiens
  misc_RNA (1)...(19): siRNA sense strand
cagcucugguacuuuaugu

SEQ ID NO: 1480039 - RNA, 19 nt, Homo sapiens
  misc_RNA (1)...(19): siRNA sense strand
aggcugggcucaugaagag

SEQ ID NO: 1480040 - RNA, 19 nt, Homo sapiens
  misc_RNA (1)...(19): siRNA sense strand
uggaagguaugagugauuc

SEQ ID NO: 1480041 - RNA, 19 nt, Homo sapiens
  misc_RNA (1)...(19): siRNA sense strand
acaagagcccacccaguga

SEQ ID NO: 1480042 - RNA, 19 nt, Homo sapiens
  misc_RNA (1)...(19): siRNA sense strand
ucccauccuuggcuaagaa

SEQ ID NO: 1480043 - RNA, 19 nt, Homo sapiens
  misc_RNA (1)...(19): siRNA sense strand
cacugaggguguccuguau

SEQ ID NO: 1480044 - RNA, 19 nt, Homo sapiens
  misc_RNA (1)...(19): siRNA sense strand
ucucuacucugggcaagga

SEQ ID NO: 1480045 - RNA, 19 nt, Homo sapiens
  misc_RNA (1)...(19): siRNA sense strand
ucagccagguuucauuguc

SEQ ID NO: 1480046 - RNA, 19 nt, Homo sapiens
  misc_RNA (1)...(19): siRNA sense strand
gcaacaucugcgugaguuu

SEQ ID NO: 1480047 - RNA, 19 nt, Homo sapiens
  misc_RNA (1)...(19): siRNA sense strand
ugcaacaucugcgugaguu

SEQ ID NO: 1480048 - RNA, 19 nt, Homo sapiens
  misc_RNA (1)...(19): siRNA sense strand
gguaugagugauucucugu

SEQ ID NO: 1480049 - RNA, 19 nt, Homo sapiens
  misc_RNA (1)...(19): siRNA sense strand
cgaguacaccuacaaugca

SEQ ID NO: 1480050 - RNA, 19 nt, Homo sapiens
  misc_RNA (1)...(19): siRNA sense strand
gauucucuccuuccucuuc

SEQ ID NO: 1480051 - RNA, 19 nt, Homo sapiens
  misc_RNA (1)...(19): siRNA sense strand
ggagguggucuugcacuuc

SEQ ID NO: 1480052 - RNA, 19 nt, Homo sapiens
  misc_RNA (1)...(19): siRNA sense strand
caagagcccacccagugau

SEQ ID NO: 1480053 - RNA, 19 nt, Homo sapiens
  misc_RNA (1)...(19): siRNA sense strand
guggaagguaugagugauu

SEQ ID NO: 1480054 - RNA, 19 nt, Homo sapiens
  misc_RNA (1)...(19): siRNA sense strand
gcccagcagauaauccauu

SEQ ID NO: 1480055 - RNA, 19 nt, Homo sapiens
  misc_RNA (1)...(19): siRNA sense strand
gcuguagcucuguggguaa

SEQ ID NO: 1480056 - RNA, 19 nt, Homo sapiens
  misc_RNA (1)...(19): siRNA sense strand
ggacagacuccgguucacu

SEQ ID NO: 1480057 - RNA, 19 nt, Homo sapiens
  misc_RNA (1)...(19): siRNA sense strand
gcucaugaagaguacugaa

SEQ ID NO: 1480058 - RNA, 19 nt, Homo sapiens
  misc_RNA (1)...(19): siRNA sense strand
ggagucggagcugcagauu

SEQ ID NO: 1480059 - RNA, 19 nt, Homo sapiens
  misc_RNA (1)...(19): siRNA sense strand
agaggaaaucucggcguua

SEQ ID NO: 1480060 - RNA, 19 nt, Homo sapiens
  misc_RNA (1)...(19): siRNA sense strand
gaagguaugagugauucuc

SEQ ID NO: 1480061 - RNA, 19 nt, Homo sapiens
  misc_RNA (1)...(19): siRNA sense strand
gaaaucucggcguuacuac

SEQ ID NO: 1480062 - RNA, 19 nt, Homo sapiens
  misc_RNA (1)...(19): siRNA sense strand
ccucauugcccucuucucu

SEQ ID NO: 1480063 - RNA, 19 nt, Homo sapiens
  misc_RNA (1)...(19): siRNA sense strand
gaauaaagcucuugagaag

SEQ ID NO: 1480064 - RNA, 19 nt, Homo sapiens
  misc_RNA (1)...(19): siRNA sense strand
aaacaaaccugcaagaaau

SEQ ID NO: 1480065 - RNA, 19 nt, Homo sapiens
  misc_RNA (1)...(19): siRNA sense strand
gaaacaaaccugcaagaaa

SEQ ID NO: 1480066 - RNA, 19 nt, Homo sapiens
  misc_RNA (1)...(19): siRNA sense strand
gcaagaacaugcugaccaa

SEQ ID NO: 1480067 - RNA, 19 nt, Homo sapiens
  misc_RNA (1)...(19): siRNA sense strand
ggaagucccugaugcugaa

SEQ ID NO: 1480068 - RNA, 19 nt, Homo sapiens
  misc_RNA (1)...(19): siRNA sense strand
agacaaagcuauugaacug

SEQ ID NO: 1480069 - RNA, 19 nt, Homo sapiens
  misc_RNA (1)...(19): siRNA sense strand
ggaaauaaagagaugauug

SEQ ID NO: 1480070 - RNA, 19 nt, Homo sapiens
  misc_RNA (1)...(19): siRNA sense strand
gaauaaagaagcugaagga

SEQ ID NO: 1480071 - RNA, 19 nt, Homo sapiens
  misc_RNA (1)...(19): siRNA sense strand
ugaauccucugaaugcaua

SEQ ID NO: 1480072 - RNA, 19 nt, Homo sapiens
  misc_RNA (1)...(19): siRNA sense strand
gaaaucagaagucuaguca

SEQ ID NO: 1480073 - RNA, 19 nt, Homo sapiens
  misc_RNA (1)...(19): siRNA sense strand
gagagcaguuuguugaaga

SEQ ID NO: 1480074 - RNA, 19 nt, Homo sapiens
  misc_RNA (1)...(19): siRNA sense strand
gcagaaaucagaagucuag

SEQ ID NO: 1480075 - RNA, 19 nt, Homo sapiens
  misc_RNA (1)...(19): siRNA sense strand
uaucagacaccauucaaua

SEQ ID NO: 1480076 - RNA, 19 nt, Homo sapiens
  misc_RNA (1)...(19): siRNA sense strand
gcaauaugcuauggacuau

SEQ ID NO: 1480077 - RNA, 19 nt, Homo sapiens
  misc_RNA (1)...(19): siRNA sense strand
gcucagauuuauguagaua

SEQ ID NO: 1480078 - RNA, 19 nt, Homo sapiens
  misc_RNA (1)...(19): siRNA sense strand
uaagacaaaugcagaauac

SEQ ID NO: 1480079 - RNA, 19 nt, Homo sapiens
  misc_RNA (1)...(19): siRNA sense strand
acggcaagcugaagaguua

SEQ ID NO: 1480080 - RNA, 19 nt, Homo sapiens
  misc_RNA (1)...(19): siRNA sense strand
gcaagcagccaaauguuau

SEQ ID NO: 1480081 - RNA, 19 nt, Homo sapiens
  misc_RNA (1)...(19): siRNA sense strand
gaauggagaucugcugcaa

SEQ ID NO: 1480082 - RNA, 19 nt, Homo sapiens
  misc_RNA (1)...(19): siRNA sense strand
ucucagaugcucagauuua

SEQ ID NO: 1480083 - RNA, 19 nt, Homo sapiens
  misc_RNA (1)...(19): siRNA sense strand
gaagaugaauaaagaagcu

SEQ ID NO: 1480084 - RNA, 19 nt, Homo sapiens
  misc_RNA (1)...(19): siRNA sense strand
guagauaaggugaaacaaa

SEQ ID NO: 1480085 - RNA, 19 nt, Homo sapiens
  misc_RNA (1)...(19): siRNA sense strand
guaagacaaaugcagaaua

SEQ ID NO: 1480086 - RNA, 19 nt, Homo sapiens
  misc_RNA (1)...(19): siRNA sense strand
uuagaggguuuguccauaa

SEQ ID NO: 1480087 - RNA, 19 nt, Homo sapiens
  misc_RNA (1)...(19): siRNA sense strand
acugcaaccuucagaaaua

SEQ ID NO: 1480088 - RNA, 19 nt, Homo sapiens
  misc_RNA (1)...(19): siRNA sense strand
gcagccaaauguuaugaga

SEQ ID NO: 1480089 - RNA, 19 nt, Homo sapiens
  misc_RNA (1)...(19): siRNA sense strand
ugcagaagaugaauaaaga

SEQ ID NO: 1480090 - RNA, 19 nt, Homo sapiens
  misc_RNA (1)...(19): siRNA sense strand
caaagcuauugaacuguuu

SEQ ID NO: 1480091 - RNA, 19 nt, Homo sapiens
  misc_RNA (1)...(19): siRNA sense strand
gagacggaauguuaucaga

SEQ ID NO: 1480092 - RNA, 19 nt, Homo sapiens
  misc_RNA (1)...(19): siRNA sense strand
uugaagcacuaaagcaaua

SEQ ID NO: 1480093 - RNA, 19 nt, Homo sapiens
  misc_RNA (1)...(19): siRNA sense strand
cgaauaaagcucuugagaa

SEQ ID NO: 1480094 - RNA, 19 nt, Homo sapiens
  misc_RNA (1)...(19): siRNA sense strand
ugaagacacugcugugcaa

SEQ ID NO: 1480095 - RNA, 19 nt, Homo sapiens
  misc_RNA (1)...(19): siRNA sense strand
uaaaacaccuagaugguaa

SEQ ID NO: 1480096 - RNA, 19 nt, Homo sapiens
  misc_RNA (1)...(19): siRNA sense strand
ggacugaauccucugaaug

SEQ ID NO: 1480097 - RNA, 19 nt, Homo sapiens
  misc_RNA (1)...(19): siRNA sense strand
acaaagcuauugaacuguu

SEQ ID NO: 1480098 - RNA, 19 nt, Homo sapiens
  misc_RNA (1)...(19): siRNA sense strand
gaaaugaaagggcgaaggu

SEQ ID NO: 1480099 - RNA, 19 nt, Homo sapiens
  misc_RNA (1)...(19): siRNA sense strand
gcaaccuucagaaauauaa

SEQ ID NO: 1480100 - RNA, 19 nt, Homo sapiens
  misc_RNA (1)...(19): siRNA sense strand
gaaaaucugcuuccacaaa

SEQ ID NO: 1480101 - RNA, 19 nt, Homo sapiens
  misc_RNA (1)...(19): siRNA sense strand
uagauaaggugaaacaaac

SEQ ID NO: 1480102 - RNA, 19 nt, Homo sapiens
  misc_RNA (1)...(19): siRNA sense strand
gaaauauaaugggaagucu

SEQ ID NO: 1480103 - RNA, 19 nt, Homo sapiens
  misc_RNA (1)...(19): siRNA sense strand
gaauacaggagaaucugaa

SEQ ID NO: 1480104 - RNA, 19 nt, Homo sapiens
  misc_RNA (1)...(19): siRNA sense strand
auucugaacuugacuguga

SEQ ID NO: 1480105 - RNA, 19 nt, Homo sapiens
  misc_RNA (1)...(19): siRNA sense strand
gaaggagagcaguuuguug

SEQ ID NO: 1480106 - RNA, 19 nt, Homo sapiens
  misc_RNA (1)...(19): siRNA sense strand
caacgaggcagcccuggaa

SEQ ID NO: 1480107 - RNA, 19 nt, Homo sapiens
  misc_RNA (1)...(19): siRNA sense strand
caaauguuaugagaaggaa

SEQ ID NO: 1480108 - RNA, 19 nt, Homo sapiens
  misc_RNA (1)...(19): siRNA sense strand
gacggaauguuaucagaca

SEQ ID NO: 1480109 - RNA, 19 nt, Homo sapiens
  misc_RNA (1)...(19): siRNA sense strand
gaagauagaguguguaacc

SEQ ID NO: 1480110 - RNA, 19 nt, Homo sapiens
  misc_RNA (1)...(19): siRNA sense strand
gaggaaggguggacacaac

SEQ ID NO: 1480111 - RNA, 19 nt, Homo sapiens
  misc_RNA (1)...(19): siRNA sense strand
ggaacuuauucaaggaaga

SEQ ID NO: 1480112 - RNA, 19 nt, Homo sapiens
  misc_RNA (1)...(19): siRNA sense strand
ggagagcaguuuguugaag

SEQ ID NO: 1480113 - RNA, 19 nt, Homo sapiens
  misc_RNA (1)...(19): siRNA sense strand
gcugaguccugauaaccaa

SEQ ID NO: 1480114 - RNA, 19 nt, Homo sapiens
  misc_RNA (1)...(19): siRNA sense strand
gaagcuaguggaaauaaag

SEQ ID NO: 1480115 - RNA, 19 nt, Homo sapiens
  misc_RNA (1)...(19): siRNA sense strand
aaacaauggcuaccucuau

SEQ ID NO: 1480116 - RNA, 19 nt, Homo sapiens
  misc_RNA (1)...(19): siRNA sense strand
ugaccaagcagaaaucaga

SEQ ID NO: 1480117 - RNA, 19 nt, Homo sapiens
  misc_RNA (1)...(19): siRNA sense strand
gauugaagcacuaaagcaa

SEQ ID NO: 1480118 - RNA, 19 nt, Homo sapiens
  misc_RNA (1)...(19): siRNA sense strand
gaagaagccuuggaaaagu

SEQ ID NO: 1480119 - RNA, 19 nt, Homo sapiens
  misc_RNA (1)...(19): siRNA sense strand
gaaggguggacacaacuga

SEQ ID NO: 1480120 - RNA, 19 nt, Homo sapiens
  misc_RNA (1)...(19): siRNA sense strand
cuaccucuaucaccagauu

SEQ ID NO: 1480121 - RNA, 19 nt, Homo sapiens
  misc_RNA (1)...(19): siRNA sense strand
ucaaagaccaaccacagaa

SEQ ID NO: 1480122 - RNA, 19 nt, Homo sapiens
  misc_RNA (1)...(19): siRNA sense strand
agagaugauugaagcacua

SEQ ID NO: 1480123 - RNA, 19 nt, Homo sapiens
  misc_RNA (1)...(19): siRNA sense strand
acucucagaugcucagauu

SEQ ID NO: 1480124 - RNA, 19 nt, Homo sapiens
  misc_RNA (1)...(19): siRNA sense strand
ccauuucaccuggaacuua

SEQ ID NO: 1480125 - RNA, 19 nt, Homo sapiens
  misc_RNA (1)...(19): siRNA sense strand
uagaagauagaguguguaa

SEQ ID NO: 1480126 - RNA, 19 nt, Homo sapiens
  misc_RNA (1)...(19): siRNA sense strand
ggaauccacaccaaacaau

SEQ ID NO: 1480127 - RNA, 19 nt, Homo sapiens
  misc_RNA (1)...(19): siRNA sense strand
uguaccaucuggauaauca

SEQ ID NO: 1480128 - RNA, 19 nt, Homo sapiens
  misc_RNA (1)...(19): siRNA sense strand
gacuggcaauugcgaugua

SEQ ID NO: 1480129 - RNA, 19 nt, Homo sapiens
  misc_RNA (1)...(19): siRNA sense strand
gccugaaacugcagaagau

SEQ ID NO: 1480130 - RNA, 19 nt, Homo sapiens
  misc_RNA (1)...(19): siRNA sense strand
aaaaucaacugacaaggaa

SEQ ID NO: 1480131 - RNA, 19 nt, Homo sapiens
  misc_RNA (1)...(19): siRNA sense strand
ugaagcuaguggaaauaaa

SEQ ID NO: 1480132 - RNA, 19 nt, Homo sapiens
  misc_RNA (1)...(19): siRNA sense strand
ccgcagugcagccaaauuu

SEQ ID NO: 1480133 - RNA, 19 nt, Homo sapiens
  misc_RNA (1)...(19): siRNA sense strand
cauuucaccuggaacuuau

SEQ ID NO: 1480134 - RNA, 19 nt, Homo sapiens
  misc_RNA (1)...(19): siRNA sense strand
uagaguguguaaccagauu

SEQ ID NO: 1480135 - RNA, 19 nt, Homo sapiens
  misc_RNA (1)...(19): siRNA sense strand
gcagaagaugaauaaagaa

SEQ ID NO: 1480136 - RNA, 19 nt, Homo sapiens
  misc_RNA (1)...(19): siRNA sense strand
gaaacuacgccugggucua

SEQ ID NO: 1480137 - RNA, 19 nt, Homo sapiens
  misc_RNA (1)...(19): siRNA sense strand
gcagugcagccaaauuuua

SEQ ID NO: 1480138 - RNA, 19 nt, Homo sapiens
  misc_RNA (1)...(19): siRNA sense strand
ggauaaucacccagagaaa

SEQ ID NO: 1480139 - RNA, 19 nt, Homo sapiens
  misc_RNA (1)...(19): siRNA sense strand
caagaauucccuggagaaa

SEQ ID NO: 1480140 - RNA, 19 nt, Homo sapiens
  misc_RNA (1)...(19): siRNA sense strand
ccaagaauucccuggagaa

SEQ ID NO: 1480141 - RNA, 19 nt, Homo sapiens
  misc_RNA (1)...(19): siRNA sense strand
caacugacaaggaagagau

SEQ ID NO: 1480142 - RNA, 19 nt, Homo sapiens
  misc_RNA (1)...(19): siRNA sense strand
agacaccauucaauaagga

SEQ ID NO: 1480143 - RNA, 19 nt, Homo sapiens
  misc_RNA (1)...(19): siRNA sense strand
gggacugaauccucugaau

SEQ ID NO: 1480144 - RNA, 19 nt, Homo sapiens
  misc_RNA (1)...(19): siRNA sense strand
gcagaauacaggagaaucu

SEQ ID NO: 1480145 - RNA, 19 nt, Homo sapiens
  misc_RNA (1)...(19): siRNA sense strand
aaggagagcaguuuguuga

SEQ ID NO: 1480146 - RNA, 19 nt, Homo sapiens
  misc_RNA (1)...(19): siRNA sense strand
aaacugcagaagaugaaua

SEQ ID NO: 1480147 - RNA, 19 nt, Homo sapiens
  misc_RNA (1)...(19): siRNA sense strand
aaucagaagucuagucacu

SEQ ID NO: 1480148 - RNA, 19 nt, Homo sapiens
  misc_RNA (1)...(19): siRNA sense strand
acaaggaagagaucaaaga

SEQ ID NO: 1480149 - RNA, 19 nt, Homo sapiens
  misc_RNA (1)...(19): siRNA sense strand
acaccuagaugguaacaac

SEQ ID NO: 1480150 - RNA, 19 nt, Homo sapiens
  misc_RNA (1)...(19): siRNA sense strand
cagaugcucagauuuaugu

SEQ ID NO: 1480151 - RNA, 19 nt, Homo sapiens
  misc_RNA (1)...(19): siRNA sense strand
ugaaacaaaccugcaagaa

SEQ ID NO: 1480152 - RNA, 19 nt, Homo sapiens
  misc_RNA (1)...(19): siRNA sense strand
ugcaagcagccaaauguua

SEQ ID NO: 1480153 - RNA, 19 nt, Homo sapiens
  misc_RNA (1)...(19): siRNA sense strand
ugacaaggaagagaucaaa

SEQ ID NO: 1480154 - RNA, 19 nt, Homo sapiens
  misc_RNA (1)...(19): siRNA sense strand
cagauugggugcugcuaca

SEQ ID NO: 1480155 - RNA, 19 nt, Homo sapiens
  misc_RNA (1)...(19): siRNA sense strand
caaacaauggcuaccucua

SEQ ID NO: 1480156 - RNA, 19 nt, Homo sapiens
  misc_RNA (1)...(19): siRNA sense strand
aaagggcgaagguguguuu

SEQ ID NO: 1480157 - RNA, 19 nt, Homo sapiens
  misc_RNA (1)...(19): siRNA sense strand
cuacugcaaccuucagaaa

SEQ ID NO: 1480158 - RNA, 19 nt, Homo sapiens
  misc_RNA (1)...(19): siRNA sense strand
ucaggcauaggcaguauuu

SEQ ID NO: 1480159 - RNA, 19 nt, Homo sapiens
  misc_RNA (1)...(19): siRNA sense strand
auugguaucuucaaggauu

SEQ ID NO: 1480160 - RNA, 19 nt, Homo sapiens
  misc_RNA (1)...(19): siRNA sense strand
gaccaaccacagaauguau

SEQ ID NO: 1480161 - RNA, 19 nt, Homo sapiens
  misc_RNA (1)...(19): siRNA sense strand
caaagaccaaccacagaau

SEQ ID NO: 1480162 - RNA, 19 nt, Homo sapiens
  misc_RNA (1)...(19): siRNA sense strand
aaaaucugcuuccacaaaa

SEQ ID NO: 1480163 - RNA, 19 nt, Homo sapiens
  misc_RNA (1)...(19): siRNA sense strand
gaaagcagcugauggauga

SEQ ID NO: 1480164 - RNA, 19 nt, Homo sapiens
  misc_RNA (1)...(19): siRNA sense strand
ggaaagagaugaaugagaa

SEQ ID NO: 1480165 - RNA, 19 nt, Homo sapiens
  misc_RNA (1)...(19): siRNA sense strand
gcaaagaccugaccagugu

SEQ ID NO: 1480166 - RNA, 19 nt, Homo sapiens
  misc_RNA (1)...(19): siRNA sense strand
ggacaaggcucuccaguuc

SEQ ID NO: 1480167 - RNA, 19 nt, Homo sapiens
  misc_RNA (1)...(19): siRNA sense strand
gcacgaaaccuucacaaua

SEQ ID NO: 1480168 - RNA, 19 nt, Homo sapiens
  misc_RNA (1)...(19): siRNA sense strand
gcacuaaucugcaaacugu

SEQ ID NO: 1480169 - RNA, 19 nt, Homo sapiens
  misc_RNA (1)...(19): siRNA sense strand
gcagggaggugaagcagua

SEQ ID NO: 1480170 - RNA, 19 nt, Homo sapiens
  misc_RNA (1)...(19): siRNA sense strand
cacgaaaccuucacaauaa

SEQ ID NO: 1480171 - RNA, 19 nt, Homo sapiens
  misc_RNA (1)...(19): siRNA sense strand
gaacagaucaucagacuuc

SEQ ID NO: 1480172 - RNA, 19 nt, Homo sapiens
  misc_RNA (1)...(19): siRNA sense strand
gcaaggaccugaccagugu

SEQ ID NO: 1480173 - RNA, 19 nt, Homo sapiens
  misc_RNA (1)...(19): siRNA sense strand
gaacaucgaugcggaagga

SEQ ID NO: 1480174 - RNA, 19 nt, Homo sapiens
  misc_RNA (1)...(19): siRNA sense strand
gggaggagaugcagacuug

SEQ ID NO: 1480175 - RNA, 19 nt, Homo sapiens
  misc_RNA (1)...(19): siRNA sense strand
gcaaguggaucacggacaa

SEQ ID NO: 1480176 - RNA, 19 nt, Homo sapiens
  misc_RNA (1)...(19): siRNA sense strand
ggaaaacccugaugagaaa

SEQ ID NO: 1480177 - RNA, 19 nt, Homo sapiens
  misc_RNA (1)...(19): siRNA sense strand
gaacuaccaugaccagaag

SEQ ID NO: 1480178 - RNA, 19 nt, Homo sapiens
  misc_RNA (1)...(19): siRNA sense strand
gcacaaggccuuugaggau

SEQ ID NO: 1480179 - RNA, 19 nt, Homo sapiens
  misc_RNA (1)...(19): siRNA sense strand
ggacacggcggauaaauuc

SEQ ID NO: 1480180 - RNA, 19 nt, Homo sapiens
  misc_RNA (1)...(19): siRNA sense strand
ggaagaagcagcuggaauc

SEQ ID NO: 1480181 - RNA, 19 nt, Homo sapiens
  misc_RNA (1)...(19): siRNA sense strand
gcgggaaguuguucagaaa

SEQ ID NO: 1480182 - RNA, 19 nt, Homo sapiens
  misc_RNA (1)...(19): siRNA sense strand
ggaggaaagagaugaauga

SEQ ID NO: 1480183 - RNA, 19 nt, Homo sapiens
  misc_RNA (1)...(19): siRNA sense strand
ucaccgaucucuacaagga

SEQ ID NO: 1480184 - RNA, 19 nt, Homo sapiens
  misc_RNA (1)...(19): siRNA sense strand
agagagaccuggcucaaug

SEQ ID NO: 1480185 - RNA, 19 nt, Homo sapiens
  misc_RNA (1)...(19): siRNA sense strand
agaaauccaucaucaccua

SEQ ID NO: 1480186 - RNA, 19 nt, Homo sapiens
  misc_RNA (1)...(19): siRNA sense strand
guuaaugucaccaacuuua

SEQ ID NO: 1480187 - RNA, 19 nt, Homo sapiens
  misc_RNA (1)...(19): siRNA sense strand
ucaaucggauguuggcuaa

SEQ ID NO: 1480188 - RNA, 19 nt, Homo sapiens
  misc_RNA (1)...(19): siRNA sense strand
acgacgagcuggauaauga

SEQ ID NO: 1480189 - RNA, 19 nt, Homo sapiens
  misc_RNA (1)...(19): siRNA sense strand
cagacaagaucaaggagaa

SEQ ID NO: 1480190 - RNA, 19 nt, Homo sapiens
  misc_RNA (1)...(19): siRNA sense strand
ccucuugucugccgaguuu

SEQ ID NO: 1480191 - RNA, 19 nt, Homo sapiens
  misc_RNA (1)...(19): siRNA sense strand
ucaggaaggucgugaaaca

SEQ ID NO: 1480192 - RNA, 19 nt, Homo sapiens
  misc_RNA (1)...(19): siRNA sense strand
ccaaacgacucuggaaguu

SEQ ID NO: 1480193 - RNA, 19 nt, Homo sapiens
  misc_RNA (1)...(19): siRNA sense strand
uggaacugcucaugaagua

SEQ ID NO: 1480194 - RNA, 19 nt, Homo sapiens
  misc_RNA (1)...(19): siRNA sense strand
uaaaggccuuggcagauga

SEQ ID NO: 1480195 - RNA, 19 nt, Homo sapiens
  misc_RNA (1)...(19): siRNA sense strand
gcagaucagccgggacuua

SEQ ID NO: 1480196 - RNA, 19 nt, Homo sapiens
  misc_RNA (1)...(19): siRNA sense strand
agaagcagcuggaaucauc

SEQ ID NO: 1480197 - RNA, 19 nt, Homo sapiens
  misc_RNA (1)...(19): siRNA sense strand
agaaagagaacuaccauga

SEQ ID NO: 1480198 - RNA, 19 nt, Homo sapiens
  misc_RNA (1)...(19): siRNA sense strand
gaccugaucgacuuugaua

SEQ ID NO: 1480199 - RNA, 19 nt, Homo sapiens
  misc_RNA (1)...(19): siRNA sense strand
ccaggaugcugagaacuuu

SEQ ID NO: 1480200 - RNA, 19 nt, Homo sapiens
  misc_RNA (1)...(19): siRNA sense strand
gcaggcuacccucauguua

SEQ ID NO: 1480201 - RNA, 19 nt, Homo sapiens
  misc_RNA (1)...(19): siRNA sense strand
ccaccacgcuugagcugaa

SEQ ID NO: 1480202 - RNA, 19 nt, Homo sapiens
  misc_RNA (1)...(19): siRNA sense strand
ugaaggacguggcggaaga

SEQ ID NO: 1480203 - RNA, 19 nt, Homo sapiens
  misc_RNA (1)...(19): siRNA sense strand
ccaaugaggcacagcagua

SEQ ID NO: 1480204 - RNA, 19 nt, Homo sapiens
  misc_RNA (1)...(19): siRNA sense strand
gugcaacuguucaugaaga

SEQ ID NO: 1480205 - RNA, 19 nt, Homo sapiens
  misc_RNA (1)...(19): siRNA sense strand
gagacaaccuggagcuaca

SEQ ID NO: 1480206 - RNA, 19 nt, Homo sapiens
  misc_RNA (1)...(19): siRNA sense strand
ggaaaccuauacucagaca

SEQ ID NO: 1480207 - RNA, 19 nt, Homo sapiens
  misc_RNA (1)...(19): siRNA sense strand
gaaguuugaggauuucuug

SEQ ID NO: 1480208 - RNA, 19 nt, Homo sapiens
  misc_RNA (1)...(19): siRNA sense strand
gagaugaagaccuugauga

SEQ ID NO: 1480209 - RNA, 19 nt, Homo sapiens
  misc_RNA (1)...(19): siRNA sense strand
agaaggagcagaucuauuc

SEQ ID NO: 1480210 - RNA, 19 nt, Homo sapiens
  misc_RNA (1)...(19): siRNA sense strand
gagcuggcccugagaaaug

SEQ ID NO: 1480211 - RNA, 19 nt, Homo sapiens
  misc_RNA (1)...(19): siRNA sense strand
ccacagaguuugaaaaugu

SEQ ID NO: 1480212 - RNA, 19 nt, Homo sapiens
  misc_RNA (1)...(19): siRNA sense strand
caugaaggguggcuagaga

SEQ ID NO: 1480213 - RNA, 19 nt, Homo sapiens
  misc_RNA (1)...(19): siRNA sense strand
uugaagaccugcuacagaa

SEQ ID NO: 1480214 - RNA, 19 nt, Homo sapiens
  misc_RNA (1)...(19): siRNA sense strand
uuugagaggucccggauaa

SEQ ID NO: 1480215 - RNA, 19 nt, Homo sapiens
  misc_RNA (1)...(19): siRNA sense strand
cucaggagcuggagaaaga

SEQ ID NO: 1480216 - RNA, 19 nt, Homo sapiens
  misc_RNA (1)...(19): siRNA sense strand
uggagaagcucaucaagag

SEQ ID NO: 1480217 - RNA, 19 nt, Homo sapiens
  misc_RNA (1)...(19): siRNA sense strand
gcugaggcguggcugauug

SEQ ID NO: 1480218 - RNA, 19 nt, Homo sapiens
  misc_RNA (1)...(19): siRNA sense strand
gaacugcucaugaaguauc

SEQ ID NO: 1480219 - RNA, 19 nt, Homo sapiens
  misc_RNA (1)...(19): siRNA sense strand
gggaacagaucaucagacu

SEQ ID NO: 1480220 - RNA, 19 nt, Homo sapiens
  misc_RNA (1)...(19): siRNA sense strand
gagccaagcugcagaucag

SEQ ID NO: 1480221 - RNA, 19 nt, Homo sapiens
  misc_RNA (1)...(19): siRNA sense strand
gggcucccaugacauugua

SEQ ID NO: 1480222 - RNA, 19 nt, Homo sapiens
  misc_RNA (1)...(19): siRNA sense strand
gcugaaagaacgccagauu

SEQ ID NO: 1480223 - RNA, 19 nt, Homo sapiens
  misc_RNA (1)...(19): siRNA sense strand
gacaauauacugcgccuau

SEQ ID NO: 1480224 - RNA, 19 nt, Homo sapiens
  misc_RNA (1)...(19): siRNA sense strand
gaccaucacuguccugaac

SEQ ID NO: 1480225 - RNA, 19 nt, Homo sapiens
  misc_RNA (1)...(19): siRNA sense strand
uuaaugcccugauacacaa

SEQ ID NO: 1480226 - RNA, 19 nt, Homo sapiens
  misc_RNA (1)...(19): siRNA sense strand
ccagggaugucuccucugu

SEQ ID NO: 1480227 - RNA, 19 nt, Homo sapiens
  misc_RNA (1)...(19): siRNA sense strand
caggauaacuuuggguaug

SEQ ID NO: 1480228 - RNA, 19 nt, Homo sapiens
  misc_RNA (1)...(19): siRNA sense strand
ccaacaaucagaaagugua

SEQ ID NO: 1480229 - RNA, 19 nt, Homo sapiens
  misc_RNA (1)...(19): siRNA sense strand
ggccuuuaaugcccugaua

SEQ ID NO: 1480230 - RNA, 19 nt, Homo sapiens
  misc_RNA (1)...(19): siRNA sense strand
ucaagaggcaugaggcuuu

SEQ ID NO: 1480231 - RNA, 19 nt, Homo sapiens
  misc_RNA (1)...(19): siRNA sense strand
ggaugucuccuaugaugaa

SEQ ID NO: 1480232 - RNA, 19 nt, Homo sapiens
  misc_RNA (1)...(19): siRNA sense strand
ggaggccucuguccuacug

SEQ ID NO: 1480233 - RNA, 19 nt, Homo sapiens
  misc_RNA (1)...(19): siRNA sense strand
ggccucaucuggaccauca

SEQ ID NO: 1480234 - RNA, 19 nt, Homo sapiens
  misc_RNA (1)...(19): siRNA sense strand
gauaaauuccgcuucuuca

SEQ ID NO: 1480235 - RNA, 19 nt, Homo sapiens
  misc_RNA (1)...(19): siRNA sense strand
agaaguggcuggccgagau

SEQ ID NO: 1480236 - RNA, 19 nt, Homo sapiens
  misc_RNA (1)...(19): siRNA sense strand
gcaagcacaaggccuuuga

SEQ ID NO: 1480237 - RNA, 19 nt, Homo sapiens
  misc_RNA (1)...(19): siRNA sense strand
ccagugugcucaucuuaca

SEQ ID NO: 1480238 - RNA, 19 nt, Homo sapiens
  misc_RNA (1)...(19): siRNA sense strand
agacugagaagaugauuga

SEQ ID NO: 1480239 - RNA, 19 nt, Homo sapiens
  misc_RNA (1)...(19): siRNA sense strand
aaacgacucuggaaguucu

SEQ ID NO: 1480240 - RNA, 19 nt, Homo sapiens
  misc_RNA (1)...(19): siRNA sense strand
gauaaaggccuuggcagau

SEQ ID NO: 1480241 - RNA, 19 nt, Homo sapiens
  misc_RNA (1)...(19): siRNA sense strand
cagaggagauccgcgagaa

SEQ ID NO: 1480242 - RNA, 19 nt, Homo sapiens
  misc_RNA (1)...(19): siRNA sense strand
ggauaaauuccgcuucuuc

SEQ ID NO: 1480243 - RNA, 19 nt, Homo sapiens
  misc_RNA (1)...(19): siRNA sense strand
gaaaccuucacaauaaaug

SEQ ID NO: 1480244 - RNA, 19 nt, Homo sapiens
  misc_RNA (1)...(19): siRNA sense strand
gaccagugugcucaucuua

SEQ ID NO: 1480245 - RNA, 19 nt, Homo sapiens
  misc_RNA (1)...(19): siRNA sense strand
cuggagagaugcugccaaa

SEQ ID NO: 1480246 - RNA, 19 nt, Homo sapiens
  misc_RNA (1)...(19): siRNA sense strand
ggaaauggggcaagacuuu

SEQ ID NO: 1480247 - RNA, 19 nt, Homo sapiens
  misc_RNA (1)...(19): siRNA sense strand
gagaaggugcagcugauug

SEQ ID NO: 1480248 - RNA, 19 nt, Homo sapiens
  misc_RNA (1)...(19): siRNA sense strand
caucaccgaucucuacaag

SEQ ID NO: 1480249 - RNA, 19 nt, Homo sapiens
  misc_RNA (1)...(19): siRNA sense strand
ggaugucuccucuguggaa

SEQ ID NO: 1480250 - RNA, 19 nt, Homo sapiens
  misc_RNA (1)...(19): siRNA sense strand
cagaggccauccagaacaa

SEQ ID NO: 1480251 - RNA, 19 nt, Homo sapiens
  misc_RNA (1)...(19): siRNA sense strand
gaagaagcagcuggaauca

SEQ ID NO: 1480252 - RNA, 19 nt, Homo sapiens
  misc_RNA (1)...(19): siRNA sense strand
ccaagugaaugugcggaaa

SEQ ID NO: 1480253 - RNA, 19 nt, Homo sapiens
  misc_RNA (1)...(19): siRNA sense strand
cacaauaaauggcuaaagc

SEQ ID NO: 1480254 - RNA, 19 nt, Homo sapiens
  misc_RNA (1)...(19): siRNA sense strand
caaccgggauaaggucuug

SEQ ID NO: 1480255 - RNA, 19 nt, Homo sapiens
  misc_RNA (1)...(19): siRNA sense strand
gagaaggagcagaucuauu

SEQ ID NO: 1480256 - RNA, 19 nt, Homo sapiens
  misc_RNA (1)...(19): siRNA sense strand
caacuguucaugaagaaga

SEQ ID NO: 1480257 - RNA, 19 nt, Homo sapiens
  misc_RNA (1)...(19): siRNA sense strand
gacaucggccacagaguuu

SEQ ID NO: 1480258 - RNA, 19 nt, Homo sapiens
  misc_RNA (1)...(19): siRNA sense strand
agagcuggcuucccaugaa

SEQ ID NO: 1480259 - RNA, 19 nt, Homo sapiens
  misc_RNA (1)...(19): siRNA sense strand
gcaugcagguaucaaggau

SEQ ID NO: 1480260 - RNA, 19 nt, Homo sapiens
  misc_RNA (1)...(19): siRNA sense strand
ugaagaccuugaugacuca

SEQ ID NO: 1480261 - RNA, 19 nt, Homo sapiens
  misc_RNA (1)...(19): siRNA sense strand
aggaagcccuggaccugua

SEQ ID NO: 1480262 - RNA, 19 nt, Homo sapiens
  misc_RNA (1)...(19): siRNA sense strand
acaaggccuuugaggauga

SEQ ID NO: 1480263 - RNA, 19 nt, Homo sapiens
  misc_RNA (1)...(19): siRNA sense strand
cagaaggacugcacacuaa

SEQ ID NO: 1480264 - RNA, 19 nt, Homo sapiens
  misc_RNA (1)...(19): siRNA sense strand
gagaaugacuacuacaaug

SEQ ID NO: 1480265 - RNA, 19 nt, Homo sapiens
  misc_RNA (1)...(19): siRNA sense strand
guggagagcugcuuccuuu

SEQ ID NO: 1480266 - RNA, 19 nt, Homo sapiens
  misc_RNA (1)...(19): siRNA sense strand
cacaguggcuucuuccuua

SEQ ID NO: 1480267 - RNA, 19 nt, Homo sapiens
  misc_RNA (1)...(19): siRNA sense strand
gaacauaccaggacaugga

SEQ ID NO: 1480268 - RNA, 19 nt, Homo sapiens
  misc_RNA (1)...(19): siRNA sense strand
acacuaaccuguaauuaug

SEQ ID NO: 1480269 - RNA, 19 nt, Homo sapiens
  misc_RNA (1)...(19): siRNA sense strand
gguaugaacugcaugaaca

SEQ ID NO: 1480270 - RNA, 19 nt, Homo sapiens
  misc_RNA (1)...(19): siRNA sense strand
gggaagacaugcaaagaca

SEQ ID NO: 1480271 - RNA, 19 nt, Homo sapiens
  misc_RNA (1)...(19): siRNA sense strand
gcaaggcgcugcagaaacg

SEQ ID NO: 1480272 - RNA, 19 nt, Homo sapiens
  misc_RNA (1)...(19): siRNA sense strand
ggacuaccagcaacucaua

SEQ ID NO: 1480273 - RNA, 19 nt, Homo sapiens
  misc_RNA (1)...(19): siRNA sense strand
gcacacuaaccuguaauua

SEQ ID NO: 1480274 - RNA, 19 nt, Homo sapiens
  misc_RNA (1)...(19): siRNA sense strand
caacuacccuggcgacuac

SEQ ID NO: 1480275 - RNA, 19 nt, Homo sapiens
  misc_RNA (1)...(19): siRNA sense strand
ggaagaggccucagacaca

SEQ ID NO: 1480276 - RNA, 19 nt, Homo sapiens
  misc_RNA (1)...(19): siRNA sense strand
aaggaggugucccacauua

SEQ ID NO: 1480277 - RNA, 19 nt, Homo sapiens
  misc_RNA (1)...(19): siRNA sense strand
gaagaggccucagacacau

SEQ ID NO: 1480278 - RNA, 19 nt, Homo sapiens
  misc_RNA (1)...(19): siRNA sense strand
gcucagagggcacagauga

SEQ ID NO: 1480279 - RNA, 19 nt, Homo sapiens
  misc_RNA (1)...(19): siRNA sense strand
ccacguccaucaccaccua

SEQ ID NO: 1480280 - RNA, 19 nt, Homo sapiens
  misc_RNA (1)...(19): siRNA sense strand
ugaacugcaugaacaaaga

SEQ ID NO: 1480281 - RNA, 19 nt, Homo sapiens
  misc_RNA (1)...(19): siRNA sense strand
ccaaggaggugucccacau

SEQ ID NO: 1480282 - RNA, 19 nt, Homo sapiens
  misc_RNA (1)...(19): siRNA sense strand
caagcaguguggagacauu

SEQ ID NO: 1480283 - RNA, 19 nt, Homo sapiens
  misc_RNA (1)...(19): siRNA sense strand
gaccacaucugcaucaacu

SEQ ID NO: 1480284 - RNA, 19 nt, Homo sapiens
  misc_RNA (1)...(19): siRNA sense strand
cagcagaguuugagaucga

SEQ ID NO: 1480285 - RNA, 19 nt, Homo sapiens
  misc_RNA (1)...(19): siRNA sense strand
ccacauuacagcagaguuu

SEQ ID NO: 1480286 - RNA, 19 nt, Homo sapiens
  misc_RNA (1)...(19): siRNA sense strand
ggagaaccaccaggaaauu

SEQ ID NO: 1480287 - RNA, 19 nt, Homo sapiens
  misc_RNA (1)...(19): siRNA sense strand
gagaaccaccaggaaauuu

SEQ ID NO: 1480288 - RNA, 19 nt, Homo sapiens
  misc_RNA (1)...(19): siRNA sense strand
gaccagggcugcgucaaca

SEQ ID NO: 1480289 - RNA, 19 nt, Homo sapiens
  misc_RNA (1)...(19): siRNA sense strand
caacgucacacacugcaaa

SEQ ID NO: 1480290 - RNA, 19 nt, Homo sapiens
  misc_RNA (1)...(19): siRNA sense strand
ccagaaggacugcacacua

SEQ ID NO: 1480291 - RNA, 19 nt, Homo sapiens
  misc_RNA (1)...(19): siRNA sense strand
ggacugcgaggcuaaagug

SEQ ID NO: 1480292 - RNA, 19 nt, Homo sapiens
  misc_RNA (1)...(19): siRNA sense strand
gaagacaugcaaagacauc

SEQ ID NO: 1480293 - RNA, 19 nt, Homo sapiens
  misc_RNA (1)...(19): siRNA sense strand
gcggcgagcuuggugacua

SEQ ID NO: 1480294 - RNA, 19 nt, Homo sapiens
  misc_RNA (1)...(19): siRNA sense strand
gcaccuaccagcccgaguu

SEQ ID NO: 1480295 - RNA, 19 nt, Homo sapiens
  misc_RNA (1)...(19): siRNA sense strand
ggaggugucccacauuaca

SEQ ID NO: 1480296 - RNA, 19 nt, Homo sapiens
  misc_RNA (1)...(19): siRNA sense strand
gccagugugugccauguau

SEQ ID NO: 1480297 - RNA, 19 nt, Homo sapiens
  misc_RNA (1)...(19): siRNA sense strand
ccaaugaggguaugaacug

SEQ ID NO: 1480298 - RNA, 19 nt, Homo sapiens
  misc_RNA (1)...(19): siRNA sense strand
cggcaaaggcuuccaagug

SEQ ID NO: 1480299 - RNA, 19 nt, Homo sapiens
  misc_RNA (1)...(19): siRNA sense strand
cacacuaaccuguaauuau

SEQ ID NO: 1480300 - RNA, 19 nt, Homo sapiens
  misc_RNA (1)...(19): siRNA sense strand
guccugagcugcggaguuc

SEQ ID NO: 1480301 - RNA, 19 nt, Homo sapiens
  misc_RNA (1)...(19): siRNA sense strand
gggcaaggcgcugcagaaa

SEQ ID NO: 1480302 - RNA, 19 nt, Homo sapiens
  misc_RNA (1)...(19): siRNA sense strand
cugcugcgcuccaaagugu

SEQ ID NO: 1480303 - RNA, 19 nt, Homo sapiens
  misc_RNA (1)...(19): siRNA sense strand
caaguacacagcccaggaa

SEQ ID NO: 1480304 - RNA, 19 nt, Homo sapiens
  misc_RNA (1)...(19): siRNA sense strand
ggccagaaccacugcauca

SEQ ID NO: 1480305 - RNA, 19 nt, Homo sapiens
  misc_RNA (1)...(19): siRNA sense strand
gcgcccaaguccuacaaau

SEQ ID NO: 1480306 - RNA, 19 nt, Homo sapiens
  misc_RNA (1)...(19): siRNA sense strand
gcauccaccgcuccaauga

SEQ ID NO: 1480307 - RNA, 19 nt, Homo sapiens
  misc_RNA (1)...(19): siRNA sense strand
ccacgguccuucaucaaac

SEQ ID NO: 1480308 - RNA, 19 nt, Homo sapiens
  misc_RNA (1)...(19): siRNA sense strand
agacgugcgcagucaauaa

SEQ ID NO: 1480309 - RNA, 19 nt, Homo sapiens
  misc_RNA (1)...(19): siRNA sense strand
guggacgagugcagcauga

SEQ ID NO: 1480310 - RNA, 19 nt, Homo sapiens
  misc_RNA (1)...(19): siRNA sense strand
gaccacuucugccgcaaca

SEQ ID NO: 1480311 - RNA, 19 nt, Homo sapiens
  misc_RNA (1)...(19): siRNA sense strand
gaggguaugaacugcauga

SEQ ID NO: 1480312 - RNA, 19 nt, Homo sapiens
  misc_RNA (1)...(19): siRNA sense strand
gaauguggaggccaguguu

SEQ ID NO: 1480313 - RNA, 19 nt, Homo sapiens
  misc_RNA (1)...(19): siRNA sense strand
ucaagacccugcgcaaguc

SEQ ID NO: 1480314 - RNA, 19 nt, Homo sapiens
  misc_RNA (1)...(19): siRNA sense strand
acgagugccuggucaacaa

SEQ ID NO: 1480315 - RNA, 19 nt, Homo sapiens
  misc_RNA (1)...(19): siRNA sense strand
gagacgugcgcagucaaua

SEQ ID NO: 1480316 - RNA, 19 nt, Homo sapiens
  misc_RNA (1)...(19): siRNA sense strand
ucaaacugcugcgcuccaa

SEQ ID NO: 1480317 - RNA, 19 nt, Homo sapiens
  misc_RNA (1)...(19): siRNA sense strand
ugagaaugacuacuacaau

SEQ ID NO: 1480318 - RNA, 19 nt, Homo sapiens
  misc_RNA (1)...(19): siRNA sense strand
gcgauguucuggucaugag

SEQ ID NO: 1480319 - RNA, 19 nt, Homo sapiens
  misc_RNA (1)...(19): siRNA sense strand
ccaacuacccuggcgacua

SEQ ID NO: 1480320 - RNA, 19 nt, Homo sapiens
  misc_RNA (1)...(19): siRNA sense strand
caaggaggugucccacauu

SEQ ID NO: 1480321 - RNA, 19 nt, Homo sapiens
  misc_RNA (1)...(19): siRNA sense strand
ccacugccaugugacuuuc

SEQ ID NO: 1480322 - RNA, 19 nt, Homo sapiens
  misc_RNA (1)...(19): siRNA sense strand
ggacgggaagacaugcaaa

SEQ ID NO: 1480323 - RNA, 19 nt, Homo sapiens
  misc_RNA (1)...(19): siRNA sense strand
ggaauguggaggccagugu

SEQ ID NO: 1480324 - RNA, 19 nt, Homo sapiens
  misc_RNA (1)...(19): siRNA sense strand
ugacuacaccggcuacauc

SEQ ID NO: 1480325 - RNA, 19 nt, Homo sapiens
  misc_RNA (1)...(19): siRNA sense strand
gugagaaugacuacuacaa

SEQ ID NO: 1480326 - RNA, 19 nt, Homo sapiens
  misc_RNA (1)...(19): siRNA sense strand
guacacagcccaggaaucc

SEQ ID NO: 1480327 - RNA, 19 nt, Homo sapiens
  misc_RNA (1)...(19): siRNA sense strand
gcccaaguccuacaaaugc

SEQ ID NO: 1480328 - RNA, 19 nt, Homo sapiens
  misc_RNA (1)...(19): siRNA sense strand
caacaccagcacagacuuc

SEQ ID NO: 1480329 - RNA, 19 nt, Homo sapiens
  misc_RNA (1)...(19): siRNA sense strand
cuggaccacugccauguga

SEQ ID NO: 1480330 - RNA, 19 nt, Homo sapiens
  misc_RNA (1)...(19): siRNA sense strand
ucgugacccucaaguguga

SEQ ID NO: 1480331 - RNA, 19 nt, Homo sapiens
  misc_RNA (1)...(19): siRNA sense strand
ugaaagacaagaagcugau

SEQ ID NO: 1480332 - RNA, 19 nt, Homo sapiens
  misc_RNA (1)...(19): siRNA sense strand
gcacagaugacugccacau

SEQ ID NO: 1480333 - RNA, 19 nt, Homo sapiens
  misc_RNA (1)...(19): siRNA sense strand
ggaugagugcggcgauguu

SEQ ID NO: 1480334 - RNA, 19 nt, Homo sapiens
  misc_RNA (1)...(19): siRNA sense strand
aagugugacuccuccaaga

SEQ ID NO: 1480335 - RNA, 19 nt, Homo sapiens
  misc_RNA (1)...(19): siRNA sense strand
gacauugacgagugugaga

SEQ ID NO: 1480336 - RNA, 19 nt, Homo sapiens
  misc_RNA (1)...(19): siRNA sense strand
guucuggucaugaggaaga

SEQ ID NO: 1480337 - RNA, 19 nt, Homo sapiens
  misc_RNA (1)...(19): siRNA sense strand
acugcacacuaaccuguaa

SEQ ID NO: 1480338 - RNA, 19 nt, Homo sapiens
  misc_RNA (1)...(19): siRNA sense strand
acacagcccaggaauccaa

SEQ ID NO: 1480339 - RNA, 19 nt, Homo sapiens
  misc_RNA (1)...(19): siRNA sense strand
ucaccuacgaugaggacua

SEQ ID NO: 1480340 - RNA, 19 nt, Homo sapiens
  misc_RNA (1)...(19): siRNA sense strand
gcuuccaagugcccuaugu

SEQ ID NO: 1480341 - RNA, 19 nt, Homo sapiens
  misc_RNA (1)...(19): siRNA sense strand
cugcuuugauggcuucaug

SEQ ID NO: 1480342 - RNA, 19 nt, Homo sapiens
  misc_RNA (1)...(19): siRNA sense strand
gaaagacaagaagcugauc

SEQ ID NO: 1480343 - RNA, 19 nt, Homo sapiens
  misc_RNA (1)...(19): siRNA sense strand
cggagaaccaccaggaaau

SEQ ID NO: 1480344 - RNA, 19 nt, Homo sapiens
  misc_RNA (1)...(19): siRNA sense strand
gaaggcaacagcggcaaag

SEQ ID NO: 1480345 - RNA, 19 nt, Homo sapiens
  misc_RNA (1)...(19): siRNA sense strand
gcaacaccagcacagacuu

SEQ ID NO: 1480346 - RNA, 19 nt, Homo sapiens
  misc_RNA (1)...(19): siRNA sense strand
agugugagaaugacuacua

SEQ ID NO: 1480347 - RNA, 19 nt, Homo sapiens
  misc_RNA (1)...(19): siRNA sense strand
gccggcagcaguucuaugu

SEQ ID NO: 1480348 - RNA, 19 nt, Homo sapiens
  misc_RNA (1)...(19): siRNA sense strand
gaucgagacaaagauggaa

SEQ ID NO: 1480349 - RNA, 19 nt, Homo sapiens
  misc_RNA (1)...(19): siRNA sense strand
ugagaucgagacaaagaug

SEQ ID NO: 1480350 - RNA, 19 nt, Homo sapiens
  misc_RNA (1)...(19): siRNA sense strand
ugacuuucgugacccucaa

SEQ ID NO: 1480351 - RNA, 19 nt, Homo sapiens
  misc_RNA (1)...(19): siRNA sense strand
gcaacaccguaggcagcuu

SEQ ID NO: 1480352 - RNA, 19 nt, Homo sapiens
  misc_RNA (1)...(19): siRNA sense strand
ggucagucgacguggauga

SEQ ID NO: 1480353 - RNA, 19 nt, Homo sapiens
  misc_RNA (1)...(19): siRNA sense strand
ccaggaauccaaggagaug

SEQ ID NO: 1480354 - RNA, 19 nt, Homo sapiens
  misc_RNA (1)...(19): siRNA sense strand
uggaaggccagcucaguug

SEQ ID NO: 1480355 - RNA, 19 nt, Homo sapiens
  misc_RNA (1)...(19): siRNA sense strand
ggcaagcaguguggagaca

SEQ ID NO: 1480356 - RNA, 19 nt, Homo sapiens
  misc_RNA (1)...(19): siRNA sense strand
gagagcugcuuccuuuccu

SEQ ID NO: 1480357 - RNA, 19 nt, Homo sapiens
  misc_RNA (1)...(19): siRNA sense strand
guaugaacugcaugaacaa

SEQ ID NO: 1480358 - RNA, 19 nt, Homo sapiens
  misc_RNA (1)...(19): siRNA sense strand
gaugagugcggcgauguuc

SEQ ID NO: 1480359 - RNA, 19 nt, Homo sapiens
  misc_RNA (1)...(19): siRNA sense strand
gugccagacucggaaaaua

SEQ ID NO: 1480360 - RNA, 19 nt, Homo sapiens
  misc_RNA (1)...(19): siRNA sense strand
cguggucccugagaucuuc

SEQ ID NO: 1480361 - RNA, 19 nt, Homo sapiens
  misc_RNA (1)...(19): siRNA sense strand
gaaccaccaggaaauuuug

SEQ ID NO: 1480362 - RNA, 19 nt, Homo sapiens
  misc_RNA (1)...(19): siRNA sense strand
ucggagaaccaccaggaaa

SEQ ID NO: 1480363 - RNA, 19 nt, Homo sapiens
  misc_RNA (1)...(19): siRNA sense strand
gcacaacccuggagacagu

SEQ ID NO: 1480364 - RNA, 19 nt, Homo sapiens
  misc_RNA (1)...(19): siRNA sense strand
acauggagcuucuguguga

SEQ ID NO: 1480365 - RNA, 19 nt, Homo sapiens
  misc_RNA (1)...(19): siRNA sense strand
ccaaagccguggccaauca

SEQ ID NO: 1480366 - RNA, 19 nt, Homo sapiens
  misc_RNA (1)...(19): siRNA sense strand
gaagaaggcaucuccaagu

SEQ ID NO: 1480367 - RNA, 19 nt, Homo sapiens
  misc_RNA (1)...(19): siRNA sense strand
ccaauggucucccgauauc

SEQ ID NO: 1480368 - RNA, 19 nt, Homo sapiens
  misc_RNA (1)...(19): siRNA sense strand
ggacauauucacugacaug

SEQ ID NO: 1480369 - RNA, 19 nt, Homo sapiens
  misc_RNA (1)...(19): siRNA sense strand
caccaaguaucaucaguug

SEQ ID NO: 1480370 - RNA, 19 nt, Homo sapiens
  misc_RNA (1)...(19): siRNA sense strand
gguggugauugcagugaua

SEQ ID NO: 1480371 - RNA, 19 nt, Homo sapiens
  misc_RNA (1)...(19): siRNA sense strand
gcccaauggucucccgaua

SEQ ID NO: 1480372 - RNA, 19 nt, Homo sapiens
  misc_RNA (1)...(19): siRNA sense strand
ucacaaaguucggcccauu

SEQ ID NO: 1480373 - RNA, 19 nt, Homo sapiens
  misc_RNA (1)...(19): siRNA sense strand
ggagaugugcuacaagaug

SEQ ID NO: 1480374 - RNA, 19 nt, Homo sapiens
  misc_RNA (1)...(19): siRNA sense strand
aaacuggaccucaucacua

SEQ ID NO: 1480375 - RNA, 19 nt, Homo sapiens
  misc_RNA (1)...(19): siRNA sense strand
gcuacaagauggaccucaa

SEQ ID NO: 1480376 - RNA, 19 nt, Homo sapiens
  misc_RNA (1)...(19): siRNA sense strand
ggagaaguucguccucauu

SEQ ID NO: 1480377 - RNA, 19 nt, Homo sapiens
  misc_RNA (1)...(19): siRNA sense strand
gagaaguucguccucauug

SEQ ID NO: 1480378 - RNA, 19 nt, Homo sapiens
  misc_RNA (1)...(19): siRNA sense strand
ggacaaggccaagaacauc

SEQ ID NO: 1480379 - RNA, 19 nt, Homo sapiens
  misc_RNA (1)...(19): siRNA sense strand
ugauggacauauucacuga

SEQ ID NO: 1480380 - RNA, 19 nt, Homo sapiens
  misc_RNA (1)...(19): siRNA sense strand
gcccucaaccauaauagua

SEQ ID NO: 1480381 - RNA, 19 nt, Homo sapiens
  misc_RNA (1)...(19): siRNA sense strand
gggagcaccugccgaacau

SEQ ID NO: 1480382 - RNA, 19 nt, Homo sapiens
  misc_RNA (1)...(19): siRNA sense strand
guacaacaaguccaaguuc

SEQ ID NO: 1480383 - RNA, 19 nt, Homo sapiens
  misc_RNA (1)...(19): siRNA sense strand
aacuggaccucaucacuaa

SEQ ID NO: 1480384 - RNA, 19 nt, Homo sapiens
  misc_RNA (1)...(19): siRNA sense strand
ggugguggcuguggugaug

SEQ ID NO: 1480385 - RNA, 19 nt, Homo sapiens
  misc_RNA (1)...(19): siRNA sense strand
agaaguucguccucauuga

SEQ ID NO: 1480386 - RNA, 19 nt, Homo sapiens
  misc_RNA (1)...(19): siRNA sense strand
ucacugacauggagcuucu

SEQ ID NO: 1480387 - RNA, 19 nt, Homo sapiens
  misc_RNA (1)...(19): siRNA sense strand
cuggagaugugcuacaaga

SEQ ID NO: 1480388 - RNA, 19 nt, Homo sapiens
  misc_RNA (1)...(19): siRNA sense strand
ccaaguaucaucaguugca

SEQ ID NO: 1480389 - RNA, 19 nt, Homo sapiens
  misc_RNA (1)...(19): siRNA sense strand
ugacauggagcuucugugu

SEQ ID NO: 1480390 - RNA, 19 nt, Homo sapiens
  misc_RNA (1)...(19): siRNA sense strand
uacaacaaguccaaguuca

SEQ ID NO: 1480391 - RNA, 19 nt, Homo sapiens
  misc_RNA (1)...(19): siRNA sense strand
aagaaggcaucuccaaguc

SEQ ID NO: 1480392 - RNA, 19 nt, Homo sapiens
  misc_RNA (1)...(19): siRNA sense strand
gaccugcugcgcuuccuuu

SEQ ID NO: 1480393 - RNA, 19 nt, Homo sapiens
  misc_RNA (1)...(19): siRNA sense strand
caacaaguccaaguucaag

SEQ ID NO: 1480394 - RNA, 19 nt, Homo sapiens
  misc_RNA (1)...(19): siRNA sense strand
ucaauggugguaacaguga

SEQ ID NO: 1480395 - RNA, 19 nt, Homo sapiens
  misc_RNA (1)...(19): siRNA sense strand
cagaccuccugaugcagua

SEQ ID NO: 1480396 - RNA, 19 nt, Homo sapiens
  misc_RNA (1)...(19): siRNA sense strand
gcaccagccucagcagcau

SEQ ID NO: 1480397 - RNA, 19 nt, Homo sapiens
  misc_RNA (1)...(19): siRNA sense strand
gacaaggccaagaacauca

SEQ ID NO: 1480398 - RNA, 19 nt, Homo sapiens
  misc_RNA (1)...(19): siRNA sense strand
ggcguggugucccugugua

SEQ ID NO: 1480399 - RNA, 19 nt, Homo sapiens
  misc_RNA (1)...(19): siRNA sense strand
ucacuaaguacaacaaguc

SEQ ID NO: 1480400 - RNA, 19 nt, Homo sapiens
  misc_RNA (1)...(19): siRNA sense strand
ccgcaucguggaagacuuu

SEQ ID NO: 1480401 - RNA, 19 nt, Homo sapiens
  misc_RNA (1)...(19): siRNA sense strand
ucucaauggugguaacagu

SEQ ID NO: 1480402 - RNA, 19 nt, Homo sapiens
  misc_RNA (1)...(19): siRNA sense strand
cagcuggaccucaucacaa

SEQ ID NO: 1480403 - RNA, 19 nt, Homo sapiens
  misc_RNA (1)...(19): siRNA sense strand
gggacaaggccaagaacau

SEQ ID NO: 1480404 - RNA, 19 nt, Homo sapiens
  misc_RNA (1)...(19): siRNA sense strand
uggaggagaaggagaagaa

SEQ ID NO: 1480405 - RNA, 19 nt, Homo sapiens
  misc_RNA (1)...(19): siRNA sense strand
uggagacaguggaggagaa

SEQ ID NO: 1480406 - RNA, 19 nt, Homo sapiens
  misc_RNA (1)...(19): siRNA sense strand
gaaguucguccucauugac

SEQ ID NO: 1480407 - RNA, 19 nt, Homo sapiens
  misc_RNA (1)...(19): siRNA sense strand
ggaguuccgcugucuguac

SEQ ID NO: 1480408 - RNA, 19 nt, Homo sapiens
  misc_RNA (1)...(19): siRNA sense strand
ccagcuggaucuccuuguc

SEQ ID NO: 1480409 - RNA, 19 nt, Homo sapiens
  misc_RNA (1)...(19): siRNA sense strand
cuaaguacaacaaguccaa

SEQ ID NO: 1480410 - RNA, 19 nt, Homo sapiens
  misc_RNA (1)...(19): siRNA sense strand
caaggguggccaucucaau

SEQ ID NO: 1480411 - RNA, 19 nt, Homo sapiens
  misc_RNA (1)...(19): siRNA sense strand
ucaccaaguaucaucaguu

SEQ ID NO: 1480412 - RNA, 19 nt, Homo sapiens
  misc_RNA (1)...(19): siRNA sense strand
gaggcugucccuaaaccaa

SEQ ID NO: 1480413 - RNA, 19 nt, Homo sapiens
  misc_RNA (1)...(19): siRNA sense strand
ggaccucaucaccaaguau

SEQ ID NO: 1480414 - RNA, 19 nt, Homo sapiens
  misc_RNA (1)...(19): siRNA sense strand
ccagacgggcaccagauga

SEQ ID NO: 1480415 - RNA, 19 nt, Homo sapiens
  misc_RNA (1)...(19): siRNA sense strand
caaacuggaccucaucacu

SEQ ID NO: 1480416 - RNA, 19 nt, Homo sapiens
  misc_RNA (1)...(19): siRNA sense strand
agcuggaccucaucacaaa

SEQ ID NO: 1480417 - RNA, 19 nt, Homo sapiens
  misc_RNA (1)...(19): siRNA sense strand
ccagaggacaggagguugu

SEQ ID NO: 1480418 - RNA, 19 nt, Homo sapiens
  misc_RNA (1)...(19): siRNA sense strand
acaacaaguccaaguucaa

SEQ ID NO: 1480419 - RNA, 19 nt, Homo sapiens
  misc_RNA (1)...(19): siRNA sense strand
ggaccucaucacaaaguuc

SEQ ID NO: 1480420 - RNA, 19 nt, Homo sapiens
  misc_RNA (1)...(19): siRNA sense strand
gcuucugugugaccucaug

SEQ ID NO: 1480421 - RNA, 19 nt, Homo sapiens
  misc_RNA (1)...(19): siRNA sense strand
gaccucaucacuaaguaca

SEQ ID NO: 1480422 - RNA, 19 nt, Homo sapiens
  misc_RNA (1)...(19): siRNA sense strand
acagcaaacuggaccucau

SEQ ID NO: 1480423 - RNA, 19 nt, Homo sapiens
  misc_RNA (1)...(19): siRNA sense strand
gggccaaucucggcaagcu

SEQ ID NO: 1480424 - RNA, 19 nt, Homo sapiens
  misc_RNA (1)...(19): siRNA sense strand
gcgggcaguuacagcuuca

SEQ ID NO: 1480425 - RNA, 19 nt, Homo sapiens
  misc_RNA (1)...(19): siRNA sense strand
agagggacaaggccaagaa

SEQ ID NO: 1480426 - RNA, 19 nt, Homo sapiens
  misc_RNA (1)...(19): siRNA sense strand
gaccucaucaccaaguauc

SEQ ID NO: 1480427 - RNA, 19 nt, Homo sapiens
  misc_RNA (1)...(19): siRNA sense strand
gaaagacugugauuuagaa

SEQ ID NO: 1480428 - RNA, 19 nt, Homo sapiens
  misc_RNA (1)...(19): siRNA sense strand
gccaugaacugacauauga

SEQ ID NO: 1480429 - RNA, 19 nt, Homo sapiens
  misc_RNA (1)...(19): siRNA sense strand
gcagagaugcugaugauaa

SEQ ID NO: 1480430 - RNA, 19 nt, Homo sapiens
  misc_RNA (1)...(19): siRNA sense strand
gggaaagaauuuauggauu

SEQ ID NO: 1480431 - RNA, 19 nt, Homo sapiens
  misc_RNA (1)...(19): siRNA sense strand
gaugauaaacacaagcuua

SEQ ID NO: 1480432 - RNA, 19 nt, Homo sapiens
  misc_RNA (1)...(19): siRNA sense strand
gaagaagaauccacaucau

SEQ ID NO: 1480433 - RNA, 19 nt, Homo sapiens
  misc_RNA (1)...(19): siRNA sense strand
ucaagaagcauuagaagaa

SEQ ID NO: 1480434 - RNA, 19 nt, Homo sapiens
  misc_RNA (1)...(19): siRNA sense strand
cagagaugcugaugauaaa

SEQ ID NO: 1480435 - RNA, 19 nt, Homo sapiens
  misc_RNA (1)...(19): siRNA sense strand
ucugaaagacugugauuua

SEQ ID NO: 1480436 - RNA, 19 nt, Homo sapiens
  misc_RNA (1)...(19): siRNA sense strand
cgaagaaugugggaaagaa

SEQ ID NO: 1480437 - RNA, 19 nt, Homo sapiens
  misc_RNA (1)...(19): siRNA sense strand
gggagacgauuguucauca

SEQ ID NO: 1480438 - RNA, 19 nt, Homo sapiens
  misc_RNA (1)...(19): siRNA sense strand
gaugacauguaccguaaga

SEQ ID NO: 1480439 - RNA, 19 nt, Homo sapiens
  misc_RNA (1)...(19): siRNA sense strand
aagaugacauguaccguaa

SEQ ID NO: 1480440 - RNA, 19 nt, Homo sapiens
  misc_RNA (1)...(19): siRNA sense strand
cguaagacuuguacuaugu

SEQ ID NO: 1480441 - RNA, 19 nt, Homo sapiens
  misc_RNA (1)...(19): siRNA sense strand
ugugauaacugcagagaug

SEQ ID NO: 1480442 - RNA, 19 nt, Homo sapiens
  misc_RNA (1)...(19): siRNA sense strand
gaccuguuauggaauuuga

SEQ ID NO: 1480443 - RNA, 19 nt, Homo sapiens
  misc_RNA (1)...(19): siRNA sense strand
gagccaccucuuaaauuua

SEQ ID NO: 1480444 - RNA, 19 nt, Homo sapiens
  misc_RNA (1)...(19): siRNA sense strand
agaagaagaagaacagaaa

SEQ ID NO: 1480445 - RNA, 19 nt, Homo sapiens
  misc_RNA (1)...(19): siRNA sense strand
ccuagaagaugacauguac

SEQ ID NO: 1480446 - RNA, 19 nt, Homo sapiens
  misc_RNA (1)...(19): siRNA sense strand
ggaggcauggcuaauguaa

SEQ ID NO: 1480447 - RNA, 19 nt, Homo sapiens
  misc_RNA (1)...(19): siRNA sense strand
gaaugugggaaagaauuua

SEQ ID NO: 1480448 - RNA, 19 nt, Homo sapiens
  misc_RNA (1)...(19): siRNA sense strand
ggaggaggcuucauuuuag

SEQ ID NO: 1480449 - RNA, 19 nt, Homo sapiens
  misc_RNA (1)...(19): siRNA sense strand
ggaagaagaagaagaacag

SEQ ID NO: 1480450 - RNA, 19 nt, Homo sapiens
  misc_RNA (1)...(19): siRNA sense strand
ggagacgauuguucaucaa

SEQ ID NO: 1480451 - RNA, 19 nt, Homo sapiens
  misc_RNA (1)...(19): siRNA sense strand
aacacaagcuuauaaccaa

SEQ ID NO: 1480452 - RNA, 19 nt, Homo sapiens
  misc_RNA (1)...(19): siRNA sense strand
caagaagcauuagaagaag

SEQ ID NO: 1480453 - RNA, 19 nt, Homo sapiens
  misc_RNA (1)...(19): siRNA sense strand
ugaagaagaauccacauca

SEQ ID NO: 1480454 - RNA, 19 nt, Homo sapiens
  misc_RNA (1)...(19): siRNA sense strand
cugcagagaugcugaugau

SEQ ID NO: 1480455 - RNA, 19 nt, Homo sapiens
  misc_RNA (1)...(19): siRNA sense strand
gaagaaaaccuagaagaug

SEQ ID NO: 1480456 - RNA, 19 nt, Homo sapiens
  misc_RNA (1)...(19): siRNA sense strand
gaagaagaacagaaaauug

SEQ ID NO: 1480457 - RNA, 19 nt, Homo sapiens
  misc_RNA (1)...(19): siRNA sense strand
aaaagcagccccaaagaua

SEQ ID NO: 1480458 - RNA, 19 nt, Homo sapiens
  misc_RNA (1)...(19): siRNA sense strand
acacaagcuuauaaccaaa

SEQ ID NO: 1480459 - RNA, 19 nt, Homo sapiens
  misc_RNA (1)...(19): siRNA sense strand
gaagaaugugggaaagaau

SEQ ID NO: 1480460 - RNA, 19 nt, Homo sapiens
  misc_RNA (1)...(19): siRNA sense strand
uguaauaugcgaagaaugu

SEQ ID NO: 1480461 - RNA, 19 nt, Homo sapiens
  misc_RNA (1)...(19): siRNA sense strand
ugaaagacugugauuuaga

SEQ ID NO: 1480462 - RNA, 19 nt, Homo sapiens
  misc_RNA (1)...(19): siRNA sense strand
agaggaagaagaagaagaa

SEQ ID NO: 1480463 - RNA, 19 nt, Homo sapiens
  misc_RNA (1)...(19): siRNA sense strand
aagaaaaccuagaagauga

SEQ ID NO: 1480464 - RNA, 19 nt, Homo sapiens
  misc_RNA (1)...(19): siRNA sense strand
gauuugccaacuugugaua

SEQ ID NO: 1480465 - RNA, 19 nt, Homo sapiens
  misc_RNA (1)...(19): siRNA sense strand
aaaccuagaagaugacaug

SEQ ID NO: 1480466 - RNA, 19 nt, Homo sapiens
  misc_RNA (1)...(19): siRNA sense strand
aaagggagacgauuguuca

SEQ ID NO: 1480467 - RNA, 19 nt, Homo sapiens
  misc_RNA (1)...(19): siRNA sense strand
aagaagaauccacaucauu

SEQ ID NO: 1480468 - RNA, 19 nt, Homo sapiens
  misc_RNA (1)...(19): siRNA sense strand
agaagaggaagaagaagaa

SEQ ID NO: 1480469 - RNA, 19 nt, Homo sapiens
  misc_RNA (1)...(19): siRNA sense strand
gaguauggaccagaagaaa

SEQ ID NO: 1480470 - RNA, 19 nt, Homo sapiens
  misc_RNA (1)...(19): siRNA sense strand
gagaugcugaugauaaaca

SEQ ID NO: 1480471 - RNA, 19 nt, Homo sapiens
  misc_RNA (1)...(19): siRNA sense strand
uaugaaccacuuugauuug

SEQ ID NO: 1480472 - RNA, 19 nt, Homo sapiens
  misc_RNA (1)...(19): siRNA sense strand
ccguaagacuuguacuaug

SEQ ID NO: 1480473 - RNA, 19 nt, Homo sapiens
  misc_RNA (1)...(19): siRNA sense strand
aaaggaaguccgacaggaa

SEQ ID NO: 1480474 - RNA, 19 nt, Homo sapiens
  misc_RNA (1)...(19): siRNA sense strand
acaauggggugauaugaaa

SEQ ID NO: 1480475 - RNA, 19 nt, Homo sapiens
  misc_RNA (1)...(19): siRNA sense strand
uagaagaggaagaagaaga

SEQ ID NO: 1480476 - RNA, 19 nt, Homo sapiens
  misc_RNA (1)...(19): siRNA sense strand
gaagaagaagaagaacaga

SEQ ID NO: 1480477 - RNA, 19 nt, Homo sapiens
  misc_RNA (1)...(19): siRNA sense strand
agccaccucuuaaauuuau

SEQ ID NO: 1480478 - RNA, 19 nt, Homo sapiens
  misc_RNA (1)...(19): siRNA sense strand
cuuaugaaccacuuugauu

SEQ ID NO: 1480479 - RNA, 19 nt, Homo sapiens
  misc_RNA (1)...(19): siRNA sense strand
caugaacugacauaugaaa

SEQ ID NO: 1480480 - RNA, 19 nt, Homo sapiens
  misc_RNA (1)...(19): siRNA sense strand
cugaaagacugugauuuag

SEQ ID NO: 1480481 - RNA, 19 nt, Homo sapiens
  misc_RNA (1)...(19): siRNA sense strand
aaacacaagcuuauaacca

SEQ ID NO: 1480482 - RNA, 19 nt, Homo sapiens
  misc_RNA (1)...(19): siRNA sense strand
aggcauggcuaauguaaaa

SEQ ID NO: 1480483 - RNA, 19 nt, Homo sapiens
  misc_RNA (1)...(19): siRNA sense strand
agaaugugggaaagaauuu

SEQ ID NO: 1480484 - RNA, 19 nt, Homo sapiens
  misc_RNA (1)...(19): siRNA sense strand
ggccaugaacugacauaug

SEQ ID NO: 1480485 - RNA, 19 nt, Homo sapiens
  misc_RNA (1)...(19): siRNA sense strand
uaagacuuguacuaugugu

SEQ ID NO: 1480486 - RNA, 19 nt, Homo sapiens
  misc_RNA (1)...(19): siRNA sense strand
uaagaagcagcguguggaa

SEQ ID NO: 1480487 - RNA, 19 nt, Homo sapiens
  misc_RNA (1)...(19): siRNA sense strand
gaacagaaaauuggaaaag

SEQ ID NO: 1480488 - RNA, 19 nt, Homo sapiens
  misc_RNA (1)...(19): siRNA sense strand
acaggaggaggcuucauuu

SEQ ID NO: 1480489 - RNA, 19 nt, Homo sapiens
  misc_RNA (1)...(19): siRNA sense strand
ggguagucaagaagcauua

SEQ ID NO: 1480490 - RNA, 19 nt, Homo sapiens
  misc_RNA (1)...(19): siRNA sense strand
cacaggaggaggcuucauu

SEQ ID NO: 1480491 - RNA, 19 nt, Homo sapiens
  misc_RNA (1)...(19): siRNA sense strand
caaaacagaggcaaaacaa

SEQ ID NO: 1480492 - RNA, 19 nt, Homo sapiens
  misc_RNA (1)...(19): siRNA sense strand
aagaaugugggaaagaauu

SEQ ID NO: 1480493 - RNA, 19 nt, Homo sapiens
  misc_RNA (1)...(19): siRNA sense strand
acauguaccguaagacuug

SEQ ID NO: 1480494 - RNA, 19 nt, Homo sapiens
  misc_RNA (1)...(19): siRNA sense strand
acaugaguauggaccagaa

SEQ ID NO: 1480495 - RNA, 19 nt, Homo sapiens
  misc_RNA (1)...(19): siRNA sense strand
gcgaagaaugugggaaaga

SEQ ID NO: 1480496 - RNA, 19 nt, Homo sapiens
  misc_RNA (1)...(19): siRNA sense strand
uuuagaagaggaagaagaa

SEQ ID NO: 1480497 - RNA, 19 nt, Homo sapiens
  misc_RNA (1)...(19): siRNA sense strand
gucaagaagcauuagaaga

SEQ ID NO: 1480498 - RNA, 19 nt, Homo sapiens
  misc_RNA (1)...(19): siRNA sense strand
gaagaagaagaacagaaaa

SEQ ID NO: 1480499 - RNA, 19 nt, Homo sapiens
  misc_RNA (1)...(19): siRNA sense strand
cuggaggcauggcuaaugu

SEQ ID NO: 1480500 - RNA, 19 nt, Homo sapiens
  misc_RNA (1)...(19): siRNA sense strand
uaccguaagacuuguacua

SEQ ID NO: 1480501 - RNA, 19 nt, Homo sapiens
  misc_RNA (1)...(19): siRNA sense strand
gacauguaccguaagacuu

SEQ ID NO: 1480502 - RNA, 19 nt, Homo sapiens
  misc_RNA (1)...(19): siRNA sense strand
aaacagaggcaaaacaaga

SEQ ID NO: 1480503 - RNA, 19 nt, Homo sapiens
  misc_RNA (1)...(19): siRNA sense strand
ggaaaagggagacgauugu

SEQ ID NO: 1480504 - RNA, 19 nt, Homo sapiens
  misc_RNA (1)...(19): siRNA sense strand
aaggaaguccgacaggaaa

SEQ ID NO: 1480505 - RNA, 19 nt, Homo sapiens
  misc_RNA (1)...(19): siRNA sense strand
ggggugauaugaaacucua

SEQ ID NO: 1480506 - RNA, 19 nt, Homo sapiens
  misc_RNA (1)...(19): siRNA sense strand
gaggaggcuucauuuuaga

SEQ ID NO: 1480507 - RNA, 19 nt, Homo sapiens
  misc_RNA (1)...(19): siRNA sense strand
gaggcauggcuaauguaaa

SEQ ID NO: 1480508 - RNA, 19 nt, Homo sapiens
  misc_RNA (1)...(19): siRNA sense strand
uagaagaagcaaaggaagu

SEQ ID NO: 1480509 - RNA, 19 nt, Homo sapiens
  misc_RNA (1)...(19): siRNA sense strand
ccacuuugauuugccaacu

SEQ ID NO: 1480510 - RNA, 19 nt, Homo sapiens
  misc_RNA (1)...(19): siRNA sense strand
guaagacuuguacuaugug

SEQ ID NO: 1480511 - RNA, 19 nt, Homo sapiens
  misc_RNA (1)...(19): siRNA sense strand
aagaagaagaagaacagaa

SEQ ID NO: 1480512 - RNA, 19 nt, Homo sapiens
  misc_RNA (1)...(19): siRNA sense strand
ggauucuuaucuuaugaac

SEQ ID NO: 1480513 - RNA, 19 nt, Homo sapiens
  misc_RNA (1)...(19): siRNA sense strand
cuacuggaggcauggcuaa

SEQ ID NO: 1480514 - RNA, 19 nt, Homo sapiens
  misc_RNA (1)...(19): siRNA sense strand
ugacauguaccguaagacu

SEQ ID NO: 1480515 - RNA, 19 nt, Homo sapiens
  misc_RNA (1)...(19): siRNA sense strand
uacuauguguggccaugaa

SEQ ID NO: 1480516 - RNA, 19 nt, Homo sapiens
  misc_RNA (1)...(19): siRNA sense strand
aggaggaggcuucauuuua

SEQ ID NO: 1480517 - RNA, 19 nt, Homo sapiens
  misc_RNA (1)...(19): siRNA sense strand
gaagaggaagaagaagaag

SEQ ID NO: 1480518 - RNA, 19 nt, Homo sapiens
  misc_RNA (1)...(19): siRNA sense strand
gaagaacagaaaauuggaa

SEQ ID NO: 1480519 - RNA, 19 nt, Homo sapiens
  misc_RNA (1)...(19): siRNA sense strand
uggaaaaguuguucaucaa

SEQ ID NO: 1480520 - RNA, 19 nt, Homo sapiens
  misc_RNA (1)...(19): siRNA sense strand
acuuugauuugccaacuug

SEQ ID NO: 1480521 - RNA, 19 nt, Homo sapiens
  misc_RNA (1)...(19): siRNA sense strand
ugggaaagaauuuauggau

SEQ ID NO: 1480522 - RNA, 19 nt, Homo sapiens
  misc_RNA (1)...(19): siRNA sense strand
ccaccucuuaaauuuauug

SEQ ID NO: 1480523 - RNA, 19 nt, Homo sapiens
  misc_RNA (1)...(19): siRNA sense strand
uaucuuaugaaccacuuug

SEQ ID NO: 1480524 - RNA, 19 nt, Homo sapiens
  misc_RNA (1)...(19): siRNA sense strand
ugaguauggaccagaagaa

SEQ ID NO: 1480525 - RNA, 19 nt, Homo sapiens
  misc_RNA (1)...(19): siRNA sense strand
guagucaagaagcauuaga

SEQ ID NO: 1480526 - RNA, 19 nt, Homo sapiens
  misc_RNA (1)...(19): siRNA sense strand
aguuacagauugugaagag

SEQ ID NO: 1480527 - RNA, 19 nt, Homo sapiens
  misc_RNA (1)...(19): siRNA sense strand
cauugaagaugaugcuuua

SEQ ID NO: 1480528 - RNA, 19 nt, Homo sapiens
  misc_RNA (1)...(19): siRNA sense strand
cagaggcgcugcugcuuaa

SEQ ID NO: 1480529 - RNA, 19 nt, Homo sapiens
  misc_RNA (1)...(19): siRNA sense strand
ggugaaggcggcaucauua

SEQ ID NO: 1480530 - RNA, 19 nt, Homo sapiens
  misc_RNA (1)...(19): siRNA sense strand
caauaaugcuggagugaau

SEQ ID NO: 1480531 - RNA, 19 nt, Homo sapiens
  misc_RNA (1)...(19): siRNA sense strand
ugauaacacucauugaaga

SEQ ID NO: 1480532 - RNA, 19 nt, Homo sapiens
  misc_RNA (1)...(19): siRNA sense strand
uaacacagccauccuugaa

SEQ ID NO: 1480533 - RNA, 19 nt, Homo sapiens
  misc_RNA (1)...(19): siRNA sense strand
gaaggcggcaucauuauca

SEQ ID NO: 1480534 - RNA, 19 nt, Homo sapiens
  misc_RNA (1)...(19): siRNA sense strand
gaagaugaugcuuuaaaug

SEQ ID NO: 1480535 - RNA, 19 nt, Homo sapiens
  misc_RNA (1)...(19): siRNA sense strand
ugaagcagguguacagugu

SEQ ID NO: 1480536 - RNA, 19 nt, Homo sapiens
  misc_RNA (1)...(19): siRNA sense strand
gaaaacaugggacaauaua

SEQ ID NO: 1480537 - RNA, 19 nt, Homo sapiens
  misc_RNA (1)...(19): siRNA sense strand
ugauacaacuccauuucaa

SEQ ID NO: 1480538 - RNA, 19 nt, Homo sapiens
  misc_RNA (1)...(19): siRNA sense strand
caacuccauuucaagcaaa

SEQ ID NO: 1480539 - RNA, 19 nt, Homo sapiens
  misc_RNA (1)...(19): siRNA sense strand
gcacagcagccgguuuauu

SEQ ID NO: 1480540 - RNA, 19 nt, Homo sapiens
  misc_RNA (1)...(19): siRNA sense strand
ggauugauaacacucauug

SEQ ID NO: 1480541 - RNA, 19 nt, Homo sapiens
  misc_RNA (1)...(19): siRNA sense strand
cacagcagccgguuuauug

SEQ ID NO: 1480542 - RNA, 19 nt, Homo sapiens
  misc_RNA (1)...(19): siRNA sense strand
gcacgugaacggcaaagug

SEQ ID NO: 1480543 - RNA, 19 nt, Homo sapiens
  misc_RNA (1)...(19): siRNA sense strand
caacugagagacacuuuua

SEQ ID NO: 1480544 - RNA, 19 nt, Homo sapiens
  misc_RNA (1)...(19): siRNA sense strand
uggcauaguuggauucaca

SEQ ID NO: 1480545 - RNA, 19 nt, Homo sapiens
  misc_RNA (1)...(19): siRNA sense strand
acacagccauccuugaauc

SEQ ID NO: 1480546 - RNA, 19 nt, Homo sapiens
  misc_RNA (1)...(19): siRNA sense strand
uaugaacaguggugugaga

SEQ ID NO: 1480547 - RNA, 19 nt, Homo sapiens
  misc_RNA (1)...(19): siRNA sense strand
ucaagacuaugauacaacu

SEQ ID NO: 1480548 - RNA, 19 nt, Homo sapiens
  misc_RNA (1)...(19): siRNA sense strand
ggcggcaucauuaucaaua

SEQ ID NO: 1480549 - RNA, 19 nt, Homo sapiens
  misc_RNA (1)...(19): siRNA sense strand
caauaugucaucuuuagca

SEQ ID NO: 1480550 - RNA, 19 nt, Homo sapiens
  misc_RNA (1)...(19): siRNA sense strand
gcggcaucauuaucaauau

SEQ ID NO: 1480551 - RNA, 19 nt, Homo sapiens
  misc_RNA (1)...(19): siRNA sense strand
uggagugaauaaugagaaa

SEQ ID NO: 1480552 - RNA, 19 nt, Homo sapiens
  misc_RNA (1)...(19): siRNA sense strand
cugcuaaucuuaugaacag

SEQ ID NO: 1480553 - RNA, 19 nt, Homo sapiens
  misc_RNA (1)...(19): siRNA sense strand
caugggacaauauauagaa

SEQ ID NO: 1480554 - RNA, 19 nt, Homo sapiens
  misc_RNA (1)...(19): siRNA sense strand
agguagcgcugguggauug

SEQ ID NO: 1480555 - RNA, 19 nt, Homo sapiens
  misc_RNA (1)...(19): siRNA sense strand
gauaacacucauugaagau

SEQ ID NO: 1480556 - RNA, 19 nt, Homo sapiens
  misc_RNA (1)...(19): siRNA sense strand
agaagacucuguucaucca

SEQ ID NO: 1480557 - RNA, 19 nt, Homo sapiens
  misc_RNA (1)...(19): siRNA sense strand
auaaggaucauaucaagga

SEQ ID NO: 1480558 - RNA, 19 nt, Homo sapiens
  misc_RNA (1)...(19): siRNA sense strand
augcuggagugaauaauga

SEQ ID NO: 1480559 - RNA, 19 nt, Homo sapiens
  misc_RNA (1)...(19): siRNA sense strand
gcuuuaaauggugcuauua

SEQ ID NO: 1480560 - RNA, 19 nt, Homo sapiens
  misc_RNA (1)...(19): siRNA sense strand
uugcacagcagccgguuua

SEQ ID NO: 1480561 - RNA, 19 nt, Homo sapiens
  misc_RNA (1)...(19): siRNA sense strand
gguuuggauuacaugagua

SEQ ID NO: 1480562 - RNA, 19 nt, Homo sapiens
  misc_RNA (1)...(19): siRNA sense strand
acaacuccauuucaagcaa

SEQ ID NO: 1480563 - RNA, 19 nt, Homo sapiens
  misc_RNA (1)...(19): siRNA sense strand
aagaaaacaugggacaaua

SEQ ID NO: 1480564 - RNA, 19 nt, Homo sapiens
  misc_RNA (1)...(19): siRNA sense strand
cggcaucauuaucaauaug

SEQ ID NO: 1480565 - RNA, 19 nt, Homo sapiens
  misc_RNA (1)...(19): siRNA sense strand
ucaaagcauggcauaguug

SEQ ID NO: 1480566 - RNA, 19 nt, Homo sapiens
  misc_RNA (1)...(19): siRNA sense strand
cuucuaagggaauucauuu

SEQ ID NO: 1480567 - RNA, 19 nt, Homo sapiens
  misc_RNA (1)...(19): siRNA sense strand
uucaaagcauggcauaguu

SEQ ID NO: 1480568 - RNA, 19 nt, Homo sapiens
  misc_RNA (1)...(19): siRNA sense strand
aaauggugcuauuaugaag

SEQ ID NO: 1480569 - RNA, 19 nt, Homo sapiens
  misc_RNA (1)...(19): siRNA sense strand
guagaccacuuuggaagac

SEQ ID NO: 1480570 - RNA, 19 nt, Homo sapiens
  misc_RNA (1)...(19): siRNA sense strand
aagaugaugcuuuaaaugg

SEQ ID NO: 1480571 - RNA, 19 nt, Homo sapiens
  misc_RNA (1)...(19): siRNA sense strand
gaagaaaacaugggacaau

SEQ ID NO: 1480572 - RNA, 19 nt, Homo sapiens
  misc_RNA (1)...(19): siRNA sense strand
caagguagcgcugguggau

SEQ ID NO: 1480573 - RNA, 19 nt, Homo sapiens
  misc_RNA (1)...(19): siRNA sense strand
gauacaacuccauuucaag

SEQ ID NO: 1480574 - RNA, 19 nt, Homo sapiens
  misc_RNA (1)...(19): siRNA sense strand
uaugauacaacuccauuuc

SEQ ID NO: 1480575 - RNA, 19 nt, Homo sapiens
  misc_RNA (1)...(19): siRNA sense strand
uguccaggcuuuguuaaca

SEQ ID NO: 1480576 - RNA, 19 nt, Homo sapiens
  misc_RNA (1)...(19): siRNA sense strand
gcuauuaugaagaucacaa

SEQ ID NO: 1480577 - RNA, 19 nt, Homo sapiens
  misc_RNA (1)...(19): siRNA sense strand
cagcaacaacugagagaca

SEQ ID NO: 1480578 - RNA, 19 nt, Homo sapiens
  misc_RNA (1)...(19): siRNA sense strand
gaaucuugaagcaggugua

SEQ ID NO: 1480579 - RNA, 19 nt, Homo sapiens
  misc_RNA (1)...(19): siRNA sense strand
ugagagacacuuuuagaaa

SEQ ID NO: 1480580 - RNA, 19 nt, Homo sapiens
  misc_RNA (1)...(19): siRNA sense strand
caacuucuaagggaauuca

SEQ ID NO: 1480581 - RNA, 19 nt, Homo sapiens
  misc_RNA (1)...(19): siRNA sense strand
uaaggaucauaucaaggau

SEQ ID NO: 1480582 - RNA, 19 nt, Homo sapiens
  misc_RNA (1)...(19): siRNA sense strand
caacaacugagagacacuu

SEQ ID NO: 1480583 - RNA, 19 nt, Homo sapiens
  misc_RNA (1)...(19): siRNA sense strand
gcaucauuaucaauauguc

SEQ ID NO: 1480584 - RNA, 19 nt, Homo sapiens
  misc_RNA (1)...(19): siRNA sense strand
ucaauaaugcuggagugaa

SEQ ID NO: 1480585 - RNA, 19 nt, Homo sapiens
  misc_RNA (1)...(19): siRNA sense strand
uaucuugguuuggauuaca

SEQ ID NO: 1480586 - RNA, 19 nt, Homo sapiens
  misc_RNA (1)...(19): siRNA sense strand
ucacaacuucuaagggaau

SEQ ID NO: 1480587 - RNA, 19 nt, Homo sapiens
  misc_RNA (1)...(19): siRNA sense strand
agaugaugcuuuaaauggu

SEQ ID NO: 1480588 - RNA, 19 nt, Homo sapiens
  misc_RNA (1)...(19): siRNA sense strand
gugaaggcggcaucauuau

SEQ ID NO: 1480589 - RNA, 19 nt, Homo sapiens
  misc_RNA (1)...(19): siRNA sense strand
uguuaucaguggaaccuau

SEQ ID NO: 1480590 - RNA, 19 nt, Homo sapiens
  misc_RNA (1)...(19): siRNA sense strand
auaaugcuggagugaauaa

SEQ ID NO: 1480591 - RNA, 19 nt, Homo sapiens
  misc_RNA (1)...(19): siRNA sense strand
ugccauuuguccaggcuuu

SEQ ID NO: 1480592 - RNA, 19 nt, Homo sapiens
  misc_RNA (1)...(19): siRNA sense strand
guuggcugcuaaucuuaug

SEQ ID NO: 1480593 - RNA, 19 nt, Homo sapiens
  misc_RNA (1)...(19): siRNA sense strand
uagcgcugguggauuggaa

SEQ ID NO: 1480594 - RNA, 19 nt, Homo sapiens
  misc_RNA (1)...(19): siRNA sense strand
gcguuggcugcuaaucuua

SEQ ID NO: 1480595 - RNA, 19 nt, Homo sapiens
  misc_RNA (1)...(19): siRNA sense strand
gcaguuugaaccucagaag

SEQ ID NO: 1480596 - RNA, 19 nt, Homo sapiens
  misc_RNA (1)...(19): siRNA sense strand
ggaauucauuuucaagacu

SEQ ID NO: 1480597 - RNA, 19 nt, Homo sapiens
  misc_RNA (1)...(19): siRNA sense strand
cuaagggaauucauuuuca

SEQ ID NO: 1480598 - RNA, 19 nt, Homo sapiens
  misc_RNA (1)...(19): siRNA sense strand
ugaaggcggcaucauuauc

SEQ ID NO: 1480599 - RNA, 19 nt, Homo sapiens
  misc_RNA (1)...(19): siRNA sense strand
cacaacuucuaagggaauu

SEQ ID NO: 1480600 - RNA, 19 nt, Homo sapiens
  misc_RNA (1)...(19): siRNA sense strand
ugcuuuaaauggugcuauu

SEQ ID NO: 1480601 - RNA, 19 nt, Homo sapiens
  misc_RNA (1)...(19): siRNA sense strand
guuguagaccacuuuggaa

SEQ ID NO: 1480602 - RNA, 19 nt, Homo sapiens
  misc_RNA (1)...(19): siRNA sense strand
gaagaaacuuugugaacuc

SEQ ID NO: 1480603 - RNA, 19 nt, Homo sapiens
  misc_RNA (1)...(19): siRNA sense strand
gaaacuuugugaacucuau

SEQ ID NO: 1480604 - RNA, 19 nt, Homo sapiens
  misc_RNA (1)...(19): siRNA sense strand
ggacuuacacucuuaggaa

SEQ ID NO: 1480605 - RNA, 19 nt, Homo sapiens
  misc_RNA (1)...(19): siRNA sense strand
gaggaaagguugaagaaac

SEQ ID NO: 1480606 - RNA, 19 nt, Homo sapiens
  misc_RNA (1)...(19): siRNA sense strand
ccaauuaccuacuuagauc

SEQ ID NO: 1480607 - RNA, 19 nt, Homo sapiens
  misc_RNA (1)...(19): siRNA sense strand
ggaauccaauuaccuacuu

SEQ ID NO: 1480608 - RNA, 19 nt, Homo sapiens
  misc_RNA (1)...(19): siRNA sense strand
gaaugugguuguucuggaa

SEQ ID NO: 1480609 - RNA, 19 nt, Homo sapiens
  misc_RNA (1)...(19): siRNA sense strand
cagccaaacuucugcauga

SEQ ID NO: 1480610 - RNA, 19 nt, Homo sapiens
  misc_RNA (1)...(19): siRNA sense strand
gggcggaucuggucaagug

SEQ ID NO: 1480611 - RNA, 19 nt, Homo sapiens
  misc_RNA (1)...(19): siRNA sense strand
gaauccaauuaccuacuua

SEQ ID NO: 1480612 - RNA, 19 nt, Homo sapiens
  misc_RNA (1)...(19): siRNA sense strand
ggcgagagauuccgaguga

SEQ ID NO: 1480613 - RNA, 19 nt, Homo sapiens
  misc_RNA (1)...(19): siRNA sense strand
gauuauugauggagaagaa

SEQ ID NO: 1480614 - RNA, 19 nt, Homo sapiens
  misc_RNA (1)...(19): siRNA sense strand
ugaaggagcuacuggacaa

SEQ ID NO: 1480615 - RNA, 19 nt, Homo sapiens
  misc_RNA (1)...(19): siRNA sense strand
gaggcuaaauaugugauua

SEQ ID NO: 1480616 - RNA, 19 nt, Homo sapiens
  misc_RNA (1)...(19): siRNA sense strand
ggaccaacccagaaucgua

SEQ ID NO: 1480617 - RNA, 19 nt, Homo sapiens
  misc_RNA (1)...(19): siRNA sense strand
gcaugacucuggacugaau

SEQ ID NO: 1480618 - RNA, 19 nt, Homo sapiens
  misc_RNA (1)...(19): siRNA sense strand
agaaucaucucgacaacaa

SEQ ID NO: 1480619 - RNA, 19 nt, Homo sapiens
  misc_RNA (1)...(19): siRNA sense strand
gauccugacucaauaugga

SEQ ID NO: 1480620 - RNA, 19 nt, Homo sapiens
  misc_RNA (1)...(19): siRNA sense strand
ggcaggacuuacacucuua

SEQ ID NO: 1480621 - RNA, 19 nt, Homo sapiens
  misc_RNA (1)...(19): siRNA sense strand
ggacaggauuuacuuugca

SEQ ID NO: 1480622 - RNA, 19 nt, Homo sapiens
  misc_RNA (1)...(19): siRNA sense strand
ggacaggagaggaaauuug

SEQ ID NO: 1480623 - RNA, 19 nt, Homo sapiens
  misc_RNA (1)...(19): siRNA sense strand
cuacuuagaucauaacaac

SEQ ID NO: 1480624 - RNA, 19 nt, Homo sapiens
  misc_RNA (1)...(19): siRNA sense strand
gggacaacaugacaaugaa

SEQ ID NO: 1480625 - RNA, 19 nt, Homo sapiens
  misc_RNA (1)...(19): siRNA sense strand
guggaaccaugauuauuga

SEQ ID NO: 1480626 - RNA, 19 nt, Homo sapiens
  misc_RNA (1)...(19): siRNA sense strand
gucaucaaguguauaguuu

SEQ ID NO: 1480627 - RNA, 19 nt, Homo sapiens
  misc_RNA (1)...(19): siRNA sense strand
gauaauggaccuccuugga

SEQ ID NO: 1480628 - RNA, 19 nt, Homo sapiens
  misc_RNA (1)...(19): siRNA sense strand
gccagugcauuaugaagaa

SEQ ID NO: 1480629 - RNA, 19 nt, Homo sapiens
  misc_RNA (1)...(19): siRNA sense strand
ggagaggccugugaucuac

SEQ ID NO: 1480630 - RNA, 19 nt, Homo sapiens
  misc_RNA (1)...(19): siRNA sense strand
guaugaggcuaaauaugug

SEQ ID NO: 1480631 - RNA, 19 nt, Homo sapiens
  misc_RNA (1)...(19): siRNA sense strand
gaagagugggacaacauga

SEQ ID NO: 1480632 - RNA, 19 nt, Homo sapiens
  misc_RNA (1)...(19): siRNA sense strand
guucagucaucaaguguau

SEQ ID NO: 1480633 - RNA, 19 nt, Homo sapiens
  misc_RNA (1)...(19): siRNA sense strand
gaucuacauugaccagaca

SEQ ID NO: 1480634 - RNA, 19 nt, Homo sapiens
  misc_RNA (1)...(19): siRNA sense strand
ggccugugaucuacauuga

SEQ ID NO: 1480635 - RNA, 19 nt, Homo sapiens
  misc_RNA (1)...(19): siRNA sense strand
ggaggacaauggaugacau

SEQ ID NO: 1480636 - RNA, 19 nt, Homo sapiens
  misc_RNA (1)...(19): siRNA sense strand
gagagcagcccgagagauc

SEQ ID NO: 1480637 - RNA, 19 nt, Homo sapiens
  misc_RNA (1)...(19): siRNA sense strand
ugaagaaacuuugugaacu

SEQ ID NO: 1480638 - RNA, 19 nt, Homo sapiens
  misc_RNA (1)...(19): siRNA sense strand
ucaagugagugagcggaua

SEQ ID NO: 1480639 - RNA, 19 nt, Homo sapiens
  misc_RNA (1)...(19): siRNA sense strand
gcagaagagugggacaaca

SEQ ID NO: 1480640 - RNA, 19 nt, Homo sapiens
  misc_RNA (1)...(19): siRNA sense strand
ggacugaaucugcaaagca

SEQ ID NO: 1480641 - RNA, 19 nt, Homo sapiens
  misc_RNA (1)...(19): siRNA sense strand
cgucugauccaccauguaa

SEQ ID NO: 1480642 - RNA, 19 nt, Homo sapiens
  misc_RNA (1)...(19): siRNA sense strand
gcaccgagacugccacaca

SEQ ID NO: 1480643 - RNA, 19 nt, Homo sapiens
  misc_RNA (1)...(19): siRNA sense strand
caagugagugagcggauaa

SEQ ID NO: 1480644 - RNA, 19 nt, Homo sapiens
  misc_RNA (1)...(19): siRNA sense strand
uguaugaggcuaaauaugu

SEQ ID NO: 1480645 - RNA, 19 nt, Homo sapiens
  misc_RNA (1)...(19): siRNA sense strand
gauuggagaccuacaaagu

SEQ ID NO: 1480646 - RNA, 19 nt, Homo sapiens
  misc_RNA (1)...(19): siRNA sense strand
ugaacucuaugccaagguu

SEQ ID NO: 1480647 - RNA, 19 nt, Homo sapiens
  misc_RNA (1)...(19): siRNA sense strand
uaaaccaugagauguauga

SEQ ID NO: 1480648 - RNA, 19 nt, Homo sapiens
  misc_RNA (1)...(19): siRNA sense strand
gaucuggucaagugaguga

SEQ ID NO: 1480649 - RNA, 19 nt, Homo sapiens
  misc_RNA (1)...(19): siRNA sense strand
gacaggagaggaaauuugu

SEQ ID NO: 1480650 - RNA, 19 nt, Homo sapiens
  misc_RNA (1)...(19): siRNA sense strand
gcagcuugccacucucuuu

SEQ ID NO: 1480651 - RNA, 19 nt, Homo sapiens
  misc_RNA (1)...(19): siRNA sense strand
uuggagaccuacaaaguga

SEQ ID NO: 1480652 - RNA, 19 nt, Homo sapiens
  misc_RNA (1)...(19): siRNA sense strand
ccuaaaccaugagauguau

SEQ ID NO: 1480653 - RNA, 19 nt, Homo sapiens
  misc_RNA (1)...(19): siRNA sense strand
gcugcuacacaacuuauuu

SEQ ID NO: 1480654 - RNA, 19 nt, Homo sapiens
  misc_RNA (1)...(19): siRNA sense strand
gauguaugaggcuaaauau

SEQ ID NO: 1480655 - RNA, 19 nt, Homo sapiens
  misc_RNA (1)...(19): siRNA sense strand
ugagauguaugaggcuaaa

SEQ ID NO: 1480656 - RNA, 19 nt, Homo sapiens
  misc_RNA (1)...(19): siRNA sense strand
ggaggcacaacaagaauca

SEQ ID NO: 1480657 - RNA, 19 nt, Homo sapiens
  misc_RNA (1)...(19): siRNA sense strand
uggagacccuaaaccauga

SEQ ID NO: 1480658 - RNA, 19 nt, Homo sapiens
  misc_RNA (1)...(19): siRNA sense strand
gaggacaggagaggaaauu

SEQ ID NO: 1480659 - RNA, 19 nt, Homo sapiens
  misc_RNA (1)...(19): siRNA sense strand
gaccaacccagaaucguau

SEQ ID NO: 1480660 - RNA, 19 nt, Homo sapiens
  misc_RNA (1)...(19): siRNA sense strand
gaagauuccagaggaugaa

SEQ ID NO: 1480661 - RNA, 19 nt, Homo sapiens
  misc_RNA (1)...(19): siRNA sense strand
ggaaccaugauuauugaug

SEQ ID NO: 1480662 - RNA, 19 nt, Homo sapiens
  misc_RNA (1)...(19): siRNA sense strand
agauguaugaggcuaaaua

SEQ ID NO: 1480663 - RNA, 19 nt, Homo sapiens
  misc_RNA (1)...(19): siRNA sense strand
gguuaaauauguggaccuu

SEQ ID NO: 1480664 - RNA, 19 nt, Homo sapiens
  misc_RNA (1)...(19): siRNA sense strand
ccagaaucguaucuugaga

SEQ ID NO: 1480665 - RNA, 19 nt, Homo sapiens
  misc_RNA (1)...(19): siRNA sense strand
ugagugagcggauaaugga

SEQ ID NO: 1480666 - RNA, 19 nt, Homo sapiens
  misc_RNA (1)...(19): siRNA sense strand
caagaaucaucucgacaac

SEQ ID NO: 1480667 - RNA, 19 nt, Homo sapiens
  misc_RNA (1)...(19): siRNA sense strand
gaugauaccaaaccugaag

SEQ ID NO: 1480668 - RNA, 19 nt, Homo sapiens
  misc_RNA (1)...(19): siRNA sense strand
cugcaugacucuggacuga

SEQ ID NO: 1480669 - RNA, 19 nt, Homo sapiens
  misc_RNA (1)...(19): siRNA sense strand
caaagugaaugagguugag

SEQ ID NO: 1480670 - RNA, 19 nt, Homo sapiens
  misc_RNA (1)...(19): siRNA sense strand
gauuuauccuggcccacaa

SEQ ID NO: 1480671 - RNA, 19 nt, Homo sapiens
  misc_RNA (1)...(19): siRNA sense strand
gccuacacguuggaugaua

SEQ ID NO: 1480672 - RNA, 19 nt, Homo sapiens
  misc_RNA (1)...(19): siRNA sense strand
acaagaaucaucucgacaa

SEQ ID NO: 1480673 - RNA, 19 nt, Homo sapiens
  misc_RNA (1)...(19): siRNA sense strand
cuuggaggauccuauguug

SEQ ID NO: 1480674 - RNA, 19 nt, Homo sapiens
  misc_RNA (1)...(19): siRNA sense strand
cugggauccugacucaaua

SEQ ID NO: 1480675 - RNA, 19 nt, Homo sapiens
  misc_RNA (1)...(19): siRNA sense strand
uggagccagugcauuauga

SEQ ID NO: 1480676 - RNA, 19 nt, Homo sapiens
  misc_RNA (1)...(19): siRNA sense strand
caugauuauugauggagaa

SEQ ID NO: 1480677 - RNA, 19 nt, Homo sapiens
  misc_RNA (1)...(19): siRNA sense strand
uguggaaccaugauuauug

SEQ ID NO: 1480678 - RNA, 19 nt, Homo sapiens
  misc_RNA (1)...(19): siRNA sense strand
cgagagauuccgagugaug

SEQ ID NO: 1480679 - RNA, 19 nt, Homo sapiens
  misc_RNA (1)...(19): siRNA sense strand
gaugagaaaccagaugauc

SEQ ID NO: 1480680 - RNA, 19 nt, Homo sapiens
  misc_RNA (1)...(19): siRNA sense strand
gcccaucaccaccaccuuu

SEQ ID NO: 1480681 - RNA, 19 nt, Homo sapiens
  misc_RNA (1)...(19): siRNA sense strand
ccaaagaggaaagguugaa

SEQ ID NO: 1480682 - RNA, 19 nt, Homo sapiens
  misc_RNA (1)...(19): siRNA sense strand
uggagaggccugugaucua

SEQ ID NO: 1480683 - RNA, 19 nt, Homo sapiens
  misc_RNA (1)...(19): siRNA sense strand
cuacaaagugaaugagguu

SEQ ID NO: 1480684 - RNA, 19 nt, Homo sapiens
  misc_RNA (1)...(19): siRNA sense strand
gacccuaaaccaugagaug

SEQ ID NO: 1480685 - RNA, 19 nt, Homo sapiens
  misc_RNA (1)...(19): siRNA sense strand
ugggacaacaugacaauga

SEQ ID NO: 1480686 - RNA, 19 nt, Homo sapiens
  misc_RNA (1)...(19): siRNA sense strand
ggagaccuacaaagugaau

SEQ ID NO: 1480687 - RNA, 19 nt, Homo sapiens
  misc_RNA (1)...(19): siRNA sense strand
ggacugaaugugguuguuc

SEQ ID NO: 1480688 - RNA, 19 nt, Homo sapiens
  misc_RNA (1)...(19): siRNA sense strand
aggcaggacuuacacucuu

SEQ ID NO: 1480689 - RNA, 19 nt, Homo sapiens
  misc_RNA (1)...(19): siRNA sense strand
gguugaagaaacuuuguga

SEQ ID NO: 1480690 - RNA, 19 nt, Homo sapiens
  misc_RNA (1)...(19): siRNA sense strand
aaagaggaaagguugaaga

SEQ ID NO: 1480691 - RNA, 19 nt, Homo sapiens
  misc_RNA (1)...(19): siRNA sense strand
gaucacucgugugccuuug

SEQ ID NO: 1480692 - RNA, 19 nt, Homo sapiens
  misc_RNA (1)...(19): siRNA sense strand
ccauguaaagggcaaauca

SEQ ID NO: 1480693 - RNA, 19 nt, Homo sapiens
  misc_RNA (1)...(19): siRNA sense strand
uggauugaccaccaucuuu

SEQ ID NO: 1480694 - RNA, 19 nt, Homo sapiens
  misc_RNA (1)...(19): siRNA sense strand
gcagucagaaccagagucu

SEQ ID NO: 1480695 - RNA, 19 nt, Homo sapiens
  misc_RNA (1)...(19): siRNA sense strand
aagaggaaagguugaagaa

SEQ ID NO: 1480696 - RNA, 19 nt, Homo sapiens
  misc_RNA (1)...(19): siRNA sense strand
caugaggucucugcucucu

SEQ ID NO: 1480697 - RNA, 19 nt, Homo sapiens
  misc_RNA (1)...(19): siRNA sense strand
ccagugcauuaugaagaaa

SEQ ID NO: 1480698 - RNA, 19 nt, Homo sapiens
  misc_RNA (1)...(19): siRNA sense strand
ccacaaagccagaaaacug

SEQ ID NO: 1480699 - RNA, 19 nt, Homo sapiens
  misc_RNA (1)...(19): siRNA sense strand
gaaauuugugggcggaucu

SEQ ID NO: 1480700 - RNA, 19 nt, Homo sapiens
  misc_RNA (1)...(19): siRNA sense strand
acaaagugaaugagguuga

SEQ ID NO: 1480701 - RNA, 19 nt, Homo sapiens
  misc_RNA (1)...(19): siRNA sense strand
uggaggauccuauguugga

SEQ ID NO: 1480702 - RNA, 19 nt, Homo sapiens
  misc_RNA (1)...(19): siRNA sense strand
cggaggacauggccagaua

SEQ ID NO: 1480703 - RNA, 19 nt, Homo sapiens
  misc_RNA (1)...(19): siRNA sense strand
ggacauggccagauacuac

SEQ ID NO: 1480704 - RNA, 19 nt, Homo sapiens
  misc_RNA (1)...(19): siRNA sense strand
gcagagauauggaaaacga

SEQ ID NO: 1480705 - RNA, 19 nt, Homo sapiens
  misc_RNA (1)...(19): siRNA sense strand
gaugagagaaagcacagaa

SEQ ID NO: 1480706 - RNA, 19 nt, Homo sapiens
  misc_RNA (1)...(19): siRNA sense strand
ccagaacucggcuugaaga

SEQ ID NO: 1480707 - RNA, 19 nt, Homo sapiens
  misc_RNA (1)...(19): siRNA sense strand
gcccagagacacugauuuc

SEQ ID NO: 1480708 - RNA, 19 nt, Homo sapiens
  misc_RNA (1)...(19): siRNA sense strand
gauuucagaccucuugaug

SEQ ID NO: 1480709 - RNA, 19 nt, Homo sapiens
  misc_RNA (1)...(19): siRNA sense strand
uuucagaccucuugaugag

SEQ ID NO: 1480710 - RNA, 19 nt, Homo sapiens
  misc_RNA (1)...(19): siRNA sense strand
ucccagaacucggcuugaa

SEQ ID NO: 1480711 - RNA, 19 nt, Homo sapiens
  misc_RNA (1)...(19): siRNA sense strand
gcuugaagacccugcaaug

SEQ ID NO: 1480712 - RNA, 19 nt, Homo sapiens
  misc_RNA (1)...(19): siRNA sense strand
gacacuacaucaaccucau

SEQ ID NO: 1480713 - RNA, 19 nt, Homo sapiens
  misc_RNA (1)...(19): siRNA sense strand
gcgcugcgacacuacauca

SEQ ID NO: 1480714 - RNA, 19 nt, Homo sapiens
  misc_RNA (1)...(19): siRNA sense strand
uugaagacccugcaaugug

SEQ ID NO: 1480715 - RNA, 19 nt, Homo sapiens
  misc_RNA (1)...(19): siRNA sense strand
ccaggcagagauauggaaa

SEQ ID NO: 1480716 - RNA, 19 nt, Homo sapiens
  misc_RNA (1)...(19): siRNA sense strand
gagagaaagcacagaaaau

SEQ ID NO: 1480717 - RNA, 19 nt, Homo sapiens
  misc_RNA (1)...(19): siRNA sense strand
gcaggaaccucaccuacgu

SEQ ID NO: 1480718 - RNA, 19 nt, Homo sapiens
  misc_RNA (1)...(19): siRNA sense strand
gcauguaccgccagcagaa

SEQ ID NO: 1480719 - RNA, 19 nt, Homo sapiens
  misc_RNA (1)...(19): siRNA sense strand
ggagcugcgugccuuuguc

SEQ ID NO: 1480720 - RNA, 19 nt, Homo sapiens
  misc_RNA (1)...(19): siRNA sense strand
gugggaacgucguccaaag

SEQ ID NO: 1480721 - RNA, 19 nt, Homo sapiens
  misc_RNA (1)...(19): siRNA sense strand
ccugacagcagcagugaga

SEQ ID NO: 1480722 - RNA, 19 nt, Homo sapiens
  misc_RNA (1)...(19): siRNA sense strand
ccucugcuccugugggaaa

SEQ ID NO: 1480723 - RNA, 19 nt, Homo sapiens
  misc_RNA (1)...(19): siRNA sense strand
ccacggagacucgcagaca

SEQ ID NO: 1480724 - RNA, 19 nt, Homo sapiens
  misc_RNA (1)...(19): siRNA sense strand
cccugggucuucauccuuu

SEQ ID NO: 1480725 - RNA, 19 nt, Homo sapiens
  misc_RNA (1)...(19): siRNA sense strand
ugacagcagcagugagaug

SEQ ID NO: 1480726 - RNA, 19 nt, Homo sapiens
  misc_RNA (1)...(19): siRNA sense strand
gccaacaccagcaguacug

SEQ ID NO: 1480727 - RNA, 19 nt, Homo sapiens
  misc_RNA (1)...(19): siRNA sense strand
gggaacgucguccaaagca

SEQ ID NO: 1480728 - RNA, 19 nt, Homo sapiens
  misc_RNA (1)...(19): siRNA sense strand
ccaccagcacccugauguu

SEQ ID NO: 1480729 - RNA, 19 nt, Homo sapiens
  misc_RNA (1)...(19): siRNA sense strand
ggacaacuuugaugagaug

SEQ ID NO: 1480730 - RNA, 19 nt, Homo sapiens
  misc_RNA (1)...(19): siRNA sense strand
gcagacauacucaguguuu

SEQ ID NO: 1480731 - RNA, 19 nt, Homo sapiens
  misc_RNA (1)...(19): siRNA sense strand
ucaagaggcugacgcagaa

SEQ ID NO: 1480732 - RNA, 19 nt, Homo sapiens
  misc_RNA (1)...(19): siRNA sense strand
gaaccugucgccaguauga

SEQ ID NO: 1480733 - RNA, 19 nt, Homo sapiens
  misc_RNA (1)...(19): siRNA sense strand
gagaaccugucgccaguau

SEQ ID NO: 1480734 - RNA, 19 nt, Homo sapiens
  misc_RNA (1)...(19): siRNA sense strand
gcgcuacccuggcuacaug

SEQ ID NO: 1480735 - RNA, 19 nt, Homo sapiens
  misc_RNA (1)...(19): siRNA sense strand
gguccagccuuacaauuca

SEQ ID NO: 1480736 - RNA, 19 nt, Homo sapiens
  misc_RNA (1)...(19): siRNA sense strand
ugacagguauccuaagaag

SEQ ID NO: 1480737 - RNA, 19 nt, Homo sapiens
  misc_RNA (1)...(19): siRNA sense strand
ggacacauccagggagauu

SEQ ID NO: 1480738 - RNA, 19 nt, Homo sapiens
  misc_RNA (1)...(19): siRNA sense strand
aaagauccaugaggacauu

SEQ ID NO: 1480739 - RNA, 19 nt, Homo sapiens
  misc_RNA (1)...(19): siRNA sense strand
gcucuggacuggguuccua

SEQ ID NO: 1480740 - RNA, 19 nt, Homo sapiens
  misc_RNA (1)...(19): siRNA sense strand
agaagcuggugcagacaua

SEQ ID NO: 1480741 - RNA, 19 nt, Homo sapiens
  misc_RNA (1)...(19): siRNA sense strand
gugcagacauacucagugu

SEQ ID NO: 1480742 - RNA, 19 nt, Homo sapiens
  misc_RNA (1)...(19): siRNA sense strand
ugaaugacagguauccuaa

SEQ ID NO: 1480743 - RNA, 19 nt, Homo sapiens
  misc_RNA (1)...(19): siRNA sense strand
aaugacagguauccuaaga

SEQ ID NO: 1480744 - RNA, 19 nt, Homo sapiens
  misc_RNA (1)...(19): siRNA sense strand
cggcuccacuuccucauga

SEQ ID NO: 1480745 - RNA, 19 nt, Homo sapiens
  misc_RNA (1)...(19): siRNA sense strand
ggacaacacagcccugaac

SEQ ID NO: 1480746 - RNA, 19 nt, Homo sapiens
  misc_RNA (1)...(19): siRNA sense strand
acaauucacuccucacacu

SEQ ID NO: 1480747 - RNA, 19 nt, Homo sapiens
  misc_RNA (1)...(19): siRNA sense strand
aaggacaacuuugaugaga

SEQ ID NO: 1480748 - RNA, 19 nt, Homo sapiens
  misc_RNA (1)...(19): siRNA sense strand
ugaaccggauugccacaga

SEQ ID NO: 1480749 - RNA, 19 nt, Homo sapiens
  misc_RNA (1)...(19): siRNA sense strand
ccacccagguccacaagag

SEQ ID NO: 1480750 - RNA, 19 nt, Homo sapiens
  misc_RNA (1)...(19): siRNA sense strand
cuggcuacaugaacaauga

SEQ ID NO: 1480751 - RNA, 19 nt, Homo sapiens
  misc_RNA (1)...(19): siRNA sense strand
ggucagcgggcucaugaug

SEQ ID NO: 1480752 - RNA, 19 nt, Homo sapiens
  misc_RNA (1)...(19): siRNA sense strand
ccucaucgccucgcucauu

SEQ ID NO: 1480753 - RNA, 19 nt, Homo sapiens
  misc_RNA (1)...(19): siRNA sense strand
aggaggagcuggcaacaac

SEQ ID NO: 1480754 - RNA, 19 nt, Homo sapiens
  misc_RNA (1)...(19): siRNA sense strand
ccacagaccgccugcacau

SEQ ID NO: 1480755 - RNA, 19 nt, Homo sapiens
  misc_RNA (1)...(19): siRNA sense strand
ucuuagaacggcugaauga

SEQ ID NO: 1480756 - RNA, 19 nt, Homo sapiens
  misc_RNA (1)...(19): siRNA sense strand
gaccaaccacugcuacauc

SEQ ID NO: 1480757 - RNA, 19 nt, Homo sapiens
  misc_RNA (1)...(19): siRNA sense strand
acaucuaccugucggaaca

SEQ ID NO: 1480758 - RNA, 19 nt, Homo sapiens
  misc_RNA (1)...(19): siRNA sense strand
ccacacggccagacuacau

SEQ ID NO: 1480759 - RNA, 19 nt, Homo sapiens
  misc_RNA (1)...(19): siRNA sense strand
gacgcagaaugcagacugu

SEQ ID NO: 1480760 - RNA, 19 nt, Homo sapiens
  misc_RNA (1)...(19): siRNA sense strand
cagcaucuccucgcucuuc

SEQ ID NO: 1480761 - RNA, 19 nt, Homo sapiens
  misc_RNA (1)...(19): siRNA sense strand
cugaaugacagguauccua

SEQ ID NO: 1480762 - RNA, 19 nt, Homo sapiens
  misc_RNA (1)...(19): siRNA sense strand
ccacgguccuggaugucau

SEQ ID NO: 1480763 - RNA, 19 nt, Homo sapiens
  misc_RNA (1)...(19): siRNA sense strand
cuacaucgccauccucaac

SEQ ID NO: 1480764 - RNA, 19 nt, Homo sapiens
  misc_RNA (1)...(19): siRNA sense strand
gaugguagugacagucuag

SEQ ID NO: 1480765 - RNA, 19 nt, Homo sapiens
  misc_RNA (1)...(19): siRNA sense strand
caaggacaacuuugaugag

SEQ ID NO: 1480766 - RNA, 19 nt, Homo sapiens
  misc_RNA (1)...(19): siRNA sense strand
ucacuccucacacucaaga

SEQ ID NO: 1480767 - RNA, 19 nt, Homo sapiens
  misc_RNA (1)...(19): siRNA sense strand
uuagaacggcugaaugaca

SEQ ID NO: 1480768 - RNA, 19 nt, Homo sapiens
  misc_RNA (1)...(19): siRNA sense strand
gaggaggagcuggcaacaa

SEQ ID NO: 1480769 - RNA, 19 nt, Homo sapiens
  misc_RNA (1)...(19): siRNA sense strand
cagauuggguucgaguucu

SEQ ID NO: 1480770 - RNA, 19 nt, Homo sapiens
  misc_RNA (1)...(19): siRNA sense strand
ggcagacgaugagcacuac

SEQ ID NO: 1480771 - RNA, 19 nt, Homo sapiens
  misc_RNA (1)...(19): siRNA sense strand
gaggagcuggcaacaacug

SEQ ID NO: 1480772 - RNA, 19 nt, Homo sapiens
  misc_RNA (1)...(19): siRNA sense strand
uacccuggcuacaugaaca

SEQ ID NO: 1480773 - RNA, 19 nt, Homo sapiens
  misc_RNA (1)...(19): siRNA sense strand
acagguauccuaagaagcu

SEQ ID NO: 1480774 - RNA, 19 nt, Homo sapiens
  misc_RNA (1)...(19): siRNA sense strand
acuggguuccuaccucuua

SEQ ID NO: 1480775 - RNA, 19 nt, Homo sapiens
  misc_RNA (1)...(19): siRNA sense strand
gaaugacagguauccuaag

SEQ ID NO: 1480776 - RNA, 19 nt, Homo sapiens
  misc_RNA (1)...(19): siRNA sense strand
acacauccagggagauugu

SEQ ID NO: 1480777 - RNA, 19 nt, Homo sapiens
  misc_RNA (1)...(19): siRNA sense strand
gaauauaacuccagaaucu

SEQ ID NO: 1480778 - RNA, 19 nt, Homo sapiens
  misc_RNA (1)...(19): siRNA sense strand
gggcagacccugugaauau

SEQ ID NO: 1480779 - RNA, 19 nt, Homo sapiens
  misc_RNA (1)...(19): siRNA sense strand
ccacacgaguuaccaauga

SEQ ID NO: 1480780 - RNA, 19 nt, Homo sapiens
  misc_RNA (1)...(19): siRNA sense strand
gaaagaaacccggauuugu

SEQ ID NO: 1480781 - RNA, 19 nt, Homo sapiens
  misc_RNA (1)...(19): siRNA sense strand
ggccagaaauguauuguuc

SEQ ID NO: 1480782 - RNA, 19 nt, Homo sapiens
  misc_RNA (1)...(19): siRNA sense strand
ggcaagaaaugcagcaaga

SEQ ID NO: 1480783 - RNA, 19 nt, Homo sapiens
  misc_RNA (1)...(19): siRNA sense strand
ccagaaauguauuguucaa

SEQ ID NO: 1480784 - RNA, 19 nt, Homo sapiens
  misc_RNA (1)...(19): siRNA sense strand
ucaaagaccuguggaacug

SEQ ID NO: 1480785 - RNA, 19 nt, Homo sapiens
  misc_RNA (1)...(19): siRNA sense strand
ggcagacccugugaauaua

SEQ ID NO: 1480786 - RNA, 19 nt, Homo sapiens
  misc_RNA (1)...(19): siRNA sense strand
guuugagugugaagaaaua

SEQ ID NO: 1480787 - RNA, 19 nt, Homo sapiens
  misc_RNA (1)...(19): siRNA sense strand
gaccaggacugugaagaug

SEQ ID NO: 1480788 - RNA, 19 nt, Homo sapiens
  misc_RNA (1)...(19): siRNA sense strand
caacgaggacugcagcaaa

SEQ ID NO: 1480789 - RNA, 19 nt, Homo sapiens
  misc_RNA (1)...(19): siRNA sense strand
gcagcaagaccaagaaauc

SEQ ID NO: 1480790 - RNA, 19 nt, Homo sapiens
  misc_RNA (1)...(19): siRNA sense strand
gagguggaguugacgagaa

SEQ ID NO: 1480791 - RNA, 19 nt, Homo sapiens
  misc_RNA (1)...(19): siRNA sense strand
caucagugcacauguauug

SEQ ID NO: 1480792 - RNA, 19 nt, Homo sapiens
  misc_RNA (1)...(19): siRNA sense strand
aaagaaacccggauuugug

SEQ ID NO: 1480793 - RNA, 19 nt, Homo sapiens
  misc_RNA (1)...(19): siRNA sense strand
gcagacccugugaauauaa

SEQ ID NO: 1480794 - RNA, 19 nt, Homo sapiens
  misc_RNA (1)...(19): siRNA sense strand
gcaaaugcaacuacaacug

SEQ ID NO: 1480795 - RNA, 19 nt, Homo sapiens
  misc_RNA (1)...(19): siRNA sense strand
ggaaaaggcagcucacuga

SEQ ID NO: 1480796 - RNA, 19 nt, Homo sapiens
  misc_RNA (1)...(19): siRNA sense strand
aagcagcguuucccuucua

SEQ ID NO: 1480797 - RNA, 19 nt, Homo sapiens
  misc_RNA (1)...(19): siRNA sense strand
ugaaagaaacccggauuug

SEQ ID NO: 1480798 - RNA, 19 nt, Homo sapiens
  misc_RNA (1)...(19): siRNA sense strand
gcuggauguuugaguguga

SEQ ID NO: 1480799 - RNA, 19 nt, Homo sapiens
  misc_RNA (1)...(19): siRNA sense strand
cagcugaccaggacuguga

SEQ ID NO: 1480800 - RNA, 19 nt, Homo sapiens
  misc_RNA (1)...(19): siRNA sense strand
cagcccaacuguaaacauc

SEQ ID NO: 1480801 - RNA, 19 nt, Homo sapiens
  misc_RNA (1)...(19): siRNA sense strand
ugaauugauugcaguugga

SEQ ID NO: 1480802 - RNA, 19 nt, Homo sapiens
  misc_RNA (1)...(19): siRNA sense strand
guaaacaucagugcacaug

SEQ ID NO: 1480803 - RNA, 19 nt, Homo sapiens
  misc_RNA (1)...(19): siRNA sense strand
gguaucuccacacgaguua

SEQ ID NO: 1480804 - RNA, 19 nt, Homo sapiens
  misc_RNA (1)...(19): siRNA sense strand
gugaaagaaacccggauuu

SEQ ID NO: 1480805 - RNA, 19 nt, Homo sapiens
  misc_RNA (1)...(19): siRNA sense strand
gugaauauaacuccagaau

SEQ ID NO: 1480806 - RNA, 19 nt, Homo sapiens
  misc_RNA (1)...(19): siRNA sense strand
ggaguugacgagaaacaau

SEQ ID NO: 1480807 - RNA, 19 nt, Homo sapiens
  misc_RNA (1)...(19): siRNA sense strand
gaagauggggagacauuuu

SEQ ID NO: 1480808 - RNA, 19 nt, Homo sapiens
  misc_RNA (1)...(19): siRNA sense strand
gauguuugagugugaagaa

SEQ ID NO: 1480809 - RNA, 19 nt, Homo sapiens
  misc_RNA (1)...(19): siRNA sense strand
aagaaacccggauuuguga

SEQ ID NO: 1480810 - RNA, 19 nt, Homo sapiens
  misc_RNA (1)...(19): siRNA sense strand
ugacgagaaacaaugaauu

SEQ ID NO: 1480811 - RNA, 19 nt, Homo sapiens
  misc_RNA (1)...(19): siRNA sense strand
gggcugcauuccucugugu

SEQ ID NO: 1480812 - RNA, 19 nt, Homo sapiens
  misc_RNA (1)...(19): siRNA sense strand
gaugauccaguccugcaaa

SEQ ID NO: 1480813 - RNA, 19 nt, Homo sapiens
  misc_RNA (1)...(19): siRNA sense strand
gcgaggagugggucuguga

SEQ ID NO: 1480814 - RNA, 19 nt, Homo sapiens
  misc_RNA (1)...(19): siRNA sense strand
uuacuuacgcuggauguuu

SEQ ID NO: 1480815 - RNA, 19 nt, Homo sapiens
  misc_RNA (1)...(19): siRNA sense strand
ggggagacauuuuccaaga

SEQ ID NO: 1480816 - RNA, 19 nt, Homo sapiens
  misc_RNA (1)...(19): siRNA sense strand
ccaaggggcuggaaugcaa

SEQ ID NO: 1480817 - RNA, 19 nt, Homo sapiens
  misc_RNA (1)...(19): siRNA sense strand
uacuuacgcuggauguuug

SEQ ID NO: 1480818 - RNA, 19 nt, Homo sapiens
  misc_RNA (1)...(19): siRNA sense strand
ccucggcuggucaaaguua

SEQ ID NO: 1480819 - RNA, 19 nt, Homo sapiens
  misc_RNA (1)...(19): siRNA sense strand
caacugcccgcaugccaau

SEQ ID NO: 1480820 - RNA, 19 nt, Homo sapiens
  misc_RNA (1)...(19): siRNA sense strand
cagugcacauguauugaug

SEQ ID NO: 1480821 - RNA, 19 nt, Homo sapiens
  misc_RNA (1)...(19): siRNA sense strand
ccagucagguuuacuuacg

SEQ ID NO: 1480822 - RNA, 19 nt, Homo sapiens
  misc_RNA (1)...(19): siRNA sense strand
gcgccaagcagcucaacga

SEQ ID NO: 1480823 - RNA, 19 nt, Homo sapiens
  misc_RNA (1)...(19): siRNA sense strand
gauccaguccugcaaaugc

SEQ ID NO: 1480824 - RNA, 19 nt, Homo sapiens
  misc_RNA (1)...(19): siRNA sense strand
guuuccagcccaacuguaa

SEQ ID NO: 1480825 - RNA, 19 nt, Homo sapiens
  misc_RNA (1)...(19): siRNA sense strand
gaucugcagagcucaguca

SEQ ID NO: 1480826 - RNA, 19 nt, Homo sapiens
  misc_RNA (1)...(19): siRNA sense strand
gaguugacgagaaacaaug

SEQ ID NO: 1480827 - RNA, 19 nt, Homo sapiens
  misc_RNA (1)...(19): siRNA sense strand
cgucacccuucuccacuug

SEQ ID NO: 1480828 - RNA, 19 nt, Homo sapiens
  misc_RNA (1)...(19): siRNA sense strand
gaauugauugcaguuggaa

SEQ ID NO: 1480829 - RNA, 19 nt, Homo sapiens
  misc_RNA (1)...(19): siRNA sense strand
ccugagugccgccuuguga

SEQ ID NO: 1480830 - RNA, 19 nt, Homo sapiens
  misc_RNA (1)...(19): siRNA sense strand
ugagugccgccuugugaaa

SEQ ID NO: 1480831 - RNA, 19 nt, Homo sapiens
  misc_RNA (1)...(19): siRNA sense strand
ugaccaggacugugaagau

SEQ ID NO: 1480832 - RNA, 19 nt, Homo sapiens
  misc_RNA (1)...(19): siRNA sense strand
agguggaguugacgagaaa

SEQ ID NO: 1480833 - RNA, 19 nt, Homo sapiens
  misc_RNA (1)...(19): siRNA sense strand
gggagacauuuuccaagaa

SEQ ID NO: 1480834 - RNA, 19 nt, Homo sapiens
  misc_RNA (1)...(19): siRNA sense strand
caaggccagaaauguauug

SEQ ID NO: 1480835 - RNA, 19 nt, Homo sapiens
  misc_RNA (1)...(19): siRNA sense strand
gaaaaggcagcucacugaa

SEQ ID NO: 1480836 - RNA, 19 nt, Homo sapiens
  misc_RNA (1)...(19): siRNA sense strand
guucaaacaacuucauggu

SEQ ID NO: 1480837 - RNA, 19 nt, Homo sapiens
  misc_RNA (1)...(19): siRNA sense strand
agaaaugcagcaagaccaa

SEQ ID NO: 1480838 - RNA, 19 nt, Homo sapiens
  misc_RNA (1)...(19): siRNA sense strand
ugaauauaacuccagaauc

SEQ ID NO: 1480839 - RNA, 19 nt, Homo sapiens
  misc_RNA (1)...(19): siRNA sense strand
gcacgaaucucugcuggua

SEQ ID NO: 1480840 - RNA, 19 nt, Homo sapiens
  misc_RNA (1)...(19): siRNA sense strand
gaacuacgaggaugaauug

SEQ ID NO: 1480841 - RNA, 19 nt, Homo sapiens
  misc_RNA (1)...(19): siRNA sense strand
ggaaaagggucuuaaacaa

SEQ ID NO: 1480842 - RNA, 19 nt, Homo sapiens
  misc_RNA (1)...(19): siRNA sense strand
uaucucaacugcugaccua

SEQ ID NO: 1480843 - RNA, 19 nt, Homo sapiens
  misc_RNA (1)...(19): siRNA sense strand
gaaucuuacugaugccaaa

SEQ ID NO: 1480844 - RNA, 19 nt, Homo sapiens
  misc_RNA (1)...(19): siRNA sense strand
gcacauggcguagaguuug

SEQ ID NO: 1480845 - RNA, 19 nt, Homo sapiens
  misc_RNA (1)...(19): siRNA sense strand
gaaaagggucuuaaacaaa

SEQ ID NO: 1480846 - RNA, 19 nt, Homo sapiens
  misc_RNA (1)...(19): siRNA sense strand
ggagcgaaacccuuugaaa

SEQ ID NO: 1480847 - RNA, 19 nt, Homo sapiens
  misc_RNA (1)...(19): siRNA sense strand
ccaaauauaguuucaugga

SEQ ID NO: 1480848 - RNA, 19 nt, Homo sapiens
  misc_RNA (1)...(19): siRNA sense strand
cgagaaaacuggcagaaga

SEQ ID NO: 1480849 - RNA, 19 nt, Homo sapiens
  misc_RNA (1)...(19): siRNA sense strand
caacaagccagaaagcaau

SEQ ID NO: 1480850 - RNA, 19 nt, Homo sapiens
  misc_RNA (1)...(19): siRNA sense strand
gccaaacaaugccgaauac

SEQ ID NO: 1480851 - RNA, 19 nt, Homo sapiens
  misc_RNA (1)...(19): siRNA sense strand
cauugucguuucuuaugua

SEQ ID NO: 1480852 - RNA, 19 nt, Homo sapiens
  misc_RNA (1)...(19): siRNA sense strand
aaacaaugccgaauacaca

SEQ ID NO: 1480853 - RNA, 19 nt, Homo sapiens
  misc_RNA (1)...(19): siRNA sense strand
gagaggaaagacuuaauuc

SEQ ID NO: 1480854 - RNA, 19 nt, Homo sapiens
  misc_RNA (1)...(19): siRNA sense strand
aggaaagacuuaauucaca

SEQ ID NO: 1480855 - RNA, 19 nt, Homo sapiens
  misc_RNA (1)...(19): siRNA sense strand
gagcgaaacccuuugaaaa

SEQ ID NO: 1480856 - RNA, 19 nt, Homo sapiens
  misc_RNA (1)...(19): siRNA sense strand
cgaauacacaagacaagaa

SEQ ID NO: 1480857 - RNA, 19 nt, Homo sapiens
  misc_RNA (1)...(19): siRNA sense strand
uauguacacuggaguaucu

SEQ ID NO: 1480858 - RNA, 19 nt, Homo sapiens
  misc_RNA (1)...(19): siRNA sense strand
ugucaucaauuaugcuguu

SEQ ID NO: 1480859 - RNA, 19 nt, Homo sapiens
  misc_RNA (1)...(19): siRNA sense strand
cuuauucaaucgugucuga

SEQ ID NO: 1480860 - RNA, 19 nt, Homo sapiens
  misc_RNA (1)...(19): siRNA sense strand
uuacugaugccaaauauag

SEQ ID NO: 1480861 - RNA, 19 nt, Homo sapiens
  misc_RNA (1)...(19): siRNA sense strand
cacccauugucguuucuua

SEQ ID NO: 1480862 - RNA, 19 nt, Homo sapiens
  misc_RNA (1)...(19): siRNA sense strand
caucaauuaugcuguuaag

SEQ ID NO: 1480863 - RNA, 19 nt, Homo sapiens
  misc_RNA (1)...(19): siRNA sense strand
gaugccaaauauaguuuca

SEQ ID NO: 1480864 - RNA, 19 nt, Homo sapiens
  misc_RNA (1)...(19): siRNA sense strand
gguaccuacuucaccauga

SEQ ID NO: 1480865 - RNA, 19 nt, Homo sapiens
  misc_RNA (1)...(19): siRNA sense strand
guagagaggaaagacuuaa

SEQ ID NO: 1480866 - RNA, 19 nt, Homo sapiens
  misc_RNA (1)...(19): siRNA sense strand
cuacgaggaugaauugacu

SEQ ID NO: 1480867 - RNA, 19 nt, Homo sapiens
  misc_RNA (1)...(19): siRNA sense strand
ugccaaauauaguuucaug

SEQ ID NO: 1480868 - RNA, 19 nt, Homo sapiens
  misc_RNA (1)...(19): siRNA sense strand
ucaacaagccagaaagcaa

SEQ ID NO: 1480869 - RNA, 19 nt, Homo sapiens
  misc_RNA (1)...(19): siRNA sense strand
gaggagcgaaacccuuuga

SEQ ID NO: 1480870 - RNA, 19 nt, Homo sapiens
  misc_RNA (1)...(19): siRNA sense strand
gaaagcaauggaugaggau

SEQ ID NO: 1480871 - RNA, 19 nt, Homo sapiens
  misc_RNA (1)...(19): siRNA sense strand
gaggaaagacuuaauucac

SEQ ID NO: 1480872 - RNA, 19 nt, Homo sapiens
  misc_RNA (1)...(19): siRNA sense strand
agagaggaaagacuuaauu

SEQ ID NO: 1480873 - RNA, 19 nt, Homo sapiens
  misc_RNA (1)...(19): siRNA sense strand
cuguuaagauuguggaaga

SEQ ID NO: 1480874 - RNA, 19 nt, Homo sapiens
  misc_RNA (1)...(19): siRNA sense strand
ccauugucguuucuuaugu

SEQ ID NO: 1480875 - RNA, 19 nt, Homo sapiens
  misc_RNA (1)...(19): siRNA sense strand
caagaacuacgaggaugaa

SEQ ID NO: 1480876 - RNA, 19 nt, Homo sapiens
  misc_RNA (1)...(19): siRNA sense strand
caauggaugaggauaacaa

SEQ ID NO: 1480877 - RNA, 19 nt, Homo sapiens
  misc_RNA (1)...(19): siRNA sense strand
aagaggagcgaaacccuuu

SEQ ID NO: 1480878 - RNA, 19 nt, Homo sapiens
  misc_RNA (1)...(19): siRNA sense strand
gucaucaauuaugcuguua

SEQ ID NO: 1480879 - RNA, 19 nt, Homo sapiens
  misc_RNA (1)...(19): siRNA sense strand
ggaugcacccauugucguu

SEQ ID NO: 1480880 - RNA, 19 nt, Homo sapiens
  misc_RNA (1)...(19): siRNA sense strand
gccagaaagcaauggauga

SEQ ID NO: 1480881 - RNA, 19 nt, Homo sapiens
  misc_RNA (1)...(19): siRNA sense strand
auacacaagacaagaacua

SEQ ID NO: 1480882 - RNA, 19 nt, Homo sapiens
  misc_RNA (1)...(19): siRNA sense strand
caaagccgcaagccaaaca

SEQ ID NO: 1480883 - RNA, 19 nt, Homo sapiens
  misc_RNA (1)...(19): siRNA sense strand
gaauacacaagacaagaac

SEQ ID NO: 1480884 - RNA, 19 nt, Homo sapiens
  misc_RNA (1)...(19): siRNA sense strand
aagcaauggaugaggauaa

SEQ ID NO: 1480885 - RNA, 19 nt, Homo sapiens
  misc_RNA (1)...(19): siRNA sense strand
acagcuuccucuacaucua

SEQ ID NO: 1480886 - RNA, 19 nt, Homo sapiens
  misc_RNA (1)...(19): siRNA sense strand
auucacagcuuccucuaca

SEQ ID NO: 1480887 - RNA, 19 nt, Homo sapiens
  misc_RNA (1)...(19): siRNA sense strand
ggagucauuccccuucuua

SEQ ID NO: 1480888 - RNA, 19 nt, Homo sapiens
  misc_RNA (1)...(19): siRNA sense strand
gggcacauggcguagaguu

SEQ ID NO: 1480889 - RNA, 19 nt, Homo sapiens
  misc_RNA (1)...(19): siRNA sense strand
acaagaacuacgaggauga

SEQ ID NO: 1480890 - RNA, 19 nt, Homo sapiens
  misc_RNA (1)...(19): siRNA sense strand
auaguuucauggagucauu

SEQ ID NO: 1480891 - RNA, 19 nt, Homo sapiens
  misc_RNA (1)...(19): siRNA sense strand
gaaggucuccaaaaccaaa

SEQ ID NO: 1480892 - RNA, 19 nt, Homo sapiens
  misc_RNA (1)...(19): siRNA sense strand
agaacuacgaggaugaauu

SEQ ID NO: 1480893 - RNA, 19 nt, Homo sapiens
  misc_RNA (1)...(19): siRNA sense strand
uuucgaaguguguuucuaa

SEQ ID NO: 1480894 - RNA, 19 nt, Homo sapiens
  misc_RNA (1)...(19): siRNA sense strand
ucuuacugaugccaaauau

SEQ ID NO: 1480895 - RNA, 19 nt, Homo sapiens
  misc_RNA (1)...(19): siRNA sense strand
ugucguuucuuauguaggu

SEQ ID NO: 1480896 - RNA, 19 nt, Homo sapiens
  misc_RNA (1)...(19): siRNA sense strand
agccaaacaaugccgaaua

SEQ ID NO: 1480897 - RNA, 19 nt, Homo sapiens
  misc_RNA (1)...(19): siRNA sense strand
caccaagcauuaguucaca

SEQ ID NO: 1480898 - RNA, 19 nt, Homo sapiens
  misc_RNA (1)...(19): siRNA sense strand
agacaagaacuacgaggau

SEQ ID NO: 1480899 - RNA, 19 nt, Homo sapiens
  misc_RNA (1)...(19): siRNA sense strand
caaacaaugccgaauacac

SEQ ID NO: 1480900 - RNA, 19 nt, Homo sapiens
  misc_RNA (1)...(19): siRNA sense strand
agaggaaagacuuaauuca

SEQ ID NO: 1480901 - RNA, 19 nt, Homo sapiens
  misc_RNA (1)...(19): siRNA sense strand
uguagagaggaaagacuua

SEQ ID NO: 1480902 - RNA, 19 nt, Homo sapiens
  misc_RNA (1)...(19): siRNA sense strand
uagaguuuguagagaggaa

SEQ ID NO: 1480903 - RNA, 19 nt, Homo sapiens
  misc_RNA (1)...(19): siRNA sense strand
uagcucugguugaggaugu

SEQ ID NO: 1480904 - RNA, 19 nt, Homo sapiens
  misc_RNA (1)...(19): siRNA sense strand
cacaagacaagaacuacga

SEQ ID NO: 1480905 - RNA, 19 nt, Homo sapiens
  misc_RNA (1)...(19): siRNA sense strand
gagaaaacuggcagaagaa

SEQ ID NO: 1480906 - RNA, 19 nt, Homo sapiens
  misc_RNA (1)...(19): siRNA sense strand
ccaagcauuaguucacaga

SEQ ID NO: 1480907 - RNA, 19 nt, Homo sapiens
  misc_RNA (1)...(19): siRNA sense strand
cacauggcguagaguuugu

SEQ ID NO: 1480908 - RNA, 19 nt, Homo sapiens
  misc_RNA (1)...(19): siRNA sense strand
aaauucaacaagccagaaa

SEQ ID NO: 1480909 - RNA, 19 nt, Homo sapiens
  misc_RNA (1)...(19): siRNA sense strand
gaccaccaagcauuaguuc

SEQ ID NO: 1480910 - RNA, 19 nt, Homo sapiens
  misc_RNA (1)...(19): siRNA sense strand
gaaucucugcugguaccua

SEQ ID NO: 1480911 - RNA, 19 nt, Homo sapiens
  misc_RNA (1)...(19): siRNA sense strand
ucacagcuuccucuacauc

SEQ ID NO: 1480912 - RNA, 19 nt, Homo sapiens
  misc_RNA (1)...(19): siRNA sense strand
ggcguagaguuuguagaga

SEQ ID NO: 1480913 - RNA, 19 nt, Homo sapiens
  misc_RNA (1)...(19): siRNA sense strand
ggcacauggcguagaguuu

SEQ ID NO: 1480914 - RNA, 19 nt, Homo sapiens
  misc_RNA (1)...(19): siRNA sense strand
ccaggaaugguucgcuuuc

SEQ ID NO: 1480915 - RNA, 19 nt, Homo sapiens
  misc_RNA (1)...(19): siRNA sense strand
caaugccgaauacacaaga

SEQ ID NO: 1480916 - RNA, 19 nt, Homo sapiens
  misc_RNA (1)...(19): siRNA sense strand
ugaccaccaagcauuaguu

SEQ ID NO: 1480917 - RNA, 19 nt, Homo sapiens
  misc_RNA (1)...(19): siRNA sense strand
aggaaugguucgcuuucga

SEQ ID NO: 1480918 - RNA, 19 nt, Homo sapiens
  misc_RNA (1)...(19): siRNA sense strand
guucacagaccaggaaugg

SEQ ID NO: 1480919 - RNA, 19 nt, Homo sapiens
  misc_RNA (1)...(19): siRNA sense strand
gcaaugaaaucuccaagug

SEQ ID NO: 1480920 - RNA, 19 nt, Homo sapiens
  misc_RNA (1)...(19): siRNA sense strand
gaagauucaucacuuagaa

SEQ ID NO: 1480921 - RNA, 19 nt, Homo sapiens
  misc_RNA (1)...(19): siRNA sense strand
gaaagaagaaagaggauaa

SEQ ID NO: 1480922 - RNA, 19 nt, Homo sapiens
  misc_RNA (1)...(19): siRNA sense strand
gaaaggcccugaaggacuu

SEQ ID NO: 1480923 - RNA, 19 nt, Homo sapiens
  misc_RNA (1)...(19): siRNA sense strand
gauugggccucgaagauua

SEQ ID NO: 1480924 - RNA, 19 nt, Homo sapiens
  misc_RNA (1)...(19): siRNA sense strand
gcaaaugucuuuagaucuc

SEQ ID NO: 1480925 - RNA, 19 nt, Homo sapiens
  misc_RNA (1)...(19): siRNA sense strand
gcaaagaggagaaugaaga

SEQ ID NO: 1480926 - RNA, 19 nt, Homo sapiens
  misc_RNA (1)...(19): siRNA sense strand
gaaugaagauccagaaagg

SEQ ID NO: 1480927 - RNA, 19 nt, Homo sapiens
  misc_RNA (1)...(19): siRNA sense strand
agacagaacuacuaacuuc

SEQ ID NO: 1480928 - RNA, 19 nt, Homo sapiens
  misc_RNA (1)...(19): siRNA sense strand
ccaaggagcucugaauugu

SEQ ID NO: 1480929 - RNA, 19 nt, Homo sapiens
  misc_RNA (1)...(19): siRNA sense strand
caagaacaguggagauuuc

SEQ ID NO: 1480930 - RNA, 19 nt, Homo sapiens
  misc_RNA (1)...(19): siRNA sense strand
cgaaagagaaggagaagaa

SEQ ID NO: 1480931 - RNA, 19 nt, Homo sapiens
  misc_RNA (1)...(19): siRNA sense strand
gcacacaaccuccgcuuug

SEQ ID NO: 1480932 - RNA, 19 nt, Homo sapiens
  misc_RNA (1)...(19): siRNA sense strand
gagcaaggccauccgagua

SEQ ID NO: 1480933 - RNA, 19 nt, Homo sapiens
  misc_RNA (1)...(19): siRNA sense strand
gaacuuggaagacagagaa

SEQ ID NO: 1480934 - RNA, 19 nt, Homo sapiens
  misc_RNA (1)...(19): siRNA sense strand
gaaacaugguggccugaga

SEQ ID NO: 1480935 - RNA, 19 nt, Homo sapiens
  misc_RNA (1)...(19): siRNA sense strand
aaagcaagguucacucauu

SEQ ID NO: 1480936 - RNA, 19 nt, Homo sapiens
  misc_RNA (1)...(19): siRNA sense strand
gaagcuauggaaacacuua

SEQ ID NO: 1480937 - RNA, 19 nt, Homo sapiens
  misc_RNA (1)...(19): siRNA sense strand
cagcaaaugucuuuagauc

SEQ ID NO: 1480938 - RNA, 19 nt, Homo sapiens
  misc_RNA (1)...(19): siRNA sense strand
gcacugaccguauccagaa

SEQ ID NO: 1480939 - RNA, 19 nt, Homo sapiens
  misc_RNA (1)...(19): siRNA sense strand
gcaauuggaucaguguaug

SEQ ID NO: 1480940 - RNA, 19 nt, Homo sapiens
  misc_RNA (1)...(19): siRNA sense strand
guacagacagaacuacuaa

SEQ ID NO: 1480941 - RNA, 19 nt, Homo sapiens
  misc_RNA (1)...(19): siRNA sense strand
gaaagaagagcgugaaagg

SEQ ID NO: 1480942 - RNA, 19 nt, Homo sapiens
  misc_RNA (1)...(19): siRNA sense strand
ccacgaagcuauggaaaca

SEQ ID NO: 1480943 - RNA, 19 nt, Homo sapiens
  misc_RNA (1)...(19): siRNA sense strand
ggauccagaugaugucuug

SEQ ID NO: 1480944 - RNA, 19 nt, Homo sapiens
  misc_RNA (1)...(19): siRNA sense strand
gaaagguacucugaaacau

SEQ ID NO: 1480945 - RNA, 19 nt, Homo sapiens
  misc_RNA (1)...(19): siRNA sense strand
gaugaugucuuggcagaug

SEQ ID NO: 1480946 - RNA, 19 nt, Homo sapiens
  misc_RNA (1)...(19): siRNA sense strand
uguaugauauggaugauga

SEQ ID NO: 1480947 - RNA, 19 nt, Homo sapiens
  misc_RNA (1)...(19): siRNA sense strand
gaaccacuccacaagauug

SEQ ID NO: 1480948 - RNA, 19 nt, Homo sapiens
  misc_RNA (1)...(19): siRNA sense strand
cagauguuguugaagauaa

SEQ ID NO: 1480949 - RNA, 19 nt, Homo sapiens
  misc_RNA (1)...(19): siRNA sense strand
ugauauggaugaugaugaa

SEQ ID NO: 1480950 - RNA, 19 nt, Homo sapiens
  misc_RNA (1)...(19): siRNA sense strand
gggagaaggguccugguua

SEQ ID NO: 1480951 - RNA, 19 nt, Homo sapiens
  misc_RNA (1)...(19): siRNA sense strand
cagccugaaucaauuaauu

SEQ ID NO: 1480952 - RNA, 19 nt, Homo sapiens
  misc_RNA (1)...(19): siRNA sense strand
ggagaaggguccugguuac

SEQ ID NO: 1480953 - RNA, 19 nt, Homo sapiens
  misc_RNA (1)...(19): siRNA sense strand
cuacuaacuucgccaagaa

SEQ ID NO: 1480954 - RNA, 19 nt, Homo sapiens
  misc_RNA (1)...(19): siRNA sense strand
gcccagaccaguacccuua

SEQ ID NO: 1480955 - RNA, 19 nt, Homo sapiens
  misc_RNA (1)...(19): siRNA sense strand
aaggacacauugagugaua

SEQ ID NO: 1480956 - RNA, 19 nt, Homo sapiens
  misc_RNA (1)...(19): siRNA sense strand
gaacuaaggacacauugag

SEQ ID NO: 1480957 - RNA, 19 nt, Homo sapiens
  misc_RNA (1)...(19): siRNA sense strand
gauaaagacaagcugauug

SEQ ID NO: 1480958 - RNA, 19 nt, Homo sapiens
  misc_RNA (1)...(19): siRNA sense strand
aaggagcucugaauuguga

SEQ ID NO: 1480959 - RNA, 19 nt, Homo sapiens
  misc_RNA (1)...(19): siRNA sense strand
ccaacuggcugcauuuaag

SEQ ID NO: 1480960 - RNA, 19 nt, Homo sapiens
  misc_RNA (1)...(19): siRNA sense strand
uaacuucgccaagaacuaa

SEQ ID NO: 1480961 - RNA, 19 nt, Homo sapiens
  misc_RNA (1)...(19): siRNA sense strand
ggaaagaagaaagaggaua

SEQ ID NO: 1480962 - RNA, 19 nt, Homo sapiens
  misc_RNA (1)...(19): siRNA sense strand
caagcugauugcuguguuu

SEQ ID NO: 1480963 - RNA, 19 nt, Homo sapiens
  misc_RNA (1)...(19): siRNA sense strand
ggaggauccugcagagugu

SEQ ID NO: 1480964 - RNA, 19 nt, Homo sapiens
  misc_RNA (1)...(19): siRNA sense strand
gucauuggcucucuuaaca

SEQ ID NO: 1480965 - RNA, 19 nt, Homo sapiens
  misc_RNA (1)...(19): siRNA sense strand
uggcagauguuguugaaga

SEQ ID NO: 1480966 - RNA, 19 nt, Homo sapiens
  misc_RNA (1)...(19): siRNA sense strand
aaagaaaggcccugaagga

SEQ ID NO: 1480967 - RNA, 19 nt, Homo sapiens
  misc_RNA (1)...(19): siRNA sense strand
gagaagaagagcuggagaa

SEQ ID NO: 1480968 - RNA, 19 nt, Homo sapiens
  misc_RNA (1)...(19): siRNA sense strand
uggaaaggcugagcagaaa

SEQ ID NO: 1480969 - RNA, 19 nt, Homo sapiens
  misc_RNA (1)...(19): siRNA sense strand
ccaaagggagcagcaauaa

SEQ ID NO: 1480970 - RNA, 19 nt, Homo sapiens
  misc_RNA (1)...(19): siRNA sense strand
cauuggcucucuuaacauu

SEQ ID NO: 1480971 - RNA, 19 nt, Homo sapiens
  misc_RNA (1)...(19): siRNA sense strand
gaaagagaaggagaagaaa

SEQ ID NO: 1480972 - RNA, 19 nt, Homo sapiens
  misc_RNA (1)...(19): siRNA sense strand
aagcaagguucacucauug

SEQ ID NO: 1480973 - RNA, 19 nt, Homo sapiens
  misc_RNA (1)...(19): siRNA sense strand
gcacaucaacuucagaucu

SEQ ID NO: 1480974 - RNA, 19 nt, Homo sapiens
  misc_RNA (1)...(19): siRNA sense strand
gcugauugcuguguuugaa

SEQ ID NO: 1480975 - RNA, 19 nt, Homo sapiens
  misc_RNA (1)...(19): siRNA sense strand
ggacagaauuuuggaggua

SEQ ID NO: 1480976 - RNA, 19 nt, Homo sapiens
  misc_RNA (1)...(19): siRNA sense strand
ggagguaaaugggagagau

SEQ ID NO: 1480977 - RNA, 19 nt, Homo sapiens
  misc_RNA (1)...(19): siRNA sense strand
ccgcagauccuguagacua

SEQ ID NO: 1480978 - RNA, 19 nt, Homo sapiens
  misc_RNA (1)...(19): siRNA sense strand
gugaaaggauuggagcaaa

SEQ ID NO: 1480979 - RNA, 19 nt, Homo sapiens
  misc_RNA (1)...(19): siRNA sense strand
gaagagcgugaaaggauug

SEQ ID NO: 1480980 - RNA, 19 nt, Homo sapiens
  misc_RNA (1)...(19): siRNA sense strand
aagaagagcuggagaaaau

SEQ ID NO: 1480981 - RNA, 19 nt, Homo sapiens
  misc_RNA (1)...(19): siRNA sense strand
caagaacuaaggacacauu

SEQ ID NO: 1480982 - RNA, 19 nt, Homo sapiens
  misc_RNA (1)...(19): siRNA sense strand
uagaggacauggaaaauaa

SEQ ID NO: 1480983 - RNA, 19 nt, Homo sapiens
  misc_RNA (1)...(19): siRNA sense strand
gacaagaacaguggagauu

SEQ ID NO: 1480984 - RNA, 19 nt, Homo sapiens
  misc_RNA (1)...(19): siRNA sense strand
gcugagauuuggaaagaag

SEQ ID NO: 1480985 - RNA, 19 nt, Homo sapiens
  misc_RNA (1)...(19): siRNA sense strand
gaucagcacaucaacuuca

SEQ ID NO: 1480986 - RNA, 19 nt, Homo sapiens
  misc_RNA (1)...(19): siRNA sense strand
caauguccauggagggaaa

SEQ ID NO: 1480987 - RNA, 19 nt, Homo sapiens
  misc_RNA (1)...(19): siRNA sense strand
caacaauguggaucucgua

SEQ ID NO: 1480988 - RNA, 19 nt, Homo sapiens
  misc_RNA (1)...(19): siRNA sense strand
gggaaucucuuuugggaaa

SEQ ID NO: 1480989 - RNA, 19 nt, Homo sapiens
  misc_RNA (1)...(19): siRNA sense strand
agaagagcgugaaaggauu

SEQ ID NO: 1480990 - RNA, 19 nt, Homo sapiens
  misc_RNA (1)...(19): siRNA sense strand
caagaaccacuccacaaga

SEQ ID NO: 1480991 - RNA, 19 nt, Homo sapiens
  misc_RNA (1)...(19): siRNA sense strand
acacuuaggcggucaaugu

SEQ ID NO: 1480992 - RNA, 19 nt, Homo sapiens
  misc_RNA (1)...(19): siRNA sense strand
gauggucgucugcgaauga

SEQ ID NO: 1480993 - RNA, 19 nt, Homo sapiens
  misc_RNA (1)...(19): siRNA sense strand
gguggcagaucuccgguau

SEQ ID NO: 1480994 - RNA, 19 nt, Homo sapiens
  misc_RNA (1)...(19): siRNA sense strand
gagaaugaagauccagaaa

SEQ ID NO: 1480995 - RNA, 19 nt, Homo sapiens
  misc_RNA (1)...(19): siRNA sense strand
caaacagaaaggucuauug

SEQ ID NO: 1480996 - RNA, 19 nt, Homo sapiens
  misc_RNA (1)...(19): siRNA sense strand
caagcgggagggacuauuu

SEQ ID NO: 1480997 - RNA, 19 nt, Homo sapiens
  misc_RNA (1)...(19): siRNA sense strand
gcaaggccauccgaguaug

SEQ ID NO: 1480998 - RNA, 19 nt, Homo sapiens
  misc_RNA (1)...(19): siRNA sense strand
agaaagagaccacuuagag

SEQ ID NO: 1480999 - RNA, 19 nt, Homo sapiens
  misc_RNA (1)...(19): siRNA sense strand
gcagauguuguugaagaua

SEQ ID NO: 1481000 - RNA, 19 nt, Homo sapiens
  misc_RNA (1)...(19): siRNA sense strand
ggagaaugaagauccagaa

SEQ ID NO: 1481001 - RNA, 19 nt, Homo sapiens
  misc_RNA (1)...(19): siRNA sense strand
caaagggagcagcaauaaa

SEQ ID NO: 1481002 - RNA, 19 nt, Homo sapiens
  misc_RNA (1)...(19): siRNA sense strand
ugaaugguguacagacaga

SEQ ID NO: 1481003 - RNA, 19 nt, Homo sapiens
  misc_RNA (1)...(19): siRNA sense strand
cauccacugucuccagaaa

SEQ ID NO: 1481004 - RNA, 19 nt, Homo sapiens
  misc_RNA (1)...(19): siRNA sense strand
gaaccaugcacaucagcaa

SEQ ID NO: 1481005 - RNA, 19 nt, Homo sapiens
  misc_RNA (1)...(19): siRNA sense strand
gaaauggaccccaauuaug

SEQ ID NO: 1481006 - RNA, 19 nt, Homo sapiens
  misc_RNA (1)...(19): siRNA sense strand
uauggaugaugaugaaaug

SEQ ID NO: 1481007 - RNA, 19 nt, Homo sapiens
  misc_RNA (1)...(19): siRNA sense strand
ggagcuagaggacauggaa

SEQ ID NO: 1481008 - RNA, 19 nt, Homo sapiens
  misc_RNA (1)...(19): siRNA sense strand
cgaagagcauggaccuugu

SEQ ID NO: 1481009 - RNA, 19 nt, Homo sapiens
  misc_RNA (1)...(19): siRNA sense strand
ggauugggccucgaagauu

SEQ ID NO: 1481010 - RNA, 19 nt, Homo sapiens
  misc_RNA (1)...(19): siRNA sense strand
gccaaggagcucugaauug

SEQ ID NO: 1481011 - RNA, 19 nt, Homo sapiens
  misc_RNA (1)...(19): siRNA sense strand
ggaaaagggcaaauugaaa

SEQ ID NO: 1481012 - RNA, 19 nt, Homo sapiens
  misc_RNA (1)...(19): siRNA sense strand
aagaaccacuccacaagau

SEQ ID NO: 1481013 - RNA, 19 nt, Homo sapiens
  misc_RNA (1)...(19): siRNA sense strand
gggaaaguccaaccacgaa

SEQ ID NO: 1481014 - RNA, 19 nt, Homo sapiens
  misc_RNA (1)...(19): siRNA sense strand
gaccagcugauugcaguua

SEQ ID NO: 1481015 - RNA, 19 nt, Homo sapiens
  misc_RNA (1)...(19): siRNA sense strand
uaccaaggcugggaggaaa

SEQ ID NO: 1481016 - RNA, 19 nt, Homo sapiens
  misc_RNA (1)...(19): siRNA sense strand
cuaaagacagcaaaucuca

SEQ ID NO: 1481017 - RNA, 19 nt, Homo sapiens
  misc_RNA (1)...(19): siRNA sense strand
ggacuaaagacagcaaauc

SEQ ID NO: 1481018 - RNA, 19 nt, Homo sapiens
  misc_RNA (1)...(19): siRNA sense strand
ugaagacgacgaaggaaga

SEQ ID NO: 1481019 - RNA, 19 nt, Homo sapiens
  misc_RNA (1)...(19): siRNA sense strand
gcaaugaaaucuccaagug

SEQ ID NO: 1481020 - RNA, 19 nt, Homo sapiens
  misc_RNA (1)...(19): siRNA sense strand
gaagauucaucacuuagaa

SEQ ID NO: 1481021 - RNA, 19 nt, Homo sapiens
  misc_RNA (1)...(19): siRNA sense strand
gaaagaagaaagaggauaa

SEQ ID NO: 1481022 - RNA, 19 nt, Homo sapiens
  misc_RNA (1)...(19): siRNA sense strand
gaaaggcccugaaggacuu

SEQ ID NO: 1481023 - RNA, 19 nt, Homo sapiens
  misc_RNA (1)...(19): siRNA sense strand
gauugggccucgaagauua

SEQ ID NO: 1481024 - RNA, 19 nt, Homo sapiens
  misc_RNA (1)...(19): siRNA sense strand
gcaaaugucuuuagaucuc

SEQ ID NO: 1481025 - RNA, 19 nt, Homo sapiens
  misc_RNA (1)...(19): siRNA sense strand
gcaaagaggagaaugaaga

SEQ ID NO: 1481026 - RNA, 19 nt, Homo sapiens
  misc_RNA (1)...(19): siRNA sense strand
gaaugaagauccagaaagg

SEQ ID NO: 1481027 - RNA, 19 nt, Homo sapiens
  misc_RNA (1)...(19): siRNA sense strand
agacagaacuacuaacuuc

SEQ ID NO: 1481028 - RNA, 19 nt, Homo sapiens
  misc_RNA (1)...(19): siRNA sense strand
ccaaggagcucugaauugu

SEQ ID NO: 1481029 - RNA, 19 nt, Homo sapiens
  misc_RNA (1)...(19): siRNA sense strand
caagaacaguggagauuuc

SEQ ID NO: 1481030 - RNA, 19 nt, Homo sapiens
  misc_RNA (1)...(19): siRNA sense strand
cgaaagagaaggagaagaa

SEQ ID NO: 1481031 - RNA, 19 nt, Homo sapiens
  misc_RNA (1)...(19): siRNA sense strand
gcacacaaccuccgcuuug

SEQ ID NO: 1481032 - RNA, 19 nt, Homo sapiens
  misc_RNA (1)...(19): siRNA sense strand
gagcaaggccauccgagua

SEQ ID NO: 1481033 - RNA, 19 nt, Homo sapiens
  misc_RNA (1)...(19): siRNA sense strand
gaacuuggaagacagagaa

SEQ ID NO: 1481034 - RNA, 19 nt, Homo sapiens
  misc_RNA (1)...(19): siRNA sense strand
gaaacaugguggccugaga

SEQ ID NO: 1481035 - RNA, 19 nt, Homo sapiens
  misc_RNA (1)...(19): siRNA sense strand
aaagcaagguucacucauu

SEQ ID NO: 1481036 - RNA, 19 nt, Homo sapiens
  misc_RNA (1)...(19): siRNA sense strand
gaagcuauggaaacacuua

SEQ ID NO: 1481037 - RNA, 19 nt, Homo sapiens
  misc_RNA (1)...(19): siRNA sense strand
cagcaaaugucuuuagauc

SEQ ID NO: 1481038 - RNA, 19 nt, Homo sapiens
  misc_RNA (1)...(19): siRNA sense strand
gcacugaccguauccagaa

SEQ ID NO: 1481039 - RNA, 19 nt, Homo sapiens
  misc_RNA (1)...(19): siRNA sense strand
gcaauuggaucaguguaug

SEQ ID NO: 1481040 - RNA, 19 nt, Homo sapiens
  misc_RNA (1)...(19): siRNA sense strand
guacagacagaacuacuaa

SEQ ID NO: 1481041 - RNA, 19 nt, Homo sapiens
  misc_RNA (1)...(19): siRNA sense strand
gaaagaagagcgugaaagg

SEQ ID NO: 1481042 - RNA, 19 nt, Homo sapiens
  misc_RNA (1)...(19): siRNA sense strand
ccacgaagcuauggaaaca

SEQ ID NO: 1481043 - RNA, 19 nt, Homo sapiens
  misc_RNA (1)...(19): siRNA sense strand
ggauccagaugaugucuug

SEQ ID NO: 1481044 - RNA, 19 nt, Homo sapiens
  misc_RNA (1)...(19): siRNA sense strand
gaaagguacucugaaacau

SEQ ID NO: 1481045 - RNA, 19 nt, Homo sapiens
  misc_RNA (1)...(19): siRNA sense strand
gaugaugucuuggcagaug

SEQ ID NO: 1481046 - RNA, 19 nt, Homo sapiens
  misc_RNA (1)...(19): siRNA sense strand
uguaugauauggaugauga

SEQ ID NO: 1481047 - RNA, 19 nt, Homo sapiens
  misc_RNA (1)...(19): siRNA sense strand
gaaccacuccacaagauug

SEQ ID NO: 1481048 - RNA, 19 nt, Homo sapiens
  misc_RNA (1)...(19): siRNA sense strand
cagauguuguugaagauaa

SEQ ID NO: 1481049 - RNA, 19 nt, Homo sapiens
  misc_RNA (1)...(19): siRNA sense strand
ugauauggaugaugaugaa

SEQ ID NO: 1481050 - RNA, 19 nt, Homo sapiens
  misc_RNA (1)...(19): siRNA sense strand
gggagaaggguccugguua

SEQ ID NO: 1481051 - RNA, 19 nt, Homo sapiens
  misc_RNA (1)...(19): siRNA sense strand
cagccugaaucaauuaauu

SEQ ID NO: 1481052 - RNA, 19 nt, Homo sapiens
  misc_RNA (1)...(19): siRNA sense strand
ggagaaggguccugguuac

SEQ ID NO: 1481053 - RNA, 19 nt, Homo sapiens
  misc_RNA (1)...(19): siRNA sense strand
cuacuaacuucgccaagaa

SEQ ID NO: 1481054 - RNA, 19 nt, Homo sapiens
  misc_RNA (1)...(19): siRNA sense strand
gcccagaccaguacccuua

SEQ ID NO: 1481055 - RNA, 19 nt, Homo sapiens
  misc_RNA (1)...(19): siRNA sense strand
aaggacacauugagugaua

SEQ ID NO: 1481056 - RNA, 19 nt, Homo sapiens
  misc_RNA (1)...(19): siRNA sense strand
gaacuaaggacacauugag

SEQ ID NO: 1481057 - RNA, 19 nt, Homo sapiens
  misc_RNA (1)...(19): siRNA sense strand
gauaaagacaagcugauug

SEQ ID NO: 1481058 - RNA, 19 nt, Homo sapiens
  misc_RNA (1)...(19): siRNA sense strand
aaggagcucugaauuguga

SEQ ID NO: 1481059 - RNA, 19 nt, Homo sapiens
  misc_RNA (1)...(19): siRNA sense strand
ccaacuggcugcauuuaag

SEQ ID NO: 1481060 - RNA, 19 nt, Homo sapiens
  misc_RNA (1)...(19): siRNA sense strand
uaacuucgccaagaacuaa

SEQ ID NO: 1481061 - RNA, 19 nt, Homo sapiens
  misc_RNA (1)...(19): siRNA sense strand
ggaaagaagaaagaggaua

SEQ ID NO: 1481062 - RNA, 19 nt, Homo sapiens
  misc_RNA (1)...(19): siRNA sense strand
caagcugauugcuguguuu

SEQ ID NO: 1481063 - RNA, 19 nt, Homo sapiens
  misc_RNA (1)...(19): siRNA sense strand
ggaggauccugcagagugu

SEQ ID NO: 1481064 - RNA, 19 nt, Homo sapiens
  misc_RNA (1)...(19): siRNA sense strand
gucauuggcucucuuaaca

SEQ ID NO: 1481065 - RNA, 19 nt, Homo sapiens
  misc_RNA (1)...(19): siRNA sense strand
uggcagauguuguugaaga

SEQ ID NO: 1481066 - RNA, 19 nt, Homo sapiens
  misc_RNA (1)...(19): siRNA sense strand
aaagaaaggcccugaagga

SEQ ID NO: 1481067 - RNA, 19 nt, Homo sapiens
  misc_RNA (1)...(19): siRNA sense strand
gagaagaagagcuggagaa

SEQ ID NO: 1481068 - RNA, 19 nt, Homo sapiens
  misc_RNA (1)...(19): siRNA sense strand
uggaaaggcugagcagaaa

SEQ ID NO: 1481069 - RNA, 19 nt, Homo sapiens
  misc_RNA (1)...(19): siRNA sense strand
ccaaagggagcagcaauaa

SEQ ID NO: 1481070 - RNA, 19 nt, Homo sapiens
  misc_RNA (1)...(19): siRNA sense strand
cauuggcucucuuaacauu

SEQ ID NO: 1481071 - RNA, 19 nt, Homo sapiens
  misc_RNA (1)...(19): siRNA sense strand
gaaagagaaggagaagaaa

SEQ ID NO: 1481072 - RNA, 19 nt, Homo sapiens
  misc_RNA (1)...(19): siRNA sense strand
aagcaagguucacucauug

SEQ ID NO: 1481073 - RNA, 19 nt, Homo sapiens
  misc_RNA (1)...(19): siRNA sense strand
gcacaucaacuucagaucu

SEQ ID NO: 1481074 - RNA, 19 nt, Homo sapiens
  misc_RNA (1)...(19): siRNA sense strand
gcugauugcuguguuugaa

SEQ ID NO: 1481075 - RNA, 19 nt, Homo sapiens
  misc_RNA (1)...(19): siRNA sense strand
ggacagaauuuuggaggua

SEQ ID NO: 1481076 - RNA, 19 nt, Homo sapiens
  misc_RNA (1)...(19): siRNA sense strand
ggagguaaaugggagagau

SEQ ID NO: 1481077 - RNA, 19 nt, Homo sapiens
  misc_RNA (1)...(19): siRNA sense strand
ccgcagauccuguagacua

SEQ ID NO: 1481078 - RNA, 19 nt, Homo sapiens
  misc_RNA (1)...(19): siRNA sense strand
gugaaaggauuggagcaaa

SEQ ID NO: 1481079 - RNA, 19 nt, Homo sapiens
  misc_RNA (1)...(19): siRNA sense strand
gaagagcgugaaaggauug

SEQ ID NO: 1481080 - RNA, 19 nt, Homo sapiens
  misc_RNA (1)...(19): siRNA sense strand
aagaagagcuggagaaaau

SEQ ID NO: 1481081 - RNA, 19 nt, Homo sapiens
  misc_RNA (1)...(19): siRNA sense strand
caagaacuaaggacacauu

SEQ ID NO: 1481082 - RNA, 19 nt, Homo sapiens
  misc_RNA (1)...(19): siRNA sense strand
uagaggacauggaaaauaa

SEQ ID NO: 1481083 - RNA, 19 nt, Homo sapiens
  misc_RNA (1)...(19): siRNA sense strand
gacaagaacaguggagauu

SEQ ID NO: 1481084 - RNA, 19 nt, Homo sapiens
  misc_RNA (1)...(19): siRNA sense strand
gcugagauuuggaaagaag

SEQ ID NO: 1481085 - RNA, 19 nt, Homo sapiens
  misc_RNA (1)...(19): siRNA sense strand
gaucagcacaucaacuuca

SEQ ID NO: 1481086 - RNA, 19 nt, Homo sapiens
  misc_RNA (1)...(19): siRNA sense strand
caauguccauggagggaaa

SEQ ID NO: 1481087 - RNA, 19 nt, Homo sapiens
  misc_RNA (1)...(19): siRNA sense strand
caacaauguggaucucgua

SEQ ID NO: 1481088 - RNA, 19 nt, Homo sapiens
  misc_RNA (1)...(19): siRNA sense strand
gggaaucucuuuugggaaa

SEQ ID NO: 1481089 - RNA, 19 nt, Homo sapiens
  misc_RNA (1)...(19): siRNA sense strand
agaagagcgugaaaggauu

SEQ ID NO: 1481090 - RNA, 19 nt, Homo sapiens
  misc_RNA (1)...(19): siRNA sense strand
caagaaccacuccacaaga

SEQ ID NO: 1481091 - RNA, 19 nt, Homo sapiens
  misc_RNA (1)...(19): siRNA sense strand
acacuuaggcggucaaugu

SEQ ID NO: 1481092 - RNA, 19 nt, Homo sapiens
  misc_RNA (1)...(19): siRNA sense strand
gauggucgucugcgaauga

SEQ ID NO: 1481093 - RNA, 19 nt, Homo sapiens
  misc_RNA (1)...(19): siRNA sense strand
gguggcagaucuccgguau

SEQ ID NO: 1481094 - RNA, 19 nt, Homo sapiens
  misc_RNA (1)...(19): siRNA sense strand
gagaaugaagauccagaaa

SEQ ID NO: 1481095 - RNA, 19 nt, Homo sapiens
  misc_RNA (1)...(19): siRNA sense strand
caaacagaaaggucuauug

SEQ ID NO: 1481096 - RNA, 19 nt, Homo sapiens
  misc_RNA (1)...(19): siRNA sense strand
caagcgggagggacuauuu

SEQ ID NO: 1481097 - RNA, 19 nt, Homo sapiens
  misc_RNA (1)...(19): siRNA sense strand
gcaaggccauccgaguaug

SEQ ID NO: 1481098 - RNA, 19 nt, Homo sapiens
  misc_RNA (1)...(19): siRNA sense strand
agaaagagaccacuuagag

SEQ ID NO: 1481099 - RNA, 19 nt, Homo sapiens
  misc_RNA (1)...(19): siRNA sense strand
gcagauguuguugaagaua

SEQ ID NO: 1481100 - RNA, 19 nt, Homo sapiens
  misc_RNA (1)...(19): siRNA sense strand
ggagaaugaagauccagaa

SEQ ID NO: 1481101 - RNA, 19 nt, Homo sapiens
  misc_RNA (1)...(19): siRNA sense strand
caaagggagcagcaauaaa

SEQ ID NO: 1481102 - RNA, 19 nt, Homo sapiens
  misc_RNA (1)...(19): siRNA sense strand
ugaaugguguacagacaga

SEQ ID NO: 1481103 - RNA, 19 nt, Homo sapiens
  misc_RNA (1)...(19): siRNA sense strand
cauccacugucuccagaaa

SEQ ID NO: 1481104 - RNA, 19 nt, Homo sapiens
  misc_RNA (1)...(19): siRNA sense strand
gaaccaugcacaucagcaa

SEQ ID NO: 1481105 - RNA, 19 nt, Homo sapiens
  misc_RNA (1)...(19): siRNA sense strand
gaaauggaccccaauuaug

SEQ ID NO: 1481106 - RNA, 19 nt, Homo sapiens
  misc_RNA (1)...(19): siRNA sense strand
uauggaugaugaugaaaug

SEQ ID NO: 1481107 - RNA, 19 nt, Homo sapiens
  misc_RNA (1)...(19): siRNA sense strand
ggagcuagaggacauggaa

SEQ ID NO: 1481108 - RNA, 19 nt, Homo sapiens
  misc_RNA (1)...(19): siRNA sense strand
cgaagagcauggaccuugu

SEQ ID NO: 1481109 - RNA, 19 nt, Homo sapiens
  misc_RNA (1)...(19): siRNA sense strand
ggauugggccucgaagauu

SEQ ID NO: 1481110 - RNA, 19 nt, Homo sapiens
  misc_RNA (1)...(19): siRNA sense strand
gccaaggagcucugaauug

SEQ ID NO: 1481111 - RNA, 19 nt, Homo sapiens
  misc_RNA (1)...(19): siRNA sense strand
ggaaaagggcaaauugaaa

SEQ ID NO: 1481112 - RNA, 19 nt, Homo sapiens
  misc_RNA (1)...(19): siRNA sense strand
aagaaccacuccacaagau

SEQ ID NO: 1481113 - RNA, 19 nt, Homo sapiens
  misc_RNA (1)...(19): siRNA sense strand
gggaaaguccaaccacgaa

SEQ ID NO: 1481114 - RNA, 19 nt, Homo sapiens
  misc_RNA (1)...(19): siRNA sense strand
gaccagcugauugcaguua

SEQ ID NO: 1481115 - RNA, 19 nt, Homo sapiens
  misc_RNA (1)...(19): siRNA sense strand
uaccaaggcugggaggaaa

SEQ ID NO: 1481116 - RNA, 19 nt, Homo sapiens
  misc_RNA (1)...(19): siRNA sense strand
cuaaagacagcaaaucuca

SEQ ID NO: 1481117 - RNA, 19 nt, Homo sapiens
  misc_RNA (1)...(19): siRNA sense strand
ggacuaaagacagcaaauc

SEQ ID NO: 1481118 - RNA, 19 nt, Homo sapiens
  misc_RNA (1)...(19): siRNA sense strand
ugaagacgacgaaggaaga

SEQ ID NO: 1481119 - RNA, 19 nt, Homo sapiens
  misc_RNA (1)...(19): siRNA sense strand
gaagagaaagcuaauaaga

SEQ ID NO: 1481120 - RNA, 19 nt, Homo sapiens
  misc_RNA (1)...(19): siRNA sense strand
agagaaagcuaauaagaag

SEQ ID NO: 1481121 - RNA, 19 nt, Homo sapiens
  misc_RNA (1)...(19): siRNA sense strand
gcugcuggaucaaguauca

SEQ ID NO: 1481122 - RNA, 19 nt, Homo sapiens
  misc_RNA (1)...(19): siRNA sense strand
cugaagagaaagcuaauaa

SEQ ID NO: 1481123 - RNA, 19 nt, Homo sapiens
  misc_RNA (1)...(19): siRNA sense strand
gagagaagaggaagagucu

SEQ ID NO: 1481124 - RNA, 19 nt, Homo sapiens
  misc_RNA (1)...(19): siRNA sense strand
gucuuggucuuuggaaaua

SEQ ID NO: 1481125 - RNA, 19 nt, Homo sapiens
  misc_RNA (1)...(19): siRNA sense strand
uaagaaggcagagagaaga

SEQ ID NO: 1481126 - RNA, 19 nt, Homo sapiens
  misc_RNA (1)...(19): siRNA sense strand
gcagagagaagaggaagag

SEQ ID NO: 1481127 - RNA, 19 nt, Homo sapiens
  misc_RNA (1)...(19): siRNA sense strand
gagucuuggucuuuggaaa

SEQ ID NO: 1481128 - RNA, 19 nt, Homo sapiens
  misc_RNA (1)...(19): siRNA sense strand
ggucuuuggaaauaucuuu

SEQ ID NO: 1481129 - RNA, 19 nt, Homo sapiens
  misc_RNA (1)...(19): siRNA sense strand
ggagcugcuggaucaagua

SEQ ID NO: 1481130 - RNA, 19 nt, Homo sapiens
  misc_RNA (1)...(19): siRNA sense strand
uaauaagaaggcagagaga

SEQ ID NO: 1481131 - RNA, 19 nt, Homo sapiens
  misc_RNA (1)...(19): siRNA sense strand
gagcugcuggaucaaguau

SEQ ID NO: 1481132 - RNA, 19 nt, Homo sapiens
  misc_RNA (1)...(19): siRNA sense strand
gcuaauaagaaggcagaga

SEQ ID NO: 1481133 - RNA, 19 nt, Homo sapiens
  misc_RNA (1)...(19): siRNA sense strand
gaagagaaagcuaauaaga

SEQ ID NO: 1481134 - RNA, 19 nt, Homo sapiens
  misc_RNA (1)...(19): siRNA sense strand
agagaaagcuaauaagaag

SEQ ID NO: 1481135 - RNA, 19 nt, Homo sapiens
  misc_RNA (1)...(19): siRNA sense strand
gcugcuggaucaaguauca

SEQ ID NO: 1481136 - RNA, 19 nt, Homo sapiens
  misc_RNA (1)...(19): siRNA sense strand
cugaagagaaagcuaauaa

SEQ ID NO: 1481137 - RNA, 19 nt, Homo sapiens
  misc_RNA (1)...(19): siRNA sense strand
gagagaagaggaagagucu

SEQ ID NO: 1481138 - RNA, 19 nt, Homo sapiens
  misc_RNA (1)...(19): siRNA sense strand
gucuuggucuuuggaaaua

SEQ ID NO: 1481139 - RNA, 19 nt, Homo sapiens
  misc_RNA (1)...(19): siRNA sense strand
uaagaaggcagagagaaga

SEQ ID NO: 1481140 - RNA, 19 nt, Homo sapiens
  misc_RNA (1)...(19): siRNA sense strand
gcagagagaagaggaagag

SEQ ID NO: 1481141 - RNA, 19 nt, Homo sapiens
  misc_RNA (1)...(19): siRNA sense strand
gagucuuggucuuuggaaa

SEQ ID NO: 1481142 - RNA, 19 nt, Homo sapiens
  misc_RNA (1)...(19): siRNA sense strand
ggucuuuggaaauaucuuu

SEQ ID NO: 1481143 - RNA, 19 nt, Homo sapiens
  misc_RNA (1)...(19): siRNA sense strand
ggagcugcuggaucaagua

SEQ ID NO: 1481144 - RNA, 19 nt, Homo sapiens
  misc_RNA (1)...(19): siRNA sense strand
uaauaagaaggcagagaga

SEQ ID NO: 1481145 - RNA, 19 nt, Homo sapiens
  misc_RNA (1)...(19): siRNA sense strand
gagcugcuggaucaaguau

SEQ ID NO: 1481146 - RNA, 19 nt, Homo sapiens
  misc_RNA (1)...(19): siRNA sense strand
gcuaauaagaaggcagaga

SEQ ID NO: 1481147 - RNA, 19 nt, Homo sapiens
  misc_RNA (1)...(19): siRNA sense strand
uggaacagcugcagccauu

SEQ ID NO: 1481148 - RNA, 19 nt, Homo sapiens
  misc_RNA (1)...(19): siRNA sense strand
ccucaccuuucuacaagua

SEQ ID NO: 1481149 - RNA, 19 nt, Homo sapiens
  misc_RNA (1)...(19): siRNA sense strand
ggaaaccugggacaucuga

SEQ ID NO: 1481150 - RNA, 19 nt, Homo sapiens
  misc_RNA (1)...(19): siRNA sense strand
gaacagcugcagccauuuu

SEQ ID NO: 1481151 - RNA, 19 nt, Homo sapiens
  misc_RNA (1)...(19): siRNA sense strand
gaugugaggucuggaacag

SEQ ID NO: 1481152 - RNA, 19 nt, Homo sapiens
  misc_RNA (1)...(19): siRNA sense strand
ccugggacaucugaacuga

SEQ ID NO: 1481153 - RNA, 19 nt, Homo sapiens
  misc_RNA (1)...(19): siRNA sense strand
acucuucccucaccuuucu

SEQ ID NO: 1481154 - RNA, 19 nt, Homo sapiens
  misc_RNA (1)...(19): siRNA sense strand
ugggaaaccugggacaucu

SEQ ID NO: 1481155 - RNA, 19 nt, Homo sapiens
  misc_RNA (1)...(19): siRNA sense strand
ucccucaccuuucuacaag

SEQ ID NO: 1481156 - RNA, 19 nt, Homo sapiens
  misc_RNA (1)...(19): siRNA sense strand
cuacucuucccucaccuuu

SEQ ID NO: 1481157 - RNA, 19 nt, Homo sapiens
  misc_RNA (1)...(19): siRNA sense strand
ggaacagcugcagccauuu

SEQ ID NO: 1481158 - RNA, 19 nt, Homo sapiens
  misc_RNA (1)...(19): siRNA sense strand
uggaacagcugcagccauu

SEQ ID NO: 1481159 - RNA, 19 nt, Homo sapiens
  misc_RNA (1)...(19): siRNA sense strand
ccucaccuuucuacaagua

SEQ ID NO: 1481160 - RNA, 19 nt, Homo sapiens
  misc_RNA (1)...(19): siRNA sense strand
ggaaaccugggacaucuga

SEQ ID NO: 1481161 - RNA, 19 nt, Homo sapiens
  misc_RNA (1)...(19): siRNA sense strand
gaacagcugcagccauuuu

SEQ ID NO: 1481162 - RNA, 19 nt, Homo sapiens
  misc_RNA (1)...(19): siRNA sense strand
gaugugaggucuggaacag

SEQ ID NO: 1481163 - RNA, 19 nt, Homo sapiens
  misc_RNA (1)...(19): siRNA sense strand
ccugggacaucugaacuga

SEQ ID NO: 1481164 - RNA, 19 nt, Homo sapiens
  misc_RNA (1)...(19): siRNA sense strand
acucuucccucaccuuucu

SEQ ID NO: 1481165 - RNA, 19 nt, Homo sapiens
  misc_RNA (1)...(19): siRNA sense strand
ugggaaaccugggacaucu

SEQ ID NO: 1481166 - RNA, 19 nt, Homo sapiens
  misc_RNA (1)...(19): siRNA sense strand
ucccucaccuuucuacaag

SEQ ID NO: 1481167 - RNA, 19 nt, Homo sapiens
  misc_RNA (1)...(19): siRNA sense strand
cuacucuucccucaccuuu

SEQ ID NO: 1481168 - RNA, 19 nt, Homo sapiens
  misc_RNA (1)...(19): siRNA sense strand
ggaacagcugcagccauuu

SEQ ID NO: 1481169 - RNA, 19 nt, Homo sapiens
  misc_RNA (1)...(19): siRNA sense strand
gcagaaaggugcauuauua

SEQ ID NO: 1481170 - RNA, 19 nt, Homo sapiens
  misc_RNA (1)...(19): siRNA sense strand
uaagaucucuccugauuua

SEQ ID NO: 1481171 - RNA, 19 nt, Homo sapiens
  misc_RNA (1)...(19): siRNA sense strand
ggugggagcucuauuguua

SEQ ID NO: 1481172 - RNA, 19 nt, Homo sapiens
  misc_RNA (1)...(19): siRNA sense strand
gaaaauaucugcaacauug

SEQ ID NO: 1481173 - RNA, 19 nt, Homo sapiens
  misc_RNA (1)...(19): siRNA sense strand
caauggaccuccuuaauau

SEQ ID NO: 1481174 - RNA, 19 nt, Homo sapiens
  misc_RNA (1)...(19): siRNA sense strand
gaaaggugcauuauuaaga

SEQ ID NO: 1481175 - RNA, 19 nt, Homo sapiens
  misc_RNA (1)...(19): siRNA sense strand
gcaagaucgugcccuauau

SEQ ID NO: 1481176 - RNA, 19 nt, Homo sapiens
  misc_RNA (1)...(19): siRNA sense strand
caaacuugcuguuauaugg

SEQ ID NO: 1481177 - RNA, 19 nt, Homo sapiens
  misc_RNA (1)...(19): siRNA sense strand
acaauggaccuccuuaaua

SEQ ID NO: 1481178 - RNA, 19 nt, Homo sapiens
  misc_RNA (1)...(19): siRNA sense strand
auuaagaucucuccugauu

SEQ ID NO: 1481179 - RNA, 19 nt, Homo sapiens
  misc_RNA (1)...(19): siRNA sense strand
gccgugaaauguccacuuu

SEQ ID NO: 1481180 - RNA, 19 nt, Homo sapiens
  misc_RNA (1)...(19): siRNA sense strand
caagaucgugcccuauaua

SEQ ID NO: 1481181 - RNA, 19 nt, Homo sapiens
  misc_RNA (1)...(19): siRNA sense strand
cacgaaggguggacaauug

SEQ ID NO: 1481182 - RNA, 19 nt, Homo sapiens
  misc_RNA (1)...(19): siRNA sense strand
ggacuucuccugcaagauc

SEQ ID NO: 1481183 - RNA, 19 nt, Homo sapiens
  misc_RNA (1)...(19): siRNA sense strand
gcacgaaggguggacaauu

SEQ ID NO: 1481184 - RNA, 19 nt, Homo sapiens
  misc_RNA (1)...(19): siRNA sense strand
ugccaaacuugcuguuaua

SEQ ID NO: 1481185 - RNA, 19 nt, Homo sapiens
  misc_RNA (1)...(19): siRNA sense strand
ggagagcugugcaccuaca

SEQ ID NO: 1481186 - RNA, 19 nt, Homo sapiens
  misc_RNA (1)...(19): siRNA sense strand
cagaaaggugcauuauuaa

SEQ ID NO: 1481187 - RNA, 19 nt, Homo sapiens
  misc_RNA (1)...(19): siRNA sense strand
gaacucucgccuuucagua

SEQ ID NO: 1481188 - RNA, 19 nt, Homo sapiens
  misc_RNA (1)...(19): siRNA sense strand
cuucaacggugaccaguga

SEQ ID NO: 1481189 - RNA, 19 nt, Homo sapiens
  misc_RNA (1)...(19): siRNA sense strand
caacuagagagucagauga

SEQ ID NO: 1481190 - RNA, 19 nt, Homo sapiens
  misc_RNA (1)...(19): siRNA sense strand
gacaauggaccuccuuaau

SEQ ID NO: 1481191 - RNA, 19 nt, Homo sapiens
  misc_RNA (1)...(19): siRNA sense strand
caaggugucugccucuucu

SEQ ID NO: 1481192 - RNA, 19 nt, Homo sapiens
  misc_RNA (1)...(19): siRNA sense strand
uccacgagcugaccaagaa

SEQ ID NO: 1481193 - RNA, 19 nt, Homo sapiens
  misc_RNA (1)...(19): siRNA sense strand
gaauggauccuugggugaa

SEQ ID NO: 1481194 - RNA, 19 nt, Homo sapiens
  misc_RNA (1)...(19): siRNA sense strand
gaucgugcccuauauagag

SEQ ID NO: 1481195 - RNA, 19 nt, Homo sapiens
  misc_RNA (1)...(19): siRNA sense strand
ggagccuucugaaacuuug

SEQ ID NO: 1481196 - RNA, 19 nt, Homo sapiens
  misc_RNA (1)...(19): siRNA sense strand
cagauguacuacgaaauga

SEQ ID NO: 1481197 - RNA, 19 nt, Homo sapiens
  misc_RNA (1)...(19): siRNA sense strand
gagagucagaugaacugua

SEQ ID NO: 1481198 - RNA, 19 nt, Homo sapiens
  misc_RNA (1)...(19): siRNA sense strand
guacaccacggaacucgaa

SEQ ID NO: 1481199 - RNA, 19 nt, Homo sapiens
  misc_RNA (1)...(19): siRNA sense strand
ccagacaccaucuauguuc

SEQ ID NO: 1481200 - RNA, 19 nt, Homo sapiens
  misc_RNA (1)...(19): siRNA sense strand
ggugaccagugaugacaau

SEQ ID NO: 1481201 - RNA, 19 nt, Homo sapiens
  misc_RNA (1)...(19): siRNA sense strand
gcacugaccauuuuauaug

SEQ ID NO: 1481202 - RNA, 19 nt, Homo sapiens
  misc_RNA (1)...(19): siRNA sense strand
cucaacaacugccaaacuu

SEQ ID NO: 1481203 - RNA, 19 nt, Homo sapiens
  misc_RNA (1)...(19): siRNA sense strand
ggaccuccuuaauaucauc

SEQ ID NO: 1481204 - RNA, 19 nt, Homo sapiens
  misc_RNA (1)...(19): siRNA sense strand
gaucucuccugauuuacca

SEQ ID NO: 1481205 - RNA, 19 nt, Homo sapiens
  misc_RNA (1)...(19): siRNA sense strand
gggacuuucucaucaucuu

SEQ ID NO: 1481206 - RNA, 19 nt, Homo sapiens
  misc_RNA (1)...(19): siRNA sense strand
agagucagaugaacuguac

SEQ ID NO: 1481207 - RNA, 19 nt, Homo sapiens
  misc_RNA (1)...(19): siRNA sense strand
cugccaaacuugcuguuau

SEQ ID NO: 1481208 - RNA, 19 nt, Homo sapiens
  misc_RNA (1)...(19): siRNA sense strand
acagauguacuacgaaaug

SEQ ID NO: 1481209 - RNA, 19 nt, Homo sapiens
  misc_RNA (1)...(19): siRNA sense strand
gaaaugaucgaaaacuguu

SEQ ID NO: 1481210 - RNA, 19 nt, Homo sapiens
  misc_RNA (1)...(19): siRNA sense strand
cuccagcucuuccuucaga

SEQ ID NO: 1481211 - RNA, 19 nt, Homo sapiens
  misc_RNA (1)...(19): siRNA sense strand
uaccauacgccgugaaaug

SEQ ID NO: 1481212 - RNA, 19 nt, Homo sapiens
  misc_RNA (1)...(19): siRNA sense strand
uaccagacaccaucuaugu

SEQ ID NO: 1481213 - RNA, 19 nt, Homo sapiens
  misc_RNA (1)...(19): siRNA sense strand
ggcagaaaggugcauuauu

SEQ ID NO: 1481214 - RNA, 19 nt, Homo sapiens
  misc_RNA (1)...(19): siRNA sense strand
ggggagagcugugcaccua

SEQ ID NO: 1481215 - RNA, 19 nt, Homo sapiens
  misc_RNA (1)...(19): siRNA sense strand
ugcaagaucgugcccuaua

SEQ ID NO: 1481216 - RNA, 19 nt, Homo sapiens
  misc_RNA (1)...(19): siRNA sense strand
caacggugaccagugauga

SEQ ID NO: 1481217 - RNA, 19 nt, Homo sapiens
  misc_RNA (1)...(19): siRNA sense strand
gauguacuacgaaaugauc

SEQ ID NO: 1481218 - RNA, 19 nt, Homo sapiens
  misc_RNA (1)...(19): siRNA sense strand
agucaccaccuucaccuua

SEQ ID NO: 1481219 - RNA, 19 nt, Homo sapiens
  misc_RNA (1)...(19): siRNA sense strand
gaccagugaugacaaugac

SEQ ID NO: 1481220 - RNA, 19 nt, Homo sapiens
  misc_RNA (1)...(19): siRNA sense strand
cagaggcgcuggcauuucc

SEQ ID NO: 1481221 - RNA, 19 nt, Homo sapiens
  misc_RNA (1)...(19): siRNA sense strand
agauucaacuagagaguca

SEQ ID NO: 1481222 - RNA, 19 nt, Homo sapiens
  misc_RNA (1)...(19): siRNA sense strand
gcucuauuguuagcacuuc

SEQ ID NO: 1481223 - RNA, 19 nt, Homo sapiens
  misc_RNA (1)...(19): siRNA sense strand
agacaauggaccuccuuaa

SEQ ID NO: 1481224 - RNA, 19 nt, Homo sapiens
  misc_RNA (1)...(19): siRNA sense strand
cauuguuacugccuacaug

SEQ ID NO: 1481225 - RNA, 19 nt, Homo sapiens
  misc_RNA (1)...(19): siRNA sense strand
caccaucaccugcucucua

SEQ ID NO: 1481226 - RNA, 19 nt, Homo sapiens
  misc_RNA (1)...(19): siRNA sense strand
gucaccaccuucaccuuau

SEQ ID NO: 1481227 - RNA, 19 nt, Homo sapiens
  misc_RNA (1)...(19): siRNA sense strand
gcucuuccuucagaucuca

SEQ ID NO: 1481228 - RNA, 19 nt, Homo sapiens
  misc_RNA (1)...(19): siRNA sense strand
ucuagugacugcgaggaaa

SEQ ID NO: 1481229 - RNA, 19 nt, Homo sapiens
  misc_RNA (1)...(19): siRNA sense strand
ggugguauuuuggcuguua

SEQ ID NO: 1481230 - RNA, 19 nt, Homo sapiens
  misc_RNA (1)...(19): siRNA sense strand
ucaccaccuucaccuuaug

SEQ ID NO: 1481231 - RNA, 19 nt, Homo sapiens
  misc_RNA (1)...(19): siRNA sense strand
ggagcagagugugaagaca

SEQ ID NO: 1481232 - RNA, 19 nt, Homo sapiens
  misc_RNA (1)...(19): siRNA sense strand
ugaccagugaugacaauga

SEQ ID NO: 1481233 - RNA, 19 nt, Homo sapiens
  misc_RNA (1)...(19): siRNA sense strand
gacaccaucuauguucuag

SEQ ID NO: 1481234 - RNA, 19 nt, Homo sapiens
  misc_RNA (1)...(19): siRNA sense strand
caaggaggauuugggguuu

SEQ ID NO: 1481235 - RNA, 19 nt, Homo sapiens
  misc_RNA (1)...(19): siRNA sense strand
ccaaacuugcuguuauaug

SEQ ID NO: 1481236 - RNA, 19 nt, Homo sapiens
  misc_RNA (1)...(19): siRNA sense strand
cagacaauggaccuccuua

SEQ ID NO: 1481237 - RNA, 19 nt, Homo sapiens
  misc_RNA (1)...(19): siRNA sense strand
cgugaaauguccacuuuug

SEQ ID NO: 1481238 - RNA, 19 nt, Homo sapiens
  misc_RNA (1)...(19): siRNA sense strand
ccagugaugacaaugacaa

SEQ ID NO: 1481239 - RNA, 19 nt, Homo sapiens
  misc_RNA (1)...(19): siRNA sense strand
gagccuacgcggucaugug

SEQ ID NO: 1481240 - RNA, 19 nt, Homo sapiens
  misc_RNA (1)...(19): siRNA sense strand
uaaacggcagauucaacua

SEQ ID NO: 1481241 - RNA, 19 nt, Homo sapiens
  misc_RNA (1)...(19): siRNA sense strand
caccugcucucuagugacu

SEQ ID NO: 1481242 - RNA, 19 nt, Homo sapiens
  misc_RNA (1)...(19): siRNA sense strand
gcagacaauggaccuccuu

SEQ ID NO: 1481243 - RNA, 19 nt, Homo sapiens
  misc_RNA (1)...(19): siRNA sense strand
ggacuuucucaucaucuuc

SEQ ID NO: 1481244 - RNA, 19 nt, Homo sapiens
  misc_RNA (1)...(19): siRNA sense strand
ucaacuagagagucagaug

SEQ ID NO: 1481245 - RNA, 19 nt, Homo sapiens
  misc_RNA (1)...(19): siRNA sense strand
gcagauucaacuagagagu

SEQ ID NO: 1481246 - RNA, 19 nt, Homo sapiens
  misc_RNA (1)...(19): siRNA sense strand
gccuguacccgagggaaua

SEQ ID NO: 1481247 - RNA, 19 nt, Homo sapiens
  misc_RNA (1)...(19): siRNA sense strand
guacuacgaaaugaucgaa

SEQ ID NO: 1481248 - RNA, 19 nt, Homo sapiens
  misc_RNA (1)...(19): siRNA sense strand
guccagaaacgaaacuugu

SEQ ID NO: 1481249 - RNA, 19 nt, Homo sapiens
  misc_RNA (1)...(19): siRNA sense strand
ucaacaacugccaaacuug

SEQ ID NO: 1481250 - RNA, 19 nt, Homo sapiens
  misc_RNA (1)...(19): siRNA sense strand
cucgaacucucgccuuuca

SEQ ID NO: 1481251 - RNA, 19 nt, Homo sapiens
  misc_RNA (1)...(19): siRNA sense strand
aacucgaacucucgccuuu

SEQ ID NO: 1481252 - RNA, 19 nt, Homo sapiens
  misc_RNA (1)...(19): siRNA sense strand
aaacggcagauucaacuag

SEQ ID NO: 1481253 - RNA, 19 nt, Homo sapiens
  misc_RNA (1)...(19): siRNA sense strand
ggaccgggaaauucugcaa

SEQ ID NO: 1481254 - RNA, 19 nt, Homo sapiens
  misc_RNA (1)...(19): siRNA sense strand
caggagccuucugaaacuu

SEQ ID NO: 1481255 - RNA, 19 nt, Homo sapiens
  misc_RNA (1)...(19): siRNA sense strand
caucaccugcucucuagug

SEQ ID NO: 1481256 - RNA, 19 nt, Homo sapiens
  misc_RNA (1)...(19): siRNA sense strand
agacaccaucuauguucua

SEQ ID NO: 1481257 - RNA, 19 nt, Homo sapiens
  misc_RNA (1)...(19): siRNA sense strand
caucuccaacucccucuug

SEQ ID NO: 1481258 - RNA, 19 nt, Homo sapiens
  misc_RNA (1)...(19): siRNA sense strand
gugaugacaaugacaacga

SEQ ID NO: 1481259 - RNA, 19 nt, Homo sapiens
  misc_RNA (1)...(19): siRNA sense strand
uuaauaucaucagccaguu

SEQ ID NO: 1481260 - RNA, 19 nt, Homo sapiens
  misc_RNA (1)...(19): siRNA sense strand
aacggcagauucaacuaga

SEQ ID NO: 1481261 - RNA, 19 nt, Homo sapiens
  misc_RNA (1)...(19): siRNA sense strand
cagcugagcaaggaggauu

SEQ ID NO: 1481262 - RNA, 19 nt, Homo sapiens
  misc_RNA (1)...(19): siRNA sense strand
cgggaaauucugcaagaga

SEQ ID NO: 1481263 - RNA, 19 nt, Homo sapiens
  misc_RNA (1)...(19): siRNA sense strand
gccuuccgcuggucaucuu

SEQ ID NO: 1481264 - RNA, 19 nt, Homo sapiens
  misc_RNA (1)...(19): siRNA sense strand
agaaaggugcauuauuaag

SEQ ID NO: 1481265 - RNA, 19 nt, Homo sapiens
  misc_RNA (1)...(19): siRNA sense strand
accaucaccugcucucuag

SEQ ID NO: 1481266 - RNA, 19 nt, Homo sapiens
  misc_RNA (1)...(19): siRNA sense strand
cagacaccaucuauguucu

SEQ ID NO: 1481267 - RNA, 19 nt, Homo sapiens
  misc_RNA (1)...(19): siRNA sense strand
uuaagaucucuccugauuu

SEQ ID NO: 1481268 - RNA, 19 nt, Homo sapiens
  misc_RNA (1)...(19): siRNA sense strand
gcagauaacuuucaaggaa

SEQ ID NO: 1481269 - RNA, 19 nt, Homo sapiens
  misc_RNA (1)...(19): siRNA sense strand
gaagacagcacaaguauaa

SEQ ID NO: 1481270 - RNA, 19 nt, Homo sapiens
  misc_RNA (1)...(19): siRNA sense strand
gagaggagcuuguaucuuc

SEQ ID NO: 1481271 - RNA, 19 nt, Homo sapiens
  misc_RNA (1)...(19): siRNA sense strand
gaauaugucuccaguguug

SEQ ID NO: 1481272 - RNA, 19 nt, Homo sapiens
  misc_RNA (1)...(19): siRNA sense strand
cagagaaccuggauuuaua

SEQ ID NO: 1481273 - RNA, 19 nt, Homo sapiens
  misc_RNA (1)...(19): siRNA sense strand
ggaaacagcagaauuuaaa

SEQ ID NO: 1481274 - RNA, 19 nt, Homo sapiens
  misc_RNA (1)...(19): siRNA sense strand
gacaggagauaauauguuu

SEQ ID NO: 1481275 - RNA, 19 nt, Homo sapiens
  misc_RNA (1)...(19): siRNA sense strand
gaaccuggauuuauaguag

SEQ ID NO: 1481276 - RNA, 19 nt, Homo sapiens
  misc_RNA (1)...(19): siRNA sense strand
gcauagcccugaaguuuga

SEQ ID NO: 1481277 - RNA, 19 nt, Homo sapiens
  misc_RNA (1)...(19): siRNA sense strand
ggaaauagacucaagaauc

SEQ ID NO: 1481278 - RNA, 19 nt, Homo sapiens
  misc_RNA (1)...(19): siRNA sense strand
gaaauagacucaagaaucc

SEQ ID NO: 1481279 - RNA, 19 nt, Homo sapiens
  misc_RNA (1)...(19): siRNA sense strand
gggaagacauaaauucaaa

SEQ ID NO: 1481280 - RNA, 19 nt, Homo sapiens
  misc_RNA (1)...(19): siRNA sense strand
gaagagcuacgcaaacuuu

SEQ ID NO: 1481281 - RNA, 19 nt, Homo sapiens
  misc_RNA (1)...(19): siRNA sense strand
ggagaucucuaccauggaa

SEQ ID NO: 1481282 - RNA, 19 nt, Homo sapiens
  misc_RNA (1)...(19): siRNA sense strand
gcaacaaacuaaacagcaa

SEQ ID NO: 1481283 - RNA, 19 nt, Homo sapiens
  misc_RNA (1)...(19): siRNA sense strand
gcaacucccucaucuacuu

SEQ ID NO: 1481284 - RNA, 19 nt, Homo sapiens
  misc_RNA (1)...(19): siRNA sense strand
gcaaaggcaucgauuacau

SEQ ID NO: 1481285 - RNA, 19 nt, Homo sapiens
  misc_RNA (1)...(19): siRNA sense strand
uaaagggacuauugaguau

SEQ ID NO: 1481286 - RNA, 19 nt, Homo sapiens
  misc_RNA (1)...(19): siRNA sense strand
gcagguugcuacagugaaa

SEQ ID NO: 1481287 - RNA, 19 nt, Homo sapiens
  misc_RNA (1)...(19): siRNA sense strand
gaggaagcauuuacugaga

SEQ ID NO: 1481288 - RNA, 19 nt, Homo sapiens
  misc_RNA (1)...(19): siRNA sense strand
aagaucagauugcagauaa

SEQ ID NO: 1481289 - RNA, 19 nt, Homo sapiens
  misc_RNA (1)...(19): siRNA sense strand
gagaauggcugugaggaau

SEQ ID NO: 1481290 - RNA, 19 nt, Homo sapiens
  misc_RNA (1)...(19): siRNA sense strand
ggaagcauuuacugagaaa

SEQ ID NO: 1481291 - RNA, 19 nt, Homo sapiens
  misc_RNA (1)...(19): siRNA sense strand
gaaguaacacugaggaaau

SEQ ID NO: 1481292 - RNA, 19 nt, Homo sapiens
  misc_RNA (1)...(19): siRNA sense strand
ugaggagucugaaacaauu

SEQ ID NO: 1481293 - RNA, 19 nt, Homo sapiens
  misc_RNA (1)...(19): siRNA sense strand
gcaaaguguuaacaaagga

SEQ ID NO: 1481294 - RNA, 19 nt, Homo sapiens
  misc_RNA (1)...(19): siRNA sense strand
gaugucagcugcaauguac

SEQ ID NO: 1481295 - RNA, 19 nt, Homo sapiens
  misc_RNA (1)...(19): siRNA sense strand
gaugaacugcgacaagaua

SEQ ID NO: 1481296 - RNA, 19 nt, Homo sapiens
  misc_RNA (1)...(19): siRNA sense strand
gaggagaauuugcgcuuug

SEQ ID NO: 1481297 - RNA, 19 nt, Homo sapiens
  misc_RNA (1)...(19): siRNA sense strand
ggacagaucacuuguaugc

SEQ ID NO: 1481298 - RNA, 19 nt, Homo sapiens
  misc_RNA (1)...(19): siRNA sense strand
gcaacaguaugcacagaga

SEQ ID NO: 1481299 - RNA, 19 nt, Homo sapiens
  misc_RNA (1)...(19): siRNA sense strand
gaagauacuggcgaauaua

SEQ ID NO: 1481300 - RNA, 19 nt, Homo sapiens
  misc_RNA (1)...(19): siRNA sense strand
gaagaucagauugcagaua

SEQ ID NO: 1481301 - RNA, 19 nt, Homo sapiens
  misc_RNA (1)...(19): siRNA sense strand
caauugaggauucuaguaa

SEQ ID NO: 1481302 - RNA, 19 nt, Homo sapiens
  misc_RNA (1)...(19): siRNA sense strand
uagcauagcccugaaguuu

SEQ ID NO: 1481303 - RNA, 19 nt, Homo sapiens
  misc_RNA (1)...(19): siRNA sense strand
cuaaagggacuauugagua

SEQ ID NO: 1481304 - RNA, 19 nt, Homo sapiens
  misc_RNA (1)...(19): siRNA sense strand
gaauggcugugaggaauau

SEQ ID NO: 1481305 - RNA, 19 nt, Homo sapiens
  misc_RNA (1)...(19): siRNA sense strand
caaaggcaucgauuacaua

SEQ ID NO: 1481306 - RNA, 19 nt, Homo sapiens
  misc_RNA (1)...(19): siRNA sense strand
cuuaagaucugauacugaa

SEQ ID NO: 1481307 - RNA, 19 nt, Homo sapiens
  misc_RNA (1)...(19): siRNA sense strand
gaucugauacugaacauuc

SEQ ID NO: 1481308 - RNA, 19 nt, Homo sapiens
  misc_RNA (1)...(19): siRNA sense strand
cauaaguucuugugucuca

SEQ ID NO: 1481309 - RNA, 19 nt, Homo sapiens
  misc_RNA (1)...(19): siRNA sense strand
aauaucagguccuaaagaa

SEQ ID NO: 1481310 - RNA, 19 nt, Homo sapiens
  misc_RNA (1)...(19): siRNA sense strand
aaagaagacagcacaagua

SEQ ID NO: 1481311 - RNA, 19 nt, Homo sapiens
  misc_RNA (1)...(19): siRNA sense strand
agaagauacuggcgaauau

SEQ ID NO: 1481312 - RNA, 19 nt, Homo sapiens
  misc_RNA (1)...(19): siRNA sense strand
caucugaggcugaauuuga

SEQ ID NO: 1481313 - RNA, 19 nt, Homo sapiens
  misc_RNA (1)...(19): siRNA sense strand
ggaggagaauuugcgcuuu

SEQ ID NO: 1481314 - RNA, 19 nt, Homo sapiens
  misc_RNA (1)...(19): siRNA sense strand
ggacaggagauaauauguu

SEQ ID NO: 1481315 - RNA, 19 nt, Homo sapiens
  misc_RNA (1)...(19): siRNA sense strand
gugcuacaaugcaacagua

SEQ ID NO: 1481316 - RNA, 19 nt, Homo sapiens
  misc_RNA (1)...(19): siRNA sense strand
gcacaaguauaaaagguaa

SEQ ID NO: 1481317 - RNA, 19 nt, Homo sapiens
  misc_RNA (1)...(19): siRNA sense strand
cagcugcaauguacaaaga

SEQ ID NO: 1481318 - RNA, 19 nt, Homo sapiens
  misc_RNA (1)...(19): siRNA sense strand
gaauaucagguccuaaaga

SEQ ID NO: 1481319 - RNA, 19 nt, Homo sapiens
  misc_RNA (1)...(19): siRNA sense strand
aaacauggcacaagcuuga

SEQ ID NO: 1481320 - RNA, 19 nt, Homo sapiens
  misc_RNA (1)...(19): siRNA sense strand
ugaggaauauggcaucaug

SEQ ID NO: 1481321 - RNA, 19 nt, Homo sapiens
  misc_RNA (1)...(19): siRNA sense strand
ugaguauacuguugaauca

SEQ ID NO: 1481322 - RNA, 19 nt, Homo sapiens
  misc_RNA (1)...(19): siRNA sense strand
ggaaaacguuuguaucuca

SEQ ID NO: 1481323 - RNA, 19 nt, Homo sapiens
  misc_RNA (1)...(19): siRNA sense strand
cagaugaacugcgacaaga

SEQ ID NO: 1481324 - RNA, 19 nt, Homo sapiens
  misc_RNA (1)...(19): siRNA sense strand
ggaaguaacacugaggaaa

SEQ ID NO: 1481325 - RNA, 19 nt, Homo sapiens
  misc_RNA (1)...(19): siRNA sense strand
gaacugcgacaagauaaau

SEQ ID NO: 1481326 - RNA, 19 nt, Homo sapiens
  misc_RNA (1)...(19): siRNA sense strand
gccagagaaugggagauua

SEQ ID NO: 1481327 - RNA, 19 nt, Homo sapiens
  misc_RNA (1)...(19): siRNA sense strand
aaguaacacugaggaaaua

SEQ ID NO: 1481328 - RNA, 19 nt, Homo sapiens
  misc_RNA (1)...(19): siRNA sense strand
aaucugggcuuuugaauaa

SEQ ID NO: 1481329 - RNA, 19 nt, Homo sapiens
  misc_RNA (1)...(19): siRNA sense strand
ggaaucguacacuuucuaa

SEQ ID NO: 1481330 - RNA, 19 nt, Homo sapiens
  misc_RNA (1)...(19): siRNA sense strand
ucacuuguaugccuucuuc

SEQ ID NO: 1481331 - RNA, 19 nt, Homo sapiens
  misc_RNA (1)...(19): siRNA sense strand
gcacugaggagucucuuuc

SEQ ID NO: 1481332 - RNA, 19 nt, Homo sapiens
  misc_RNA (1)...(19): siRNA sense strand
ucagauugcagauaacuuu

SEQ ID NO: 1481333 - RNA, 19 nt, Homo sapiens
  misc_RNA (1)...(19): siRNA sense strand
cagaagauacuggcgaaua

SEQ ID NO: 1481334 - RNA, 19 nt, Homo sapiens
  misc_RNA (1)...(19): siRNA sense strand
aaggacagaucacuuguau

SEQ ID NO: 1481335 - RNA, 19 nt, Homo sapiens
  misc_RNA (1)...(19): siRNA sense strand
gggaaacagcagaauuuaa

SEQ ID NO: 1481336 - RNA, 19 nt, Homo sapiens
  misc_RNA (1)...(19): siRNA sense strand
caagggaagacauaaauuc

SEQ ID NO: 1481337 - RNA, 19 nt, Homo sapiens
  misc_RNA (1)...(19): siRNA sense strand
acaauuggcuauccaugga

SEQ ID NO: 1481338 - RNA, 19 nt, Homo sapiens
  misc_RNA (1)...(19): siRNA sense strand
cgagaugcagguaaugaua

SEQ ID NO: 1481339 - RNA, 19 nt, Homo sapiens
  misc_RNA (1)...(19): siRNA sense strand
cauggacucuuguuuaugg

SEQ ID NO: 1481340 - RNA, 19 nt, Homo sapiens
  misc_RNA (1)...(19): siRNA sense strand
ugaggagucucuuucugaa

SEQ ID NO: 1481341 - RNA, 19 nt, Homo sapiens
  misc_RNA (1)...(19): siRNA sense strand
gcugcaauguacaaagaaa

SEQ ID NO: 1481342 - RNA, 19 nt, Homo sapiens
  misc_RNA (1)...(19): siRNA sense strand
agacagugauggacagguu

SEQ ID NO: 1481343 - RNA, 19 nt, Homo sapiens
  misc_RNA (1)...(19): siRNA sense strand
gaggaaauagacucaagaa

SEQ ID NO: 1481344 - RNA, 19 nt, Homo sapiens
  misc_RNA (1)...(19): siRNA sense strand
gaacaaugacagguuuaga

SEQ ID NO: 1481345 - RNA, 19 nt, Homo sapiens
  misc_RNA (1)...(19): siRNA sense strand
gcacagagagauaagaaac

SEQ ID NO: 1481346 - RNA, 19 nt, Homo sapiens
  misc_RNA (1)...(19): siRNA sense strand
cagaagagcuacgcaaacu

SEQ ID NO: 1481347 - RNA, 19 nt, Homo sapiens
  misc_RNA (1)...(19): siRNA sense strand
gaagcaacucccucaucua

SEQ ID NO: 1481348 - RNA, 19 nt, Homo sapiens
  misc_RNA (1)...(19): siRNA sense strand
aaagcaaaggcaucgauua

SEQ ID NO: 1481349 - RNA, 19 nt, Homo sapiens
  misc_RNA (1)...(19): siRNA sense strand
uaucagguccuaaagaaga

SEQ ID NO: 1481350 - RNA, 19 nt, Homo sapiens
  misc_RNA (1)...(19): siRNA sense strand
cagauaacuuucaaggaau

SEQ ID NO: 1481351 - RNA, 19 nt, Homo sapiens
  misc_RNA (1)...(19): siRNA sense strand
uaaggaagaucagauugca

SEQ ID NO: 1481352 - RNA, 19 nt, Homo sapiens
  misc_RNA (1)...(19): siRNA sense strand
cugaauaugucuccagugu

SEQ ID NO: 1481353 - RNA, 19 nt, Homo sapiens
  misc_RNA (1)...(19): siRNA sense strand
gaaaggacagaucacuugu

SEQ ID NO: 1481354 - RNA, 19 nt, Homo sapiens
  misc_RNA (1)...(19): siRNA sense strand
guucuugugucucagaguu

SEQ ID NO: 1481355 - RNA, 19 nt, Homo sapiens
  misc_RNA (1)...(19): siRNA sense strand
caacaaacuaaacagcaaa

SEQ ID NO: 1481356 - RNA, 19 nt, Homo sapiens
  misc_RNA (1)...(19): siRNA sense strand
gauugcagauaacuuucaa

SEQ ID NO: 1481357 - RNA, 19 nt, Homo sapiens
  misc_RNA (1)...(19): siRNA sense strand
agacauggauucacuagcu

SEQ ID NO: 1481358 - RNA, 19 nt, Homo sapiens
  misc_RNA (1)...(19): siRNA sense strand
agaaaggacagaucacuug

SEQ ID NO: 1481359 - RNA, 19 nt, Homo sapiens
  misc_RNA (1)...(19): siRNA sense strand
aggcaucgauuacauaagu

SEQ ID NO: 1481360 - RNA, 19 nt, Homo sapiens
  misc_RNA (1)...(19): siRNA sense strand
gacagaggcagaagagcua

SEQ ID NO: 1481361 - RNA, 19 nt, Homo sapiens
  misc_RNA (1)...(19): siRNA sense strand
aaaucagaaucuacuggua

SEQ ID NO: 1481362 - RNA, 19 nt, Homo sapiens
  misc_RNA (1)...(19): siRNA sense strand
caucugagccacugaaagu

SEQ ID NO: 1481363 - RNA, 19 nt, Homo sapiens
  misc_RNA (1)...(19): siRNA sense strand
gagaaugggagauuacuac

SEQ ID NO: 1481364 - RNA, 19 nt, Homo sapiens
  misc_RNA (1)...(19): siRNA sense strand
gcugauggacacauagaaa

SEQ ID NO: 1481365 - RNA, 19 nt, Homo sapiens
  misc_RNA (1)...(19): siRNA sense strand
uaaagaagacagcacaagu

SEQ ID NO: 1481366 - RNA, 19 nt, Homo sapiens
  misc_RNA (1)...(19): siRNA sense strand
aaaccuaaagggacuauug

SEQ ID NO: 1481367 - RNA, 19 nt, Homo sapiens
  misc_RNA (1)...(19): siRNA sense strand
uacaacaccuaacgaacuu

SEQ ID NO: 1481368 - RNA, 19 nt, Homo sapiens
  misc_RNA (1)...(19): siRNA sense strand
ggaguaaccugaccgugaa

SEQ ID NO: 1481369 - RNA, 19 nt, Homo sapiens
  misc_RNA (1)...(19): siRNA sense strand
gaucgugggcucagaaaua

SEQ ID NO: 1481370 - RNA, 19 nt, Homo sapiens
  misc_RNA (1)...(19): siRNA sense strand
gcagaagauuggaggauuc

SEQ ID NO: 1481371 - RNA, 19 nt, Homo sapiens
  misc_RNA (1)...(19): siRNA sense strand
ccgugaagguugcauauaa

SEQ ID NO: 1481372 - RNA, 19 nt, Homo sapiens
  misc_RNA (1)...(19): siRNA sense strand
gcauauaacagcucaggaa

SEQ ID NO: 1481373 - RNA, 19 nt, Homo sapiens
  misc_RNA (1)...(19): siRNA sense strand
ucaggaagcugugagauag

SEQ ID NO: 1481374 - RNA, 19 nt, Homo sapiens
  misc_RNA (1)...(19): siRNA sense strand
gcucagaaauagacaguac

SEQ ID NO: 1481375 - RNA, 19 nt, Homo sapiens
  misc_RNA (1)...(19): siRNA sense strand
gcugugagauagagaagau

SEQ ID NO: 1481376 - RNA, 19 nt, Homo sapiens
  misc_RNA (1)...(19): siRNA sense strand
gaagaucgugggcucagaa

SEQ ID NO: 1481377 - RNA, 19 nt, Homo sapiens
  misc_RNA (1)...(19): siRNA sense strand
ggcagaagauuggaggauu

SEQ ID NO: 1481378 - RNA, 19 nt, Homo sapiens
  misc_RNA (1)...(19): siRNA sense strand
gagcuggaccggcagaaga

SEQ ID NO: 1481379 - RNA, 19 nt, Homo sapiens
  misc_RNA (1)...(19): siRNA sense strand
gguguggccuccgaucaaa

SEQ ID NO: 1481380 - RNA, 19 nt, Homo sapiens
  misc_RNA (1)...(19): siRNA sense strand
gaagcugugagauagagaa

SEQ ID NO: 1481381 - RNA, 19 nt, Homo sapiens
  misc_RNA (1)...(19): siRNA sense strand
aaauagacaguacgggaaa

SEQ ID NO: 1481382 - RNA, 19 nt, Homo sapiens
  misc_RNA (1)...(19): siRNA sense strand
gaccgugaagguugcauau

SEQ ID NO: 1481383 - RNA, 19 nt, Homo sapiens
  misc_RNA (1)...(19): siRNA sense strand
cgugaagguugcauauaac

SEQ ID NO: 1481384 - RNA, 19 nt, Homo sapiens
  misc_RNA (1)...(19): siRNA sense strand
ggaguaaccugaccgugaa

SEQ ID NO: 1481385 - RNA, 19 nt, Homo sapiens
  misc_RNA (1)...(19): siRNA sense strand
gaucgugggcucagaaaua

SEQ ID NO: 1481386 - RNA, 19 nt, Homo sapiens
  misc_RNA (1)...(19): siRNA sense strand
gcagaagauuggaggauuc

SEQ ID NO: 1481387 - RNA, 19 nt, Homo sapiens
  misc_RNA (1)...(19): siRNA sense strand
ccgugaagguugcauauaa

SEQ ID NO: 1481388 - RNA, 19 nt, Homo sapiens
  misc_RNA (1)...(19): siRNA sense strand
gcauauaacagcucaggaa

SEQ ID NO: 1481389 - RNA, 19 nt, Homo sapiens
  misc_RNA (1)...(19): siRNA sense strand
ucaggaagcugugagauag

SEQ ID NO: 1481390 - RNA, 19 nt, Homo sapiens
  misc_RNA (1)...(19): siRNA sense strand
gcucagaaauagacaguac

SEQ ID NO: 1481391 - RNA, 19 nt, Homo sapiens
  misc_RNA (1)...(19): siRNA sense strand
gcugugagauagagaagau

SEQ ID NO: 1481392 - RNA, 19 nt, Homo sapiens
  misc_RNA (1)...(19): siRNA sense strand
gaagaucgugggcucagaa

SEQ ID NO: 1481393 - RNA, 19 nt, Homo sapiens
  misc_RNA (1)...(19): siRNA sense strand
ggcagaagauuggaggauu

SEQ ID NO: 1481394 - RNA, 19 nt, Homo sapiens
  misc_RNA (1)...(19): siRNA sense strand
gagcuggaccggcagaaga

SEQ ID NO: 1481395 - RNA, 19 nt, Homo sapiens
  misc_RNA (1)...(19): siRNA sense strand
gguguggccuccgaucaaa

SEQ ID NO: 1481396 - RNA, 19 nt, Homo sapiens
  misc_RNA (1)...(19): siRNA sense strand
gaagcugugagauagagaa

SEQ ID NO: 1481397 - RNA, 19 nt, Homo sapiens
  misc_RNA (1)...(19): siRNA sense strand
gaacuuucgcguccucaag

SEQ ID NO: 1481398 - RNA, 19 nt, Homo sapiens
  misc_RNA (1)...(19): siRNA sense strand
aaauagacaguacgggaaa

SEQ ID NO: 1481399 - RNA, 19 nt, Homo sapiens
  misc_RNA (1)...(19): siRNA sense strand
gaccgugaagguugcauau

SEQ ID NO: 1481400 - RNA, 19 nt, Homo sapiens
  misc_RNA (1)...(19): siRNA sense strand
cgugaagguugcauauaac

SEQ ID NO: 1481401 - RNA, 19 nt, Homo sapiens
  misc_RNA (1)...(19): siRNA sense strand
gaacaugaaugagaaguug

SEQ ID NO: 1481402 - RNA, 19 nt, Homo sapiens
  misc_RNA (1)...(19): siRNA sense strand
caacagcucccaccacuua

SEQ ID NO: 1481403 - RNA, 19 nt, Homo sapiens
  misc_RNA (1)...(19): siRNA sense strand
gaaacuaccuccguauguu

SEQ ID NO: 1481404 - RNA, 19 nt, Homo sapiens
  misc_RNA (1)...(19): siRNA sense strand
ccacaaccaucaacaggaa

SEQ ID NO: 1481405 - RNA, 19 nt, Homo sapiens
  misc_RNA (1)...(19): siRNA sense strand
gaugacgccugagauguuu

SEQ ID NO: 1481406 - RNA, 19 nt, Homo sapiens
  misc_RNA (1)...(19): siRNA sense strand
gacagcagaucgaguccua

SEQ ID NO: 1481407 - RNA, 19 nt, Homo sapiens
  misc_RNA (1)...(19): siRNA sense strand
gugacgaucuggauuugaa

SEQ ID NO: 1481408 - RNA, 19 nt, Homo sapiens
  misc_RNA (1)...(19): siRNA sense strand
aaggagaacucaccagaga

SEQ ID NO: 1481409 - RNA, 19 nt, Homo sapiens
  misc_RNA (1)...(19): siRNA sense strand
ggcagaagcccgugaaguu

SEQ ID NO: 1481410 - RNA, 19 nt, Homo sapiens
  misc_RNA (1)...(19): siRNA sense strand
gcuccgaggugggaaacua

SEQ ID NO: 1481411 - RNA, 19 nt, Homo sapiens
  misc_RNA (1)...(19): siRNA sense strand
ggaaacuaccuccguaugu

SEQ ID NO: 1481412 - RNA, 19 nt, Homo sapiens
  misc_RNA (1)...(19): siRNA sense strand
acgcugagauggagaagaa

SEQ ID NO: 1481413 - RNA, 19 nt, Homo sapiens
  misc_RNA (1)...(19): siRNA sense strand
ggagaucgaugggcagaag

SEQ ID NO: 1481414 - RNA, 19 nt, Homo sapiens
  misc_RNA (1)...(19): siRNA sense strand
cagagaaguuugcccugaa

SEQ ID NO: 1481415 - RNA, 19 nt, Homo sapiens
  misc_RNA (1)...(19): siRNA sense strand
acacuaaggaucacggaua

SEQ ID NO: 1481416 - RNA, 19 nt, Homo sapiens
  misc_RNA (1)...(19): siRNA sense strand
gcaacgaugagaaguacaa

SEQ ID NO: 1481417 - RNA, 19 nt, Homo sapiens
  misc_RNA (1)...(19): siRNA sense strand
gaccagcgcgucaucauca

SEQ ID NO: 1481418 - RNA, 19 nt, Homo sapiens
  misc_RNA (1)...(19): siRNA sense strand
cagcugugauccaugagaa

SEQ ID NO: 1481419 - RNA, 19 nt, Homo sapiens
  misc_RNA (1)...(19): siRNA sense strand
ccuggaacaugaaugagaa

SEQ ID NO: 1481420 - RNA, 19 nt, Homo sapiens
  misc_RNA (1)...(19): siRNA sense strand
gcagaagcccgugaaguuc

SEQ ID NO: 1481421 - RNA, 19 nt, Homo sapiens
  misc_RNA (1)...(19): siRNA sense strand
gcaagaccuucgggcagaa

SEQ ID NO: 1481422 - RNA, 19 nt, Homo sapiens
  misc_RNA (1)...(19): siRNA sense strand
ggaggcgacuagccacugu

SEQ ID NO: 1481423 - RNA, 19 nt, Homo sapiens
  misc_RNA (1)...(19): siRNA sense strand
ugaacccgcugacguuugu

SEQ ID NO: 1481424 - RNA, 19 nt, Homo sapiens
  misc_RNA (1)...(19): siRNA sense strand
ggaacaugaaugagaaguu

SEQ ID NO: 1481425 - RNA, 19 nt, Homo sapiens
  misc_RNA (1)...(19): siRNA sense strand
gccuucaccuggaacauga

SEQ ID NO: 1481426 - RNA, 19 nt, Homo sapiens
  misc_RNA (1)...(19): siRNA sense strand
ggagaacucaccagagaag

SEQ ID NO: 1481427 - RNA, 19 nt, Homo sapiens
  misc_RNA (1)...(19): siRNA sense strand
gaagagaggaagaaaauag

SEQ ID NO: 1481428 - RNA, 19 nt, Homo sapiens
  misc_RNA (1)...(19): siRNA sense strand
ugacagacgcugagaugga

SEQ ID NO: 1481429 - RNA, 19 nt, Homo sapiens
  misc_RNA (1)...(19): siRNA sense strand
gaccaugacccagcuguga

SEQ ID NO: 1481430 - RNA, 19 nt, Homo sapiens
  misc_RNA (1)...(19): siRNA sense strand
ccaccuaccucagggaaca

SEQ ID NO: 1481431 - RNA, 19 nt, Homo sapiens
  misc_RNA (1)...(19): siRNA sense strand
guuccgagguucucuguac

SEQ ID NO: 1481432 - RNA, 19 nt, Homo sapiens
  misc_RNA (1)...(19): siRNA sense strand
gacggcgaguucuacauga

SEQ ID NO: 1481433 - RNA, 19 nt, Homo sapiens
  misc_RNA (1)...(19): siRNA sense strand
gagacgccuucaccuggaa

SEQ ID NO: 1481434 - RNA, 19 nt, Homo sapiens
  misc_RNA (1)...(19): siRNA sense strand
ucaccuggaacaugaauga

SEQ ID NO: 1481435 - RNA, 19 nt, Homo sapiens
  misc_RNA (1)...(19): siRNA sense strand
ccucggaaguggaagagau

SEQ ID NO: 1481436 - RNA, 19 nt, Homo sapiens
  misc_RNA (1)...(19): siRNA sense strand
ccaccagugugacccuguu

SEQ ID NO: 1481437 - RNA, 19 nt, Homo sapiens
  misc_RNA (1)...(19): siRNA sense strand
gagauugccauccggaaca

SEQ ID NO: 1481438 - RNA, 19 nt, Homo sapiens
  misc_RNA (1)...(19): siRNA sense strand
cgacggcgaguucuacaug

SEQ ID NO: 1481439 - RNA, 19 nt, Homo sapiens
  misc_RNA (1)...(19): siRNA sense strand
ucaucaagcugaacaucca

SEQ ID NO: 1481440 - RNA, 19 nt, Homo sapiens
  misc_RNA (1)...(19): siRNA sense strand
gggaaacuaccuccguaug

SEQ ID NO: 1481441 - RNA, 19 nt, Homo sapiens
  misc_RNA (1)...(19): siRNA sense strand
gauucuggauggcaacgau

SEQ ID NO: 1481442 - RNA, 19 nt, Homo sapiens
  misc_RNA (1)...(19): siRNA sense strand
ccagugugacccuguuaaa

SEQ ID NO: 1481443 - RNA, 19 nt, Homo sapiens
  misc_RNA (1)...(19): siRNA sense strand
ugaugacgccugagauguu

SEQ ID NO: 1481444 - RNA, 19 nt, Homo sapiens
  misc_RNA (1)...(19): siRNA sense strand
gcuggcaucagaagaccua

SEQ ID NO: 1481445 - RNA, 19 nt, Homo sapiens
  misc_RNA (1)...(19): siRNA sense strand
gcaugggccgagacaagaa

SEQ ID NO: 1481446 - RNA, 19 nt, Homo sapiens
  misc_RNA (1)...(19): siRNA sense strand
ggacgacggcgaguucuac

SEQ ID NO: 1481447 - RNA, 19 nt, Homo sapiens
  misc_RNA (1)...(19): siRNA sense strand
gcccacugcuggagacucu

SEQ ID NO: 1481448 - RNA, 19 nt, Homo sapiens
  misc_RNA (1)...(19): siRNA sense strand
agugggacaugucagagaa

SEQ ID NO: 1481449 - RNA, 19 nt, Homo sapiens
  misc_RNA (1)...(19): siRNA sense strand
acccagcugugauccauga

SEQ ID NO: 1481450 - RNA, 19 nt, Homo sapiens
  misc_RNA (1)...(19): siRNA sense strand
auaguugcaucgucacaug

SEQ ID NO: 1481451 - RNA, 19 nt, Homo sapiens
  misc_RNA (1)...(19): siRNA sense strand
gcugagauggagaagaaga

SEQ ID NO: 1481452 - RNA, 19 nt, Homo sapiens
  misc_RNA (1)...(19): siRNA sense strand
gggaacagaaggccaagag

SEQ ID NO: 1481453 - RNA, 19 nt, Homo sapiens
  misc_RNA (1)...(19): siRNA sense strand
aaacuaccuccguauguuc

SEQ ID NO: 1481454 - RNA, 19 nt, Homo sapiens
  misc_RNA (1)...(19): siRNA sense strand
cacuaaggaucacggauac

SEQ ID NO: 1481455 - RNA, 19 nt, Homo sapiens
  misc_RNA (1)...(19): siRNA sense strand
ugacccagcugugauccau

SEQ ID NO: 1481456 - RNA, 19 nt, Homo sapiens
  misc_RNA (1)...(19): siRNA sense strand
guacccacccugcccaaca

SEQ ID NO: 1481457 - RNA, 19 nt, Homo sapiens
  misc_RNA (1)...(19): siRNA sense strand
ggaaguggaagagauucug

SEQ ID NO: 1481458 - RNA, 19 nt, Homo sapiens
  misc_RNA (1)...(19): siRNA sense strand
cuccguauguuccgagguu

SEQ ID NO: 1481459 - RNA, 19 nt, Homo sapiens
  misc_RNA (1)...(19): siRNA sense strand
agagaaguuugcccugaag

SEQ ID NO: 1481460 - RNA, 19 nt, Homo sapiens
  misc_RNA (1)...(19): siRNA sense strand
gagugggacaugucagaga

SEQ ID NO: 1481461 - RNA, 19 nt, Homo sapiens
  misc_RNA (1)...(19): siRNA sense strand
gagacaagaagagaaccuu

SEQ ID NO: 1481462 - RNA, 19 nt, Homo sapiens
  misc_RNA (1)...(19): siRNA sense strand
aacagaaggccaagaggaa

SEQ ID NO: 1481463 - RNA, 19 nt, Homo sapiens
  misc_RNA (1)...(19): siRNA sense strand
uggcaacgaugagaaguac

SEQ ID NO: 1481464 - RNA, 19 nt, Homo sapiens
  misc_RNA (1)...(19): siRNA sense strand
guugaugacgccugagaug

SEQ ID NO: 1481465 - RNA, 19 nt, Homo sapiens
  misc_RNA (1)...(19): siRNA sense strand
guugcaucgucacauggua

SEQ ID NO: 1481466 - RNA, 19 nt, Homo sapiens
  misc_RNA (1)...(19): siRNA sense strand
ugaaugagaaguugaugac

SEQ ID NO: 1481467 - RNA, 19 nt, Homo sapiens
  misc_RNA (1)...(19): siRNA sense strand
ggauggcaacgaugagaag

SEQ ID NO: 1481468 - RNA, 19 nt, Homo sapiens
  misc_RNA (1)...(19): siRNA sense strand
ccacugcuggagacucuga

SEQ ID NO: 1481469 - RNA, 19 nt, Homo sapiens
  misc_RNA (1)...(19): siRNA sense strand
gggaguuugucaccaccau

SEQ ID NO: 1481470 - RNA, 19 nt, Homo sapiens
  misc_RNA (1)...(19): siRNA sense strand
ucugugacgaucuggauuu

SEQ ID NO: 1481471 - RNA, 19 nt, Homo sapiens
  misc_RNA (1)...(19): siRNA sense strand
gccgugccaugcuccacaa

SEQ ID NO: 1481472 - RNA, 19 nt, Homo sapiens
  misc_RNA (1)...(19): siRNA sense strand
gccaucgccucugccauca

SEQ ID NO: 1481473 - RNA, 19 nt, Homo sapiens
  misc_RNA (1)...(19): siRNA sense strand
agacauugaugcuacauua

SEQ ID NO: 1481474 - RNA, 19 nt, Homo sapiens
  misc_RNA (1)...(19): siRNA sense strand
agacagaacuucaaagguu

SEQ ID NO: 1481475 - RNA, 19 nt, Homo sapiens
  misc_RNA (1)...(19): siRNA sense strand
gaacaagucauccuggaaa

SEQ ID NO: 1481476 - RNA, 19 nt, Homo sapiens
  misc_RNA (1)...(19): siRNA sense strand
gacagaacuucaaagguuu

SEQ ID NO: 1481477 - RNA, 19 nt, Homo sapiens
  misc_RNA (1)...(19): siRNA sense strand
guaaaagagugcaaugaua

SEQ ID NO: 1481478 - RNA, 19 nt, Homo sapiens
  misc_RNA (1)...(19): siRNA sense strand
gaaugcagccuuuccagaa

SEQ ID NO: 1481479 - RNA, 19 nt, Homo sapiens
  misc_RNA (1)...(19): siRNA sense strand
gaacuuauuugggcaccuu

SEQ ID NO: 1481480 - RNA, 19 nt, Homo sapiens
  misc_RNA (1)...(19): siRNA sense strand
gcaguuggcuuuugaaaug

SEQ ID NO: 1481481 - RNA, 19 nt, Homo sapiens
  misc_RNA (1)...(19): siRNA sense strand
gcaaaguuguauccaggaa

SEQ ID NO: 1481482 - RNA, 19 nt, Homo sapiens
  misc_RNA (1)...(19): siRNA sense strand
agaggaaggugcaggcuuu

SEQ ID NO: 1481483 - RNA, 19 nt, Homo sapiens
  misc_RNA (1)...(19): siRNA sense strand
ggaaggugcaggcuuuaaa

SEQ ID NO: 1481484 - RNA, 19 nt, Homo sapiens
  misc_RNA (1)...(19): siRNA sense strand
gcauuugccauaccugaua

SEQ ID NO: 1481485 - RNA, 19 nt, Homo sapiens
  misc_RNA (1)...(19): siRNA sense strand
uaucagaaccaucuaauuc

SEQ ID NO: 1481486 - RNA, 19 nt, Homo sapiens
  misc_RNA (1)...(19): siRNA sense strand
acuccuggcuuuaaaguuu

SEQ ID NO: 1481487 - RNA, 19 nt, Homo sapiens
  misc_RNA (1)...(19): siRNA sense strand
acaagugaaugcagccuuu

SEQ ID NO: 1481488 - RNA, 19 nt, Homo sapiens
  misc_RNA (1)...(19): siRNA sense strand
gaaggaggaaccaauggaa

SEQ ID NO: 1481489 - RNA, 19 nt, Homo sapiens
  misc_RNA (1)...(19): siRNA sense strand
gaugauuacuuggaguuau

SEQ ID NO: 1481490 - RNA, 19 nt, Homo sapiens
  misc_RNA (1)...(19): siRNA sense strand
uuauaucuguggucacuaa

SEQ ID NO: 1481491 - RNA, 19 nt, Homo sapiens
  misc_RNA (1)...(19): siRNA sense strand
gagcuuggccacucuccua

SEQ ID NO: 1481492 - RNA, 19 nt, Homo sapiens
  misc_RNA (1)...(19): siRNA sense strand
ccuuugcuguguuaaauaa

SEQ ID NO: 1481493 - RNA, 19 nt, Homo sapiens
  misc_RNA (1)...(19): siRNA sense strand
gaaccagacagaacuucaa

SEQ ID NO: 1481494 - RNA, 19 nt, Homo sapiens
  misc_RNA (1)...(19): siRNA sense strand
caugagagccuucacauac

SEQ ID NO: 1481495 - RNA, 19 nt, Homo sapiens
  misc_RNA (1)...(19): siRNA sense strand
cuucaaacguccauucuca

SEQ ID NO: 1481496 - RNA, 19 nt, Homo sapiens
  misc_RNA (1)...(19): siRNA sense strand
ggaguuauuccugcaguuu

SEQ ID NO: 1481497 - RNA, 19 nt, Homo sapiens
  misc_RNA (1)...(19): siRNA sense strand
guguucaacuuccucaauu

SEQ ID NO: 1481498 - RNA, 19 nt, Homo sapiens
  misc_RNA (1)...(19): siRNA sense strand
gaaaaucauuguugagaag

SEQ ID NO: 1481499 - RNA, 19 nt, Homo sapiens
  misc_RNA (1)...(19): siRNA sense strand
ggaaaaucauuguugagaa

SEQ ID NO: 1481500 - RNA, 19 nt, Homo sapiens
  misc_RNA (1)...(19): siRNA sense strand
uauauugccuuugucuuga

SEQ ID NO: 1481501 - RNA, 19 nt, Homo sapiens
  misc_RNA (1)...(19): siRNA sense strand
gaaccuucagccaauauug

SEQ ID NO: 1481502 - RNA, 19 nt, Homo sapiens
  misc_RNA (1)...(19): siRNA sense strand
ucagaaccuucagccaaua

SEQ ID NO: 1481503 - RNA, 19 nt, Homo sapiens
  misc_RNA (1)...(19): siRNA sense strand
caccuuugaugauuacuug

SEQ ID NO: 1481504 - RNA, 19 nt, Homo sapiens
  misc_RNA (1)...(19): siRNA sense strand
ugaaguaucagcccauaga

SEQ ID NO: 1481505 - RNA, 19 nt, Homo sapiens
  misc_RNA (1)...(19): siRNA sense strand
gaugcuacauuauaugaac

SEQ ID NO: 1481506 - RNA, 19 nt, Homo sapiens
  misc_RNA (1)...(19): siRNA sense strand
cagauccucaaccaaauua

SEQ ID NO: 1481507 - RNA, 19 nt, Homo sapiens
  misc_RNA (1)...(19): siRNA sense strand
ucaagcagcagcaaaugaa

SEQ ID NO: 1481508 - RNA, 19 nt, Homo sapiens
  misc_RNA (1)...(19): siRNA sense strand
gccucacucuucuauauug

SEQ ID NO: 1481509 - RNA, 19 nt, Homo sapiens
  misc_RNA (1)...(19): siRNA sense strand
gaagcagugggauugguaa

SEQ ID NO: 1481510 - RNA, 19 nt, Homo sapiens
  misc_RNA (1)...(19): siRNA sense strand
caaugaugauuuccugaca

SEQ ID NO: 1481511 - RNA, 19 nt, Homo sapiens
  misc_RNA (1)...(19): siRNA sense strand
ucaaccaaauuauggaauc

SEQ ID NO: 1481512 - RNA, 19 nt, Homo sapiens
  misc_RNA (1)...(19): siRNA sense strand
gaugauuuccugacaaugg

SEQ ID NO: 1481513 - RNA, 19 nt, Homo sapiens
  misc_RNA (1)...(19): siRNA sense strand
gaaggugcaggcuuuaaag

SEQ ID NO: 1481514 - RNA, 19 nt, Homo sapiens
  misc_RNA (1)...(19): siRNA sense strand
gcacucaagcagcagcaaa

SEQ ID NO: 1481515 - RNA, 19 nt, Homo sapiens
  misc_RNA (1)...(19): siRNA sense strand
gcacgcacuccuggcuuua

SEQ ID NO: 1481516 - RNA, 19 nt, Homo sapiens
  misc_RNA (1)...(19): siRNA sense strand
caucgugauucagguguuu

SEQ ID NO: 1481517 - RNA, 19 nt, Homo sapiens
  misc_RNA (1)...(19): siRNA sense strand
caacuuccucaauugcuuu

SEQ ID NO: 1481518 - RNA, 19 nt, Homo sapiens
  misc_RNA (1)...(19): siRNA sense strand
gcaaugauaacaccaugag

SEQ ID NO: 1481519 - RNA, 19 nt, Homo sapiens
  misc_RNA (1)...(19): siRNA sense strand
gugaagcccugaagaagcu

SEQ ID NO: 1481520 - RNA, 19 nt, Homo sapiens
  misc_RNA (1)...(19): siRNA sense strand
cauuugccauaccugauaa

SEQ ID NO: 1481521 - RNA, 19 nt, Homo sapiens
  misc_RNA (1)...(19): siRNA sense strand
gguuugcuuugaaguauca

SEQ ID NO: 1481522 - RNA, 19 nt, Homo sapiens
  misc_RNA (1)...(19): siRNA sense strand
ccugauaagccacggcaua

SEQ ID NO: 1481523 - RNA, 19 nt, Homo sapiens
  misc_RNA (1)...(19): siRNA sense strand
ugaugaguguuauaucugu

SEQ ID NO: 1481524 - RNA, 19 nt, Homo sapiens
  misc_RNA (1)...(19): siRNA sense strand
gauccucaaccaaauuaug

SEQ ID NO: 1481525 - RNA, 19 nt, Homo sapiens
  misc_RNA (1)...(19): siRNA sense strand
cuauauugccuuugucuug

SEQ ID NO: 1481526 - RNA, 19 nt, Homo sapiens
  misc_RNA (1)...(19): siRNA sense strand
ucaacuuccucaauugcuu

SEQ ID NO: 1481527 - RNA, 19 nt, Homo sapiens
  misc_RNA (1)...(19): siRNA sense strand
acacucgguuugcuuugaa

SEQ ID NO: 1481528 - RNA, 19 nt, Homo sapiens
  misc_RNA (1)...(19): siRNA sense strand
ccaugagagccuucacaua

SEQ ID NO: 1481529 - RNA, 19 nt, Homo sapiens
  misc_RNA (1)...(19): siRNA sense strand
gggcagaagcagugggauu

SEQ ID NO: 1481530 - RNA, 19 nt, Homo sapiens
  misc_RNA (1)...(19): siRNA sense strand
uugccucacucuucuauau

SEQ ID NO: 1481531 - RNA, 19 nt, Homo sapiens
  misc_RNA (1)...(19): siRNA sense strand
ccaggaaaaucauuguuga

SEQ ID NO: 1481532 - RNA, 19 nt, Homo sapiens
  misc_RNA (1)...(19): siRNA sense strand
gguacacucgguuugcuuu

SEQ ID NO: 1481533 - RNA, 19 nt, Homo sapiens
  misc_RNA (1)...(19): siRNA sense strand
cccauuagcagcugccuuu

SEQ ID NO: 1481534 - RNA, 19 nt, Homo sapiens
  misc_RNA (1)...(19): siRNA sense strand
gaggaaggugcaggcuuua

SEQ ID NO: 1481535 - RNA, 19 nt, Homo sapiens
  misc_RNA (1)...(19): siRNA sense strand
caaccaaauuauggaaucu

SEQ ID NO: 1481536 - RNA, 19 nt, Homo sapiens
  misc_RNA (1)...(19): siRNA sense strand
gcccauagagaaucacaga

SEQ ID NO: 1481537 - RNA, 19 nt, Homo sapiens
  misc_RNA (1)...(19): siRNA sense strand
cgucuggcaucgugauuca

SEQ ID NO: 1481538 - RNA, 19 nt, Homo sapiens
  misc_RNA (1)...(19): siRNA sense strand
ucaaacguccauucucaga

SEQ ID NO: 1481539 - RNA, 19 nt, Homo sapiens
  misc_RNA (1)...(19): siRNA sense strand
ccagauccucaaccaaauu

SEQ ID NO: 1481540 - RNA, 19 nt, Homo sapiens
  misc_RNA (1)...(19): siRNA sense strand
acagugaagcccugaagaa

SEQ ID NO: 1481541 - RNA, 19 nt, Homo sapiens
  misc_RNA (1)...(19): siRNA sense strand
gcaucgugauucagguguu

SEQ ID NO: 1481542 - RNA, 19 nt, Homo sapiens
  misc_RNA (1)...(19): siRNA sense strand
cuuggccacucuccuaauu

SEQ ID NO: 1481543 - RNA, 19 nt, Homo sapiens
  misc_RNA (1)...(19): siRNA sense strand
uaucuguggucacuaacug

SEQ ID NO: 1481544 - RNA, 19 nt, Homo sapiens
  misc_RNA (1)...(19): siRNA sense strand
cuccuguguuuacccauua

SEQ ID NO: 1481545 - RNA, 19 nt, Homo sapiens
  misc_RNA (1)...(19): siRNA sense strand
ggcagaagcagugggauug

SEQ ID NO: 1481546 - RNA, 19 nt, Homo sapiens
  misc_RNA (1)...(19): siRNA sense strand
ucccagauccucaaccaaa

SEQ ID NO: 1481547 - RNA, 19 nt, Homo sapiens
  misc_RNA (1)...(19): siRNA sense strand
caaaguuguauccaggaaa

SEQ ID NO: 1481548 - RNA, 19 nt, Homo sapiens
  misc_RNA (1)...(19): siRNA sense strand
aguaaauucagaugccuua

SEQ ID NO: 1481549 - RNA, 19 nt, Homo sapiens
  misc_RNA (1)...(19): siRNA sense strand
gggcaccuuugaugauuac

SEQ ID NO: 1481550 - RNA, 19 nt, Homo sapiens
  misc_RNA (1)...(19): siRNA sense strand
ugggcaccuuugaugauua

SEQ ID NO: 1481551 - RNA, 19 nt, Homo sapiens
  misc_RNA (1)...(19): siRNA sense strand
acucuucuauauugccuuu

SEQ ID NO: 1481552 - RNA, 19 nt, Homo sapiens
  misc_RNA (1)...(19): siRNA sense strand
aguaucagcccauagagaa

SEQ ID NO: 1481553 - RNA, 19 nt, Homo sapiens
  misc_RNA (1)...(19): siRNA sense strand
gcacuccuggcuuuaaagu

SEQ ID NO: 1481554 - RNA, 19 nt, Homo sapiens
  misc_RNA (1)...(19): siRNA sense strand
ccaucuaauucugaaaguu

SEQ ID NO: 1481555 - RNA, 19 nt, Homo sapiens
  misc_RNA (1)...(19): siRNA sense strand
aaaguuguauccaggaaaa

SEQ ID NO: 1481556 - RNA, 19 nt, Homo sapiens
  misc_RNA (1)...(19): siRNA sense strand
uauacuugcauuugccaua

SEQ ID NO: 1481557 - RNA, 19 nt, Homo sapiens
  misc_RNA (1)...(19): siRNA sense strand
cucagaaccuucagccaau

SEQ ID NO: 1481558 - RNA, 19 nt, Homo sapiens
  misc_RNA (1)...(19): siRNA sense strand
ugaccgagaaccugaagga

SEQ ID NO: 1481559 - RNA, 19 nt, Homo sapiens
  misc_RNA (1)...(19): siRNA sense strand
cacggcauauccagaugaa

SEQ ID NO: 1481560 - RNA, 19 nt, Homo sapiens
  misc_RNA (1)...(19): siRNA sense strand
acgcacuccuggcuuuaaa

SEQ ID NO: 1481561 - RNA, 19 nt, Homo sapiens
  misc_RNA (1)...(19): siRNA sense strand
aaugaugauuuccugacaa

SEQ ID NO: 1481562 - RNA, 19 nt, Homo sapiens
  misc_RNA (1)...(19): siRNA sense strand
ccagacagaacuucaaagg

SEQ ID NO: 1481563 - RNA, 19 nt, Homo sapiens
  misc_RNA (1)...(19): siRNA sense strand
aagcagaccucauuuugau

SEQ ID NO: 1481564 - RNA, 19 nt, Homo sapiens
  misc_RNA (1)...(19): siRNA sense strand
agaagcagugggauuggua

SEQ ID NO: 1481565 - RNA, 19 nt, Homo sapiens
  misc_RNA (1)...(19): siRNA sense strand
acugugcgcugauuggaau

SEQ ID NO: 1481566 - RNA, 19 nt, Homo sapiens
  misc_RNA (1)...(19): siRNA sense strand
ucgguuugcuuugaaguau

SEQ ID NO: 1481567 - RNA, 19 nt, Homo sapiens
  misc_RNA (1)...(19): siRNA sense strand
gcauauccagaugaaacua

SEQ ID NO: 1481568 - RNA, 19 nt, Homo sapiens
  misc_RNA (1)...(19): siRNA sense strand
gaguuauuccugcaguuug

SEQ ID NO: 1481569 - RNA, 19 nt, Homo sapiens
  misc_RNA (1)...(19): siRNA sense strand
gcaccuuugaugauuacuu

SEQ ID NO: 1481570 - RNA, 19 nt, Homo sapiens
  misc_RNA (1)...(19): siRNA sense strand
gacauugaugcuacauuau

SEQ ID NO: 1481571 - RNA, 19 nt, Homo sapiens
  misc_RNA (1)...(19): siRNA sense strand
gaaccaucuaauucugaaa

SEQ ID NO: 1481572 - RNA, 19 nt, Homo sapiens
  misc_RNA (1)...(19): siRNA sense strand
aaugcagccuuuccagaau

SEQ ID NO: 1481573 - RNA, 19 nt, Homo sapiens
  misc_RNA (1)...(19): siRNA sense strand
ggacugggcuuuggcaaua

SEQ ID NO: 1481574 - RNA, 19 nt, Homo sapiens
  misc_RNA (1)...(19): siRNA sense strand
gaagucagcugucgugaga

SEQ ID NO: 1481575 - RNA, 19 nt, Homo sapiens
  misc_RNA (1)...(19): siRNA sense strand
gaagucaacgcuaaucaua

SEQ ID NO: 1481576 - RNA, 19 nt, Homo sapiens
  misc_RNA (1)...(19): siRNA sense strand
ggauagaagucuuaggauu

SEQ ID NO: 1481577 - RNA, 19 nt, Homo sapiens
  misc_RNA (1)...(19): siRNA sense strand
gaagucaaaccucaucaua

SEQ ID NO: 1481578 - RNA, 19 nt, Homo sapiens
  misc_RNA (1)...(19): siRNA sense strand
gauagaagucuuaggauuu

SEQ ID NO: 1481579 - RNA, 19 nt, Homo sapiens
  misc_RNA (1)...(19): siRNA sense strand
caacagacaccagaacaua

SEQ ID NO: 1481580 - RNA, 19 nt, Homo sapiens
  misc_RNA (1)...(19): siRNA sense strand
ggccaaggcuuucuccaaa

SEQ ID NO: 1481581 - RNA, 19 nt, Homo sapiens
  misc_RNA (1)...(19): siRNA sense strand
ggacacacuuggaggagaa

SEQ ID NO: 1481582 - RNA, 19 nt, Homo sapiens
  misc_RNA (1)...(19): siRNA sense strand
gaagagaagccuugugugu

SEQ ID NO: 1481583 - RNA, 19 nt, Homo sapiens
  misc_RNA (1)...(19): siRNA sense strand
gggcgaggcuuuagucuca

SEQ ID NO: 1481584 - RNA, 19 nt, Homo sapiens
  misc_RNA (1)...(19): siRNA sense strand
ggcaauaagucagcucuaa

SEQ ID NO: 1481585 - RNA, 19 nt, Homo sapiens
  misc_RNA (1)...(19): siRNA sense strand
ggaaagagaccuggagaga

SEQ ID NO: 1481586 - RNA, 19 nt, Homo sapiens
  misc_RNA (1)...(19): siRNA sense strand
gggagaagccguauguuug

SEQ ID NO: 1481587 - RNA, 19 nt, Homo sapiens
  misc_RNA (1)...(19): siRNA sense strand
caaaggagaagcccuaugu

SEQ ID NO: 1481588 - RNA, 19 nt, Homo sapiens
  misc_RNA (1)...(19): siRNA sense strand
caccucaccuuacaucaaa

SEQ ID NO: 1481589 - RNA, 19 nt, Homo sapiens
  misc_RNA (1)...(19): siRNA sense strand
gagaggugaugcuggagaa

SEQ ID NO: 1481590 - RNA, 19 nt, Homo sapiens
  misc_RNA (1)...(19): siRNA sense strand
ggagagaagcccauugugu

SEQ ID NO: 1481591 - RNA, 19 nt, Homo sapiens
  misc_RNA (1)...(19): siRNA sense strand
gaggauagaagucuuagga

SEQ ID NO: 1481592 - RNA, 19 nt, Homo sapiens
  misc_RNA (1)...(19): siRNA sense strand
ggauguggcuguggauuuc

SEQ ID NO: 1481593 - RNA, 19 nt, Homo sapiens
  misc_RNA (1)...(19): siRNA sense strand
ggagaagcccuacgugugu

SEQ ID NO: 1481594 - RNA, 19 nt, Homo sapiens
  misc_RNA (1)...(19): siRNA sense strand
ugaggaaacagacaaauug

SEQ ID NO: 1481595 - RNA, 19 nt, Homo sapiens
  misc_RNA (1)...(19): siRNA sense strand
agucaaaccucaucauaca

SEQ ID NO: 1481596 - RNA, 19 nt, Homo sapiens
  misc_RNA (1)...(19): siRNA sense strand
gggagaagcccuacaugug

SEQ ID NO: 1481597 - RNA, 19 nt, Homo sapiens
  misc_RNA (1)...(19): siRNA sense strand
ggagaagccguauguuugu

SEQ ID NO: 1481598 - RNA, 19 nt, Homo sapiens
  misc_RNA (1)...(19): siRNA sense strand
ggaccacccuugucaacca

SEQ ID NO: 1481599 - RNA, 19 nt, Homo sapiens
  misc_RNA (1)...(19): siRNA sense strand
gggagacccuggagugauc

SEQ ID NO: 1481600 - RNA, 19 nt, Homo sapiens
  misc_RNA (1)...(19): siRNA sense strand
gcaauaagucagcucuaau

SEQ ID NO: 1481601 - RNA, 19 nt, Homo sapiens
  misc_RNA (1)...(19): siRNA sense strand
aaagucacaccucaccuua

SEQ ID NO: 1481602 - RNA, 19 nt, Homo sapiens
  misc_RNA (1)...(19): siRNA sense strand
auagaagucuuaggauuug

SEQ ID NO: 1481603 - RNA, 19 nt, Homo sapiens
  misc_RNA (1)...(19): siRNA sense strand
caccuuacaucaaaugaca

SEQ ID NO: 1481604 - RNA, 19 nt, Homo sapiens
  misc_RNA (1)...(19): siRNA sense strand
gaauucaacccucaucucu

SEQ ID NO: 1481605 - RNA, 19 nt, Homo sapiens
  misc_RNA (1)...(19): siRNA sense strand
ggugagaaaccuuacaugu

SEQ ID NO: 1481606 - RNA, 19 nt, Homo sapiens
  misc_RNA (1)...(19): siRNA sense strand
gcaauccaaccucaucaga

SEQ ID NO: 1481607 - RNA, 19 nt, Homo sapiens
  misc_RNA (1)...(19): siRNA sense strand
ggacacacucaaaggagaa

SEQ ID NO: 1481608 - RNA, 19 nt, Homo sapiens
  misc_RNA (1)...(19): siRNA sense strand
aaccggaagucaacgcuaa

SEQ ID NO: 1481609 - RNA, 19 nt, Homo sapiens
  misc_RNA (1)...(19): siRNA sense strand
gcaaccuucggauuccuua

SEQ ID NO: 1481610 - RNA, 19 nt, Homo sapiens
  misc_RNA (1)...(19): siRNA sense strand
gcuuuagucucaagucaca

SEQ ID NO: 1481611 - RNA, 19 nt, Homo sapiens
  misc_RNA (1)...(19): siRNA sense strand
gggauguggcuguggauuu

SEQ ID NO: 1481612 - RNA, 19 nt, Homo sapiens
  misc_RNA (1)...(19): siRNA sense strand
gaagccagcccagcucaga

SEQ ID NO: 1481613 - RNA, 19 nt, Homo sapiens
  misc_RNA (1)...(19): siRNA sense strand
gaagucaaaccuuguugca

SEQ ID NO: 1481614 - RNA, 19 nt, Homo sapiens
  misc_RNA (1)...(19): siRNA sense strand
gugagaaaccuuacaugug

SEQ ID NO: 1481615 - RNA, 19 nt, Homo sapiens
  misc_RNA (1)...(19): siRNA sense strand
agucaacgcuaaucauaca

SEQ ID NO: 1481616 - RNA, 19 nt, Homo sapiens
  misc_RNA (1)...(19): siRNA sense strand
agaagagccucgccagaca

SEQ ID NO: 1481617 - RNA, 19 nt, Homo sapiens
  misc_RNA (1)...(19): siRNA sense strand
aauccaaccucaucagaca

SEQ ID NO: 1481618 - RNA, 19 nt, Homo sapiens
  misc_RNA (1)...(19): siRNA sense strand
gagaagccguauguuugug

SEQ ID NO: 1481619 - RNA, 19 nt, Homo sapiens
  misc_RNA (1)...(19): siRNA sense strand
gcagggcaaccuucggauu

SEQ ID NO: 1481620 - RNA, 19 nt, Homo sapiens
  misc_RNA (1)...(19): siRNA sense strand
caagucacaccucaacaga

SEQ ID NO: 1481621 - RNA, 19 nt, Homo sapiens
  misc_RNA (1)...(19): siRNA sense strand
ggaagucaacgcuaaucau

SEQ ID NO: 1481622 - RNA, 19 nt, Homo sapiens
  misc_RNA (1)...(19): siRNA sense strand
gcucaaaggacucuguaca

SEQ ID NO: 1481623 - RNA, 19 nt, Homo sapiens
  misc_RNA (1)...(19): siRNA sense strand
gacacacuccggugagaaa

SEQ ID NO: 1481624 - RNA, 19 nt, Homo sapiens
  misc_RNA (1)...(19): siRNA sense strand
agucacaccucaacagaca

SEQ ID NO: 1481625 - RNA, 19 nt, Homo sapiens
  misc_RNA (1)...(19): siRNA sense strand
gccaugccuuuguuuggaa

SEQ ID NO: 1481626 - RNA, 19 nt, Homo sapiens
  misc_RNA (1)...(19): siRNA sense strand
agucacaccucaccuuaca

SEQ ID NO: 1481627 - RNA, 19 nt, Homo sapiens
  misc_RNA (1)...(19): siRNA sense strand
auucaacccucaucucuca

SEQ ID NO: 1481628 - RNA, 19 nt, Homo sapiens
  misc_RNA (1)...(19): siRNA sense strand
caugugcuguguaaucauc

SEQ ID NO: 1481629 - RNA, 19 nt, Homo sapiens
  misc_RNA (1)...(19): siRNA sense strand
gcacagcuucagccagaau

SEQ ID NO: 1481630 - RNA, 19 nt, Homo sapiens
  misc_RNA (1)...(19): siRNA sense strand
ggaguguggacgaggcuuu

SEQ ID NO: 1481631 - RNA, 19 nt, Homo sapiens
  misc_RNA (1)...(19): siRNA sense strand
gaguguggacgaggcuuua

SEQ ID NO: 1481632 - RNA, 19 nt, Homo sapiens
  misc_RNA (1)...(19): siRNA sense strand
ggacacacuccggugagaa

SEQ ID NO: 1481633 - RNA, 19 nt, Homo sapiens
  misc_RNA (1)...(19): siRNA sense strand
gcuucagccucaagucuca

SEQ ID NO: 1481634 - RNA, 19 nt, Homo sapiens
  misc_RNA (1)...(19): siRNA sense strand
cagaggaccacccuuguca

SEQ ID NO: 1481635 - RNA, 19 nt, Homo sapiens
  misc_RNA (1)...(19): siRNA sense strand
ccagaagucaaaccuuguu

SEQ ID NO: 1481636 - RNA, 19 nt, Homo sapiens
  misc_RNA (1)...(19): siRNA sense strand
cggaagagaagccuugugu

SEQ ID NO: 1481637 - RNA, 19 nt, Homo sapiens
  misc_RNA (1)...(19): siRNA sense strand
agucaacuguggagagugu

SEQ ID NO: 1481638 - RNA, 19 nt, Homo sapiens
  misc_RNA (1)...(19): siRNA sense strand
gacugggcuuuggcaauaa

SEQ ID NO: 1481639 - RNA, 19 nt, Homo sapiens
  misc_RNA (1)...(19): siRNA sense strand
caggagagaagcccauugu

SEQ ID NO: 1481640 - RNA, 19 nt, Homo sapiens
  misc_RNA (1)...(19): siRNA sense strand
gcagaggaccacccuuguc

SEQ ID NO: 1481641 - RNA, 19 nt, Homo sapiens
  misc_RNA (1)...(19): siRNA sense strand
aaccuuacaugugcaguga

SEQ ID NO: 1481642 - RNA, 19 nt, Homo sapiens
  misc_RNA (1)...(19): siRNA sense strand
gaagucuuaggauuuggaa

SEQ ID NO: 1481643 - RNA, 19 nt, Homo sapiens
  misc_RNA (1)...(19): siRNA sense strand
ggaagaaccaagaaaagga

SEQ ID NO: 1481644 - RNA, 19 nt, Homo sapiens
  misc_RNA (1)...(19): siRNA sense strand
uacaucaaaugacacauac

SEQ ID NO: 1481645 - RNA, 19 nt, Homo sapiens
  misc_RNA (1)...(19): siRNA sense strand
ucagcaagaugacaaaccu

SEQ ID NO: 1481646 - RNA, 19 nt, Homo sapiens
  misc_RNA (1)...(19): siRNA sense strand
agaagcccauugugugcaa

SEQ ID NO: 1481647 - RNA, 19 nt, Homo sapiens
  misc_RNA (1)...(19): siRNA sense strand
agaagguccugagggagaa

SEQ ID NO: 1481648 - RNA, 19 nt, Homo sapiens
  misc_RNA (1)...(19): siRNA sense strand
aaccuucggauuccuuaua

SEQ ID NO: 1481649 - RNA, 19 nt, Homo sapiens
  misc_RNA (1)...(19): siRNA sense strand
ccagaggacacacucaaag

SEQ ID NO: 1481650 - RNA, 19 nt, Homo sapiens
  misc_RNA (1)...(19): siRNA sense strand
cugaggaaacagacaaauu

SEQ ID NO: 1481651 - RNA, 19 nt, Homo sapiens
  misc_RNA (1)...(19): siRNA sense strand
cuggagugaucaagcagaa

SEQ ID NO: 1481652 - RNA, 19 nt, Homo sapiens
  misc_RNA (1)...(19): siRNA sense strand
ccggcaaccuguccagauc

SEQ ID NO: 1481653 - RNA, 19 nt, Homo sapiens
  misc_RNA (1)...(19): siRNA sense strand
aggugaugcuggagaacua

SEQ ID NO: 1481654 - RNA, 19 nt, Homo sapiens
  misc_RNA (1)...(19): siRNA sense strand
ucagagggguggaguuaga

SEQ ID NO: 1481655 - RNA, 19 nt, Homo sapiens
  misc_RNA (1)...(19): siRNA sense strand
acagcaaccuggucucacu

SEQ ID NO: 1481656 - RNA, 19 nt, Homo sapiens
  misc_RNA (1)...(19): siRNA sense strand
cagggcaaccuucggauuc

SEQ ID NO: 1481657 - RNA, 19 nt, Homo sapiens
  misc_RNA (1)...(19): siRNA sense strand
ggaagcacucgagggagaa

SEQ ID NO: 1481658 - RNA, 19 nt, Homo sapiens
  misc_RNA (1)...(19): siRNA sense strand
aacauacacucaggagaga

SEQ ID NO: 1481659 - RNA, 19 nt, Homo sapiens
  misc_RNA (1)...(19): siRNA sense strand
ggggagaagccguauguuu

SEQ ID NO: 1481660 - RNA, 19 nt, Homo sapiens
  misc_RNA (1)...(19): siRNA sense strand
ccggguuucuccagucaga

SEQ ID NO: 1481661 - RNA, 19 nt, Homo sapiens
  misc_RNA (1)...(19): siRNA sense strand
caaauuguugaagaggaua

SEQ ID NO: 1481662 - RNA, 19 nt, Homo sapiens
  misc_RNA (1)...(19): siRNA sense strand
ucacaccucaccuuacauc

SEQ ID NO: 1481663 - RNA, 19 nt, Homo sapiens
  misc_RNA (1)...(19): siRNA sense strand
gaguguggacugagcuuca

SEQ ID NO: 1481664 - RNA, 19 nt, Homo sapiens
  misc_RNA (1)...(19): siRNA sense strand
ccagaagucaaaccucauc

SEQ ID NO: 1481665 - RNA, 19 nt, Homo sapiens
  misc_RNA (1)...(19): siRNA sense strand
gcucagucaccagcggaua

SEQ ID NO: 1481666 - RNA, 19 nt, Homo sapiens
  misc_RNA (1)...(19): siRNA sense strand
ucacugggaauuucauuuu

SEQ ID NO: 1481667 - RNA, 19 nt, Homo sapiens
  misc_RNA (1)...(19): siRNA sense strand
acaccucaccuuacaucaa

SEQ ID NO: 1481668 - RNA, 19 nt, Homo sapiens
  misc_RNA (1)...(19): siRNA sense strand
gcgaggcuuuagucucaag

SEQ ID NO: 1481669 - RNA, 19 nt, Homo sapiens
  misc_RNA (1)...(19): siRNA sense strand
aaggagaagcccuaugugu

SEQ ID NO: 1481670 - RNA, 19 nt, Homo sapiens
  misc_RNA (1)...(19): siRNA sense strand
gaauguggcaaaggcuuca

SEQ ID NO: 1481671 - RNA, 19 nt, Homo sapiens
  misc_RNA (1)...(19): siRNA sense strand
gggcuuuggcaauaaguca

SEQ ID NO: 1481672 - RNA, 19 nt, Homo sapiens
  misc_RNA (1)...(19): siRNA sense strand
gggcucacucggaagagaa

SEQ ID NO: 1481673 - RNA, 19 nt, Homo sapiens
  misc_RNA (1)...(19): siRNA sense strand
ugacucaaauucugacuuu

SEQ ID NO: 1481674 - RNA, 19 nt, Homo sapiens
  misc_RNA (1)...(19): siRNA sense strand
gaaggauccugcacaguuc

SEQ ID NO: 1481675 - RNA, 19 nt, Homo sapiens
  misc_RNA (1)...(19): siRNA sense strand
cugcauagcuccacacuca

SEQ ID NO: 1481676 - RNA, 19 nt, Homo sapiens
  misc_RNA (1)...(19): siRNA sense strand
cucauaggcuccacucuaa

SEQ ID NO: 1481677 - RNA, 19 nt, Homo sapiens
  misc_RNA (1)...(19): siRNA sense strand
ggacuccucuccucacaac

SEQ ID NO: 1481678 - RNA, 19 nt, Homo sapiens
  misc_RNA (1)...(19): siRNA sense strand
agaaggauccugcacaguu

SEQ ID NO: 1481679 - RNA, 19 nt, Homo sapiens
  misc_RNA (1)...(19): siRNA sense strand
gaccugcggcuacugcuuu

SEQ ID NO: 1481680 - RNA, 19 nt, Homo sapiens
  misc_RNA (1)...(19): siRNA sense strand
caauucggcucuugugacu

SEQ ID NO: 1481681 - RNA, 19 nt, Homo sapiens
  misc_RNA (1)...(19): siRNA sense strand
ucucauaggcuccacucua

SEQ ID NO: 1481682 - RNA, 19 nt, Homo sapiens
  misc_RNA (1)...(19): siRNA sense strand
gcucuugugacucaaauuc

SEQ ID NO: 1481683 - RNA, 19 nt, Homo sapiens
  misc_RNA (1)...(19): siRNA sense strand
gaccaggugcugccacaga

SEQ ID NO: 1481684 - RNA, 19 nt, Homo sapiens
  misc_RNA (1)...(19): siRNA sense strand
ggccuucaaucaccaaacu

SEQ ID NO: 1481685 - RNA, 19 nt, Homo sapiens
  misc_RNA (1)...(19): siRNA sense strand
gcccaaagaggccaguuuc

SEQ ID NO: 1481686 - RNA, 19 nt, Homo sapiens
  misc_RNA (1)...(19): siRNA sense strand
caaccaccguucucuucca

SEQ ID NO: 1481687 - RNA, 19 nt, Homo sapiens
  misc_RNA (1)...(19): siRNA sense strand
acauggcgcuggcaucagu

SEQ ID NO: 1481688 - RNA, 19 nt, Homo sapiens
  misc_RNA (1)...(19): siRNA sense strand
gcugcuugcuuucccucaa

SEQ ID NO: 1481689 - RNA, 19 nt, Homo sapiens
  misc_RNA (1)...(19): siRNA sense strand
cauaggcuccacucuaaca

SEQ ID NO: 1481690 - RNA, 19 nt, Homo sapiens
  misc_RNA (1)...(19): siRNA sense strand
ccaaagaggccaguuucuc

SEQ ID NO: 1481691 - RNA, 19 nt, Homo sapiens
  misc_RNA (1)...(19): siRNA sense strand
gucguggaguauccuauau

SEQ ID NO: 1481692 - RNA, 19 nt, Homo sapiens
  misc_RNA (1)...(19): siRNA sense strand
auucggcucuugugacuca

SEQ ID NO: 1481693 - RNA, 19 nt, Homo sapiens
  misc_RNA (1)...(19): siRNA sense strand
cagcccaccuucucauagg

SEQ ID NO: 1481694 - RNA, 19 nt, Homo sapiens
  misc_RNA (1)...(19): siRNA sense strand
agacauggcgcuggcauca

SEQ ID NO: 1481695 - RNA, 19 nt, Homo sapiens
  misc_RNA (1)...(19): siRNA sense strand
caaccuacagccucucucu

SEQ ID NO: 1481696 - RNA, 19 nt, Homo sapiens
  misc_RNA (1)...(19): siRNA sense strand
gcauagcuccacacucacu

SEQ ID NO: 1481697 - RNA, 19 nt, Homo sapiens
  misc_RNA (1)...(19): siRNA sense strand
agucguggaguauccuaua

SEQ ID NO: 1481698 - RNA, 19 nt, Homo sapiens
  misc_RNA (1)...(19): siRNA sense strand
ggccugugggcaucaauug

SEQ ID NO: 1481699 - RNA, 19 nt, Homo sapiens
  misc_RNA (1)...(19): siRNA sense strand
cguggaguauccuauaugc

SEQ ID NO: 1481700 - RNA, 19 nt, Homo sapiens
  misc_RNA (1)...(19): siRNA sense strand
ggacggagcucccagauuc

SEQ ID NO: 1481701 - RNA, 19 nt, Homo sapiens
  misc_RNA (1)...(19): siRNA sense strand
gcacaaagcuuggcagaag

SEQ ID NO: 1481702 - RNA, 19 nt, Homo sapiens
  misc_RNA (1)...(19): siRNA sense strand
gaaaucgguuguuugaaga

SEQ ID NO: 1481703 - RNA, 19 nt, Homo sapiens
  misc_RNA (1)...(19): siRNA sense strand
gaagauggcaaugaaauaa

SEQ ID NO: 1481704 - RNA, 19 nt, Homo sapiens
  misc_RNA (1)...(19): siRNA sense strand
uaauggagcugcccuuuga

SEQ ID NO: 1481705 - RNA, 19 nt, Homo sapiens
  misc_RNA (1)...(19): siRNA sense strand
gcagaaaucgguuguuuga

SEQ ID NO: 1481706 - RNA, 19 nt, Homo sapiens
  misc_RNA (1)...(19): siRNA sense strand
ugaagaagcucacucuguu

SEQ ID NO: 1481707 - RNA, 19 nt, Homo sapiens
  misc_RNA (1)...(19): siRNA sense strand
ggagcugcccuuugaauua

SEQ ID NO: 1481708 - RNA, 19 nt, Homo sapiens
  misc_RNA (1)...(19): siRNA sense strand
gagcugcccuuugaauuaa

SEQ ID NO: 1481709 - RNA, 19 nt, Homo sapiens
  misc_RNA (1)...(19): siRNA sense strand
gagaaucuguucccagcua

SEQ ID NO: 1481710 - RNA, 19 nt, Homo sapiens
  misc_RNA (1)...(19): siRNA sense strand
gaagagcauuccuccagaa

SEQ ID NO: 1481711 - RNA, 19 nt, Homo sapiens
  misc_RNA (1)...(19): siRNA sense strand
guagauaucucagcaaaca

SEQ ID NO: 1481712 - RNA, 19 nt, Homo sapiens
  misc_RNA (1)...(19): siRNA sense strand
gcagugcguuuguguuuga

SEQ ID NO: 1481713 - RNA, 19 nt, Homo sapiens
  misc_RNA (1)...(19): siRNA sense strand
gcaaugaaauaauggaaag

SEQ ID NO: 1481714 - RNA, 19 nt, Homo sapiens
  misc_RNA (1)...(19): siRNA sense strand
gaaaggaacacucucacaa

SEQ ID NO: 1481715 - RNA, 19 nt, Homo sapiens
  misc_RNA (1)...(19): siRNA sense strand
gaagaagcucacucuguua

SEQ ID NO: 1481716 - RNA, 19 nt, Homo sapiens
  misc_RNA (1)...(19): siRNA sense strand
cagcagaaaucgguuguuu

SEQ ID NO: 1481717 - RNA, 19 nt, Homo sapiens
  misc_RNA (1)...(19): siRNA sense strand
ugaccuaccuucccuauuc

SEQ ID NO: 1481718 - RNA, 19 nt, Homo sapiens
  misc_RNA (1)...(19): siRNA sense strand
caauguggguuucaacuau

SEQ ID NO: 1481719 - RNA, 19 nt, Homo sapiens
  misc_RNA (1)...(19): siRNA sense strand
gagcagugcguuuguguuu

SEQ ID NO: 1481720 - RNA, 19 nt, Homo sapiens
  misc_RNA (1)...(19): siRNA sense strand
aagaauggcuucauagaca

SEQ ID NO: 1481721 - RNA, 19 nt, Homo sapiens
  misc_RNA (1)...(19): siRNA sense strand
cauaagcaauaccuugauu

SEQ ID NO: 1481722 - RNA, 19 nt, Homo sapiens
  misc_RNA (1)...(19): siRNA sense strand
gaaugguacauaagcaaua

SEQ ID NO: 1481723 - RNA, 19 nt, Homo sapiens
  misc_RNA (1)...(19): siRNA sense strand
aaccaaaucucacaucuuc

SEQ ID NO: 1481724 - RNA, 19 nt, Homo sapiens
  misc_RNA (1)...(19): siRNA sense strand
gcaagaauggcuucauaga

SEQ ID NO: 1481725 - RNA, 19 nt, Homo sapiens
  misc_RNA (1)...(19): siRNA sense strand
ugaagaaccugaaagaacu

SEQ ID NO: 1481726 - RNA, 19 nt, Homo sapiens
  misc_RNA (1)...(19): siRNA sense strand
agaaaucgguuguuugaag

SEQ ID NO: 1481727 - RNA, 19 nt, Homo sapiens
  misc_RNA (1)...(19): siRNA sense strand
cugcaagaauggcuucaua

SEQ ID NO: 1481728 - RNA, 19 nt, Homo sapiens
  misc_RNA (1)...(19): siRNA sense strand
ugaagcaaguuacauuugu

SEQ ID NO: 1481729 - RNA, 19 nt, Homo sapiens
  misc_RNA (1)...(19): siRNA sense strand
gaacgggaucgccaacauu

SEQ ID NO: 1481730 - RNA, 19 nt, Homo sapiens
  misc_RNA (1)...(19): siRNA sense strand
uagagagacuggauuguuc

SEQ ID NO: 1481731 - RNA, 19 nt, Homo sapiens
  misc_RNA (1)...(19): siRNA sense strand
gggaaacucgugucaagaa

SEQ ID NO: 1481732 - RNA, 19 nt, Homo sapiens
  misc_RNA (1)...(19): siRNA sense strand
ugaccgaccugccgcaaga

SEQ ID NO: 1481733 - RNA, 19 nt, Homo sapiens
  misc_RNA (1)...(19): siRNA sense strand
gaagcucacucuguuaguc

SEQ ID NO: 1481734 - RNA, 19 nt, Homo sapiens
  misc_RNA (1)...(19): siRNA sense strand
ugacucauccacaccuuua

SEQ ID NO: 1481735 - RNA, 19 nt, Homo sapiens
  misc_RNA (1)...(19): siRNA sense strand
gaagagcgccuuggagaag

SEQ ID NO: 1481736 - RNA, 19 nt, Homo sapiens
  misc_RNA (1)...(19): siRNA sense strand
uggaaaggcuugagaagag

SEQ ID NO: 1481737 - RNA, 19 nt, Homo sapiens
  misc_RNA (1)...(19): siRNA sense strand
ugaagauggcaaugaaaua

SEQ ID NO: 1481738 - RNA, 19 nt, Homo sapiens
  misc_RNA (1)...(19): siRNA sense strand
ucaacuaucugaagagcau

SEQ ID NO: 1481739 - RNA, 19 nt, Homo sapiens
  misc_RNA (1)...(19): siRNA sense strand
agacacaccugagagaaug

SEQ ID NO: 1481740 - RNA, 19 nt, Homo sapiens
  misc_RNA (1)...(19): siRNA sense strand
uugaagaccuuaaagaaag

SEQ ID NO: 1481741 - RNA, 19 nt, Homo sapiens
  misc_RNA (1)...(19): siRNA sense strand
gaaagccuauauugaagac

SEQ ID NO: 1481742 - RNA, 19 nt, Homo sapiens
  misc_RNA (1)...(19): siRNA sense strand
gaaguuaugaaagccuaua

SEQ ID NO: 1481743 - RNA, 19 nt, Homo sapiens
  misc_RNA (1)...(19): siRNA sense strand
ggaaaucuagaauuaaugg

SEQ ID NO: 1481744 - RNA, 19 nt, Homo sapiens
  misc_RNA (1)...(19): siRNA sense strand
gcuguauacugcaagaaug

SEQ ID NO: 1481745 - RNA, 19 nt, Homo sapiens
  misc_RNA (1)...(19): siRNA sense strand
guuaugaaagccuauauug

SEQ ID NO: 1481746 - RNA, 19 nt, Homo sapiens
  misc_RNA (1)...(19): siRNA sense strand
ggaaacucgugucaagaag

SEQ ID NO: 1481747 - RNA, 19 nt, Homo sapiens
  misc_RNA (1)...(19): siRNA sense strand
cugagagaaugguacauaa

SEQ ID NO: 1481748 - RNA, 19 nt, Homo sapiens
  misc_RNA (1)...(19): siRNA sense strand
agaguucacuucccaagga

SEQ ID NO: 1481749 - RNA, 19 nt, Homo sapiens
  misc_RNA (1)...(19): siRNA sense strand
uggacaagauugaaaggaa

SEQ ID NO: 1481750 - RNA, 19 nt, Homo sapiens
  misc_RNA (1)...(19): siRNA sense strand
ggaacuuuguggccgaaug

SEQ ID NO: 1481751 - RNA, 19 nt, Homo sapiens
  misc_RNA (1)...(19): siRNA sense strand
ugaagaccuuaaagaaaga

SEQ ID NO: 1481752 - RNA, 19 nt, Homo sapiens
  misc_RNA (1)...(19): siRNA sense strand
gaauugggagauugugaaa

SEQ ID NO: 1481753 - RNA, 19 nt, Homo sapiens
  misc_RNA (1)...(19): siRNA sense strand
gcucccaacugcccuuugu

SEQ ID NO: 1481754 - RNA, 19 nt, Homo sapiens
  misc_RNA (1)...(19): siRNA sense strand
gaaauaauggaaagugaac

SEQ ID NO: 1481755 - RNA, 19 nt, Homo sapiens
  misc_RNA (1)...(19): siRNA sense strand
gauaaugcccaaugugaag

SEQ ID NO: 1481756 - RNA, 19 nt, Homo sapiens
  misc_RNA (1)...(19): siRNA sense strand
gaaccugaaagaacucaau

SEQ ID NO: 1481757 - RNA, 19 nt, Homo sapiens
  misc_RNA (1)...(19): siRNA sense strand
cgaccugccgcaagauaua

SEQ ID NO: 1481758 - RNA, 19 nt, Homo sapiens
  misc_RNA (1)...(19): siRNA sense strand
aaagaaagagaaucuguuc

SEQ ID NO: 1481759 - RNA, 19 nt, Homo sapiens
  misc_RNA (1)...(19): siRNA sense strand
gugggaaacucgugucaag

SEQ ID NO: 1481760 - RNA, 19 nt, Homo sapiens
  misc_RNA (1)...(19): siRNA sense strand
gagaaugguacauaagcaa

SEQ ID NO: 1481761 - RNA, 19 nt, Homo sapiens
  misc_RNA (1)...(19): siRNA sense strand
gcguuuguguuugaacuuu

SEQ ID NO: 1481762 - RNA, 19 nt, Homo sapiens
  misc_RNA (1)...(19): siRNA sense strand
agauggcaaugaaauaaug

SEQ ID NO: 1481763 - RNA, 19 nt, Homo sapiens
  misc_RNA (1)...(19): siRNA sense strand
ggagcucccagauucauug

SEQ ID NO: 1481764 - RNA, 19 nt, Homo sapiens
  misc_RNA (1)...(19): siRNA sense strand
agacuggauuguucuggaa

SEQ ID NO: 1481765 - RNA, 19 nt, Homo sapiens
  misc_RNA (1)...(19): siRNA sense strand
uaagcaauaccuugauuca

SEQ ID NO: 1481766 - RNA, 19 nt, Homo sapiens
  misc_RNA (1)...(19): siRNA sense strand
gaugagaauucuggaucug

SEQ ID NO: 1481767 - RNA, 19 nt, Homo sapiens
  misc_RNA (1)...(19): siRNA sense strand
uaaaggaggaguggaacuu

SEQ ID NO: 1481768 - RNA, 19 nt, Homo sapiens
  misc_RNA (1)...(19): siRNA sense strand
gaaucuguucccagcuaua

SEQ ID NO: 1481769 - RNA, 19 nt, Homo sapiens
  misc_RNA (1)...(19): siRNA sense strand
uuggauaucagcagcaaua

SEQ ID NO: 1481770 - RNA, 19 nt, Homo sapiens
  misc_RNA (1)...(19): siRNA sense strand
cacaaagcuuggcagaaga

SEQ ID NO: 1481771 - RNA, 19 nt, Homo sapiens
  misc_RNA (1)...(19): siRNA sense strand
gcagacacaccugagagaa

SEQ ID NO: 1481772 - RNA, 19 nt, Homo sapiens
  misc_RNA (1)...(19): siRNA sense strand
aaacucgugucaagaagca

SEQ ID NO: 1481773 - RNA, 19 nt, Homo sapiens
  misc_RNA (1)...(19): siRNA sense strand
ccugagagaaugguacaua

SEQ ID NO: 1481774 - RNA, 19 nt, Homo sapiens
  misc_RNA (1)...(19): siRNA sense strand
gugaagauggcaaugaaau

SEQ ID NO: 1481775 - RNA, 19 nt, Homo sapiens
  misc_RNA (1)...(19): siRNA sense strand
ugucgaauuugcagugguu

SEQ ID NO: 1481776 - RNA, 19 nt, Homo sapiens
  misc_RNA (1)...(19): siRNA sense strand
ucaauguggguuucaacua

SEQ ID NO: 1481777 - RNA, 19 nt, Homo sapiens
  misc_RNA (1)...(19): siRNA sense strand
ugaacgggaucgccaacau

SEQ ID NO: 1481778 - RNA, 19 nt, Homo sapiens
  misc_RNA (1)...(19): siRNA sense strand
gaagaaggagguggaaagg

SEQ ID NO: 1481779 - RNA, 19 nt, Homo sapiens
  misc_RNA (1)...(19): siRNA sense strand
aaggaggaguggaacuuug

SEQ ID NO: 1481780 - RNA, 19 nt, Homo sapiens
  misc_RNA (1)...(19): siRNA sense strand
ggcaaugaaauaauggaaa

SEQ ID NO: 1481781 - RNA, 19 nt, Homo sapiens
  misc_RNA (1)...(19): siRNA sense strand
cuagagagacuggauuguu

SEQ ID NO: 1481782 - RNA, 19 nt, Homo sapiens
  misc_RNA (1)...(19): siRNA sense strand
aauuugcagugguuggaua

SEQ ID NO: 1481783 - RNA, 19 nt, Homo sapiens
  misc_RNA (1)...(19): siRNA sense strand
ggagcagacacaccugaga

SEQ ID NO: 1481784 - RNA, 19 nt, Homo sapiens
  misc_RNA (1)...(19): siRNA sense strand
uacauaagcaauaccuuga

SEQ ID NO: 1481785 - RNA, 19 nt, Homo sapiens
  misc_RNA (1)...(19): siRNA sense strand
gcgugcggcuucuggacaa

SEQ ID NO: 1481786 - RNA, 19 nt, Homo sapiens
  misc_RNA (1)...(19): siRNA sense strand
ugaaagccuauauugaaga

SEQ ID NO: 1481787 - RNA, 19 nt, Homo sapiens
  misc_RNA (1)...(19): siRNA sense strand
gauaucagcagcaauaacc

SEQ ID NO: 1481788 - RNA, 19 nt, Homo sapiens
  misc_RNA (1)...(19): siRNA sense strand
uuguagauaucucagcaaa

SEQ ID NO: 1481789 - RNA, 19 nt, Homo sapiens
  misc_RNA (1)...(19): siRNA sense strand
gaacucaauguggguuuca

SEQ ID NO: 1481790 - RNA, 19 nt, Homo sapiens
  misc_RNA (1)...(19): siRNA sense strand
auaaagugguugucuucga

SEQ ID NO: 1481791 - RNA, 19 nt, Homo sapiens
  misc_RNA (1)...(19): siRNA sense strand
gagagaaugguacauaagc

SEQ ID NO: 1481792 - RNA, 19 nt, Homo sapiens
  misc_RNA (1)...(19): siRNA sense strand
guggaaaggcuugagaaga

SEQ ID NO: 1481793 - RNA, 19 nt, Homo sapiens
  misc_RNA (1)...(19): siRNA sense strand
gaccuuaaagaaagagaau

SEQ ID NO: 1481794 - RNA, 19 nt, Homo sapiens
  misc_RNA (1)...(19): siRNA sense strand
ccaaaucucacaucuucca

SEQ ID NO: 1481795 - RNA, 19 nt, Homo sapiens
  misc_RNA (1)...(19): siRNA sense strand
caagaauggcuucauagac

SEQ ID NO: 1481796 - RNA, 19 nt, Homo sapiens
  misc_RNA (1)...(19): siRNA sense strand
gccaacauuuugauaaaga

SEQ ID NO: 1481797 - RNA, 19 nt, Homo sapiens
  misc_RNA (1)...(19): siRNA sense strand
agauaaaggaggaguggaa

SEQ ID NO: 1481798 - RNA, 19 nt, Homo sapiens
  misc_RNA (1)...(19): siRNA sense strand
ugauaaugcccaaugugaa

SEQ ID NO: 1481799 - RNA, 19 nt, Homo sapiens
  misc_RNA (1)...(19): siRNA sense strand
guuugaagaaccugaaaga

SEQ ID NO: 1481800 - RNA, 19 nt, Homo sapiens
  misc_RNA (1)...(19): siRNA sense strand
ggacggagcucccagauuc

SEQ ID NO: 1481801 - RNA, 19 nt, Homo sapiens
  misc_RNA (1)...(19): siRNA sense strand
gcacaaagcuuggcagaag

SEQ ID NO: 1481802 - RNA, 19 nt, Homo sapiens
  misc_RNA (1)...(19): siRNA sense strand
gaaaucgguuguuugaaga

SEQ ID NO: 1481803 - RNA, 19 nt, Homo sapiens
  misc_RNA (1)...(19): siRNA sense strand
gaagauggcaaugaaauaa

SEQ ID NO: 1481804 - RNA, 19 nt, Homo sapiens
  misc_RNA (1)...(19): siRNA sense strand
uaauggagcugcccuuuga

SEQ ID NO: 1481805 - RNA, 19 nt, Homo sapiens
  misc_RNA (1)...(19): siRNA sense strand
gcagaaaucgguuguuuga

SEQ ID NO: 1481806 - RNA, 19 nt, Homo sapiens
  misc_RNA (1)...(19): siRNA sense strand
ugaagaagcucacucuguu

SEQ ID NO: 1481807 - RNA, 19 nt, Homo sapiens
  misc_RNA (1)...(19): siRNA sense strand
ggagcugcccuuugaauua

SEQ ID NO: 1481808 - RNA, 19 nt, Homo sapiens
  misc_RNA (1)...(19): siRNA sense strand
gagcugcccuuugaauuaa

SEQ ID NO: 1481809 - RNA, 19 nt, Homo sapiens
  misc_RNA (1)...(19): siRNA sense strand
gagaaucuguucccagcua

SEQ ID NO: 1481810 - RNA, 19 nt, Homo sapiens
  misc_RNA (1)...(19): siRNA sense strand
gaagagcauuccuccagaa

SEQ ID NO: 1481811 - RNA, 19 nt, Homo sapiens
  misc_RNA (1)...(19): siRNA sense strand
guagauaucucagcaaaca

SEQ ID NO: 1481812 - RNA, 19 nt, Homo sapiens
  misc_RNA (1)...(19): siRNA sense strand
gcagugcguuuguguuuga

SEQ ID NO: 1481813 - RNA, 19 nt, Homo sapiens
  misc_RNA (1)...(19): siRNA sense strand
gcaaugaaauaauggaaag

SEQ ID NO: 1481814 - RNA, 19 nt, Homo sapiens
  misc_RNA (1)...(19): siRNA sense strand
gaaaggaacacucucacaa

SEQ ID NO: 1481815 - RNA, 19 nt, Homo sapiens
  misc_RNA (1)...(19): siRNA sense strand
gaagaagcucacucuguua

SEQ ID NO: 1481816 - RNA, 19 nt, Homo sapiens
  misc_RNA (1)...(19): siRNA sense strand
cagcagaaaucgguuguuu

SEQ ID NO: 1481817 - RNA, 19 nt, Homo sapiens
  misc_RNA (1)...(19): siRNA sense strand
ugaccuaccuucccuauuc

SEQ ID NO: 1481818 - RNA, 19 nt, Homo sapiens
  misc_RNA (1)...(19): siRNA sense strand
caauguggguuucaacuau

SEQ ID NO: 1481819 - RNA, 19 nt, Homo sapiens
  misc_RNA (1)...(19): siRNA sense strand
gagcagugcguuuguguuu

SEQ ID NO: 1481820 - RNA, 19 nt, Homo sapiens
  misc_RNA (1)...(19): siRNA sense strand
aagaauggcuucauagaca

SEQ ID NO: 1481821 - RNA, 19 nt, Homo sapiens
  misc_RNA (1)...(19): siRNA sense strand
cauaagcaauaccuugauu

SEQ ID NO: 1481822 - RNA, 19 nt, Homo sapiens
  misc_RNA (1)...(19): siRNA sense strand
gaaugguacauaagcaaua

SEQ ID NO: 1481823 - RNA, 19 nt, Homo sapiens
  misc_RNA (1)...(19): siRNA sense strand
aaccaaaucucacaucuuc

SEQ ID NO: 1481824 - RNA, 19 nt, Homo sapiens
  misc_RNA (1)...(19): siRNA sense strand
gcaagaauggcuucauaga

SEQ ID NO: 1481825 - RNA, 19 nt, Homo sapiens
  misc_RNA (1)...(19): siRNA sense strand
ugaagaaccugaaagaacu

SEQ ID NO: 1481826 - RNA, 19 nt, Homo sapiens
  misc_RNA (1)...(19): siRNA sense strand
agaaaucgguuguuugaag

SEQ ID NO: 1481827 - RNA, 19 nt, Homo sapiens
  misc_RNA (1)...(19): siRNA sense strand
cugcaagaauggcuucaua

SEQ ID NO: 1481828 - RNA, 19 nt, Homo sapiens
  misc_RNA (1)...(19): siRNA sense strand
ugaagcaaguuacauuugu

SEQ ID NO: 1481829 - RNA, 19 nt, Homo sapiens
  misc_RNA (1)...(19): siRNA sense strand
gaacgggaucgccaacauu

SEQ ID NO: 1481830 - RNA, 19 nt, Homo sapiens
  misc_RNA (1)...(19): siRNA sense strand
uagagagacuggauuguuc

SEQ ID NO: 1481831 - RNA, 19 nt, Homo sapiens
  misc_RNA (1)...(19): siRNA sense strand
gggaaacucgugucaagaa

SEQ ID NO: 1481832 - RNA, 19 nt, Homo sapiens
  misc_RNA (1)...(19): siRNA sense strand
ugaccgaccugccgcaaga

SEQ ID NO: 1481833 - RNA, 19 nt, Homo sapiens
  misc_RNA (1)...(19): siRNA sense strand
gaagcucacucuguuaguc

SEQ ID NO: 1481834 - RNA, 19 nt, Homo sapiens
  misc_RNA (1)...(19): siRNA sense strand
ugacucauccacaccuuua

SEQ ID NO: 1481835 - RNA, 19 nt, Homo sapiens
  misc_RNA (1)...(19): siRNA sense strand
gaagagcgccuuggagaag

SEQ ID NO: 1481836 - RNA, 19 nt, Homo sapiens
  misc_RNA (1)...(19): siRNA sense strand
uggaaaggcuugagaagag

SEQ ID NO: 1481837 - RNA, 19 nt, Homo sapiens
  misc_RNA (1)...(19): siRNA sense strand
ugaagauggcaaugaaaua

SEQ ID NO: 1481838 - RNA, 19 nt, Homo sapiens
  misc_RNA (1)...(19): siRNA sense strand
ucaacuaucugaagagcau

SEQ ID NO: 1481839 - RNA, 19 nt, Homo sapiens
  misc_RNA (1)...(19): siRNA sense strand
agacacaccugagagaaug

SEQ ID NO: 1481840 - RNA, 19 nt, Homo sapiens
  misc_RNA (1)...(19): siRNA sense strand
uugaagaccuuaaagaaag

SEQ ID NO: 1481841 - RNA, 19 nt, Homo sapiens
  misc_RNA (1)...(19): siRNA sense strand
gaaagccuauauugaagac

SEQ ID NO: 1481842 - RNA, 19 nt, Homo sapiens
  misc_RNA (1)...(19): siRNA sense strand
gaaguuaugaaagccuaua

SEQ ID NO: 1481843 - RNA, 19 nt, Homo sapiens
  misc_RNA (1)...(19): siRNA sense strand
ggaaaucuagaauuaaugg

SEQ ID NO: 1481844 - RNA, 19 nt, Homo sapiens
  misc_RNA (1)...(19): siRNA sense strand
gcuguauacugcaagaaug

SEQ ID NO: 1481845 - RNA, 19 nt, Homo sapiens
  misc_RNA (1)...(19): siRNA sense strand
guuaugaaagccuauauug

SEQ ID NO: 1481846 - RNA, 19 nt, Homo sapiens
  misc_RNA (1)...(19): siRNA sense strand
ggaaacucgugucaagaag

SEQ ID NO: 1481847 - RNA, 19 nt, Homo sapiens
  misc_RNA (1)...(19): siRNA sense strand
cugagagaaugguacauaa

SEQ ID NO: 1481848 - RNA, 19 nt, Homo sapiens
  misc_RNA (1)...(19): siRNA sense strand
agaguucacuucccaagga

SEQ ID NO: 1481849 - RNA, 19 nt, Homo sapiens
  misc_RNA (1)...(19): siRNA sense strand
uggacaagauugaaaggaa

SEQ ID NO: 1481850 - RNA, 19 nt, Homo sapiens
  misc_RNA (1)...(19): siRNA sense strand
ggaacuuuguggccgaaug

SEQ ID NO: 1481851 - RNA, 19 nt, Homo sapiens
  misc_RNA (1)...(19): siRNA sense strand
ugaagaccuuaaagaaaga

SEQ ID NO: 1481852 - RNA, 19 nt, Homo sapiens
  misc_RNA (1)...(19): siRNA sense strand
gaauugggagauugugaaa

SEQ ID NO: 1481853 - RNA, 19 nt, Homo sapiens
  misc_RNA (1)...(19): siRNA sense strand
gcucccaacugcccuuugu

SEQ ID NO: 1481854 - RNA, 19 nt, Homo sapiens
  misc_RNA (1)...(19): siRNA sense strand
gaaauaauggaaagugaac

SEQ ID NO: 1481855 - RNA, 19 nt, Homo sapiens
  misc_RNA (1)...(19): siRNA sense strand
gauaaugcccaaugugaag

SEQ ID NO: 1481856 - RNA, 19 nt, Homo sapiens
  misc_RNA (1)...(19): siRNA sense strand
gaaccugaaagaacucaau

SEQ ID NO: 1481857 - RNA, 19 nt, Homo sapiens
  misc_RNA (1)...(19): siRNA sense strand
cgaccugccgcaagauaua

SEQ ID NO: 1481858 - RNA, 19 nt, Homo sapiens
  misc_RNA (1)...(19): siRNA sense strand
aaagaaagagaaucuguuc

SEQ ID NO: 1481859 - RNA, 19 nt, Homo sapiens
  misc_RNA (1)...(19): siRNA sense strand
gugggaaacucgugucaag

SEQ ID NO: 1481860 - RNA, 19 nt, Homo sapiens
  misc_RNA (1)...(19): siRNA sense strand
gagaaugguacauaagcaa

SEQ ID NO: 1481861 - RNA, 19 nt, Homo sapiens
  misc_RNA (1)...(19): siRNA sense strand
gcguuuguguuugaacuuu

SEQ ID NO: 1481862 - RNA, 19 nt, Homo sapiens
  misc_RNA (1)...(19): siRNA sense strand
agauggcaaugaaauaaug

SEQ ID NO: 1481863 - RNA, 19 nt, Homo sapiens
  misc_RNA (1)...(19): siRNA sense strand
ggagcucccagauucauug

SEQ ID NO: 1481864 - RNA, 19 nt, Homo sapiens
  misc_RNA (1)...(19): siRNA sense strand
agacuggauuguucuggaa

SEQ ID NO: 1481865 - RNA, 19 nt, Homo sapiens
  misc_RNA (1)...(19): siRNA sense strand
uaagcaauaccuugauuca

SEQ ID NO: 1481866 - RNA, 19 nt, Homo sapiens
  misc_RNA (1)...(19): siRNA sense strand
gaugagaauucuggaucug

SEQ ID NO: 1481867 - RNA, 19 nt, Homo sapiens
  misc_RNA (1)...(19): siRNA sense strand
uaaaggaggaguggaacuu

SEQ ID NO: 1481868 - RNA, 19 nt, Homo sapiens
  misc_RNA (1)...(19): siRNA sense strand
gaaucuguucccagcuaua

SEQ ID NO: 1481869 - RNA, 19 nt, Homo sapiens
  misc_RNA (1)...(19): siRNA sense strand
uuggauaucagcagcaaua

SEQ ID NO: 1481870 - RNA, 19 nt, Homo sapiens
  misc_RNA (1)...(19): siRNA sense strand
cacaaagcuuggcagaaga

SEQ ID NO: 1481871 - RNA, 19 nt, Homo sapiens
  misc_RNA (1)...(19): siRNA sense strand
gcagacacaccugagagaa

SEQ ID NO: 1481872 - RNA, 19 nt, Homo sapiens
  misc_RNA (1)...(19): siRNA sense strand
aaacucgugucaagaagca

SEQ ID NO: 1481873 - RNA, 19 nt, Homo sapiens
  misc_RNA (1)...(19): siRNA sense strand
ccugagagaaugguacaua

SEQ ID NO: 1481874 - RNA, 19 nt, Homo sapiens
  misc_RNA (1)...(19): siRNA sense strand
gugaagauggcaaugaaau

SEQ ID NO: 1481875 - RNA, 19 nt, Homo sapiens
  misc_RNA (1)...(19): siRNA sense strand
ugucgaauuugcagugguu

SEQ ID NO: 1481876 - RNA, 19 nt, Homo sapiens
  misc_RNA (1)...(19): siRNA sense strand
ucaauguggguuucaacua

SEQ ID NO: 1481877 - RNA, 19 nt, Homo sapiens
  misc_RNA (1)...(19): siRNA sense strand
ugaacgggaucgccaacau

SEQ ID NO: 1481878 - RNA, 19 nt, Homo sapiens
  misc_RNA (1)...(19): siRNA sense strand
gaagaaggagguggaaagg

SEQ ID NO: 1481879 - RNA, 19 nt, Homo sapiens
  misc_RNA (1)...(19): siRNA sense strand
aaggaggaguggaacuuug

SEQ ID NO: 1481880 - RNA, 19 nt, Homo sapiens
  misc_RNA (1)...(19): siRNA sense strand
ggcaaugaaauaauggaaa

SEQ ID NO: 1481881 - RNA, 19 nt, Homo sapiens
  misc_RNA (1)...(19): siRNA sense strand
cuagagagacuggauuguu

SEQ ID NO: 1481882 - RNA, 19 nt, Homo sapiens
  misc_RNA (1)...(19): siRNA sense strand
aauuugcagugguuggaua

SEQ ID NO: 1481883 - RNA, 19 nt, Homo sapiens
  misc_RNA (1)...(19): siRNA sense strand
ggagcagacacaccugaga

SEQ ID NO: 1481884 - RNA, 19 nt, Homo sapiens
  misc_RNA (1)...(19): siRNA sense strand
uacauaagcaauaccuuga

SEQ ID NO: 1481885 - RNA, 19 nt, Homo sapiens
  misc_RNA (1)...(19): siRNA sense strand
gcgugcggcuucuggacaa

SEQ ID NO: 1481886 - RNA, 19 nt, Homo sapiens
  misc_RNA (1)...(19): siRNA sense strand
ugaaagccuauauugaaga

SEQ ID NO: 1481887 - RNA, 19 nt, Homo sapiens
  misc_RNA (1)...(19): siRNA sense strand
gauaucagcagcaauaacc

SEQ ID NO: 1481888 - RNA, 19 nt, Homo sapiens
  misc_RNA (1)...(19): siRNA sense strand
uuguagauaucucagcaaa

SEQ ID NO: 1481889 - RNA, 19 nt, Homo sapiens
  misc_RNA (1)...(19): siRNA sense strand
gaacucaauguggguuuca

SEQ ID NO: 1481890 - RNA, 19 nt, Homo sapiens
  misc_RNA (1)...(19): siRNA sense strand
auaaagugguugucuucga

SEQ ID NO: 1481891 - RNA, 19 nt, Homo sapiens
  misc_RNA (1)...(19): siRNA sense strand
gagagaaugguacauaagc

SEQ ID NO: 1481892 - RNA, 19 nt, Homo sapiens
  misc_RNA (1)...(19): siRNA sense strand
guggaaaggcuugagaaga

SEQ ID NO: 1481893 - RNA, 19 nt, Homo sapiens
  misc_RNA (1)...(19): siRNA sense strand
gaccuuaaagaaagagaau

SEQ ID NO: 1481894 - RNA, 19 nt, Homo sapiens
  misc_RNA (1)...(19): siRNA sense strand
ccaaaucucacaucuucca

SEQ ID NO: 1481895 - RNA, 19 nt, Homo sapiens
  misc_RNA (1)...(19): siRNA sense strand
caagaauggcuucauagac

SEQ ID NO: 1481896 - RNA, 19 nt, Homo sapiens
  misc_RNA (1)...(19): siRNA sense strand
gccaacauuuugauaaaga

SEQ ID NO: 1481897 - RNA, 19 nt, Homo sapiens
  misc_RNA (1)...(19): siRNA sense strand
agauaaaggaggaguggaa

SEQ ID NO: 1481898 - RNA, 19 nt, Homo sapiens
  misc_RNA (1)...(19): siRNA sense strand
ugauaaugcccaaugugaa

SEQ ID NO: 1481899 - RNA, 19 nt, Homo sapiens
  misc_RNA (1)...(19): siRNA sense strand
guuugaagaaccugaaaga

SEQ ID NO: 1481900 - RNA, 19 nt, Homo sapiens
  misc_RNA (1)...(19): siRNA sense strand
gaacccagcuggccaugcu

SEQ ID NO: 1481901 - RNA, 19 nt, Homo sapiens
  misc_RNA (1)...(19): siRNA sense strand
ucacggagcagcacgcuuu

SEQ ID NO: 1481902 - RNA, 19 nt, Homo sapiens
  misc_RNA (1)...(19): siRNA sense strand
gaucuugccugugcccuau

SEQ ID NO: 1481903 - RNA, 19 nt, Homo sapiens
  misc_RNA (1)...(19): siRNA sense strand
gggcugauguggccgaugu

SEQ ID NO: 1481904 - RNA, 19 nt, Homo sapiens
  misc_RNA (1)...(19): siRNA sense strand
gcagcacggcgacgacuuu

SEQ ID NO: 1481905 - RNA, 19 nt, Homo sapiens
  misc_RNA (1)...(19): siRNA sense strand
gaauggcuaccgacgcuuu

SEQ ID NO: 1481906 - RNA, 19 nt, Homo sapiens
  misc_RNA (1)...(19): siRNA sense strand
ggaauacacgcuggacuug

SEQ ID NO: 1481907 - RNA, 19 nt, Homo sapiens
  misc_RNA (1)...(19): siRNA sense strand
uggagagccuggaugugua

SEQ ID NO: 1481908 - RNA, 19 nt, Homo sapiens
  misc_RNA (1)...(19): siRNA sense strand
gcgacgacuuugacugguu

SEQ ID NO: 1481909 - RNA, 19 nt, Homo sapiens
  misc_RNA (1)...(19): siRNA sense strand
cgcccgagcugaacuggaa

SEQ ID NO: 1481910 - RNA, 19 nt, Homo sapiens
  misc_RNA (1)...(19): siRNA sense strand
ugacccugcugcuacugua

SEQ ID NO: 1481911 - RNA, 19 nt, Homo sapiens
  misc_RNA (1)...(19): siRNA sense strand
gcacguaccaggagaucca

SEQ ID NO: 1481912 - RNA, 19 nt, Homo sapiens
  misc_RNA (1)...(19): siRNA sense strand
agugggagauccagaauac

SEQ ID NO: 1481913 - RNA, 19 nt, Homo sapiens
  misc_RNA (1)...(19): siRNA sense strand
accaggagauccaggaguu

SEQ ID NO: 1481914 - RNA, 19 nt, Homo sapiens
  misc_RNA (1)...(19): siRNA sense strand
gaacaggagcagggcaaca

SEQ ID NO: 1481915 - RNA, 19 nt, Homo sapiens
  misc_RNA (1)...(19): siRNA sense strand
gcaugcugcugcaacaacu

SEQ ID NO: 1481916 - RNA, 19 nt, Homo sapiens
  misc_RNA (1)...(19): siRNA sense strand
gacacuggccgcuuugauc

SEQ ID NO: 1481917 - RNA, 19 nt, Homo sapiens
  misc_RNA (1)...(19): siRNA sense strand
ccgugacacuggccgcuuu

SEQ ID NO: 1481918 - RNA, 19 nt, Homo sapiens
  misc_RNA (1)...(19): siRNA sense strand
gcacuggagccuggugaug

SEQ ID NO: 1481919 - RNA, 19 nt, Homo sapiens
  misc_RNA (1)...(19): siRNA sense strand
uggcggugcugaccucuca

SEQ ID NO: 1481920 - RNA, 19 nt, Homo sapiens
  misc_RNA (1)...(19): siRNA sense strand
gugacccugugcacaugua

SEQ ID NO: 1481921 - RNA, 19 nt, Homo sapiens
  misc_RNA (1)...(19): siRNA sense strand
gacccucauuuccgaagug

SEQ ID NO: 1481922 - RNA, 19 nt, Homo sapiens
  misc_RNA (1)...(19): siRNA sense strand
gcacggcgacgacuuugac

SEQ ID NO: 1481923 - RNA, 19 nt, Homo sapiens
  misc_RNA (1)...(19): siRNA sense strand
cagcgaggccugcuucuac

SEQ ID NO: 1481924 - RNA, 19 nt, Homo sapiens
  misc_RNA (1)...(19): siRNA sense strand
aauacacgcuggacuugca

SEQ ID NO: 1481925 - RNA, 19 nt, Homo sapiens
  misc_RNA (1)...(19): siRNA sense strand
cuacugccacggaggcuuu

SEQ ID NO: 1481926 - RNA, 19 nt, Homo sapiens
  misc_RNA (1)...(19): siRNA sense strand
ggcggcagccucagaacaa

SEQ ID NO: 1481927 - RNA, 19 nt, Homo sapiens
  misc_RNA (1)...(19): siRNA sense strand
gucaggacccgcuacauca

SEQ ID NO: 1481928 - RNA, 19 nt, Homo sapiens
  misc_RNA (1)...(19): siRNA sense strand
ccaggagauccaggaguua

SEQ ID NO: 1481929 - RNA, 19 nt, Homo sapiens
  misc_RNA (1)...(19): siRNA sense strand
ggacccucauuuccgaagu

SEQ ID NO: 1481930 - RNA, 19 nt, Homo sapiens
  misc_RNA (1)...(19): siRNA sense strand
uggccaugcuacucuuuga

SEQ ID NO: 1481931 - RNA, 19 nt, Homo sapiens
  misc_RNA (1)...(19): siRNA sense strand
guggcugggucgcugcauu

SEQ ID NO: 1481932 - RNA, 19 nt, Homo sapiens
  misc_RNA (1)...(19): siRNA sense strand
gaaccgcugccgcaugcau

SEQ ID NO: 1481933 - RNA, 19 nt, Homo sapiens
  misc_RNA (1)...(19): siRNA sense strand
gcgugacccugugcacaug

SEQ ID NO: 1481934 - RNA, 19 nt, Homo sapiens
  misc_RNA (1)...(19): siRNA sense strand
uggaauacacgcuggacuu

SEQ ID NO: 1481935 - RNA, 19 nt, Homo sapiens
  misc_RNA (1)...(19): siRNA sense strand
gcuggagcgugugguguuc

SEQ ID NO: 1481936 - RNA, 19 nt, Homo sapiens
  misc_RNA (1)...(19): siRNA sense strand
ccaugcuacucuuugaaca

SEQ ID NO: 1481937 - RNA, 19 nt, Homo sapiens
  misc_RNA (1)...(19): siRNA sense strand
cgucaggacccgcuacauc

SEQ ID NO: 1481938 - RNA, 19 nt, Homo sapiens
  misc_RNA (1)...(19): siRNA sense strand
ggaguuacagugggagauc

SEQ ID NO: 1481939 - RNA, 19 nt, Homo sapiens
  misc_RNA (1)...(19): siRNA sense strand
uguaccagcugcacaaagc

SEQ ID NO: 1481940 - RNA, 19 nt, Homo sapiens
  misc_RNA (1)...(19): siRNA sense strand
cgacuuugacugguucuuc

SEQ ID NO: 1481941 - RNA, 19 nt, Homo sapiens
  misc_RNA (1)...(19): siRNA sense strand
ggcagccucagaacaagaa

SEQ ID NO: 1481942 - RNA, 19 nt, Homo sapiens
  misc_RNA (1)...(19): siRNA sense strand
gaagugaucgucagaauua

SEQ ID NO: 1481943 - RNA, 19 nt, Homo sapiens
  misc_RNA (1)...(19): siRNA sense strand
gaacuacuccuucaagauu

SEQ ID NO: 1481944 - RNA, 19 nt, Homo sapiens
  misc_RNA (1)...(19): siRNA sense strand
ucaaacagcuggcgagauu

SEQ ID NO: 1481945 - RNA, 19 nt, Homo sapiens
  misc_RNA (1)...(19): siRNA sense strand
gaacuuaaccagugcagaa

SEQ ID NO: 1481946 - RNA, 19 nt, Homo sapiens
  misc_RNA (1)...(19): siRNA sense strand
caaacuagccgaagagauu

SEQ ID NO: 1481947 - RNA, 19 nt, Homo sapiens
  misc_RNA (1)...(19): siRNA sense strand
uaaagaacaucacuaagca

SEQ ID NO: 1481948 - RNA, 19 nt, Homo sapiens
  misc_RNA (1)...(19): siRNA sense strand
aaggagggcuugaccauaa

SEQ ID NO: 1481949 - RNA, 19 nt, Homo sapiens
  misc_RNA (1)...(19): siRNA sense strand
gaaacagggaccaagauaa

SEQ ID NO: 1481950 - RNA, 19 nt, Homo sapiens
  misc_RNA (1)...(19): siRNA sense strand
ggguagauauccauagaaa

SEQ ID NO: 1481951 - RNA, 19 nt, Homo sapiens
  misc_RNA (1)...(19): siRNA sense strand
gaacgaacugcagaacuua

SEQ ID NO: 1481952 - RNA, 19 nt, Homo sapiens
  misc_RNA (1)...(19): siRNA sense strand
gagaacuacuccuucaaga

SEQ ID NO: 1481953 - RNA, 19 nt, Homo sapiens
  misc_RNA (1)...(19): siRNA sense strand
ugaacgaacugcagaacuu

SEQ ID NO: 1481954 - RNA, 19 nt, Homo sapiens
  misc_RNA (1)...(19): siRNA sense strand
ccauaaagaacaucacuaa

SEQ ID NO: 1481955 - RNA, 19 nt, Homo sapiens
  misc_RNA (1)...(19): siRNA sense strand
aaagaaggcagaaauuuga

SEQ ID NO: 1481956 - RNA, 19 nt, Homo sapiens
  misc_RNA (1)...(19): siRNA sense strand
gugcugagauagagauuau

SEQ ID NO: 1481957 - RNA, 19 nt, Homo sapiens
  misc_RNA (1)...(19): siRNA sense strand
ggacggaucuuugggaaac

SEQ ID NO: 1481958 - RNA, 19 nt, Homo sapiens
  misc_RNA (1)...(19): siRNA sense strand
gaacaagucaacacagaca

SEQ ID NO: 1481959 - RNA, 19 nt, Homo sapiens
  misc_RNA (1)...(19): siRNA sense strand
gaaaagaaggcagaaauuu

SEQ ID NO: 1481960 - RNA, 19 nt, Homo sapiens
  misc_RNA (1)...(19): siRNA sense strand
cauggaaguugauuacuca

SEQ ID NO: 1481961 - RNA, 19 nt, Homo sapiens
  misc_RNA (1)...(19): siRNA sense strand
caagaucagggaaauugua

SEQ ID NO: 1481962 - RNA, 19 nt, Homo sapiens
  misc_RNA (1)...(19): siRNA sense strand
gcuaagcgggcaucaguuu

SEQ ID NO: 1481963 - RNA, 19 nt, Homo sapiens
  misc_RNA (1)...(19): siRNA sense strand
ggaagugaucgucagaauu

SEQ ID NO: 1481964 - RNA, 19 nt, Homo sapiens
  misc_RNA (1)...(19): siRNA sense strand
gaaaggagggcuugaccau

SEQ ID NO: 1481965 - RNA, 19 nt, Homo sapiens
  misc_RNA (1)...(19): siRNA sense strand
cacaauggcuugguuggaa

SEQ ID NO: 1481966 - RNA, 19 nt, Homo sapiens
  misc_RNA (1)...(19): siRNA sense strand
cgucacauaugcaacaaga

SEQ ID NO: 1481967 - RNA, 19 nt, Homo sapiens
  misc_RNA (1)...(19): siRNA sense strand
gauaacaaucucaucuuug

SEQ ID NO: 1481968 - RNA, 19 nt, Homo sapiens
  misc_RNA (1)...(19): siRNA sense strand
gaaggcagaaauuugaaga

SEQ ID NO: 1481969 - RNA, 19 nt, Homo sapiens
  misc_RNA (1)...(19): siRNA sense strand
ucagggaaauuguacaaca

SEQ ID NO: 1481970 - RNA, 19 nt, Homo sapiens
  misc_RNA (1)...(19): siRNA sense strand
gcaagaccgugaacgaacu

SEQ ID NO: 1481971 - RNA, 19 nt, Homo sapiens
  misc_RNA (1)...(19): siRNA sense strand
ucucaucuuugcaggauuu

SEQ ID NO: 1481972 - RNA, 19 nt, Homo sapiens
  misc_RNA (1)...(19): siRNA sense strand
ugaaacagggaccaagaua

SEQ ID NO: 1481973 - RNA, 19 nt, Homo sapiens
  misc_RNA (1)...(19): siRNA sense strand
gaagcugcgugaggccuuu

SEQ ID NO: 1481974 - RNA, 19 nt, Homo sapiens
  misc_RNA (1)...(19): siRNA sense strand
cagcgcacuuggcaucuuu

SEQ ID NO: 1481975 - RNA, 19 nt, Homo sapiens
  misc_RNA (1)...(19): siRNA sense strand
gcugagauagagauuauga

SEQ ID NO: 1481976 - RNA, 19 nt, Homo sapiens
  misc_RNA (1)...(19): siRNA sense strand
gaucagggaaauuguacaa

SEQ ID NO: 1481977 - RNA, 19 nt, Homo sapiens
  misc_RNA (1)...(19): siRNA sense strand
gcuggaagcgcauaucaga

SEQ ID NO: 1481978 - RNA, 19 nt, Homo sapiens
  misc_RNA (1)...(19): siRNA sense strand
gaaguugauuacucagucu

SEQ ID NO: 1481979 - RNA, 19 nt, Homo sapiens
  misc_RNA (1)...(19): siRNA sense strand
ucacauaugcaacaagaga

SEQ ID NO: 1481980 - RNA, 19 nt, Homo sapiens
  misc_RNA (1)...(19): siRNA sense strand
caucgugccucgugaccaa

SEQ ID NO: 1481981 - RNA, 19 nt, Homo sapiens
  misc_RNA (1)...(19): siRNA sense strand
aggcagaaauuugaagaaa

SEQ ID NO: 1481982 - RNA, 19 nt, Homo sapiens
  misc_RNA (1)...(19): siRNA sense strand
agaccaaacuagccgaaga

SEQ ID NO: 1481983 - RNA, 19 nt, Homo sapiens
  misc_RNA (1)...(19): siRNA sense strand
ggaaaaucauggaaguuga

SEQ ID NO: 1481984 - RNA, 19 nt, Homo sapiens
  misc_RNA (1)...(19): siRNA sense strand
uggaacaagucaacacaga

SEQ ID NO: 1481985 - RNA, 19 nt, Homo sapiens
  misc_RNA (1)...(19): siRNA sense strand
gaccaaacgccagaugaaa

SEQ ID NO: 1481986 - RNA, 19 nt, Homo sapiens
  misc_RNA (1)...(19): siRNA sense strand
gagauagagauuaugaaga

SEQ ID NO: 1481987 - RNA, 19 nt, Homo sapiens
  misc_RNA (1)...(19): siRNA sense strand
gcagaaagaggcagaugag

SEQ ID NO: 1481988 - RNA, 19 nt, Homo sapiens
  misc_RNA (1)...(19): siRNA sense strand
caacgucacauaugcaaca

SEQ ID NO: 1481989 - RNA, 19 nt, Homo sapiens
  misc_RNA (1)...(19): siRNA sense strand
caacaagagaagaagcaaa

SEQ ID NO: 1481990 - RNA, 19 nt, Homo sapiens
  misc_RNA (1)...(19): siRNA sense strand
gccggagccucuaucaaga

SEQ ID NO: 1481991 - RNA, 19 nt, Homo sapiens
  misc_RNA (1)...(19): siRNA sense strand
gcacuucucaggccagaca

SEQ ID NO: 1481992 - RNA, 19 nt, Homo sapiens
  misc_RNA (1)...(19): siRNA sense strand
ucacuacccacuccggaua

SEQ ID NO: 1481993 - RNA, 19 nt, Homo sapiens
  misc_RNA (1)...(19): siRNA sense strand
ccaacaagccaaucugauc

SEQ ID NO: 1481994 - RNA, 19 nt, Homo sapiens
  misc_RNA (1)...(19): siRNA sense strand
aaugauaugcuggcuguua

SEQ ID NO: 1481995 - RNA, 19 nt, Homo sapiens
  misc_RNA (1)...(19): siRNA sense strand
ggaaaagaaggcagaaauu

SEQ ID NO: 1481996 - RNA, 19 nt, Homo sapiens
  misc_RNA (1)...(19): siRNA sense strand
gcagaugagaccaaacuag

SEQ ID NO: 1481997 - RNA, 19 nt, Homo sapiens
  misc_RNA (1)...(19): siRNA sense strand
ccggguagauauccauaga

SEQ ID NO: 1481998 - RNA, 19 nt, Homo sapiens
  misc_RNA (1)...(19): siRNA sense strand
ugaagcagcaggagcagaa

SEQ ID NO: 1481999 - RNA, 19 nt, Homo sapiens
  misc_RNA (1)...(19): siRNA sense strand
uaagcgggcaucaguuuga

SEQ ID NO: 1482000 - RNA, 19 nt, Homo sapiens
  misc_RNA (1)...(19): siRNA sense strand
uaugcuggcuguuaaccaa

SEQ ID NO: 1482001 - RNA, 19 nt, Homo sapiens
  misc_RNA (1)...(19): siRNA sense strand
uuggaagacugauuggaaa

SEQ ID NO: 1482002 - RNA, 19 nt, Homo sapiens
  misc_RNA (1)...(19): siRNA sense strand
guuggaagacugauuggaa

SEQ ID NO: 1482003 - RNA, 19 nt, Homo sapiens
  misc_RNA (1)...(19): siRNA sense strand
cagagaagccugucaccau

SEQ ID NO: 1482004 - RNA, 19 nt, Homo sapiens
  misc_RNA (1)...(19): siRNA sense strand
gaagacugauuggaaaaga

SEQ ID NO: 1482005 - RNA, 19 nt, Homo sapiens
  misc_RNA (1)...(19): siRNA sense strand
cggagccucuaucaagauu

SEQ ID NO: 1482006 - RNA, 19 nt, Homo sapiens
  misc_RNA (1)...(19): siRNA sense strand
augauaugcuggcuguuaa

SEQ ID NO: 1482007 - RNA, 19 nt, Homo sapiens
  misc_RNA (1)...(19): siRNA sense strand
auaacaaucucaucuuugc

SEQ ID NO: 1482008 - RNA, 19 nt, Homo sapiens
  misc_RNA (1)...(19): siRNA sense strand
uggagaauguggaacaagu

SEQ ID NO: 1482009 - RNA, 19 nt, Homo sapiens
  misc_RNA (1)...(19): siRNA sense strand
gaucuuugggaaacugaaa

SEQ ID NO: 1482010 - RNA, 19 nt, Homo sapiens
  misc_RNA (1)...(19): siRNA sense strand
gagccucuaucaagauugc

SEQ ID NO: 1482011 - RNA, 19 nt, Homo sapiens
  misc_RNA (1)...(19): siRNA sense strand
aaacagggaccaagauaac

SEQ ID NO: 1482012 - RNA, 19 nt, Homo sapiens
  misc_RNA (1)...(19): siRNA sense strand
gagaauguggaacaaguca

SEQ ID NO: 1482013 - RNA, 19 nt, Homo sapiens
  misc_RNA (1)...(19): siRNA sense strand
ucauggaaguugauuacuc

SEQ ID NO: 1482014 - RNA, 19 nt, Homo sapiens
  misc_RNA (1)...(19): siRNA sense strand
ugaccaaacgccagaugaa

SEQ ID NO: 1482015 - RNA, 19 nt, Homo sapiens
  misc_RNA (1)...(19): siRNA sense strand
uugaaaucaugcagaaaga

SEQ ID NO: 1482016 - RNA, 19 nt, Homo sapiens
  misc_RNA (1)...(19): siRNA sense strand
gcuacgccuucguggacua

SEQ ID NO: 1482017 - RNA, 19 nt, Homo sapiens
  misc_RNA (1)...(19): siRNA sense strand
gaggaaaacuucuuuaacc

SEQ ID NO: 1482018 - RNA, 19 nt, Homo sapiens
  misc_RNA (1)...(19): siRNA sense strand
gcccagggacggaucuuug

SEQ ID NO: 1482019 - RNA, 19 nt, Homo sapiens
  misc_RNA (1)...(19): siRNA sense strand
agaggcagaugagaccaaa

SEQ ID NO: 1482020 - RNA, 19 nt, Homo sapiens
  misc_RNA (1)...(19): siRNA sense strand
gcaagaucagggaaauugu

SEQ ID NO: 1482021 - RNA, 19 nt, Homo sapiens
  misc_RNA (1)...(19): siRNA sense strand
aaaggagggcuugaccaua

SEQ ID NO: 1482022 - RNA, 19 nt, Homo sapiens
  misc_RNA (1)...(19): siRNA sense strand
ggaaaauucagauucgaaa

SEQ ID NO: 1482023 - RNA, 19 nt, Homo sapiens
  misc_RNA (1)...(19): siRNA sense strand
ugagauagagauuaugaag

SEQ ID NO: 1482024 - RNA, 19 nt, Homo sapiens
  misc_RNA (1)...(19): siRNA sense strand
guugauuacucagucucua

SEQ ID NO: 1482025 - RNA, 19 nt, Homo sapiens
  misc_RNA (1)...(19): siRNA sense strand
ugcaggauuugagcauaua

SEQ ID NO: 1482026 - RNA, 19 nt, Homo sapiens
  misc_RNA (1)...(19): siRNA sense strand
caugaaacagggaccaaga

SEQ ID NO: 1482027 - RNA, 19 nt, Homo sapiens
  misc_RNA (1)...(19): siRNA sense strand
ggcagaaauuugaagaaaa

SEQ ID NO: 1482028 - RNA, 19 nt, Homo sapiens
  misc_RNA (1)...(19): siRNA sense strand
gguguuggauggacuuuug

SEQ ID NO: 1482029 - RNA, 19 nt, Homo sapiens
  misc_RNA (1)...(19): siRNA sense strand
ggcacacaauggcuugguu

SEQ ID NO: 1482030 - RNA, 19 nt, Homo sapiens
  misc_RNA (1)...(19): siRNA sense strand
acacagaaaccgccguugu

SEQ ID NO: 1482031 - RNA, 19 nt, Homo sapiens
  misc_RNA (1)...(19): siRNA sense strand
aggaagugaucgucagaau

SEQ ID NO: 1482032 - RNA, 19 nt, Homo sapiens
  misc_RNA (1)...(19): siRNA sense strand
gaacugcagaacuuaacca

SEQ ID NO: 1482033 - RNA, 19 nt, Homo sapiens
  misc_RNA (1)...(19): siRNA sense strand
gcacuuggcaucuuuucaa

SEQ ID NO: 1482034 - RNA, 19 nt, Homo sapiens
  misc_RNA (1)...(19): siRNA sense strand
ggaauugcaugggaaaauc

SEQ ID NO: 1482035 - RNA, 19 nt, Homo sapiens
  misc_RNA (1)...(19): siRNA sense strand
uuugagaacuacuccuuca

SEQ ID NO: 1482036 - RNA, 19 nt, Homo sapiens
  misc_RNA (1)...(19): siRNA sense strand
gaauguggaacaagucaac

SEQ ID NO: 1482037 - RNA, 19 nt, Homo sapiens
  misc_RNA (1)...(19): siRNA sense strand
cgcaagaucagggaaauug

SEQ ID NO: 1482038 - RNA, 19 nt, Homo sapiens
  misc_RNA (1)...(19): siRNA sense strand
gcccagacgucagcgaaag

SEQ ID NO: 1482039 - RNA, 19 nt, Homo sapiens
  misc_RNA (1)...(19): siRNA sense strand
ucccgcaucaucacucuua

SEQ ID NO: 1482040 - RNA, 19 nt, Homo sapiens
  misc_RNA (1)...(19): siRNA sense strand
uugcaggauuugagcauau

SEQ ID NO: 1482041 - RNA, 19 nt, Homo sapiens
  misc_RNA (1)...(19): siRNA sense strand
gauagagauuaugaagaag

SEQ ID NO: 1482042 - RNA, 19 nt, Homo sapiens
  misc_RNA (1)...(19): siRNA sense strand
ggaaguagauuucgauaua

SEQ ID NO: 1482043 - RNA, 19 nt, Homo sapiens
  misc_RNA (1)...(19): siRNA sense strand
aagaagagcucacaagaua

SEQ ID NO: 1482044 - RNA, 19 nt, Homo sapiens
  misc_RNA (1)...(19): siRNA sense strand
acaaacagcucaucauuaa

SEQ ID NO: 1482045 - RNA, 19 nt, Homo sapiens
  misc_RNA (1)...(19): siRNA sense strand
caugaacccuugaagauua

SEQ ID NO: 1482046 - RNA, 19 nt, Homo sapiens
  misc_RNA (1)...(19): siRNA sense strand
gaacaaacagcucaucauu

SEQ ID NO: 1482047 - RNA, 19 nt, Homo sapiens
  misc_RNA (1)...(19): siRNA sense strand
cacagaagcuggaaagaaa

SEQ ID NO: 1482048 - RNA, 19 nt, Homo sapiens
  misc_RNA (1)...(19): siRNA sense strand
ggaaauaagagaauccauu

SEQ ID NO: 1482049 - RNA, 19 nt, Homo sapiens
  misc_RNA (1)...(19): siRNA sense strand
gaaauucuacccacaugaa

SEQ ID NO: 1482050 - RNA, 19 nt, Homo sapiens
  misc_RNA (1)...(19): siRNA sense strand
gaagaaccuuuaaccaucu

SEQ ID NO: 1482051 - RNA, 19 nt, Homo sapiens
  misc_RNA (1)...(19): siRNA sense strand
ggaaagagaagacacagau

SEQ ID NO: 1482052 - RNA, 19 nt, Homo sapiens
  misc_RNA (1)...(19): siRNA sense strand
gagaagacacagauucauu

SEQ ID NO: 1482053 - RNA, 19 nt, Homo sapiens
  misc_RNA (1)...(19): siRNA sense strand
guauugaucucuccuucuu

SEQ ID NO: 1482054 - RNA, 19 nt, Homo sapiens
  misc_RNA (1)...(19): siRNA sense strand
gaaguagauuucgauauag

SEQ ID NO: 1482055 - RNA, 19 nt, Homo sapiens
  misc_RNA (1)...(19): siRNA sense strand
gcacagagccaacauuacu

SEQ ID NO: 1482056 - RNA, 19 nt, Homo sapiens
  misc_RNA (1)...(19): siRNA sense strand
ggcacuggcuugaaccuaa

SEQ ID NO: 1482057 - RNA, 19 nt, Homo sapiens
  misc_RNA (1)...(19): siRNA sense strand
uaaagaagagcucacaaga

SEQ ID NO: 1482058 - RNA, 19 nt, Homo sapiens
  misc_RNA (1)...(19): siRNA sense strand
gugcacagagccaacauua

SEQ ID NO: 1482059 - RNA, 19 nt, Homo sapiens
  misc_RNA (1)...(19): siRNA sense strand
gaaggacuacuuuggcauu

SEQ ID NO: 1482060 - RNA, 19 nt, Homo sapiens
  misc_RNA (1)...(19): siRNA sense strand
ggacugcugcucuuuguau

SEQ ID NO: 1482061 - RNA, 19 nt, Homo sapiens
  misc_RNA (1)...(19): siRNA sense strand
caaaggcacuggcuugaac

SEQ ID NO: 1482062 - RNA, 19 nt, Homo sapiens
  misc_RNA (1)...(19): siRNA sense strand
gaaagagaagacacagauu

SEQ ID NO: 1482063 - RNA, 19 nt, Homo sapiens
  misc_RNA (1)...(19): siRNA sense strand
caccagaguuugagcaguu

SEQ ID NO: 1482064 - RNA, 19 nt, Homo sapiens
  misc_RNA (1)...(19): siRNA sense strand
gaagacacagauucauuug

SEQ ID NO: 1482065 - RNA, 19 nt, Homo sapiens
  misc_RNA (1)...(19): siRNA sense strand
aaagggcaguuucucauug

SEQ ID NO: 1482066 - RNA, 19 nt, Homo sapiens
  misc_RNA (1)...(19): siRNA sense strand
uaaaggaaguagauuucga

SEQ ID NO: 1482067 - RNA, 19 nt, Homo sapiens
  misc_RNA (1)...(19): siRNA sense strand
caacaggcacaacaacauu

SEQ ID NO: 1482068 - RNA, 19 nt, Homo sapiens
  misc_RNA (1)...(19): siRNA sense strand
cuaaugagcauccugagaa

SEQ ID NO: 1482069 - RNA, 19 nt, Homo sapiens
  misc_RNA (1)...(19): siRNA sense strand
gugggaaaguugccaaaga

SEQ ID NO: 1482070 - RNA, 19 nt, Homo sapiens
  misc_RNA (1)...(19): siRNA sense strand
ccauacaccaugugcuuua

SEQ ID NO: 1482071 - RNA, 19 nt, Homo sapiens
  misc_RNA (1)...(19): siRNA sense strand
agacacagauucauuugag

SEQ ID NO: 1482072 - RNA, 19 nt, Homo sapiens
  misc_RNA (1)...(19): siRNA sense strand
cuaaagaggagaacauuuc

SEQ ID NO: 1482073 - RNA, 19 nt, Homo sapiens
  misc_RNA (1)...(19): siRNA sense strand
gcucaucauuaacauggaa

SEQ ID NO: 1482074 - RNA, 19 nt, Homo sapiens
  misc_RNA (1)...(19): siRNA sense strand
aaacagcucaucauuaaca

SEQ ID NO: 1482075 - RNA, 19 nt, Homo sapiens
  misc_RNA (1)...(19): siRNA sense strand
auucacagcugcaggcuuu

SEQ ID NO: 1482076 - RNA, 19 nt, Homo sapiens
  misc_RNA (1)...(19): siRNA sense strand
ccuugaagauuaaagaaga

SEQ ID NO: 1482077 - RNA, 19 nt, Homo sapiens
  misc_RNA (1)...(19): siRNA sense strand
agaauuacaucagugaguu

SEQ ID NO: 1482078 - RNA, 19 nt, Homo sapiens
  misc_RNA (1)...(19): siRNA sense strand
agaagacacagauucauuu

SEQ ID NO: 1482079 - RNA, 19 nt, Homo sapiens
  misc_RNA (1)...(19): siRNA sense strand
agauugacaugcucuuuga

SEQ ID NO: 1482080 - RNA, 19 nt, Homo sapiens
  misc_RNA (1)...(19): siRNA sense strand
ucucugaacuaguguacaa

SEQ ID NO: 1482081 - RNA, 19 nt, Homo sapiens
  misc_RNA (1)...(19): siRNA sense strand
gagauugacaugcucuuug

SEQ ID NO: 1482082 - RNA, 19 nt, Homo sapiens
  misc_RNA (1)...(19): siRNA sense strand
ccacaugaacccuugaaga

SEQ ID NO: 1482083 - RNA, 19 nt, Homo sapiens
  misc_RNA (1)...(19): siRNA sense strand
caaagggcaguuucucauu

SEQ ID NO: 1482084 - RNA, 19 nt, Homo sapiens
  misc_RNA (1)...(19): siRNA sense strand
gaauuacaucagugaguuu

SEQ ID NO: 1482085 - RNA, 19 nt, Homo sapiens
  misc_RNA (1)...(19): siRNA sense strand
aaccaucucugaacuagug

SEQ ID NO: 1482086 - RNA, 19 nt, Homo sapiens
  misc_RNA (1)...(19): siRNA sense strand
gggugaggguguuccauug

SEQ ID NO: 1482087 - RNA, 19 nt, Homo sapiens
  misc_RNA (1)...(19): siRNA sense strand
aacaaacagcucaucauua

SEQ ID NO: 1482088 - RNA, 19 nt, Homo sapiens
  misc_RNA (1)...(19): siRNA sense strand
ucacagaagcuggaaagaa

SEQ ID NO: 1482089 - RNA, 19 nt, Homo sapiens
  misc_RNA (1)...(19): siRNA sense strand
gaccacaucugcaacuacu

SEQ ID NO: 1482090 - RNA, 19 nt, Homo sapiens
  misc_RNA (1)...(19): siRNA sense strand
gcccaccaguugcugaauu

SEQ ID NO: 1482091 - RNA, 19 nt, Homo sapiens
  misc_RNA (1)...(19): siRNA sense strand
gcaaaggcacuggcuugaa

SEQ ID NO: 1482092 - RNA, 19 nt, Homo sapiens
  misc_RNA (1)...(19): siRNA sense strand
gcaguucccacuccuugaa

SEQ ID NO: 1482093 - RNA, 19 nt, Homo sapiens
  misc_RNA (1)...(19): siRNA sense strand
gagcucacaagauaccuuu

SEQ ID NO: 1482094 - RNA, 19 nt, Homo sapiens
  misc_RNA (1)...(19): siRNA sense strand
uaacaaguccaucuucaag

SEQ ID NO: 1482095 - RNA, 19 nt, Homo sapiens
  misc_RNA (1)...(19): siRNA sense strand
gaaccuaacaaguccaucu

SEQ ID NO: 1482096 - RNA, 19 nt, Homo sapiens
  misc_RNA (1)...(19): siRNA sense strand
gugaaauucuacccacaug

SEQ ID NO: 1482097 - RNA, 19 nt, Homo sapiens
  misc_RNA (1)...(19): siRNA sense strand
ucagugaguuugagauuuu

SEQ ID NO: 1482098 - RNA, 19 nt, Homo sapiens
  misc_RNA (1)...(19): siRNA sense strand
augagcauccugagaauua

SEQ ID NO: 1482099 - RNA, 19 nt, Homo sapiens
  misc_RNA (1)...(19): siRNA sense strand
ccuaacaaguccaucuuca

SEQ ID NO: 1482100 - RNA, 19 nt, Homo sapiens
  misc_RNA (1)...(19): siRNA sense strand
ggagucagguauugaucuc

SEQ ID NO: 1482101 - RNA, 19 nt, Homo sapiens
  misc_RNA (1)...(19): siRNA sense strand
cuucuaggcuugaguugga

SEQ ID NO: 1482102 - RNA, 19 nt, Homo sapiens
  misc_RNA (1)...(19): siRNA sense strand
gguguuccauugccuaaag

SEQ ID NO: 1482103 - RNA, 19 nt, Homo sapiens
  misc_RNA (1)...(19): siRNA sense strand
uaaugagcauccugagaau

SEQ ID NO: 1482104 - RNA, 19 nt, Homo sapiens
  misc_RNA (1)...(19): siRNA sense strand
cuaccugggugccuguauu

SEQ ID NO: 1482105 - RNA, 19 nt, Homo sapiens
  misc_RNA (1)...(19): siRNA sense strand
uugagcaguuucacuauga

SEQ ID NO: 1482106 - RNA, 19 nt, Homo sapiens
  misc_RNA (1)...(19): siRNA sense strand
ggaggccaguuccaagauc

SEQ ID NO: 1482107 - RNA, 19 nt, Homo sapiens
  misc_RNA (1)...(19): siRNA sense strand
cgauauagugggaaaguug

SEQ ID NO: 1482108 - RNA, 19 nt, Homo sapiens
  misc_RNA (1)...(19): siRNA sense strand
aaagagaagacacagauuc

SEQ ID NO: 1482109 - RNA, 19 nt, Homo sapiens
  misc_RNA (1)...(19): siRNA sense strand
cuagugaagaggaagauaa

SEQ ID NO: 1482110 - RNA, 19 nt, Homo sapiens
  misc_RNA (1)...(19): siRNA sense strand
acaaguccaucuucaagca

SEQ ID NO: 1482111 - RNA, 19 nt, Homo sapiens
  misc_RNA (1)...(19): siRNA sense strand
caagauaccuuuuauaccu

SEQ ID NO: 1482112 - RNA, 19 nt, Homo sapiens
  misc_RNA (1)...(19): siRNA sense strand
cacaugaacccuugaagau

SEQ ID NO: 1482113 - RNA, 19 nt, Homo sapiens
  misc_RNA (1)...(19): siRNA sense strand
cauucugacuggccauauu

SEQ ID NO: 1482114 - RNA, 19 nt, Homo sapiens
  misc_RNA (1)...(19): siRNA sense strand
cccaccaguugcugaauuu

SEQ ID NO: 1482115 - RNA, 19 nt, Homo sapiens
  misc_RNA (1)...(19): siRNA sense strand
gagaauuacaucagugagu

SEQ ID NO: 1482116 - RNA, 19 nt, Homo sapiens
  misc_RNA (1)...(19): siRNA sense strand
ggcuugaguuggaaagaga

SEQ ID NO: 1482117 - RNA, 19 nt, Homo sapiens
  misc_RNA (1)...(19): siRNA sense strand
ccagcugccugcaaacauc

SEQ ID NO: 1482118 - RNA, 19 nt, Homo sapiens
  misc_RNA (1)...(19): siRNA sense strand
caucagugaguuugagauu

SEQ ID NO: 1482119 - RNA, 19 nt, Homo sapiens
  misc_RNA (1)...(19): siRNA sense strand
aagggcaguuucucauuga

SEQ ID NO: 1482120 - RNA, 19 nt, Homo sapiens
  misc_RNA (1)...(19): siRNA sense strand
gcacuggcuugaaccuaac

SEQ ID NO: 1482121 - RNA, 19 nt, Homo sapiens
  misc_RNA (1)...(19): siRNA sense strand
aagaagaaccuuuaaccau

SEQ ID NO: 1482122 - RNA, 19 nt, Homo sapiens
  misc_RNA (1)...(19): siRNA sense strand
accaugugcuuuagaguga

SEQ ID NO: 1482123 - RNA, 19 nt, Homo sapiens
  misc_RNA (1)...(19): siRNA sense strand
aaagaagagcucacaagau

SEQ ID NO: 1482124 - RNA, 19 nt, Homo sapiens
  misc_RNA (1)...(19): siRNA sense strand
ccucacccaugcaaggauu

SEQ ID NO: 1482125 - RNA, 19 nt, Homo sapiens
  misc_RNA (1)...(19): siRNA sense strand
gacugcugcucuuuguauu

SEQ ID NO: 1482126 - RNA, 19 nt, Homo sapiens
  misc_RNA (1)...(19): siRNA sense strand
aagaagaggagcugaagga

SEQ ID NO: 1482127 - RNA, 19 nt, Homo sapiens
  misc_RNA (1)...(19): siRNA sense strand
caugugcuuuagagugaaa

SEQ ID NO: 1482128 - RNA, 19 nt, Homo sapiens
  misc_RNA (1)...(19): siRNA sense strand
caccaguugcugaauuuaa

SEQ ID NO: 1482129 - RNA, 19 nt, Homo sapiens
  misc_RNA (1)...(19): siRNA sense strand
ccaaagggcaguuucucau

SEQ ID NO: 1482130 - RNA, 19 nt, Homo sapiens
  misc_RNA (1)...(19): siRNA sense strand
gcucacaagauaccuuuua

SEQ ID NO: 1482131 - RNA, 19 nt, Homo sapiens
  misc_RNA (1)...(19): siRNA sense strand
ggcauucaauacuucaaca

SEQ ID NO: 1482132 - RNA, 19 nt, Homo sapiens
  misc_RNA (1)...(19): siRNA sense strand
cgagcaagaagaagaacuu

SEQ ID NO: 1482133 - RNA, 19 nt, Homo sapiens
  misc_RNA (1)...(19): siRNA sense strand
gcuggagaaggacuacuuu

SEQ ID NO: 1482134 - RNA, 19 nt, Homo sapiens
  misc_RNA (1)...(19): siRNA sense strand
ugggaaaguugccaaagag

SEQ ID NO: 1482135 - RNA, 19 nt, Homo sapiens
  misc_RNA (1)...(19): siRNA sense strand
aacaccagcugccugcaaa

SEQ ID NO: 1482136 - RNA, 19 nt, Homo sapiens
  misc_RNA (1)...(19): siRNA sense strand
caacaccagcugccugcaa

SEQ ID NO: 1482137 - RNA, 19 nt, Homo sapiens
  misc_RNA (1)...(19): siRNA sense strand
auugaucucuccuucuuau

SEQ ID NO: 1482138 - RNA, 19 nt, Homo sapiens
  misc_RNA (1)...(19): siRNA sense strand
gaagagcucacaagauacc

SEQ ID NO: 1482139 - RNA, 19 nt, Homo sapiens
  misc_RNA (1)...(19): siRNA sense strand
gccagacaccagaguuuga

SEQ ID NO: 1482140 - RNA, 19 nt, Homo sapiens
  misc_RNA (1)...(19): siRNA sense strand
ugacaugcucuuugacugu

SEQ ID NO: 1482141 - RNA, 19 nt, Homo sapiens
  misc_RNA (1)...(19): siRNA sense strand
ggaguggguggcugggaaa

SEQ ID NO: 1482142 - RNA, 19 nt, Homo sapiens
  misc_RNA (1)...(19): siRNA sense strand
gaaacccgccugccaugag

SEQ ID NO: 1482143 - RNA, 19 nt, Homo sapiens
  misc_RNA (1)...(19): siRNA sense strand
cccagacagugcugcgaaa

SEQ ID NO: 1482144 - RNA, 19 nt, Homo sapiens
  misc_RNA (1)...(19): siRNA sense strand
gcuccuccuuccucaccuu

SEQ ID NO: 1482145 - RNA, 19 nt, Homo sapiens
  misc_RNA (1)...(19): siRNA sense strand
cgaaacccgccugccauga

SEQ ID NO: 1482146 - RNA, 19 nt, Homo sapiens
  misc_RNA (1)...(19): siRNA sense strand
gaacuaaauuggaauguga

SEQ ID NO: 1482147 - RNA, 19 nt, Homo sapiens
  misc_RNA (1)...(19): siRNA sense strand
ggaauugacuuaaaucgaa

SEQ ID NO: 1482148 - RNA, 19 nt, Homo sapiens
  misc_RNA (1)...(19): siRNA sense strand
gcacagagcuucauaaccu

SEQ ID NO: 1482149 - RNA, 19 nt, Homo sapiens
  misc_RNA (1)...(19): siRNA sense strand
gcaggagccuacaaauuug

SEQ ID NO: 1482150 - RNA, 19 nt, Homo sapiens
  misc_RNA (1)...(19): siRNA sense strand
caccuacucuuuccucuaa

SEQ ID NO: 1482151 - RNA, 19 nt, Homo sapiens
  misc_RNA (1)...(19): siRNA sense strand
agaaucaucucuaagcaaa

SEQ ID NO: 1482152 - RNA, 19 nt, Homo sapiens
  misc_RNA (1)...(19): siRNA sense strand
gaaugugaaucugcaugua

SEQ ID NO: 1482153 - RNA, 19 nt, Homo sapiens
  misc_RNA (1)...(19): siRNA sense strand
gagcaggagccuacaaauu

SEQ ID NO: 1482154 - RNA, 19 nt, Homo sapiens
  misc_RNA (1)...(19): siRNA sense strand
gccauucgcugaacugaga

SEQ ID NO: 1482155 - RNA, 19 nt, Homo sapiens
  misc_RNA (1)...(19): siRNA sense strand
gaguaucuauggugacuug

SEQ ID NO: 1482156 - RNA, 19 nt, Homo sapiens
  misc_RNA (1)...(19): siRNA sense strand
cuacagcuguggagcagua

SEQ ID NO: 1482157 - RNA, 19 nt, Homo sapiens
  misc_RNA (1)...(19): siRNA sense strand
aaacagauauccagcuucu

SEQ ID NO: 1482158 - RNA, 19 nt, Homo sapiens
  misc_RNA (1)...(19): siRNA sense strand
caauaugcuugccaucuug

SEQ ID NO: 1482159 - RNA, 19 nt, Homo sapiens
  misc_RNA (1)...(19): siRNA sense strand
gcacaggaauuuucuugaa

SEQ ID NO: 1482160 - RNA, 19 nt, Homo sapiens
  misc_RNA (1)...(19): siRNA sense strand
gaagauggagaaagugaug

SEQ ID NO: 1482161 - RNA, 19 nt, Homo sapiens
  misc_RNA (1)...(19): siRNA sense strand
uauggugacuuggaguuua

SEQ ID NO: 1482162 - RNA, 19 nt, Homo sapiens
  misc_RNA (1)...(19): siRNA sense strand
cuaaacagauauccagcuu

SEQ ID NO: 1482163 - RNA, 19 nt, Homo sapiens
  misc_RNA (1)...(19): siRNA sense strand
cugagaagcugaguaucua

SEQ ID NO: 1482164 - RNA, 19 nt, Homo sapiens
  misc_RNA (1)...(19): siRNA sense strand
gaagcagggccucuaccua

SEQ ID NO: 1482165 - RNA, 19 nt, Homo sapiens
  misc_RNA (1)...(19): siRNA sense strand
agcaggagccuacaaauuu

SEQ ID NO: 1482166 - RNA, 19 nt, Homo sapiens
  misc_RNA (1)...(19): siRNA sense strand
gcacaccuacccuaaggaa

SEQ ID NO: 1482167 - RNA, 19 nt, Homo sapiens
  misc_RNA (1)...(19): siRNA sense strand
gagacaagaacaacuuaug

SEQ ID NO: 1482168 - RNA, 19 nt, Homo sapiens
  misc_RNA (1)...(19): siRNA sense strand
gaacaaaagcuaaacagau

SEQ ID NO: 1482169 - RNA, 19 nt, Homo sapiens
  misc_RNA (1)...(19): siRNA sense strand
guuuguggaugauggaauu

SEQ ID NO: 1482170 - RNA, 19 nt, Homo sapiens
  misc_RNA (1)...(19): siRNA sense strand
gaugauggaauugacuuaa

SEQ ID NO: 1482171 - RNA, 19 nt, Homo sapiens
  misc_RNA (1)...(19): siRNA sense strand
caaaugagaaauucacaag

SEQ ID NO: 1482172 - RNA, 19 nt, Homo sapiens
  misc_RNA (1)...(19): siRNA sense strand
gcaaaugagaaauucacaa

SEQ ID NO: 1482173 - RNA, 19 nt, Homo sapiens
  misc_RNA (1)...(19): siRNA sense strand
ccaaucugaugagcaauau

SEQ ID NO: 1482174 - RNA, 19 nt, Homo sapiens
  misc_RNA (1)...(19): siRNA sense strand
agaagcauauucccaaucu

SEQ ID NO: 1482175 - RNA, 19 nt, Homo sapiens
  misc_RNA (1)...(19): siRNA sense strand
aaacugaagaucaugaaga

SEQ ID NO: 1482176 - RNA, 19 nt, Homo sapiens
  misc_RNA (1)...(19): siRNA sense strand
ccaguacgcaccacauuug

SEQ ID NO: 1482177 - RNA, 19 nt, Homo sapiens
  misc_RNA (1)...(19): siRNA sense strand
ggaugauggaauugacuua

SEQ ID NO: 1482178 - RNA, 19 nt, Homo sapiens
  misc_RNA (1)...(19): siRNA sense strand
cuacaaauuugagagaauc

SEQ ID NO: 1482179 - RNA, 19 nt, Homo sapiens
  misc_RNA (1)...(19): siRNA sense strand
cgaacuaaauuggaaugug

SEQ ID NO: 1482180 - RNA, 19 nt, Homo sapiens
  misc_RNA (1)...(19): siRNA sense strand
guauugcuuuggauuuguu

SEQ ID NO: 1482181 - RNA, 19 nt, Homo sapiens
  misc_RNA (1)...(19): siRNA sense strand
cacaagcgcacaggaauuu

SEQ ID NO: 1482182 - RNA, 19 nt, Homo sapiens
  misc_RNA (1)...(19): siRNA sense strand
gaacugagacaagaacaac

SEQ ID NO: 1482183 - RNA, 19 nt, Homo sapiens
  misc_RNA (1)...(19): siRNA sense strand
cuaaggaagaggaguugua

SEQ ID NO: 1482184 - RNA, 19 nt, Homo sapiens
  misc_RNA (1)...(19): siRNA sense strand
aacugaagaucaugaagaa

SEQ ID NO: 1482185 - RNA, 19 nt, Homo sapiens
  misc_RNA (1)...(19): siRNA sense strand
acuuggaguuuaugaauga

SEQ ID NO: 1482186 - RNA, 19 nt, Homo sapiens
  misc_RNA (1)...(19): siRNA sense strand
gcaccuacucuuuccucua

SEQ ID NO: 1482187 - RNA, 19 nt, Homo sapiens
  misc_RNA (1)...(19): siRNA sense strand
ggaaugugaaucugcaugu

SEQ ID NO: 1482188 - RNA, 19 nt, Homo sapiens
  misc_RNA (1)...(19): siRNA sense strand
caucuugguugccagaauc

SEQ ID NO: 1482189 - RNA, 19 nt, Homo sapiens
  misc_RNA (1)...(19): siRNA sense strand
gacuuggaguuuaugaaug

SEQ ID NO: 1482190 - RNA, 19 nt, Homo sapiens
  misc_RNA (1)...(19): siRNA sense strand
gugaugguauugcuuugga

SEQ ID NO: 1482191 - RNA, 19 nt, Homo sapiens
  misc_RNA (1)...(19): siRNA sense strand
uaacucuggugaggucauu

SEQ ID NO: 1482192 - RNA, 19 nt, Homo sapiens
  misc_RNA (1)...(19): siRNA sense strand
ucgcugaacugagacaaga

SEQ ID NO: 1482193 - RNA, 19 nt, Homo sapiens
  misc_RNA (1)...(19): siRNA sense strand
acagauauccagcuucuuc

SEQ ID NO: 1482194 - RNA, 19 nt, Homo sapiens
  misc_RNA (1)...(19): siRNA sense strand
aagcauauucccaaucuga

SEQ ID NO: 1482195 - RNA, 19 nt, Homo sapiens
  misc_RNA (1)...(19): siRNA sense strand
gaagcugaguaucuauggu

SEQ ID NO: 1482196 - RNA, 19 nt, Homo sapiens
  misc_RNA (1)...(19): siRNA sense strand
gagaagcugaguaucuaug

SEQ ID NO: 1482197 - RNA, 19 nt, Homo sapiens
  misc_RNA (1)...(19): siRNA sense strand
acaccuacccuaaggaaga

SEQ ID NO: 1482198 - RNA, 19 nt, Homo sapiens
  misc_RNA (1)...(19): siRNA sense strand
gaagaagcagggccucuac

SEQ ID NO: 1482199 - RNA, 19 nt, Homo sapiens
  misc_RNA (1)...(19): siRNA sense strand
ugacuuggaguuuaugaau

SEQ ID NO: 1482200 - RNA, 19 nt, Homo sapiens
  misc_RNA (1)...(19): siRNA sense strand
uuaugucccugaugccaaa

SEQ ID NO: 1482201 - RNA, 19 nt, Homo sapiens
  misc_RNA (1)...(19): siRNA sense strand
ugaagaucaugaagaagca

SEQ ID NO: 1482202 - RNA, 19 nt, Homo sapiens
  misc_RNA (1)...(19): siRNA sense strand
gacucggucuugggugaua

SEQ ID NO: 1482203 - RNA, 19 nt, Homo sapiens
  misc_RNA (1)...(19): siRNA sense strand
ucacaagcgcacaggaauu

SEQ ID NO: 1482204 - RNA, 19 nt, Homo sapiens
  misc_RNA (1)...(19): siRNA sense strand
caaaauguccuaucugcaa

SEQ ID NO: 1482205 - RNA, 19 nt, Homo sapiens
  misc_RNA (1)...(19): siRNA sense strand
ccuacaaauuugagagaau

SEQ ID NO: 1482206 - RNA, 19 nt, Homo sapiens
  misc_RNA (1)...(19): siRNA sense strand
agacaagaacaacuuaugu

SEQ ID NO: 1482207 - RNA, 19 nt, Homo sapiens
  misc_RNA (1)...(19): siRNA sense strand
gcauauucccaaucugaug

SEQ ID NO: 1482208 - RNA, 19 nt, Homo sapiens
  misc_RNA (1)...(19): siRNA sense strand
cauauucccaaucugauga

SEQ ID NO: 1482209 - RNA, 19 nt, Homo sapiens
  misc_RNA (1)...(19): siRNA sense strand
cagggccucuaccuacaaa

SEQ ID NO: 1482210 - RNA, 19 nt, Homo sapiens
  misc_RNA (1)...(19): siRNA sense strand
agcaguauguucccucuga

SEQ ID NO: 1482211 - RNA, 19 nt, Homo sapiens
  misc_RNA (1)...(19): siRNA sense strand
gaugguauugcuuuggauu

SEQ ID NO: 1482212 - RNA, 19 nt, Homo sapiens
  misc_RNA (1)...(19): siRNA sense strand
gccagaaucagcugccauu

SEQ ID NO: 1482213 - RNA, 19 nt, Homo sapiens
  misc_RNA (1)...(19): siRNA sense strand
gguauugcuuuggauuugu

SEQ ID NO: 1482214 - RNA, 19 nt, Homo sapiens
  misc_RNA (1)...(19): siRNA sense strand
ccucugagaagcugaguau

SEQ ID NO: 1482215 - RNA, 19 nt, Homo sapiens
  misc_RNA (1)...(19): siRNA sense strand
uucauaaccucuucaugga

SEQ ID NO: 1482216 - RNA, 19 nt, Homo sapiens
  misc_RNA (1)...(19): siRNA sense strand
ugaagaagcagggccucua

SEQ ID NO: 1482217 - RNA, 19 nt, Homo sapiens
  misc_RNA (1)...(19): siRNA sense strand
cuucuucucuugugguugu

SEQ ID NO: 1482218 - RNA, 19 nt, Homo sapiens
  misc_RNA (1)...(19): siRNA sense strand
uauccagcuucuucucuug

SEQ ID NO: 1482219 - RNA, 19 nt, Homo sapiens
  misc_RNA (1)...(19): siRNA sense strand
acagaagcauauucccaau

SEQ ID NO: 1482220 - RNA, 19 nt, Homo sapiens
  misc_RNA (1)...(19): siRNA sense strand
gcagggccucuaccuacaa

SEQ ID NO: 1482221 - RNA, 19 nt, Homo sapiens
  misc_RNA (1)...(19): siRNA sense strand
gaagcauauucccaaucug

SEQ ID NO: 1482222 - RNA, 19 nt, Homo sapiens
  misc_RNA (1)...(19): siRNA sense strand
cccaaucugaugagcaaua

SEQ ID NO: 1482223 - RNA, 19 nt, Homo sapiens
  misc_RNA (1)...(19): siRNA sense strand
uguccuaucugcaaaugag

SEQ ID NO: 1482224 - RNA, 19 nt, Homo sapiens
  misc_RNA (1)...(19): siRNA sense strand
ggagcaggagccuacaaau

SEQ ID NO: 1482225 - RNA, 19 nt, Homo sapiens
  misc_RNA (1)...(19): siRNA sense strand
guuguacgcaugucagaga

SEQ ID NO: 1482226 - RNA, 19 nt, Homo sapiens
  misc_RNA (1)...(19): siRNA sense strand
ugguauugcuuuggauuug

SEQ ID NO: 1482227 - RNA, 19 nt, Homo sapiens
  misc_RNA (1)...(19): siRNA sense strand
ugaggucauucuggaguga

SEQ ID NO: 1482228 - RNA, 19 nt, Homo sapiens
  misc_RNA (1)...(19): siRNA sense strand
aaagugaaucuugcucauu

SEQ ID NO: 1482229 - RNA, 19 nt, Homo sapiens
  misc_RNA (1)...(19): siRNA sense strand
uuugucaguuuguggauga

SEQ ID NO: 1482230 - RNA, 19 nt, Homo sapiens
  misc_RNA (1)...(19): siRNA sense strand
caaauuugagagaaucauc

SEQ ID NO: 1482231 - RNA, 19 nt, Homo sapiens
  misc_RNA (1)...(19): siRNA sense strand
gccuacaaauuugagagaa

SEQ ID NO: 1482232 - RNA, 19 nt, Homo sapiens
  misc_RNA (1)...(19): siRNA sense strand
ucaagccgaugacggaaaa

SEQ ID NO: 1482233 - RNA, 19 nt, Homo sapiens
  misc_RNA (1)...(19): siRNA sense strand
gauggaauugacuuaaauc

SEQ ID NO: 1482234 - RNA, 19 nt, Homo sapiens
  misc_RNA (1)...(19): siRNA sense strand
gcauguacagaagcauauu

SEQ ID NO: 1482235 - RNA, 19 nt, Homo sapiens
  misc_RNA (1)...(19): siRNA sense strand
gauauccagcuucuucucu

SEQ ID NO: 1482236 - RNA, 19 nt, Homo sapiens
  misc_RNA (1)...(19): siRNA sense strand
uaagcaaaauguccuaucu

SEQ ID NO: 1482237 - RNA, 19 nt, Homo sapiens
  misc_RNA (1)...(19): siRNA sense strand
ccaucuugguugccagaau

SEQ ID NO: 1482238 - RNA, 19 nt, Homo sapiens
  misc_RNA (1)...(19): siRNA sense strand
cugagacaagaacaacuua

SEQ ID NO: 1482239 - RNA, 19 nt, Homo sapiens
  misc_RNA (1)...(19): siRNA sense strand
gcaggcuguuuucaauuug

SEQ ID NO: 1482240 - RNA, 19 nt, Homo sapiens
  misc_RNA (1)...(19): siRNA sense strand
uggaguuuaugaaugaaca

SEQ ID NO: 1482241 - RNA, 19 nt, Homo sapiens
  misc_RNA (1)...(19): siRNA sense strand
uaaggaagaggaguuguac

SEQ ID NO: 1482242 - RNA, 19 nt, Homo sapiens
  misc_RNA (1)...(19): siRNA sense strand
cugcauguacagaagcaua

SEQ ID NO: 1482243 - RNA, 19 nt, Homo sapiens
  misc_RNA (1)...(19): siRNA sense strand
aaaauguccuaucugcaaa

SEQ ID NO: 1482244 - RNA, 19 nt, Homo sapiens
  misc_RNA (1)...(19): siRNA sense strand
ggagaaauauuuacccaaa

SEQ ID NO: 1482245 - RNA, 19 nt, Homo sapiens
  misc_RNA (1)...(19): siRNA sense strand
gcaaggaacugaauaugau

SEQ ID NO: 1482246 - RNA, 19 nt, Homo sapiens
  misc_RNA (1)...(19): siRNA sense strand
ggagaaaccugugcaaaug

SEQ ID NO: 1482247 - RNA, 19 nt, Homo sapiens
  misc_RNA (1)...(19): siRNA sense strand
ggacgaggcuggacaugau

SEQ ID NO: 1482248 - RNA, 19 nt, Homo sapiens
  misc_RNA (1)...(19): siRNA sense strand
agaaagaacucacuuacga

SEQ ID NO: 1482249 - RNA, 19 nt, Homo sapiens
  misc_RNA (1)...(19): siRNA sense strand
aaagacaacucgaagaaug

SEQ ID NO: 1482250 - RNA, 19 nt, Homo sapiens
  misc_RNA (1)...(19): siRNA sense strand
aaacaccgcugcacagaug

SEQ ID NO: 1482251 - RNA, 19 nt, Homo sapiens
  misc_RNA (1)...(19): siRNA sense strand
uggaggagcuugacuuuau

SEQ ID NO: 1482252 - RNA, 19 nt, Homo sapiens
  misc_RNA (1)...(19): siRNA sense strand
ugagaacgguggagaaaga

SEQ ID NO: 1482253 - RNA, 19 nt, Homo sapiens
  misc_RNA (1)...(19): siRNA sense strand
guaaagacaacucgaagaa

SEQ ID NO: 1482254 - RNA, 19 nt, Homo sapiens
  misc_RNA (1)...(19): siRNA sense strand
ggugaaugcugucuauuuc

SEQ ID NO: 1482255 - RNA, 19 nt, Homo sapiens
  misc_RNA (1)...(19): siRNA sense strand
ccagauacuuucuuucaau

SEQ ID NO: 1482256 - RNA, 19 nt, Homo sapiens
  misc_RNA (1)...(19): siRNA sense strand
gugauuuccucucaucuuu

SEQ ID NO: 1482257 - RNA, 19 nt, Homo sapiens
  misc_RNA (1)...(19): siRNA sense strand
gaggagagacuguuuaaag

SEQ ID NO: 1482258 - RNA, 19 nt, Homo sapiens
  misc_RNA (1)...(19): siRNA sense strand
cgagaccacugacuugaga

SEQ ID NO: 1482259 - RNA, 19 nt, Homo sapiens
  misc_RNA (1)...(19): siRNA sense strand
ggacgagaccacugacuug

SEQ ID NO: 1482260 - RNA, 19 nt, Homo sapiens
  misc_RNA (1)...(19): siRNA sense strand
cagcaagaaugaggagaaa

SEQ ID NO: 1482261 - RNA, 19 nt, Homo sapiens
  misc_RNA (1)...(19): siRNA sense strand
gagaaaccugugcaaauga

SEQ ID NO: 1482262 - RNA, 19 nt, Homo sapiens
  misc_RNA (1)...(19): siRNA sense strand
ggcaaggaacugaauauga

SEQ ID NO: 1482263 - RNA, 19 nt, Homo sapiens
  misc_RNA (1)...(19): siRNA sense strand
gauggaggagcuugacuuu

SEQ ID NO: 1482264 - RNA, 19 nt, Homo sapiens
  misc_RNA (1)...(19): siRNA sense strand
ggagaaagaacucacuuac

SEQ ID NO: 1482265 - RNA, 19 nt, Homo sapiens
  misc_RNA (1)...(19): siRNA sense strand
gcuacgacauggagagugu

SEQ ID NO: 1482266 - RNA, 19 nt, Homo sapiens
  misc_RNA (1)...(19): siRNA sense strand
cgccacagcugccaucaug

SEQ ID NO: 1482267 - RNA, 19 nt, Homo sapiens
  misc_RNA (1)...(19): siRNA sense strand
gcacagauggcccagauac

SEQ ID NO: 1482268 - RNA, 19 nt, Homo sapiens
  misc_RNA (1)...(19): siRNA sense strand
ggaggagcuugacuuuauc

SEQ ID NO: 1482269 - RNA, 19 nt, Homo sapiens
  misc_RNA (1)...(19): siRNA sense strand
gauuuccucucaucuuuua

SEQ ID NO: 1482270 - RNA, 19 nt, Homo sapiens
  misc_RNA (1)...(19): siRNA sense strand
ggaaacaccgcugcacaga

SEQ ID NO: 1482271 - RNA, 19 nt, Homo sapiens
  misc_RNA (1)...(19): siRNA sense strand
ggagaacaccgaggagaga

SEQ ID NO: 1482272 - RNA, 19 nt, Homo sapiens
  misc_RNA (1)...(19): siRNA sense strand
gcccagauacuuucuuuca

SEQ ID NO: 1482273 - RNA, 19 nt, Homo sapiens
  misc_RNA (1)...(19): siRNA sense strand
ugaaaacgcuggguaaaga

SEQ ID NO: 1482274 - RNA, 19 nt, Homo sapiens
  misc_RNA (1)...(19): siRNA sense strand
agaggcaaauggcaccuuu

SEQ ID NO: 1482275 - RNA, 19 nt, Homo sapiens
  misc_RNA (1)...(19): siRNA sense strand
gguuuaaacuagaggaaag

SEQ ID NO: 1482276 - RNA, 19 nt, Homo sapiens
  misc_RNA (1)...(19): siRNA sense strand
ggggaaaagucuugugauu

SEQ ID NO: 1482277 - RNA, 19 nt, Homo sapiens
  misc_RNA (1)...(19): siRNA sense strand
cagauggcccagauacuuu

SEQ ID NO: 1482278 - RNA, 19 nt, Homo sapiens
  misc_RNA (1)...(19): siRNA sense strand
ggcuggacaugauggauga

SEQ ID NO: 1482279 - RNA, 19 nt, Homo sapiens
  misc_RNA (1)...(19): siRNA sense strand
gaggagaaaccugugcaaa

SEQ ID NO: 1482280 - RNA, 19 nt, Homo sapiens
  misc_RNA (1)...(19): siRNA sense strand
ggcacgcaguacuugcuua

SEQ ID NO: 1482281 - RNA, 19 nt, Homo sapiens
  misc_RNA (1)...(19): siRNA sense strand
ccaacgggauucucuucug

SEQ ID NO: 1482282 - RNA, 19 nt, Homo sapiens
  misc_RNA (1)...(19): siRNA sense strand
aggagagacuguuuaaagu

SEQ ID NO: 1482283 - RNA, 19 nt, Homo sapiens
  misc_RNA (1)...(19): siRNA sense strand
gaaaagacagaagguaaaa

SEQ ID NO: 1482284 - RNA, 19 nt, Homo sapiens
  misc_RNA (1)...(19): siRNA sense strand
gguaaagacaacucgaaga

SEQ ID NO: 1482285 - RNA, 19 nt, Homo sapiens
  misc_RNA (1)...(19): siRNA sense strand
gaaacaccgcugcacagau

SEQ ID NO: 1482286 - RNA, 19 nt, Homo sapiens
  misc_RNA (1)...(19): siRNA sense strand
gaugcggugugccagauuc

SEQ ID NO: 1482287 - RNA, 19 nt, Homo sapiens
  misc_RNA (1)...(19): siRNA sense strand
agaacucacuuacgagaag

SEQ ID NO: 1482288 - RNA, 19 nt, Homo sapiens
  misc_RNA (1)...(19): siRNA sense strand
aaaucuuggugcuuccaua

SEQ ID NO: 1482289 - RNA, 19 nt, Homo sapiens
  misc_RNA (1)...(19): siRNA sense strand
uggcccagauacuuucuuu

SEQ ID NO: 1482290 - RNA, 19 nt, Homo sapiens
  misc_RNA (1)...(19): siRNA sense strand
cagaaagaccaacgggauu

SEQ ID NO: 1482291 - RNA, 19 nt, Homo sapiens
  misc_RNA (1)...(19): siRNA sense strand
ggaacugaauaugaucauc

SEQ ID NO: 1482292 - RNA, 19 nt, Homo sapiens
  misc_RNA (1)...(19): siRNA sense strand
agaaaccugugcaaaugau

SEQ ID NO: 1482293 - RNA, 19 nt, Homo sapiens
  misc_RNA (1)...(19): siRNA sense strand
caacucgaagaauguguuu

SEQ ID NO: 1482294 - RNA, 19 nt, Homo sapiens
  misc_RNA (1)...(19): siRNA sense strand
uaucagcgccguagagaag

SEQ ID NO: 1482295 - RNA, 19 nt, Homo sapiens
  misc_RNA (1)...(19): siRNA sense strand
gggcaaggcagacuucucu

SEQ ID NO: 1482296 - RNA, 19 nt, Homo sapiens
  misc_RNA (1)...(19): siRNA sense strand
caaggcugguucuggugaa

SEQ ID NO: 1482297 - RNA, 19 nt, Homo sapiens
  misc_RNA (1)...(19): siRNA sense strand
ccgaggagagacuguuuaa

SEQ ID NO: 1482298 - RNA, 19 nt, Homo sapiens
  misc_RNA (1)...(19): siRNA sense strand
ggacaugauggaugaagag

SEQ ID NO: 1482299 - RNA, 19 nt, Homo sapiens
  misc_RNA (1)...(19): siRNA sense strand
uggagaaagaacucacuua

SEQ ID NO: 1482300 - RNA, 19 nt, Homo sapiens
  misc_RNA (1)...(19): siRNA sense strand
guagagaaguccagaaaac

SEQ ID NO: 1482301 - RNA, 19 nt, Homo sapiens
  misc_RNA (1)...(19): siRNA sense strand
gaagaggagguggaagugu

SEQ ID NO: 1482302 - RNA, 19 nt, Homo sapiens
  misc_RNA (1)...(19): siRNA sense strand
uguccaaggucgugcacaa

SEQ ID NO: 1482303 - RNA, 19 nt, Homo sapiens
  misc_RNA (1)...(19): siRNA sense strand
ccacagcugccaucaugau

SEQ ID NO: 1482304 - RNA, 19 nt, Homo sapiens
  misc_RNA (1)...(19): siRNA sense strand
ccaaggucgugcacaaguc

SEQ ID NO: 1482305 - RNA, 19 nt, Homo sapiens
  misc_RNA (1)...(19): siRNA sense strand
gcacgcaguacuugcuuag

SEQ ID NO: 1482306 - RNA, 19 nt, Homo sapiens
  misc_RNA (1)...(19): siRNA sense strand
uuaaagucagcaagaauga

SEQ ID NO: 1482307 - RNA, 19 nt, Homo sapiens
  misc_RNA (1)...(19): siRNA sense strand
gggauggacaguuugacaa

SEQ ID NO: 1482308 - RNA, 19 nt, Homo sapiens
  misc_RNA (1)...(19): siRNA sense strand
ucuggugaaugcugucuau

SEQ ID NO: 1482309 - RNA, 19 nt, Homo sapiens
  misc_RNA (1)...(19): siRNA sense strand
acagauggcccagauacuu

SEQ ID NO: 1482310 - RNA, 19 nt, Homo sapiens
  misc_RNA (1)...(19): siRNA sense strand
ggaugaagaggagguggaa

SEQ ID NO: 1482311 - RNA, 19 nt, Homo sapiens
  misc_RNA (1)...(19): siRNA sense strand
gaacgguggagaaagaacu

SEQ ID NO: 1482312 - RNA, 19 nt, Homo sapiens
  misc_RNA (1)...(19): siRNA sense strand
gcaaucuacuuuuaagaag

SEQ ID NO: 1482313 - RNA, 19 nt, Homo sapiens
  misc_RNA (1)...(19): siRNA sense strand
uaaagacaacucgaagaau

SEQ ID NO: 1482314 - RNA, 19 nt, Homo sapiens
  misc_RNA (1)...(19): siRNA sense strand
uggugaaugcugucuauuu

SEQ ID NO: 1482315 - RNA, 19 nt, Homo sapiens
  misc_RNA (1)...(19): siRNA sense strand
gacgagaccacugacuuga

SEQ ID NO: 1482316 - RNA, 19 nt, Homo sapiens
  misc_RNA (1)...(19): siRNA sense strand
gaccaacgggauucucuuc

SEQ ID NO: 1482317 - RNA, 19 nt, Homo sapiens
  misc_RNA (1)...(19): siRNA sense strand
cugcacagauggcccagau

SEQ ID NO: 1482318 - RNA, 19 nt, Homo sapiens
  misc_RNA (1)...(19): siRNA sense strand
gggaaaagucuugugauuu

SEQ ID NO: 1482319 - RNA, 19 nt, Homo sapiens
  misc_RNA (1)...(19): siRNA sense strand
gagaaagaacucacuuacg

SEQ ID NO: 1482320 - RNA, 19 nt, Homo sapiens
  misc_RNA (1)...(19): siRNA sense strand
ucuuggugcuuccauaugu

SEQ ID NO: 1482321 - RNA, 19 nt, Homo sapiens
  misc_RNA (1)...(19): siRNA sense strand
gcaagaaugaggagaaacc

SEQ ID NO: 1482322 - RNA, 19 nt, Homo sapiens
  misc_RNA (1)...(19): siRNA sense strand
gaaugcugucuauuucaga

SEQ ID NO: 1482323 - RNA, 19 nt, Homo sapiens
  misc_RNA (1)...(19): siRNA sense strand
gggcucaguggauccauug

SEQ ID NO: 1482324 - RNA, 19 nt, Homo sapiens
  misc_RNA (1)...(19): siRNA sense strand
ccguagagaaguccagaaa

SEQ ID NO: 1482325 - RNA, 19 nt, Homo sapiens
  misc_RNA (1)...(19): siRNA sense strand
agaggaaagcuacgacaug

SEQ ID NO: 1482326 - RNA, 19 nt, Homo sapiens
  misc_RNA (1)...(19): siRNA sense strand
cccagauacuuucuuucaa

SEQ ID NO: 1482327 - RNA, 19 nt, Homo sapiens
  misc_RNA (1)...(19): siRNA sense strand
aggagaaaccugugcaaau

SEQ ID NO: 1482328 - RNA, 19 nt, Homo sapiens
  misc_RNA (1)...(19): siRNA sense strand
ucagcaagaaugaggagaa

SEQ ID NO: 1482329 - RNA, 19 nt, Homo sapiens
  misc_RNA (1)...(19): siRNA sense strand
ggauggacaguuugacaag

SEQ ID NO: 1482330 - RNA, 19 nt, Homo sapiens
  misc_RNA (1)...(19): siRNA sense strand
uguuuaaagucagcaagaa

SEQ ID NO: 1482331 - RNA, 19 nt, Homo sapiens
  misc_RNA (1)...(19): siRNA sense strand
cgagaaguucguagaaugg

SEQ ID NO: 1482332 - RNA, 19 nt, Homo sapiens
  misc_RNA (1)...(19): siRNA sense strand
gagaacgguggagaaagaa

SEQ ID NO: 1482333 - RNA, 19 nt, Homo sapiens
  misc_RNA (1)...(19): siRNA sense strand
gagaaguucguagaaugga

SEQ ID NO: 1482334 - RNA, 19 nt, Homo sapiens
  misc_RNA (1)...(19): siRNA sense strand
gaaagaccaacgggauucu

SEQ ID NO: 1482335 - RNA, 19 nt, Homo sapiens
  misc_RNA (1)...(19): siRNA sense strand
gaggagcuugacuuuauca

SEQ ID NO: 1482336 - RNA, 19 nt, Homo sapiens
  misc_RNA (1)...(19): siRNA sense strand
gcaaccugggcaugacuga

SEQ ID NO: 1482337 - RNA, 19 nt, Homo sapiens
  misc_RNA (1)...(19): siRNA sense strand
gaaaccugugcaaaugaug

SEQ ID NO: 1482338 - RNA, 19 nt, Homo sapiens
  misc_RNA (1)...(19): siRNA sense strand
uggacaugauggaugaaga

SEQ ID NO: 1482339 - RNA, 19 nt, Homo sapiens
  misc_RNA (1)...(19): siRNA sense strand
caccuuugccuuaaaccuu

SEQ ID NO: 1482340 - RNA, 19 nt, Homo sapiens
  misc_RNA (1)...(19): siRNA sense strand
accuuugccuuaaaccuuu

SEQ ID NO: 1482341 - RNA, 19 nt, Homo sapiens
  misc_RNA (1)...(19): siRNA sense strand
uuuaaagucagcaagaaug

SEQ ID NO: 1482342 - RNA, 19 nt, Homo sapiens
  misc_RNA (1)...(19): siRNA sense strand
agaaagaccaacgggauuc

SEQ ID NO: 1482343 - RNA, 19 nt, Homo sapiens
  misc_RNA (1)...(19): siRNA sense strand
gggcaaagguggaaaugaa

SEQ ID NO: 1482344 - RNA, 19 nt, Homo sapiens
  misc_RNA (1)...(19): siRNA sense strand
gcacacuggugguccauga

SEQ ID NO: 1482345 - RNA, 19 nt, Homo sapiens
  misc_RNA (1)...(19): siRNA sense strand
caaugugacugcugacaaa

SEQ ID NO: 1482346 - RNA, 19 nt, Homo sapiens
  misc_RNA (1)...(19): siRNA sense strand
gaaaguaauggaccaguga

SEQ ID NO: 1482347 - RNA, 19 nt, Homo sapiens
  misc_RNA (1)...(19): siRNA sense strand
guucaugaguuuggagaua

SEQ ID NO: 1482348 - RNA, 19 nt, Homo sapiens
  misc_RNA (1)...(19): siRNA sense strand
ggagaccauugcaucauug

SEQ ID NO: 1482349 - RNA, 19 nt, Homo sapiens
  misc_RNA (1)...(19): siRNA sense strand
gaaaguacaaagacaggaa

SEQ ID NO: 1482350 - RNA, 19 nt, Homo sapiens
  misc_RNA (1)...(19): siRNA sense strand
gugcagguccucacuuuaa

SEQ ID NO: 1482351 - RNA, 19 nt, Homo sapiens
  misc_RNA (1)...(19): siRNA sense strand
gcagaugacuugggcaaag

SEQ ID NO: 1482352 - RNA, 19 nt, Homo sapiens
  misc_RNA (1)...(19): siRNA sense strand
gagcagaaggaaaguaaug

SEQ ID NO: 1482353 - RNA, 19 nt, Homo sapiens
  misc_RNA (1)...(19): siRNA sense strand
ggaaaugaagaaaguacaa

SEQ ID NO: 1482354 - RNA, 19 nt, Homo sapiens
  misc_RNA (1)...(19): siRNA sense strand
ugaagaaaguacaaagaca

SEQ ID NO: 1482355 - RNA, 19 nt, Homo sapiens
  misc_RNA (1)...(19): siRNA sense strand
gugcagggcaucaucaauu

SEQ ID NO: 1482356 - RNA, 19 nt, Homo sapiens
  misc_RNA (1)...(19): siRNA sense strand
ggaagucguuuggcuugug

SEQ ID NO: 1482357 - RNA, 19 nt, Homo sapiens
  misc_RNA (1)...(19): siRNA sense strand
gcaaagguggaaaugaaga

SEQ ID NO: 1482358 - RNA, 19 nt, Homo sapiens
  misc_RNA (1)...(19): siRNA sense strand
uuaauccucuauccagaaa

SEQ ID NO: 1482359 - RNA, 19 nt, Homo sapiens
  misc_RNA (1)...(19): siRNA sense strand
cugaaggccugcauggauu

SEQ ID NO: 1482360 - RNA, 19 nt, Homo sapiens
  misc_RNA (1)...(19): siRNA sense strand
ugcagggcaucaucaauuu

SEQ ID NO: 1482361 - RNA, 19 nt, Homo sapiens
  misc_RNA (1)...(19): siRNA sense strand
gcaaugugacugcugacaa

SEQ ID NO: 1482362 - RNA, 19 nt, Homo sapiens
  misc_RNA (1)...(19): siRNA sense strand
uauugaagauucugugauc

SEQ ID NO: 1482363 - RNA, 19 nt, Homo sapiens
  misc_RNA (1)...(19): siRNA sense strand
cgaugugucuauugaagau

SEQ ID NO: 1482364 - RNA, 19 nt, Homo sapiens
  misc_RNA (1)...(19): siRNA sense strand
gaugaagagaggcauguug

SEQ ID NO: 1482365 - RNA, 19 nt, Homo sapiens
  misc_RNA (1)...(19): siRNA sense strand
gcagaaggaaaguaaugga

SEQ ID NO: 1482366 - RNA, 19 nt, Homo sapiens
  misc_RNA (1)...(19): siRNA sense strand
uggccgaugugucuauuga

SEQ ID NO: 1482367 - RNA, 19 nt, Homo sapiens
  misc_RNA (1)...(19): siRNA sense strand
gcauuaaaggacugacuga

SEQ ID NO: 1482368 - RNA, 19 nt, Homo sapiens
  misc_RNA (1)...(19): siRNA sense strand
ucguuuggcuuguggugua

SEQ ID NO: 1482369 - RNA, 19 nt, Homo sapiens
  misc_RNA (1)...(19): siRNA sense strand
caaagguggaaaugaagaa

SEQ ID NO: 1482370 - RNA, 19 nt, Homo sapiens
  misc_RNA (1)...(19): siRNA sense strand
gaggcauguuggagacuug

SEQ ID NO: 1482371 - RNA, 19 nt, Homo sapiens
  misc_RNA (1)...(19): siRNA sense strand
aggagaccauugcaucauu

SEQ ID NO: 1482372 - RNA, 19 nt, Homo sapiens
  misc_RNA (1)...(19): siRNA sense strand
gccgaugugucuauugaag

SEQ ID NO: 1482373 - RNA, 19 nt, Homo sapiens
  misc_RNA (1)...(19): siRNA sense strand
guaauggaccagugaaggu

SEQ ID NO: 1482374 - RNA, 19 nt, Homo sapiens
  misc_RNA (1)...(19): siRNA sense strand
uucaugaguuuggagauaa

SEQ ID NO: 1482375 - RNA, 19 nt, Homo sapiens
  misc_RNA (1)...(19): siRNA sense strand
gacaggaaacgcuggaagu

SEQ ID NO: 1482376 - RNA, 19 nt, Homo sapiens
  misc_RNA (1)...(19): siRNA sense strand
ucaucaauuucgagcagaa

SEQ ID NO: 1482377 - RNA, 19 nt, Homo sapiens
  misc_RNA (1)...(19): siRNA sense strand
ucgagcagaaggaaaguaa

SEQ ID NO: 1482378 - RNA, 19 nt, Homo sapiens
  misc_RNA (1)...(19): siRNA sense strand
guuggagacuugggcaaug

SEQ ID NO: 1482379 - RNA, 19 nt, Homo sapiens
  misc_RNA (1)...(19): siRNA sense strand
ugugacugcugacaaagau

SEQ ID NO: 1482380 - RNA, 19 nt, Homo sapiens
  misc_RNA (1)...(19): siRNA sense strand
ggagacuugggcaauguga

SEQ ID NO: 1482381 - RNA, 19 nt, Homo sapiens
  misc_RNA (1)...(19): siRNA sense strand
aagaugguguggccgaugu

SEQ ID NO: 1482382 - RNA, 19 nt, Homo sapiens
  misc_RNA (1)...(19): siRNA sense strand
ucaugaguuuggagauaau

SEQ ID NO: 1482383 - RNA, 19 nt, Homo sapiens
  misc_RNA (1)...(19): siRNA sense strand
aaaguacaaagacaggaaa

SEQ ID NO: 1482384 - RNA, 19 nt, Homo sapiens
  misc_RNA (1)...(19): siRNA sense strand
gcagguccucacuuuaauc

SEQ ID NO: 1482385 - RNA, 19 nt, Homo sapiens
  misc_RNA (1)...(19): siRNA sense strand
gcagggcaucaucaauuuc

SEQ ID NO: 1482386 - RNA, 19 nt, Homo sapiens
  misc_RNA (1)...(19): siRNA sense strand
ucacuuuaauccucuaucc

SEQ ID NO: 1482387 - RNA, 19 nt, Homo sapiens
  misc_RNA (1)...(19): siRNA sense strand
acacuggugguccaugaaa

SEQ ID NO: 1482388 - RNA, 19 nt, Homo sapiens
  misc_RNA (1)...(19): siRNA sense strand
ucaggagaccauugcauca

SEQ ID NO: 1482389 - RNA, 19 nt, Homo sapiens
  misc_RNA (1)...(19): siRNA sense strand
ggaagcauuaaaggacuga

SEQ ID NO: 1482390 - RNA, 19 nt, Homo sapiens
  misc_RNA (1)...(19): siRNA sense strand
ggaugaagagaggcauguu

SEQ ID NO: 1482391 - RNA, 19 nt, Homo sapiens
  misc_RNA (1)...(19): siRNA sense strand
cagaugacuugggcaaagg

SEQ ID NO: 1482392 - RNA, 19 nt, Homo sapiens
  misc_RNA (1)...(19): siRNA sense strand
gaagaaggcugugaaccua

SEQ ID NO: 1482393 - RNA, 19 nt, Homo sapiens
  misc_RNA (1)...(19): siRNA sense strand
caaggaaacugaagaugaa

SEQ ID NO: 1482394 - RNA, 19 nt, Homo sapiens
  misc_RNA (1)...(19): siRNA sense strand
caaccuggccaauaucuua

SEQ ID NO: 1482395 - RNA, 19 nt, Homo sapiens
  misc_RNA (1)...(19): siRNA sense strand
gcaaacauaugcccaaguc

SEQ ID NO: 1482396 - RNA, 19 nt, Homo sapiens
  misc_RNA (1)...(19): siRNA sense strand
agacauauccugaauaaga

SEQ ID NO: 1482397 - RNA, 19 nt, Homo sapiens
  misc_RNA (1)...(19): siRNA sense strand
acacuuauuugcuguauga

SEQ ID NO: 1482398 - RNA, 19 nt, Homo sapiens
  misc_RNA (1)...(19): siRNA sense strand
gacauauccugaauaagaa

SEQ ID NO: 1482399 - RNA, 19 nt, Homo sapiens
  misc_RNA (1)...(19): siRNA sense strand
gaagaagaaaggaacguuu

SEQ ID NO: 1482400 - RNA, 19 nt, Homo sapiens
  misc_RNA (1)...(19): siRNA sense strand
ucacgucuaugauaacauu

SEQ ID NO: 1482401 - RNA, 19 nt, Homo sapiens
  misc_RNA (1)...(19): siRNA sense strand
gaacaggccgcacaucuca

SEQ ID NO: 1482402 - RNA, 19 nt, Homo sapiens
  misc_RNA (1)...(19): siRNA sense strand
cgaaaggagucgcaucuuc

SEQ ID NO: 1482403 - RNA, 19 nt, Homo sapiens
  misc_RNA (1)...(19): siRNA sense strand
acagcaaccuggccaauau

SEQ ID NO: 1482404 - RNA, 19 nt, Homo sapiens
  misc_RNA (1)...(19): siRNA sense strand
ucaaggaaacugaagauga

SEQ ID NO: 1482405 - RNA, 19 nt, Homo sapiens
  misc_RNA (1)...(19): siRNA sense strand
ugauucacgucuaugauaa

SEQ ID NO: 1482406 - RNA, 19 nt, Homo sapiens
  misc_RNA (1)...(19): siRNA sense strand
agaaauccaaggacacuua

SEQ ID NO: 1482407 - RNA, 19 nt, Homo sapiens
  misc_RNA (1)...(19): siRNA sense strand
ggacacuuauuugcuguau

SEQ ID NO: 1482408 - RNA, 19 nt, Homo sapiens
  misc_RNA (1)...(19): siRNA sense strand
caagcagacauuagacaua

SEQ ID NO: 1482409 - RNA, 19 nt, Homo sapiens
  misc_RNA (1)...(19): siRNA sense strand
gaaaggagucgcaucuucu

SEQ ID NO: 1482410 - RNA, 19 nt, Homo sapiens
  misc_RNA (1)...(19): siRNA sense strand
ggaaacugaagaugaagaa

SEQ ID NO: 1482411 - RNA, 19 nt, Homo sapiens
  misc_RNA (1)...(19): siRNA sense strand
gagcugaggaugucaagga

SEQ ID NO: 1482412 - RNA, 19 nt, Homo sapiens
  misc_RNA (1)...(19): siRNA sense strand
aagcagacauuagacauau

SEQ ID NO: 1482413 - RNA, 19 nt, Homo sapiens
  misc_RNA (1)...(19): siRNA sense strand
gcucuucucugcucaucga

SEQ ID NO: 1482414 - RNA, 19 nt, Homo sapiens
  misc_RNA (1)...(19): siRNA sense strand
gaggcauuaucuaacagua

SEQ ID NO: 1482415 - RNA, 19 nt, Homo sapiens
  misc_RNA (1)...(19): siRNA sense strand
uguaggagcucgucacucu

SEQ ID NO: 1482416 - RNA, 19 nt, Homo sapiens
  misc_RNA (1)...(19): siRNA sense strand
gagagaagaaggcugugaa

SEQ ID NO: 1482417 - RNA, 19 nt, Homo sapiens
  misc_RNA (1)...(19): siRNA sense strand
gaaauccaaggacacuuau

SEQ ID NO: 1482418 - RNA, 19 nt, Homo sapiens
  misc_RNA (1)...(19): siRNA sense strand
aaacauaugcccaagucaa

SEQ ID NO: 1482419 - RNA, 19 nt, Homo sapiens
  misc_RNA (1)...(19): siRNA sense strand
aaacugaagaugaagaaga

SEQ ID NO: 1482420 - RNA, 19 nt, Homo sapiens
  misc_RNA (1)...(19): siRNA sense strand
aauccaaggacacuuauuu

SEQ ID NO: 1482421 - RNA, 19 nt, Homo sapiens
  misc_RNA (1)...(19): siRNA sense strand
caaccacgaggaugugauu

SEQ ID NO: 1482422 - RNA, 19 nt, Homo sapiens
  misc_RNA (1)...(19): siRNA sense strand
ggagauggcaaucgaagca

SEQ ID NO: 1482423 - RNA, 19 nt, Homo sapiens
  misc_RNA (1)...(19): siRNA sense strand
cauuagacauauccugaau

SEQ ID NO: 1482424 - RNA, 19 nt, Homo sapiens
  misc_RNA (1)...(19): siRNA sense strand
aacugaagaugaagaagaa

SEQ ID NO: 1482425 - RNA, 19 nt, Homo sapiens
  misc_RNA (1)...(19): siRNA sense strand
gcacaacaagugguccaaa

SEQ ID NO: 1482426 - RNA, 19 nt, Homo sapiens
  misc_RNA (1)...(19): siRNA sense strand
caacaagugguccaaaguc

SEQ ID NO: 1482427 - RNA, 19 nt, Homo sapiens
  misc_RNA (1)...(19): siRNA sense strand
gcucaucgaggcauuaucu

SEQ ID NO: 1482428 - RNA, 19 nt, Homo sapiens
  misc_RNA (1)...(19): siRNA sense strand
agaaggcugugaaccuaga

SEQ ID NO: 1482429 - RNA, 19 nt, Homo sapiens
  misc_RNA (1)...(19): siRNA sense strand
gauugagacagcacugaaa

SEQ ID NO: 1482430 - RNA, 19 nt, Homo sapiens
  misc_RNA (1)...(19): siRNA sense strand
ccucuucacugcaccaagu

SEQ ID NO: 1482431 - RNA, 19 nt, Homo sapiens
  misc_RNA (1)...(19): siRNA sense strand
uaggagcucgucacucuuu

SEQ ID NO: 1482432 - RNA, 19 nt, Homo sapiens
  misc_RNA (1)...(19): siRNA sense strand
gaagaugaagaagaaagga

SEQ ID NO: 1482433 - RNA, 19 nt, Homo sapiens
  misc_RNA (1)...(19): siRNA sense strand
cacaacaagugguccaaag

SEQ ID NO: 1482434 - RNA, 19 nt, Homo sapiens
  misc_RNA (1)...(19): siRNA sense strand
cgucuaugauaacauugaa

SEQ ID NO: 1482435 - RNA, 19 nt, Homo sapiens
  misc_RNA (1)...(19): siRNA sense strand
gugccaagcagacauuaga

SEQ ID NO: 1482436 - RNA, 19 nt, Homo sapiens
  misc_RNA (1)...(19): siRNA sense strand
caagugccaagcagacauu

SEQ ID NO: 1482437 - RNA, 19 nt, Homo sapiens
  misc_RNA (1)...(19): siRNA sense strand
agaggugugucgcagcaaa

SEQ ID NO: 1482438 - RNA, 19 nt, Homo sapiens
  misc_RNA (1)...(19): siRNA sense strand
gugugucgcagcaaacaua

SEQ ID NO: 1482439 - RNA, 19 nt, Homo sapiens
  misc_RNA (1)...(19): siRNA sense strand
gaaguggaggacagagaga

SEQ ID NO: 1482440 - RNA, 19 nt, Homo sapiens
  misc_RNA (1)...(19): siRNA sense strand
ggaacaggccgcacaucuc

SEQ ID NO: 1482441 - RNA, 19 nt, Homo sapiens
  misc_RNA (1)...(19): siRNA sense strand
ucaucgaggcauuaucuaa

SEQ ID NO: 1482442 - RNA, 19 nt, Homo sapiens
  misc_RNA (1)...(19): siRNA sense strand
ggagaaauccaaggacacu

SEQ ID NO: 1482443 - RNA, 19 nt, Homo sapiens
  misc_RNA (1)...(19): siRNA sense strand
aacaagugguccaaaguca

SEQ ID NO: 1482444 - RNA, 19 nt, Homo sapiens
  misc_RNA (1)...(19): siRNA sense strand
agacagcacugaaaaugga

SEQ ID NO: 1482445 - RNA, 19 nt, Homo sapiens
  misc_RNA (1)...(19): siRNA sense strand
uaagaauggaggagugaug

SEQ ID NO: 1482446 - RNA, 19 nt, Homo sapiens
  misc_RNA (1)...(19): siRNA sense strand
caucuucuccaaacucugu

SEQ ID NO: 1482447 - RNA, 19 nt, Homo sapiens
  misc_RNA (1)...(19): siRNA sense strand
caaagucaggcacaucaag

SEQ ID NO: 1482448 - RNA, 19 nt, Homo sapiens
  misc_RNA (1)...(19): siRNA sense strand
caacagcaaccuggccaau

SEQ ID NO: 1482449 - RNA, 19 nt, Homo sapiens
  misc_RNA (1)...(19): siRNA sense strand
ccaaggacacuuauuugcu

SEQ ID NO: 1482450 - RNA, 19 nt, Homo sapiens
  misc_RNA (1)...(19): siRNA sense strand
ggaugucaaggaaacugaa

SEQ ID NO: 1482451 - RNA, 19 nt, Homo sapiens
  misc_RNA (1)...(19): siRNA sense strand
cgauugagacagcacugaa

SEQ ID NO: 1482452 - RNA, 19 nt, Homo sapiens
  misc_RNA (1)...(19): siRNA sense strand
ugaagaagaaaggaacguu

SEQ ID NO: 1482453 - RNA, 19 nt, Homo sapiens
  misc_RNA (1)...(19): siRNA sense strand
ccaagcagacauuagacau

SEQ ID NO: 1482454 - RNA, 19 nt, Homo sapiens
  misc_RNA (1)...(19): siRNA sense strand
gcaaccuggccaauaucuu

SEQ ID NO: 1482455 - RNA, 19 nt, Homo sapiens
  misc_RNA (1)...(19): siRNA sense strand
cgaagcaggagcugaggau

SEQ ID NO: 1482456 - RNA, 19 nt, Homo sapiens
  misc_RNA (1)...(19): siRNA sense strand
cugaggaugucaaggaaac

SEQ ID NO: 1482457 - RNA, 19 nt, Homo sapiens
  misc_RNA (1)...(19): siRNA sense strand
acaggccgcacaucucauu

SEQ ID NO: 1482458 - RNA, 19 nt, Homo sapiens
  misc_RNA (1)...(19): siRNA sense strand
gaagaaagcugaguugaag

SEQ ID NO: 1482459 - RNA, 19 nt, Homo sapiens
  misc_RNA (1)...(19): siRNA sense strand
gauccaccauuaguuauua

SEQ ID NO: 1482460 - RNA, 19 nt, Homo sapiens
  misc_RNA (1)...(19): siRNA sense strand
gaagacagguacuacuuag

SEQ ID NO: 1482461 - RNA, 19 nt, Homo sapiens
  misc_RNA (1)...(19): siRNA sense strand
gaaaguggcaugacaaugg

SEQ ID NO: 1482462 - RNA, 19 nt, Homo sapiens
  misc_RNA (1)...(19): siRNA sense strand
ggacuuacguuuguaucaa

SEQ ID NO: 1482463 - RNA, 19 nt, Homo sapiens
  misc_RNA (1)...(19): siRNA sense strand
gcgaagccauggagaacuu

SEQ ID NO: 1482464 - RNA, 19 nt, Homo sapiens
  misc_RNA (1)...(19): siRNA sense strand
gcaccucccuuucccaucu

SEQ ID NO: 1482465 - RNA, 19 nt, Homo sapiens
  misc_RNA (1)...(19): siRNA sense strand
gggauaacaccacuacuga

SEQ ID NO: 1482466 - RNA, 19 nt, Homo sapiens
  misc_RNA (1)...(19): siRNA sense strand
gagcagcaaugcguugaug

SEQ ID NO: 1482467 - RNA, 19 nt, Homo sapiens
  misc_RNA (1)...(19): siRNA sense strand
ugaagacagguacuacuua

SEQ ID NO: 1482468 - RNA, 19 nt, Homo sapiens
  misc_RNA (1)...(19): siRNA sense strand
gaauccaguucauggcuau

SEQ ID NO: 1482469 - RNA, 19 nt, Homo sapiens
  misc_RNA (1)...(19): siRNA sense strand
uaggauccaccauuaguua

SEQ ID NO: 1482470 - RNA, 19 nt, Homo sapiens
  misc_RNA (1)...(19): siRNA sense strand
gaauguaagugacaaaauc

SEQ ID NO: 1482471 - RNA, 19 nt, Homo sapiens
  misc_RNA (1)...(19): siRNA sense strand
aaaggaaaguggcaugaca

SEQ ID NO: 1482472 - RNA, 19 nt, Homo sapiens
  misc_RNA (1)...(19): siRNA sense strand
ggagguggaaggacagauu

SEQ ID NO: 1482473 - RNA, 19 nt, Homo sapiens
  misc_RNA (1)...(19): siRNA sense strand
aagcugaguugaaggcaaa

SEQ ID NO: 1482474 - RNA, 19 nt, Homo sapiens
  misc_RNA (1)...(19): siRNA sense strand
ugaagaaagcugaguugaa

SEQ ID NO: 1482475 - RNA, 19 nt, Homo sapiens
  misc_RNA (1)...(19): siRNA sense strand
gauaacaccacuacugagu

SEQ ID NO: 1482476 - RNA, 19 nt, Homo sapiens
  misc_RNA (1)...(19): siRNA sense strand
gaagccauggagaacuuua

SEQ ID NO: 1482477 - RNA, 19 nt, Homo sapiens
  misc_RNA (1)...(19): siRNA sense strand
aauauucucuggagcugaa

SEQ ID NO: 1482478 - RNA, 19 nt, Homo sapiens
  misc_RNA (1)...(19): siRNA sense strand
ggagaacuuuaugcaacaa

SEQ ID NO: 1482479 - RNA, 19 nt, Homo sapiens
  misc_RNA (1)...(19): siRNA sense strand
ucacguuuaugugcaauga

SEQ ID NO: 1482480 - RNA, 19 nt, Homo sapiens
  misc_RNA (1)...(19): siRNA sense strand
gcuggugaauggagaguuc

SEQ ID NO: 1482481 - RNA, 19 nt, Homo sapiens
  misc_RNA (1)...(19): siRNA sense strand
aaaguggcaugacaaugga

SEQ ID NO: 1482482 - RNA, 19 nt, Homo sapiens
  misc_RNA (1)...(19): siRNA sense strand
caccauuaguuauuacugu

SEQ ID NO: 1482483 - RNA, 19 nt, Homo sapiens
  misc_RNA (1)...(19): siRNA sense strand
gaauggagaguucaguucu

SEQ ID NO: 1482484 - RNA, 19 nt, Homo sapiens
  misc_RNA (1)...(19): siRNA sense strand
ggauccaccauuaguuauu

SEQ ID NO: 1482485 - RNA, 19 nt, Homo sapiens
  misc_RNA (1)...(19): siRNA sense strand
caauggaggagcuaaaaua

SEQ ID NO: 1482486 - RNA, 19 nt, Homo sapiens
  misc_RNA (1)...(19): siRNA sense strand
gugaagacagguacuacuu

SEQ ID NO: 1482487 - RNA, 19 nt, Homo sapiens
  misc_RNA (1)...(19): siRNA sense strand
gacaaaaucacguuuaugu

SEQ ID NO: 1482488 - RNA, 19 nt, Homo sapiens
  misc_RNA (1)...(19): siRNA sense strand
uggugugcgugcugucuua

SEQ ID NO: 1482489 - RNA, 19 nt, Homo sapiens
  misc_RNA (1)...(19): siRNA sense strand
accuuaggauccaccauua

SEQ ID NO: 1482490 - RNA, 19 nt, Homo sapiens
  misc_RNA (1)...(19): siRNA sense strand
uggaggagcuaaaauauuc

SEQ ID NO: 1482491 - RNA, 19 nt, Homo sapiens
  misc_RNA (1)...(19): siRNA sense strand
ggaaaguggcaugacaaug

SEQ ID NO: 1482492 - RNA, 19 nt, Homo sapiens
  misc_RNA (1)...(19): siRNA sense strand
gcugaagaaagcugaguug

SEQ ID NO: 1482493 - RNA, 19 nt, Homo sapiens
  misc_RNA (1)...(19): siRNA sense strand
gcaaugaccacuacauccu

SEQ ID NO: 1482494 - RNA, 19 nt, Homo sapiens
  misc_RNA (1)...(19): siRNA sense strand
gcaaaaguagggacuguga

SEQ ID NO: 1482495 - RNA, 19 nt, Homo sapiens
  misc_RNA (1)...(19): siRNA sense strand
uggagaacuuuaugcaaca

SEQ ID NO: 1482496 - RNA, 19 nt, Homo sapiens
  misc_RNA (1)...(19): siRNA sense strand
ccucuaaggagugggauaa

SEQ ID NO: 1482497 - RNA, 19 nt, Homo sapiens
  misc_RNA (1)...(19): siRNA sense strand
ugacaauggaggagcuaaa

SEQ ID NO: 1482498 - RNA, 19 nt, Homo sapiens
  misc_RNA (1)...(19): siRNA sense strand
cuuccagucugcaaguuga

SEQ ID NO: 1482499 - RNA, 19 nt, Homo sapiens
  misc_RNA (1)...(19): siRNA sense strand
gacuuacguuuguaucaag

SEQ ID NO: 1482500 - RNA, 19 nt, Homo sapiens
  misc_RNA (1)...(19): siRNA sense strand
aaucggagccagugucuag

SEQ ID NO: 1482501 - RNA, 19 nt, Homo sapiens
  misc_RNA (1)...(19): siRNA sense strand
caccuuaggauccaccauu

SEQ ID NO: 1482502 - RNA, 19 nt, Homo sapiens
  misc_RNA (1)...(19): siRNA sense strand
ccaguggacaauagcauau

SEQ ID NO: 1482503 - RNA, 19 nt, Homo sapiens
  misc_RNA (1)...(19): siRNA sense strand
ucuaaggagugggauaaca

SEQ ID NO: 1482504 - RNA, 19 nt, Homo sapiens
  misc_RNA (1)...(19): siRNA sense strand
caaaccagagugugagaag

SEQ ID NO: 1482505 - RNA, 19 nt, Homo sapiens
  misc_RNA (1)...(19): siRNA sense strand
caccugggcaccucccuuu

SEQ ID NO: 1482506 - RNA, 19 nt, Homo sapiens
  misc_RNA (1)...(19): siRNA sense strand
aaaucacguuuaugugcaa

SEQ ID NO: 1482507 - RNA, 19 nt, Homo sapiens
  misc_RNA (1)...(19): siRNA sense strand
gcaaucggagccagugucu

SEQ ID NO: 1482508 - RNA, 19 nt, Homo sapiens
  misc_RNA (1)...(19): siRNA sense strand
uaugugcaaugaccacuac

SEQ ID NO: 1482509 - RNA, 19 nt, Homo sapiens
  misc_RNA (1)...(19): siRNA sense strand
aauggagaguucaguucuu

SEQ ID NO: 1482510 - RNA, 19 nt, Homo sapiens
  misc_RNA (1)...(19): siRNA sense strand
guggcgaguuucugcuuca

SEQ ID NO: 1482511 - RNA, 19 nt, Homo sapiens
  misc_RNA (1)...(19): siRNA sense strand
gagguggaaggacagauuc

SEQ ID NO: 1482512 - RNA, 19 nt, Homo sapiens
  misc_RNA (1)...(19): siRNA sense strand
gggacuuacguuuguauca

SEQ ID NO: 1482513 - RNA, 19 nt, Homo sapiens
  misc_RNA (1)...(19): siRNA sense strand
gaaggcaaaauuguuguaa

SEQ ID NO: 1482514 - RNA, 19 nt, Homo sapiens
  misc_RNA (1)...(19): siRNA sense strand
gugcaaugaccacuacauc

SEQ ID NO: 1482515 - RNA, 19 nt, Homo sapiens
  misc_RNA (1)...(19): siRNA sense strand
ggccugugaauguaaguga

SEQ ID NO: 1482516 - RNA, 19 nt, Homo sapiens
  misc_RNA (1)...(19): siRNA sense strand
gaaaagaucuugaaaguuc

SEQ ID NO: 1482517 - RNA, 19 nt, Homo sapiens
  misc_RNA (1)...(19): siRNA sense strand
ggaaguagcuaguaaagca

SEQ ID NO: 1482518 - RNA, 19 nt, Homo sapiens
  misc_RNA (1)...(19): siRNA sense strand
aaagagagcugcgggaaua

SEQ ID NO: 1482519 - RNA, 19 nt, Homo sapiens
  misc_RNA (1)...(19): siRNA sense strand
ggagacaaguauuaucuuu

SEQ ID NO: 1482520 - RNA, 19 nt, Homo sapiens
  misc_RNA (1)...(19): siRNA sense strand
gaucagaaguaucauguga

SEQ ID NO: 1482521 - RNA, 19 nt, Homo sapiens
  misc_RNA (1)...(19): siRNA sense strand
acacaagccuucugaaauu

SEQ ID NO: 1482522 - RNA, 19 nt, Homo sapiens
  misc_RNA (1)...(19): siRNA sense strand
guccagaaguuuacuauuu

SEQ ID NO: 1482523 - RNA, 19 nt, Homo sapiens
  misc_RNA (1)...(19): siRNA sense strand
ggaggaaccugaauaccuu

SEQ ID NO: 1482524 - RNA, 19 nt, Homo sapiens
  misc_RNA (1)...(19): siRNA sense strand
gcauaguacuaaugguuua

SEQ ID NO: 1482525 - RNA, 19 nt, Homo sapiens
  misc_RNA (1)...(19): siRNA sense strand
gaacucacauacguuguuu

SEQ ID NO: 1482526 - RNA, 19 nt, Homo sapiens
  misc_RNA (1)...(19): siRNA sense strand
aaacaugucuguccaagau

SEQ ID NO: 1482527 - RNA, 19 nt, Homo sapiens
  misc_RNA (1)...(19): siRNA sense strand
gacaguagagugacauuua

SEQ ID NO: 1482528 - RNA, 19 nt, Homo sapiens
  misc_RNA (1)...(19): siRNA sense strand
gcaagacuguucugaauac

SEQ ID NO: 1482529 - RNA, 19 nt, Homo sapiens
  misc_RNA (1)...(19): siRNA sense strand
cagaagaaccaguaguuua

SEQ ID NO: 1482530 - RNA, 19 nt, Homo sapiens
  misc_RNA (1)...(19): siRNA sense strand
gaaaccacaccuucaguaa

SEQ ID NO: 1482531 - RNA, 19 nt, Homo sapiens
  misc_RNA (1)...(19): siRNA sense strand
gaaaguuggucuguagaug

SEQ ID NO: 1482532 - RNA, 19 nt, Homo sapiens
  misc_RNA (1)...(19): siRNA sense strand
cagcaagacuguucugaau

SEQ ID NO: 1482533 - RNA, 19 nt, Homo sapiens
  misc_RNA (1)...(19): siRNA sense strand
gaaagugggcauuacuauu

SEQ ID NO: 1482534 - RNA, 19 nt, Homo sapiens
  misc_RNA (1)...(19): siRNA sense strand
gcauauuccucuucagaug

SEQ ID NO: 1482535 - RNA, 19 nt, Homo sapiens
  misc_RNA (1)...(19): siRNA sense strand
gaagaaccaguaguuuaua

SEQ ID NO: 1482536 - RNA, 19 nt, Homo sapiens
  misc_RNA (1)...(19): siRNA sense strand
guacagacucuucauauca

SEQ ID NO: 1482537 - RNA, 19 nt, Homo sapiens
  misc_RNA (1)...(19): siRNA sense strand
cgacuuugguuuccucuug

SEQ ID NO: 1482538 - RNA, 19 nt, Homo sapiens
  misc_RNA (1)...(19): siRNA sense strand
gauguugacuucacugauc

SEQ ID NO: 1482539 - RNA, 19 nt, Homo sapiens
  misc_RNA (1)...(19): siRNA sense strand
ccagaggcguuccauuuga

SEQ ID NO: 1482540 - RNA, 19 nt, Homo sapiens
  misc_RNA (1)...(19): siRNA sense strand
ggaggaggauuuaauacag

SEQ ID NO: 1482541 - RNA, 19 nt, Homo sapiens
  misc_RNA (1)...(19): siRNA sense strand
gugaagagaagauuaaguu

SEQ ID NO: 1482542 - RNA, 19 nt, Homo sapiens
  misc_RNA (1)...(19): siRNA sense strand
ucagaaguaucaugugaga

SEQ ID NO: 1482543 - RNA, 19 nt, Homo sapiens
  misc_RNA (1)...(19): siRNA sense strand
ucacauacguuguuugaac

SEQ ID NO: 1482544 - RNA, 19 nt, Homo sapiens
  misc_RNA (1)...(19): siRNA sense strand
ugaaacuucuuuacaggaa

SEQ ID NO: 1482545 - RNA, 19 nt, Homo sapiens
  misc_RNA (1)...(19): siRNA sense strand
ccacagaugcaucauuuga

SEQ ID NO: 1482546 - RNA, 19 nt, Homo sapiens
  misc_RNA (1)...(19): siRNA sense strand
gggcauuacuauucuuaug

SEQ ID NO: 1482547 - RNA, 19 nt, Homo sapiens
  misc_RNA (1)...(19): siRNA sense strand
ugacuucacugaucuuagu

SEQ ID NO: 1482548 - RNA, 19 nt, Homo sapiens
  misc_RNA (1)...(19): siRNA sense strand
ggaaugcagugaaacuucu

SEQ ID NO: 1482549 - RNA, 19 nt, Homo sapiens
  misc_RNA (1)...(19): siRNA sense strand
guggauacauggguaauug

SEQ ID NO: 1482550 - RNA, 19 nt, Homo sapiens
  misc_RNA (1)...(19): siRNA sense strand
ggacuucucaauccaauuc

SEQ ID NO: 1482551 - RNA, 19 nt, Homo sapiens
  misc_RNA (1)...(19): siRNA sense strand
gguggaggaggauuuaaua

SEQ ID NO: 1482552 - RNA, 19 nt, Homo sapiens
  misc_RNA (1)...(19): siRNA sense strand
acuaaugguuuaaguggua

SEQ ID NO: 1482553 - RNA, 19 nt, Homo sapiens
  misc_RNA (1)...(19): siRNA sense strand
uaaagcagcaguacuaaca

SEQ ID NO: 1482554 - RNA, 19 nt, Homo sapiens
  misc_RNA (1)...(19): siRNA sense strand
gcagcuguccagaaguuua

SEQ ID NO: 1482555 - RNA, 19 nt, Homo sapiens
  misc_RNA (1)...(19): siRNA sense strand
ccaggaagcuguggaccaa

SEQ ID NO: 1482556 - RNA, 19 nt, Homo sapiens
  misc_RNA (1)...(19): siRNA sense strand
gcagugcgaggccauguuu

SEQ ID NO: 1482557 - RNA, 19 nt, Homo sapiens
  misc_RNA (1)...(19): siRNA sense strand
cgacugagcgaccuucuga

SEQ ID NO: 1482558 - RNA, 19 nt, Homo sapiens
  misc_RNA (1)...(19): siRNA sense strand
agacccaccucuacagaaa

SEQ ID NO: 1482559 - RNA, 19 nt, Homo sapiens
  misc_RNA (1)...(19): siRNA sense strand
caaaggacacagcuuaugu

SEQ ID NO: 1482560 - RNA, 19 nt, Homo sapiens
  misc_RNA (1)...(19): siRNA sense strand
caaguacagacucuucaua

SEQ ID NO: 1482561 - RNA, 19 nt, Homo sapiens
  misc_RNA (1)...(19): siRNA sense strand
uauacaagaugguggucua

SEQ ID NO: 1482562 - RNA, 19 nt, Homo sapiens
  misc_RNA (1)...(19): siRNA sense strand
gugagaagacuuuaauaga

SEQ ID NO: 1482563 - RNA, 19 nt, Homo sapiens
  misc_RNA (1)...(19): siRNA sense strand
gcagugaaacuucuuuaca

SEQ ID NO: 1482564 - RNA, 19 nt, Homo sapiens
  misc_RNA (1)...(19): siRNA sense strand
gauggucugccuucaagua

SEQ ID NO: 1482565 - RNA, 19 nt, Homo sapiens
  misc_RNA (1)...(19): siRNA sense strand
gguaauugcacuccugaaa

SEQ ID NO: 1482566 - RNA, 19 nt, Homo sapiens
  misc_RNA (1)...(19): siRNA sense strand
ggaaauuguccaucacguu

SEQ ID NO: 1482567 - RNA, 19 nt, Homo sapiens
  misc_RNA (1)...(19): siRNA sense strand
guaacuugcugcagaacau

SEQ ID NO: 1482568 - RNA, 19 nt, Homo sapiens
  misc_RNA (1)...(19): siRNA sense strand
auaaagauguaccucagaa

SEQ ID NO: 1482569 - RNA, 19 nt, Homo sapiens
  misc_RNA (1)...(19): siRNA sense strand
gaaccaguaguuuauaauc

SEQ ID NO: 1482570 - RNA, 19 nt, Homo sapiens
  misc_RNA (1)...(19): siRNA sense strand
cuaaaugggugcaauucau

SEQ ID NO: 1482571 - RNA, 19 nt, Homo sapiens
  misc_RNA (1)...(19): siRNA sense strand
ccagaucucuaugaaccua

SEQ ID NO: 1482572 - RNA, 19 nt, Homo sapiens
  misc_RNA (1)...(19): siRNA sense strand
ccagugaagagaagauuaa

SEQ ID NO: 1482573 - RNA, 19 nt, Homo sapiens
  misc_RNA (1)...(19): siRNA sense strand
gagugacauuuacuucauu

SEQ ID NO: 1482574 - RNA, 19 nt, Homo sapiens
  misc_RNA (1)...(19): siRNA sense strand
acaagaugguggucuaaug

SEQ ID NO: 1482575 - RNA, 19 nt, Homo sapiens
  misc_RNA (1)...(19): siRNA sense strand
uacaggaaguagcuaguaa

SEQ ID NO: 1482576 - RNA, 19 nt, Homo sapiens
  misc_RNA (1)...(19): siRNA sense strand
ggccugaagcugauuauga

SEQ ID NO: 1482577 - RNA, 19 nt, Homo sapiens
  misc_RNA (1)...(19): siRNA sense strand
gaggaggauuuaauacagu

SEQ ID NO: 1482578 - RNA, 19 nt, Homo sapiens
  misc_RNA (1)...(19): siRNA sense strand
uguuugaacugcaggagua

SEQ ID NO: 1482579 - RNA, 19 nt, Homo sapiens
  misc_RNA (1)...(19): siRNA sense strand
ucacacaagccuucugaaa

SEQ ID NO: 1482580 - RNA, 19 nt, Homo sapiens
  misc_RNA (1)...(19): siRNA sense strand
ggccagaguucgaguccuu

SEQ ID NO: 1482581 - RNA, 19 nt, Homo sapiens
  misc_RNA (1)...(19): siRNA sense strand
gaaagagagcugcgggaau

SEQ ID NO: 1482582 - RNA, 19 nt, Homo sapiens
  misc_RNA (1)...(19): siRNA sense strand
ccaauggauuugaugacaa

SEQ ID NO: 1482583 - RNA, 19 nt, Homo sapiens
  misc_RNA (1)...(19): siRNA sense strand
aaagugggcauuacuauuc

SEQ ID NO: 1482584 - RNA, 19 nt, Homo sapiens
  misc_RNA (1)...(19): siRNA sense strand
ucacggaggaaccugaaua

SEQ ID NO: 1482585 - RNA, 19 nt, Homo sapiens
  misc_RNA (1)...(19): siRNA sense strand
agaagaaccaguaguuuau

SEQ ID NO: 1482586 - RNA, 19 nt, Homo sapiens
  misc_RNA (1)...(19): siRNA sense strand
aaguacagccuucuuagua

SEQ ID NO: 1482587 - RNA, 19 nt, Homo sapiens
  misc_RNA (1)...(19): siRNA sense strand
ugaguaacuugcugcagaa

SEQ ID NO: 1482588 - RNA, 19 nt, Homo sapiens
  misc_RNA (1)...(19): siRNA sense strand
ucugguauauccucugaaa

SEQ ID NO: 1482589 - RNA, 19 nt, Homo sapiens
  misc_RNA (1)...(19): siRNA sense strand
gaugaagcuuccugcacaa

SEQ ID NO: 1482590 - RNA, 19 nt, Homo sapiens
  misc_RNA (1)...(19): siRNA sense strand
guggaagccuuuacagauc

SEQ ID NO: 1482591 - RNA, 19 nt, Homo sapiens
  misc_RNA (1)...(19): siRNA sense strand
uuccagaccuccaugguuu

SEQ ID NO: 1482592 - RNA, 19 nt, Homo sapiens
  misc_RNA (1)...(19): siRNA sense strand
uuccacagaugcaucauuu

SEQ ID NO: 1482593 - RNA, 19 nt, Homo sapiens
  misc_RNA (1)...(19): siRNA sense strand
gauuguuccucaugugguu

SEQ ID NO: 1482594 - RNA, 19 nt, Homo sapiens
  misc_RNA (1)...(19): siRNA sense strand
gcaguccuccuaaugaguu

SEQ ID NO: 1482595 - RNA, 19 nt, Homo sapiens
  misc_RNA (1)...(19): siRNA sense strand
aaacuggucuuauuaaccu

SEQ ID NO: 1482596 - RNA, 19 nt, Homo sapiens
  misc_RNA (1)...(19): siRNA sense strand
ggaaaacuggucuuauuaa

SEQ ID NO: 1482597 - RNA, 19 nt, Homo sapiens
  misc_RNA (1)...(19): siRNA sense strand
uaaguuccguugugguuca

SEQ ID NO: 1482598 - RNA, 19 nt, Homo sapiens
  misc_RNA (1)...(19): siRNA sense strand
aacaacagcugccuucauc

SEQ ID NO: 1482599 - RNA, 19 nt, Homo sapiens
  misc_RNA (1)...(19): siRNA sense strand
ggugagaagacuuuaauag

SEQ ID NO: 1482600 - RNA, 19 nt, Homo sapiens
  misc_RNA (1)...(19): siRNA sense strand
guucucaucaggagccuua

SEQ ID NO: 1482601 - RNA, 19 nt, Homo sapiens
  misc_RNA (1)...(19): siRNA sense strand
gauagucccagugcaguuu

SEQ ID NO: 1482602 - RNA, 19 nt, Homo sapiens
  misc_RNA (1)...(19): siRNA sense strand
gugguucacucugguauau

SEQ ID NO: 1482603 - RNA, 19 nt, Homo sapiens
  misc_RNA (1)...(19): siRNA sense strand
ccuaacgaaucuaacaaga

SEQ ID NO: 1482604 - RNA, 19 nt, Homo sapiens
  misc_RNA (1)...(19): siRNA sense strand
ccacagauuucaggagaca

SEQ ID NO: 1482605 - RNA, 19 nt, Homo sapiens
  misc_RNA (1)...(19): siRNA sense strand
ccuaggaaauacauguuau

SEQ ID NO: 1482606 - RNA, 19 nt, Homo sapiens
  misc_RNA (1)...(19): siRNA sense strand
uaauugcacuccugaaagg

SEQ ID NO: 1482607 - RNA, 19 nt, Homo sapiens
  misc_RNA (1)...(19): siRNA sense strand
cuacggauccaaauguaaa

SEQ ID NO: 1482608 - RNA, 19 nt, Homo sapiens
  misc_RNA (1)...(19): siRNA sense strand
uggcagcuguccagaaguu

SEQ ID NO: 1482609 - RNA, 19 nt, Homo sapiens
  misc_RNA (1)...(19): siRNA sense strand
cagcauaguacuaaugguu

SEQ ID NO: 1482610 - RNA, 19 nt, Homo sapiens
  misc_RNA (1)...(19): siRNA sense strand
cagcuuaugugcuuuugua

SEQ ID NO: 1482611 - RNA, 19 nt, Homo sapiens
  misc_RNA (1)...(19): siRNA sense strand
gaauuacuucuuucucuuc

SEQ ID NO: 1482612 - RNA, 19 nt, Homo sapiens
  misc_RNA (1)...(19): siRNA sense strand
cagcugccuucaucuguga

SEQ ID NO: 1482613 - RNA, 19 nt, Homo sapiens
  misc_RNA (1)...(19): siRNA sense strand
gcaccucggauauucuuug

SEQ ID NO: 1482614 - RNA, 19 nt, Homo sapiens
  misc_RNA (1)...(19): siRNA sense strand
gguauauccucugaaagug

SEQ ID NO: 1482615 - RNA, 19 nt, Homo sapiens
  misc_RNA (1)...(19): siRNA sense strand
gucugaggcucuggcauua

SEQ ID NO: 1482616 - RNA, 19 nt, Homo sapiens
  misc_RNA (1)...(19): siRNA sense strand
ccaccaaccuggacaagau

SEQ ID NO: 1482617 - RNA, 19 nt, Homo sapiens
  misc_RNA (1)...(19): siRNA sense strand
ucaagccgcugcucaacaa

SEQ ID NO: 1482618 - RNA, 19 nt, Homo sapiens
  misc_RNA (1)...(19): siRNA sense strand
gcaagaagcgcacguccau

SEQ ID NO: 1482619 - RNA, 19 nt, Homo sapiens
  misc_RNA (1)...(19): siRNA sense strand
gcucuacgguaacguguuc

SEQ ID NO: 1482620 - RNA, 19 nt, Homo sapiens
  misc_RNA (1)...(19): siRNA sense strand
cagcacagcgcaccacuug

SEQ ID NO: 1482621 - RNA, 19 nt, Homo sapiens
  misc_RNA (1)...(19): siRNA sense strand
cggacgaccuggagcaguu

SEQ ID NO: 1482622 - RNA, 19 nt, Homo sapiens
  misc_RNA (1)...(19): siRNA sense strand
gccugcagcuggagaagga

SEQ ID NO: 1482623 - RNA, 19 nt, Homo sapiens
  misc_RNA (1)...(19): siRNA sense strand
ugggcacgcucuacgguaa

SEQ ID NO: 1482624 - RNA, 19 nt, Homo sapiens
  misc_RNA (1)...(19): siRNA sense strand
gcaguucgccaagcaguuc

SEQ ID NO: 1482625 - RNA, 19 nt, Homo sapiens
  misc_RNA (1)...(19): siRNA sense strand
gcccauggacgauguauac

SEQ ID NO: 1482626 - RNA, 19 nt, Homo sapiens
  misc_RNA (1)...(19): siRNA sense strand
gaacaugugcaagcucaag

SEQ ID NO: 1482627 - RNA, 19 nt, Homo sapiens
  misc_RNA (1)...(19): siRNA sense strand
ucaagaacaugugcaagcu

SEQ ID NO: 1482628 - RNA, 19 nt, Homo sapiens
  misc_RNA (1)...(19): siRNA sense strand
gcgaagugcagaagcugau

SEQ ID NO: 1482629 - RNA, 19 nt, Homo sapiens
  misc_RNA (1)...(19): siRNA sense strand
cagaaggagaagcgcauga

SEQ ID NO: 1482630 - RNA, 19 nt, Homo sapiens
  misc_RNA (1)...(19): siRNA sense strand
gaucaucaaugcuguggua

SEQ ID NO: 1482631 - RNA, 19 nt, Homo sapiens
  misc_RNA (1)...(19): siRNA sense strand
caaucacugugcuuauuua

SEQ ID NO: 1482632 - RNA, 19 nt, Homo sapiens
  misc_RNA (1)...(19): siRNA sense strand
ccucugauguccugguuua

SEQ ID NO: 1482633 - RNA, 19 nt, Homo sapiens
  misc_RNA (1)...(19): siRNA sense strand
uaugugcuauggcuacuua

SEQ ID NO: 1482634 - RNA, 19 nt, Homo sapiens
  misc_RNA (1)...(19): siRNA sense strand
gcaaucacugugcuuauuu

SEQ ID NO: 1482635 - RNA, 19 nt, Homo sapiens
  misc_RNA (1)...(19): siRNA sense strand
gcaacugccuccuaauuuu

SEQ ID NO: 1482636 - RNA, 19 nt, Homo sapiens
  misc_RNA (1)...(19): siRNA sense strand
gaacugcuaccgauacauc

SEQ ID NO: 1482637 - RNA, 19 nt, Homo sapiens
  misc_RNA (1)...(19): siRNA sense strand
ggaggugacuuugaguuca

SEQ ID NO: 1482638 - RNA, 19 nt, Homo sapiens
  misc_RNA (1)...(19): siRNA sense strand
gaucaucccauucuucugu

SEQ ID NO: 1482639 - RNA, 19 nt, Homo sapiens
  misc_RNA (1)...(19): siRNA sense strand
gcauugccauugcgauuuc

SEQ ID NO: 1482640 - RNA, 19 nt, Homo sapiens
  misc_RNA (1)...(19): siRNA sense strand
uaccagaucuuugacuuug

SEQ ID NO: 1482641 - RNA, 19 nt, Homo sapiens
  misc_RNA (1)...(19): siRNA sense strand
ggacgcgguucuacuccaa

SEQ ID NO: 1482642 - RNA, 19 nt, Homo sapiens
  misc_RNA (1)...(19): siRNA sense strand
gaacauguugguugcaauc

SEQ ID NO: 1482643 - RNA, 19 nt, Homo sapiens
  misc_RNA (1)...(19): siRNA sense strand
caacaugugcauugccauu

SEQ ID NO: 1482644 - RNA, 19 nt, Homo sapiens
  misc_RNA (1)...(19): siRNA sense strand
gauguccugguuuauguua

SEQ ID NO: 1482645 - RNA, 19 nt, Homo sapiens
  misc_RNA (1)...(19): siRNA sense strand
cagugaauccuaccuguuu

SEQ ID NO: 1482646 - RNA, 19 nt, Homo sapiens
  misc_RNA (1)...(19): siRNA sense strand
ucaaugcugugguacuguu

SEQ ID NO: 1482647 - RNA, 19 nt, Homo sapiens
  misc_RNA (1)...(19): siRNA sense strand
gaacugggaggugacuuug

SEQ ID NO: 1482648 - RNA, 19 nt, Homo sapiens
  misc_RNA (1)...(19): siRNA sense strand
ucacugugcuuauuuaucc

SEQ ID NO: 1482649 - RNA, 19 nt, Homo sapiens
  misc_RNA (1)...(19): siRNA sense strand
cgauuucucuucucaugau

SEQ ID NO: 1482650 - RNA, 19 nt, Homo sapiens
  misc_RNA (1)...(19): siRNA sense strand
gcugugguacuguugauuu

SEQ ID NO: 1482651 - RNA, 19 nt, Homo sapiens
  misc_RNA (1)...(19): siRNA sense strand
caucaaugcugugguacug

SEQ ID NO: 1482652 - RNA, 19 nt, Homo sapiens
  misc_RNA (1)...(19): siRNA sense strand
guuaccagaucuuugacuu

SEQ ID NO: 1482653 - RNA, 19 nt, Homo sapiens
  misc_RNA (1)...(19): siRNA sense strand
gaggugacuuugaguucau

SEQ ID NO: 1482654 - RNA, 19 nt, Homo sapiens
  misc_RNA (1)...(19): siRNA sense strand
ugcaaucacugugcuuauu

SEQ ID NO: 1482655 - RNA, 19 nt, Homo sapiens
  misc_RNA (1)...(19): siRNA sense strand
uugauuagcuguguuugga

SEQ ID NO: 1482656 - RNA, 19 nt, Homo sapiens
  misc_RNA (1)...(19): siRNA sense strand
gaugucaugucagugaauc

SEQ ID NO: 1482657 - RNA, 19 nt, Homo sapiens
  misc_RNA (1)...(19): siRNA sense strand
ccuguuugguccuuauuau

SEQ ID NO: 1482658 - RNA, 19 nt, Homo sapiens
  misc_RNA (1)...(19): siRNA sense strand
ugaacugggaggugacuuu

SEQ ID NO: 1482659 - RNA, 19 nt, Homo sapiens
  misc_RNA (1)...(19): siRNA sense strand
ucaucccauucuucuguua

SEQ ID NO: 1482660 - RNA, 19 nt, Homo sapiens
  misc_RNA (1)...(19): siRNA sense strand
cugauguccugguuuaugu

SEQ ID NO: 1482661 - RNA, 19 nt, Homo sapiens
  misc_RNA (1)...(19): siRNA sense strand
ccauugcgauuucucuucu

SEQ ID NO: 1482662 - RNA, 19 nt, Homo sapiens
  misc_RNA (1)...(19): siRNA sense strand
gaugaugccacugugaaug

SEQ ID NO: 1482663 - RNA, 19 nt, Homo sapiens
  misc_RNA (1)...(19): siRNA sense strand
gugcauugccauugcgauu

SEQ ID NO: 1482664 - RNA, 19 nt, Homo sapiens
  misc_RNA (1)...(19): siRNA sense strand
gugcuuauuuauccaaacu

SEQ ID NO: 1482665 - RNA, 19 nt, Homo sapiens
  misc_RNA (1)...(19): siRNA sense strand
gggaggugacuuugaguuc

SEQ ID NO: 1482666 - RNA, 19 nt, Homo sapiens
  misc_RNA (1)...(19): siRNA sense strand
ugaauggugcugccaagga

SEQ ID NO: 1482667 - RNA, 19 nt, Homo sapiens
  misc_RNA (1)...(19): siRNA sense strand
ggucgacgcuccugaaaac

SEQ ID NO: 1482668 - RNA, 19 nt, Homo sapiens
  misc_RNA (1)...(19): siRNA sense strand
cuaccuguuugguccuuau

SEQ ID NO: 1482669 - RNA, 19 nt, Homo sapiens
  misc_RNA (1)...(19): siRNA sense strand
gcgauuucucuucucauga

SEQ ID NO: 1482670 - RNA, 19 nt, Homo sapiens
  misc_RNA (1)...(19): siRNA sense strand
ccggagcgaugaagauggu

SEQ ID NO: 1482671 - RNA, 19 nt, Homo sapiens
  misc_RNA (1)...(19): siRNA sense strand
guugcaaucacugugcuua

SEQ ID NO: 1482672 - RNA, 19 nt, Homo sapiens
  misc_RNA (1)...(19): siRNA sense strand
ugacuuugcccugaacaug

SEQ ID NO: 1482673 - RNA, 19 nt, Homo sapiens
  misc_RNA (1)...(19): siRNA sense strand
ugcgauuucucuucucaug

SEQ ID NO: 1482674 - RNA, 19 nt, Homo sapiens
  misc_RNA (1)...(19): siRNA sense strand
ugaacauguugguugcaau

SEQ ID NO: 1482675 - RNA, 19 nt, Homo sapiens
  misc_RNA (1)...(19): siRNA sense strand
gauaugugcuauggcuacu

SEQ ID NO: 1482676 - RNA, 19 nt, Homo sapiens
  misc_RNA (1)...(19): siRNA sense strand
uauguuaccagcaaugaca

SEQ ID NO: 1482677 - RNA, 19 nt, Homo sapiens
  misc_RNA (1)...(19): siRNA sense strand
cauguugguugcaaucacu

SEQ ID NO: 1482678 - RNA, 19 nt, Homo sapiens
  misc_RNA (1)...(19): siRNA sense strand
gacuuugcccugaacaugu

SEQ ID NO: 1482679 - RNA, 19 nt, Homo sapiens
  misc_RNA (1)...(19): siRNA sense strand
uuaccagaucuuugacuuu

SEQ ID NO: 1482680 - RNA, 19 nt, Homo sapiens
  misc_RNA (1)...(19): siRNA sense strand
uuacuugauuagcuguguu

SEQ ID NO: 1482681 - RNA, 19 nt, Homo sapiens
  misc_RNA (1)...(19): siRNA sense strand
acuuugcccugaacauguu

SEQ ID NO: 1482682 - RNA, 19 nt, Homo sapiens
  misc_RNA (1)...(19): siRNA sense strand
uguuugguccuuauuauuc

SEQ ID NO: 1482683 - RNA, 19 nt, Homo sapiens
  misc_RNA (1)...(19): siRNA sense strand
gaacaucacuagaauuaag

SEQ ID NO: 1482684 - RNA, 19 nt, Homo sapiens
  misc_RNA (1)...(19): siRNA sense strand
acaaggaccuccgucauua

SEQ ID NO: 1482685 - RNA, 19 nt, Homo sapiens
  misc_RNA (1)...(19): siRNA sense strand
gggcacugcugaacccuua

SEQ ID NO: 1482686 - RNA, 19 nt, Homo sapiens
  misc_RNA (1)...(19): siRNA sense strand
cggaacaucacuagaauua

SEQ ID NO: 1482687 - RNA, 19 nt, Homo sapiens
  misc_RNA (1)...(19): siRNA sense strand
gggcggaacaucacuagaa

SEQ ID NO: 1482688 - RNA, 19 nt, Homo sapiens
  misc_RNA (1)...(19): siRNA sense strand
ggaccuccgucauuacuac

SEQ ID NO: 1482689 - RNA, 19 nt, Homo sapiens
  misc_RNA (1)...(19): siRNA sense strand
uacggaaccuucugugaga

SEQ ID NO: 1482690 - RNA, 19 nt, Homo sapiens
  misc_RNA (1)...(19): siRNA sense strand
ggcggaacaucacuagaau

SEQ ID NO: 1482691 - RNA, 19 nt, Homo sapiens
  misc_RNA (1)...(19): siRNA sense strand
uggacgugcuggugccuua

SEQ ID NO: 1482692 - RNA, 19 nt, Homo sapiens
  misc_RNA (1)...(19): siRNA sense strand
gagaguggcgcguacaaca

SEQ ID NO: 1482693 - RNA, 19 nt, Homo sapiens
  misc_RNA (1)...(19): siRNA sense strand
ggaacaucacuagaauuaa

SEQ ID NO: 1482694 - RNA, 19 nt, Homo sapiens
  misc_RNA (1)...(19): siRNA sense strand
caaccucaacuucaagaug

SEQ ID NO: 1482695 - RNA, 19 nt, Homo sapiens
  misc_RNA (1)...(19): siRNA sense strand
gaacgacacacuggugauc

SEQ ID NO: 1482696 - RNA, 19 nt, Homo sapiens
  misc_RNA (1)...(19): siRNA sense strand
ugacggaggcuuugagagu

SEQ ID NO: 1482697 - RNA, 19 nt, Homo sapiens
  misc_RNA (1)...(19): siRNA sense strand
ggagaccguguacccguuu

SEQ ID NO: 1482698 - RNA, 19 nt, Homo sapiens
  misc_RNA (1)...(19): siRNA sense strand
uacaaggaccuccgucauu

SEQ ID NO: 1482699 - RNA, 19 nt, Homo sapiens
  misc_RNA (1)...(19): siRNA sense strand
gugcacaaccucaacuuca

SEQ ID NO: 1482700 - RNA, 19 nt, Homo sapiens
  misc_RNA (1)...(19): siRNA sense strand
ccucugggccaccgucuuu

SEQ ID NO: 1482701 - RNA, 19 nt, Homo sapiens
  misc_RNA (1)...(19): siRNA sense strand
gagagcggcaugggucgua

SEQ ID NO: 1482702 - RNA, 19 nt, Homo sapiens
  misc_RNA (1)...(19): siRNA sense strand
gaugacggaggcuuugaga

SEQ ID NO: 1482703 - RNA, 19 nt, Homo sapiens
  misc_RNA (1)...(19): siRNA sense strand
guacaaggaccuccgucau

SEQ ID NO: 1482704 - RNA, 19 nt, Homo sapiens
  misc_RNA (1)...(19): siRNA sense strand
gcacaaccucaacuucaag

SEQ ID NO: 1482705 - RNA, 19 nt, Homo sapiens
  misc_RNA (1)...(19): siRNA sense strand
ccgcauggaccaaggaguu

SEQ ID NO: 1482706 - RNA, 19 nt, Homo sapiens
  misc_RNA (1)...(19): siRNA sense strand
uugcucagcuucuggagau

SEQ ID NO: 1482707 - RNA, 19 nt, Homo sapiens
  misc_RNA (1)...(19): siRNA sense strand
ggacgugcaccacuucaac

SEQ ID NO: 1482708 - RNA, 19 nt, Homo sapiens
  misc_RNA (1)...(19): siRNA sense strand
ugcacaaccucaacuucaa

SEQ ID NO: 1482709 - RNA, 19 nt, Homo sapiens
  misc_RNA (1)...(19): siRNA sense strand
cguguacccguuugacuuu

SEQ ID NO: 1482710 - RNA, 19 nt, Homo sapiens
  misc_RNA (1)...(19): siRNA sense strand
gcgcuuugcucagcuucug

SEQ ID NO: 1482711 - RNA, 19 nt, Homo sapiens
  misc_RNA (1)...(19): siRNA sense strand
gagaccguguacccguuug

SEQ ID NO: 1482712 - RNA, 19 nt, Homo sapiens
  misc_RNA (1)...(19): siRNA sense strand
gaucuucacguccgacaac

SEQ ID NO: 1482713 - RNA, 19 nt, Homo sapiens
  misc_RNA (1)...(19): siRNA sense strand
gcggaacaucacuagaauu

SEQ ID NO: 1482714 - RNA, 19 nt, Homo sapiens
  misc_RNA (1)...(19): siRNA sense strand
caacuucaagaugcccuuu

SEQ ID NO: 1482715 - RNA, 19 nt, Homo sapiens
  misc_RNA (1)...(19): siRNA sense strand
ugacgccgguguccugaac

SEQ ID NO: 1482716 - RNA, 19 nt, Homo sapiens
  misc_RNA (1)...(19): siRNA sense strand
ccaucgaccaggacuucua

SEQ ID NO: 1482717 - RNA, 19 nt, Homo sapiens
  misc_RNA (1)...(19): siRNA sense strand
ggaugaccggccuuucuuc

SEQ ID NO: 1482718 - RNA, 19 nt, Homo sapiens
  misc_RNA (1)...(19): siRNA sense strand
gagaauagaguacauugaa

SEQ ID NO: 1482719 - RNA, 19 nt, Homo sapiens
  misc_RNA (1)...(19): siRNA sense strand
gaaauugacagcccuugaa

SEQ ID NO: 1482720 - RNA, 19 nt, Homo sapiens
  misc_RNA (1)...(19): siRNA sense strand
gggaguacauugagauaau

SEQ ID NO: 1482721 - RNA, 19 nt, Homo sapiens
  misc_RNA (1)...(19): siRNA sense strand
cgauaugucuugucguuca

SEQ ID NO: 1482722 - RNA, 19 nt, Homo sapiens
  misc_RNA (1)...(19): siRNA sense strand
uuucucaacucguucgaua

SEQ ID NO: 1482723 - RNA, 19 nt, Homo sapiens
  misc_RNA (1)...(19): siRNA sense strand
ggaguacauugagauaauc

SEQ ID NO: 1482724 - RNA, 19 nt, Homo sapiens
  misc_RNA (1)...(19): siRNA sense strand
gaacggagaauagaguaca

SEQ ID NO: 1482725 - RNA, 19 nt, Homo sapiens
  misc_RNA (1)...(19): siRNA sense strand
ggagaauagaguacauuga

SEQ ID NO: 1482726 - RNA, 19 nt, Homo sapiens
  misc_RNA (1)...(19): siRNA sense strand
caacacuaaacgagaaauu

SEQ ID NO: 1482727 - RNA, 19 nt, Homo sapiens
  misc_RNA (1)...(19): siRNA sense strand
acacuaaacgagaaauuga

SEQ ID NO: 1482728 - RNA, 19 nt, Homo sapiens
  misc_RNA (1)...(19): siRNA sense strand
gauaugucuugucguucaa

SEQ ID NO: 1482729 - RNA, 19 nt, Homo sapiens
  misc_RNA (1)...(19): siRNA sense strand
cagacuuucucaacucguu

SEQ ID NO: 1482730 - RNA, 19 nt, Homo sapiens
  misc_RNA (1)...(19): siRNA sense strand
uugcaacacuaaacgagaa

SEQ ID NO: 1482731 - RNA, 19 nt, Homo sapiens
  misc_RNA (1)...(19): siRNA sense strand
caagaaaaucgcagacuuu

SEQ ID NO: 1482732 - RNA, 19 nt, Homo sapiens
  misc_RNA (1)...(19): siRNA sense strand
cauugaagcucgggugaca

SEQ ID NO: 1482733 - RNA, 19 nt, Homo sapiens
  misc_RNA (1)...(19): siRNA sense strand
agaauagaguacauugaag

SEQ ID NO: 1482734 - RNA, 19 nt, Homo sapiens
  misc_RNA (1)...(19): siRNA sense strand
gggcuaaccgggaguacau

SEQ ID NO: 1482735 - RNA, 19 nt, Homo sapiens
  misc_RNA (1)...(19): siRNA sense strand
ucaagaaaaucgcagacuu

SEQ ID NO: 1482736 - RNA, 19 nt, Homo sapiens
  misc_RNA (1)...(19): siRNA sense strand
ucaacucguucgauauguc

SEQ ID NO: 1482737 - RNA, 19 nt, Homo sapiens
  misc_RNA (1)...(19): siRNA sense strand
gcuaaccgggaguacauug

SEQ ID NO: 1482738 - RNA, 19 nt, Homo sapiens
  misc_RNA (1)...(19): siRNA sense strand
ucgcagacuuucucaacuc

SEQ ID NO: 1482739 - RNA, 19 nt, Homo sapiens
  misc_RNA (1)...(19): siRNA sense strand
uucgauaugucuugucguu

SEQ ID NO: 1482740 - RNA, 19 nt, Homo sapiens
  misc_RNA (1)...(19): siRNA sense strand
ucucaacucguucgauaug

SEQ ID NO: 1482741 - RNA, 19 nt, Homo sapiens
  misc_RNA (1)...(19): siRNA sense strand
gcccuugaacggagaauag

SEQ ID NO: 1482742 - RNA, 19 nt, Homo sapiens
  misc_RNA (1)...(19): siRNA sense strand
agaaauugacagcccuuga

SEQ ID NO: 1482743 - RNA, 19 nt, Homo sapiens
  misc_RNA (1)...(19): siRNA sense strand
caccagcagcaucaagaaa

SEQ ID NO: 1482744 - RNA, 19 nt, Homo sapiens
  misc_RNA (1)...(19): siRNA sense strand
cggagaauagaguacauug

SEQ ID NO: 1482745 - RNA, 19 nt, Homo sapiens
  misc_RNA (1)...(19): siRNA sense strand
gaacaucaguuucugugaa

SEQ ID NO: 1482746 - RNA, 19 nt, Homo sapiens
  misc_RNA (1)...(19): siRNA sense strand
gaaccagugugucaucauu

SEQ ID NO: 1482747 - RNA, 19 nt, Homo sapiens
  misc_RNA (1)...(19): siRNA sense strand
gaaacuacguggagaagau

SEQ ID NO: 1482748 - RNA, 19 nt, Homo sapiens
  misc_RNA (1)...(19): siRNA sense strand
ccaaauuccugcagaggua

SEQ ID NO: 1482749 - RNA, 19 nt, Homo sapiens
  misc_RNA (1)...(19): siRNA sense strand
gaacaugcuuaucgacugu

SEQ ID NO: 1482750 - RNA, 19 nt, Homo sapiens
  misc_RNA (1)...(19): siRNA sense strand
gcaaaucuuuaucgaacuu

SEQ ID NO: 1482751 - RNA, 19 nt, Homo sapiens
  misc_RNA (1)...(19): siRNA sense strand
gcaccaaggucuuugucaa

SEQ ID NO: 1482752 - RNA, 19 nt, Homo sapiens
  misc_RNA (1)...(19): siRNA sense strand
gcuccaagaucaagaaaca

SEQ ID NO: 1482753 - RNA, 19 nt, Homo sapiens
  misc_RNA (1)...(19): siRNA sense strand
ugacaccggacuacuauua

SEQ ID NO: 1482754 - RNA, 19 nt, Homo sapiens
  misc_RNA (1)...(19): siRNA sense strand
gcaucaacuucgucaauga

SEQ ID NO: 1482755 - RNA, 19 nt, Homo sapiens
  misc_RNA (1)...(19): siRNA sense strand
ggacuccaauccaguacuu

SEQ ID NO: 1482756 - RNA, 19 nt, Homo sapiens
  misc_RNA (1)...(19): siRNA sense strand
acaacaaggucgucuguga

SEQ ID NO: 1482757 - RNA, 19 nt, Homo sapiens
  misc_RNA (1)...(19): siRNA sense strand
ucaagcagaugcccuacuu

SEQ ID NO: 1482758 - RNA, 19 nt, Homo sapiens
  misc_RNA (1)...(19): siRNA sense strand
gaagcuggauggagacaag

SEQ ID NO: 1482759 - RNA, 19 nt, Homo sapiens
  misc_RNA (1)...(19): siRNA sense strand
gcucugugcucaucucugu

SEQ ID NO: 1482760 - RNA, 19 nt, Homo sapiens
  misc_RNA (1)...(19): siRNA sense strand
ucggugugcuggacauuua

SEQ ID NO: 1482761 - RNA, 19 nt, Homo sapiens
  misc_RNA (1)...(19): siRNA sense strand
gcaaguacuuugagaucca

SEQ ID NO: 1482762 - RNA, 19 nt, Homo sapiens
  misc_RNA (1)...(19): siRNA sense strand
ggcaagaucuccaacuucu

SEQ ID NO: 1482763 - RNA, 19 nt, Homo sapiens
  misc_RNA (1)...(19): siRNA sense strand
ccaggugugugaagucuug

SEQ ID NO: 1482764 - RNA, 19 nt, Homo sapiens
  misc_RNA (1)...(19): siRNA sense strand
ugaacgaggucauugagau

SEQ ID NO: 1482765 - RNA, 19 nt, Homo sapiens
  misc_RNA (1)...(19): siRNA sense strand
gaagcugcagcaaaucuuu

SEQ ID NO: 1482766 - RNA, 19 nt, Homo sapiens
  misc_RNA (1)...(19): siRNA sense strand
caacaauuccagccgcuuu

SEQ ID NO: 1482767 - RNA, 19 nt, Homo sapiens
  misc_RNA (1)...(19): siRNA sense strand
gaagguccagcacgucaaa

SEQ ID NO: 1482768 - RNA, 19 nt, Homo sapiens
  misc_RNA (1)...(19): siRNA sense strand
ggaggaguaugugcaggaa

SEQ ID NO: 1482769 - RNA, 19 nt, Homo sapiens
  misc_RNA (1)...(19): siRNA sense strand
gaagaagggaccugagaag

SEQ ID NO: 1482770 - RNA, 19 nt, Homo sapiens
  misc_RNA (1)...(19): siRNA sense strand
ccucagagcacaacacaga

SEQ ID NO: 1482771 - RNA, 19 nt, Homo sapiens
  misc_RNA (1)...(19): siRNA sense strand
gaguggagcugggaagaca

SEQ ID NO: 1482772 - RNA, 19 nt, Homo sapiens
  misc_RNA (1)...(19): siRNA sense strand
ccaacauccugcugaacaa

SEQ ID NO: 1482773 - RNA, 19 nt, Homo sapiens
  misc_RNA (1)...(19): siRNA sense strand
gcuucgagaucuuccagaa

SEQ ID NO: 1482774 - RNA, 19 nt, Homo sapiens
  misc_RNA (1)...(19): siRNA sense strand
caaccgugcuaugcagaaa

SEQ ID NO: 1482775 - RNA, 19 nt, Homo sapiens
  misc_RNA (1)...(19): siRNA sense strand
gaaccugggccucaugaca

SEQ ID NO: 1482776 - RNA, 19 nt, Homo sapiens
  misc_RNA (1)...(19): siRNA sense strand
gagaaccagugugucauca

SEQ ID NO: 1482777 - RNA, 19 nt, Homo sapiens
  misc_RNA (1)...(19): siRNA sense strand
gcagcgaguccaucaaugu

SEQ ID NO: 1482778 - RNA, 19 nt, Homo sapiens
  misc_RNA (1)...(19): siRNA sense strand
gaacuuccacaucuacuac

SEQ ID NO: 1482779 - RNA, 19 nt, Homo sapiens
  misc_RNA (1)...(19): siRNA sense strand
gaacgaggucauugagauc

SEQ ID NO: 1482780 - RNA, 19 nt, Homo sapiens
  misc_RNA (1)...(19): siRNA sense strand
augagaagcugcagcaaau

SEQ ID NO: 1482781 - RNA, 19 nt, Homo sapiens
  misc_RNA (1)...(19): siRNA sense strand
ggacgacagaagcgacuuu

SEQ ID NO: 1482782 - RNA, 19 nt, Homo sapiens
  misc_RNA (1)...(19): siRNA sense strand
gcagcaaaucuuuaucgaa

SEQ ID NO: 1482783 - RNA, 19 nt, Homo sapiens
  misc_RNA (1)...(19): siRNA sense strand
cagcgacacacuacaguuu

SEQ ID NO: 1482784 - RNA, 19 nt, Homo sapiens
  misc_RNA (1)...(19): siRNA sense strand
ccaaguguguguaugugau

SEQ ID NO: 1482785 - RNA, 19 nt, Homo sapiens
  misc_RNA (1)...(19): siRNA sense strand
caacaacaaggucgucugu

SEQ ID NO: 1482786 - RNA, 19 nt, Homo sapiens
  misc_RNA (1)...(19): siRNA sense strand
gacaacauguaccggaaca

SEQ ID NO: 1482787 - RNA, 19 nt, Homo sapiens
  misc_RNA (1)...(19): siRNA sense strand
acauggagcccgaccagua

SEQ ID NO: 1482788 - RNA, 19 nt, Homo sapiens
  misc_RNA (1)...(19): siRNA sense strand
cuacauccgcugcaucaaa

SEQ ID NO: 1482789 - RNA, 19 nt, Homo sapiens
  misc_RNA (1)...(19): siRNA sense strand
guccagcacgucaaagaua

SEQ ID NO: 1482790 - RNA, 19 nt, Homo sapiens
  misc_RNA (1)...(19): siRNA sense strand
gacuacaucuucaccuaca

SEQ ID NO: 1482791 - RNA, 19 nt, Homo sapiens
  misc_RNA (1)...(19): siRNA sense strand
cagcaucaaucggaacuuc

SEQ ID NO: 1482792 - RNA, 19 nt, Homo sapiens
  misc_RNA (1)...(19): siRNA sense strand
ucucuucuccgaccucaua

SEQ ID NO: 1482793 - RNA, 19 nt, Homo sapiens
  misc_RNA (1)...(19): siRNA sense strand
ugagugcuaugcagguuau

SEQ ID NO: 1482794 - RNA, 19 nt, Homo sapiens
  misc_RNA (1)...(19): siRNA sense strand
gcacgucaaagauaucauc

SEQ ID NO: 1482795 - RNA, 19 nt, Homo sapiens
  misc_RNA (1)...(19): siRNA sense strand
caacacagaauuccucaac

SEQ ID NO: 1482796 - RNA, 19 nt, Homo sapiens
  misc_RNA (1)...(19): siRNA sense strand
ccaagacugugcgcaacaa

SEQ ID NO: 1482797 - RNA, 19 nt, Homo sapiens
  misc_RNA (1)...(19): siRNA sense strand
acacagaauuccucaacgu

SEQ ID NO: 1482798 - RNA, 19 nt, Homo sapiens
  misc_RNA (1)...(19): siRNA sense strand
gaucaccgaagacgccauu

SEQ ID NO: 1482799 - RNA, 19 nt, Homo sapiens
  misc_RNA (1)...(19): siRNA sense strand
caacgugaacgaggucauu

SEQ ID NO: 1482800 - RNA, 19 nt, Homo sapiens
  misc_RNA (1)...(19): siRNA sense strand
guacgugggccaagaugug

SEQ ID NO: 1482801 - RNA, 19 nt, Homo sapiens
  misc_RNA (1)...(19): siRNA sense strand
uggaauaccugggccugaa

SEQ ID NO: 1482802 - RNA, 19 nt, Homo sapiens
  misc_RNA (1)...(19): siRNA sense strand
caucauuaguggagagagu

SEQ ID NO: 1482803 - RNA, 19 nt, Homo sapiens
  misc_RNA (1)...(19): siRNA sense strand
cgacagaagcgacuuuggu

SEQ ID NO: 1482804 - RNA, 19 nt, Homo sapiens
  misc_RNA (1)...(19): siRNA sense strand
gaugacauggugcuucuuc

SEQ ID NO: 1482805 - RNA, 19 nt, Homo sapiens
  misc_RNA (1)...(19): siRNA sense strand
gagaagcugcagcaaaucu

SEQ ID NO: 1482806 - RNA, 19 nt, Homo sapiens
  misc_RNA (1)...(19): siRNA sense strand
ucaacuucgucaaugagaa

SEQ ID NO: 1482807 - RNA, 19 nt, Homo sapiens
  misc_RNA (1)...(19): siRNA sense strand
ucaugacaccggacuacua

SEQ ID NO: 1482808 - RNA, 19 nt, Homo sapiens
  misc_RNA (1)...(19): siRNA sense strand
gaagaagaaaguggacauc

SEQ ID NO: 1482809 - RNA, 19 nt, Homo sapiens
  misc_RNA (1)...(19): siRNA sense strand
gcgcagcgaguccaucaau

SEQ ID NO: 1482810 - RNA, 19 nt, Homo sapiens
  misc_RNA (1)...(19): siRNA sense strand
ggaacaucaguuucuguga

SEQ ID NO: 1482811 - RNA, 19 nt, Homo sapiens
  misc_RNA (1)...(19): siRNA sense strand
caugacaccggacuacuau

SEQ ID NO: 1482812 - RNA, 19 nt, Homo sapiens
  misc_RNA (1)...(19): siRNA sense strand
acgacuacaucuucaccua

SEQ ID NO: 1482813 - RNA, 19 nt, Homo sapiens
  misc_RNA (1)...(19): siRNA sense strand
ugaagaagggaccugagaa

SEQ ID NO: 1482814 - RNA, 19 nt, Homo sapiens
  misc_RNA (1)...(19): siRNA sense strand
agaagcgacuuuggugaga

SEQ ID NO: 1482815 - RNA, 19 nt, Homo sapiens
  misc_RNA (1)...(19): siRNA sense strand
gugaagaagggaccugaga

SEQ ID NO: 1482816 - RNA, 19 nt, Homo sapiens
  misc_RNA (1)...(19): siRNA sense strand
ggcgagagaaagugaagaa

SEQ ID NO: 1482817 - RNA, 19 nt, Homo sapiens
  misc_RNA (1)...(19): siRNA sense strand
gccgccaguucgccaaauu

SEQ ID NO: 1482818 - RNA, 19 nt, Homo sapiens
  misc_RNA (1)...(19): siRNA sense strand
cgagaggaaccgagacguu

SEQ ID NO: 1482819 - RNA, 19 nt, Homo sapiens
  misc_RNA (1)...(19): siRNA sense strand
ccaauccaguacuucaaca

SEQ ID NO: 1482820 - RNA, 19 nt, Homo sapiens
  misc_RNA (1)...(19): siRNA sense strand
uuaucgaacuuacccugaa

SEQ ID NO: 1482821 - RNA, 19 nt, Homo sapiens
  misc_RNA (1)...(19): siRNA sense strand
gggcaagaucuccaacuuc

SEQ ID NO: 1482822 - RNA, 19 nt, Homo sapiens
  misc_RNA (1)...(19): siRNA sense strand
caucggcucugugcucauc

SEQ ID NO: 1482823 - RNA, 19 nt, Homo sapiens
  misc_RNA (1)...(19): siRNA sense strand
ucaagaaacaagccaacga

SEQ ID NO: 1482824 - RNA, 19 nt, Homo sapiens
  misc_RNA (1)...(19): siRNA sense strand
caaguguguguaugugauu

SEQ ID NO: 1482825 - RNA, 19 nt, Homo sapiens
  misc_RNA (1)...(19): siRNA sense strand
ucaccuacaucggcucugu

SEQ ID NO: 1482826 - RNA, 19 nt, Homo sapiens
  misc_RNA (1)...(19): siRNA sense strand
cauggacgacuacaucuuc

SEQ ID NO: 1482827 - RNA, 19 nt, Homo sapiens
  misc_RNA (1)...(19): siRNA sense strand
ggaaacuacguggagaaga

SEQ ID NO: 1482828 - RNA, 19 nt, Homo sapiens
  misc_RNA (1)...(19): siRNA sense strand
gcacgcgacaggacgacuu

SEQ ID NO: 1482829 - RNA, 19 nt, Homo sapiens
  misc_RNA (1)...(19): siRNA sense strand
agaagggccagguguguga

SEQ ID NO: 1482830 - RNA, 19 nt, Homo sapiens
  misc_RNA (1)...(19): siRNA sense strand
uccaguacuucaacaacaa

SEQ ID NO: 1482831 - RNA, 19 nt, Homo sapiens
  misc_RNA (1)...(19): siRNA sense strand
aaugagaagcugcagcaaa

SEQ ID NO: 1482832 - RNA, 19 nt, Homo sapiens
  misc_RNA (1)...(19): siRNA sense strand
uccagcacgucaaagauau

SEQ ID NO: 1482833 - RNA, 19 nt, Homo sapiens
  misc_RNA (1)...(19): siRNA sense strand
cagagcacaacacagaauu

SEQ ID NO: 1482834 - RNA, 19 nt, Homo sapiens
  misc_RNA (1)...(19): siRNA sense strand
cgacaggacgacuucuuca

SEQ ID NO: 1482835 - RNA, 19 nt, Homo sapiens
  misc_RNA (1)...(19): siRNA sense strand
gcgacaggacgacuucuuc

SEQ ID NO: 1482836 - RNA, 19 nt, Homo sapiens
  misc_RNA (1)...(19): siRNA sense strand
gcccaaguguguguaugug

SEQ ID NO: 1482837 - RNA, 19 nt, Homo sapiens
  misc_RNA (1)...(19): siRNA sense strand
ggguggacuucgccgauuc

SEQ ID NO: 1482838 - RNA, 19 nt, Homo sapiens
  misc_RNA (1)...(19): siRNA sense strand
cugcagagguaugccauuc

SEQ ID NO: 1482839 - RNA, 19 nt, Homo sapiens
  misc_RNA (1)...(19): siRNA sense strand
aagcugcagcaaaucuuua

SEQ ID NO: 1482840 - RNA, 19 nt, Homo sapiens
  misc_RNA (1)...(19): siRNA sense strand
gcagaaccugggccucaug

SEQ ID NO: 1482841 - RNA, 19 nt, Homo sapiens
  misc_RNA (1)...(19): siRNA sense strand
gauccugacgcccaagugu

SEQ ID NO: 1482842 - RNA, 19 nt, Homo sapiens
  misc_RNA (1)...(19): siRNA sense strand
gcagagccacaacgugaag

SEQ ID NO: 1482843 - RNA, 19 nt, Homo sapiens
  misc_RNA (1)...(19): siRNA sense strand
ccaucaaugugacccucaa

SEQ ID NO: 1482844 - RNA, 19 nt, Homo sapiens
  misc_RNA (1)...(19): siRNA sense strand
gagcggcguggaugacaug

SEQ ID NO: 1482845 - RNA, 19 nt, Homo sapiens
  misc_RNA (1)...(19): siRNA sense strand
ccaccaagcugcagaacaa

SEQ ID NO: 1482846 - RNA, 19 nt, Homo sapiens
  misc_RNA (1)...(19): siRNA sense strand
ggccagggcuccaucauug

SEQ ID NO: 1482847 - RNA, 19 nt, Homo sapiens
  misc_RNA (1)...(19): siRNA sense strand
ggucugggaugacuuaaau

SEQ ID NO: 1482848 - RNA, 19 nt, Homo sapiens
  misc_RNA (1)...(19): siRNA sense strand
gagaggaagacgaguauuu

SEQ ID NO: 1482849 - RNA, 19 nt, Homo sapiens
  misc_RNA (1)...(19): siRNA sense strand
gcacggcacacucaccuuu

SEQ ID NO: 1482850 - RNA, 19 nt, Homo sapiens
  misc_RNA (1)...(19): siRNA sense strand
gaacaggaaguguauaggu

SEQ ID NO: 1482851 - RNA, 19 nt, Homo sapiens
  misc_RNA (1)...(19): siRNA sense strand
gagcgaggccuccuucugu

SEQ ID NO: 1482852 - RNA, 19 nt, Homo sapiens
  misc_RNA (1)...(19): siRNA sense strand
gaugaccucucccgucuac

SEQ ID NO: 1482853 - RNA, 19 nt, Homo sapiens
  misc_RNA (1)...(19): siRNA sense strand
acaaauaccgccacacguu

SEQ ID NO: 1482854 - RNA, 19 nt, Homo sapiens
  misc_RNA (1)...(19): siRNA sense strand
auguggaccuggacaaaua

SEQ ID NO: 1482855 - RNA, 19 nt, Homo sapiens
  misc_RNA (1)...(19): siRNA sense strand
cgacaagaccagcuucuca

SEQ ID NO: 1482856 - RNA, 19 nt, Homo sapiens
  misc_RNA (1)...(19): siRNA sense strand
ucaagaacaggaaguguau

SEQ ID NO: 1482857 - RNA, 19 nt, Homo sapiens
  misc_RNA (1)...(19): siRNA sense strand
gcggagaggaagacgagua

SEQ ID NO: 1482858 - RNA, 19 nt, Homo sapiens
  misc_RNA (1)...(19): siRNA sense strand
ccacuucccuccaguaccu

SEQ ID NO: 1482859 - RNA, 19 nt, Homo sapiens
  misc_RNA (1)...(19): siRNA sense strand
ucugggaugacuuaaauaa

SEQ ID NO: 1482860 - RNA, 19 nt, Homo sapiens
  misc_RNA (1)...(19): siRNA sense strand
ggauguggaccuggacaaa

SEQ ID NO: 1482861 - RNA, 19 nt, Homo sapiens
  misc_RNA (1)...(19): siRNA sense strand
cuacggcaccgacaugaug

SEQ ID NO: 1482862 - RNA, 19 nt, Homo sapiens
  misc_RNA (1)...(19): siRNA sense strand
cuagcaggcuccacuaacu

SEQ ID NO: 1482863 - RNA, 19 nt, Homo sapiens
  misc_RNA (1)...(19): siRNA sense strand
uaaggucagcuuccacaug

SEQ ID NO: 1482864 - RNA, 19 nt, Homo sapiens
  misc_RNA (1)...(19): siRNA sense strand
ccacccugcugagcuguga

SEQ ID NO: 1482865 - RNA, 19 nt, Homo sapiens
  misc_RNA (1)...(19): siRNA sense strand
caagaacaggaaguguaua

SEQ ID NO: 1482866 - RNA, 19 nt, Homo sapiens
  misc_RNA (1)...(19): siRNA sense strand
gacaagaccagcuucucau

SEQ ID NO: 1482867 - RNA, 19 nt, Homo sapiens
  misc_RNA (1)...(19): siRNA sense strand
gauguggaccuggacaaau

SEQ ID NO: 1482868 - RNA, 19 nt, Homo sapiens
  misc_RNA (1)...(19): siRNA sense strand
cagcacuucugggagauca

SEQ ID NO: 1482869 - RNA, 19 nt, Homo sapiens
  misc_RNA (1)...(19): siRNA sense strand
agcgaggccuccuucugua

SEQ ID NO: 1482870 - RNA, 19 nt, Homo sapiens
  misc_RNA (1)...(19): siRNA sense strand
gcucuagcaggcuccacua

SEQ ID NO: 1482871 - RNA, 19 nt, Homo sapiens
  misc_RNA (1)...(19): siRNA sense strand
agaggaagacgaguauuuc

SEQ ID NO: 1482872 - RNA, 19 nt, Homo sapiens
  misc_RNA (1)...(19): siRNA sense strand
uucaagaacaggaagugua

SEQ ID NO: 1482873 - RNA, 19 nt, Homo sapiens
  misc_RNA (1)...(19): siRNA sense strand
gaccggcgaguccuucugu

SEQ ID NO: 1482874 - RNA, 19 nt, Homo sapiens
  misc_RNA (1)...(19): siRNA sense strand
aagaacaggaaguguauag

SEQ ID NO: 1482875 - RNA, 19 nt, Homo sapiens
  misc_RNA (1)...(19): siRNA sense strand
ggaaugaaacugaaacaua

SEQ ID NO: 1482876 - RNA, 19 nt, Homo sapiens
  misc_RNA (1)...(19): siRNA sense strand
gaaauguucucaggaauga

SEQ ID NO: 1482877 - RNA, 19 nt, Homo sapiens
  misc_RNA (1)...(19): siRNA sense strand
gaaugaaacugaaacauac

SEQ ID NO: 1482878 - RNA, 19 nt, Homo sapiens
  misc_RNA (1)...(19): siRNA sense strand
gcaaucaggauguaaagua

SEQ ID NO: 1482879 - RNA, 19 nt, Homo sapiens
  misc_RNA (1)...(19): siRNA sense strand
gaauguaccucagcuguug

SEQ ID NO: 1482880 - RNA, 19 nt, Homo sapiens
  misc_RNA (1)...(19): siRNA sense strand
gaaacaucgugacuuugua

SEQ ID NO: 1482881 - RNA, 19 nt, Homo sapiens
  misc_RNA (1)...(19): siRNA sense strand
acagaaacaucgugacuuu

SEQ ID NO: 1482882 - RNA, 19 nt, Homo sapiens
  misc_RNA (1)...(19): siRNA sense strand
gaucacauauuugccagua

SEQ ID NO: 1482883 - RNA, 19 nt, Homo sapiens
  misc_RNA (1)...(19): siRNA sense strand
ugaaugugcuggaugauga

SEQ ID NO: 1482884 - RNA, 19 nt, Homo sapiens
  misc_RNA (1)...(19): siRNA sense strand
ucacauauuugccaguaaa

SEQ ID NO: 1482885 - RNA, 19 nt, Homo sapiens
  misc_RNA (1)...(19): siRNA sense strand
gcagagugauacagaaugu

SEQ ID NO: 1482886 - RNA, 19 nt, Homo sapiens
  misc_RNA (1)...(19): siRNA sense strand
caaaccacguaacauauug

SEQ ID NO: 1482887 - RNA, 19 nt, Homo sapiens
  misc_RNA (1)...(19): siRNA sense strand
gauccaagcagaagaauuc

SEQ ID NO: 1482888 - RNA, 19 nt, Homo sapiens
  misc_RNA (1)...(19): siRNA sense strand
gaaugaagaggaauaugaa

SEQ ID NO: 1482889 - RNA, 19 nt, Homo sapiens
  misc_RNA (1)...(19): siRNA sense strand
gaagaauuccugcugaaau

SEQ ID NO: 1482890 - RNA, 19 nt, Homo sapiens
  misc_RNA (1)...(19): siRNA sense strand
gugcagagaaugaauguuu

SEQ ID NO: 1482891 - RNA, 19 nt, Homo sapiens
  misc_RNA (1)...(19): siRNA sense strand
ccucaaaccacguaacaua

SEQ ID NO: 1482892 - RNA, 19 nt, Homo sapiens
  misc_RNA (1)...(19): siRNA sense strand
guaaagcaguggugaaugc

SEQ ID NO: 1482893 - RNA, 19 nt, Homo sapiens
  misc_RNA (1)...(19): siRNA sense strand
caaucaggauguaaaguau

SEQ ID NO: 1482894 - RNA, 19 nt, Homo sapiens
  misc_RNA (1)...(19): siRNA sense strand
ggaaauguucucaggaaug

SEQ ID NO: 1482895 - RNA, 19 nt, Homo sapiens
  misc_RNA (1)...(19): siRNA sense strand
gacuuuguauggaguguuu

SEQ ID NO: 1482896 - RNA, 19 nt, Homo sapiens
  misc_RNA (1)...(19): siRNA sense strand
gaugaugauuaucuugaga

SEQ ID NO: 1482897 - RNA, 19 nt, Homo sapiens
  misc_RNA (1)...(19): siRNA sense strand
aagaauuccugcugaaaug

SEQ ID NO: 1482898 - RNA, 19 nt, Homo sapiens
  misc_RNA (1)...(19): siRNA sense strand
cagaagaauuccugcugaa

SEQ ID NO: 1482899 - RNA, 19 nt, Homo sapiens
  misc_RNA (1)...(19): siRNA sense strand
agaaugaagaggaauauga

SEQ ID NO: 1482900 - RNA, 19 nt, Homo sapiens
  misc_RNA (1)...(19): siRNA sense strand
caaagaaggcaaucaggau

SEQ ID NO: 1482901 - RNA, 19 nt, Homo sapiens
  misc_RNA (1)...(19): siRNA sense strand
gaauggaaggcaaacaguu

SEQ ID NO: 1482902 - RNA, 19 nt, Homo sapiens
  misc_RNA (1)...(19): siRNA sense strand
uuucggaauugcucuuaua

SEQ ID NO: 1482903 - RNA, 19 nt, Homo sapiens
  misc_RNA (1)...(19): siRNA sense strand
cgaguaugguuuccgcaaa

SEQ ID NO: 1482904 - RNA, 19 nt, Homo sapiens
  misc_RNA (1)...(19): siRNA sense strand
ucaaaccacguaacauauu

SEQ ID NO: 1482905 - RNA, 19 nt, Homo sapiens
  misc_RNA (1)...(19): siRNA sense strand
cucauugacuuuggacuua

SEQ ID NO: 1482906 - RNA, 19 nt, Homo sapiens
  misc_RNA (1)...(19): siRNA sense strand
gaugauccaagcagaagaa

SEQ ID NO: 1482907 - RNA, 19 nt, Homo sapiens
  misc_RNA (1)...(19): siRNA sense strand
agaaggcaaucaggaugua

SEQ ID NO: 1482908 - RNA, 19 nt, Homo sapiens
  misc_RNA (1)...(19): siRNA sense strand
gugcuaagacugcugaaug

SEQ ID NO: 1482909 - RNA, 19 nt, Homo sapiens
  misc_RNA (1)...(19): siRNA sense strand
ggaaucauuuuacuggaaa

SEQ ID NO: 1482910 - RNA, 19 nt, Homo sapiens
  misc_RNA (1)...(19): siRNA sense strand
uaaacucauugacuuugga

SEQ ID NO: 1482911 - RNA, 19 nt, Homo sapiens
  misc_RNA (1)...(19): siRNA sense strand
gaguaugguuuccgcaaag

SEQ ID NO: 1482912 - RNA, 19 nt, Homo sapiens
  misc_RNA (1)...(19): siRNA sense strand
cuggaaauguucucaggaa

SEQ ID NO: 1482913 - RNA, 19 nt, Homo sapiens
  misc_RNA (1)...(19): siRNA sense strand
caucgugacuuuguaugga

SEQ ID NO: 1482914 - RNA, 19 nt, Homo sapiens
  misc_RNA (1)...(19): siRNA sense strand
gcuggaugaugauuaucuu

SEQ ID NO: 1482915 - RNA, 19 nt, Homo sapiens
  misc_RNA (1)...(19): siRNA sense strand
ggaugaugauuaucuugag

SEQ ID NO: 1482916 - RNA, 19 nt, Homo sapiens
  misc_RNA (1)...(19): siRNA sense strand
caccaggguuguuccaugu

SEQ ID NO: 1482917 - RNA, 19 nt, Homo sapiens
  misc_RNA (1)...(19): siRNA sense strand
guaucgggcuccagaagca

SEQ ID NO: 1482918 - RNA, 19 nt, Homo sapiens
  misc_RNA (1)...(19): siRNA sense strand
gcauugugcccgagauguu

SEQ ID NO: 1482919 - RNA, 19 nt, Homo sapiens
  misc_RNA (1)...(19): siRNA sense strand
gcagagaaugaauguuuua

SEQ ID NO: 1482920 - RNA, 19 nt, Homo sapiens
  misc_RNA (1)...(19): siRNA sense strand
agaaacaucgugacuuugu

SEQ ID NO: 1482921 - RNA, 19 nt, Homo sapiens
  misc_RNA (1)...(19): siRNA sense strand
agucagaucucaggaaugg

SEQ ID NO: 1482922 - RNA, 19 nt, Homo sapiens
  misc_RNA (1)...(19): siRNA sense strand
acagucagaucucaggaau

SEQ ID NO: 1482923 - RNA, 19 nt, Homo sapiens
  misc_RNA (1)...(19): siRNA sense strand
gaaggcaaucaggauguaa

SEQ ID NO: 1482924 - RNA, 19 nt, Homo sapiens
  misc_RNA (1)...(19): siRNA sense strand
ucagaucucaggaauggaa

SEQ ID NO: 1482925 - RNA, 19 nt, Homo sapiens
  misc_RNA (1)...(19): siRNA sense strand
ggagugcagagaaugaaug

SEQ ID NO: 1482926 - RNA, 19 nt, Homo sapiens
  misc_RNA (1)...(19): siRNA sense strand
uaccucagcuguugaucug

SEQ ID NO: 1482927 - RNA, 19 nt, Homo sapiens
  misc_RNA (1)...(19): siRNA sense strand
gaaacauacagucagaucu

SEQ ID NO: 1482928 - RNA, 19 nt, Homo sapiens
  misc_RNA (1)...(19): siRNA sense strand
aaacaucgugacuuuguau

SEQ ID NO: 1482929 - RNA, 19 nt, Homo sapiens
  misc_RNA (1)...(19): siRNA sense strand
ggaauggaaggcaaacagu

SEQ ID NO: 1482930 - RNA, 19 nt, Homo sapiens
  misc_RNA (1)...(19): siRNA sense strand
uauugaagaucuggucaug

SEQ ID NO: 1482931 - RNA, 19 nt, Homo sapiens
  misc_RNA (1)...(19): siRNA sense strand
gagccuaggaaucauuuua

SEQ ID NO: 1482932 - RNA, 19 nt, Homo sapiens
  misc_RNA (1)...(19): siRNA sense strand
gaccucaaaccacguaaca

SEQ ID NO: 1482933 - RNA, 19 nt, Homo sapiens
  misc_RNA (1)...(19): siRNA sense strand
ugugcuggaugaugauuau

SEQ ID NO: 1482934 - RNA, 19 nt, Homo sapiens
  misc_RNA (1)...(19): siRNA sense strand
cagccuaucaccuaagaga

SEQ ID NO: 1482935 - RNA, 19 nt, Homo sapiens
  misc_RNA (1)...(19): siRNA sense strand
ugucaguguuucggaauug

SEQ ID NO: 1482936 - RNA, 19 nt, Homo sapiens
  misc_RNA (1)...(19): siRNA sense strand
gaucuguggagccuaggaa

SEQ ID NO: 1482937 - RNA, 19 nt, Homo sapiens
  misc_RNA (1)...(19): siRNA sense strand
ugcuaagacugcugaaugu

SEQ ID NO: 1482938 - RNA, 19 nt, Homo sapiens
  misc_RNA (1)...(19): siRNA sense strand
ugaaacauacagucagauc

SEQ ID NO: 1482939 - RNA, 19 nt, Homo sapiens
  misc_RNA (1)...(19): siRNA sense strand
aaacauacagucagaucuc

SEQ ID NO: 1482940 - RNA, 19 nt, Homo sapiens
  misc_RNA (1)...(19): siRNA sense strand
cacgcugucuguugcuuga

SEQ ID NO: 1482941 - RNA, 19 nt, Homo sapiens
  misc_RNA (1)...(19): siRNA sense strand
uugaagaucuggucaugcu

SEQ ID NO: 1482942 - RNA, 19 nt, Homo sapiens
  misc_RNA (1)...(19): siRNA sense strand
gccaucacgcugucuguug

SEQ ID NO: 1482943 - RNA, 19 nt, Homo sapiens
  misc_RNA (1)...(19): siRNA sense strand
guauggaguguuuacaauc

SEQ ID NO: 1482944 - RNA, 19 nt, Homo sapiens
  misc_RNA (1)...(19): siRNA sense strand
agaagaauuccugcugaaa

SEQ ID NO: 1482945 - RNA, 19 nt, Homo sapiens
  misc_RNA (1)...(19): siRNA sense strand
aauguucucaggaaugaaa

SEQ ID NO: 1482946 - RNA, 19 nt, Homo sapiens
  misc_RNA (1)...(19): siRNA sense strand
uuaaacucauugacuuugg

SEQ ID NO: 1482947 - RNA, 19 nt, Homo sapiens
  misc_RNA (1)...(19): siRNA sense strand
gagaaugaagaggaauaug

SEQ ID NO: 1482948 - RNA, 19 nt, Homo sapiens
  misc_RNA (1)...(19): siRNA sense strand
uggaugaugauuaucuuga

SEQ ID NO: 1482949 - RNA, 19 nt, Homo sapiens
  misc_RNA (1)...(19): siRNA sense strand
uugugcagcccauucuuua

SEQ ID NO: 1482950 - RNA, 19 nt, Homo sapiens
  misc_RNA (1)...(19): siRNA sense strand
aguggugaaugccgcaauu

SEQ ID NO: 1482951 - RNA, 19 nt, Homo sapiens
  misc_RNA (1)...(19): siRNA sense strand
caguaaagcaguggugaau

SEQ ID NO: 1482952 - RNA, 19 nt, Homo sapiens
  misc_RNA (1)...(19): siRNA sense strand
ccaguaaagcaguggugaa

SEQ ID NO: 1482953 - RNA, 19 nt, Homo sapiens
  misc_RNA (1)...(19): siRNA sense strand
cauauuugccaguaaagca

SEQ ID NO: 1482954 - RNA, 19 nt, Homo sapiens
  misc_RNA (1)...(19): siRNA sense strand
uggaaauguucucaggaau

SEQ ID NO: 1482955 - RNA, 19 nt, Homo sapiens
  misc_RNA (1)...(19): siRNA sense strand
ccagaagcagaauugcaaa

SEQ ID NO: 1482956 - RNA, 19 nt, Homo sapiens
  misc_RNA (1)...(19): siRNA sense strand
caggauguaaaguauauuc

SEQ ID NO: 1482957 - RNA, 19 nt, Homo sapiens
  misc_RNA (1)...(19): siRNA sense strand
caugaugauccaagcagaa

SEQ ID NO: 1482958 - RNA, 19 nt, Homo sapiens
  misc_RNA (1)...(19): siRNA sense strand
ugagaaugaagaggaauau

SEQ ID NO: 1482959 - RNA, 19 nt, Homo sapiens
  misc_RNA (1)...(19): siRNA sense strand
gcggaccucaaaccacgua

SEQ ID NO: 1482960 - RNA, 19 nt, Homo sapiens
  misc_RNA (1)...(19): siRNA sense strand
ugcuugaacuccuggaugu

SEQ ID NO: 1482961 - RNA, 19 nt, Homo sapiens
  misc_RNA (1)...(19): siRNA sense strand
ugcugaaugugcuggauga

SEQ ID NO: 1482962 - RNA, 19 nt, Homo sapiens
  misc_RNA (1)...(19): siRNA sense strand
ccacuuuucuccaaaugug

SEQ ID NO: 1482963 - RNA, 19 nt, Homo sapiens
  misc_RNA (1)...(19): siRNA sense strand
ccugcagagugauacagaa

SEQ ID NO: 1482964 - RNA, 19 nt, Homo sapiens
  misc_RNA (1)...(19): siRNA sense strand
ggauguaaaguauauucag

SEQ ID NO: 1482965 - RNA, 19 nt, Homo sapiens
  misc_RNA (1)...(19): siRNA sense strand
gagugcagagaaugaaugu

SEQ ID NO: 1482966 - RNA, 19 nt, Homo sapiens
  misc_RNA (1)...(19): siRNA sense strand
gaacaguugcagggucaca

SEQ ID NO: 1482967 - RNA, 19 nt, Homo sapiens
  misc_RNA (1)...(19): siRNA sense strand
uguggaugauacagcauug

SEQ ID NO: 1482968 - RNA, 19 nt, Homo sapiens
  misc_RNA (1)...(19): siRNA sense strand
uccagaagcagaauugcaa

SEQ ID NO: 1482969 - RNA, 19 nt, Homo sapiens
  misc_RNA (1)...(19): siRNA sense strand
ggaaugaaacugaaacaua

SEQ ID NO: 1482970 - RNA, 19 nt, Homo sapiens
  misc_RNA (1)...(19): siRNA sense strand
gaaauguucucaggaauga

SEQ ID NO: 1482971 - RNA, 19 nt, Homo sapiens
  misc_RNA (1)...(19): siRNA sense strand
gaaugaaacugaaacauac

SEQ ID NO: 1482972 - RNA, 19 nt, Homo sapiens
  misc_RNA (1)...(19): siRNA sense strand
gcaaucaggauguaaagua

SEQ ID NO: 1482973 - RNA, 19 nt, Homo sapiens
  misc_RNA (1)...(19): siRNA sense strand
gaauguaccucagcuguug

SEQ ID NO: 1482974 - RNA, 19 nt, Homo sapiens
  misc_RNA (1)...(19): siRNA sense strand
gaaacaucgugacuuugua

SEQ ID NO: 1482975 - RNA, 19 nt, Homo sapiens
  misc_RNA (1)...(19): siRNA sense strand
acagaaacaucgugacuuu

SEQ ID NO: 1482976 - RNA, 19 nt, Homo sapiens
  misc_RNA (1)...(19): siRNA sense strand
gaucacauauuugccagua

SEQ ID NO: 1482977 - RNA, 19 nt, Homo sapiens
  misc_RNA (1)...(19): siRNA sense strand
ugaaugugcuggaugauga

SEQ ID NO: 1482978 - RNA, 19 nt, Homo sapiens
  misc_RNA (1)...(19): siRNA sense strand
ucacauauuugccaguaaa

SEQ ID NO: 1482979 - RNA, 19 nt, Homo sapiens
  misc_RNA (1)...(19): siRNA sense strand
gcagagugauacagaaugu

SEQ ID NO: 1482980 - RNA, 19 nt, Homo sapiens
  misc_RNA (1)...(19): siRNA sense strand
caaaccacguaacauauug

SEQ ID NO: 1482981 - RNA, 19 nt, Homo sapiens
  misc_RNA (1)...(19): siRNA sense strand
gauccaagcagaagaauuc

SEQ ID NO: 1482982 - RNA, 19 nt, Homo sapiens
  misc_RNA (1)...(19): siRNA sense strand
gaaugaagaggaauaugaa

SEQ ID NO: 1482983 - RNA, 19 nt, Homo sapiens
  misc_RNA (1)...(19): siRNA sense strand
gaagaauuccugcugaaau

SEQ ID NO: 1482984 - RNA, 19 nt, Homo sapiens
  misc_RNA (1)...(19): siRNA sense strand
gugcagagaaugaauguuu

SEQ ID NO: 1482985 - RNA, 19 nt, Homo sapiens
  misc_RNA (1)...(19): siRNA sense strand
ccucaaaccacguaacaua

SEQ ID NO: 1482986 - RNA, 19 nt, Homo sapiens
  misc_RNA (1)...(19): siRNA sense strand
guaaagcaguggugaaugc

SEQ ID NO: 1482987 - RNA, 19 nt, Homo sapiens
  misc_RNA (1)...(19): siRNA sense strand
caaucaggauguaaaguau

SEQ ID NO: 1482988 - RNA, 19 nt, Homo sapiens
  misc_RNA (1)...(19): siRNA sense strand
ccaaagcugcgcagaaauu

SEQ ID NO: 1482989 - RNA, 19 nt, Homo sapiens
  misc_RNA (1)...(19): siRNA sense strand
gauguuugaugggaaguuu

SEQ ID NO: 1482990 - RNA, 19 nt, Homo sapiens
  misc_RNA (1)...(19): siRNA sense strand
ggaaauguucucaggaaug

SEQ ID NO: 1482991 - RNA, 19 nt, Homo sapiens
  misc_RNA (1)...(19): siRNA sense strand
caaagcugcgcagaaauua

SEQ ID NO: 1482992 - RNA, 19 nt, Homo sapiens
  misc_RNA (1)...(19): siRNA sense strand
gacuuuguauggaguguuu

SEQ ID NO: 1482993 - RNA, 19 nt, Homo sapiens
  misc_RNA (1)...(19): siRNA sense strand
gaugaugauuaucuugaga

SEQ ID NO: 1482994 - RNA, 19 nt, Homo sapiens
  misc_RNA (1)...(19): siRNA sense strand
aagaauuccugcugaaaug

SEQ ID NO: 1482995 - RNA, 19 nt, Homo sapiens
  misc_RNA (1)...(19): siRNA sense strand
cagaagaauuccugcugaa

SEQ ID NO: 1482996 - RNA, 19 nt, Homo sapiens
  misc_RNA (1)...(19): siRNA sense strand
agaaugaagaggaauauga

SEQ ID NO: 1482997 - RNA, 19 nt, Homo sapiens
  misc_RNA (1)...(19): siRNA sense strand
caaagaaggcaaucaggau

SEQ ID NO: 1482998 - RNA, 19 nt, Homo sapiens
  misc_RNA (1)...(19): siRNA sense strand
gaauggaaggcaaacaguu

SEQ ID NO: 1482999 - RNA, 19 nt, Homo sapiens
  misc_RNA (1)...(19): siRNA sense strand
uuucggaauugcucuuaua

SEQ ID NO: 1483000 - RNA, 19 nt, Homo sapiens
  misc_RNA (1)...(19): siRNA sense strand
cgaguaugguuuccgcaaa

SEQ ID NO: 1483001 - RNA, 19 nt, Homo sapiens
  misc_RNA (1)...(19): siRNA sense strand
ucaaaccacguaacauauu

SEQ ID NO: 1483002 - RNA, 19 nt, Homo sapiens
  misc_RNA (1)...(19): siRNA sense strand
cucauugacuuuggacuua

SEQ ID NO: 1483003 - RNA, 19 nt, Homo sapiens
  misc_RNA (1)...(19): siRNA sense strand
gaugauccaagcagaagaa

SEQ ID NO: 1483004 - RNA, 19 nt, Homo sapiens
  misc_RNA (1)...(19): siRNA sense strand
agaaggcaaucaggaugua

SEQ ID NO: 1483005 - RNA, 19 nt, Homo sapiens
  misc_RNA (1)...(19): siRNA sense strand
guaucaaaccuugcuuuaa

SEQ ID NO: 1483006 - RNA, 19 nt, Homo sapiens
  misc_RNA (1)...(19): siRNA sense strand
gugcuaagacugcugaaug

SEQ ID NO: 1483007 - RNA, 19 nt, Homo sapiens
  misc_RNA (1)...(19): siRNA sense strand
ggaaucauuuuacuggaaa

SEQ ID NO: 1483008 - RNA, 19 nt, Homo sapiens
  misc_RNA (1)...(19): siRNA sense strand
uaaacucauugacuuugga

SEQ ID NO: 1483009 - RNA, 19 nt, Homo sapiens
  misc_RNA (1)...(19): siRNA sense strand
uuccaaagcugcgcagaaa

SEQ ID NO: 1483010 - RNA, 19 nt, Homo sapiens
  misc_RNA (1)...(19): siRNA sense strand
gaguaugguuuccgcaaag

SEQ ID NO: 1483011 - RNA, 19 nt, Homo sapiens
  misc_RNA (1)...(19): siRNA sense strand
cuggaaauguucucaggaa

SEQ ID NO: 1483012 - RNA, 19 nt, Homo sapiens
  misc_RNA (1)...(19): siRNA sense strand
caucgugacuuuguaugga

SEQ ID NO: 1483013 - RNA, 19 nt, Homo sapiens
  misc_RNA (1)...(19): siRNA sense strand
gcuggaugaugauuaucuu

SEQ ID NO: 1483014 - RNA, 19 nt, Homo sapiens
  misc_RNA (1)...(19): siRNA sense strand
ggaugaugauuaucuugag

SEQ ID NO: 1483015 - RNA, 19 nt, Homo sapiens
  misc_RNA (1)...(19): siRNA sense strand
caccaggguuguuccaugu

SEQ ID NO: 1483016 - RNA, 19 nt, Homo sapiens
  misc_RNA (1)...(19): siRNA sense strand
uguaucaaaccuugcuuua

SEQ ID NO: 1483017 - RNA, 19 nt, Homo sapiens
  misc_RNA (1)...(19): siRNA sense strand
guaucgggcuccagaagca

SEQ ID NO: 1483018 - RNA, 19 nt, Homo sapiens
  misc_RNA (1)...(19): siRNA sense strand
gcauugugcccgagauguu

SEQ ID NO: 1483019 - RNA, 19 nt, Homo sapiens
  misc_RNA (1)...(19): siRNA sense strand
gcagagaaugaauguuuua

SEQ ID NO: 1483020 - RNA, 19 nt, Homo sapiens
  misc_RNA (1)...(19): siRNA sense strand
agaaacaucgugacuuugu

SEQ ID NO: 1483021 - RNA, 19 nt, Homo sapiens
  misc_RNA (1)...(19): siRNA sense strand
agucagaucucaggaaugg

SEQ ID NO: 1483022 - RNA, 19 nt, Homo sapiens
  misc_RNA (1)...(19): siRNA sense strand
acagucagaucucaggaau

SEQ ID NO: 1483023 - RNA, 19 nt, Homo sapiens
  misc_RNA (1)...(19): siRNA sense strand
gaaggcaaucaggauguaa

SEQ ID NO: 1483024 - RNA, 19 nt, Homo sapiens
  misc_RNA (1)...(19): siRNA sense strand
ucagaucucaggaauggaa

SEQ ID NO: 1483025 - RNA, 19 nt, Homo sapiens
  misc_RNA (1)...(19): siRNA sense strand
ggagugcagagaaugaaug

SEQ ID NO: 1483026 - RNA, 19 nt, Homo sapiens
  misc_RNA (1)...(19): siRNA sense strand
uaccucagcuguugaucug

SEQ ID NO: 1483027 - RNA, 19 nt, Homo sapiens
  misc_RNA (1)...(19): siRNA sense strand
gaaacauacagucagaucu

SEQ ID NO: 1483028 - RNA, 19 nt, Homo sapiens
  misc_RNA (1)...(19): siRNA sense strand
caaaugcuggugauuccaa

SEQ ID NO: 1483029 - RNA, 19 nt, Homo sapiens
  misc_RNA (1)...(19): siRNA sense strand
aaacaucgugacuuuguau

SEQ ID NO: 1483030 - RNA, 19 nt, Homo sapiens
  misc_RNA (1)...(19): siRNA sense strand
ggaauggaaggcaaacagu

SEQ ID NO: 1483031 - RNA, 19 nt, Homo sapiens
  misc_RNA (1)...(19): siRNA sense strand
gaaguuuguuguggcuaca

SEQ ID NO: 1483032 - RNA, 19 nt, Homo sapiens
  misc_RNA (1)...(19): siRNA sense strand
uauugaagaucuggucaug

SEQ ID NO: 1483033 - RNA, 19 nt, Homo sapiens
  misc_RNA (1)...(19): siRNA sense strand
ugacuggaaggauguuuga

SEQ ID NO: 1483034 - RNA, 19 nt, Homo sapiens
  misc_RNA (1)...(19): siRNA sense strand
gagccuaggaaucauuuua

SEQ ID NO: 1483035 - RNA, 19 nt, Homo sapiens
  misc_RNA (1)...(19): siRNA sense strand
gaccucaaaccacguaaca

SEQ ID NO: 1483036 - RNA, 19 nt, Homo sapiens
  misc_RNA (1)...(19): siRNA sense strand
cagaaauuacugacuggaa

SEQ ID NO: 1483037 - RNA, 19 nt, Homo sapiens
  misc_RNA (1)...(19): siRNA sense strand
ugugcuggaugaugauuau

SEQ ID NO: 1483038 - RNA, 19 nt, Homo sapiens
  misc_RNA (1)...(19): siRNA sense strand
cagccuaucaccuaagaga

SEQ ID NO: 1483039 - RNA, 19 nt, Homo sapiens
  misc_RNA (1)...(19): siRNA sense strand
ugucaguguuucggaauug

SEQ ID NO: 1483040 - RNA, 19 nt, Homo sapiens
  misc_RNA (1)...(19): siRNA sense strand
gaucuguggagccuaggaa

SEQ ID NO: 1483041 - RNA, 19 nt, Homo sapiens
  misc_RNA (1)...(19): siRNA sense strand
guaugcaaaugcuggugau

SEQ ID NO: 1483042 - RNA, 19 nt, Homo sapiens
  misc_RNA (1)...(19): siRNA sense strand
ugcuaagacugcugaaugu

SEQ ID NO: 1483043 - RNA, 19 nt, Homo sapiens
  misc_RNA (1)...(19): siRNA sense strand
ugaaacauacagucagauc

SEQ ID NO: 1483044 - RNA, 19 nt, Homo sapiens
  misc_RNA (1)...(19): siRNA sense strand
aaaugcuggugauuccaaa

SEQ ID NO: 1483045 - RNA, 19 nt, Homo sapiens
  misc_RNA (1)...(19): siRNA sense strand
cacgcugucuguugcuuga

SEQ ID NO: 1483046 - RNA, 19 nt, Homo sapiens
  misc_RNA (1)...(19): siRNA sense strand
aaacauacagucagaucuc

SEQ ID NO: 1483047 - RNA, 19 nt, Homo sapiens
  misc_RNA (1)...(19): siRNA sense strand
uugaagaucuggucaugcu

SEQ ID NO: 1483048 - RNA, 19 nt, Homo sapiens
  misc_RNA (1)...(19): siRNA sense strand
gccaucacgcugucuguug

SEQ ID NO: 1483049 - RNA, 19 nt, Homo sapiens
  misc_RNA (1)...(19): siRNA sense strand
aauguucucaggaaugaaa

SEQ ID NO: 1483050 - RNA, 19 nt, Homo sapiens
  misc_RNA (1)...(19): siRNA sense strand
agaagaauuccugcugaaa

SEQ ID NO: 1483051 - RNA, 19 nt, Homo sapiens
  misc_RNA (1)...(19): siRNA sense strand
guauggaguguuuacaauc

SEQ ID NO: 1483052 - RNA, 19 nt, Homo sapiens
  misc_RNA (1)...(19): siRNA sense strand
uuaaacucauugacuuugg

SEQ ID NO: 1483053 - RNA, 19 nt, Homo sapiens
  misc_RNA (1)...(19): siRNA sense strand
gagaaugaagaggaauaug

SEQ ID NO: 1483054 - RNA, 19 nt, Homo sapiens
  misc_RNA (1)...(19): siRNA sense strand
uggaugaugauuaucuuga

SEQ ID NO: 1483055 - RNA, 19 nt, Homo sapiens
  misc_RNA (1)...(19): siRNA sense strand
uugugcagcccauucuuua

SEQ ID NO: 1483056 - RNA, 19 nt, Homo sapiens
  misc_RNA (1)...(19): siRNA sense strand
aguggugaaugccgcaauu

SEQ ID NO: 1483057 - RNA, 19 nt, Homo sapiens
  misc_RNA (1)...(19): siRNA sense strand
caguaaagcaguggugaau

SEQ ID NO: 1483058 - RNA, 19 nt, Homo sapiens
  misc_RNA (1)...(19): siRNA sense strand
ccaguaaagcaguggugaa

SEQ ID NO: 1483059 - RNA, 19 nt, Homo sapiens
  misc_RNA (1)...(19): siRNA sense strand
cauauuugccaguaaagca

SEQ ID NO: 1483060 - RNA, 19 nt, Homo sapiens
  misc_RNA (1)...(19): siRNA sense strand
uggaaauguucucaggaau

SEQ ID NO: 1483061 - RNA, 19 nt, Homo sapiens
  misc_RNA (1)...(19): siRNA sense strand
ccagaagcagaauugcaaa

SEQ ID NO: 1483062 - RNA, 19 nt, Homo sapiens
  misc_RNA (1)...(19): siRNA sense strand
caggauguaaaguauauuc

SEQ ID NO: 1483063 - RNA, 19 nt, Homo sapiens
  misc_RNA (1)...(19): siRNA sense strand
caugaugauccaagcagaa

SEQ ID NO: 1483064 - RNA, 19 nt, Homo sapiens
  misc_RNA (1)...(19): siRNA sense strand
ugagaaugaagaggaauau

SEQ ID NO: 1483065 - RNA, 19 nt, Homo sapiens
  misc_RNA (1)...(19): siRNA sense strand
ugcuugaacuccuggaugu

SEQ ID NO: 1483066 - RNA, 19 nt, Homo sapiens
  misc_RNA (1)...(19): siRNA sense strand
caagaggggauaucuguau

SEQ ID NO: 1483067 - RNA, 19 nt, Homo sapiens
  misc_RNA (1)...(19): siRNA sense strand
ccacuuuucuccaaaugug

SEQ ID NO: 1483068 - RNA, 19 nt, Homo sapiens
  misc_RNA (1)...(19): siRNA sense strand
ugcugaaugugcuggauga

SEQ ID NO: 1483069 - RNA, 19 nt, Homo sapiens
  misc_RNA (1)...(19): siRNA sense strand
gcaaggaauugauaacuaa

SEQ ID NO: 1483070 - RNA, 19 nt, Homo sapiens
  misc_RNA (1)...(19): siRNA sense strand
ggauaaagaugauucaguu

SEQ ID NO: 1483071 - RNA, 19 nt, Homo sapiens
  misc_RNA (1)...(19): siRNA sense strand
gaaaggagcaaauugaaga

SEQ ID NO: 1483072 - RNA, 19 nt, Homo sapiens
  misc_RNA (1)...(19): siRNA sense strand
gugagaaacugacuuuauu

SEQ ID NO: 1483073 - RNA, 19 nt, Homo sapiens
  misc_RNA (1)...(19): siRNA sense strand
ucacauaguuuggaucuga

SEQ ID NO: 1483074 - RNA, 19 nt, Homo sapiens
  misc_RNA (1)...(19): siRNA sense strand
acaaagaggaggagaauuu

SEQ ID NO: 1483075 - RNA, 19 nt, Homo sapiens
  misc_RNA (1)...(19): siRNA sense strand
gaccaucagugaaauacuu

SEQ ID NO: 1483076 - RNA, 19 nt, Homo sapiens
  misc_RNA (1)...(19): siRNA sense strand
uggaguaucuugagaauca

SEQ ID NO: 1483077 - RNA, 19 nt, Homo sapiens
  misc_RNA (1)...(19): siRNA sense strand
gaagcaggguaaauacuca

SEQ ID NO: 1483078 - RNA, 19 nt, Homo sapiens
  misc_RNA (1)...(19): siRNA sense strand
ccaagagccggacugauua

SEQ ID NO: 1483079 - RNA, 19 nt, Homo sapiens
  misc_RNA (1)...(19): siRNA sense strand
aaacauggcccgaaauaau

SEQ ID NO: 1483080 - RNA, 19 nt, Homo sapiens
  misc_RNA (1)...(19): siRNA sense strand
caaggaagcucugcugaca

SEQ ID NO: 1483081 - RNA, 19 nt, Homo sapiens
  misc_RNA (1)...(19): siRNA sense strand
gaaacaaguauucuucguu

SEQ ID NO: 1483082 - RNA, 19 nt, Homo sapiens
  misc_RNA (1)...(19): siRNA sense strand
cgugaaagauggcuacaga

SEQ ID NO: 1483083 - RNA, 19 nt, Homo sapiens
  misc_RNA (1)...(19): siRNA sense strand
gagaaaggagcaaauugaa

SEQ ID NO: 1483084 - RNA, 19 nt, Homo sapiens
  misc_RNA (1)...(19): siRNA sense strand
cuaaugagaccaucaguga

SEQ ID NO: 1483085 - RNA, 19 nt, Homo sapiens
  misc_RNA (1)...(19): siRNA sense strand
aaagauggcuacagaagca

SEQ ID NO: 1483086 - RNA, 19 nt, Homo sapiens
  misc_RNA (1)...(19): siRNA sense strand
ugaagaaucuaagaaggaa

SEQ ID NO: 1483087 - RNA, 19 nt, Homo sapiens
  misc_RNA (1)...(19): siRNA sense strand
caaguauucuucguuguug

SEQ ID NO: 1483088 - RNA, 19 nt, Homo sapiens
  misc_RNA (1)...(19): siRNA sense strand
ggagcaaauugaagaaucu

SEQ ID NO: 1483089 - RNA, 19 nt, Homo sapiens
  misc_RNA (1)...(19): siRNA sense strand
gaauggauaagcugccuaa

SEQ ID NO: 1483090 - RNA, 19 nt, Homo sapiens
  misc_RNA (1)...(19): siRNA sense strand
gaaccaaaauaccagcuuu

SEQ ID NO: 1483091 - RNA, 19 nt, Homo sapiens
  misc_RNA (1)...(19): siRNA sense strand
ggaaacaaguauucuucgu

SEQ ID NO: 1483092 - RNA, 19 nt, Homo sapiens
  misc_RNA (1)...(19): siRNA sense strand
guaagacuacugccuauuc

SEQ ID NO: 1483093 - RNA, 19 nt, Homo sapiens
  misc_RNA (1)...(19): siRNA sense strand
aaacaacgaaggcgugaaa

SEQ ID NO: 1483094 - RNA, 19 nt, Homo sapiens
  misc_RNA (1)...(19): siRNA sense strand
gagagaaaggagcaaauug

SEQ ID NO: 1483095 - RNA, 19 nt, Homo sapiens
  misc_RNA (1)...(19): siRNA sense strand
caaucugacuuuccugaug

SEQ ID NO: 1483096 - RNA, 19 nt, Homo sapiens
  misc_RNA (1)...(19): siRNA sense strand
guaugcugcugcaaagauu

SEQ ID NO: 1483097 - RNA, 19 nt, Homo sapiens
  misc_RNA (1)...(19): siRNA sense strand
gaggaaacaaguauucuuc

SEQ ID NO: 1483098 - RNA, 19 nt, Homo sapiens
  misc_RNA (1)...(19): siRNA sense strand
caagaggaaacaaguauuc

SEQ ID NO: 1483099 - RNA, 19 nt, Homo sapiens
  misc_RNA (1)...(19): siRNA sense strand
gaggugcgaccaacauauu

SEQ ID NO: 1483100 - RNA, 19 nt, Homo sapiens
  misc_RNA (1)...(19): siRNA sense strand
uuaaacauggcccgaaaua

SEQ ID NO: 1483101 - RNA, 19 nt, Homo sapiens
  misc_RNA (1)...(19): siRNA sense strand
aaacugaauuguccuuucu

SEQ ID NO: 1483102 - RNA, 19 nt, Homo sapiens
  misc_RNA (1)...(19): siRNA sense strand
gauaagcugccuaauccaa

SEQ ID NO: 1483103 - RNA, 19 nt, Homo sapiens
  misc_RNA (1)...(19): siRNA sense strand
agagaaaggagcaaauuga

SEQ ID NO: 1483104 - RNA, 19 nt, Homo sapiens
  misc_RNA (1)...(19): siRNA sense strand
gaauuucaguguggucuag

SEQ ID NO: 1483105 - RNA, 19 nt, Homo sapiens
  misc_RNA (1)...(19): siRNA sense strand
uacaagagcuuuucauaga

SEQ ID NO: 1483106 - RNA, 19 nt, Homo sapiens
  misc_RNA (1)...(19): siRNA sense strand
uacagaagcaggguaaaua

SEQ ID NO: 1483107 - RNA, 19 nt, Homo sapiens
  misc_RNA (1)...(19): siRNA sense strand
caacgaaggcgugaaagau

SEQ ID NO: 1483108 - RNA, 19 nt, Homo sapiens
  misc_RNA (1)...(19): siRNA sense strand
caugagacccagacacaaa

SEQ ID NO: 1483109 - RNA, 19 nt, Homo sapiens
  misc_RNA (1)...(19): siRNA sense strand
ugggauugcuggaucauau

SEQ ID NO: 1483110 - RNA, 19 nt, Homo sapiens
  misc_RNA (1)...(19): siRNA sense strand
aacauggcccgaaauaaua

SEQ ID NO: 1483111 - RNA, 19 nt, Homo sapiens
  misc_RNA (1)...(19): siRNA sense strand
uaaaugaaacacagccuau

SEQ ID NO: 1483112 - RNA, 19 nt, Homo sapiens
  misc_RNA (1)...(19): siRNA sense strand
uccaagagccggacugauu

SEQ ID NO: 1483113 - RNA, 19 nt, Homo sapiens
  misc_RNA (1)...(19): siRNA sense strand
uggaucauaugguaaguau

SEQ ID NO: 1483114 - RNA, 19 nt, Homo sapiens
  misc_RNA (1)...(19): siRNA sense strand
gaaaagaagcaaggaauug

SEQ ID NO: 1483115 - RNA, 19 nt, Homo sapiens
  misc_RNA (1)...(19): siRNA sense strand
agcaaggaauugauaacua

SEQ ID NO: 1483116 - RNA, 19 nt, Homo sapiens
  misc_RNA (1)...(19): siRNA sense strand
ccuggaagauuaacagaag

SEQ ID NO: 1483117 - RNA, 19 nt, Homo sapiens
  misc_RNA (1)...(19): siRNA sense strand
aagaagcaaggaauugaua

SEQ ID NO: 1483118 - RNA, 19 nt, Homo sapiens
  misc_RNA (1)...(19): siRNA sense strand
gcaaauugaagaaucuaag

SEQ ID NO: 1483119 - RNA, 19 nt, Homo sapiens
  misc_RNA (1)...(19): siRNA sense strand
ugacuuuauuacccacuuu

SEQ ID NO: 1483120 - RNA, 19 nt, Homo sapiens
  misc_RNA (1)...(19): siRNA sense strand
gauaaagaugauucaguug

SEQ ID NO: 1483121 - RNA, 19 nt, Homo sapiens
  misc_RNA (1)...(19): siRNA sense strand
gagaaacugacuuuauuac

SEQ ID NO: 1483122 - RNA, 19 nt, Homo sapiens
  misc_RNA (1)...(19): siRNA sense strand
aaugagaccaucagugaaa

SEQ ID NO: 1483123 - RNA, 19 nt, Homo sapiens
  misc_RNA (1)...(19): siRNA sense strand
aaagaugauucaguugaug

SEQ ID NO: 1483124 - RNA, 19 nt, Homo sapiens
  misc_RNA (1)...(19): siRNA sense strand
uaaacauggcccgaaauaa

SEQ ID NO: 1483125 - RNA, 19 nt, Homo sapiens
  misc_RNA (1)...(19): siRNA sense strand
gaaaucacaggcuuuuaaa

SEQ ID NO: 1483126 - RNA, 19 nt, Homo sapiens
  misc_RNA (1)...(19): siRNA sense strand
uauggaguaucuugagaau

SEQ ID NO: 1483127 - RNA, 19 nt, Homo sapiens
  misc_RNA (1)...(19): siRNA sense strand
gacaggugguggcucugaa

SEQ ID NO: 1483128 - RNA, 19 nt, Homo sapiens
  misc_RNA (1)...(19): siRNA sense strand
acacaggcaggcagacuaa

SEQ ID NO: 1483129 - RNA, 19 nt, Homo sapiens
  misc_RNA (1)...(19): siRNA sense strand
cuaguaugcugcugcaaag

SEQ ID NO: 1483130 - RNA, 19 nt, Homo sapiens
  misc_RNA (1)...(19): siRNA sense strand
ggaggugcgaccaacauau

SEQ ID NO: 1483131 - RNA, 19 nt, Homo sapiens
  misc_RNA (1)...(19): siRNA sense strand
caaagaggaggagaauuuc

SEQ ID NO: 1483132 - RNA, 19 nt, Homo sapiens
  misc_RNA (1)...(19): siRNA sense strand
aaugaaacacagccuauug

SEQ ID NO: 1483133 - RNA, 19 nt, Homo sapiens
  misc_RNA (1)...(19): siRNA sense strand
ugaaagauggcuacagaag

SEQ ID NO: 1483134 - RNA, 19 nt, Homo sapiens
  misc_RNA (1)...(19): siRNA sense strand
cuaagaaggaaacaacgaa

SEQ ID NO: 1483135 - RNA, 19 nt, Homo sapiens
  misc_RNA (1)...(19): siRNA sense strand
cagaauccauccaguuuug

SEQ ID NO: 1483136 - RNA, 19 nt, Homo sapiens
  misc_RNA (1)...(19): siRNA sense strand
aaauacuugucacauccua

SEQ ID NO: 1483137 - RNA, 19 nt, Homo sapiens
  misc_RNA (1)...(19): siRNA sense strand
auagcaagcucugguuguu

SEQ ID NO: 1483138 - RNA, 19 nt, Homo sapiens
  misc_RNA (1)...(19): siRNA sense strand
gacuuuauuacccacuuua

SEQ ID NO: 1483139 - RNA, 19 nt, Homo sapiens
  misc_RNA (1)...(19): siRNA sense strand
auaaugacccuggaagauu

SEQ ID NO: 1483140 - RNA, 19 nt, Homo sapiens
  misc_RNA (1)...(19): siRNA sense strand
uaauaaugacccuggaaga

SEQ ID NO: 1483141 - RNA, 19 nt, Homo sapiens
  misc_RNA (1)...(19): siRNA sense strand
gcuugcagcuguacaucuc

SEQ ID NO: 1483142 - RNA, 19 nt, Homo sapiens
  misc_RNA (1)...(19): siRNA sense strand
gagcaaauugaagaaucua

SEQ ID NO: 1483143 - RNA, 19 nt, Homo sapiens
  misc_RNA (1)...(19): siRNA sense strand
uaagagagaaaggagcaaa

SEQ ID NO: 1483144 - RNA, 19 nt, Homo sapiens
  misc_RNA (1)...(19): siRNA sense strand
cuucguuguuggaaaugua

SEQ ID NO: 1483145 - RNA, 19 nt, Homo sapiens
  misc_RNA (1)...(19): siRNA sense strand
caggcaggcagacuaauga

SEQ ID NO: 1483146 - RNA, 19 nt, Homo sapiens
  misc_RNA (1)...(19): siRNA sense strand
gucaagaggaaacaaguau

SEQ ID NO: 1483147 - RNA, 19 nt, Homo sapiens
  misc_RNA (1)...(19): siRNA sense strand
gagugggauugcuggauca

SEQ ID NO: 1483148 - RNA, 19 nt, Homo sapiens
  misc_RNA (1)...(19): siRNA sense strand
gaagaaucuaagaaggaaa

SEQ ID NO: 1483149 - RNA, 19 nt, Homo sapiens
  misc_RNA (1)...(19): siRNA sense strand
agagagaaaggagcaaauu

SEQ ID NO: 1483150 - RNA, 19 nt, Homo sapiens
  misc_RNA (1)...(19): siRNA sense strand
ccuaguaugcugcugcaaa

SEQ ID NO: 1483151 - RNA, 19 nt, Homo sapiens
  misc_RNA (1)...(19): siRNA sense strand
gaagcaaggaauugauaac

SEQ ID NO: 1483152 - RNA, 19 nt, Homo sapiens
  misc_RNA (1)...(19): siRNA sense strand
caaagcaucagaaccaaaa

SEQ ID NO: 1483153 - RNA, 19 nt, Homo sapiens
  misc_RNA (1)...(19): siRNA sense strand
ccaaagcaucagaaccaaa

SEQ ID NO: 1483154 - RNA, 19 nt, Homo sapiens
  misc_RNA (1)...(19): siRNA sense strand
ugagaccaucagugaaaua

SEQ ID NO: 1483155 - RNA, 19 nt, Homo sapiens
  misc_RNA (1)...(19): siRNA sense strand
caagagccggacugauuau

SEQ ID NO: 1483156 - RNA, 19 nt, Homo sapiens
  misc_RNA (1)...(19): siRNA sense strand
cuaacaaucugacuuuccu

SEQ ID NO: 1483157 - RNA, 19 nt, Homo sapiens
  misc_RNA (1)...(19): siRNA sense strand
gaccauacuaauacuaaca

SEQ ID NO: 1483158 - RNA, 19 nt, Homo sapiens
  misc_RNA (1)...(19): siRNA sense strand
agaagcaaggaauugauaa

SEQ ID NO: 1483159 - RNA, 19 nt, Homo sapiens
  misc_RNA (1)...(19): siRNA sense strand
gaaaaucacauaguuugga

SEQ ID NO: 1483160 - RNA, 19 nt, Homo sapiens
  misc_RNA (1)...(19): siRNA sense strand
uggcagaugcgcuacaaga

SEQ ID NO: 1483161 - RNA, 19 nt, Homo sapiens
  misc_RNA (1)...(19): siRNA sense strand
ucaagaggaaacaaguauu

SEQ ID NO: 1483162 - RNA, 19 nt, Homo sapiens
  misc_RNA (1)...(19): siRNA sense strand
ggaggccucagaccaggaa

SEQ ID NO: 1483163 - RNA, 19 nt, Homo sapiens
  misc_RNA (1)...(19): siRNA sense strand
acacaaagaggaggagaau

SEQ ID NO: 1483164 - RNA, 19 nt, Homo sapiens
  misc_RNA (1)...(19): siRNA sense strand
gcuacaagagcuuuucaua

SEQ ID NO: 1483165 - RNA, 19 nt, Homo sapiens
  misc_RNA (1)...(19): siRNA sense strand
guccaaagcaucagaacca

SEQ ID NO: 1483166 - RNA, 19 nt, Homo sapiens
  misc_RNA (1)...(19): siRNA sense strand
agugagaaacugacuuuau

SEQ ID NO: 1483167 - RNA, 19 nt, Homo sapiens
  misc_RNA (1)...(19): siRNA sense strand
cacauaguuuggaucugaa

SEQ ID NO: 1483168 - RNA, 19 nt, Homo sapiens
  misc_RNA (1)...(19): siRNA sense strand
aaagcccaguggacaguug

SEQ ID NO: 1483169 - RNA, 19 nt, Homo sapiens
  misc_RNA (1)...(19): siRNA sense strand
gaagaggccuccuuugaga

SEQ ID NO: 1483170 - RNA, 19 nt, Homo sapiens
  misc_RNA (1)...(19): siRNA sense strand
gaaugccaaugcugucuua

SEQ ID NO: 1483171 - RNA, 19 nt, Homo sapiens
  misc_RNA (1)...(19): siRNA sense strand
ggucucagccuauguguua

SEQ ID NO: 1483172 - RNA, 19 nt, Homo sapiens
  misc_RNA (1)...(19): siRNA sense strand
ccacggagauagucaaaga

SEQ ID NO: 1483173 - RNA, 19 nt, Homo sapiens
  misc_RNA (1)...(19): siRNA sense strand
cagaauuacuggcccauuu

SEQ ID NO: 1483174 - RNA, 19 nt, Homo sapiens
  misc_RNA (1)...(19): siRNA sense strand
uaaagucucugggcaggua

SEQ ID NO: 1483175 - RNA, 19 nt, Homo sapiens
  misc_RNA (1)...(19): siRNA sense strand
gauugaaccuguuucuaga

SEQ ID NO: 1483176 - RNA, 19 nt, Homo sapiens
  misc_RNA (1)...(19): siRNA sense strand
ggacagcccaggugaggua

SEQ ID NO: 1483177 - RNA, 19 nt, Homo sapiens
  misc_RNA (1)...(19): siRNA sense strand
ccagugagguccagggaaa

SEQ ID NO: 1483178 - RNA, 19 nt, Homo sapiens
  misc_RNA (1)...(19): siRNA sense strand
ucuggaaggugaucuuuaa

SEQ ID NO: 1483179 - RNA, 19 nt, Homo sapiens
  misc_RNA (1)...(19): siRNA sense strand
gaggacuggugcaggauaa

SEQ ID NO: 1483180 - RNA, 19 nt, Homo sapiens
  misc_RNA (1)...(19): siRNA sense strand
uuagggagcugaaggauca

SEQ ID NO: 1483181 - RNA, 19 nt, Homo sapiens
  misc_RNA (1)...(19): siRNA sense strand
gcagacaacccguccauca

SEQ ID NO: 1483182 - RNA, 19 nt, Homo sapiens
  misc_RNA (1)...(19): siRNA sense strand
gaagaccuaucaggaggaa

SEQ ID NO: 1483183 - RNA, 19 nt, Homo sapiens
  misc_RNA (1)...(19): siRNA sense strand
gucaaagaguggccaguaa

SEQ ID NO: 1483184 - RNA, 19 nt, Homo sapiens
  misc_RNA (1)...(19): siRNA sense strand
ccaaugcugucuuacuaga

SEQ ID NO: 1483185 - RNA, 19 nt, Homo sapiens
  misc_RNA (1)...(19): siRNA sense strand
ggagagcgguggagaaacg

SEQ ID NO: 1483186 - RNA, 19 nt, Homo sapiens
  misc_RNA (1)...(19): siRNA sense strand
cugcaucucaccagaauua

SEQ ID NO: 1483187 - RNA, 19 nt, Homo sapiens
  misc_RNA (1)...(19): siRNA sense strand
ugccaaugcugucuuacua

SEQ ID NO: 1483188 - RNA, 19 nt, Homo sapiens
  misc_RNA (1)...(19): siRNA sense strand
ggaagaggccuccuuugag

SEQ ID NO: 1483189 - RNA, 19 nt, Homo sapiens
  misc_RNA (1)...(19): siRNA sense strand
caggugagguaucugaaga

SEQ ID NO: 1483190 - RNA, 19 nt, Homo sapiens
  misc_RNA (1)...(19): siRNA sense strand
aaagguggcuggcggaaag

SEQ ID NO: 1483191 - RNA, 19 nt, Homo sapiens
  misc_RNA (1)...(19): siRNA sense strand
cagaagucacugaugguua

SEQ ID NO: 1483192 - RNA, 19 nt, Homo sapiens
  misc_RNA (1)...(19): siRNA sense strand
gaaugagaguaucgaagag

SEQ ID NO: 1483193 - RNA, 19 nt, Homo sapiens
  misc_RNA (1)...(19): siRNA sense strand
gaaggucucagccuaugug

SEQ ID NO: 1483194 - RNA, 19 nt, Homo sapiens
  misc_RNA (1)...(19): siRNA sense strand
ugaaagauugaaccuguuu

SEQ ID NO: 1483195 - RNA, 19 nt, Homo sapiens
  misc_RNA (1)...(19): siRNA sense strand
gaaacugcgaguauucuca

SEQ ID NO: 1483196 - RNA, 19 nt, Homo sapiens
  misc_RNA (1)...(19): siRNA sense strand
ggacacugaguuucuugaa

SEQ ID NO: 1483197 - RNA, 19 nt, Homo sapiens
  misc_RNA (1)...(19): siRNA sense strand
agaaugagaguaucgaaga

SEQ ID NO: 1483198 - RNA, 19 nt, Homo sapiens
  misc_RNA (1)...(19): siRNA sense strand
ggauaaugaguguggauga

SEQ ID NO: 1483199 - RNA, 19 nt, Homo sapiens
  misc_RNA (1)...(19): siRNA sense strand
gauaaugaguguggaugag

SEQ ID NO: 1483200 - RNA, 19 nt, Homo sapiens
  misc_RNA (1)...(19): siRNA sense strand
gggaagaagaggaggaaga

SEQ ID NO: 1483201 - RNA, 19 nt, Homo sapiens
  misc_RNA (1)...(19): siRNA sense strand
gggccacucuuaaccagau

SEQ ID NO: 1483202 - RNA, 19 nt, Homo sapiens
  misc_RNA (1)...(19): siRNA sense strand
agaagucacugaugguuac

SEQ ID NO: 1483203 - RNA, 19 nt, Homo sapiens
  misc_RNA (1)...(19): siRNA sense strand
gaagguaauacgggaagaa

SEQ ID NO: 1483204 - RNA, 19 nt, Homo sapiens
  misc_RNA (1)...(19): siRNA sense strand
gcagaagucacugaugguu

SEQ ID NO: 1483205 - RNA, 19 nt, Homo sapiens
  misc_RNA (1)...(19): siRNA sense strand
uaacagaggcagaaaagaa

SEQ ID NO: 1483206 - RNA, 19 nt, Homo sapiens
  misc_RNA (1)...(19): siRNA sense strand
uauggccgcuggaaucaug

SEQ ID NO: 1483207 - RNA, 19 nt, Homo sapiens
  misc_RNA (1)...(19): siRNA sense strand
gacggucucggguauguuu

SEQ ID NO: 1483208 - RNA, 19 nt, Homo sapiens
  misc_RNA (1)...(19): siRNA sense strand
ggaagaagaggaggaagag

SEQ ID NO: 1483209 - RNA, 19 nt, Homo sapiens
  misc_RNA (1)...(19): siRNA sense strand
caaagaguggccaguaaca

SEQ ID NO: 1483210 - RNA, 19 nt, Homo sapiens
  misc_RNA (1)...(19): siRNA sense strand
gcaggagaaugccaaugcu

SEQ ID NO: 1483211 - RNA, 19 nt, Homo sapiens
  misc_RNA (1)...(19): siRNA sense strand
gguaauacgggaagaagag

SEQ ID NO: 1483212 - RNA, 19 nt, Homo sapiens
  misc_RNA (1)...(19): siRNA sense strand
ucucggccauucccaguga

SEQ ID NO: 1483213 - RNA, 19 nt, Homo sapiens
  misc_RNA (1)...(19): siRNA sense strand
gaauuacuggcccauuugu

SEQ ID NO: 1483214 - RNA, 19 nt, Homo sapiens
  misc_RNA (1)...(19): siRNA sense strand
uaucgaagagccagaggaa

SEQ ID NO: 1483215 - RNA, 19 nt, Homo sapiens
  misc_RNA (1)...(19): siRNA sense strand
ggugcaggauaaugagugu

SEQ ID NO: 1483216 - RNA, 19 nt, Homo sapiens
  misc_RNA (1)...(19): siRNA sense strand
ggacuggugcaggauaaug

SEQ ID NO: 1483217 - RNA, 19 nt, Homo sapiens
  misc_RNA (1)...(19): siRNA sense strand
gaugagcagaagucacuga

SEQ ID NO: 1483218 - RNA, 19 nt, Homo sapiens
  misc_RNA (1)...(19): siRNA sense strand
ggacaggcaauggcacaug

SEQ ID NO: 1483219 - RNA, 19 nt, Homo sapiens
  misc_RNA (1)...(19): siRNA sense strand
agauugaaccuguuucuag

SEQ ID NO: 1483220 - RNA, 19 nt, Homo sapiens
  misc_RNA (1)...(19): siRNA sense strand
guccaucaguguagaagag

SEQ ID NO: 1483221 - RNA, 19 nt, Homo sapiens
  misc_RNA (1)...(19): siRNA sense strand
gcaagauauuccggaagca

SEQ ID NO: 1483222 - RNA, 19 nt, Homo sapiens
  misc_RNA (1)...(19): siRNA sense strand
caacccguccaucagugua

SEQ ID NO: 1483223 - RNA, 19 nt, Homo sapiens
  misc_RNA (1)...(19): siRNA sense strand
gacuggugcaggauaauga

SEQ ID NO: 1483224 - RNA, 19 nt, Homo sapiens
  misc_RNA (1)...(19): siRNA sense strand
agaauuacuggcccauuug

SEQ ID NO: 1483225 - RNA, 19 nt, Homo sapiens
  misc_RNA (1)...(19): siRNA sense strand
caucucaccagaauuacug

SEQ ID NO: 1483226 - RNA, 19 nt, Homo sapiens
  misc_RNA (1)...(19): siRNA sense strand
ccggagagcgguggagaaa

SEQ ID NO: 1483227 - RNA, 19 nt, Homo sapiens
  misc_RNA (1)...(19): siRNA sense strand
gcccaggugagguaucuga

SEQ ID NO: 1483228 - RNA, 19 nt, Homo sapiens
  misc_RNA (1)...(19): siRNA sense strand
aagaguggccaguaacaga

SEQ ID NO: 1483229 - RNA, 19 nt, Homo sapiens
  misc_RNA (1)...(19): siRNA sense strand
gaguguggaugagcagaag

SEQ ID NO: 1483230 - RNA, 19 nt, Homo sapiens
  misc_RNA (1)...(19): siRNA sense strand
uaccggaaacugcgaguau

SEQ ID NO: 1483231 - RNA, 19 nt, Homo sapiens
  misc_RNA (1)...(19): siRNA sense strand
gaagcaggagaaugccaau

SEQ ID NO: 1483232 - RNA, 19 nt, Homo sapiens
  misc_RNA (1)...(19): siRNA sense strand
augcuguggugccggcuua

SEQ ID NO: 1483233 - RNA, 19 nt, Homo sapiens
  misc_RNA (1)...(19): siRNA sense strand
agucaaagaguggccagua

SEQ ID NO: 1483234 - RNA, 19 nt, Homo sapiens
  misc_RNA (1)...(19): siRNA sense strand
gcuauggccgcuggaauca

SEQ ID NO: 1483235 - RNA, 19 nt, Homo sapiens
  misc_RNA (1)...(19): siRNA sense strand
agacaacccguccaucagu

SEQ ID NO: 1483236 - RNA, 19 nt, Homo sapiens
  misc_RNA (1)...(19): siRNA sense strand
ggaccucaugcacauagug

SEQ ID NO: 1483237 - RNA, 19 nt, Homo sapiens
  misc_RNA (1)...(19): siRNA sense strand
uugaaagauugaaccuguu

SEQ ID NO: 1483238 - RNA, 19 nt, Homo sapiens
  misc_RNA (1)...(19): siRNA sense strand
gagcuaaugaagguaauac

SEQ ID NO: 1483239 - RNA, 19 nt, Homo sapiens
  misc_RNA (1)...(19): siRNA sense strand
ucuggaagauacugauguc

SEQ ID NO: 1483240 - RNA, 19 nt, Homo sapiens
  misc_RNA (1)...(19): siRNA sense strand
cacagugcccugcaucuca

SEQ ID NO: 1483241 - RNA, 19 nt, Homo sapiens
  misc_RNA (1)...(19): siRNA sense strand
gccaguaacagaggcagaa

SEQ ID NO: 1483242 - RNA, 19 nt, Homo sapiens
  misc_RNA (1)...(19): siRNA sense strand
ccuuugagaaugagaguau

SEQ ID NO: 1483243 - RNA, 19 nt, Homo sapiens
  misc_RNA (1)...(19): siRNA sense strand
aggccuccuuugagaauga

SEQ ID NO: 1483244 - RNA, 19 nt, Homo sapiens
  misc_RNA (1)...(19): siRNA sense strand
gguaucugaagaccuauca

SEQ ID NO: 1483245 - RNA, 19 nt, Homo sapiens
  misc_RNA (1)...(19): siRNA sense strand
ggccuuuaagcaaguguuu

SEQ ID NO: 1483246 - RNA, 19 nt, Homo sapiens
  misc_RNA (1)...(19): siRNA sense strand
gcaacgagcuggacaccuu

SEQ ID NO: 1483247 - RNA, 19 nt, Homo sapiens
  misc_RNA (1)...(19): siRNA sense strand
gcagugaccuguuccaaag

SEQ ID NO: 1483248 - RNA, 19 nt, Homo sapiens
  misc_RNA (1)...(19): siRNA sense strand
aaacugucaugcauagaua

SEQ ID NO: 1483249 - RNA, 19 nt, Homo sapiens
  misc_RNA (1)...(19): siRNA sense strand
gaaccgccaucccuuggaa

SEQ ID NO: 1483250 - RNA, 19 nt, Homo sapiens
  misc_RNA (1)...(19): siRNA sense strand
gcacacacaauuaucugua

SEQ ID NO: 1483251 - RNA, 19 nt, Homo sapiens
  misc_RNA (1)...(19): siRNA sense strand
gcuggaagcugcagucuac

SEQ ID NO: 1483252 - RNA, 19 nt, Homo sapiens
  misc_RNA (1)...(19): siRNA sense strand
cagaugcgcucaccuaugg

SEQ ID NO: 1483253 - RNA, 19 nt, Homo sapiens
  misc_RNA (1)...(19): siRNA sense strand
gguggugucugcaucuuau

SEQ ID NO: 1483254 - RNA, 19 nt, Homo sapiens
  misc_RNA (1)...(19): siRNA sense strand
uaagacacauuggaguaaa

SEQ ID NO: 1483255 - RNA, 19 nt, Homo sapiens
  misc_RNA (1)...(19): siRNA sense strand
guaagacacauuggaguaa

SEQ ID NO: 1483256 - RNA, 19 nt, Homo sapiens
  misc_RNA (1)...(19): siRNA sense strand
gggaaugucugugccuuca

SEQ ID NO: 1483257 - RNA, 19 nt, Homo sapiens
  misc_RNA (1)...(19): siRNA sense strand
ccacuucuacaucuucuuu

SEQ ID NO: 1483258 - RNA, 19 nt, Homo sapiens
  misc_RNA (1)...(19): siRNA sense strand
caccuucucuguccacuuc

SEQ ID NO: 1483259 - RNA, 19 nt, Homo sapiens
  misc_RNA (1)...(19): siRNA sense strand
gaaugucugugccuucacu

SEQ ID NO: 1483260 - RNA, 19 nt, Homo sapiens
  misc_RNA (1)...(19): siRNA sense strand
gugcagaugcgcucaccua

SEQ ID NO: 1483261 - RNA, 19 nt, Homo sapiens
  misc_RNA (1)...(19): siRNA sense strand
caaacugucaugcauagau

SEQ ID NO: 1483262 - RNA, 19 nt, Homo sapiens
  misc_RNA (1)...(19): siRNA sense strand
gcagaugcgcucaccuaug

SEQ ID NO: 1483263 - RNA, 19 nt, Homo sapiens
  misc_RNA (1)...(19): siRNA sense strand
gcaagcugcugcgcacaca

SEQ ID NO: 1483264 - RNA, 19 nt, Homo sapiens
  misc_RNA (1)...(19): siRNA sense strand
uguaagacacauuggagua

SEQ ID NO: 1483265 - RNA, 19 nt, Homo sapiens
  misc_RNA (1)...(19): siRNA sense strand
cccaaacugucaugcauag

SEQ ID NO: 1483266 - RNA, 19 nt, Homo sapiens
  misc_RNA (1)...(19): siRNA sense strand
ugucaugcauagauaaugg

SEQ ID NO: 1483267 - RNA, 19 nt, Homo sapiens
  misc_RNA (1)...(19): siRNA sense strand
gagucgauaugugcuggaa

SEQ ID NO: 1483268 - RNA, 19 nt, Homo sapiens
  misc_RNA (1)...(19): siRNA sense strand
gucuacaccuucaccaugu

SEQ ID NO: 1483269 - RNA, 19 nt, Homo sapiens
  misc_RNA (1)...(19): siRNA sense strand
aagcugcagucuacaccuu

SEQ ID NO: 1483270 - RNA, 19 nt, Homo sapiens
  misc_RNA (1)...(19): siRNA sense strand
gcugcagucuacaccuuca

SEQ ID NO: 1483271 - RNA, 19 nt, Homo sapiens
  misc_RNA (1)...(19): siRNA sense strand
aagacacauuggaguaaau

SEQ ID NO: 1483272 - RNA, 19 nt, Homo sapiens
  misc_RNA (1)...(19): siRNA sense strand
cugcugcgcacacacaauu

SEQ ID NO: 1483273 - RNA, 19 nt, Homo sapiens
  misc_RNA (1)...(19): siRNA sense strand
cacacacaauuaucuguac

SEQ ID NO: 1483274 - RNA, 19 nt, Homo sapiens
  misc_RNA (1)...(19): siRNA sense strand
gcugcgcacacacaauuau

SEQ ID NO: 1483275 - RNA, 19 nt, Homo sapiens
  misc_RNA (1)...(19): siRNA sense strand
gccauucggagucgauaug

SEQ ID NO: 1483276 - RNA, 19 nt, Homo sapiens
  misc_RNA (1)...(19): siRNA sense strand
gaaagggacgcaucgagua

SEQ ID NO: 1483277 - RNA, 19 nt, Homo sapiens
  misc_RNA (1)...(19): siRNA sense strand
ucgaguaccuggugaaaug

SEQ ID NO: 1483278 - RNA, 19 nt, Homo sapiens
  misc_RNA (1)...(19): siRNA sense strand
acacagauccgccacauga

SEQ ID NO: 1483279 - RNA, 19 nt, Homo sapiens
  misc_RNA (1)...(19): siRNA sense strand
gaugugcauuucucuguca

SEQ ID NO: 1483280 - RNA, 19 nt, Homo sapiens
  misc_RNA (1)...(19): siRNA sense strand
guacacagauccgccacau

SEQ ID NO: 1483281 - RNA, 19 nt, Homo sapiens
  misc_RNA (1)...(19): siRNA sense strand
ggaaccgcaucauccugaa

SEQ ID NO: 1483282 - RNA, 19 nt, Homo sapiens
  misc_RNA (1)...(19): siRNA sense strand
ggccgaauccaucaucaaa

SEQ ID NO: 1483283 - RNA, 19 nt, Homo sapiens
  misc_RNA (1)...(19): siRNA sense strand
ucaccgaugucaccagcaa

SEQ ID NO: 1483284 - RNA, 19 nt, Homo sapiens
  misc_RNA (1)...(19): siRNA sense strand
gcucauugcagccuucgaa

SEQ ID NO: 1483285 - RNA, 19 nt, Homo sapiens
  misc_RNA (1)...(19): siRNA sense strand
ucaaacggcggauccgaaa

SEQ ID NO: 1483286 - RNA, 19 nt, Homo sapiens
  misc_RNA (1)...(19): siRNA sense strand
agagggagcgugagcugua

SEQ ID NO: 1483287 - RNA, 19 nt, Homo sapiens
  misc_RNA (1)...(19): siRNA sense strand
gcaucauccugaaccugaa

SEQ ID NO: 1483288 - RNA, 19 nt, Homo sapiens
  misc_RNA (1)...(19): siRNA sense strand
gagggagcgugagcuguau

SEQ ID NO: 1483289 - RNA, 19 nt, Homo sapiens
  misc_RNA (1)...(19): siRNA sense strand
ggcaagagcaagaaguuca

SEQ ID NO: 1483290 - RNA, 19 nt, Homo sapiens
  misc_RNA (1)...(19): siRNA sense strand
ucagugaugugcauuucuc

SEQ ID NO: 1483291 - RNA, 19 nt, Homo sapiens
  misc_RNA (1)...(19): siRNA sense strand
gaugucacccugcuccaau

SEQ ID NO: 1483292 - RNA, 19 nt, Homo sapiens
  misc_RNA (1)...(19): siRNA sense strand
ggugggcgaucaaguacag

SEQ ID NO: 1483293 - RNA, 19 nt, Homo sapiens
  misc_RNA (1)...(19): siRNA sense strand
cuacaccacaguccucuga

SEQ ID NO: 1483294 - RNA, 19 nt, Homo sapiens
  misc_RNA (1)...(19): siRNA sense strand
cauugcagccuucgaacaa

SEQ ID NO: 1483295 - RNA, 19 nt, Homo sapiens
  misc_RNA (1)...(19): siRNA sense strand
gacccaaacccaaaacuuu

SEQ ID NO: 1483296 - RNA, 19 nt, Homo sapiens
  misc_RNA (1)...(19): siRNA sense strand
guuauaggcaagagcaaga

SEQ ID NO: 1483297 - RNA, 19 nt, Homo sapiens
  misc_RNA (1)...(19): siRNA sense strand
cugcaacccugaggauuuc

SEQ ID NO: 1483298 - RNA, 19 nt, Homo sapiens
  misc_RNA (1)...(19): siRNA sense strand
ucugcaacccugaggauuu

SEQ ID NO: 1483299 - RNA, 19 nt, Homo sapiens
  misc_RNA (1)...(19): siRNA sense strand
ccgaauccaucaucaaacg

SEQ ID NO: 1483300 - RNA, 19 nt, Homo sapiens
  misc_RNA (1)...(19): siRNA sense strand
gagacggugcgcaucauca

SEQ ID NO: 1483301 - RNA, 19 nt, Homo sapiens
  misc_RNA (1)...(19): siRNA sense strand
ccaaaacuuuccuccugaa

SEQ ID NO: 1483302 - RNA, 19 nt, Homo sapiens
  misc_RNA (1)...(19): siRNA sense strand
uaggcaagagcaagaaguu

SEQ ID NO: 1483303 - RNA, 19 nt, Homo sapiens
  misc_RNA (1)...(19): siRNA sense strand
gugaugugcauuucucugu

SEQ ID NO: 1483304 - RNA, 19 nt, Homo sapiens
  misc_RNA (1)...(19): siRNA sense strand
cuugggagcccgaggagaa

SEQ ID NO: 1483305 - RNA, 19 nt, Homo sapiens
  misc_RNA (1)...(19): siRNA sense strand
caucgaguaccuggugaaa

SEQ ID NO: 1483306 - RNA, 19 nt, Homo sapiens
  misc_RNA (1)...(19): siRNA sense strand
gagcagcgguugacacuga

SEQ ID NO: 1483307 - RNA, 19 nt, Homo sapiens
  misc_RNA (1)...(19): siRNA sense strand
gggaauguguccacucgua

SEQ ID NO: 1483308 - RNA, 19 nt, Homo sapiens
  misc_RNA (1)...(19): siRNA sense strand
gcagagagcaacaccauga

SEQ ID NO: 1483309 - RNA, 19 nt, Homo sapiens
  misc_RNA (1)...(19): siRNA sense strand
caacucaucgccagaaauu

SEQ ID NO: 1483310 - RNA, 19 nt, Homo sapiens
  misc_RNA (1)...(19): siRNA sense strand
gagaugcaguuaccugugu

SEQ ID NO: 1483311 - RNA, 19 nt, Homo sapiens
  misc_RNA (1)...(19): siRNA sense strand
ggacuucaguaucaacaca

SEQ ID NO: 1483312 - RNA, 19 nt, Homo sapiens
  misc_RNA (1)...(19): siRNA sense strand
gagcauggcggcuuuguca

SEQ ID NO: 1483313 - RNA, 19 nt, Homo sapiens
  misc_RNA (1)...(19): siRNA sense strand
ggaagaguaacuuugauau

SEQ ID NO: 1483314 - RNA, 19 nt, Homo sapiens
  misc_RNA (1)...(19): siRNA sense strand
gcacacacagccacaguga

SEQ ID NO: 1483315 - RNA, 19 nt, Homo sapiens
  misc_RNA (1)...(19): siRNA sense strand
gcaggaguguggagucugu

SEQ ID NO: 1483316 - RNA, 19 nt, Homo sapiens
  misc_RNA (1)...(19): siRNA sense strand
cgacaagacagucaaagug

SEQ ID NO: 1483317 - RNA, 19 nt, Homo sapiens
  misc_RNA (1)...(19): siRNA sense strand
gguugacacugacagaaga

SEQ ID NO: 1483318 - RNA, 19 nt, Homo sapiens
  misc_RNA (1)...(19): siRNA sense strand
gugaugguuuggaagagua

SEQ ID NO: 1483319 - RNA, 19 nt, Homo sapiens
  misc_RNA (1)...(19): siRNA sense strand
gaugaacaagugaugguuu

SEQ ID NO: 1483320 - RNA, 19 nt, Homo sapiens
  misc_RNA (1)...(19): siRNA sense strand
gacaagagcagccgggaau

SEQ ID NO: 1483321 - RNA, 19 nt, Homo sapiens
  misc_RNA (1)...(19): siRNA sense strand
gaauguguccacucguauu

SEQ ID NO: 1483322 - RNA, 19 nt, Homo sapiens
  misc_RNA (1)...(19): siRNA sense strand
caagugaugguuuggaaga

SEQ ID NO: 1483323 - RNA, 19 nt, Homo sapiens
  misc_RNA (1)...(19): siRNA sense strand
uguguggacuucaguauca

SEQ ID NO: 1483324 - RNA, 19 nt, Homo sapiens
  misc_RNA (1)...(19): siRNA sense strand
gaaccagcagcuaaucaug

SEQ ID NO: 1483325 - RNA, 19 nt, Homo sapiens
  misc_RNA (1)...(19): siRNA sense strand
gaacaagugaugguuugga

SEQ ID NO: 1483326 - RNA, 19 nt, Homo sapiens
  misc_RNA (1)...(19): siRNA sense strand
uggaggcucugaugaacaa

SEQ ID NO: 1483327 - RNA, 19 nt, Homo sapiens
  misc_RNA (1)...(19): siRNA sense strand
ggaccagccaccacuguug

SEQ ID NO: 1483328 - RNA, 19 nt, Homo sapiens
  misc_RNA (1)...(19): siRNA sense strand
gcugcagcauuaucaguug

SEQ ID NO: 1483329 - RNA, 19 nt, Homo sapiens
  misc_RNA (1)...(19): siRNA sense strand
gacaagacagucaaagugu

SEQ ID NO: 1483330 - RNA, 19 nt, Homo sapiens
  misc_RNA (1)...(19): siRNA sense strand
ugugugaacuucucuccuu

SEQ ID NO: 1483331 - RNA, 19 nt, Homo sapiens
  misc_RNA (1)...(19): siRNA sense strand
gaagauccuggaccugaug

SEQ ID NO: 1483332 - RNA, 19 nt, Homo sapiens
  misc_RNA (1)...(19): siRNA sense strand
aaaggugaguccacugugu

SEQ ID NO: 1483333 - RNA, 19 nt, Homo sapiens
  misc_RNA (1)...(19): siRNA sense strand
caucgugucugccagugau

SEQ ID NO: 1483334 - RNA, 19 nt, Homo sapiens
  misc_RNA (1)...(19): siRNA sense strand
uggaagaguaacuuugaua

SEQ ID NO: 1483335 - RNA, 19 nt, Homo sapiens
  misc_RNA (1)...(19): siRNA sense strand
gcagugaacgggcucucuu

SEQ ID NO: 1483336 - RNA, 19 nt, Homo sapiens
  misc_RNA (1)...(19): siRNA sense strand
ugugggacgugcggacuua

SEQ ID NO: 1483337 - RNA, 19 nt, Homo sapiens
  misc_RNA (1)...(19): siRNA sense strand
ggaauguguccacucguau

SEQ ID NO: 1483338 - RNA, 19 nt, Homo sapiens
  misc_RNA (1)...(19): siRNA sense strand
guuaagcugugggacaaga

SEQ ID NO: 1483339 - RNA, 19 nt, Homo sapiens
  misc_RNA (1)...(19): siRNA sense strand
gugaugacaagacuguuaa

SEQ ID NO: 1483340 - RNA, 19 nt, Homo sapiens
  misc_RNA (1)...(19): siRNA sense strand
gacagccucugacgacaag

SEQ ID NO: 1483341 - RNA, 19 nt, Homo sapiens
  misc_RNA (1)...(19): siRNA sense strand
ugacagaagacaagcugaa

SEQ ID NO: 1483342 - RNA, 19 nt, Homo sapiens
  misc_RNA (1)...(19): siRNA sense strand
aacaagugaugguuuggaa

SEQ ID NO: 1483343 - RNA, 19 nt, Homo sapiens
  misc_RNA (1)...(19): siRNA sense strand
gagaaccagcagcuaauca

SEQ ID NO: 1483344 - RNA, 19 nt, Homo sapiens
  misc_RNA (1)...(19): siRNA sense strand
gguccgcugugccaaguuc

SEQ ID NO: 1483345 - RNA, 19 nt, Homo sapiens
  misc_RNA (1)...(19): siRNA sense strand
ugaacgggcucucuuucca

SEQ ID NO: 1483346 - RNA, 19 nt, Homo sapiens
  misc_RNA (1)...(19): siRNA sense strand
gcagugauggccaguccuu

SEQ ID NO: 1483347 - RNA, 19 nt, Homo sapiens
  misc_RNA (1)...(19): siRNA sense strand
ucgggaaacuaccugauca

SEQ ID NO: 1483348 - RNA, 19 nt, Homo sapiens
  misc_RNA (1)...(19): siRNA sense strand
ggcaacucaucgccagaaa

SEQ ID NO: 1483349 - RNA, 19 nt, Homo sapiens
  misc_RNA (1)...(19): siRNA sense strand
gcacaugaagccgcaguca

SEQ ID NO: 1483350 - RNA, 19 nt, Homo sapiens
  misc_RNA (1)...(19): siRNA sense strand
ugaagauccuggaccugau

SEQ ID NO: 1483351 - RNA, 19 nt, Homo sapiens
  misc_RNA (1)...(19): siRNA sense strand
ccgcuucacuggccacaag

SEQ ID NO: 1483352 - RNA, 19 nt, Homo sapiens
  misc_RNA (1)...(19): siRNA sense strand
gcaacucaucgccagaaau

SEQ ID NO: 1483353 - RNA, 19 nt, Homo sapiens
  misc_RNA (1)...(19): siRNA sense strand
gcauggacaacacagugaa

SEQ ID NO: 1483354 - RNA, 19 nt, Homo sapiens
  misc_RNA (1)...(19): siRNA sense strand
ccacucguauugugagcau

SEQ ID NO: 1483355 - RNA, 19 nt, Homo sapiens
  misc_RNA (1)...(19): siRNA sense strand
agugaugacaagacuguua

SEQ ID NO: 1483356 - RNA, 19 nt, Homo sapiens
  misc_RNA (1)...(19): siRNA sense strand
cagaagacaagcugaagca

SEQ ID NO: 1483357 - RNA, 19 nt, Homo sapiens
  misc_RNA (1)...(19): siRNA sense strand
uauuguugaucauggagaa

SEQ ID NO: 1483358 - RNA, 19 nt, Homo sapiens
  misc_RNA (1)...(19): siRNA sense strand
augaacaagugaugguuug

SEQ ID NO: 1483359 - RNA, 19 nt, Homo sapiens
  misc_RNA (1)...(19): siRNA sense strand
agccaccacuguugccuuu

SEQ ID NO: 1483360 - RNA, 19 nt, Homo sapiens
  misc_RNA (1)...(19): siRNA sense strand
caagagcagccgggaaugu

SEQ ID NO: 1483361 - RNA, 19 nt, Homo sapiens
  misc_RNA (1)...(19): siRNA sense strand
gaagcagugucuggagaac

SEQ ID NO: 1483362 - RNA, 19 nt, Homo sapiens
  misc_RNA (1)...(19): siRNA sense strand
ucaaaggugaguccacugu

SEQ ID NO: 1483363 - RNA, 19 nt, Homo sapiens
  misc_RNA (1)...(19): siRNA sense strand
ggagaaccagcagcuaauc

SEQ ID NO: 1483364 - RNA, 19 nt, Homo sapiens
  misc_RNA (1)...(19): siRNA sense strand
ucauggagaagucacgaaa

SEQ ID NO: 1483365 - RNA, 19 nt, Homo sapiens
  misc_RNA (1)...(19): siRNA sense strand
ccaccgagaugcaguuacc

SEQ ID NO: 1483366 - RNA, 19 nt, Homo sapiens
  misc_RNA (1)...(19): siRNA sense strand
gggcaacucaucgccagaa

SEQ ID NO: 1483367 - RNA, 19 nt, Homo sapiens
  misc_RNA (1)...(19): siRNA sense strand
ucccugagccagcauauca

SEQ ID NO: 1483368 - RNA, 19 nt, Homo sapiens
  misc_RNA (1)...(19): siRNA sense strand
cuagcacgcuggagcacau

SEQ ID NO: 1483369 - RNA, 19 nt, Homo sapiens
  misc_RNA (1)...(19): siRNA sense strand
gcggcuuugucaccuaugu

SEQ ID NO: 1483370 - RNA, 19 nt, Homo sapiens
  misc_RNA (1)...(19): siRNA sense strand
ugaagcagugucuggagaa

SEQ ID NO: 1483371 - RNA, 19 nt, Homo sapiens
  misc_RNA (1)...(19): siRNA sense strand
gguacccaaugucaaaggu

SEQ ID NO: 1483372 - RNA, 19 nt, Homo sapiens
  misc_RNA (1)...(19): siRNA sense strand
auggagaagucacgaaagu

SEQ ID NO: 1483373 - RNA, 19 nt, Homo sapiens
  misc_RNA (1)...(19): siRNA sense strand
ucacgcgccuaccgcuuca

SEQ ID NO: 1483374 - RNA, 19 nt, Homo sapiens
  misc_RNA (1)...(19): siRNA sense strand
ccagcuggauguccucacu

SEQ ID NO: 1483375 - RNA, 19 nt, Homo sapiens
  misc_RNA (1)...(19): siRNA sense strand
ggcauggacaacacaguga

SEQ ID NO: 1483376 - RNA, 19 nt, Homo sapiens
  misc_RNA (1)...(19): siRNA sense strand
cagugaacgggcucucuuu

SEQ ID NO: 1483377 - RNA, 19 nt, Homo sapiens
  misc_RNA (1)...(19): siRNA sense strand
ugacagccucugacgacaa

SEQ ID NO: 1483378 - RNA, 19 nt, Homo sapiens
  misc_RNA (1)...(19): siRNA sense strand
gcacgcuggagcacauugu

SEQ ID NO: 1483379 - RNA, 19 nt, Homo sapiens
  misc_RNA (1)...(19): siRNA sense strand
uuuggaagaguaacuuuga

SEQ ID NO: 1483380 - RNA, 19 nt, Homo sapiens
  misc_RNA (1)...(19): siRNA sense strand
ugacucaacccugaagauc

SEQ ID NO: 1483381 - RNA, 19 nt, Homo sapiens
  misc_RNA (1)...(19): siRNA sense strand
gggaaacuaccugaucaca

SEQ ID NO: 1483382 - RNA, 19 nt, Homo sapiens
  misc_RNA (1)...(19): siRNA sense strand
guacaaguauccacaauca

SEQ ID NO: 1483383 - RNA, 19 nt, Homo sapiens
  misc_RNA (1)...(19): siRNA sense strand
aaaugaagguggaacaaua

SEQ ID NO: 1483384 - RNA, 19 nt, Homo sapiens
  misc_RNA (1)...(19): siRNA sense strand
acaaucaccuugacaguaa

SEQ ID NO: 1483385 - RNA, 19 nt, Homo sapiens
  misc_RNA (1)...(19): siRNA sense strand
gaacaauacgggccacaaa

SEQ ID NO: 1483386 - RNA, 19 nt, Homo sapiens
  misc_RNA (1)...(19): siRNA sense strand
aaacucaucuucacagugu

SEQ ID NO: 1483387 - RNA, 19 nt, Homo sapiens
  misc_RNA (1)...(19): siRNA sense strand
gaacagcaacuacagaaag

SEQ ID NO: 1483388 - RNA, 19 nt, Homo sapiens
  misc_RNA (1)...(19): siRNA sense strand
ucacagaggcuaccaaugu

SEQ ID NO: 1483389 - RNA, 19 nt, Homo sapiens
  misc_RNA (1)...(19): siRNA sense strand
caaaugaccacuaccauca

SEQ ID NO: 1483390 - RNA, 19 nt, Homo sapiens
  misc_RNA (1)...(19): siRNA sense strand
ugucuaccguucacucuua

SEQ ID NO: 1483391 - RNA, 19 nt, Homo sapiens
  misc_RNA (1)...(19): siRNA sense strand
ggaguaaauugaagaacca

SEQ ID NO: 1483392 - RNA, 19 nt, Homo sapiens
  misc_RNA (1)...(19): siRNA sense strand
gauaguaccaagcugauug

SEQ ID NO: 1483393 - RNA, 19 nt, Homo sapiens
  misc_RNA (1)...(19): siRNA sense strand
agccagagcuuauagauag

SEQ ID NO: 1483394 - RNA, 19 nt, Homo sapiens
  misc_RNA (1)...(19): siRNA sense strand
ucacaguguuccacauuau

SEQ ID NO: 1483395 - RNA, 19 nt, Homo sapiens
  misc_RNA (1)...(19): siRNA sense strand
gagccagagcuuauagaua

SEQ ID NO: 1483396 - RNA, 19 nt, Homo sapiens
  misc_RNA (1)...(19): siRNA sense strand
acucuuaccuauaccuuaa

SEQ ID NO: 1483397 - RNA, 19 nt, Homo sapiens
  misc_RNA (1)...(19): siRNA sense strand
gaaaugaagguggaacaau

SEQ ID NO: 1483398 - RNA, 19 nt, Homo sapiens
  misc_RNA (1)...(19): siRNA sense strand
ggcacugucuauagucuuu

SEQ ID NO: 1483399 - RNA, 19 nt, Homo sapiens
  misc_RNA (1)...(19): siRNA sense strand
gugcagaggcugaugagaa

SEQ ID NO: 1483400 - RNA, 19 nt, Homo sapiens
  misc_RNA (1)...(19): siRNA sense strand
gggccuggcaguacaagua

SEQ ID NO: 1483401 - RNA, 19 nt, Homo sapiens
  misc_RNA (1)...(19): siRNA sense strand
gaaccagacaguggaagaa

SEQ ID NO: 1483402 - RNA, 19 nt, Homo sapiens
  misc_RNA (1)...(19): siRNA sense strand
ucuauagucuuucuuccuu

SEQ ID NO: 1483403 - RNA, 19 nt, Homo sapiens
  misc_RNA (1)...(19): siRNA sense strand
guaaauugaagaaccaugu

SEQ ID NO: 1483404 - RNA, 19 nt, Homo sapiens
  misc_RNA (1)...(19): siRNA sense strand
gggaguauucgcugauuga

SEQ ID NO: 1483405 - RNA, 19 nt, Homo sapiens
  misc_RNA (1)...(19): siRNA sense strand
ccaaugacucuuucacaga

SEQ ID NO: 1483406 - RNA, 19 nt, Homo sapiens
  misc_RNA (1)...(19): siRNA sense strand
aguauucgcugauugagau

SEQ ID NO: 1483407 - RNA, 19 nt, Homo sapiens
  misc_RNA (1)...(19): siRNA sense strand
ccaaaaugcuggugugugu

SEQ ID NO: 1483408 - RNA, 19 nt, Homo sapiens
  misc_RNA (1)...(19): siRNA sense strand
uggaugccauucacucuga

SEQ ID NO: 1483409 - RNA, 19 nt, Homo sapiens
  misc_RNA (1)...(19): siRNA sense strand
gauuguggccuguacugaa

SEQ ID NO: 1483410 - RNA, 19 nt, Homo sapiens
  misc_RNA (1)...(19): siRNA sense strand
guacaaacucaucuucaca

SEQ ID NO: 1483411 - RNA, 19 nt, Homo sapiens
  misc_RNA (1)...(19): siRNA sense strand
gagcugcaaaugaccacua

SEQ ID NO: 1483412 - RNA, 19 nt, Homo sapiens
  misc_RNA (1)...(19): siRNA sense strand
ccacaaacaacuccuagag

SEQ ID NO: 1483413 - RNA, 19 nt, Homo sapiens
  misc_RNA (1)...(19): siRNA sense strand
gaugaacagcaacuacaga

SEQ ID NO: 1483414 - RNA, 19 nt, Homo sapiens
  misc_RNA (1)...(19): siRNA sense strand
gaggagaagagcaucuaug

SEQ ID NO: 1483415 - RNA, 19 nt, Homo sapiens
  misc_RNA (1)...(19): siRNA sense strand
cacaaucaccuugacagua

SEQ ID NO: 1483416 - RNA, 19 nt, Homo sapiens
  misc_RNA (1)...(19): siRNA sense strand
gcgcacaguaaccaacuuu

SEQ ID NO: 1483417 - RNA, 19 nt, Homo sapiens
  misc_RNA (1)...(19): siRNA sense strand
caagagcaugcgcacagua

SEQ ID NO: 1483418 - RNA, 19 nt, Homo sapiens
  misc_RNA (1)...(19): siRNA sense strand
uccauguggugaucaaauu

SEQ ID NO: 1483419 - RNA, 19 nt, Homo sapiens
  misc_RNA (1)...(19): siRNA sense strand
ccagacaguggaagaaaug

SEQ ID NO: 1483420 - RNA, 19 nt, Homo sapiens
  misc_RNA (1)...(19): siRNA sense strand
cuacugcuccaucaucuug

SEQ ID NO: 1483421 - RNA, 19 nt, Homo sapiens
  misc_RNA (1)...(19): siRNA sense strand
caauacgggccacaaacaa

SEQ ID NO: 1483422 - RNA, 19 nt, Homo sapiens
  misc_RNA (1)...(19): siRNA sense strand
gcaguacaaguauccacaa

SEQ ID NO: 1483423 - RNA, 19 nt, Homo sapiens
  misc_RNA (1)...(19): siRNA sense strand
gcugauugagguacaaguu

SEQ ID NO: 1483424 - RNA, 19 nt, Homo sapiens
  misc_RNA (1)...(19): siRNA sense strand
gugcaucgucuaccaccua

SEQ ID NO: 1483425 - RNA, 19 nt, Homo sapiens
  misc_RNA (1)...(19): siRNA sense strand
gcgaggagaagagcaucua

SEQ ID NO: 1483426 - RNA, 19 nt, Homo sapiens
  misc_RNA (1)...(19): siRNA sense strand
uucacaguguuccacauua

SEQ ID NO: 1483427 - RNA, 19 nt, Homo sapiens
  misc_RNA (1)...(19): siRNA sense strand
ccagcuugccguugacauu

SEQ ID NO: 1483428 - RNA, 19 nt, Homo sapiens
  misc_RNA (1)...(19): siRNA sense strand
uauagucuuucuuccuugu

SEQ ID NO: 1483429 - RNA, 19 nt, Homo sapiens
  misc_RNA (1)...(19): siRNA sense strand
cacagaggcuaccaauguc

SEQ ID NO: 1483430 - RNA, 19 nt, Homo sapiens
  misc_RNA (1)...(19): siRNA sense strand
ggaacaauacgggccacaa

SEQ ID NO: 1483431 - RNA, 19 nt, Homo sapiens
  misc_RNA (1)...(19): siRNA sense strand
ccagagcuuauagauagua

SEQ ID NO: 1483432 - RNA, 19 nt, Homo sapiens
  misc_RNA (1)...(19): siRNA sense strand
caguacaaguauccacaau

SEQ ID NO: 1483433 - RNA, 19 nt, Homo sapiens
  misc_RNA (1)...(19): siRNA sense strand
aagagcaugcgcacaguaa

SEQ ID NO: 1483434 - RNA, 19 nt, Homo sapiens
  misc_RNA (1)...(19): siRNA sense strand
ccaagcugauugagguaca

SEQ ID NO: 1483435 - RNA, 19 nt, Homo sapiens
  misc_RNA (1)...(19): siRNA sense strand
gcaacuccuuggugaucca

SEQ ID NO: 1483436 - RNA, 19 nt, Homo sapiens
  misc_RNA (1)...(19): siRNA sense strand
ggaccugaaggaguacaaa

SEQ ID NO: 1483437 - RNA, 19 nt, Homo sapiens
  misc_RNA (1)...(19): siRNA sense strand
auuguggccuguacugaaa

SEQ ID NO: 1483438 - RNA, 19 nt, Homo sapiens
  misc_RNA (1)...(19): siRNA sense strand
uggcagaucuuuuggugaa

SEQ ID NO: 1483439 - RNA, 19 nt, Homo sapiens
  misc_RNA (1)...(19): siRNA sense strand
caagcugauugagguacaa

SEQ ID NO: 1483440 - RNA, 19 nt, Homo sapiens
  misc_RNA (1)...(19): siRNA sense strand
ucugggcauuauaucauuu

SEQ ID NO: 1483441 - RNA, 19 nt, Homo sapiens
  misc_RNA (1)...(19): siRNA sense strand
ccuuguugaucuuguaugu

SEQ ID NO: 1483442 - RNA, 19 nt, Homo sapiens
  misc_RNA (1)...(19): siRNA sense strand
gacaguggaagaaaugaag

SEQ ID NO: 1483443 - RNA, 19 nt, Homo sapiens
  misc_RNA (1)...(19): siRNA sense strand
acaaacucaucuucacagu

SEQ ID NO: 1483444 - RNA, 19 nt, Homo sapiens
  misc_RNA (1)...(19): siRNA sense strand
ccuuccagcuugccguuga

SEQ ID NO: 1483445 - RNA, 19 nt, Homo sapiens
  misc_RNA (1)...(19): siRNA sense strand
ggaagaaaugaagguggaa

SEQ ID NO: 1483446 - RNA, 19 nt, Homo sapiens
  misc_RNA (1)...(19): siRNA sense strand
gagcuuauagauaguacca

SEQ ID NO: 1483447 - RNA, 19 nt, Homo sapiens
  misc_RNA (1)...(19): siRNA sense strand
caagaucuccaagcgaauc

SEQ ID NO: 1483448 - RNA, 19 nt, Homo sapiens
  misc_RNA (1)...(19): siRNA sense strand
guggugaucaaauucaaga

SEQ ID NO: 1483449 - RNA, 19 nt, Homo sapiens
  misc_RNA (1)...(19): siRNA sense strand
cagaggcuaccaaugucua

SEQ ID NO: 1483450 - RNA, 19 nt, Homo sapiens
  misc_RNA (1)...(19): siRNA sense strand
ugaacagcaacuacagaaa

SEQ ID NO: 1483451 - RNA, 19 nt, Homo sapiens
  misc_RNA (1)...(19): siRNA sense strand
gccaugugcuccacuuuug

SEQ ID NO: 1483452 - RNA, 19 nt, Homo sapiens
  misc_RNA (1)...(19): siRNA sense strand
caaguuguucucauauugg

SEQ ID NO: 1483453 - RNA, 19 nt, Homo sapiens
  misc_RNA (1)...(19): siRNA sense strand
guccuggagcugcaaauga

SEQ ID NO: 1483454 - RNA, 19 nt, Homo sapiens
  misc_RNA (1)...(19): siRNA sense strand
gagauuguggccuguacug

SEQ ID NO: 1483455 - RNA, 19 nt, Homo sapiens
  misc_RNA (1)...(19): siRNA sense strand
gaguauucgcugauugaga

SEQ ID NO: 1483456 - RNA, 19 nt, Homo sapiens
  misc_RNA (1)...(19): siRNA sense strand
ccacaaucaccuugacagu

SEQ ID NO: 1483457 - RNA, 19 nt, Homo sapiens
  misc_RNA (1)...(19): siRNA sense strand
acaauacgggccacaaaca

SEQ ID NO: 1483458 - RNA, 19 nt, Homo sapiens
  misc_RNA (1)...(19): siRNA sense strand
uagucuuucuuccuuguug

SEQ ID NO: 1483459 - RNA, 19 nt, Homo sapiens
  misc_RNA (1)...(19): siRNA sense strand
gcaucuauggcacugucua

SEQ ID NO: 1483460 - RNA, 19 nt, Homo sapiens
  misc_RNA (1)...(19): siRNA sense strand
ucaagagcaugcgcacagu

SEQ ID NO: 1483461 - RNA, 19 nt, Homo sapiens
  misc_RNA (1)...(19): siRNA sense strand
caaucaccuugacaguaau

SEQ ID NO: 1483462 - RNA, 19 nt, Homo sapiens
  misc_RNA (1)...(19): siRNA sense strand
gcaagaucuccaagcgaau

SEQ ID NO: 1483463 - RNA, 19 nt, Homo sapiens
  misc_RNA (1)...(19): siRNA sense strand
ugcagaggcugaugagaac

SEQ ID NO: 1483464 - RNA, 19 nt, Homo sapiens
  misc_RNA (1)...(19): siRNA sense strand
ccaauccccuucucuaugg

SEQ ID NO: 1483465 - RNA, 19 nt, Homo sapiens
  misc_RNA (1)...(19): siRNA sense strand
cuuccuuguugaucuugua

SEQ ID NO: 1483466 - RNA, 19 nt, Homo sapiens
  misc_RNA (1)...(19): siRNA sense strand
cgggaguauucgcugauug

SEQ ID NO: 1483467 - RNA, 19 nt, Homo sapiens
  misc_RNA (1)...(19): siRNA sense strand
cguucacucuuaccuauac

SEQ ID NO: 1483468 - RNA, 19 nt, Homo sapiens
  misc_RNA (1)...(19): siRNA sense strand
gacccugagccagagcuua

SEQ ID NO: 1483469 - RNA, 19 nt, Homo sapiens
  misc_RNA (1)...(19): siRNA sense strand
cagcuugccguugacauug

SEQ ID NO: 1483470 - RNA, 19 nt, Homo sapiens
  misc_RNA (1)...(19): siRNA sense strand
caucuauggcacugucuau

SEQ ID NO: 1483471 - RNA, 19 nt, Homo sapiens
  misc_RNA (1)...(19): siRNA sense strand
ugucaaagcuaaacagaaa

SEQ ID NO: 1483472 - RNA, 19 nt, Homo sapiens
  misc_RNA (1)...(19): siRNA sense strand
ugacaaagaugagauacuu

SEQ ID NO: 1483473 - RNA, 19 nt, Homo sapiens
  misc_RNA (1)...(19): siRNA sense strand
gaaaggacagauuaugaaa

SEQ ID NO: 1483474 - RNA, 19 nt, Homo sapiens
  misc_RNA (1)...(19): siRNA sense strand
ggacaggcaauuccucaua

SEQ ID NO: 1483475 - RNA, 19 nt, Homo sapiens
  misc_RNA (1)...(19): siRNA sense strand
ugaacaagaugacuuugaa

SEQ ID NO: 1483476 - RNA, 19 nt, Homo sapiens
  misc_RNA (1)...(19): siRNA sense strand
gcaauuccucauagaaaua

SEQ ID NO: 1483477 - RNA, 19 nt, Homo sapiens
  misc_RNA (1)...(19): siRNA sense strand
cgagacuacuucagccuua

SEQ ID NO: 1483478 - RNA, 19 nt, Homo sapiens
  misc_RNA (1)...(19): siRNA sense strand
gaagaagccaaggaaauuu

SEQ ID NO: 1483479 - RNA, 19 nt, Homo sapiens
  misc_RNA (1)...(19): siRNA sense strand
gcagaggacuguaccuucu

SEQ ID NO: 1483480 - RNA, 19 nt, Homo sapiens
  misc_RNA (1)...(19): siRNA sense strand
aaggacagauuaugaaaug

SEQ ID NO: 1483481 - RNA, 19 nt, Homo sapiens
  misc_RNA (1)...(19): siRNA sense strand
caagaugacuuugaagaag

SEQ ID NO: 1483482 - RNA, 19 nt, Homo sapiens
  misc_RNA (1)...(19): siRNA sense strand
aagugaagcugccaugaaa

SEQ ID NO: 1483483 - RNA, 19 nt, Homo sapiens
  misc_RNA (1)...(19): siRNA sense strand
cagaaagaauuuacugaca

SEQ ID NO: 1483484 - RNA, 19 nt, Homo sapiens
  misc_RNA (1)...(19): siRNA sense strand
ugaagaagccaaggaaauu

SEQ ID NO: 1483485 - RNA, 19 nt, Homo sapiens
  misc_RNA (1)...(19): siRNA sense strand
ggacagauuaugaaaugga

SEQ ID NO: 1483486 - RNA, 19 nt, Homo sapiens
  misc_RNA (1)...(19): siRNA sense strand
cgcagaagcugaaagugaa

SEQ ID NO: 1483487 - RNA, 19 nt, Homo sapiens
  misc_RNA (1)...(19): siRNA sense strand
ggcaauuccucauagaaau

SEQ ID NO: 1483488 - RNA, 19 nt, Homo sapiens
  misc_RNA (1)...(19): siRNA sense strand
ugaaaggacagauuaugaa

SEQ ID NO: 1483489 - RNA, 19 nt, Homo sapiens
  misc_RNA (1)...(19): siRNA sense strand
gacaggcaauuccucauag

SEQ ID NO: 1483490 - RNA, 19 nt, Homo sapiens
  misc_RNA (1)...(19): siRNA sense strand
gaaagugaagcugccauga

SEQ ID NO: 1483491 - RNA, 19 nt, Homo sapiens
  misc_RNA (1)...(19): siRNA sense strand
gaagcugccaugaaagaga

SEQ ID NO: 1483492 - RNA, 19 nt, Homo sapiens
  misc_RNA (1)...(19): siRNA sense strand
agaauuuacugacaaugug

SEQ ID NO: 1483493 - RNA, 19 nt, Homo sapiens
  misc_RNA (1)...(19): siRNA sense strand
ggugaaugaugccuauaag

SEQ ID NO: 1483494 - RNA, 19 nt, Homo sapiens
  misc_RNA (1)...(19): siRNA sense strand
gaauuuacugacaauguga

SEQ ID NO: 1483495 - RNA, 19 nt, Homo sapiens
  misc_RNA (1)...(19): siRNA sense strand
agaggacuguaccuucuaa

SEQ ID NO: 1483496 - RNA, 19 nt, Homo sapiens
  misc_RNA (1)...(19): siRNA sense strand
gacuguaccuucuaaagcu

SEQ ID NO: 1483497 - RNA, 19 nt, Homo sapiens
  misc_RNA (1)...(19): siRNA sense strand
gugaagcugccaugaaaga

SEQ ID NO: 1483498 - RNA, 19 nt, Homo sapiens
  misc_RNA (1)...(19): siRNA sense strand
ucgcagaagcugaaaguga

SEQ ID NO: 1483499 - RNA, 19 nt, Homo sapiens
  misc_RNA (1)...(19): siRNA sense strand
gagacuacuucagccuuau

SEQ ID NO: 1483500 - RNA, 19 nt, Homo sapiens
  misc_RNA (1)...(19): siRNA sense strand
acaagaugacuuugaagaa

SEQ ID NO: 1483501 - RNA, 19 nt, Homo sapiens
  misc_RNA (1)...(19): siRNA sense strand
gaacaagaugacuuugaag

SEQ ID NO: 1483502 - RNA, 19 nt, Homo sapiens
  misc_RNA (1)...(19): siRNA sense strand
aaagugaagcugccaugaa

SEQ ID NO: 1483503 - RNA, 19 nt, Homo sapiens
  misc_RNA (1)...(19): siRNA sense strand
ccucauagaaauaauggaa

SEQ ID NO: 1483504 - RNA, 19 nt, Homo sapiens
  misc_RNA (1)...(19): siRNA sense strand
gagcagaggacuguaccuu

SEQ ID NO: 1483505 - RNA, 19 nt, Homo sapiens
  misc_RNA (1)...(19): siRNA sense strand
gaaauggacaggcaauucc

SEQ ID NO: 1483506 - RNA, 19 nt, Homo sapiens
  misc_RNA (1)...(19): siRNA sense strand
cugaaaggacagauuauga

SEQ ID NO: 1483507 - RNA, 19 nt, Homo sapiens
  misc_RNA (1)...(19): siRNA sense strand
ucaaagcuaaacagaaaga

SEQ ID NO: 1483508 - RNA, 19 nt, Homo sapiens
  misc_RNA (1)...(19): siRNA sense strand
caaccguuccuucagaguu

SEQ ID NO: 1483509 - RNA, 19 nt, Homo sapiens
  misc_RNA (1)...(19): siRNA sense strand
ucuaaagcuccauggaaua

SEQ ID NO: 1483510 - RNA, 19 nt, Homo sapiens
  misc_RNA (1)...(19): siRNA sense strand
ggacuguaccuucuaaagc

SEQ ID NO: 1483511 - RNA, 19 nt, Homo sapiens
  misc_RNA (1)...(19): siRNA sense strand
gcacagguaccagcaacug

SEQ ID NO: 1483512 - RNA, 19 nt, Homo sapiens
  misc_RNA (1)...(19): siRNA sense strand
gcaauuauccccgcuguug

SEQ ID NO: 1483513 - RNA, 19 nt, Homo sapiens
  misc_RNA (1)...(19): siRNA sense strand
cugcaaccguuccuucaga

SEQ ID NO: 1483514 - RNA, 19 nt, Homo sapiens
  misc_RNA (1)...(19): siRNA sense strand
ugaaauggacaggcaauuc

SEQ ID NO: 1483515 - RNA, 19 nt, Homo sapiens
  misc_RNA (1)...(19): siRNA sense strand
ugaaugaugccuauaagac

SEQ ID NO: 1483516 - RNA, 19 nt, Homo sapiens
  misc_RNA (1)...(19): siRNA sense strand
acaggcaauuccucauaga

SEQ ID NO: 1483517 - RNA, 19 nt, Homo sapiens
  misc_RNA (1)...(19): siRNA sense strand
aaccguuccuucagaguug

SEQ ID NO: 1483518 - RNA, 19 nt, Homo sapiens
  misc_RNA (1)...(19): siRNA sense strand
aauccauugucaaagcuaa

SEQ ID NO: 1483519 - RNA, 19 nt, Homo sapiens
  misc_RNA (1)...(19): siRNA sense strand
gcagugcuuuugaacaaga

SEQ ID NO: 1483520 - RNA, 19 nt, Homo sapiens
  misc_RNA (1)...(19): siRNA sense strand
ccuggugaaugaugccuau

SEQ ID NO: 1483521 - RNA, 19 nt, Homo sapiens
  misc_RNA (1)...(19): siRNA sense strand
cuaaagcuccauggaauag

SEQ ID NO: 1483522 - RNA, 19 nt, Homo sapiens
  misc_RNA (1)...(19): siRNA sense strand
gugaaugaugccuauaaga

SEQ ID NO: 1483523 - RNA, 19 nt, Homo sapiens
  misc_RNA (1)...(19): siRNA sense strand
cagcaacugcagcgucuug

SEQ ID NO: 1483524 - RNA, 19 nt, Homo sapiens
  misc_RNA (1)...(19): siRNA sense strand
aagcugccaugaaagagau

SEQ ID NO: 1483525 - RNA, 19 nt, Homo sapiens
  misc_RNA (1)...(19): siRNA sense strand
aggcaauuccucauagaaa

SEQ ID NO: 1483526 - RNA, 19 nt, Homo sapiens
  misc_RNA (1)...(19): siRNA sense strand
aaagcuccauggaauagag

SEQ ID NO: 1483527 - RNA, 19 nt, Homo sapiens
  misc_RNA (1)...(19): siRNA sense strand
uucuaaagcuccauggaau

SEQ ID NO: 1483528 - RNA, 19 nt, Homo sapiens
  misc_RNA (1)...(19): siRNA sense strand
gaauccauugucaaagcua

SEQ ID NO: 1483529 - RNA, 19 nt, Homo sapiens
  misc_RNA (1)...(19): siRNA sense strand
cgacagggguucccagaag

SEQ ID NO: 1483530 - RNA, 19 nt, Homo sapiens
  misc_RNA (1)...(19): siRNA sense strand
cgucuuguccacccagauu

SEQ ID NO: 1483531 - RNA, 19 nt, Homo sapiens
  misc_RNA (1)...(19): siRNA sense strand
aacaagaugacuuugaaga

SEQ ID NO: 1483532 - RNA, 19 nt, Homo sapiens
  misc_RNA (1)...(19): siRNA sense strand
gcaggcgggaagcaauuau

SEQ ID NO: 1483533 - RNA, 19 nt, Homo sapiens
  misc_RNA (1)...(19): siRNA sense strand
cagaggacuguaccuucua

SEQ ID NO: 1483534 - RNA, 19 nt, Homo sapiens
  misc_RNA (1)...(19): siRNA sense strand
cgaagcuccagcacaggua

SEQ ID NO: 1483535 - RNA, 19 nt, Homo sapiens
  misc_RNA (1)...(19): siRNA sense strand
cuucuaaagcuccauggaa

SEQ ID NO: 1483536 - RNA, 19 nt, Homo sapiens
  misc_RNA (1)...(19): siRNA sense strand
uggugaaugaugccuauaa

SEQ ID NO: 1483537 - RNA, 19 nt, Homo sapiens
  misc_RNA (1)...(19): siRNA sense strand
agaaggagaccgcuaagcu

SEQ ID NO: 1483538 - RNA, 19 nt, Homo sapiens
  misc_RNA (1)...(19): siRNA sense strand
uugaagaagccaaggaaau

SEQ ID NO: 1483539 - RNA, 19 nt, Homo sapiens
  misc_RNA (1)...(19): siRNA sense strand
cccagaaggagaccgcuaa

SEQ ID NO: 1483540 - RNA, 19 nt, Homo sapiens
  misc_RNA (1)...(19): siRNA sense strand
aauagagauuccugaaagg

SEQ ID NO: 1483541 - RNA, 19 nt, Homo sapiens
  misc_RNA (1)...(19): siRNA sense strand
caggcaauuccucauagaa

SEQ ID NO: 1483542 - RNA, 19 nt, Homo sapiens
  misc_RNA (1)...(19): siRNA sense strand
gcauggaaguguuauguaa

SEQ ID NO: 1483543 - RNA, 19 nt, Homo sapiens
  misc_RNA (1)...(19): siRNA sense strand
ugaaagaacuggagaaagu

SEQ ID NO: 1483544 - RNA, 19 nt, Homo sapiens
  misc_RNA (1)...(19): siRNA sense strand
ugaaucagauccucauuaa

SEQ ID NO: 1483545 - RNA, 19 nt, Homo sapiens
  misc_RNA (1)...(19): siRNA sense strand
gaaaggcuauggagaguca

SEQ ID NO: 1483546 - RNA, 19 nt, Homo sapiens
  misc_RNA (1)...(19): siRNA sense strand
guacauggcucucuucuac

SEQ ID NO: 1483547 - RNA, 19 nt, Homo sapiens
  misc_RNA (1)...(19): siRNA sense strand
gaauccagcuucucaauac

SEQ ID NO: 1483548 - RNA, 19 nt, Homo sapiens
  misc_RNA (1)...(19): siRNA sense strand
gcacuuugacuuccugaua

SEQ ID NO: 1483549 - RNA, 19 nt, Homo sapiens
  misc_RNA (1)...(19): siRNA sense strand
uuaaguggcuggauucuga

SEQ ID NO: 1483550 - RNA, 19 nt, Homo sapiens
  misc_RNA (1)...(19): siRNA sense strand
ggauaccacucauggaaga

SEQ ID NO: 1483551 - RNA, 19 nt, Homo sapiens
  misc_RNA (1)...(19): siRNA sense strand
caaccgaggugaaucagau

SEQ ID NO: 1483552 - RNA, 19 nt, Homo sapiens
  misc_RNA (1)...(19): siRNA sense strand
ggacgaccgugcugagaga

SEQ ID NO: 1483553 - RNA, 19 nt, Homo sapiens
  misc_RNA (1)...(19): siRNA sense strand
gaagaaaacugcaggaagu

SEQ ID NO: 1483554 - RNA, 19 nt, Homo sapiens
  misc_RNA (1)...(19): siRNA sense strand
ggaauccagcuucucaaua

SEQ ID NO: 1483555 - RNA, 19 nt, Homo sapiens
  misc_RNA (1)...(19): siRNA sense strand
uaucaaagccaacccagua

SEQ ID NO: 1483556 - RNA, 19 nt, Homo sapiens
  misc_RNA (1)...(19): siRNA sense strand
gaagccagcccgugacuug

SEQ ID NO: 1483557 - RNA, 19 nt, Homo sapiens
  misc_RNA (1)...(19): siRNA sense strand
gcacauggaggacuggauu

SEQ ID NO: 1483558 - RNA, 19 nt, Homo sapiens
  misc_RNA (1)...(19): siRNA sense strand
gaaaggagagaucacacuu

SEQ ID NO: 1483559 - RNA, 19 nt, Homo sapiens
  misc_RNA (1)...(19): siRNA sense strand
caaagccaacccaguauuu

SEQ ID NO: 1483560 - RNA, 19 nt, Homo sapiens
  misc_RNA (1)...(19): siRNA sense strand
ccaacccaguauuugauua

SEQ ID NO: 1483561 - RNA, 19 nt, Homo sapiens
  misc_RNA (1)...(19): siRNA sense strand
ugagggcgguggccaguuu

SEQ ID NO: 1483562 - RNA, 19 nt, Homo sapiens
  misc_RNA (1)...(19): siRNA sense strand
ccucagaucuacaaguuuc

SEQ ID NO: 1483563 - RNA, 19 nt, Homo sapiens
  misc_RNA (1)...(19): siRNA sense strand
gugaaucagauccucauua

SEQ ID NO: 1483564 - RNA, 19 nt, Homo sapiens
  misc_RNA (1)...(19): siRNA sense strand
gaagaaaggauucacuacu

SEQ ID NO: 1483565 - RNA, 19 nt, Homo sapiens
  misc_RNA (1)...(19): siRNA sense strand
ggacggaagauccugauuc

SEQ ID NO: 1483566 - RNA, 19 nt, Homo sapiens
  misc_RNA (1)...(19): siRNA sense strand
aagaaaggauucacuacug

SEQ ID NO: 1483567 - RNA, 19 nt, Homo sapiens
  misc_RNA (1)...(19): siRNA sense strand
gaggaaauccaguucuaug

SEQ ID NO: 1483568 - RNA, 19 nt, Homo sapiens
  misc_RNA (1)...(19): siRNA sense strand
aaggagagaucacacuuuc

SEQ ID NO: 1483569 - RNA, 19 nt, Homo sapiens
  misc_RNA (1)...(19): siRNA sense strand
aaucagauccucauuaagu

SEQ ID NO: 1483570 - RNA, 19 nt, Homo sapiens
  misc_RNA (1)...(19): siRNA sense strand
ggaaauccaguucuaugug

SEQ ID NO: 1483571 - RNA, 19 nt, Homo sapiens
  misc_RNA (1)...(19): siRNA sense strand
gauggucacugaggaggaa

SEQ ID NO: 1483572 - RNA, 19 nt, Homo sapiens
  misc_RNA (1)...(19): siRNA sense strand
ugaaugaugcuuuccagaa

SEQ ID NO: 1483573 - RNA, 19 nt, Homo sapiens
  misc_RNA (1)...(19): siRNA sense strand
aggcugaacuggaacagaa

SEQ ID NO: 1483574 - RNA, 19 nt, Homo sapiens
  misc_RNA (1)...(19): siRNA sense strand
gagaguugguauucuugga

SEQ ID NO: 1483575 - RNA, 19 nt, Homo sapiens
  misc_RNA (1)...(19): siRNA sense strand
gaugguaaccuuccuggau

SEQ ID NO: 1483576 - RNA, 19 nt, Homo sapiens
  misc_RNA (1)...(19): siRNA sense strand
ggacaugaaaggcuaugga

SEQ ID NO: 1483577 - RNA, 19 nt, Homo sapiens
  misc_RNA (1)...(19): siRNA sense strand
aaccucagaucuacaaguu

SEQ ID NO: 1483578 - RNA, 19 nt, Homo sapiens
  misc_RNA (1)...(19): siRNA sense strand
uggcccagcugauguguga

SEQ ID NO: 1483579 - RNA, 19 nt, Homo sapiens
  misc_RNA (1)...(19): siRNA sense strand
gccacuacccggcuuauga

SEQ ID NO: 1483580 - RNA, 19 nt, Homo sapiens
  misc_RNA (1)...(19): siRNA sense strand
gagcugaagaugcacuuug

SEQ ID NO: 1483581 - RNA, 19 nt, Homo sapiens
  misc_RNA (1)...(19): siRNA sense strand
gaaagaacuggagaaagug

SEQ ID NO: 1483582 - RNA, 19 nt, Homo sapiens
  misc_RNA (1)...(19): siRNA sense strand
cagcaaaucccaacauguc

SEQ ID NO: 1483583 - RNA, 19 nt, Homo sapiens
  misc_RNA (1)...(19): siRNA sense strand
gcgguggccaguuugaaua

SEQ ID NO: 1483584 - RNA, 19 nt, Homo sapiens
  misc_RNA (1)...(19): siRNA sense strand
augguaaccuuccuggaua

SEQ ID NO: 1483585 - RNA, 19 nt, Homo sapiens
  misc_RNA (1)...(19): siRNA sense strand
aggaggaaauccaguucua

SEQ ID NO: 1483586 - RNA, 19 nt, Homo sapiens
  misc_RNA (1)...(19): siRNA sense strand
ggcugaggcugaacuggaa

SEQ ID NO: 1483587 - RNA, 19 nt, Homo sapiens
  misc_RNA (1)...(19): siRNA sense strand
gugcagcaguucaagaagu

SEQ ID NO: 1483588 - RNA, 19 nt, Homo sapiens
  misc_RNA (1)...(19): siRNA sense strand
uaaccuuccuggauaaacu

SEQ ID NO: 1483589 - RNA, 19 nt, Homo sapiens
  misc_RNA (1)...(19): siRNA sense strand
aaacugggccucucucaag

SEQ ID NO: 1483590 - RNA, 19 nt, Homo sapiens
  misc_RNA (1)...(19): siRNA sense strand
ugugugagcugaagaugca

SEQ ID NO: 1483591 - RNA, 19 nt, Homo sapiens
  misc_RNA (1)...(19): siRNA sense strand
ugacacggcccugaaagaa

SEQ ID NO: 1483592 - RNA, 19 nt, Homo sapiens
  misc_RNA (1)...(19): siRNA sense strand
ggaagaaaggauucacuac

SEQ ID NO: 1483593 - RNA, 19 nt, Homo sapiens
  misc_RNA (1)...(19): siRNA sense strand
ggaggaaauccaguucuau

SEQ ID NO: 1483594 - RNA, 19 nt, Homo sapiens
  misc_RNA (1)...(19): siRNA sense strand
ccacuacccggcuuaugaa

SEQ ID NO: 1483595 - RNA, 19 nt, Homo sapiens
  misc_RNA (1)...(19): siRNA sense strand
guggcaugcugguguggua

SEQ ID NO: 1483596 - RNA, 19 nt, Homo sapiens
  misc_RNA (1)...(19): siRNA sense strand
cuacugccauccucaccaa

SEQ ID NO: 1483597 - RNA, 19 nt, Homo sapiens
  misc_RNA (1)...(19): siRNA sense strand
aaacugguaccgaaacaug

SEQ ID NO: 1483598 - RNA, 19 nt, Homo sapiens
  misc_RNA (1)...(19): siRNA sense strand
ccgguggucucaaagaugu

SEQ ID NO: 1483599 - RNA, 19 nt, Homo sapiens
  misc_RNA (1)...(19): siRNA sense strand
gaaccucagaucuacaagu

SEQ ID NO: 1483600 - RNA, 19 nt, Homo sapiens
  misc_RNA (1)...(19): siRNA sense strand
ggagaaagugaccggaauc

SEQ ID NO: 1483601 - RNA, 19 nt, Homo sapiens
  misc_RNA (1)...(19): siRNA sense strand
gcuccgagaccgcuaaagu

SEQ ID NO: 1483602 - RNA, 19 nt, Homo sapiens
  misc_RNA (1)...(19): siRNA sense strand
gcucucaugcucaggaaga

SEQ ID NO: 1483603 - RNA, 19 nt, Homo sapiens
  misc_RNA (1)...(19): siRNA sense strand
gaccagagggugccacuac

SEQ ID NO: 1483604 - RNA, 19 nt, Homo sapiens
  misc_RNA (1)...(19): siRNA sense strand
acacggcccugaaagaacu

SEQ ID NO: 1483605 - RNA, 19 nt, Homo sapiens
  misc_RNA (1)...(19): siRNA sense strand
cuacccggcuuaugaaagg

SEQ ID NO: 1483606 - RNA, 19 nt, Homo sapiens
  misc_RNA (1)...(19): siRNA sense strand
uggagaaagugaccggaau

SEQ ID NO: 1483607 - RNA, 19 nt, Homo sapiens
  misc_RNA (1)...(19): siRNA sense strand
cuaaacugguaccgaaaca

SEQ ID NO: 1483608 - RNA, 19 nt, Homo sapiens
  misc_RNA (1)...(19): siRNA sense strand
ucaaagccaacccaguauu

SEQ ID NO: 1483609 - RNA, 19 nt, Homo sapiens
  misc_RNA (1)...(19): siRNA sense strand
caucugcuccucccgaaau

SEQ ID NO: 1483610 - RNA, 19 nt, Homo sapiens
  misc_RNA (1)...(19): siRNA sense strand
cccgagaguugguauucuu

SEQ ID NO: 1483611 - RNA, 19 nt, Homo sapiens
  misc_RNA (1)...(19): siRNA sense strand
cucauuaaguggcuggauu

SEQ ID NO: 1483612 - RNA, 19 nt, Homo sapiens
  misc_RNA (1)...(19): siRNA sense strand
cacuuugacuuccugauag

SEQ ID NO: 1483613 - RNA, 19 nt, Homo sapiens
  misc_RNA (1)...(19): siRNA sense strand
accgaaacauggaaaggaa

SEQ ID NO: 1483614 - RNA, 19 nt, Homo sapiens
  misc_RNA (1)...(19): siRNA sense strand
ugguaaccuuccuggauaa

SEQ ID NO: 1483615 - RNA, 19 nt, Homo sapiens
  misc_RNA (1)...(19): siRNA sense strand
ugaagaugcacuuugacuu

SEQ ID NO: 1483616 - RNA, 19 nt, Homo sapiens
  misc_RNA (1)...(19): siRNA sense strand
aaagaacuggagaaaguga

SEQ ID NO: 1483617 - RNA, 19 nt, Homo sapiens
  misc_RNA (1)...(19): siRNA sense strand
gcccgugacuugggaaugg

SEQ ID NO: 1483618 - RNA, 19 nt, Homo sapiens
  misc_RNA (1)...(19): siRNA sense strand
ggaauggucaaaccugaac

SEQ ID NO: 1483619 - RNA, 19 nt, Homo sapiens
  misc_RNA (1)...(19): siRNA sense strand
gaauacucccuucauacca

SEQ ID NO: 1483620 - RNA, 19 nt, Homo sapiens
  misc_RNA (1)...(19): siRNA sense strand
ccaggguccgucugcauuu

SEQ ID NO: 1483621 - RNA, 19 nt, Homo sapiens
  misc_RNA (1)...(19): siRNA sense strand
gcugaugugugagcugaag

SEQ ID NO: 1483622 - RNA, 19 nt, Homo sapiens
  misc_RNA (1)...(19): siRNA sense strand
caccgguggucucaaagau

SEQ ID NO: 1483623 - RNA, 19 nt, Homo sapiens
  misc_RNA (1)...(19): siRNA sense strand
ccagcucuacuuccaagaa

SEQ ID NO: 1483624 - RNA, 19 nt, Homo sapiens
  misc_RNA (1)...(19): siRNA sense strand
ccauggauuucccgagagu

SEQ ID NO: 1483625 - RNA, 19 nt, Homo sapiens
  misc_RNA (1)...(19): siRNA sense strand
aggaagaaaggauucacua

SEQ ID NO: 1483626 - RNA, 19 nt, Homo sapiens
  misc_RNA (1)...(19): siRNA sense strand
gcuccaggcagcucucaug

SEQ ID NO: 1483627 - RNA, 19 nt, Homo sapiens
  misc_RNA (1)...(19): siRNA sense strand
gggaauggucaaaccugaa

SEQ ID NO: 1483628 - RNA, 19 nt, Homo sapiens
  misc_RNA (1)...(19): siRNA sense strand
agcugaagaugcacuuuga

SEQ ID NO: 1483629 - RNA, 19 nt, Homo sapiens
  misc_RNA (1)...(19): siRNA sense strand
ccugaaagaacuggagaaa

SEQ ID NO: 1483630 - RNA, 19 nt, Homo sapiens
  misc_RNA (1)...(19): siRNA sense strand
aagccaacccaguauuuga

SEQ ID NO: 1483631 - RNA, 19 nt, Homo sapiens
  misc_RNA (1)...(19): siRNA sense strand
guuaccggguccuagcuau

SEQ ID NO: 1483632 - RNA, 19 nt, Homo sapiens
  misc_RNA (1)...(19): siRNA sense strand
cugccgaccucuugcaauc

SEQ ID NO: 1483633 - RNA, 19 nt, Homo sapiens
  misc_RNA (1)...(19): siRNA sense strand
gcucaggaagaaaggauuc

SEQ ID NO: 1483634 - RNA, 19 nt, Homo sapiens
  misc_RNA (1)...(19): siRNA sense strand
gguacauggcucucuucua

SEQ ID NO: 1483635 - RNA, 19 nt, Homo sapiens
  misc_RNA (1)...(19): siRNA sense strand
uaaacugggccucucucaa

SEQ ID NO: 1483636 - RNA, 19 nt, Homo sapiens
  misc_RNA (1)...(19): siRNA sense strand
cgaccgugcugagagagau

SEQ ID NO: 1483637 - RNA, 19 nt, Homo sapiens
  misc_RNA (1)...(19): siRNA sense strand
cauggguacgugacaguaa

SEQ ID NO: 1483638 - RNA, 19 nt, Homo sapiens
  misc_RNA (1)...(19): siRNA sense strand
gugccucugccauggauuu

SEQ ID NO: 1483639 - RNA, 19 nt, Homo sapiens
  misc_RNA (1)...(19): siRNA sense strand
gccaacccaguauuugauu

SEQ ID NO: 1483640 - RNA, 19 nt, Homo sapiens
  misc_RNA (1)...(19): siRNA sense strand
ucucaagcaguguucauug

SEQ ID NO: 1483641 - RNA, 19 nt, Homo sapiens
  misc_RNA (1)...(19): siRNA sense strand
cagcucucaugcucaggaa

SEQ ID NO: 1483642 - RNA, 19 nt, Homo sapiens
  misc_RNA (1)...(19): siRNA sense strand
ggaaacagcuguaaauuug

SEQ ID NO: 1483643 - RNA, 19 nt, Homo sapiens
  misc_RNA (1)...(19): siRNA sense strand
gaauauagcugauuaugca

SEQ ID NO: 1483644 - RNA, 19 nt, Homo sapiens
  misc_RNA (1)...(19): siRNA sense strand
gagaaacggucaagucauu

SEQ ID NO: 1483645 - RNA, 19 nt, Homo sapiens
  misc_RNA (1)...(19): siRNA sense strand
ggacuuacaugaaggagaa

SEQ ID NO: 1483646 - RNA, 19 nt, Homo sapiens
  misc_RNA (1)...(19): siRNA sense strand
acaaaugccuuuacaguuu

SEQ ID NO: 1483647 - RNA, 19 nt, Homo sapiens
  misc_RNA (1)...(19): siRNA sense strand
gaacugaaagucuggauaa

SEQ ID NO: 1483648 - RNA, 19 nt, Homo sapiens
  misc_RNA (1)...(19): siRNA sense strand
gaacaccgcuuaacaacag

SEQ ID NO: 1483649 - RNA, 19 nt, Homo sapiens
  misc_RNA (1)...(19): siRNA sense strand
gcaauauaguccucaguuu

SEQ ID NO: 1483650 - RNA, 19 nt, Homo sapiens
  misc_RNA (1)...(19): siRNA sense strand
gaucauaaguguaagaaag

SEQ ID NO: 1483651 - RNA, 19 nt, Homo sapiens
  misc_RNA (1)...(19): siRNA sense strand
ggaaagaugcccuucacua

SEQ ID NO: 1483652 - RNA, 19 nt, Homo sapiens
  misc_RNA (1)...(19): siRNA sense strand
gaaaugacuuuggaaacuu

SEQ ID NO: 1483653 - RNA, 19 nt, Homo sapiens
  misc_RNA (1)...(19): siRNA sense strand
gaaagaugcccuucacuau

SEQ ID NO: 1483654 - RNA, 19 nt, Homo sapiens
  misc_RNA (1)...(19): siRNA sense strand
aaacagguaucucacauga

SEQ ID NO: 1483655 - RNA, 19 nt, Homo sapiens
  misc_RNA (1)...(19): siRNA sense strand
gagaaugggauacaagaua

SEQ ID NO: 1483656 - RNA, 19 nt, Homo sapiens
  misc_RNA (1)...(19): siRNA sense strand
gaggaggaauguagauauu

SEQ ID NO: 1483657 - RNA, 19 nt, Homo sapiens
  misc_RNA (1)...(19): siRNA sense strand
gaaggaaacagcuguaaau

SEQ ID NO: 1483658 - RNA, 19 nt, Homo sapiens
  misc_RNA (1)...(19): siRNA sense strand
caauauaguccucaguuua

SEQ ID NO: 1483659 - RNA, 19 nt, Homo sapiens
  misc_RNA (1)...(19): siRNA sense strand
gagacaagcuugccagauc

SEQ ID NO: 1483660 - RNA, 19 nt, Homo sapiens
  misc_RNA (1)...(19): siRNA sense strand
cgaaggaacccaugaauug

SEQ ID NO: 1483661 - RNA, 19 nt, Homo sapiens
  misc_RNA (1)...(19): siRNA sense strand
ugaaggaaaugacguuuau

SEQ ID NO: 1483662 - RNA, 19 nt, Homo sapiens
  misc_RNA (1)...(19): siRNA sense strand
ccaacaggcuauuucagua

SEQ ID NO: 1483663 - RNA, 19 nt, Homo sapiens
  misc_RNA (1)...(19): siRNA sense strand
gaagagaugcccuaaagau

SEQ ID NO: 1483664 - RNA, 19 nt, Homo sapiens
  misc_RNA (1)...(19): siRNA sense strand
agaacuagcucagaaauug

SEQ ID NO: 1483665 - RNA, 19 nt, Homo sapiens
  misc_RNA (1)...(19): siRNA sense strand
gcaagaagcaguuccuguu

SEQ ID NO: 1483666 - RNA, 19 nt, Homo sapiens
  misc_RNA (1)...(19): siRNA sense strand
gaacaugauuggaacaacu

SEQ ID NO: 1483667 - RNA, 19 nt, Homo sapiens
  misc_RNA (1)...(19): siRNA sense strand
gagaugcccuaaagaugaa

SEQ ID NO: 1483668 - RNA, 19 nt, Homo sapiens
  misc_RNA (1)...(19): siRNA sense strand
gagcgcagguacuugguaa

SEQ ID NO: 1483669 - RNA, 19 nt, Homo sapiens
  misc_RNA (1)...(19): siRNA sense strand
uagaugaccugcuugauuc

SEQ ID NO: 1483670 - RNA, 19 nt, Homo sapiens
  misc_RNA (1)...(19): siRNA sense strand
gcccuaaguuaauggauuu

SEQ ID NO: 1483671 - RNA, 19 nt, Homo sapiens
  misc_RNA (1)...(19): siRNA sense strand
uacaagauauggagcaauu

SEQ ID NO: 1483672 - RNA, 19 nt, Homo sapiens
  misc_RNA (1)...(19): siRNA sense strand
gaacguaagaaguggauga

SEQ ID NO: 1483673 - RNA, 19 nt, Homo sapiens
  misc_RNA (1)...(19): siRNA sense strand
gguacuugguaaucaaaua

SEQ ID NO: 1483674 - RNA, 19 nt, Homo sapiens
  misc_RNA (1)...(19): siRNA sense strand
ucaagagucuaaacgauau

SEQ ID NO: 1483675 - RNA, 19 nt, Homo sapiens
  misc_RNA (1)...(19): siRNA sense strand
ggauaaagaauguugaaga

SEQ ID NO: 1483676 - RNA, 19 nt, Homo sapiens
  misc_RNA (1)...(19): siRNA sense strand
uuaggaaccuuacccauug

SEQ ID NO: 1483677 - RNA, 19 nt, Homo sapiens
  misc_RNA (1)...(19): siRNA sense strand
caagucagccuagaaauga

SEQ ID NO: 1483678 - RNA, 19 nt, Homo sapiens
  misc_RNA (1)...(19): siRNA sense strand
gaaggagaaugggauacaa

SEQ ID NO: 1483679 - RNA, 19 nt, Homo sapiens
  misc_RNA (1)...(19): siRNA sense strand
gcagguacuugguaaucaa

SEQ ID NO: 1483680 - RNA, 19 nt, Homo sapiens
  misc_RNA (1)...(19): siRNA sense strand
gaaggaacccaugaauuga

SEQ ID NO: 1483681 - RNA, 19 nt, Homo sapiens
  misc_RNA (1)...(19): siRNA sense strand
aagaagagaugcccuaaag

SEQ ID NO: 1483682 - RNA, 19 nt, Homo sapiens
  misc_RNA (1)...(19): siRNA sense strand
ugagagugaugucuauuga

SEQ ID NO: 1483683 - RNA, 19 nt, Homo sapiens
  misc_RNA (1)...(19): siRNA sense strand
acagguaucucacaugaug

SEQ ID NO: 1483684 - RNA, 19 nt, Homo sapiens
  misc_RNA (1)...(19): siRNA sense strand
gaacacaggagcaauaugc

SEQ ID NO: 1483685 - RNA, 19 nt, Homo sapiens
  misc_RNA (1)...(19): siRNA sense strand
gaaagaagagaugcccuaa

SEQ ID NO: 1483686 - RNA, 19 nt, Homo sapiens
  misc_RNA (1)...(19): siRNA sense strand
ccauauugcuucugggaaa

SEQ ID NO: 1483687 - RNA, 19 nt, Homo sapiens
  misc_RNA (1)...(19): siRNA sense strand
uaaaucguauugccugcua

SEQ ID NO: 1483688 - RNA, 19 nt, Homo sapiens
  misc_RNA (1)...(19): siRNA sense strand
gccaacagauuaugcugaa

SEQ ID NO: 1483689 - RNA, 19 nt, Homo sapiens
  misc_RNA (1)...(19): siRNA sense strand
cguauugccugcuauucua

SEQ ID NO: 1483690 - RNA, 19 nt, Homo sapiens
  misc_RNA (1)...(19): siRNA sense strand
gaagauauugagccagauu

SEQ ID NO: 1483691 - RNA, 19 nt, Homo sapiens
  misc_RNA (1)...(19): siRNA sense strand
aaaggcagcagaacauuaa

SEQ ID NO: 1483692 - RNA, 19 nt, Homo sapiens
  misc_RNA (1)...(19): siRNA sense strand
agaaugggauacaagauau

SEQ ID NO: 1483693 - RNA, 19 nt, Homo sapiens
  misc_RNA (1)...(19): siRNA sense strand
gcucaagagucuaaacgau

SEQ ID NO: 1483694 - RNA, 19 nt, Homo sapiens
  misc_RNA (1)...(19): siRNA sense strand
gaagaugagugcuuuuaug

SEQ ID NO: 1483695 - RNA, 19 nt, Homo sapiens
  misc_RNA (1)...(19): siRNA sense strand
ccagguaguuuguuugcuu

SEQ ID NO: 1483696 - RNA, 19 nt, Homo sapiens
  misc_RNA (1)...(19): siRNA sense strand
gaauggaccagguaguuug

SEQ ID NO: 1483697 - RNA, 19 nt, Homo sapiens
  misc_RNA (1)...(19): siRNA sense strand
ugaacuagaugaccugcuu

SEQ ID NO: 1483698 - RNA, 19 nt, Homo sapiens
  misc_RNA (1)...(19): siRNA sense strand
ccuugaauauagcugauua

SEQ ID NO: 1483699 - RNA, 19 nt, Homo sapiens
  misc_RNA (1)...(19): siRNA sense strand
ggaaaugccgaacuucaug

SEQ ID NO: 1483700 - RNA, 19 nt, Homo sapiens
  misc_RNA (1)...(19): siRNA sense strand
aauaaugccuggauuucuu

SEQ ID NO: 1483701 - RNA, 19 nt, Homo sapiens
  misc_RNA (1)...(19): siRNA sense strand
gauauuggcagaauuugga

SEQ ID NO: 1483702 - RNA, 19 nt, Homo sapiens
  misc_RNA (1)...(19): siRNA sense strand
gccgucagcuuuagucaga

SEQ ID NO: 1483703 - RNA, 19 nt, Homo sapiens
  misc_RNA (1)...(19): siRNA sense strand
gaaccauucuguggaagau

SEQ ID NO: 1483704 - RNA, 19 nt, Homo sapiens
  misc_RNA (1)...(19): siRNA sense strand
gaaaugccgaacuucauga

SEQ ID NO: 1483705 - RNA, 19 nt, Homo sapiens
  misc_RNA (1)...(19): siRNA sense strand
ucggaaaucuaaggcuuua

SEQ ID NO: 1483706 - RNA, 19 nt, Homo sapiens
  misc_RNA (1)...(19): siRNA sense strand
agacauagccagucaguca

SEQ ID NO: 1483707 - RNA, 19 nt, Homo sapiens
  misc_RNA (1)...(19): siRNA sense strand
agaaacaaaugccuuuaca

SEQ ID NO: 1483708 - RNA, 19 nt, Homo sapiens
  misc_RNA (1)...(19): siRNA sense strand
cguaagaaguggaugaaca

SEQ ID NO: 1483709 - RNA, 19 nt, Homo sapiens
  misc_RNA (1)...(19): siRNA sense strand
guuaauggauuucacuuac

SEQ ID NO: 1483710 - RNA, 19 nt, Homo sapiens
  misc_RNA (1)...(19): siRNA sense strand
ggaaggacugcaguuuaua

SEQ ID NO: 1483711 - RNA, 19 nt, Homo sapiens
  misc_RNA (1)...(19): siRNA sense strand
aaucuaaggcuuuaaguga

SEQ ID NO: 1483712 - RNA, 19 nt, Homo sapiens
  misc_RNA (1)...(19): siRNA sense strand
aggaaggacugcaguuuau

SEQ ID NO: 1483713 - RNA, 19 nt, Homo sapiens
  misc_RNA (1)...(19): siRNA sense strand
gaaaagaucacuuaauugg

SEQ ID NO: 1483714 - RNA, 19 nt, Homo sapiens
  misc_RNA (1)...(19): siRNA sense strand
ugugauagguauaugaaug

SEQ ID NO: 1483715 - RNA, 19 nt, Homo sapiens
  misc_RNA (1)...(19): siRNA sense strand
gugaagacauagccaguca

SEQ ID NO: 1483716 - RNA, 19 nt, Homo sapiens
  misc_RNA (1)...(19): siRNA sense strand
aaacaaaugccuuuacagu

SEQ ID NO: 1483717 - RNA, 19 nt, Homo sapiens
  misc_RNA (1)...(19): siRNA sense strand
gaaguucgguauggcuguu

SEQ ID NO: 1483718 - RNA, 19 nt, Homo sapiens
  misc_RNA (1)...(19): siRNA sense strand
uaagugccuuguccacauu

SEQ ID NO: 1483719 - RNA, 19 nt, Homo sapiens
  misc_RNA (1)...(19): siRNA sense strand
agauuaaccuuacuguguu

SEQ ID NO: 1483720 - RNA, 19 nt, Homo sapiens
  misc_RNA (1)...(19): siRNA sense strand
ugaugucuauugaacguaa

SEQ ID NO: 1483721 - RNA, 19 nt, Homo sapiens
  misc_RNA (1)...(19): siRNA sense strand
uaaacgauauuggcagaau

SEQ ID NO: 1483722 - RNA, 19 nt, Homo sapiens
  misc_RNA (1)...(19): siRNA sense strand
uaaccuuacuguguucaaa

SEQ ID NO: 1483723 - RNA, 19 nt, Homo sapiens
  misc_RNA (1)...(19): siRNA sense strand
ggguuuccaugauaaaguu

SEQ ID NO: 1483724 - RNA, 19 nt, Homo sapiens
  misc_RNA (1)...(19): siRNA sense strand
gaucugugcaaccauauug

SEQ ID NO: 1483725 - RNA, 19 nt, Homo sapiens
  misc_RNA (1)...(19): siRNA sense strand
uaucucacaugaugcuauu

SEQ ID NO: 1483726 - RNA, 19 nt, Homo sapiens
  misc_RNA (1)...(19): siRNA sense strand
ggaacugaaagucuggaua

SEQ ID NO: 1483727 - RNA, 19 nt, Homo sapiens
  misc_RNA (1)...(19): siRNA sense strand
guaguuuguuugcuucaga

SEQ ID NO: 1483728 - RNA, 19 nt, Homo sapiens
  misc_RNA (1)...(19): siRNA sense strand
guuaggaaccuuacccauu

SEQ ID NO: 1483729 - RNA, 19 nt, Homo sapiens
  misc_RNA (1)...(19): siRNA sense strand
ccagauuuauuaacuccaa

SEQ ID NO: 1483730 - RNA, 19 nt, Homo sapiens
  misc_RNA (1)...(19): siRNA sense strand
ccaaggcuuugaaccauuc

SEQ ID NO: 1483731 - RNA, 19 nt, Homo sapiens
  misc_RNA (1)...(19): siRNA sense strand
gcccuuaacuucuauuuug

SEQ ID NO: 1483732 - RNA, 19 nt, Homo sapiens
  misc_RNA (1)...(19): siRNA sense strand
caacaaagcacgaaaagau

SEQ ID NO: 1483733 - RNA, 19 nt, Homo sapiens
  misc_RNA (1)...(19): siRNA sense strand
agagaugcccuaaagauga

SEQ ID NO: 1483734 - RNA, 19 nt, Homo sapiens
  misc_RNA (1)...(19): siRNA sense strand
acacggaagccuugaauau

SEQ ID NO: 1483735 - RNA, 19 nt, Homo sapiens
  misc_RNA (1)...(19): siRNA sense strand
gauacaagauauggagcaa

SEQ ID NO: 1483736 - RNA, 19 nt, Homo sapiens
  misc_RNA (1)...(19): siRNA sense strand
caggaacacaggagcaaua

SEQ ID NO: 1483737 - RNA, 19 nt, Homo sapiens
  misc_RNA (1)...(19): siRNA sense strand
gcaugaguuugaagacaau

SEQ ID NO: 1483738 - RNA, 19 nt, Homo sapiens
  misc_RNA (1)...(19): siRNA sense strand
ggcccuaaguuaauggauu

SEQ ID NO: 1483739 - RNA, 19 nt, Homo sapiens
  misc_RNA (1)...(19): siRNA sense strand
gcaccugaaacuaaugaaa

SEQ ID NO: 1483740 - RNA, 19 nt, Homo sapiens
  misc_RNA (1)...(19): siRNA sense strand
cuagaugaccugcuugauu

SEQ ID NO: 1483741 - RNA, 19 nt, Homo sapiens
  misc_RNA (1)...(19): siRNA sense strand
gaggaaagaugcccuucac

SEQ ID NO: 1483742 - RNA, 19 nt, Homo sapiens
  misc_RNA (1)...(19): siRNA sense strand
ugaagaagauguuguugga

SEQ ID NO: 1483743 - RNA, 19 nt, Homo sapiens
  misc_RNA (1)...(19): siRNA sense strand
gaaggcacaucggcucuaa

SEQ ID NO: 1483744 - RNA, 19 nt, Homo sapiens
  misc_RNA (1)...(19): siRNA sense strand
ggacaacugggccaaacua

SEQ ID NO: 1483745 - RNA, 19 nt, Homo sapiens
  misc_RNA (1)...(19): siRNA sense strand
ggaggcugguacaagguuu

SEQ ID NO: 1483746 - RNA, 19 nt, Homo sapiens
  misc_RNA (1)...(19): siRNA sense strand
uggaugcacugaagaagau

SEQ ID NO: 1483747 - RNA, 19 nt, Homo sapiens
  misc_RNA (1)...(19): siRNA sense strand
ccaauguguugcuguuauc

SEQ ID NO: 1483748 - RNA, 19 nt, Homo sapiens
  misc_RNA (1)...(19): siRNA sense strand
gggccugggugacauuauc

SEQ ID NO: 1483749 - RNA, 19 nt, Homo sapiens
  misc_RNA (1)...(19): siRNA sense strand
gcacugaagaagauguugu

SEQ ID NO: 1483750 - RNA, 19 nt, Homo sapiens
  misc_RNA (1)...(19): siRNA sense strand
agaagauguuguuggauca

SEQ ID NO: 1483751 - RNA, 19 nt, Homo sapiens
  misc_RNA (1)...(19): siRNA sense strand
gcucacccguggaaaguac

SEQ ID NO: 1483752 - RNA, 19 nt, Homo sapiens
  misc_RNA (1)...(19): siRNA sense strand
ccaaacuacagcgggauua

SEQ ID NO: 1483753 - RNA, 19 nt, Homo sapiens
  misc_RNA (1)...(19): siRNA sense strand
caacugggccaaacuacag

SEQ ID NO: 1483754 - RNA, 19 nt, Homo sapiens
  misc_RNA (1)...(19): siRNA sense strand
acuccuaccuguccuggaa

SEQ ID NO: 1483755 - RNA, 19 nt, Homo sapiens
  misc_RNA (1)...(19): siRNA sense strand
uccaauguguugcuguuau

SEQ ID NO: 1483756 - RNA, 19 nt, Homo sapiens
  misc_RNA (1)...(19): siRNA sense strand
ggaaggcacaucggcucua

SEQ ID NO: 1483757 - RNA, 19 nt, Homo sapiens
  misc_RNA (1)...(19): siRNA sense strand
uaucaccaacuacuaucua

SEQ ID NO: 1483758 - RNA, 19 nt, Homo sapiens
  misc_RNA (1)...(19): siRNA sense strand
caaacuacagcgggauuau

SEQ ID NO: 1483759 - RNA, 19 nt, Homo sapiens
  misc_RNA (1)...(19): siRNA sense strand
guguugcuguuaucuggaa

SEQ ID NO: 1483760 - RNA, 19 nt, Homo sapiens
  misc_RNA (1)...(19): siRNA sense strand
uguccaauguguugcuguu

SEQ ID NO: 1483761 - RNA, 19 nt, Homo sapiens
  misc_RNA (1)...(19): siRNA sense strand
gaagaagauguuguuggau

SEQ ID NO: 1483762 - RNA, 19 nt, Homo sapiens
  misc_RNA (1)...(19): siRNA sense strand
caccaacuacuaucuaugg

SEQ ID NO: 1483763 - RNA, 19 nt, Homo sapiens
  misc_RNA (1)...(19): siRNA sense strand
guggaugcacugaagaaga

SEQ ID NO: 1483764 - RNA, 19 nt, Homo sapiens
  misc_RNA (1)...(19): siRNA sense strand
gguaggaggcugguacaag

SEQ ID NO: 1483765 - RNA, 19 nt, Homo sapiens
  misc_RNA (1)...(19): siRNA sense strand
gccguuguccaauguguug

SEQ ID NO: 1483766 - RNA, 19 nt, Homo sapiens
  misc_RNA (1)...(19): siRNA sense strand
ggcacuuaauggacuguca

SEQ ID NO: 1483767 - RNA, 19 nt, Homo sapiens
  misc_RNA (1)...(19): siRNA sense strand
gccggacucugaccauggu

SEQ ID NO: 1483768 - RNA, 19 nt, Homo sapiens
  misc_RNA (1)...(19): siRNA sense strand
caggacaacugggccaaac

SEQ ID NO: 1483769 - RNA, 19 nt, Homo sapiens
  misc_RNA (1)...(19): siRNA sense strand
caacugaggugguucugaa

SEQ ID NO: 1483770 - RNA, 19 nt, Homo sapiens
  misc_RNA (1)...(19): siRNA sense strand
caucgaaucuccuggguuu

SEQ ID NO: 1483771 - RNA, 19 nt, Homo sapiens
  misc_RNA (1)...(19): siRNA sense strand
caaagaugcuggcuauauc

SEQ ID NO: 1483772 - RNA, 19 nt, Homo sapiens
  misc_RNA (1)...(19): siRNA sense strand
caacuucaacccucacuuu

SEQ ID NO: 1483773 - RNA, 19 nt, Homo sapiens
  misc_RNA (1)...(19): siRNA sense strand
ccggagagauugccauuga

SEQ ID NO: 1483774 - RNA, 19 nt, Homo sapiens
  misc_RNA (1)...(19): siRNA sense strand
caacuuggacugcaccuuu

SEQ ID NO: 1483775 - RNA, 19 nt, Homo sapiens
  misc_RNA (1)...(19): siRNA sense strand
gcuacuacgucaaauccua

SEQ ID NO: 1483776 - RNA, 19 nt, Homo sapiens
  misc_RNA (1)...(19): siRNA sense strand
gaacccaaccagaagauug

SEQ ID NO: 1483777 - RNA, 19 nt, Homo sapiens
  misc_RNA (1)...(19): siRNA sense strand
gaagggaacaugcacuaug

SEQ ID NO: 1483778 - RNA, 19 nt, Homo sapiens
  misc_RNA (1)...(19): siRNA sense strand
gggauucaauugcaacuuc

SEQ ID NO: 1483779 - RNA, 19 nt, Homo sapiens
  misc_RNA (1)...(19): siRNA sense strand
gaccggacguuuccagaug

SEQ ID NO: 1483780 - RNA, 19 nt, Homo sapiens
  misc_RNA (1)...(19): siRNA sense strand
gugcggaggucguuugaau

SEQ ID NO: 1483781 - RNA, 19 nt, Homo sapiens
  misc_RNA (1)...(19): siRNA sense strand
gaagcacgacugcaaguau

SEQ ID NO: 1483782 - RNA, 19 nt, Homo sapiens
  misc_RNA (1)...(19): siRNA sense strand
ccaaagaugcuggcuauau

SEQ ID NO: 1483783 - RNA, 19 nt, Homo sapiens
  misc_RNA (1)...(19): siRNA sense strand
gaauggcuacuacgucaaa

SEQ ID NO: 1483784 - RNA, 19 nt, Homo sapiens
  misc_RNA (1)...(19): siRNA sense strand
cgacauggaguaccagauu

SEQ ID NO: 1483785 - RNA, 19 nt, Homo sapiens
  misc_RNA (1)...(19): siRNA sense strand
aagggaacaugcacuauga

SEQ ID NO: 1483786 - RNA, 19 nt, Homo sapiens
  misc_RNA (1)...(19): siRNA sense strand
uuucuuagcccucuacuuu

SEQ ID NO: 1483787 - RNA, 19 nt, Homo sapiens
  misc_RNA (1)...(19): siRNA sense strand
gaacugcagcuuugaggau

SEQ ID NO: 1483788 - RNA, 19 nt, Homo sapiens
  misc_RNA (1)...(19): siRNA sense strand
caagacaggcucugaagau

SEQ ID NO: 1483789 - RNA, 19 nt, Homo sapiens
  misc_RNA (1)...(19): siRNA sense strand
gagcauuugugcgcaaguu

SEQ ID NO: 1483790 - RNA, 19 nt, Homo sapiens
  misc_RNA (1)...(19): siRNA sense strand
gacauggaguaccagauug

SEQ ID NO: 1483791 - RNA, 19 nt, Homo sapiens
  misc_RNA (1)...(19): siRNA sense strand
gggauggcauuccacaugu

SEQ ID NO: 1483792 - RNA, 19 nt, Homo sapiens
  misc_RNA (1)...(19): siRNA sense strand
gaacugcgaguggauuguu

SEQ ID NO: 1483793 - RNA, 19 nt, Homo sapiens
  misc_RNA (1)...(19): siRNA sense strand
gaacuuucagugcaauguu

SEQ ID NO: 1483794 - RNA, 19 nt, Homo sapiens
  misc_RNA (1)...(19): siRNA sense strand
ggagagauugccauugaug

SEQ ID NO: 1483795 - RNA, 19 nt, Homo sapiens
  misc_RNA (1)...(19): siRNA sense strand
ccagagagagggccaguau

SEQ ID NO: 1483796 - RNA, 19 nt, Homo sapiens
  misc_RNA (1)...(19): siRNA sense strand
gcuccaugcucuacaucaa

SEQ ID NO: 1483797 - RNA, 19 nt, Homo sapiens
  misc_RNA (1)...(19): siRNA sense strand
ggauggcauuccacauguu

SEQ ID NO: 1483798 - RNA, 19 nt, Homo sapiens
  misc_RNA (1)...(19): siRNA sense strand
gaggagcccugugguugga

SEQ ID NO: 1483799 - RNA, 19 nt, Homo sapiens
  misc_RNA (1)...(19): siRNA sense strand
ucaauugcaacuucgauuu

SEQ ID NO: 1483800 - RNA, 19 nt, Homo sapiens
  misc_RNA (1)...(19): siRNA sense strand
gaacacccaagacagugaa

SEQ ID NO: 1483801 - RNA, 19 nt, Homo sapiens
  misc_RNA (1)...(19): siRNA sense strand
cauggagucuggccggauu

SEQ ID NO: 1483802 - RNA, 19 nt, Homo sapiens
  misc_RNA (1)...(19): siRNA sense strand
caaguacugugggaccaaa

SEQ ID NO: 1483803 - RNA, 19 nt, Homo sapiens
  misc_RNA (1)...(19): siRNA sense strand
gacaggcucugaagauugc

SEQ ID NO: 1483804 - RNA, 19 nt, Homo sapiens
  misc_RNA (1)...(19): siRNA sense strand
guuagaauccgcccucaga

SEQ ID NO: 1483805 - RNA, 19 nt, Homo sapiens
  misc_RNA (1)...(19): siRNA sense strand
aaacacagaauggcuacua

SEQ ID NO: 1483806 - RNA, 19 nt, Homo sapiens
  misc_RNA (1)...(19): siRNA sense strand
gaacagaucagugccucau

SEQ ID NO: 1483807 - RNA, 19 nt, Homo sapiens
  misc_RNA (1)...(19): siRNA sense strand
ucuuugaccuggagcauga

SEQ ID NO: 1483808 - RNA, 19 nt, Homo sapiens
  misc_RNA (1)...(19): siRNA sense strand
ggaggucguuugaauucca

SEQ ID NO: 1483809 - RNA, 19 nt, Homo sapiens
  misc_RNA (1)...(19): siRNA sense strand
gagagauugccauugauga

SEQ ID NO: 1483810 - RNA, 19 nt, Homo sapiens
  misc_RNA (1)...(19): siRNA sense strand
gcggaggucguuugaauuc

SEQ ID NO: 1483811 - RNA, 19 nt, Homo sapiens
  misc_RNA (1)...(19): siRNA sense strand
agugaaaggugucaucauc

SEQ ID NO: 1483812 - RNA, 19 nt, Homo sapiens
  misc_RNA (1)...(19): siRNA sense strand
gaugcucccugcuccaaca

SEQ ID NO: 1483813 - RNA, 19 nt, Homo sapiens
  misc_RNA (1)...(19): siRNA sense strand
caacacagggagcgauuuc

SEQ ID NO: 1483814 - RNA, 19 nt, Homo sapiens
  misc_RNA (1)...(19): siRNA sense strand
uagagaacuuucagugcaa

SEQ ID NO: 1483815 - RNA, 19 nt, Homo sapiens
  misc_RNA (1)...(19): siRNA sense strand
ggaacacccaagacaguga

SEQ ID NO: 1483816 - RNA, 19 nt, Homo sapiens
  misc_RNA (1)...(19): siRNA sense strand
gaacccaucucggcuuuug

SEQ ID NO: 1483817 - RNA, 19 nt, Homo sapiens
  misc_RNA (1)...(19): siRNA sense strand
guaugacuuuaucgagauu

SEQ ID NO: 1483818 - RNA, 19 nt, Homo sapiens
  misc_RNA (1)...(19): siRNA sense strand
ggggagaacugcagcuuug

SEQ ID NO: 1483819 - RNA, 19 nt, Homo sapiens
  misc_RNA (1)...(19): siRNA sense strand
caaggacugggaauacauu

SEQ ID NO: 1483820 - RNA, 19 nt, Homo sapiens
  misc_RNA (1)...(19): siRNA sense strand
ugaaaggugucaucaucca

SEQ ID NO: 1483821 - RNA, 19 nt, Homo sapiens
  misc_RNA (1)...(19): siRNA sense strand
ucagguagaucugggaaca

SEQ ID NO: 1483822 - RNA, 19 nt, Homo sapiens
  misc_RNA (1)...(19): siRNA sense strand
aagacaggcucugaagauu

SEQ ID NO: 1483823 - RNA, 19 nt, Homo sapiens
  misc_RNA (1)...(19): siRNA sense strand
ggcaaacacugugggaaca

SEQ ID NO: 1483824 - RNA, 19 nt, Homo sapiens
  misc_RNA (1)...(19): siRNA sense strand
uguggaagccagagcauuu

SEQ ID NO: 1483825 - RNA, 19 nt, Homo sapiens
  misc_RNA (1)...(19): siRNA sense strand
uuccaaagaugcuggcuau

SEQ ID NO: 1483826 - RNA, 19 nt, Homo sapiens
  misc_RNA (1)...(19): siRNA sense strand
caacgggaccaucgaaucu

SEQ ID NO: 1483827 - RNA, 19 nt, Homo sapiens
  misc_RNA (1)...(19): siRNA sense strand
aacuuggacugcaccuuua

SEQ ID NO: 1483828 - RNA, 19 nt, Homo sapiens
  misc_RNA (1)...(19): siRNA sense strand
gauugccauugaugacauu

SEQ ID NO: 1483829 - RNA, 19 nt, Homo sapiens
  misc_RNA (1)...(19): siRNA sense strand
gaagaggaggccacagagu

SEQ ID NO: 1483830 - RNA, 19 nt, Homo sapiens
  misc_RNA (1)...(19): siRNA sense strand
ggcaaggacugggaauaca

SEQ ID NO: 1483831 - RNA, 19 nt, Homo sapiens
  misc_RNA (1)...(19): siRNA sense strand
aggaguggcuucagguaga

SEQ ID NO: 1483832 - RNA, 19 nt, Homo sapiens
  misc_RNA (1)...(19): siRNA sense strand
ccaacaacgaugcaacuga

SEQ ID NO: 1483833 - RNA, 19 nt, Homo sapiens
  misc_RNA (1)...(19): siRNA sense strand
gagaggacuggauggugua

SEQ ID NO: 1483834 - RNA, 19 nt, Homo sapiens
  misc_RNA (1)...(19): siRNA sense strand
ggaagucagcacuaaugga

SEQ ID NO: 1483835 - RNA, 19 nt, Homo sapiens
  misc_RNA (1)...(19): siRNA sense strand
gcuccauggugaugacaau

SEQ ID NO: 1483836 - RNA, 19 nt, Homo sapiens
  misc_RNA (1)...(19): siRNA sense strand
agaagauuguccucaacuu

SEQ ID NO: 1483837 - RNA, 19 nt, Homo sapiens
  misc_RNA (1)...(19): siRNA sense strand
caaaacacccucugaacuu

SEQ ID NO: 1483838 - RNA, 19 nt, Homo sapiens
  misc_RNA (1)...(19): siRNA sense strand
aagcacgacugcaaguaug

SEQ ID NO: 1483839 - RNA, 19 nt, Homo sapiens
  misc_RNA (1)...(19): siRNA sense strand
gcuacgacauggaguacca

SEQ ID NO: 1483840 - RNA, 19 nt, Homo sapiens
  misc_RNA (1)...(19): siRNA sense strand
ucacggccaucgcaacaca

SEQ ID NO: 1483841 - RNA, 19 nt, Homo sapiens
  misc_RNA (1)...(19): siRNA sense strand
ccucaucuaccuacucuga

SEQ ID NO: 1483842 - RNA, 19 nt, Homo sapiens
  misc_RNA (1)...(19): siRNA sense strand
ugagaaguauccacacaac

SEQ ID NO: 1483843 - RNA, 19 nt, Homo sapiens
  misc_RNA (1)...(19): siRNA sense strand
caaguucaccuccgacuac

SEQ ID NO: 1483844 - RNA, 19 nt, Homo sapiens
  misc_RNA (1)...(19): siRNA sense strand
gcaaggacugggaauacau

SEQ ID NO: 1483845 - RNA, 19 nt, Homo sapiens
  misc_RNA (1)...(19): siRNA sense strand
gcagagugacagccagaga

SEQ ID NO: 1483846 - RNA, 19 nt, Homo sapiens
  misc_RNA (1)...(19): siRNA sense strand
caaacacugugggaacauc

SEQ ID NO: 1483847 - RNA, 19 nt, Homo sapiens
  misc_RNA (1)...(19): siRNA sense strand
uggaacccaucucggcuuu

SEQ ID NO: 1483848 - RNA, 19 nt, Homo sapiens
  misc_RNA (1)...(19): siRNA sense strand
aaagucuccuacagccuaa

SEQ ID NO: 1483849 - RNA, 19 nt, Homo sapiens
  misc_RNA (1)...(19): siRNA sense strand
ggaguggcuucagguagau

SEQ ID NO: 1483850 - RNA, 19 nt, Homo sapiens
  misc_RNA (1)...(19): siRNA sense strand
gauccucucccugaccuuu

SEQ ID NO: 1483851 - RNA, 19 nt, Homo sapiens
  misc_RNA (1)...(19): siRNA sense strand
gauggcauuccacauguug

SEQ ID NO: 1483852 - RNA, 19 nt, Homo sapiens
  misc_RNA (1)...(19): siRNA sense strand
caauugcaacuucgauuuc

SEQ ID NO: 1483853 - RNA, 19 nt, Homo sapiens
  misc_RNA (1)...(19): siRNA sense strand
cgaugcaacugaggugguu

SEQ ID NO: 1483854 - RNA, 19 nt, Homo sapiens
  misc_RNA (1)...(19): siRNA sense strand
gagucuggccggauugcua

SEQ ID NO: 1483855 - RNA, 19 nt, Homo sapiens
  misc_RNA (1)...(19): siRNA sense strand
gcucugaagauugcucaaa

SEQ ID NO: 1483856 - RNA, 19 nt, Homo sapiens
  misc_RNA (1)...(19): siRNA sense strand
gaagcccggugugcaugga

SEQ ID NO: 1483857 - RNA, 19 nt, Homo sapiens
  misc_RNA (1)...(19): siRNA sense strand
gaggucguuugaauuccaa

SEQ ID NO: 1483858 - RNA, 19 nt, Homo sapiens
  misc_RNA (1)...(19): siRNA sense strand
ggacugcaaguacgauugg

SEQ ID NO: 1483859 - RNA, 19 nt, Homo sapiens
  misc_RNA (1)...(19): siRNA sense strand
agacaggcucugaagauug

SEQ ID NO: 1483860 - RNA, 19 nt, Homo sapiens
  misc_RNA (1)...(19): siRNA sense strand
ggacguuccggagagauug

SEQ ID NO: 1483861 - RNA, 19 nt, Homo sapiens
  misc_RNA (1)...(19): siRNA sense strand
gugcgcaaguucaaagucu

SEQ ID NO: 1483862 - RNA, 19 nt, Homo sapiens
  misc_RNA (1)...(19): siRNA sense strand
ccagaagauuguccucaac

SEQ ID NO: 1483863 - RNA, 19 nt, Homo sapiens
  misc_RNA (1)...(19): siRNA sense strand
gcaacacagggagcgauuu

SEQ ID NO: 1483864 - RNA, 19 nt, Homo sapiens
  misc_RNA (1)...(19): siRNA sense strand
gagaagcacgacugcaagu

SEQ ID NO: 1483865 - RNA, 19 nt, Homo sapiens
  misc_RNA (1)...(19): siRNA sense strand
ugcaguuccugaucuuuga

SEQ ID NO: 1483866 - RNA, 19 nt, Homo sapiens
  misc_RNA (1)...(19): siRNA sense strand
ccugagaaguauccacaca

SEQ ID NO: 1483867 - RNA, 19 nt, Homo sapiens
  misc_RNA (1)...(19): siRNA sense strand
ccgaagaggaggccacaga

SEQ ID NO: 1483868 - RNA, 19 nt, Homo sapiens
  misc_RNA (1)...(19): siRNA sense strand
ccagaugacaggaauuucu

SEQ ID NO: 1483869 - RNA, 19 nt, Homo sapiens
  misc_RNA (1)...(19): siRNA sense strand
caacugaggugguucugaa

SEQ ID NO: 1483870 - RNA, 19 nt, Homo sapiens
  misc_RNA (1)...(19): siRNA sense strand
caucgaaucuccuggguuu

SEQ ID NO: 1483871 - RNA, 19 nt, Homo sapiens
  misc_RNA (1)...(19): siRNA sense strand
caaagaugcuggcuauauc

SEQ ID NO: 1483872 - RNA, 19 nt, Homo sapiens
  misc_RNA (1)...(19): siRNA sense strand
caacuucaacccucacuuu

SEQ ID NO: 1483873 - RNA, 19 nt, Homo sapiens
  misc_RNA (1)...(19): siRNA sense strand
ccggagagauugccauuga

SEQ ID NO: 1483874 - RNA, 19 nt, Homo sapiens
  misc_RNA (1)...(19): siRNA sense strand
caacuuggacugcaccuuu

SEQ ID NO: 1483875 - RNA, 19 nt, Homo sapiens
  misc_RNA (1)...(19): siRNA sense strand
gcuacuacgucaaauccua

SEQ ID NO: 1483876 - RNA, 19 nt, Homo sapiens
  misc_RNA (1)...(19): siRNA sense strand
gaacccaaccagaagauug

SEQ ID NO: 1483877 - RNA, 19 nt, Homo sapiens
  misc_RNA (1)...(19): siRNA sense strand
gaagggaacaugcacuaug

SEQ ID NO: 1483878 - RNA, 19 nt, Homo sapiens
  misc_RNA (1)...(19): siRNA sense strand
gggauucaauugcaacuuc

SEQ ID NO: 1483879 - RNA, 19 nt, Homo sapiens
  misc_RNA (1)...(19): siRNA sense strand
gaccggacguuuccagaug

SEQ ID NO: 1483880 - RNA, 19 nt, Homo sapiens
  misc_RNA (1)...(19): siRNA sense strand
gugcggaggucguuugaau

SEQ ID NO: 1483881 - RNA, 19 nt, Homo sapiens
  misc_RNA (1)...(19): siRNA sense strand
gaagcacgacugcaaguau

SEQ ID NO: 1483882 - RNA, 19 nt, Homo sapiens
  misc_RNA (1)...(19): siRNA sense strand
ccaaagaugcuggcuauau

SEQ ID NO: 1483883 - RNA, 19 nt, Homo sapiens
  misc_RNA (1)...(19): siRNA sense strand
gaauggcuacuacgucaaa

SEQ ID NO: 1483884 - RNA, 19 nt, Homo sapiens
  misc_RNA (1)...(19): siRNA sense strand
cgacauggaguaccagauu

SEQ ID NO: 1483885 - RNA, 19 nt, Homo sapiens
  misc_RNA (1)...(19): siRNA sense strand
aagggaacaugcacuauga

SEQ ID NO: 1483886 - RNA, 19 nt, Homo sapiens
  misc_RNA (1)...(19): siRNA sense strand
uuucuuagcccucuacuuu

SEQ ID NO: 1483887 - RNA, 19 nt, Homo sapiens
  misc_RNA (1)...(19): siRNA sense strand
gaacugcagcuuugaggau

SEQ ID NO: 1483888 - RNA, 19 nt, Homo sapiens
  misc_RNA (1)...(19): siRNA sense strand
caagacaggcucugaagau

SEQ ID NO: 1483889 - RNA, 19 nt, Homo sapiens
  misc_RNA (1)...(19): siRNA sense strand
gagcauuugugcgcaaguu

SEQ ID NO: 1483890 - RNA, 19 nt, Homo sapiens
  misc_RNA (1)...(19): siRNA sense strand
gacauggaguaccagauug

SEQ ID NO: 1483891 - RNA, 19 nt, Homo sapiens
  misc_RNA (1)...(19): siRNA sense strand
gggauggcauuccacaugu

SEQ ID NO: 1483892 - RNA, 19 nt, Homo sapiens
  misc_RNA (1)...(19): siRNA sense strand
gaacugcgaguggauuguu

SEQ ID NO: 1483893 - RNA, 19 nt, Homo sapiens
  misc_RNA (1)...(19): siRNA sense strand
gaacuuucagugcaauguu

SEQ ID NO: 1483894 - RNA, 19 nt, Homo sapiens
  misc_RNA (1)...(19): siRNA sense strand
ggagagauugccauugaug

SEQ ID NO: 1483895 - RNA, 19 nt, Homo sapiens
  misc_RNA (1)...(19): siRNA sense strand
ccagagagagggccaguau

SEQ ID NO: 1483896 - RNA, 19 nt, Homo sapiens
  misc_RNA (1)...(19): siRNA sense strand
gcuccaugcucuacaucaa

SEQ ID NO: 1483897 - RNA, 19 nt, Homo sapiens
  misc_RNA (1)...(19): siRNA sense strand
ggauggcauuccacauguu

SEQ ID NO: 1483898 - RNA, 19 nt, Homo sapiens
  misc_RNA (1)...(19): siRNA sense strand
gaggagcccugugguugga

SEQ ID NO: 1483899 - RNA, 19 nt, Homo sapiens
  misc_RNA (1)...(19): siRNA sense strand
ucaauugcaacuucgauuu

SEQ ID NO: 1483900 - RNA, 19 nt, Homo sapiens
  misc_RNA (1)...(19): siRNA sense strand
gaacacccaagacagugaa

SEQ ID NO: 1483901 - RNA, 19 nt, Homo sapiens
  misc_RNA (1)...(19): siRNA sense strand
cauggagucuggccggauu

SEQ ID NO: 1483902 - RNA, 19 nt, Homo sapiens
  misc_RNA (1)...(19): siRNA sense strand
caaguacugugggaccaaa

SEQ ID NO: 1483903 - RNA, 19 nt, Homo sapiens
  misc_RNA (1)...(19): siRNA sense strand
gacaggcucugaagauugc

SEQ ID NO: 1483904 - RNA, 19 nt, Homo sapiens
  misc_RNA (1)...(19): siRNA sense strand
guuagaauccgcccucaga

SEQ ID NO: 1483905 - RNA, 19 nt, Homo sapiens
  misc_RNA (1)...(19): siRNA sense strand
aaacacagaauggcuacua

SEQ ID NO: 1483906 - RNA, 19 nt, Homo sapiens
  misc_RNA (1)...(19): siRNA sense strand
gaacagaucagugccucau

SEQ ID NO: 1483907 - RNA, 19 nt, Homo sapiens
  misc_RNA (1)...(19): siRNA sense strand
ucuuugaccuggagcauga

SEQ ID NO: 1483908 - RNA, 19 nt, Homo sapiens
  misc_RNA (1)...(19): siRNA sense strand
ggaggucguuugaauucca

SEQ ID NO: 1483909 - RNA, 19 nt, Homo sapiens
  misc_RNA (1)...(19): siRNA sense strand
gagagauugccauugauga

SEQ ID NO: 1483910 - RNA, 19 nt, Homo sapiens
  misc_RNA (1)...(19): siRNA sense strand
gcggaggucguuugaauuc

SEQ ID NO: 1483911 - RNA, 19 nt, Homo sapiens
  misc_RNA (1)...(19): siRNA sense strand
agugaaaggugucaucauc

SEQ ID NO: 1483912 - RNA, 19 nt, Homo sapiens
  misc_RNA (1)...(19): siRNA sense strand
gaugcucccugcuccaaca

SEQ ID NO: 1483913 - RNA, 19 nt, Homo sapiens
  misc_RNA (1)...(19): siRNA sense strand
caacacagggagcgauuuc

SEQ ID NO: 1483914 - RNA, 19 nt, Homo sapiens
  misc_RNA (1)...(19): siRNA sense strand
uagagaacuuucagugcaa

SEQ ID NO: 1483915 - RNA, 19 nt, Homo sapiens
  misc_RNA (1)...(19): siRNA sense strand
ggaacacccaagacaguga

SEQ ID NO: 1483916 - RNA, 19 nt, Homo sapiens
  misc_RNA (1)...(19): siRNA sense strand
gaacccaucucggcuuuug

SEQ ID NO: 1483917 - RNA, 19 nt, Homo sapiens
  misc_RNA (1)...(19): siRNA sense strand
guaugacuuuaucgagauu

SEQ ID NO: 1483918 - RNA, 19 nt, Homo sapiens
  misc_RNA (1)...(19): siRNA sense strand
ggggagaacugcagcuuug

SEQ ID NO: 1483919 - RNA, 19 nt, Homo sapiens
  misc_RNA (1)...(19): siRNA sense strand
caaggacugggaauacauu

SEQ ID NO: 1483920 - RNA, 19 nt, Homo sapiens
  misc_RNA (1)...(19): siRNA sense strand
ugaaaggugucaucaucca

SEQ ID NO: 1483921 - RNA, 19 nt, Homo sapiens
  misc_RNA (1)...(19): siRNA sense strand
ucagguagaucugggaaca

SEQ ID NO: 1483922 - RNA, 19 nt, Homo sapiens
  misc_RNA (1)...(19): siRNA sense strand
aagacaggcucugaagauu

SEQ ID NO: 1483923 - RNA, 19 nt, Homo sapiens
  misc_RNA (1)...(19): siRNA sense strand
ggcaaacacugugggaaca

SEQ ID NO: 1483924 - RNA, 19 nt, Homo sapiens
  misc_RNA (1)...(19): siRNA sense strand
uguggaagccagagcauuu

SEQ ID NO: 1483925 - RNA, 19 nt, Homo sapiens
  misc_RNA (1)...(19): siRNA sense strand
uuccaaagaugcuggcuau

SEQ ID NO: 1483926 - RNA, 19 nt, Homo sapiens
  misc_RNA (1)...(19): siRNA sense strand
caacgggaccaucgaaucu

SEQ ID NO: 1483927 - RNA, 19 nt, Homo sapiens
  misc_RNA (1)...(19): siRNA sense strand
aacuuggacugcaccuuua

SEQ ID NO: 1483928 - RNA, 19 nt, Homo sapiens
  misc_RNA (1)...(19): siRNA sense strand
gauugccauugaugacauu

SEQ ID NO: 1483929 - RNA, 19 nt, Homo sapiens
  misc_RNA (1)...(19): siRNA sense strand
gaagaggaggccacagagu

SEQ ID NO: 1483930 - RNA, 19 nt, Homo sapiens
  misc_RNA (1)...(19): siRNA sense strand
ggcaaggacugggaauaca

SEQ ID NO: 1483931 - RNA, 19 nt, Homo sapiens
  misc_RNA (1)...(19): siRNA sense strand
aggaguggcuucagguaga

SEQ ID NO: 1483932 - RNA, 19 nt, Homo sapiens
  misc_RNA (1)...(19): siRNA sense strand
ccaacaacgaugcaacuga

SEQ ID NO: 1483933 - RNA, 19 nt, Homo sapiens
  misc_RNA (1)...(19): siRNA sense strand
gagaggacuggauggugua

SEQ ID NO: 1483934 - RNA, 19 nt, Homo sapiens
  misc_RNA (1)...(19): siRNA sense strand
ggaagucagcacuaaugga

SEQ ID NO: 1483935 - RNA, 19 nt, Homo sapiens
  misc_RNA (1)...(19): siRNA sense strand
gcuccauggugaugacaau

SEQ ID NO: 1483936 - RNA, 19 nt, Homo sapiens
  misc_RNA (1)...(19): siRNA sense strand
agaagauuguccucaacuu

SEQ ID NO: 1483937 - RNA, 19 nt, Homo sapiens
  misc_RNA (1)...(19): siRNA sense strand
caaaacacccucugaacuu

SEQ ID NO: 1483938 - RNA, 19 nt, Homo sapiens
  misc_RNA (1)...(19): siRNA sense strand
aagcacgacugcaaguaug

SEQ ID NO: 1483939 - RNA, 19 nt, Homo sapiens
  misc_RNA (1)...(19): siRNA sense strand
gcuacgacauggaguacca

SEQ ID NO: 1483940 - RNA, 19 nt, Homo sapiens
  misc_RNA (1)...(19): siRNA sense strand
ucacggccaucgcaacaca

SEQ ID NO: 1483941 - RNA, 19 nt, Homo sapiens
  misc_RNA (1)...(19): siRNA sense strand
ccucaucuaccuacucuga

SEQ ID NO: 1483942 - RNA, 19 nt, Homo sapiens
  misc_RNA (1)...(19): siRNA sense strand
ugagaaguauccacacaac

SEQ ID NO: 1483943 - RNA, 19 nt, Homo sapiens
  misc_RNA (1)...(19): siRNA sense strand
caaguucaccuccgacuac

SEQ ID NO: 1483944 - RNA, 19 nt, Homo sapiens
  misc_RNA (1)...(19): siRNA sense strand
gcaaggacugggaauacau

SEQ ID NO: 1483945 - RNA, 19 nt, Homo sapiens
  misc_RNA (1)...(19): siRNA sense strand
gcagagugacagccagaga

SEQ ID NO: 1483946 - RNA, 19 nt, Homo sapiens
  misc_RNA (1)...(19): siRNA sense strand
caaacacugugggaacauc

SEQ ID NO: 1483947 - RNA, 19 nt, Homo sapiens
  misc_RNA (1)...(19): siRNA sense strand
uggaacccaucucggcuuu

SEQ ID NO: 1483948 - RNA, 19 nt, Homo sapiens
  misc_RNA (1)...(19): siRNA sense strand
aaagucuccuacagccuaa

SEQ ID NO: 1483949 - RNA, 19 nt, Homo sapiens
  misc_RNA (1)...(19): siRNA sense strand
ggaguggcuucagguagau

SEQ ID NO: 1483950 - RNA, 19 nt, Homo sapiens
  misc_RNA (1)...(19): siRNA sense strand
gauccucucccugaccuuu

SEQ ID NO: 1483951 - RNA, 19 nt, Homo sapiens
  misc_RNA (1)...(19): siRNA sense strand
gauggcauuccacauguug

SEQ ID NO: 1483952 - RNA, 19 nt, Homo sapiens
  misc_RNA (1)...(19): siRNA sense strand
caauugcaacuucgauuuc

SEQ ID NO: 1483953 - RNA, 19 nt, Homo sapiens
  misc_RNA (1)...(19): siRNA sense strand
cgaugcaacugaggugguu

SEQ ID NO: 1483954 - RNA, 19 nt, Homo sapiens
  misc_RNA (1)...(19): siRNA sense strand
gagucuggccggauugcua

SEQ ID NO: 1483955 - RNA, 19 nt, Homo sapiens
  misc_RNA (1)...(19): siRNA sense strand
gcucugaagauugcucaaa

SEQ ID NO: 1483956 - RNA, 19 nt, Homo sapiens
  misc_RNA (1)...(19): siRNA sense strand
gaagcccggugugcaugga

SEQ ID NO: 1483957 - RNA, 19 nt, Homo sapiens
  misc_RNA (1)...(19): siRNA sense strand
gaggucguuugaauuccaa

SEQ ID NO: 1483958 - RNA, 19 nt, Homo sapiens
  misc_RNA (1)...(19): siRNA sense strand
ggacugcaaguacgauugg

SEQ ID NO: 1483959 - RNA, 19 nt, Homo sapiens
  misc_RNA (1)...(19): siRNA sense strand
agacaggcucugaagauug

SEQ ID NO: 1483960 - RNA, 19 nt, Homo sapiens
  misc_RNA (1)...(19): siRNA sense strand
ggacguuccggagagauug

SEQ ID NO: 1483961 - RNA, 19 nt, Homo sapiens
  misc_RNA (1)...(19): siRNA sense strand
gugcgcaaguucaaagucu

SEQ ID NO: 1483962 - RNA, 19 nt, Homo sapiens
  misc_RNA (1)...(19): siRNA sense strand
ccagaagauuguccucaac

SEQ ID NO: 1483963 - RNA, 19 nt, Homo sapiens
  misc_RNA (1)...(19): siRNA sense strand
gcaacacagggagcgauuu

SEQ ID NO: 1483964 - RNA, 19 nt, Homo sapiens
  misc_RNA (1)...(19): siRNA sense strand
gagaagcacgacugcaagu

SEQ ID NO: 1483965 - RNA, 19 nt, Homo sapiens
  misc_RNA (1)...(19): siRNA sense strand
ugcaguuccugaucuuuga

SEQ ID NO: 1483966 - RNA, 19 nt, Homo sapiens
  misc_RNA (1)...(19): siRNA sense strand
ccugagaaguauccacaca

SEQ ID NO: 1483967 - RNA, 19 nt, Homo sapiens
  misc_RNA (1)...(19): siRNA sense strand
ccgaagaggaggccacaga

SEQ ID NO: 1483968 - RNA, 19 nt, Homo sapiens
  misc_RNA (1)...(19): siRNA sense strand
ccagaugacaggaauuucu

SEQ ID NO: 1483969 - RNA, 19 nt, Homo sapiens
  misc_RNA (1)...(19): siRNA sense strand
gaaguuggauggucuguua

SEQ ID NO: 1483970 - RNA, 19 nt, Homo sapiens
  misc_RNA (1)...(19): siRNA sense strand
gaaauggacuaucaaauga

SEQ ID NO: 1483971 - RNA, 19 nt, Homo sapiens
  misc_RNA (1)...(19): siRNA sense strand
gcacagaaauggacuauca

SEQ ID NO: 1483972 - RNA, 19 nt, Homo sapiens
  misc_RNA (1)...(19): siRNA sense strand
ccaaagaacuaaugacaaa

SEQ ID NO: 1483973 - RNA, 19 nt, Homo sapiens
  misc_RNA (1)...(19): siRNA sense strand
gaagaaaucauggagauaa

SEQ ID NO: 1483974 - RNA, 19 nt, Homo sapiens
  misc_RNA (1)...(19): siRNA sense strand
gcaaagaaucuacaacaaa

SEQ ID NO: 1483975 - RNA, 19 nt, Homo sapiens
  misc_RNA (1)...(19): siRNA sense strand
gaaauugucagaagaaauc

SEQ ID NO: 1483976 - RNA, 19 nt, Homo sapiens
  misc_RNA (1)...(19): siRNA sense strand
aaagaucacugaaguugga

SEQ ID NO: 1483977 - RNA, 19 nt, Homo sapiens
  misc_RNA (1)...(19): siRNA sense strand
cagaagaaaucauggagau

SEQ ID NO: 1483978 - RNA, 19 nt, Homo sapiens
  misc_RNA (1)...(19): siRNA sense strand
guagagagcuugaaaaucu

SEQ ID NO: 1483979 - RNA, 19 nt, Homo sapiens
  misc_RNA (1)...(19): siRNA sense strand
gagaaauugucagaagaaa

SEQ ID NO: 1483980 - RNA, 19 nt, Homo sapiens
  misc_RNA (1)...(19): siRNA sense strand
agaaauggacuaucaaaug

SEQ ID NO: 1483981 - RNA, 19 nt, Homo sapiens
  misc_RNA (1)...(19): siRNA sense strand
ugacagcuaugaauuccuu

SEQ ID NO: 1483982 - RNA, 19 nt, Homo sapiens
  misc_RNA (1)...(19): siRNA sense strand
uaaguaguauacaggcuuu

SEQ ID NO: 1483983 - RNA, 19 nt, Homo sapiens
  misc_RNA (1)...(19): siRNA sense strand
gauggucuguuagaagaaa

SEQ ID NO: 1483984 - RNA, 19 nt, Homo sapiens
  misc_RNA (1)...(19): siRNA sense strand
gaaagcaaagaaucuacaa

SEQ ID NO: 1483985 - RNA, 19 nt, Homo sapiens
  misc_RNA (1)...(19): siRNA sense strand
gcagaaaaccaaagaacua

SEQ ID NO: 1483986 - RNA, 19 nt, Homo sapiens
  misc_RNA (1)...(19): siRNA sense strand
guugagaaauugucagaag

SEQ ID NO: 1483987 - RNA, 19 nt, Homo sapiens
  misc_RNA (1)...(19): siRNA sense strand
gaacuaaugacaaaaguga

SEQ ID NO: 1483988 - RNA, 19 nt, Homo sapiens
  misc_RNA (1)...(19): siRNA sense strand
gugcaucacauuucuuaaa

SEQ ID NO: 1483989 - RNA, 19 nt, Homo sapiens
  misc_RNA (1)...(19): siRNA sense strand
gaacuugucaaaugagucu

SEQ ID NO: 1483990 - RNA, 19 nt, Homo sapiens
  misc_RNA (1)...(19): siRNA sense strand
uggauggucuguuagaaga

SEQ ID NO: 1483991 - RNA, 19 nt, Homo sapiens
  misc_RNA (1)...(19): siRNA sense strand
gcuaugaauuccuuaaagc

SEQ ID NO: 1483992 - RNA, 19 nt, Homo sapiens
  misc_RNA (1)...(19): siRNA sense strand
uaacugaaagcaaagaauc

SEQ ID NO: 1483993 - RNA, 19 nt, Homo sapiens
  misc_RNA (1)...(19): siRNA sense strand
caaagcaucacgucaucuu

SEQ ID NO: 1483994 - RNA, 19 nt, Homo sapiens
  misc_RNA (1)...(19): siRNA sense strand
caacaaaagacaaugauga

SEQ ID NO: 1483995 - RNA, 19 nt, Homo sapiens
  misc_RNA (1)...(19): siRNA sense strand
cacaaguucugaagagcaa

SEQ ID NO: 1483996 - RNA, 19 nt, Homo sapiens
  misc_RNA (1)...(19): siRNA sense strand
ggagggcaguagagagcuu

SEQ ID NO: 1483997 - RNA, 19 nt, Homo sapiens
  misc_RNA (1)...(19): siRNA sense strand
gaauucaugauguugcuau

SEQ ID NO: 1483998 - RNA, 19 nt, Homo sapiens
  misc_RNA (1)...(19): siRNA sense strand
ugaauuccuuaaagccauu

SEQ ID NO: 1483999 - RNA, 19 nt, Homo sapiens
  misc_RNA (1)...(19): siRNA sense strand
ugagaaauugucagaagaa

SEQ ID NO: 1484000 - RNA, 19 nt, Homo sapiens
  misc_RNA (1)...(19): siRNA sense strand
gaaaucauggagauaaugc

SEQ ID NO: 1484001 - RNA, 19 nt, Homo sapiens
  misc_RNA (1)...(19): siRNA sense strand
ucacaaagcaucacgucau

SEQ ID NO: 1484002 - RNA, 19 nt, Homo sapiens
  misc_RNA (1)...(19): siRNA sense strand
aacuggaacuugucaaaug

SEQ ID NO: 1484003 - RNA, 19 nt, Homo sapiens
  misc_RNA (1)...(19): siRNA sense strand
acuggaacuugucaaauga

SEQ ID NO: 1484004 - RNA, 19 nt, Homo sapiens
  misc_RNA (1)...(19): siRNA sense strand
guuaaaagaucacugaagu

SEQ ID NO: 1484005 - RNA, 19 nt, Homo sapiens
  misc_RNA (1)...(19): siRNA sense strand
cacaaagcaucacgucauc

SEQ ID NO: 1484006 - RNA, 19 nt, Homo sapiens
  misc_RNA (1)...(19): siRNA sense strand
gaaaaccaaagaacuaaug

SEQ ID NO: 1484007 - RNA, 19 nt, Homo sapiens
  misc_RNA (1)...(19): siRNA sense strand
aagcaaagaaucuacaaca

SEQ ID NO: 1484008 - RNA, 19 nt, Homo sapiens
  misc_RNA (1)...(19): siRNA sense strand
caacuggaacuugucaaau

SEQ ID NO: 1484009 - RNA, 19 nt, Homo sapiens
  misc_RNA (1)...(19): siRNA sense strand
acagaaauggacuaucaaa

SEQ ID NO: 1484010 - RNA, 19 nt, Homo sapiens
  misc_RNA (1)...(19): siRNA sense strand
ggcaguagagagcuugaaa

SEQ ID NO: 1484011 - RNA, 19 nt, Homo sapiens
  misc_RNA (1)...(19): siRNA sense strand
agcaaagaaucuacaacaa

SEQ ID NO: 1484012 - RNA, 19 nt, Homo sapiens
  misc_RNA (1)...(19): siRNA sense strand
uaacuuauucuccaacaac

SEQ ID NO: 1484013 - RNA, 19 nt, Homo sapiens
  misc_RNA (1)...(19): siRNA sense strand
caucuugacagcuaugaau

SEQ ID NO: 1484014 - RNA, 19 nt, Homo sapiens
  misc_RNA (1)...(19): siRNA sense strand
uugagaaauugucagaaga

SEQ ID NO: 1484015 - RNA, 19 nt, Homo sapiens
  misc_RNA (1)...(19): siRNA sense strand
uaaaagaucacugaaguug

SEQ ID NO: 1484016 - RNA, 19 nt, Homo sapiens
  misc_RNA (1)...(19): siRNA sense strand
cagcuaugaauuccuuaaa

SEQ ID NO: 1484017 - RNA, 19 nt, Homo sapiens
  misc_RNA (1)...(19): siRNA sense strand
uggaaucuccugugcauca

SEQ ID NO: 1484018 - RNA, 19 nt, Homo sapiens
  misc_RNA (1)...(19): siRNA sense strand
gagcaaaagcacagaaaug

SEQ ID NO: 1484019 - RNA, 19 nt, Homo sapiens
  misc_RNA (1)...(19): siRNA sense strand
aagcaucacgucaucuuga

SEQ ID NO: 1484020 - RNA, 19 nt, Homo sapiens
  misc_RNA (1)...(19): siRNA sense strand
aaagagaaaugcagaaaac

SEQ ID NO: 1484021 - RNA, 19 nt, Homo sapiens
  misc_RNA (1)...(19): siRNA sense strand
gaaaaucucauuggaaucu

SEQ ID NO: 1484022 - RNA, 19 nt, Homo sapiens
  misc_RNA (1)...(19): siRNA sense strand
cagaaauggacuaucaaau

SEQ ID NO: 1484023 - RNA, 19 nt, Homo sapiens
  misc_RNA (1)...(19): siRNA sense strand
gaaaagaguacaggacuuc

SEQ ID NO: 1484024 - RNA, 19 nt, Homo sapiens
  misc_RNA (1)...(19): siRNA sense strand
agaagaaaucauggagaua

SEQ ID NO: 1484025 - RNA, 19 nt, Homo sapiens
  misc_RNA (1)...(19): siRNA sense strand
guuggauggucuguuagaa

SEQ ID NO: 1484026 - RNA, 19 nt, Homo sapiens
  misc_RNA (1)...(19): siRNA sense strand
ucauggagauaaugcaaaa

SEQ ID NO: 1484027 - RNA, 19 nt, Homo sapiens
  misc_RNA (1)...(19): siRNA sense strand
ugaaagcaaagaaucuaca

SEQ ID NO: 1484028 - RNA, 19 nt, Homo sapiens
  misc_RNA (1)...(19): siRNA sense strand
aaccaaagaacuaaugaca

SEQ ID NO: 1484029 - RNA, 19 nt, Homo sapiens
  misc_RNA (1)...(19): siRNA sense strand
guaguauacaggcuuugga

SEQ ID NO: 1484030 - RNA, 19 nt, Homo sapiens
  misc_RNA (1)...(19): siRNA sense strand
gaacaggacucaagacauc

SEQ ID NO: 1484031 - RNA, 19 nt, Homo sapiens
  misc_RNA (1)...(19): siRNA sense strand
cagaagaucuuacuguuaa

SEQ ID NO: 1484032 - RNA, 19 nt, Homo sapiens
  misc_RNA (1)...(19): siRNA sense strand
gcacuugucuucuguguga

SEQ ID NO: 1484033 - RNA, 19 nt, Homo sapiens
  misc_RNA (1)...(19): siRNA sense strand
gaaccacccuugaaaguga

SEQ ID NO: 1484034 - RNA, 19 nt, Homo sapiens
  misc_RNA (1)...(19): siRNA sense strand
gaagcaggauguacaguaa

SEQ ID NO: 1484035 - RNA, 19 nt, Homo sapiens
  misc_RNA (1)...(19): siRNA sense strand
aaacugaaccuguggauua

SEQ ID NO: 1484036 - RNA, 19 nt, Homo sapiens
  misc_RNA (1)...(19): siRNA sense strand
gaagaacccuugaacuugu

SEQ ID NO: 1484037 - RNA, 19 nt, Homo sapiens
  misc_RNA (1)...(19): siRNA sense strand
gaacacaugcgauuacauu

SEQ ID NO: 1484038 - RNA, 19 nt, Homo sapiens
  misc_RNA (1)...(19): siRNA sense strand
gaagacaaacugcauauug

SEQ ID NO: 1484039 - RNA, 19 nt, Homo sapiens
  misc_RNA (1)...(19): siRNA sense strand
gaugcaagcuggacagauu

SEQ ID NO: 1484040 - RNA, 19 nt, Homo sapiens
  misc_RNA (1)...(19): siRNA sense strand
gcaacagggagaauuauua

SEQ ID NO: 1484041 - RNA, 19 nt, Homo sapiens
  misc_RNA (1)...(19): siRNA sense strand
aaagagcacuuaagaauuc

SEQ ID NO: 1484042 - RNA, 19 nt, Homo sapiens
  misc_RNA (1)...(19): siRNA sense strand
ggaaagcgcuucucacacu

SEQ ID NO: 1484043 - RNA, 19 nt, Homo sapiens
  misc_RNA (1)...(19): siRNA sense strand
ggcgauagaugguaaugua

SEQ ID NO: 1484044 - RNA, 19 nt, Homo sapiens
  misc_RNA (1)...(19): siRNA sense strand
gcauacaccuacucaacua

SEQ ID NO: 1484045 - RNA, 19 nt, Homo sapiens
  misc_RNA (1)...(19): siRNA sense strand
gaaggaguaucaaauguag

SEQ ID NO: 1484046 - RNA, 19 nt, Homo sapiens
  misc_RNA (1)...(19): siRNA sense strand
caagguggccauucuguua

SEQ ID NO: 1484047 - RNA, 19 nt, Homo sapiens
  misc_RNA (1)...(19): siRNA sense strand
uuagaaaggucaacuauca

SEQ ID NO: 1484048 - RNA, 19 nt, Homo sapiens
  misc_RNA (1)...(19): siRNA sense strand
gaacuugucuugcgcaaaa

SEQ ID NO: 1484049 - RNA, 19 nt, Homo sapiens
  misc_RNA (1)...(19): siRNA sense strand
ggaagaggaugaagacagu

SEQ ID NO: 1484050 - RNA, 19 nt, Homo sapiens
  misc_RNA (1)...(19): siRNA sense strand
gaagaaaguguuacagaug

SEQ ID NO: 1484051 - RNA, 19 nt, Homo sapiens
  misc_RNA (1)...(19): siRNA sense strand
aaagacaaaugaagccuaa

SEQ ID NO: 1484052 - RNA, 19 nt, Homo sapiens
  misc_RNA (1)...(19): siRNA sense strand
ggacagcacaguaaaucua

SEQ ID NO: 1484053 - RNA, 19 nt, Homo sapiens
  misc_RNA (1)...(19): siRNA sense strand
gaacaagaaacaaucaaug

SEQ ID NO: 1484054 - RNA, 19 nt, Homo sapiens
  misc_RNA (1)...(19): siRNA sense strand
gcaguuacaccuuugcaua

SEQ ID NO: 1484055 - RNA, 19 nt, Homo sapiens
  misc_RNA (1)...(19): siRNA sense strand
aaucaaugcuucacccaua

SEQ ID NO: 1484056 - RNA, 19 nt, Homo sapiens
  misc_RNA (1)...(19): siRNA sense strand
ggaagaacccuugaacuug

SEQ ID NO: 1484057 - RNA, 19 nt, Homo sapiens
  misc_RNA (1)...(19): siRNA sense strand
gaaccaggcaaaguaaaua

SEQ ID NO: 1484058 - RNA, 19 nt, Homo sapiens
  misc_RNA (1)...(19): siRNA sense strand
gagagaagccauaugaaug

SEQ ID NO: 1484059 - RNA, 19 nt, Homo sapiens
  misc_RNA (1)...(19): siRNA sense strand
gagcaagugucugaagaaa

SEQ ID NO: 1484060 - RNA, 19 nt, Homo sapiens
  misc_RNA (1)...(19): siRNA sense strand
uuaaugcacuuccagaauu

SEQ ID NO: 1484061 - RNA, 19 nt, Homo sapiens
  misc_RNA (1)...(19): siRNA sense strand
ggaagaaguggaagaagaa

SEQ ID NO: 1484062 - RNA, 19 nt, Homo sapiens
  misc_RNA (1)...(19): siRNA sense strand
gaggagcagugaaagagaa

SEQ ID NO: 1484063 - RNA, 19 nt, Homo sapiens
  misc_RNA (1)...(19): siRNA sense strand
ggaggaggauaaagagaug

SEQ ID NO: 1484064 - RNA, 19 nt, Homo sapiens
  misc_RNA (1)...(19): siRNA sense strand
ggcaaguguuggagaauaa

SEQ ID NO: 1484065 - RNA, 19 nt, Homo sapiens
  misc_RNA (1)...(19): siRNA sense strand
gaaaggaagggcaagaaau

SEQ ID NO: 1484066 - RNA, 19 nt, Homo sapiens
  misc_RNA (1)...(19): siRNA sense strand
uccuauagcucacacauaa

SEQ ID NO: 1484067 - RNA, 19 nt, Homo sapiens
  misc_RNA (1)...(19): siRNA sense strand
ggagagaagccauaugaau

SEQ ID NO: 1484068 - RNA, 19 nt, Homo sapiens
  misc_RNA (1)...(19): siRNA sense strand
gagaagggaaugcuaagaa

SEQ ID NO: 1484069 - RNA, 19 nt, Homo sapiens
  misc_RNA (1)...(19): siRNA sense strand
gaauguaugcuugugauuu

SEQ ID NO: 1484070 - RNA, 19 nt, Homo sapiens
  misc_RNA (1)...(19): siRNA sense strand
gaacaaugaucagccucaa

SEQ ID NO: 1484071 - RNA, 19 nt, Homo sapiens
  misc_RNA (1)...(19): siRNA sense strand
uuacucaccuguccauauu

SEQ ID NO: 1484072 - RNA, 19 nt, Homo sapiens
  misc_RNA (1)...(19): siRNA sense strand
gaaagagaagggaaugcua

SEQ ID NO: 1484073 - RNA, 19 nt, Homo sapiens
  misc_RNA (1)...(19): siRNA sense strand
uaaaagaccucaugagugu

SEQ ID NO: 1484074 - RNA, 19 nt, Homo sapiens
  misc_RNA (1)...(19): siRNA sense strand
ggcaaaagauagagaauaa

SEQ ID NO: 1484075 - RNA, 19 nt, Homo sapiens
  misc_RNA (1)...(19): siRNA sense strand
ccagaagaucuuacuguua

SEQ ID NO: 1484076 - RNA, 19 nt, Homo sapiens
  misc_RNA (1)...(19): siRNA sense strand
ggaagaagaagagguagaa

SEQ ID NO: 1484077 - RNA, 19 nt, Homo sapiens
  misc_RNA (1)...(19): siRNA sense strand
gaaaucaggaugaaagaca

SEQ ID NO: 1484078 - RNA, 19 nt, Homo sapiens
  misc_RNA (1)...(19): siRNA sense strand
ugaaagugauccagccaaa

SEQ ID NO: 1484079 - RNA, 19 nt, Homo sapiens
  misc_RNA (1)...(19): siRNA sense strand
ccagaaauacacaggguua

SEQ ID NO: 1484080 - RNA, 19 nt, Homo sapiens
  misc_RNA (1)...(19): siRNA sense strand
cacaugacaucacauaaau

SEQ ID NO: 1484081 - RNA, 19 nt, Homo sapiens
  misc_RNA (1)...(19): siRNA sense strand
ccaaaagaguaguucauua

SEQ ID NO: 1484082 - RNA, 19 nt, Homo sapiens
  misc_RNA (1)...(19): siRNA sense strand
ggucagcccugcaguccaa

SEQ ID NO: 1484083 - RNA, 19 nt, Homo sapiens
  misc_RNA (1)...(19): siRNA sense strand
caacuugaacgucacauga

SEQ ID NO: 1484084 - RNA, 19 nt, Homo sapiens
  misc_RNA (1)...(19): siRNA sense strand
gaugaaagacaagauacua

SEQ ID NO: 1484085 - RNA, 19 nt, Homo sapiens
  misc_RNA (1)...(19): siRNA sense strand
gaaccaguuguaaauguaa

SEQ ID NO: 1484086 - RNA, 19 nt, Homo sapiens
  misc_RNA (1)...(19): siRNA sense strand
ucacuaguguuuaccagaa

SEQ ID NO: 1484087 - RNA, 19 nt, Homo sapiens
  misc_RNA (1)...(19): siRNA sense strand
ucacaugacaucacauaaa

SEQ ID NO: 1484088 - RNA, 19 nt, Homo sapiens
  misc_RNA (1)...(19): siRNA sense strand
gacaagauauuccaaaaga

SEQ ID NO: 1484089 - RNA, 19 nt, Homo sapiens
  misc_RNA (1)...(19): siRNA sense strand
uaucaaauguagaggauca

SEQ ID NO: 1484090 - RNA, 19 nt, Homo sapiens
  misc_RNA (1)...(19): siRNA sense strand
caaaaggacaguuguguua

SEQ ID NO: 1484091 - RNA, 19 nt, Homo sapiens
  misc_RNA (1)...(19): siRNA sense strand
acaagaagagccacaagua

SEQ ID NO: 1484092 - RNA, 19 nt, Homo sapiens
  misc_RNA (1)...(19): siRNA sense strand
ggagaauaaucaagccaau

SEQ ID NO: 1484093 - RNA, 19 nt, Homo sapiens
  misc_RNA (1)...(19): siRNA sense strand
gcucacacauaagcaguaa

SEQ ID NO: 1484094 - RNA, 19 nt, Homo sapiens
  misc_RNA (1)...(19): siRNA sense strand
uagaagaggcagagaauga

SEQ ID NO: 1484095 - RNA, 19 nt, Homo sapiens
  misc_RNA (1)...(19): siRNA sense strand
gaaaagcccuaucaaugug

SEQ ID NO: 1484096 - RNA, 19 nt, Homo sapiens
  misc_RNA (1)...(19): siRNA sense strand
cagggagaauuauuagaaa

SEQ ID NO: 1484097 - RNA, 19 nt, Homo sapiens
  misc_RNA (1)...(19): siRNA sense strand
gaauaaaccccuucaagaa

SEQ ID NO: 1484098 - RNA, 19 nt, Homo sapiens
  misc_RNA (1)...(19): siRNA sense strand
uaaggcaaguguuggagaa

SEQ ID NO: 1484099 - RNA, 19 nt, Homo sapiens
  misc_RNA (1)...(19): siRNA sense strand
gagaaaagcccuaucaaug

SEQ ID NO: 1484100 - RNA, 19 nt, Homo sapiens
  misc_RNA (1)...(19): siRNA sense strand
cagaaggaguaucaaaugu

SEQ ID NO: 1484101 - RNA, 19 nt, Homo sapiens
  misc_RNA (1)...(19): siRNA sense strand
cagaaccaguuguaaaugu

SEQ ID NO: 1484102 - RNA, 19 nt, Homo sapiens
  misc_RNA (1)...(19): siRNA sense strand
caaauucagauucagauga

SEQ ID NO: 1484103 - RNA, 19 nt, Homo sapiens
  misc_RNA (1)...(19): siRNA sense strand
gaaauacacaggguuacuu

SEQ ID NO: 1484104 - RNA, 19 nt, Homo sapiens
  misc_RNA (1)...(19): siRNA sense strand
ccaaagaacaagaaacaau

SEQ ID NO: 1484105 - RNA, 19 nt, Homo sapiens
  misc_RNA (1)...(19): siRNA sense strand
guagugagcaagugucuga

SEQ ID NO: 1484106 - RNA, 19 nt, Homo sapiens
  misc_RNA (1)...(19): siRNA sense strand
agaagaaaguguuacagau

SEQ ID NO: 1484107 - RNA, 19 nt, Homo sapiens
  misc_RNA (1)...(19): siRNA sense strand
agaaccaguuguaaaugua

SEQ ID NO: 1484108 - RNA, 19 nt, Homo sapiens
  misc_RNA (1)...(19): siRNA sense strand
aaagcaacagggagaauua

SEQ ID NO: 1484109 - RNA, 19 nt, Homo sapiens
  misc_RNA (1)...(19): siRNA sense strand
gauagcacuugucuucugu

SEQ ID NO: 1484110 - RNA, 19 nt, Homo sapiens
  misc_RNA (1)...(19): siRNA sense strand
gaagagaucaaagacaugu

SEQ ID NO: 1484111 - RNA, 19 nt, Homo sapiens
  misc_RNA (1)...(19): siRNA sense strand
gcaagugucugaagaaaag

SEQ ID NO: 1484112 - RNA, 19 nt, Homo sapiens
  misc_RNA (1)...(19): siRNA sense strand
gaugaagacaaacugcaua

SEQ ID NO: 1484113 - RNA, 19 nt, Homo sapiens
  misc_RNA (1)...(19): siRNA sense strand
cugaaauccucucgaauga

SEQ ID NO: 1484114 - RNA, 19 nt, Homo sapiens
  misc_RNA (1)...(19): siRNA sense strand
ggccugaaauccucucgaa

SEQ ID NO: 1484115 - RNA, 19 nt, Homo sapiens
  misc_RNA (1)...(19): siRNA sense strand
cgcaauaacguuacaaauu

SEQ ID NO: 1484116 - RNA, 19 nt, Homo sapiens
  misc_RNA (1)...(19): siRNA sense strand
cacaguaaaucuacaaagu

SEQ ID NO: 1484117 - RNA, 19 nt, Homo sapiens
  misc_RNA (1)...(19): siRNA sense strand
gauggcaauuugucuccua

SEQ ID NO: 1484118 - RNA, 19 nt, Homo sapiens
  misc_RNA (1)...(19): siRNA sense strand
caaacugcauauuguggaa

SEQ ID NO: 1484119 - RNA, 19 nt, Homo sapiens
  misc_RNA (1)...(19): siRNA sense strand
uuaaagcacuaugaccuaa

SEQ ID NO: 1484120 - RNA, 19 nt, Homo sapiens
  misc_RNA (1)...(19): siRNA sense strand
caaauggaaaucaggauga

SEQ ID NO: 1484121 - RNA, 19 nt, Homo sapiens
  misc_RNA (1)...(19): siRNA sense strand
ugaagaguuucuacaacaa

SEQ ID NO: 1484122 - RNA, 19 nt, Homo sapiens
  misc_RNA (1)...(19): siRNA sense strand
ggaagaagaaaguguuaca

SEQ ID NO: 1484123 - RNA, 19 nt, Homo sapiens
  misc_RNA (1)...(19): siRNA sense strand
gaaaggucaacuaucacua

SEQ ID NO: 1484124 - RNA, 19 nt, Homo sapiens
  misc_RNA (1)...(19): siRNA sense strand
gguuuggugucucccauaa

SEQ ID NO: 1484125 - RNA, 19 nt, Homo sapiens
  misc_RNA (1)...(19): siRNA sense strand
caaauacaaacaucaccua

SEQ ID NO: 1484126 - RNA, 19 nt, Homo sapiens
  misc_RNA (1)...(19): siRNA sense strand
ucacauaaaucaggaagag

SEQ ID NO: 1484127 - RNA, 19 nt, Homo sapiens
  misc_RNA (1)...(19): siRNA sense strand
gcauacagaacccaacuug

SEQ ID NO: 1484128 - RNA, 19 nt, Homo sapiens
  misc_RNA (1)...(19): siRNA sense strand
aaagagaagggaaugcuaa

SEQ ID NO: 1484129 - RNA, 19 nt, Homo sapiens
  misc_RNA (1)...(19): siRNA sense strand
aauguaugcuugugauuug

SEQ ID NO: 1484130 - RNA, 19 nt, Homo sapiens
  misc_RNA (1)...(19): siRNA sense strand
gcugaaagcugacaucauu

SEQ ID NO: 1484131 - RNA, 19 nt, Homo sapiens
  misc_RNA (1)...(19): siRNA sense strand
gaaaguggcugugaagaug

SEQ ID NO: 1484132 - RNA, 19 nt, Homo sapiens
  misc_RNA (1)...(19): siRNA sense strand
gaauggaacuggagaacau

SEQ ID NO: 1484133 - RNA, 19 nt, Homo sapiens
  misc_RNA (1)...(19): siRNA sense strand
gguagaaggugugccauuu

SEQ ID NO: 1484134 - RNA, 19 nt, Homo sapiens
  misc_RNA (1)...(19): siRNA sense strand
cgaaagagacggaaagaga

SEQ ID NO: 1484135 - RNA, 19 nt, Homo sapiens
  misc_RNA (1)...(19): siRNA sense strand
acgcugagauuuacaacua

SEQ ID NO: 1484136 - RNA, 19 nt, Homo sapiens
  misc_RNA (1)...(19): siRNA sense strand
caagcgacauugaagaguu

SEQ ID NO: 1484137 - RNA, 19 nt, Homo sapiens
  misc_RNA (1)...(19): siRNA sense strand
gaaacagccuccggagugu

SEQ ID NO: 1484138 - RNA, 19 nt, Homo sapiens
  misc_RNA (1)...(19): siRNA sense strand
ggauggcuccuuugugaaa

SEQ ID NO: 1484139 - RNA, 19 nt, Homo sapiens
  misc_RNA (1)...(19): siRNA sense strand
gagaggaacuacgaagauc

SEQ ID NO: 1484140 - RNA, 19 nt, Homo sapiens
  misc_RNA (1)...(19): siRNA sense strand
ggaaagagacgcgguuugg

SEQ ID NO: 1484141 - RNA, 19 nt, Homo sapiens
  misc_RNA (1)...(19): siRNA sense strand
ggagaggaacuacgaagau

SEQ ID NO: 1484142 - RNA, 19 nt, Homo sapiens
  misc_RNA (1)...(19): siRNA sense strand
gcagaggacaugacagugu

SEQ ID NO: 1484143 - RNA, 19 nt, Homo sapiens
  misc_RNA (1)...(19): siRNA sense strand
gcgaugaacuaaaggaaaa

SEQ ID NO: 1484144 - RNA, 19 nt, Homo sapiens
  misc_RNA (1)...(19): siRNA sense strand
guauggaggacguguauga

SEQ ID NO: 1484145 - RNA, 19 nt, Homo sapiens
  misc_RNA (1)...(19): siRNA sense strand
cagcuugcaugaaggaguu

SEQ ID NO: 1484146 - RNA, 19 nt, Homo sapiens
  misc_RNA (1)...(19): siRNA sense strand
ccgacaaccuguauacugu

SEQ ID NO: 1484147 - RNA, 19 nt, Homo sapiens
  misc_RNA (1)...(19): siRNA sense strand
gcagagcaccagccagaga

SEQ ID NO: 1484148 - RNA, 19 nt, Homo sapiens
  misc_RNA (1)...(19): siRNA sense strand
gggaaguccuggcuguugu

SEQ ID NO: 1484149 - RNA, 19 nt, Homo sapiens
  misc_RNA (1)...(19): siRNA sense strand
gggcugugguccagaacuu

SEQ ID NO: 1484150 - RNA, 19 nt, Homo sapiens
  misc_RNA (1)...(19): siRNA sense strand
uguauacugugcagaguga

SEQ ID NO: 1484151 - RNA, 19 nt, Homo sapiens
  misc_RNA (1)...(19): siRNA sense strand
gcgcaucgaggccacauug

SEQ ID NO: 1484152 - RNA, 19 nt, Homo sapiens
  misc_RNA (1)...(19): siRNA sense strand
gaaggaguuugaccaucca

SEQ ID NO: 1484153 - RNA, 19 nt, Homo sapiens
  misc_RNA (1)...(19): siRNA sense strand
ggaacuggagaacaucuug

SEQ ID NO: 1484154 - RNA, 19 nt, Homo sapiens
  misc_RNA (1)...(19): siRNA sense strand
ccaaacugccugucaagug

SEQ ID NO: 1484155 - RNA, 19 nt, Homo sapiens
  misc_RNA (1)...(19): siRNA sense strand
gaccagggccaauuugaca

SEQ ID NO: 1484156 - RNA, 19 nt, Homo sapiens
  misc_RNA (1)...(19): siRNA sense strand
gauuuacaacuaccucauu

SEQ ID NO: 1484157 - RNA, 19 nt, Homo sapiens
  misc_RNA (1)...(19): siRNA sense strand
gaccugaucguacgugugu

SEQ ID NO: 1484158 - RNA, 19 nt, Homo sapiens
  misc_RNA (1)...(19): siRNA sense strand
ggagaaccccuuuaaccua

SEQ ID NO: 1484159 - RNA, 19 nt, Homo sapiens
  misc_RNA (1)...(19): siRNA sense strand
agaccuggcugcucggaau

SEQ ID NO: 1484160 - RNA, 19 nt, Homo sapiens
  misc_RNA (1)...(19): siRNA sense strand
uaccugagcucucggaacu

SEQ ID NO: 1484161 - RNA, 19 nt, Homo sapiens
  misc_RNA (1)...(19): siRNA sense strand
ggcaagccuuugacagugu

SEQ ID NO: 1484162 - RNA, 19 nt, Homo sapiens
  misc_RNA (1)...(19): siRNA sense strand
caguguggcucacgguaga

SEQ ID NO: 1484163 - RNA, 19 nt, Homo sapiens
  misc_RNA (1)...(19): siRNA sense strand
gcagcccgguccuucaauc

SEQ ID NO: 1484164 - RNA, 19 nt, Homo sapiens
  misc_RNA (1)...(19): siRNA sense strand
ggagugggaagaagugauc

SEQ ID NO: 1484165 - RNA, 19 nt, Homo sapiens
  misc_RNA (1)...(19): siRNA sense strand
ugaaaguggcugugaagau

SEQ ID NO: 1484166 - RNA, 19 nt, Homo sapiens
  misc_RNA (1)...(19): siRNA sense strand
acacguggccaaacuuguu

SEQ ID NO: 1484167 - RNA, 19 nt, Homo sapiens
  misc_RNA (1)...(19): siRNA sense strand
ccuccaaacugccugucaa

SEQ ID NO: 1484168 - RNA, 19 nt, Homo sapiens
  misc_RNA (1)...(19): siRNA sense strand
acaauggaacccaggauga

SEQ ID NO: 1484169 - RNA, 19 nt, Homo sapiens
  misc_RNA (1)...(19): siRNA sense strand
uuacuugucugcgaaugga

SEQ ID NO: 1484170 - RNA, 19 nt, Homo sapiens
  misc_RNA (1)...(19): siRNA sense strand
cgaaaacgcugagauuuac

SEQ ID NO: 1484171 - RNA, 19 nt, Homo sapiens
  misc_RNA (1)...(19): siRNA sense strand
cccugaaccuguuaccauu

SEQ ID NO: 1484172 - RNA, 19 nt, Homo sapiens
  misc_RNA (1)...(19): siRNA sense strand
gacugucgguacauacuca

SEQ ID NO: 1484173 - RNA, 19 nt, Homo sapiens
  misc_RNA (1)...(19): siRNA sense strand
ccuuauacaucaacaucga

SEQ ID NO: 1484174 - RNA, 19 nt, Homo sapiens
  misc_RNA (1)...(19): siRNA sense strand
gcaucgaggccacauugga

SEQ ID NO: 1484175 - RNA, 19 nt, Homo sapiens
  misc_RNA (1)...(19): siRNA sense strand
guacaguucaggugacaca

SEQ ID NO: 1484176 - RNA, 19 nt, Homo sapiens
  misc_RNA (1)...(19): siRNA sense strand
gcccucauccugcuucgaa

SEQ ID NO: 1484177 - RNA, 19 nt, Homo sapiens
  misc_RNA (1)...(19): siRNA sense strand
aggcccagcugaagcaaga

SEQ ID NO: 1484178 - RNA, 19 nt, Homo sapiens
  misc_RNA (1)...(19): siRNA sense strand
gguggucucuucucaugac

SEQ ID NO: 1484179 - RNA, 19 nt, Homo sapiens
  misc_RNA (1)...(19): siRNA sense strand
uggaggacguguaugaucu

SEQ ID NO: 1484180 - RNA, 19 nt, Homo sapiens
  misc_RNA (1)...(19): siRNA sense strand
ucgaaaacgcugagauuua

SEQ ID NO: 1484181 - RNA, 19 nt, Homo sapiens
  misc_RNA (1)...(19): siRNA sense strand
ccugagcucucggaacuuc

SEQ ID NO: 1484182 - RNA, 19 nt, Homo sapiens
  misc_RNA (1)...(19): siRNA sense strand
guccuggguucaagacaau

SEQ ID NO: 1484183 - RNA, 19 nt, Homo sapiens
  misc_RNA (1)...(19): siRNA sense strand
ggccagcugucugugcuau

SEQ ID NO: 1484184 - RNA, 19 nt, Homo sapiens
  misc_RNA (1)...(19): siRNA sense strand
cgcccgagcuuuacuuguc

SEQ ID NO: 1484185 - RNA, 19 nt, Homo sapiens
  misc_RNA (1)...(19): siRNA sense strand
cauccugcuucgaaagaga

SEQ ID NO: 1484186 - RNA, 19 nt, Homo sapiens
  misc_RNA (1)...(19): siRNA sense strand
gcaccauguuuuccuguga

SEQ ID NO: 1484187 - RNA, 19 nt, Homo sapiens
  misc_RNA (1)...(19): siRNA sense strand
uggagagccuggccgacaa

SEQ ID NO: 1484188 - RNA, 19 nt, Homo sapiens
  misc_RNA (1)...(19): siRNA sense strand
aagcgacauugaagaguuc

SEQ ID NO: 1484189 - RNA, 19 nt, Homo sapiens
  misc_RNA (1)...(19): siRNA sense strand
ccgcaggucugaagcucau

SEQ ID NO: 1484190 - RNA, 19 nt, Homo sapiens
  misc_RNA (1)...(19): siRNA sense strand
cugguggucucuucucaug

SEQ ID NO: 1484191 - RNA, 19 nt, Homo sapiens
  misc_RNA (1)...(19): siRNA sense strand
auucaggccucaucuugga

SEQ ID NO: 1484192 - RNA, 19 nt, Homo sapiens
  misc_RNA (1)...(19): siRNA sense strand
aaacuguccuggguucaag

SEQ ID NO: 1484193 - RNA, 19 nt, Homo sapiens
  misc_RNA (1)...(19): siRNA sense strand
ccagcugucugugcuaucu

SEQ ID NO: 1484194 - RNA, 19 nt, Homo sapiens
  misc_RNA (1)...(19): siRNA sense strand
gaggacguguaugaucuca

SEQ ID NO: 1484195 - RNA, 19 nt, Homo sapiens
  misc_RNA (1)...(19): siRNA sense strand
gggaccagggccaauuuga

SEQ ID NO: 1484196 - RNA, 19 nt, Homo sapiens
  misc_RNA (1)...(19): siRNA sense strand
cagccacuguucaccuuca

SEQ ID NO: 1484197 - RNA, 19 nt, Homo sapiens
  misc_RNA (1)...(19): siRNA sense strand
gccgacaaccuguauacug

SEQ ID NO: 1484198 - RNA, 19 nt, Homo sapiens
  misc_RNA (1)...(19): siRNA sense strand
caaacuguccuggguucaa

SEQ ID NO: 1484199 - RNA, 19 nt, Homo sapiens
  misc_RNA (1)...(19): siRNA sense strand
cugaaccuguuaccauugu

SEQ ID NO: 1484200 - RNA, 19 nt, Homo sapiens
  misc_RNA (1)...(19): siRNA sense strand
aaugagacacagaggcuuu

SEQ ID NO: 1484201 - RNA, 19 nt, Homo sapiens
  misc_RNA (1)...(19): siRNA sense strand
caugccauccgcacagauu

SEQ ID NO: 1484202 - RNA, 19 nt, Homo sapiens
  misc_RNA (1)...(19): siRNA sense strand
caagggcuacugccacaca

SEQ ID NO: 1484203 - RNA, 19 nt, Homo sapiens
  misc_RNA (1)...(19): siRNA sense strand
gaaccuguuaccauugucu

SEQ ID NO: 1484204 - RNA, 19 nt, Homo sapiens
  misc_RNA (1)...(19): siRNA sense strand
ggacucucccggaagaucu

SEQ ID NO: 1484205 - RNA, 19 nt, Homo sapiens
  misc_RNA (1)...(19): siRNA sense strand
gacccagagcaccauguuu

SEQ ID NO: 1484206 - RNA, 19 nt, Homo sapiens
  misc_RNA (1)...(19): siRNA sense strand
cacgugggcagacgccaua

SEQ ID NO: 1484207 - RNA, 19 nt, Homo sapiens
  misc_RNA (1)...(19): siRNA sense strand
ggucaucuugcccuucaug

SEQ ID NO: 1484208 - RNA, 19 nt, Homo sapiens
  misc_RNA (1)...(19): siRNA sense strand
aaggagaguuugguucagu

SEQ ID NO: 1484209 - RNA, 19 nt, Homo sapiens
  misc_RNA (1)...(19): siRNA sense strand
uuggacagcuugggcauca

SEQ ID NO: 1484210 - RNA, 19 nt, Homo sapiens
  misc_RNA (1)...(19): siRNA sense strand
ggaaguccuggcuguugug

SEQ ID NO: 1484211 - RNA, 19 nt, Homo sapiens
  misc_RNA (1)...(19): siRNA sense strand
ggauggaggagccugacau

SEQ ID NO: 1484212 - RNA, 19 nt, Homo sapiens
  misc_RNA (1)...(19): siRNA sense strand
auuuacaacuaccucauug

SEQ ID NO: 1484213 - RNA, 19 nt, Homo sapiens
  misc_RNA (1)...(19): siRNA sense strand
cuuuccaacugucuuguga

SEQ ID NO: 1484214 - RNA, 19 nt, Homo sapiens
  misc_RNA (1)...(19): siRNA sense strand
uggcggcucuggcuucucu

SEQ ID NO: 1484215 - RNA, 19 nt, Homo sapiens
  misc_RNA (1)...(19): siRNA sense strand
gguuugggcaagccuuuga

SEQ ID NO: 1484216 - RNA, 19 nt, Homo sapiens
  misc_RNA (1)...(19): siRNA sense strand
gugcgucuccaaugcaguu

SEQ ID NO: 1484217 - RNA, 19 nt, Homo sapiens
  misc_RNA (1)...(19): siRNA sense strand
ccaaaaggaccugaucgua

SEQ ID NO: 1484218 - RNA, 19 nt, Homo sapiens
  misc_RNA (1)...(19): siRNA sense strand
ggaccagggccaauuugac

SEQ ID NO: 1484219 - RNA, 19 nt, Homo sapiens
  misc_RNA (1)...(19): siRNA sense strand
agagccagccguucacuuc

SEQ ID NO: 1484220 - RNA, 19 nt, Homo sapiens
  misc_RNA (1)...(19): siRNA sense strand
ggcagccggugaagcucaa

SEQ ID NO: 1484221 - RNA, 19 nt, Homo sapiens
  misc_RNA (1)...(19): siRNA sense strand
ggccggauguugggcaaag

SEQ ID NO: 1484222 - RNA, 19 nt, Homo sapiens
  misc_RNA (1)...(19): siRNA sense strand
ggaauucggugauguauga

SEQ ID NO: 1484223 - RNA, 19 nt, Homo sapiens
  misc_RNA (1)...(19): siRNA sense strand
gaaacuauauccuacugaa

SEQ ID NO: 1484224 - RNA, 19 nt, Homo sapiens
  misc_RNA (1)...(19): siRNA sense strand
gcaacuacaucacguacaa

SEQ ID NO: 1484225 - RNA, 19 nt, Homo sapiens
  misc_RNA (1)...(19): siRNA sense strand
gcuggaaccuacuagauuu

SEQ ID NO: 1484226 - RNA, 19 nt, Homo sapiens
  misc_RNA (1)...(19): siRNA sense strand
ucucugagcuucaccuuaa

SEQ ID NO: 1484227 - RNA, 19 nt, Homo sapiens
  misc_RNA (1)...(19): siRNA sense strand
gaugagaccuaugaaguga

SEQ ID NO: 1484228 - RNA, 19 nt, Homo sapiens
  misc_RNA (1)...(19): siRNA sense strand
ccaccaagguuccaacuau

SEQ ID NO: 1484229 - RNA, 19 nt, Homo sapiens
  misc_RNA (1)...(19): siRNA sense strand
gaucaucaaccucuuugua

SEQ ID NO: 1484230 - RNA, 19 nt, Homo sapiens
  misc_RNA (1)...(19): siRNA sense strand
ggacggacgugcuguacug

SEQ ID NO: 1484231 - RNA, 19 nt, Homo sapiens
  misc_RNA (1)...(19): siRNA sense strand
gaaauugcucugaagauga

SEQ ID NO: 1484232 - RNA, 19 nt, Homo sapiens
  misc_RNA (1)...(19): siRNA sense strand
ggccagagcugccuguuca

SEQ ID NO: 1484233 - RNA, 19 nt, Homo sapiens
  misc_RNA (1)...(19): siRNA sense strand
ggaaccauauucuguuuua

SEQ ID NO: 1484234 - RNA, 19 nt, Homo sapiens
  misc_RNA (1)...(19): siRNA sense strand
ggaaagcuguacaccuguu

SEQ ID NO: 1484235 - RNA, 19 nt, Homo sapiens
  misc_RNA (1)...(19): siRNA sense strand
gcagagaugcuccugaaga

SEQ ID NO: 1484236 - RNA, 19 nt, Homo sapiens
  misc_RNA (1)...(19): siRNA sense strand
agacaucgauccugagaau

SEQ ID NO: 1484237 - RNA, 19 nt, Homo sapiens
  misc_RNA (1)...(19): siRNA sense strand
ccaccaagaucaacaugga

SEQ ID NO: 1484238 - RNA, 19 nt, Homo sapiens
  misc_RNA (1)...(19): siRNA sense strand
ggauguuagucuguauuua

SEQ ID NO: 1484239 - RNA, 19 nt, Homo sapiens
  misc_RNA (1)...(19): siRNA sense strand
ggagaagauugagcugaaa

SEQ ID NO: 1484240 - RNA, 19 nt, Homo sapiens
  misc_RNA (1)...(19): siRNA sense strand
gcucuucacuggccucuuc

SEQ ID NO: 1484241 - RNA, 19 nt, Homo sapiens
  misc_RNA (1)...(19): siRNA sense strand
ggaauaucucuuucucaua

SEQ ID NO: 1484242 - RNA, 19 nt, Homo sapiens
  misc_RNA (1)...(19): siRNA sense strand
ggacagucauguucaaugc

SEQ ID NO: 1484243 - RNA, 19 nt, Homo sapiens
  misc_RNA (1)...(19): siRNA sense strand
gcaaacgccuggucuccau

SEQ ID NO: 1484244 - RNA, 19 nt, Homo sapiens
  misc_RNA (1)...(19): siRNA sense strand
ccaaugcucucccucuaug

SEQ ID NO: 1484245 - RNA, 19 nt, Homo sapiens
  misc_RNA (1)...(19): siRNA sense strand
ccaagaaccagcaccagua

SEQ ID NO: 1484246 - RNA, 19 nt, Homo sapiens
  misc_RNA (1)...(19): siRNA sense strand
ugaaauugcucugaagaug

SEQ ID NO: 1484247 - RNA, 19 nt, Homo sapiens
  misc_RNA (1)...(19): siRNA sense strand
gagcuucaccuuaaggaaa

SEQ ID NO: 1484248 - RNA, 19 nt, Homo sapiens
  misc_RNA (1)...(19): siRNA sense strand
ggguagcauuguugauaua

SEQ ID NO: 1484249 - RNA, 19 nt, Homo sapiens
  misc_RNA (1)...(19): siRNA sense strand
gcuagaagaggaucucaaa

SEQ ID NO: 1484250 - RNA, 19 nt, Homo sapiens
  misc_RNA (1)...(19): siRNA sense strand
gaaacacccugugguagca

SEQ ID NO: 1484251 - RNA, 19 nt, Homo sapiens
  misc_RNA (1)...(19): siRNA sense strand
caucaucgccuucuucaug

SEQ ID NO: 1484252 - RNA, 19 nt, Homo sapiens
  misc_RNA (1)...(19): siRNA sense strand
caggaaccauauucuguuu

SEQ ID NO: 1484253 - RNA, 19 nt, Homo sapiens
  misc_RNA (1)...(19): siRNA sense strand
caccaacuuugacaacuuu

SEQ ID NO: 1484254 - RNA, 19 nt, Homo sapiens
  misc_RNA (1)...(19): siRNA sense strand
ccuaugaagugaagaugaa

SEQ ID NO: 1484255 - RNA, 19 nt, Homo sapiens
  misc_RNA (1)...(19): siRNA sense strand
gcaaccacgucagcuacua

SEQ ID NO: 1484256 - RNA, 19 nt, Homo sapiens
  misc_RNA (1)...(19): siRNA sense strand
acugugagcuggacaagaa

SEQ ID NO: 1484257 - RNA, 19 nt, Homo sapiens
  misc_RNA (1)...(19): siRNA sense strand
ccaaggaggagaagauuga

SEQ ID NO: 1484258 - RNA, 19 nt, Homo sapiens
  misc_RNA (1)...(19): siRNA sense strand
ggacuggaauucggugaug

SEQ ID NO: 1484259 - RNA, 19 nt, Homo sapiens
  misc_RNA (1)...(19): siRNA sense strand
gcagucaagucuaaugucu

SEQ ID NO: 1484260 - RNA, 19 nt, Homo sapiens
  misc_RNA (1)...(19): siRNA sense strand
gaagacaucgauccugaga

SEQ ID NO: 1484261 - RNA, 19 nt, Homo sapiens
  misc_RNA (1)...(19): siRNA sense strand
ccaacuggcucacagaagu

SEQ ID NO: 1484262 - RNA, 19 nt, Homo sapiens
  misc_RNA (1)...(19): siRNA sense strand
gaaccuagaacaagccaau

SEQ ID NO: 1484263 - RNA, 19 nt, Homo sapiens
  misc_RNA (1)...(19): siRNA sense strand
cggcagagaugcuccugaa

SEQ ID NO: 1484264 - RNA, 19 nt, Homo sapiens
  misc_RNA (1)...(19): siRNA sense strand
ggacggcccugaggaucaa

SEQ ID NO: 1484265 - RNA, 19 nt, Homo sapiens
  misc_RNA (1)...(19): siRNA sense strand
gcacaagaccugcuacaac

SEQ ID NO: 1484266 - RNA, 19 nt, Homo sapiens
  misc_RNA (1)...(19): siRNA sense strand
gguggaagcggucuugauu

SEQ ID NO: 1484267 - RNA, 19 nt, Homo sapiens
  misc_RNA (1)...(19): siRNA sense strand
gcaaagagcagggccuugu

SEQ ID NO: 1484268 - RNA, 19 nt, Homo sapiens
  misc_RNA (1)...(19): siRNA sense strand
cagagaugcuccugaagau

SEQ ID NO: 1484269 - RNA, 19 nt, Homo sapiens
  misc_RNA (1)...(19): siRNA sense strand
ccaccuggaugaguuuaaa

SEQ ID NO: 1484270 - RNA, 19 nt, Homo sapiens
  misc_RNA (1)...(19): siRNA sense strand
gagaugcuccugaagaugu

SEQ ID NO: 1484271 - RNA, 19 nt, Homo sapiens
  misc_RNA (1)...(19): siRNA sense strand
gaagggaaccuagaacaag

SEQ ID NO: 1484272 - RNA, 19 nt, Homo sapiens
  misc_RNA (1)...(19): siRNA sense strand
cggaggagcacauucgaua

SEQ ID NO: 1484273 - RNA, 19 nt, Homo sapiens
  misc_RNA (1)...(19): siRNA sense strand
ggucuugauuucagaagga

SEQ ID NO: 1484274 - RNA, 19 nt, Homo sapiens
  misc_RNA (1)...(19): siRNA sense strand
gaagcggucuugauuucag

SEQ ID NO: 1484275 - RNA, 19 nt, Homo sapiens
  misc_RNA (1)...(19): siRNA sense strand
aagugaagaugaaccauga

SEQ ID NO: 1484276 - RNA, 19 nt, Homo sapiens
  misc_RNA (1)...(19): siRNA sense strand
caaucaaugucgugaagau

SEQ ID NO: 1484277 - RNA, 19 nt, Homo sapiens
  misc_RNA (1)...(19): siRNA sense strand
ccauugaaauugcucugaa

SEQ ID NO: 1484278 - RNA, 19 nt, Homo sapiens
  misc_RNA (1)...(19): siRNA sense strand
ccagggauguuagucugua

SEQ ID NO: 1484279 - RNA, 19 nt, Homo sapiens
  misc_RNA (1)...(19): siRNA sense strand
ggaggagcacauucgauaa

SEQ ID NO: 1484280 - RNA, 19 nt, Homo sapiens
  misc_RNA (1)...(19): siRNA sense strand
ccuauggacuccucuuuca

SEQ ID NO: 1484281 - RNA, 19 nt, Homo sapiens
  misc_RNA (1)...(19): siRNA sense strand
uggaagcggucuugauuuc

SEQ ID NO: 1484282 - RNA, 19 nt, Homo sapiens
  misc_RNA (1)...(19): siRNA sense strand
gcgaccaucuccacaguca

SEQ ID NO: 1484283 - RNA, 19 nt, Homo sapiens
  misc_RNA (1)...(19): siRNA sense strand
ggagguacauccccaagaa

SEQ ID NO: 1484284 - RNA, 19 nt, Homo sapiens
  misc_RNA (1)...(19): siRNA sense strand
ggagcacauucgauaacuu

SEQ ID NO: 1484285 - RNA, 19 nt, Homo sapiens
  misc_RNA (1)...(19): siRNA sense strand
ucaccaaccugauccucuu

SEQ ID NO: 1484286 - RNA, 19 nt, Homo sapiens
  misc_RNA (1)...(19): siRNA sense strand
uauauucccuuuccagaag

SEQ ID NO: 1484287 - RNA, 19 nt, Homo sapiens
  misc_RNA (1)...(19): siRNA sense strand
uggaauaucucuuucucau

SEQ ID NO: 1484288 - RNA, 19 nt, Homo sapiens
  misc_RNA (1)...(19): siRNA sense strand
ggaugagaccuaugaagug

SEQ ID NO: 1484289 - RNA, 19 nt, Homo sapiens
  misc_RNA (1)...(19): siRNA sense strand
ggucaccguuggcaaguuc

SEQ ID NO: 1484290 - RNA, 19 nt, Homo sapiens
  misc_RNA (1)...(19): siRNA sense strand
gagaucaaccggaacaaca

SEQ ID NO: 1484291 - RNA, 19 nt, Homo sapiens
  misc_RNA (1)...(19): siRNA sense strand
aacaagaguugguggagaa

SEQ ID NO: 1484292 - RNA, 19 nt, Homo sapiens
  misc_RNA (1)...(19): siRNA sense strand
ucaccaacuuugacaacuu

SEQ ID NO: 1484293 - RNA, 19 nt, Homo sapiens
  misc_RNA (1)...(19): siRNA sense strand
ggccuuagcgaucuauauu

SEQ ID NO: 1484294 - RNA, 19 nt, Homo sapiens
  misc_RNA (1)...(19): siRNA sense strand
gggaacaucgugauuguca

SEQ ID NO: 1484295 - RNA, 19 nt, Homo sapiens
  misc_RNA (1)...(19): siRNA sense strand
cuucaucuguggaaacuau

SEQ ID NO: 1484296 - RNA, 19 nt, Homo sapiens
  misc_RNA (1)...(19): siRNA sense strand
gagcacauucgauaacuuc

SEQ ID NO: 1484297 - RNA, 19 nt, Homo sapiens
  misc_RNA (1)...(19): siRNA sense strand
gcacggcaucaccaacuuu

SEQ ID NO: 1484298 - RNA, 19 nt, Homo sapiens
  misc_RNA (1)...(19): siRNA sense strand
agacaucucucagaagaca

SEQ ID NO: 1484299 - RNA, 19 nt, Homo sapiens
  misc_RNA (1)...(19): siRNA sense strand
gaaccagcaccaguacaaa

SEQ ID NO: 1484300 - RNA, 19 nt, Homo sapiens
  misc_RNA (1)...(19): siRNA sense strand
gggagaacagcaaguuuga

SEQ ID NO: 1484301 - RNA, 19 nt, Homo sapiens
  misc_RNA (1)...(19): siRNA sense strand
gcccagagaagaaacaaga

SEQ ID NO: 1484302 - RNA, 19 nt, Homo sapiens
  misc_RNA (1)...(19): siRNA sense strand
gggagaagcagcagcuaga

SEQ ID NO: 1484303 - RNA, 19 nt, Homo sapiens
  misc_RNA (1)...(19): siRNA sense strand
gauguuagucuguauuuac

SEQ ID NO: 1484304 - RNA, 19 nt, Homo sapiens
  misc_RNA (1)...(19): siRNA sense strand
guucaaugccacccuguuu

SEQ ID NO: 1484305 - RNA, 19 nt, Homo sapiens
  misc_RNA (1)...(19): siRNA sense strand
cuuuguagcugucaucaug

SEQ ID NO: 1484306 - RNA, 19 nt, Homo sapiens
  misc_RNA (1)...(19): siRNA sense strand
guggguagcauuguugaua

SEQ ID NO: 1484307 - RNA, 19 nt, Homo sapiens
  misc_RNA (1)...(19): siRNA sense strand
agacagaggcggaaugcaa

SEQ ID NO: 1484308 - RNA, 19 nt, Homo sapiens
  misc_RNA (1)...(19): siRNA sense strand
gccagaagccagcgcguuu

SEQ ID NO: 1484309 - RNA, 19 nt, Homo sapiens
  misc_RNA (1)...(19): siRNA sense strand
caccggaucuccaagucaa

SEQ ID NO: 1484310 - RNA, 19 nt, Homo sapiens
  misc_RNA (1)...(19): siRNA sense strand
caaccggaacaacaacuuu

SEQ ID NO: 1484311 - RNA, 19 nt, Homo sapiens
  misc_RNA (1)...(19): siRNA sense strand
aggagaagauugagcugaa

SEQ ID NO: 1484312 - RNA, 19 nt, Homo sapiens
  misc_RNA (1)...(19): siRNA sense strand
gaggagaaggagagaaaga

SEQ ID NO: 1484313 - RNA, 19 nt, Homo sapiens
  misc_RNA (1)...(19): siRNA sense strand
guuagucuguauuuacuuc

SEQ ID NO: 1484314 - RNA, 19 nt, Homo sapiens
  misc_RNA (1)...(19): siRNA sense strand
cauccuugcugaacucugu

SEQ ID NO: 1484315 - RNA, 19 nt, Homo sapiens
  misc_RNA (1)...(19): siRNA sense strand
agucaagucuaaugucuuc

SEQ ID NO: 1484316 - RNA, 19 nt, Homo sapiens
  misc_RNA (1)...(19): siRNA sense strand
aaauugcccugaaugauac

SEQ ID NO: 1484317 - RNA, 19 nt, Homo sapiens
  misc_RNA (1)...(19): siRNA sense strand
ccaugaacauccucaacau

SEQ ID NO: 1484318 - RNA, 19 nt, Homo sapiens
  misc_RNA (1)...(19): siRNA sense strand
ggucaacuccaccuacuuc

SEQ ID NO: 1484319 - RNA, 19 nt, Homo sapiens
  misc_RNA (1)...(19): siRNA sense strand
gagcaggaguacaagaacu

SEQ ID NO: 1484320 - RNA, 19 nt, Homo sapiens
  misc_RNA (1)...(19): siRNA sense strand
caacuaccguguggagauc

SEQ ID NO: 1484321 - RNA, 19 nt, Homo sapiens
  misc_RNA (1)...(19): siRNA sense strand
cccagaaacuacaggagaa

SEQ ID NO: 1484322 - RNA, 19 nt, Homo sapiens
  misc_RNA (1)...(19): siRNA sense strand
agacauagcugcauugaau

SEQ ID NO: 1484323 - RNA, 19 nt, Homo sapiens
  misc_RNA (1)...(19): siRNA sense strand
gcacccgccugggaacuua

SEQ ID NO: 1484324 - RNA, 19 nt, Homo sapiens
  misc_RNA (1)...(19): siRNA sense strand
ugaaagacauagcugcauu

SEQ ID NO: 1484325 - RNA, 19 nt, Homo sapiens
  misc_RNA (1)...(19): siRNA sense strand
ccaaggaccucaugcucaa

SEQ ID NO: 1484326 - RNA, 19 nt, Homo sapiens
  misc_RNA (1)...(19): siRNA sense strand
ggaggcagaaguaugauuu

SEQ ID NO: 1484327 - RNA, 19 nt, Homo sapiens
  misc_RNA (1)...(19): siRNA sense strand
gaaagacauagcugcauug

SEQ ID NO: 1484328 - RNA, 19 nt, Homo sapiens
  misc_RNA (1)...(19): siRNA sense strand
agaagggccugcacagcua

SEQ ID NO: 1484329 - RNA, 19 nt, Homo sapiens
  misc_RNA (1)...(19): siRNA sense strand
ugaggaggcagaaguauga

SEQ ID NO: 1484330 - RNA, 19 nt, Homo sapiens
  misc_RNA (1)...(19): siRNA sense strand
gcacugaggaggcagaagu

SEQ ID NO: 1484331 - RNA, 19 nt, Homo sapiens
  misc_RNA (1)...(19): siRNA sense strand
cccagaagaugcucaagga

SEQ ID NO: 1484332 - RNA, 19 nt, Homo sapiens
  misc_RNA (1)...(19): siRNA sense strand
gggaccgacuggccaugua

SEQ ID NO: 1484333 - RNA, 19 nt, Homo sapiens
  misc_RNA (1)...(19): siRNA sense strand
ugugaggacuccaagagaa

SEQ ID NO: 1484334 - RNA, 19 nt, Homo sapiens
  misc_RNA (1)...(19): siRNA sense strand
guacaaggcggaggugaug

SEQ ID NO: 1484335 - RNA, 19 nt, Homo sapiens
  misc_RNA (1)...(19): siRNA sense strand
cggcuuggcccucugguuu

SEQ ID NO: 1484336 - RNA, 19 nt, Homo sapiens
  misc_RNA (1)...(19): siRNA sense strand
caacuccagcuccgucuau

SEQ ID NO: 1484337 - RNA, 19 nt, Homo sapiens
  misc_RNA (1)...(19): siRNA sense strand
ucauggcggucgucuggaa

SEQ ID NO: 1484338 - RNA, 19 nt, Homo sapiens
  misc_RNA (1)...(19): siRNA sense strand
cuacagggccgaguacgaa

SEQ ID NO: 1484339 - RNA, 19 nt, Homo sapiens
  misc_RNA (1)...(19): siRNA sense strand
ccugggaacuuacuacaac

SEQ ID NO: 1484340 - RNA, 19 nt, Homo sapiens
  misc_RNA (1)...(19): siRNA sense strand
auuccacgcuggguuguua

SEQ ID NO: 1484341 - RNA, 19 nt, Homo sapiens
  misc_RNA (1)...(19): siRNA sense strand
gcuuggcccucugguuuga

SEQ ID NO: 1484342 - RNA, 19 nt, Homo sapiens
  misc_RNA (1)...(19): siRNA sense strand
guuguuaccgcuacagcua

SEQ ID NO: 1484343 - RNA, 19 nt, Homo sapiens
  misc_RNA (1)...(19): siRNA sense strand
ggaccgacuggccauguau

SEQ ID NO: 1484344 - RNA, 19 nt, Homo sapiens
  misc_RNA (1)...(19): siRNA sense strand
gguauuuccuaggguacaa

SEQ ID NO: 1484345 - RNA, 19 nt, Homo sapiens
  misc_RNA (1)...(19): siRNA sense strand
gugaggacuccaagagaaa

SEQ ID NO: 1484346 - RNA, 19 nt, Homo sapiens
  misc_RNA (1)...(19): siRNA sense strand
gcagugaaaccgccaaagc

SEQ ID NO: 1484347 - RNA, 19 nt, Homo sapiens
  misc_RNA (1)...(19): siRNA sense strand
ucaccugcuucuucugguu

SEQ ID NO: 1484348 - RNA, 19 nt, Homo sapiens
  misc_RNA (1)...(19): siRNA sense strand
gggugcuacucugguauuu

SEQ ID NO: 1484349 - RNA, 19 nt, Homo sapiens
  misc_RNA (1)...(19): siRNA sense strand
ccagcuccgucuauuccuu

SEQ ID NO: 1484350 - RNA, 19 nt, Homo sapiens
  misc_RNA (1)...(19): siRNA sense strand
gugcuacucugguauuucc

SEQ ID NO: 1484351 - RNA, 19 nt, Homo sapiens
  misc_RNA (1)...(19): siRNA sense strand
cggaggugauggcgaggaa

SEQ ID NO: 1484352 - RNA, 19 nt, Homo sapiens
  misc_RNA (1)...(19): siRNA sense strand
gacauagcugcauugaauu

SEQ ID NO: 1484353 - RNA, 19 nt, Homo sapiens
  misc_RNA (1)...(19): siRNA sense strand
ggaagccagugugaaagac

SEQ ID NO: 1484354 - RNA, 19 nt, Homo sapiens
  misc_RNA (1)...(19): siRNA sense strand
cgccaaagcccagaagaug

SEQ ID NO: 1484355 - RNA, 19 nt, Homo sapiens
  misc_RNA (1)...(19): siRNA sense strand
gaagccagugugaaagaca

SEQ ID NO: 1484356 - RNA, 19 nt, Homo sapiens
  misc_RNA (1)...(19): siRNA sense strand
ccucugguuugaugccuau

SEQ ID NO: 1484357 - RNA, 19 nt, Homo sapiens
  misc_RNA (1)...(19): siRNA sense strand
gaggcagaaguaugauuug

SEQ ID NO: 1484358 - RNA, 19 nt, Homo sapiens
  misc_RNA (1)...(19): siRNA sense strand
cagcuccgucuauuccuuu

SEQ ID NO: 1484359 - RNA, 19 nt, Homo sapiens
  misc_RNA (1)...(19): siRNA sense strand
ccacuucucccaggaucuu

SEQ ID NO: 1484360 - RNA, 19 nt, Homo sapiens
  misc_RNA (1)...(19): siRNA sense strand
aaagacauagcugcauuga

SEQ ID NO: 1484361 - RNA, 19 nt, Homo sapiens
  misc_RNA (1)...(19): siRNA sense strand
gcuacucugguauuuccua

SEQ ID NO: 1484362 - RNA, 19 nt, Homo sapiens
  misc_RNA (1)...(19): siRNA sense strand
uguacucaaucgccacuuc

SEQ ID NO: 1484363 - RNA, 19 nt, Homo sapiens
  misc_RNA (1)...(19): siRNA sense strand
gguacaaggcggaggugau

SEQ ID NO: 1484364 - RNA, 19 nt, Homo sapiens
  misc_RNA (1)...(19): siRNA sense strand
uuccaggccugugaaguga

SEQ ID NO: 1484365 - RNA, 19 nt, Homo sapiens
  misc_RNA (1)...(19): siRNA sense strand
agacauagcugcauugaau

SEQ ID NO: 1484366 - RNA, 19 nt, Homo sapiens
  misc_RNA (1)...(19): siRNA sense strand
gcacccgccugggaacuua

SEQ ID NO: 1484367 - RNA, 19 nt, Homo sapiens
  misc_RNA (1)...(19): siRNA sense strand
ugaaagacauagcugcauu

SEQ ID NO: 1484368 - RNA, 19 nt, Homo sapiens
  misc_RNA (1)...(19): siRNA sense strand
ccaaggaccucaugcucaa

SEQ ID NO: 1484369 - RNA, 19 nt, Homo sapiens
  misc_RNA (1)...(19): siRNA sense strand
ggaggcagaaguaugauuu

SEQ ID NO: 1484370 - RNA, 19 nt, Homo sapiens
  misc_RNA (1)...(19): siRNA sense strand
gaaagacauagcugcauug

SEQ ID NO: 1484371 - RNA, 19 nt, Homo sapiens
  misc_RNA (1)...(19): siRNA sense strand
agaagggccugcacagcua

SEQ ID NO: 1484372 - RNA, 19 nt, Homo sapiens
  misc_RNA (1)...(19): siRNA sense strand
ugaggaggcagaaguauga

SEQ ID NO: 1484373 - RNA, 19 nt, Homo sapiens
  misc_RNA (1)...(19): siRNA sense strand
gcacugaggaggcagaagu

SEQ ID NO: 1484374 - RNA, 19 nt, Homo sapiens
  misc_RNA (1)...(19): siRNA sense strand
cccagaagaugcucaagga

SEQ ID NO: 1484375 - RNA, 19 nt, Homo sapiens
  misc_RNA (1)...(19): siRNA sense strand
gggaccgacuggccaugua

SEQ ID NO: 1484376 - RNA, 19 nt, Homo sapiens
  misc_RNA (1)...(19): siRNA sense strand
ugugaggacuccaagagaa

SEQ ID NO: 1484377 - RNA, 19 nt, Homo sapiens
  misc_RNA (1)...(19): siRNA sense strand
guacaaggcggaggugaug

SEQ ID NO: 1484378 - RNA, 19 nt, Homo sapiens
  misc_RNA (1)...(19): siRNA sense strand
cggcuuggcccucugguuu

SEQ ID NO: 1484379 - RNA, 19 nt, Homo sapiens
  misc_RNA (1)...(19): siRNA sense strand
caacuccagcuccgucuau

SEQ ID NO: 1484380 - RNA, 19 nt, Homo sapiens
  misc_RNA (1)...(19): siRNA sense strand
ucauggcggucgucuggaa

SEQ ID NO: 1484381 - RNA, 19 nt, Homo sapiens
  misc_RNA (1)...(19): siRNA sense strand
cuacagggccgaguacgaa

SEQ ID NO: 1484382 - RNA, 19 nt, Homo sapiens
  misc_RNA (1)...(19): siRNA sense strand
ccugggaacuuacuacaac

SEQ ID NO: 1484383 - RNA, 19 nt, Homo sapiens
  misc_RNA (1)...(19): siRNA sense strand
auuccacgcuggguuguua

SEQ ID NO: 1484384 - RNA, 19 nt, Homo sapiens
  misc_RNA (1)...(19): siRNA sense strand
gcuuggcccucugguuuga

SEQ ID NO: 1484385 - RNA, 19 nt, Homo sapiens
  misc_RNA (1)...(19): siRNA sense strand
guuguuaccgcuacagcua

SEQ ID NO: 1484386 - RNA, 19 nt, Homo sapiens
  misc_RNA (1)...(19): siRNA sense strand
ggaccgacuggccauguau

SEQ ID NO: 1484387 - RNA, 19 nt, Homo sapiens
  misc_RNA (1)...(19): siRNA sense strand
gguauuuccuaggguacaa

SEQ ID NO: 1484388 - RNA, 19 nt, Homo sapiens
  misc_RNA (1)...(19): siRNA sense strand
gugaggacuccaagagaaa

SEQ ID NO: 1484389 - RNA, 19 nt, Homo sapiens
  misc_RNA (1)...(19): siRNA sense strand
gcagugaaaccgccaaagc

SEQ ID NO: 1484390 - RNA, 19 nt, Homo sapiens
  misc_RNA (1)...(19): siRNA sense strand
ucaccugcuucuucugguu

SEQ ID NO: 1484391 - RNA, 19 nt, Homo sapiens
  misc_RNA (1)...(19): siRNA sense strand
gggugcuacucugguauuu

SEQ ID NO: 1484392 - RNA, 19 nt, Homo sapiens
  misc_RNA (1)...(19): siRNA sense strand
ccagcuccgucuauuccuu

SEQ ID NO: 1484393 - RNA, 19 nt, Homo sapiens
  misc_RNA (1)...(19): siRNA sense strand
gugcuacucugguauuucc

SEQ ID NO: 1484394 - RNA, 19 nt, Homo sapiens
  misc_RNA (1)...(19): siRNA sense strand
cggaggugauggcgaggaa

SEQ ID NO: 1484395 - RNA, 19 nt, Homo sapiens
  misc_RNA (1)...(19): siRNA sense strand
gacauagcugcauugaauu

SEQ ID NO: 1484396 - RNA, 19 nt, Homo sapiens
  misc_RNA (1)...(19): siRNA sense strand
ggaagccagugugaaagac

SEQ ID NO: 1484397 - RNA, 19 nt, Homo sapiens
  misc_RNA (1)...(19): siRNA sense strand
cgccaaagcccagaagaug

SEQ ID NO: 1484398 - RNA, 19 nt, Homo sapiens
  misc_RNA (1)...(19): siRNA sense strand
gaagccagugugaaagaca

SEQ ID NO: 1484399 - RNA, 19 nt, Homo sapiens
  misc_RNA (1)...(19): siRNA sense strand
ccucugguuugaugccuau

SEQ ID NO: 1484400 - RNA, 19 nt, Homo sapiens
  misc_RNA (1)...(19): siRNA sense strand
gaggcagaaguaugauuug

SEQ ID NO: 1484401 - RNA, 19 nt, Homo sapiens
  misc_RNA (1)...(19): siRNA sense strand
cagcuccgucuauuccuuu

SEQ ID NO: 1484402 - RNA, 19 nt, Homo sapiens
  misc_RNA (1)...(19): siRNA sense strand
ccacuucucccaggaucuu

SEQ ID NO: 1484403 - RNA, 19 nt, Homo sapiens
  misc_RNA (1)...(19): siRNA sense strand
aaagacauagcugcauuga

SEQ ID NO: 1484404 - RNA, 19 nt, Homo sapiens
  misc_RNA (1)...(19): siRNA sense strand
gcuacucugguauuuccua

SEQ ID NO: 1484405 - RNA, 19 nt, Homo sapiens
  misc_RNA (1)...(19): siRNA sense strand
uguacucaaucgccacuuc

SEQ ID NO: 1484406 - RNA, 19 nt, Homo sapiens
  misc_RNA (1)...(19): siRNA sense strand
gguacaaggcggaggugau

SEQ ID NO: 1484407 - RNA, 19 nt, Homo sapiens
  misc_RNA (1)...(19): siRNA sense strand
uuccaggccugugaaguga

SEQ ID NO: 1484408 - RNA, 19 nt, Homo sapiens
  misc_RNA (1)...(19): siRNA sense strand
gcagaaacuuugugaaauu

SEQ ID NO: 1484409 - RNA, 19 nt, Homo sapiens
  misc_RNA (1)...(19): siRNA sense strand
gaaagugagucugaggaua

SEQ ID NO: 1484410 - RNA, 19 nt, Homo sapiens
  misc_RNA (1)...(19): siRNA sense strand
gaaaugccauguuaaagag

SEQ ID NO: 1484411 - RNA, 19 nt, Homo sapiens
  misc_RNA (1)...(19): siRNA sense strand
gaucagguguaaauaguga

SEQ ID NO: 1484412 - RNA, 19 nt, Homo sapiens
  misc_RNA (1)...(19): siRNA sense strand
gaugaagaguuaaaggaaa

SEQ ID NO: 1484413 - RNA, 19 nt, Homo sapiens
  misc_RNA (1)...(19): siRNA sense strand
guagagagguugacaaugc

SEQ ID NO: 1484414 - RNA, 19 nt, Homo sapiens
  misc_RNA (1)...(19): siRNA sense strand
ggagagaucagguguaaau

SEQ ID NO: 1484415 - RNA, 19 nt, Homo sapiens
  misc_RNA (1)...(19): siRNA sense strand
gaaauugagaggauacauu

SEQ ID NO: 1484416 - RNA, 19 nt, Homo sapiens
  misc_RNA (1)...(19): siRNA sense strand
gcaagucucuuccuuacag

SEQ ID NO: 1484417 - RNA, 19 nt, Homo sapiens
  misc_RNA (1)...(19): siRNA sense strand
ggaagaagucacaaugaaa

SEQ ID NO: 1484418 - RNA, 19 nt, Homo sapiens
  misc_RNA (1)...(19): siRNA sense strand
gagaucagguguaaauagu

SEQ ID NO: 1484419 - RNA, 19 nt, Homo sapiens
  misc_RNA (1)...(19): siRNA sense strand
agagagccauuuacaauug

SEQ ID NO: 1484420 - RNA, 19 nt, Homo sapiens
  misc_RNA (1)...(19): siRNA sense strand
aaccaaauguccugaaauu

SEQ ID NO: 1484421 - RNA, 19 nt, Homo sapiens
  misc_RNA (1)...(19): siRNA sense strand
aaggaaguguccaauauaa

SEQ ID NO: 1484422 - RNA, 19 nt, Homo sapiens
  misc_RNA (1)...(19): siRNA sense strand
gaaaaccgaugaacuuaga

SEQ ID NO: 1484423 - RNA, 19 nt, Homo sapiens
  misc_RNA (1)...(19): siRNA sense strand
gggcagaaacuuugugaaa

SEQ ID NO: 1484424 - RNA, 19 nt, Homo sapiens
  misc_RNA (1)...(19): siRNA sense strand
ucugugagguucuugauuu

SEQ ID NO: 1484425 - RNA, 19 nt, Homo sapiens
  misc_RNA (1)...(19): siRNA sense strand
gaggauaguucagaugaug

SEQ ID NO: 1484426 - RNA, 19 nt, Homo sapiens
  misc_RNA (1)...(19): siRNA sense strand
uuacagagagagccauuua

SEQ ID NO: 1484427 - RNA, 19 nt, Homo sapiens
  misc_RNA (1)...(19): siRNA sense strand
gagagagccauuuacaauu

SEQ ID NO: 1484428 - RNA, 19 nt, Homo sapiens
  misc_RNA (1)...(19): siRNA sense strand
cgaaccaaauguccugaaa

SEQ ID NO: 1484429 - RNA, 19 nt, Homo sapiens
  misc_RNA (1)...(19): siRNA sense strand
gaagaaaaccgaugaacuu

SEQ ID NO: 1484430 - RNA, 19 nt, Homo sapiens
  misc_RNA (1)...(19): siRNA sense strand
caaauguccugaaauucug

SEQ ID NO: 1484431 - RNA, 19 nt, Homo sapiens
  misc_RNA (1)...(19): siRNA sense strand
uggaagaagucacaaugaa

SEQ ID NO: 1484432 - RNA, 19 nt, Homo sapiens
  misc_RNA (1)...(19): siRNA sense strand
gaaggaagaaauguugaaa

SEQ ID NO: 1484433 - RNA, 19 nt, Homo sapiens
  misc_RNA (1)...(19): siRNA sense strand
cccuacagaugaagaguua

SEQ ID NO: 1484434 - RNA, 19 nt, Homo sapiens
  misc_RNA (1)...(19): siRNA sense strand
cagaaacuuugugaaauug

SEQ ID NO: 1484435 - RNA, 19 nt, Homo sapiens
  misc_RNA (1)...(19): siRNA sense strand
cgagaaagaacccgaaaug

SEQ ID NO: 1484436 - RNA, 19 nt, Homo sapiens
  misc_RNA (1)...(19): siRNA sense strand
ggcagaaacuuugugaaau

SEQ ID NO: 1484437 - RNA, 19 nt, Homo sapiens
  misc_RNA (1)...(19): siRNA sense strand
aaaggaaguguccaauaua

SEQ ID NO: 1484438 - RNA, 19 nt, Homo sapiens
  misc_RNA (1)...(19): siRNA sense strand
gaagaagucacaaugaaac

SEQ ID NO: 1484439 - RNA, 19 nt, Homo sapiens
  misc_RNA (1)...(19): siRNA sense strand
gauagcagcaccaccaaga

SEQ ID NO: 1484440 - RNA, 19 nt, Homo sapiens
  misc_RNA (1)...(19): siRNA sense strand
gaagauaaagaaagugaag

SEQ ID NO: 1484441 - RNA, 19 nt, Homo sapiens
  misc_RNA (1)...(19): siRNA sense strand
agaaaugccauguuaaaga

SEQ ID NO: 1484442 - RNA, 19 nt, Homo sapiens
  misc_RNA (1)...(19): siRNA sense strand
gaagucacaaugaaacaga

SEQ ID NO: 1484443 - RNA, 19 nt, Homo sapiens
  misc_RNA (1)...(19): siRNA sense strand
gaaacuuugugaaauugag

SEQ ID NO: 1484444 - RNA, 19 nt, Homo sapiens
  misc_RNA (1)...(19): siRNA sense strand
ccaaauguccugaaauucu

SEQ ID NO: 1484445 - RNA, 19 nt, Homo sapiens
  misc_RNA (1)...(19): siRNA sense strand
aaaaggaaguguccaauau

SEQ ID NO: 1484446 - RNA, 19 nt, Homo sapiens
  misc_RNA (1)...(19): siRNA sense strand
gcacuguguccucauuaaa

SEQ ID NO: 1484447 - RNA, 19 nt, Homo sapiens
  misc_RNA (1)...(19): siRNA sense strand
uacacaaacugcuuuacaa

SEQ ID NO: 1484448 - RNA, 19 nt, Homo sapiens
  misc_RNA (1)...(19): siRNA sense strand
aaagaaggaagaaauguug

SEQ ID NO: 1484449 - RNA, 19 nt, Homo sapiens
  misc_RNA (1)...(19): siRNA sense strand
gaggaucuugaauuucuua

SEQ ID NO: 1484450 - RNA, 19 nt, Homo sapiens
  misc_RNA (1)...(19): siRNA sense strand
ggccagugcuaacuuggaa

SEQ ID NO: 1484451 - RNA, 19 nt, Homo sapiens
  misc_RNA (1)...(19): siRNA sense strand
agagagagccauuuacaau

SEQ ID NO: 1484452 - RNA, 19 nt, Homo sapiens
  misc_RNA (1)...(19): siRNA sense strand
gaaugugggucaguucagu

SEQ ID NO: 1484453 - RNA, 19 nt, Homo sapiens
  misc_RNA (1)...(19): siRNA sense strand
ggcacuguguccucauuaa

SEQ ID NO: 1484454 - RNA, 19 nt, Homo sapiens
  misc_RNA (1)...(19): siRNA sense strand
ccgaugaacuuagaaaucu

SEQ ID NO: 1484455 - RNA, 19 nt, Homo sapiens
  misc_RNA (1)...(19): siRNA sense strand
gaaccaaauguccugaaau

SEQ ID NO: 1484456 - RNA, 19 nt, Homo sapiens
  misc_RNA (1)...(19): siRNA sense strand
ggaaguguccaauauaaaa

SEQ ID NO: 1484457 - RNA, 19 nt, Homo sapiens
  misc_RNA (1)...(19): siRNA sense strand
guucaguggcuuuccauuu

SEQ ID NO: 1484458 - RNA, 19 nt, Homo sapiens
  misc_RNA (1)...(19): siRNA sense strand
guucuggaauggcaaggaa

SEQ ID NO: 1484459 - RNA, 19 nt, Homo sapiens
  misc_RNA (1)...(19): siRNA sense strand
caaugcaagucucuuccuu

SEQ ID NO: 1484460 - RNA, 19 nt, Homo sapiens
  misc_RNA (1)...(19): siRNA sense strand
caaugaaacagauuugcaa

SEQ ID NO: 1484461 - RNA, 19 nt, Homo sapiens
  misc_RNA (1)...(19): siRNA sense strand
gaauggcaaggaaggcuaa

SEQ ID NO: 1484462 - RNA, 19 nt, Homo sapiens
  misc_RNA (1)...(19): siRNA sense strand
uuggagagaucagguguaa

SEQ ID NO: 1484463 - RNA, 19 nt, Homo sapiens
  misc_RNA (1)...(19): siRNA sense strand
ucaguggcuuuccauuuga

SEQ ID NO: 1484464 - RNA, 19 nt, Homo sapiens
  misc_RNA (1)...(19): siRNA sense strand
agaagaaugugggucaguu

SEQ ID NO: 1484465 - RNA, 19 nt, Homo sapiens
  misc_RNA (1)...(19): siRNA sense strand
uccaaagccuucuggcaaa

SEQ ID NO: 1484466 - RNA, 19 nt, Homo sapiens
  misc_RNA (1)...(19): siRNA sense strand
gaagaaugugggucaguuc

SEQ ID NO: 1484467 - RNA, 19 nt, Homo sapiens
  misc_RNA (1)...(19): siRNA sense strand
cuacagaugaagaguuaaa

SEQ ID NO: 1484468 - RNA, 19 nt, Homo sapiens
  misc_RNA (1)...(19): siRNA sense strand
aaccauugccgaaaucuaa

SEQ ID NO: 1484469 - RNA, 19 nt, Homo sapiens
  misc_RNA (1)...(19): siRNA sense strand
uucaguggcuuuccauuug

SEQ ID NO: 1484470 - RNA, 19 nt, Homo sapiens
  misc_RNA (1)...(19): siRNA sense strand
gugaagaggagccaccaaa

SEQ ID NO: 1484471 - RNA, 19 nt, Homo sapiens
  misc_RNA (1)...(19): siRNA sense strand
acaaacugcuuuacaacag

SEQ ID NO: 1484472 - RNA, 19 nt, Homo sapiens
  misc_RNA (1)...(19): siRNA sense strand
gcaccaccaagaagaauca

SEQ ID NO: 1484473 - RNA, 19 nt, Homo sapiens
  misc_RNA (1)...(19): siRNA sense strand
gcagcaccaccaagaagaa

SEQ ID NO: 1484474 - RNA, 19 nt, Homo sapiens
  misc_RNA (1)...(19): siRNA sense strand
gugagguucuugauuugga

SEQ ID NO: 1484475 - RNA, 19 nt, Homo sapiens
  misc_RNA (1)...(19): siRNA sense strand
gagagaucagguguaaaua

SEQ ID NO: 1484476 - RNA, 19 nt, Homo sapiens
  misc_RNA (1)...(19): siRNA sense strand
uaguagugaugaagaugaa

SEQ ID NO: 1484477 - RNA, 19 nt, Homo sapiens
  misc_RNA (1)...(19): siRNA sense strand
cagaugaagaguuaaagga

SEQ ID NO: 1484478 - RNA, 19 nt, Homo sapiens
  misc_RNA (1)...(19): siRNA sense strand
aaaccuaaacagaaagcua

SEQ ID NO: 1484479 - RNA, 19 nt, Homo sapiens
  misc_RNA (1)...(19): siRNA sense strand
cagaugaugaagauaaaga

SEQ ID NO: 1484480 - RNA, 19 nt, Homo sapiens
  misc_RNA (1)...(19): siRNA sense strand
aaagugagucugaggauag

SEQ ID NO: 1484481 - RNA, 19 nt, Homo sapiens
  misc_RNA (1)...(19): siRNA sense strand
gugaaaagugccaauguua

SEQ ID NO: 1484482 - RNA, 19 nt, Homo sapiens
  misc_RNA (1)...(19): siRNA sense strand
caagaagaaucaaaacagu

SEQ ID NO: 1484483 - RNA, 19 nt, Homo sapiens
  misc_RNA (1)...(19): siRNA sense strand
gaacuagugaagaggaucu

SEQ ID NO: 1484484 - RNA, 19 nt, Homo sapiens
  misc_RNA (1)...(19): siRNA sense strand
cuacacaaacugcuuuaca

SEQ ID NO: 1484485 - RNA, 19 nt, Homo sapiens
  misc_RNA (1)...(19): siRNA sense strand
ucacaaugaaacagauuug

SEQ ID NO: 1484486 - RNA, 19 nt, Homo sapiens
  misc_RNA (1)...(19): siRNA sense strand
aaagugccaauguuaagaa

SEQ ID NO: 1484487 - RNA, 19 nt, Homo sapiens
  misc_RNA (1)...(19): siRNA sense strand
gaaaagugccaauguuaag

SEQ ID NO: 1484488 - RNA, 19 nt, Homo sapiens
  misc_RNA (1)...(19): siRNA sense strand
caggcacuguguccucauu

SEQ ID NO: 1484489 - RNA, 19 nt, Homo sapiens
  misc_RNA (1)...(19): siRNA sense strand
cagagagagccauuuacaa

SEQ ID NO: 1484490 - RNA, 19 nt, Homo sapiens
  misc_RNA (1)...(19): siRNA sense strand
aaugcaagucucuuccuua

SEQ ID NO: 1484491 - RNA, 19 nt, Homo sapiens
  misc_RNA (1)...(19): siRNA sense strand
cuaaacagaaagcuacuuc

SEQ ID NO: 1484492 - RNA, 19 nt, Homo sapiens
  misc_RNA (1)...(19): siRNA sense strand
ugacaaugcaagucucuuc

SEQ ID NO: 1484493 - RNA, 19 nt, Homo sapiens
  misc_RNA (1)...(19): siRNA sense strand
aaaccgaugaacuuagaaa

SEQ ID NO: 1484494 - RNA, 19 nt, Homo sapiens
  misc_RNA (1)...(19): siRNA sense strand
caagucucuuccuuacaga

SEQ ID NO: 1484495 - RNA, 19 nt, Homo sapiens
  misc_RNA (1)...(19): siRNA sense strand
acuguguccucauuaaaga

SEQ ID NO: 1484496 - RNA, 19 nt, Homo sapiens
  misc_RNA (1)...(19): siRNA sense strand
acagagagagccauuuaca

SEQ ID NO: 1484497 - RNA, 19 nt, Homo sapiens
  misc_RNA (1)...(19): siRNA sense strand
gagagccauuuacaauugc

SEQ ID NO: 1484498 - RNA, 19 nt, Homo sapiens
  misc_RNA (1)...(19): siRNA sense strand
gugccaauguuaagaaagc

SEQ ID NO: 1484499 - RNA, 19 nt, Homo sapiens
  misc_RNA (1)...(19): siRNA sense strand
gcuaagcgaaccaaauguc

SEQ ID NO: 1484500 - RNA, 19 nt, Homo sapiens
  misc_RNA (1)...(19): siRNA sense strand
agaugaagaguuaaaggaa

SEQ ID NO: 1484501 - RNA, 19 nt, Homo sapiens
  misc_RNA (1)...(19): siRNA sense strand
uagagagguugacaaugca

SEQ ID NO: 1484502 - RNA, 19 nt, Homo sapiens
  misc_RNA (1)...(19): siRNA sense strand
ugaaucuaguagugaugaa

SEQ ID NO: 1484503 - RNA, 19 nt, Homo sapiens
  misc_RNA (1)...(19): siRNA sense strand
gagaaagaacccgaaaugc

SEQ ID NO: 1484504 - RNA, 19 nt, Homo sapiens
  misc_RNA (1)...(19): siRNA sense strand
agagaucagguguaaauag

SEQ ID NO: 1484505 - RNA, 19 nt, Homo sapiens
  misc_RNA (1)...(19): siRNA sense strand
ucagaugaugaaccuuuaa

SEQ ID NO: 1484506 - RNA, 19 nt, Homo sapiens
  misc_RNA (1)...(19): siRNA sense strand
guaagaagaaaaccgauga

SEQ ID NO: 1484507 - RNA, 19 nt, Homo sapiens
  misc_RNA (1)...(19): siRNA sense strand
gaagaguuaaaggaaacaa

SEQ ID NO: 1484508 - RNA, 19 nt, Homo sapiens
  misc_RNA (1)...(19): siRNA sense strand
gaacacuccugaacagaca

SEQ ID NO: 1484509 - RNA, 19 nt, Homo sapiens
  misc_RNA (1)...(19): siRNA sense strand
cgaaggcccuggacugaag

SEQ ID NO: 1484510 - RNA, 19 nt, Homo sapiens
  misc_RNA (1)...(19): siRNA sense strand
ggugaacacuccugaacag

SEQ ID NO: 1484511 - RNA, 19 nt, Homo sapiens
  misc_RNA (1)...(19): siRNA sense strand
ccagguggaggaagagaua

SEQ ID NO: 1484512 - RNA, 19 nt, Homo sapiens
  misc_RNA (1)...(19): siRNA sense strand
gaacagacagcuccuuacg

SEQ ID NO: 1484513 - RNA, 19 nt, Homo sapiens
  misc_RNA (1)...(19): siRNA sense strand
ugagggacauuuccacagu

SEQ ID NO: 1484514 - RNA, 19 nt, Homo sapiens
  misc_RNA (1)...(19): siRNA sense strand
gacaucaucugggugaaca

SEQ ID NO: 1484515 - RNA, 19 nt, Homo sapiens
  misc_RNA (1)...(19): siRNA sense strand
ggacauuuccacagucaag

SEQ ID NO: 1484516 - RNA, 19 nt, Homo sapiens
  misc_RNA (1)...(19): siRNA sense strand
caaaggcugagggacauuu

SEQ ID NO: 1484517 - RNA, 19 nt, Homo sapiens
  misc_RNA (1)...(19): siRNA sense strand
caaggagugcgucuacuuc

SEQ ID NO: 1484518 - RNA, 19 nt, Homo sapiens
  misc_RNA (1)...(19): siRNA sense strand
cugaacagacagcuccuua

SEQ ID NO: 1484519 - RNA, 19 nt, Homo sapiens
  misc_RNA (1)...(19): siRNA sense strand
ccagcguccucaucucaug

SEQ ID NO: 1484520 - RNA, 19 nt, Homo sapiens
  misc_RNA (1)...(19): siRNA sense strand
gcucguggcccugcaugaa

SEQ ID NO: 1484521 - RNA, 19 nt, Homo sapiens
  misc_RNA (1)...(19): siRNA sense strand
cgacaaggagugcgucuac

SEQ ID NO: 1484522 - RNA, 19 nt, Homo sapiens
  misc_RNA (1)...(19): siRNA sense strand
acaaggagugcgucuacuu

SEQ ID NO: 1484523 - RNA, 19 nt, Homo sapiens
  misc_RNA (1)...(19): siRNA sense strand
gcagccagcguccucaucu

SEQ ID NO: 1484524 - RNA, 19 nt, Homo sapiens
  misc_RNA (1)...(19): siRNA sense strand
ggaagaagcugcaaggaau

SEQ ID NO: 1484525 - RNA, 19 nt, Homo sapiens
  misc_RNA (1)...(19): siRNA sense strand
ggaccgugcugaccaagau

SEQ ID NO: 1484526 - RNA, 19 nt, Homo sapiens
  misc_RNA (1)...(19): siRNA sense strand
gaggauagcagcaacuuca

SEQ ID NO: 1484527 - RNA, 19 nt, Homo sapiens
  misc_RNA (1)...(19): siRNA sense strand
gaagaagcugcaaggaauu

SEQ ID NO: 1484528 - RNA, 19 nt, Homo sapiens
  misc_RNA (1)...(19): siRNA sense strand
gggaagaagcugcaaggaa

SEQ ID NO: 1484529 - RNA, 19 nt, Homo sapiens
  misc_RNA (1)...(19): siRNA sense strand
gaauuugcugggucucaua

SEQ ID NO: 1484530 - RNA, 19 nt, Homo sapiens
  misc_RNA (1)...(19): siRNA sense strand
aagcaaaggagaacagaaa

SEQ ID NO: 1484531 - RNA, 19 nt, Homo sapiens
  misc_RNA (1)...(19): siRNA sense strand
ggagucuucuucuguuucu

SEQ ID NO: 1484532 - RNA, 19 nt, Homo sapiens
  misc_RNA (1)...(19): siRNA sense strand
caaaguugguagacucucu

SEQ ID NO: 1484533 - RNA, 19 nt, Homo sapiens
  misc_RNA (1)...(19): siRNA sense strand
ggauagcagcaacuucaaa

SEQ ID NO: 1484534 - RNA, 19 nt, Homo sapiens
  misc_RNA (1)...(19): siRNA sense strand
ggaauuugcugggucucau

SEQ ID NO: 1484535 - RNA, 19 nt, Homo sapiens
  misc_RNA (1)...(19): siRNA sense strand
cagcagccuucgugggauu

SEQ ID NO: 1484536 - RNA, 19 nt, Homo sapiens
  misc_RNA (1)...(19): siRNA sense strand
gagggaccgugcugaccaa

SEQ ID NO: 1484537 - RNA, 19 nt, Homo sapiens
  misc_RNA (1)...(19): siRNA sense strand
gaagcaaaggagaacagaa

SEQ ID NO: 1484538 - RNA, 19 nt, Homo sapiens
  misc_RNA (1)...(19): siRNA sense strand
gauagcagcaacuucaaag

SEQ ID NO: 1484539 - RNA, 19 nt, Homo sapiens
  misc_RNA (1)...(19): siRNA sense strand
guacaucaggugggaagaa

SEQ ID NO: 1484540 - RNA, 19 nt, Homo sapiens
  misc_RNA (1)...(19): siRNA sense strand
caaaggagaacagaaacca

SEQ ID NO: 1484541 - RNA, 19 nt, Homo sapiens
  misc_RNA (1)...(19): siRNA sense strand
cagcugagagaguacauca

SEQ ID NO: 1484542 - RNA, 19 nt, Homo sapiens
  misc_RNA (1)...(19): siRNA sense strand
ucauagaagcaaaggagaa

SEQ ID NO: 1484543 - RNA, 19 nt, Homo sapiens
  misc_RNA (1)...(19): siRNA sense strand
gcacaggggagucuucuuc

SEQ ID NO: 1484544 - RNA, 19 nt, Homo sapiens
  misc_RNA (1)...(19): siRNA sense strand
aagaagcugcaaggaauuu

SEQ ID NO: 1484545 - RNA, 19 nt, Homo sapiens
  misc_RNA (1)...(19): siRNA sense strand
uuugcugggucucauagaa

SEQ ID NO: 1484546 - RNA, 19 nt, Homo sapiens
  misc_RNA (1)...(19): siRNA sense strand
gauaagagcugucaguuuu

SEQ ID NO: 1484547 - RNA, 19 nt, Homo sapiens
  misc_RNA (1)...(19): siRNA sense strand
ggaugaaacacaacauuua

SEQ ID NO: 1484548 - RNA, 19 nt, Homo sapiens
  misc_RNA (1)...(19): siRNA sense strand
gcuaaugacugaggcuuua

SEQ ID NO: 1484549 - RNA, 19 nt, Homo sapiens
  misc_RNA (1)...(19): siRNA sense strand
ucaggaagcucuggauaua

SEQ ID NO: 1484550 - RNA, 19 nt, Homo sapiens
  misc_RNA (1)...(19): siRNA sense strand
cagaaacaauggcuaauga

SEQ ID NO: 1484551 - RNA, 19 nt, Homo sapiens
  misc_RNA (1)...(19): siRNA sense strand
gaccagauacuauuuguaa

SEQ ID NO: 1484552 - RNA, 19 nt, Homo sapiens
  misc_RNA (1)...(19): siRNA sense strand
gcaggaaucuggaccaaag

SEQ ID NO: 1484553 - RNA, 19 nt, Homo sapiens
  misc_RNA (1)...(19): siRNA sense strand
ggagauacgcauccucuaa

SEQ ID NO: 1484554 - RNA, 19 nt, Homo sapiens
  misc_RNA (1)...(19): siRNA sense strand
gaagaagcacugcccaauu

SEQ ID NO: 1484555 - RNA, 19 nt, Homo sapiens
  misc_RNA (1)...(19): siRNA sense strand
ggauauaaguuugguguuc

SEQ ID NO: 1484556 - RNA, 19 nt, Homo sapiens
  misc_RNA (1)...(19): siRNA sense strand
ugacauuacuuccagcaaa

SEQ ID NO: 1484557 - RNA, 19 nt, Homo sapiens
  misc_RNA (1)...(19): siRNA sense strand
cuggagugcugaaggauua

SEQ ID NO: 1484558 - RNA, 19 nt, Homo sapiens
  misc_RNA (1)...(19): siRNA sense strand
aagaagcacugcccaauuc

SEQ ID NO: 1484559 - RNA, 19 nt, Homo sapiens
  misc_RNA (1)...(19): siRNA sense strand
aacaauggcuaaugacuga

SEQ ID NO: 1484560 - RNA, 19 nt, Homo sapiens
  misc_RNA (1)...(19): siRNA sense strand
ggauuaggaggaauucuuu

SEQ ID NO: 1484561 - RNA, 19 nt, Homo sapiens
  misc_RNA (1)...(19): siRNA sense strand
gacauuacuuccagcaaau

SEQ ID NO: 1484562 - RNA, 19 nt, Homo sapiens
  misc_RNA (1)...(19): siRNA sense strand
ccaagccuguugagagaaa

SEQ ID NO: 1484563 - RNA, 19 nt, Homo sapiens
  misc_RNA (1)...(19): siRNA sense strand
gaaggauuacucugacauu

SEQ ID NO: 1484564 - RNA, 19 nt, Homo sapiens
  misc_RNA (1)...(19): siRNA sense strand
aaggauuacucugacauua

SEQ ID NO: 1484565 - RNA, 19 nt, Homo sapiens
  misc_RNA (1)...(19): siRNA sense strand
ggauuacucugacauuacu

SEQ ID NO: 1484566 - RNA, 19 nt, Homo sapiens
  misc_RNA (1)...(19): siRNA sense strand
gcagaaacaauggcuaaug

SEQ ID NO: 1484567 - RNA, 19 nt, Homo sapiens
  misc_RNA (1)...(19): siRNA sense strand
gauauaaguuugguguucu

SEQ ID NO: 1484568 - RNA, 19 nt, Homo sapiens
  misc_RNA (1)...(19): siRNA sense strand
gcaugaccagcgaggauua

SEQ ID NO: 1484569 - RNA, 19 nt, Homo sapiens
  misc_RNA (1)...(19): siRNA sense strand
gaugaaacacaacauuuag

SEQ ID NO: 1484570 - RNA, 19 nt, Homo sapiens
  misc_RNA (1)...(19): siRNA sense strand
gagaaagggagcuguucaa

SEQ ID NO: 1484571 - RNA, 19 nt, Homo sapiens
  misc_RNA (1)...(19): siRNA sense strand
gauugugaauuacaugaag

SEQ ID NO: 1484572 - RNA, 19 nt, Homo sapiens
  misc_RNA (1)...(19): siRNA sense strand
ggacucaagcagaaacaau

SEQ ID NO: 1484573 - RNA, 19 nt, Homo sapiens
  misc_RNA (1)...(19): siRNA sense strand
caaagaaaguggccccuau

SEQ ID NO: 1484574 - RNA, 19 nt, Homo sapiens
  misc_RNA (1)...(19): siRNA sense strand
gggaccagauacuauuugu

SEQ ID NO: 1484575 - RNA, 19 nt, Homo sapiens
  misc_RNA (1)...(19): siRNA sense strand
cuacuuaggcucuuagauc

SEQ ID NO: 1484576 - RNA, 19 nt, Homo sapiens
  misc_RNA (1)...(19): siRNA sense strand
gaugggaaguaugcuuuca

SEQ ID NO: 1484577 - RNA, 19 nt, Homo sapiens
  misc_RNA (1)...(19): siRNA sense strand
gaaagggagcuguucaaaa

SEQ ID NO: 1484578 - RNA, 19 nt, Homo sapiens
  misc_RNA (1)...(19): siRNA sense strand
ggaaucuggaccaaagaaa

SEQ ID NO: 1484579 - RNA, 19 nt, Homo sapiens
  misc_RNA (1)...(19): siRNA sense strand
ggaccagauacuauuugua

SEQ ID NO: 1484580 - RNA, 19 nt, Homo sapiens
  misc_RNA (1)...(19): siRNA sense strand
gaaacaauggcuaaugacu

SEQ ID NO: 1484581 - RNA, 19 nt, Homo sapiens
  misc_RNA (1)...(19): siRNA sense strand
ugauaagagcugucaguuu

SEQ ID NO: 1484582 - RNA, 19 nt, Homo sapiens
  misc_RNA (1)...(19): siRNA sense strand
caucaucaucgucaaagaa

SEQ ID NO: 1484583 - RNA, 19 nt, Homo sapiens
  misc_RNA (1)...(19): siRNA sense strand
cagcgaggauuaggaggaa

SEQ ID NO: 1484584 - RNA, 19 nt, Homo sapiens
  misc_RNA (1)...(19): siRNA sense strand
ccaaguacaacgugagaga

SEQ ID NO: 1484585 - RNA, 19 nt, Homo sapiens
  misc_RNA (1)...(19): siRNA sense strand
caucaucgucaaagaagaa

SEQ ID NO: 1484586 - RNA, 19 nt, Homo sapiens
  misc_RNA (1)...(19): siRNA sense strand
cuuuaagacucauaacgaa

SEQ ID NO: 1484587 - RNA, 19 nt, Homo sapiens
  misc_RNA (1)...(19): siRNA sense strand
uaacuugaaagcuuuguca

SEQ ID NO: 1484588 - RNA, 19 nt, Homo sapiens
  misc_RNA (1)...(19): siRNA sense strand
gacaggguauuucuuccau

SEQ ID NO: 1484589 - RNA, 19 nt, Homo sapiens
  misc_RNA (1)...(19): siRNA sense strand
aggaagcucuggauauaag

SEQ ID NO: 1484590 - RNA, 19 nt, Homo sapiens
  misc_RNA (1)...(19): siRNA sense strand
uacuuaggcucuuagauca

SEQ ID NO: 1484591 - RNA, 19 nt, Homo sapiens
  misc_RNA (1)...(19): siRNA sense strand
aagcagaaacaauggcuaa

SEQ ID NO: 1484592 - RNA, 19 nt, Homo sapiens
  misc_RNA (1)...(19): siRNA sense strand
gaagcucuggauauaaguu

SEQ ID NO: 1484593 - RNA, 19 nt, Homo sapiens
  misc_RNA (1)...(19): siRNA sense strand
gcuaagauugugaauuaca

SEQ ID NO: 1484594 - RNA, 19 nt, Homo sapiens
  misc_RNA (1)...(19): siRNA sense strand
gcuuuaagacucauaacga

SEQ ID NO: 1484595 - RNA, 19 nt, Homo sapiens
  misc_RNA (1)...(19): siRNA sense strand
uggaugaaacacaacauuu

SEQ ID NO: 1484596 - RNA, 19 nt, Homo sapiens
  misc_RNA (1)...(19): siRNA sense strand
gaagaaaacaaagguagaa

SEQ ID NO: 1484597 - RNA, 19 nt, Homo sapiens
  misc_RNA (1)...(19): siRNA sense strand
gaaucuggaccaaagaaag

SEQ ID NO: 1484598 - RNA, 19 nt, Homo sapiens
  misc_RNA (1)...(19): siRNA sense strand
gcucuuagaucagcaugac

SEQ ID NO: 1484599 - RNA, 19 nt, Homo sapiens
  misc_RNA (1)...(19): siRNA sense strand
ucgucaggcucuaaacaaa

SEQ ID NO: 1484600 - RNA, 19 nt, Homo sapiens
  misc_RNA (1)...(19): siRNA sense strand
gaucgucaggcucuaaaca

SEQ ID NO: 1484601 - RNA, 19 nt, Homo sapiens
  misc_RNA (1)...(19): siRNA sense strand
gcgaggauuaggaggaauu

SEQ ID NO: 1484602 - RNA, 19 nt, Homo sapiens
  misc_RNA (1)...(19): siRNA sense strand
auauuggacucaagcagaa

SEQ ID NO: 1484603 - RNA, 19 nt, Homo sapiens
  misc_RNA (1)...(19): siRNA sense strand
gaagaagaaaacaaaggua

SEQ ID NO: 1484604 - RNA, 19 nt, Homo sapiens
  misc_RNA (1)...(19): siRNA sense strand
gaagcgacaggguauuucu

SEQ ID NO: 1484605 - RNA, 19 nt, Homo sapiens
  misc_RNA (1)...(19): siRNA sense strand
aguacaacgugagagauaa

SEQ ID NO: 1484606 - RNA, 19 nt, Homo sapiens
  misc_RNA (1)...(19): siRNA sense strand
caucgucaaagaagaagaa

SEQ ID NO: 1484607 - RNA, 19 nt, Homo sapiens
  misc_RNA (1)...(19): siRNA sense strand
uacgcauccucuaaccuua

SEQ ID NO: 1484608 - RNA, 19 nt, Homo sapiens
  misc_RNA (1)...(19): siRNA sense strand
aaguacaacgugagagaua

SEQ ID NO: 1484609 - RNA, 19 nt, Homo sapiens
  misc_RNA (1)...(19): siRNA sense strand
agaaagggagcuguucaaa

SEQ ID NO: 1484610 - RNA, 19 nt, Homo sapiens
  misc_RNA (1)...(19): siRNA sense strand
caacgugagagauaagaag

SEQ ID NO: 1484611 - RNA, 19 nt, Homo sapiens
  misc_RNA (1)...(19): siRNA sense strand
gaggaucgucaggcucuaa

SEQ ID NO: 1484612 - RNA, 19 nt, Homo sapiens
  misc_RNA (1)...(19): siRNA sense strand
caucaucaucaucgucaaa

SEQ ID NO: 1484613 - RNA, 19 nt, Homo sapiens
  misc_RNA (1)...(19): siRNA sense strand
gagauacgcauccucuaac

SEQ ID NO: 1484614 - RNA, 19 nt, Homo sapiens
  misc_RNA (1)...(19): siRNA sense strand
ggaggaucgucaggcucua

SEQ ID NO: 1484615 - RNA, 19 nt, Homo sapiens
  misc_RNA (1)...(19): siRNA sense strand
gaaaacaaagguagaacau

SEQ ID NO: 1484616 - RNA, 19 nt, Homo sapiens
  misc_RNA (1)...(19): siRNA sense strand
gacucaagcagaaacaaug

SEQ ID NO: 1484617 - RNA, 19 nt, Homo sapiens
  misc_RNA (1)...(19): siRNA sense strand
caggaagcucuggauauaa

SEQ ID NO: 1484618 - RNA, 19 nt, Homo sapiens
  misc_RNA (1)...(19): siRNA sense strand
gagagaaagggagcuguuc

SEQ ID NO: 1484619 - RNA, 19 nt, Homo sapiens
  misc_RNA (1)...(19): siRNA sense strand
uugaaagcuuugucaggaa

SEQ ID NO: 1484620 - RNA, 19 nt, Homo sapiens
  misc_RNA (1)...(19): siRNA sense strand
uggcuggagugcugaagga

SEQ ID NO: 1484621 - RNA, 19 nt, Homo sapiens
  misc_RNA (1)...(19): siRNA sense strand
gagauaagaaggcccuacu

SEQ ID NO: 1484622 - RNA, 19 nt, Homo sapiens
  misc_RNA (1)...(19): siRNA sense strand
uaaguuugguguucuugcu

SEQ ID NO: 1484623 - RNA, 19 nt, Homo sapiens
  misc_RNA (1)...(19): siRNA sense strand
gucaggaagcucuggauau

SEQ ID NO: 1484624 - RNA, 19 nt, Homo sapiens
  misc_RNA (1)...(19): siRNA sense strand
ugagagaaagggagcuguu

SEQ ID NO: 1484625 - RNA, 19 nt, Homo sapiens
  misc_RNA (1)...(19): siRNA sense strand
cggcaucagcgaggagaua

SEQ ID NO: 1484626 - RNA, 19 nt, Homo sapiens
  misc_RNA (1)...(19): siRNA sense strand
ugggaaguaugcuuucaag

SEQ ID NO: 1484627 - RNA, 19 nt, Homo sapiens
  misc_RNA (1)...(19): siRNA sense strand
agucaacaaucccaaaauu

SEQ ID NO: 1484628 - RNA, 19 nt, Homo sapiens
  misc_RNA (1)...(19): siRNA sense strand
auccaagccuguugagaga

SEQ ID NO: 1484629 - RNA, 19 nt, Homo sapiens
  misc_RNA (1)...(19): siRNA sense strand
cacaacauuuagauauugg

SEQ ID NO: 1484630 - RNA, 19 nt, Homo sapiens
  misc_RNA (1)...(19): siRNA sense strand
ugucaggaagcucuggaua

SEQ ID NO: 1484631 - RNA, 19 nt, Homo sapiens
  misc_RNA (1)...(19): siRNA sense strand
gcuggagugcugaaggauu

SEQ ID NO: 1484632 - RNA, 19 nt, Homo sapiens
  misc_RNA (1)...(19): siRNA sense strand
gaaaguggccccuauucag

SEQ ID NO: 1484633 - RNA, 19 nt, Homo sapiens
  misc_RNA (1)...(19): siRNA sense strand
gcucuaaacaaaauucuga

SEQ ID NO: 1484634 - RNA, 19 nt, Homo sapiens
  misc_RNA (1)...(19): siRNA sense strand
guacaacgugagagauaag

SEQ ID NO: 1484635 - RNA, 19 nt, Homo sapiens
  misc_RNA (1)...(19): siRNA sense strand
ucaaugauaagagcuguca

SEQ ID NO: 1484636 - RNA, 19 nt, Homo sapiens
  misc_RNA (1)...(19): siRNA sense strand
uuaagacucauaacgaaca

SEQ ID NO: 1484637 - RNA, 19 nt, Homo sapiens
  misc_RNA (1)...(19): siRNA sense strand
ucaucaucaucgucaaaga

SEQ ID NO: 1484638 - RNA, 19 nt, Homo sapiens
  misc_RNA (1)...(19): siRNA sense strand
aguuugguguucuugcuaa

SEQ ID NO: 1484639 - RNA, 19 nt, Homo sapiens
  misc_RNA (1)...(19): siRNA sense strand
aaaacgagcucuuucuacu

SEQ ID NO: 1484640 - RNA, 19 nt, Homo sapiens
  misc_RNA (1)...(19): siRNA sense strand
agaagaagcacugcccaau

SEQ ID NO: 1484641 - RNA, 19 nt, Homo sapiens
  misc_RNA (1)...(19): siRNA sense strand
gaucauuuaacuugaaagc

SEQ ID NO: 1484642 - RNA, 19 nt, Homo sapiens
  misc_RNA (1)...(19): siRNA sense strand
auacgcauccucuaaccuu

SEQ ID NO: 1484643 - RNA, 19 nt, Homo sapiens
  misc_RNA (1)...(19): siRNA sense strand
cugaagcgacaggguauuu

SEQ ID NO: 1484644 - RNA, 19 nt, Homo sapiens
  misc_RNA (1)...(19): siRNA sense strand
cagcaugaccagcgaggau

SEQ ID NO: 1484645 - RNA, 19 nt, Homo sapiens
  misc_RNA (1)...(19): siRNA sense strand
gcccaaguacaacgugaga

SEQ ID NO: 1484646 - RNA, 19 nt, Homo sapiens
  misc_RNA (1)...(19): siRNA sense strand
caacgacgcuguccucuuu

SEQ ID NO: 1484647 - RNA, 19 nt, Homo sapiens
  misc_RNA (1)...(19): siRNA sense strand
ggaggaagcuuuaugaauc

SEQ ID NO: 1484648 - RNA, 19 nt, Homo sapiens
  misc_RNA (1)...(19): siRNA sense strand
ugaacaagaugcuggauaa

SEQ ID NO: 1484649 - RNA, 19 nt, Homo sapiens
  misc_RNA (1)...(19): siRNA sense strand
gaagcuuuaugaauccuua

SEQ ID NO: 1484650 - RNA, 19 nt, Homo sapiens
  misc_RNA (1)...(19): siRNA sense strand
ggacaagaccuuauacuuc

SEQ ID NO: 1484651 - RNA, 19 nt, Homo sapiens
  misc_RNA (1)...(19): siRNA sense strand
ccaaugggcugaaugugaa

SEQ ID NO: 1484652 - RNA, 19 nt, Homo sapiens
  misc_RNA (1)...(19): siRNA sense strand
ccacugcgcucacgucuuc

SEQ ID NO: 1484653 - RNA, 19 nt, Homo sapiens
  misc_RNA (1)...(19): siRNA sense strand
gacaagaccuuauacuucu

SEQ ID NO: 1484654 - RNA, 19 nt, Homo sapiens
  misc_RNA (1)...(19): siRNA sense strand
gcuaugaguucuccaacaa

SEQ ID NO: 1484655 - RNA, 19 nt, Homo sapiens
  misc_RNA (1)...(19): siRNA sense strand
gaaucggccucuucaauag

SEQ ID NO: 1484656 - RNA, 19 nt, Homo sapiens
  misc_RNA (1)...(19): siRNA sense strand
caacgcagcggcagucuuu

SEQ ID NO: 1484657 - RNA, 19 nt, Homo sapiens
  misc_RNA (1)...(19): siRNA sense strand
cgaaucggccucuucaaua

SEQ ID NO: 1484658 - RNA, 19 nt, Homo sapiens
  misc_RNA (1)...(19): siRNA sense strand
gcucgcagcucaccuccuu

SEQ ID NO: 1484659 - RNA, 19 nt, Homo sapiens
  misc_RNA (1)...(19): siRNA sense strand
acaacaaccuggagaacuu

SEQ ID NO: 1484660 - RNA, 19 nt, Homo sapiens
  misc_RNA (1)...(19): siRNA sense strand
ggacugggaggaugaauuc

SEQ ID NO: 1484661 - RNA, 19 nt, Homo sapiens
  misc_RNA (1)...(19): siRNA sense strand
acaagaugcuggauaagga

SEQ ID NO: 1484662 - RNA, 19 nt, Homo sapiens
  misc_RNA (1)...(19): siRNA sense strand
gcucacgucuucacuacug

SEQ ID NO: 1484663 - RNA, 19 nt, Homo sapiens
  misc_RNA (1)...(19): siRNA sense strand
gaacgcagugcucuucgaa

SEQ ID NO: 1484664 - RNA, 19 nt, Homo sapiens
  misc_RNA (1)...(19): siRNA sense strand
gaggaaaccagauauugug

SEQ ID NO: 1484665 - RNA, 19 nt, Homo sapiens
  misc_RNA (1)...(19): siRNA sense strand
caagguggguggcaucuac

SEQ ID NO: 1484666 - RNA, 19 nt, Homo sapiens
  misc_RNA (1)...(19): siRNA sense strand
gacagugguugccuucuuc

SEQ ID NO: 1484667 - RNA, 19 nt, Homo sapiens
  misc_RNA (1)...(19): siRNA sense strand
caagaggaaaccagauauu

SEQ ID NO: 1484668 - RNA, 19 nt, Homo sapiens
  misc_RNA (1)...(19): siRNA sense strand
acacggugcugcagacgaa

SEQ ID NO: 1484669 - RNA, 19 nt, Homo sapiens
  misc_RNA (1)...(19): siRNA sense strand
uacgguaucuacauucuug

SEQ ID NO: 1484670 - RNA, 19 nt, Homo sapiens
  misc_RNA (1)...(19): siRNA sense strand
ggcugaaugugaagaaguu

SEQ ID NO: 1484671 - RNA, 19 nt, Homo sapiens
  misc_RNA (1)...(19): siRNA sense strand
gugguugccuucuucauca

SEQ ID NO: 1484672 - RNA, 19 nt, Homo sapiens
  misc_RNA (1)...(19): siRNA sense strand
ccugggagguggcuaacaa

SEQ ID NO: 1484673 - RNA, 19 nt, Homo sapiens
  misc_RNA (1)...(19): siRNA sense strand
gggcgaggagcguaacuaa

SEQ ID NO: 1484674 - RNA, 19 nt, Homo sapiens
  misc_RNA (1)...(19): siRNA sense strand
gggaggaagcuuuaugaau

SEQ ID NO: 1484675 - RNA, 19 nt, Homo sapiens
  misc_RNA (1)...(19): siRNA sense strand
ggagaacgcagugcucuuc

SEQ ID NO: 1484676 - RNA, 19 nt, Homo sapiens
  misc_RNA (1)...(19): siRNA sense strand
gaccuuauacuucuuuauc

SEQ ID NO: 1484677 - RNA, 19 nt, Homo sapiens
  misc_RNA (1)...(19): siRNA sense strand
cagcgcggaccaacaauuu

SEQ ID NO: 1484678 - RNA, 19 nt, Homo sapiens
  misc_RNA (1)...(19): siRNA sense strand
caacguggaaacccucaaa

SEQ ID NO: 1484679 - RNA, 19 nt, Homo sapiens
  misc_RNA (1)...(19): siRNA sense strand
gcaucuggacuucaacuug

SEQ ID NO: 1484680 - RNA, 19 nt, Homo sapiens
  misc_RNA (1)...(19): siRNA sense strand
ccuccuuccucuacaguuu

SEQ ID NO: 1484681 - RNA, 19 nt, Homo sapiens
  misc_RNA (1)...(19): siRNA sense strand
agacagugguugccuucuu

SEQ ID NO: 1484682 - RNA, 19 nt, Homo sapiens
  misc_RNA (1)...(19): siRNA sense strand
gcagaucuaccaccgauac

SEQ ID NO: 1484683 - RNA, 19 nt, Homo sapiens
  misc_RNA (1)...(19): siRNA sense strand
cccaguaucuccaccaauc

SEQ ID NO: 1484684 - RNA, 19 nt, Homo sapiens
  misc_RNA (1)...(19): siRNA sense strand
ucacuacugugucccagau

SEQ ID NO: 1484685 - RNA, 19 nt, Homo sapiens
  misc_RNA (1)...(19): siRNA sense strand
gcgcucacgucuucacuac

SEQ ID NO: 1484686 - RNA, 19 nt, Homo sapiens
  misc_RNA (1)...(19): siRNA sense strand
gaacuucaacguggacaag

SEQ ID NO: 1484687 - RNA, 19 nt, Homo sapiens
  misc_RNA (1)...(19): siRNA sense strand
cccacaauaugcuggauga

SEQ ID NO: 1484688 - RNA, 19 nt, Homo sapiens
  misc_RNA (1)...(19): siRNA sense strand
gaggaagcuuuaugaaucc

SEQ ID NO: 1484689 - RNA, 19 nt, Homo sapiens
  misc_RNA (1)...(19): siRNA sense strand
caccgauacugcauggaaa

SEQ ID NO: 1484690 - RNA, 19 nt, Homo sapiens
  misc_RNA (1)...(19): siRNA sense strand
gccguggacuucuacaaca

SEQ ID NO: 1484691 - RNA, 19 nt, Homo sapiens
  misc_RNA (1)...(19): siRNA sense strand
gaguuccucuccuccacaa

SEQ ID NO: 1484692 - RNA, 19 nt, Homo sapiens
  misc_RNA (1)...(19): siRNA sense strand
ccaccgauacugcauggaa

SEQ ID NO: 1484693 - RNA, 19 nt, Homo sapiens
  misc_RNA (1)...(19): siRNA sense strand
gcaagggcugcaaggugua

SEQ ID NO: 1484694 - RNA, 19 nt, Homo sapiens
  misc_RNA (1)...(19): siRNA sense strand
uggcucggcucaacuaucu

SEQ ID NO: 1484695 - RNA, 19 nt, Homo sapiens
  misc_RNA (1)...(19): siRNA sense strand
caagaugcuggauaaggaa

SEQ ID NO: 1484696 - RNA, 19 nt, Homo sapiens
  misc_RNA (1)...(19): siRNA sense strand
ccaacacggugaaggaaaa

SEQ ID NO: 1484697 - RNA, 19 nt, Homo sapiens
  misc_RNA (1)...(19): siRNA sense strand
gcgcggaccaacaauuuca

SEQ ID NO: 1484698 - RNA, 19 nt, Homo sapiens
  misc_RNA (1)...(19): siRNA sense strand
uuaugaauccuuacugguu

SEQ ID NO: 1484699 - RNA, 19 nt, Homo sapiens
  misc_RNA (1)...(19): siRNA sense strand
ucaagaggaaaccagauau

SEQ ID NO: 1484700 - RNA, 19 nt, Homo sapiens
  misc_RNA (1)...(19): siRNA sense strand
cuaggccgguacuauaugu

SEQ ID NO: 1484701 - RNA, 19 nt, Homo sapiens
  misc_RNA (1)...(19): siRNA sense strand
ccggcugagugcacgguua

SEQ ID NO: 1484702 - RNA, 19 nt, Homo sapiens
  misc_RNA (1)...(19): siRNA sense strand
gaacaagaugcuggauaag

SEQ ID NO: 1484703 - RNA, 19 nt, Homo sapiens
  misc_RNA (1)...(19): siRNA sense strand
gccaagcugugcgcaaaca

SEQ ID NO: 1484704 - RNA, 19 nt, Homo sapiens
  misc_RNA (1)...(19): siRNA sense strand
caacaauuucaacguggaa

SEQ ID NO: 1484705 - RNA, 19 nt, Homo sapiens
  misc_RNA (1)...(19): siRNA sense strand
ggaccaacaauuucaacgu

SEQ ID NO: 1484706 - RNA, 19 nt, Homo sapiens
  misc_RNA (1)...(19): siRNA sense strand
ugaagaggacacuggauuc

SEQ ID NO: 1484707 - RNA, 19 nt, Homo sapiens
  misc_RNA (1)...(19): siRNA sense strand
gaacggcagcgagcagaca

SEQ ID NO: 1484708 - RNA, 19 nt, Homo sapiens
  misc_RNA (1)...(19): siRNA sense strand
agaggaaaccagauauugu

SEQ ID NO: 1484709 - RNA, 19 nt, Homo sapiens
  misc_RNA (1)...(19): siRNA sense strand
aagaggaaaccagauauug

SEQ ID NO: 1484710 - RNA, 19 nt, Homo sapiens
  misc_RNA (1)...(19): siRNA sense strand
acgcagugcucuucgaagu

SEQ ID NO: 1484711 - RNA, 19 nt, Homo sapiens
  misc_RNA (1)...(19): siRNA sense strand
cagagcacuucaccuacga

SEQ ID NO: 1484712 - RNA, 19 nt, Homo sapiens
  misc_RNA (1)...(19): siRNA sense strand
gcucgaauccaggaguuug

SEQ ID NO: 1484713 - RNA, 19 nt, Homo sapiens
  misc_RNA (1)...(19): siRNA sense strand
gugaggagaagccacaugu

SEQ ID NO: 1484714 - RNA, 19 nt, Homo sapiens
  misc_RNA (1)...(19): siRNA sense strand
gcucaccuccuuccucuac

SEQ ID NO: 1484715 - RNA, 19 nt, Homo sapiens
  misc_RNA (1)...(19): siRNA sense strand
cacaugugguugcucacuu

SEQ ID NO: 1484716 - RNA, 19 nt, Homo sapiens
  misc_RNA (1)...(19): siRNA sense strand
cugaagaggacacuggauu

SEQ ID NO: 1484717 - RNA, 19 nt, Homo sapiens
  misc_RNA (1)...(19): siRNA sense strand
aggccaagcugugcgcaaa

SEQ ID NO: 1484718 - RNA, 19 nt, Homo sapiens
  misc_RNA (1)...(19): siRNA sense strand
uggacaagaccuuauacuu

SEQ ID NO: 1484719 - RNA, 19 nt, Homo sapiens
  misc_RNA (1)...(19): siRNA sense strand
gaaguuuucugccaugcau

SEQ ID NO: 1484720 - RNA, 19 nt, Homo sapiens
  misc_RNA (1)...(19): siRNA sense strand
cucaagaggaaaccagaua

SEQ ID NO: 1484721 - RNA, 19 nt, Homo sapiens
  misc_RNA (1)...(19): siRNA sense strand
acaugugguugcucacuuc

SEQ ID NO: 1484722 - RNA, 19 nt, Homo sapiens
  misc_RNA (1)...(19): siRNA sense strand
gcugucaccuuggagucuu

SEQ ID NO: 1484723 - RNA, 19 nt, Homo sapiens
  misc_RNA (1)...(19): siRNA sense strand
uguggacuaugaggaguuu

SEQ ID NO: 1484724 - RNA, 19 nt, Homo sapiens
  misc_RNA (1)...(19): siRNA sense strand
caucgaggcacagcacuug

SEQ ID NO: 1484725 - RNA, 19 nt, Homo sapiens
  misc_RNA (1)...(19): siRNA sense strand
ccggugccguggacuucua

SEQ ID NO: 1484726 - RNA, 19 nt, Homo sapiens
  misc_RNA (1)...(19): siRNA sense strand
uuccagagcacuucaccua

SEQ ID NO: 1484727 - RNA, 19 nt, Homo sapiens
  misc_RNA (1)...(19): siRNA sense strand
gggagaggcagaucuacca

SEQ ID NO: 1484728 - RNA, 19 nt, Homo sapiens
  misc_RNA (1)...(19): siRNA sense strand
uuucugccaugcaugaguu

SEQ ID NO: 1484729 - RNA, 19 nt, Homo sapiens
  misc_RNA (1)...(19): siRNA sense strand
ucgcagaccccucagcuua

SEQ ID NO: 1484730 - RNA, 19 nt, Homo sapiens
  misc_RNA (1)...(19): siRNA sense strand
ggcauuggcucggcucaac

SEQ ID NO: 1484731 - RNA, 19 nt, Homo sapiens
  misc_RNA (1)...(19): siRNA sense strand
caacaaccuggagaacuuc

SEQ ID NO: 1484732 - RNA, 19 nt, Homo sapiens
  misc_RNA (1)...(19): siRNA sense strand
gccaacacggugaaggaaa

SEQ ID NO: 1484733 - RNA, 19 nt, Homo sapiens
  misc_RNA (1)...(19): siRNA sense strand
gcuguccucuuuggcuuuc

SEQ ID NO: 1484734 - RNA, 19 nt, Homo sapiens
  misc_RNA (1)...(19): siRNA sense strand
ccguggacuucuacaacaa

SEQ ID NO: 1484735 - RNA, 19 nt, Homo sapiens
  misc_RNA (1)...(19): siRNA sense strand
cagcuuacgguaucuacau

SEQ ID NO: 1484736 - RNA, 19 nt, Homo sapiens
  misc_RNA (1)...(19): siRNA sense strand
ccuuuaaaccgcacuuugu

SEQ ID NO: 1484737 - RNA, 19 nt, Homo sapiens
  misc_RNA (1)...(19): siRNA sense strand
gaagaacagugauuauuga

SEQ ID NO: 1484738 - RNA, 19 nt, Homo sapiens
  misc_RNA (1)...(19): siRNA sense strand
gaaagaaccagcuuaaaga

SEQ ID NO: 1484739 - RNA, 19 nt, Homo sapiens
  misc_RNA (1)...(19): siRNA sense strand
ucacagaaauuccuaaaga

SEQ ID NO: 1484740 - RNA, 19 nt, Homo sapiens
  misc_RNA (1)...(19): siRNA sense strand
cauaaucgcugaagauguu

SEQ ID NO: 1484741 - RNA, 19 nt, Homo sapiens
  misc_RNA (1)...(19): siRNA sense strand
caggagaggugugauguua

SEQ ID NO: 1484742 - RNA, 19 nt, Homo sapiens
  misc_RNA (1)...(19): siRNA sense strand
ggaagaacagugauuauug

SEQ ID NO: 1484743 - RNA, 19 nt, Homo sapiens
  misc_RNA (1)...(19): siRNA sense strand
gaaugcagguguugaagga

SEQ ID NO: 1484744 - RNA, 19 nt, Homo sapiens
  misc_RNA (1)...(19): siRNA sense strand
ugugagaacugcuuuauug

SEQ ID NO: 1484745 - RNA, 19 nt, Homo sapiens
  misc_RNA (1)...(19): siRNA sense strand
ugaaggaucuuugauaguu

SEQ ID NO: 1484746 - RNA, 19 nt, Homo sapiens
  misc_RNA (1)...(19): siRNA sense strand
gaggcuauauuucuccaua

SEQ ID NO: 1484747 - RNA, 19 nt, Homo sapiens
  misc_RNA (1)...(19): siRNA sense strand
uacaagagcugcuguugaa

SEQ ID NO: 1484748 - RNA, 19 nt, Homo sapiens
  misc_RNA (1)...(19): siRNA sense strand
gaaagggugucaucacagu

SEQ ID NO: 1484749 - RNA, 19 nt, Homo sapiens
  misc_RNA (1)...(19): siRNA sense strand
gaaguuugaucgaggcuau

SEQ ID NO: 1484750 - RNA, 19 nt, Homo sapiens
  misc_RNA (1)...(19): siRNA sense strand
gcaaaguuccucagaaguu

SEQ ID NO: 1484751 - RNA, 19 nt, Homo sapiens
  misc_RNA (1)...(19): siRNA sense strand
uaaguacacucgucuugaa

SEQ ID NO: 1484752 - RNA, 19 nt, Homo sapiens
  misc_RNA (1)...(19): siRNA sense strand
caagugauguugaagugaa

SEQ ID NO: 1484753 - RNA, 19 nt, Homo sapiens
  misc_RNA (1)...(19): siRNA sense strand
agaaccagcuuaaagauau

SEQ ID NO: 1484754 - RNA, 19 nt, Homo sapiens
  misc_RNA (1)...(19): siRNA sense strand
gaaaagaaagacagaguua

SEQ ID NO: 1484755 - RNA, 19 nt, Homo sapiens
  misc_RNA (1)...(19): siRNA sense strand
gagaacugcuuuauuggau

SEQ ID NO: 1484756 - RNA, 19 nt, Homo sapiens
  misc_RNA (1)...(19): siRNA sense strand
gaaggaucuuugauaguug

SEQ ID NO: 1484757 - RNA, 19 nt, Homo sapiens
  misc_RNA (1)...(19): siRNA sense strand
aaacggagacaaagaaauu

SEQ ID NO: 1484758 - RNA, 19 nt, Homo sapiens
  misc_RNA (1)...(19): siRNA sense strand
agaaaucauugagcaguua

SEQ ID NO: 1484759 - RNA, 19 nt, Homo sapiens
  misc_RNA (1)...(19): siRNA sense strand
gauguuagcuguugaugcu

SEQ ID NO: 1484760 - RNA, 19 nt, Homo sapiens
  misc_RNA (1)...(19): siRNA sense strand
gguguggccucucuguuaa

SEQ ID NO: 1484761 - RNA, 19 nt, Homo sapiens
  misc_RNA (1)...(19): siRNA sense strand
gacaagugauguugaagug

SEQ ID NO: 1484762 - RNA, 19 nt, Homo sapiens
  misc_RNA (1)...(19): siRNA sense strand
ccucagaaguugguuauga

SEQ ID NO: 1484763 - RNA, 19 nt, Homo sapiens
  misc_RNA (1)...(19): siRNA sense strand
caaaguuccucagaaguug

SEQ ID NO: 1484764 - RNA, 19 nt, Homo sapiens
  misc_RNA (1)...(19): siRNA sense strand
gaucuuugauaguugagaa

SEQ ID NO: 1484765 - RNA, 19 nt, Homo sapiens
  misc_RNA (1)...(19): siRNA sense strand
uucaagauguugccaauaa

SEQ ID NO: 1484766 - RNA, 19 nt, Homo sapiens
  misc_RNA (1)...(19): siRNA sense strand
gaaguuguagucacagaaa

SEQ ID NO: 1484767 - RNA, 19 nt, Homo sapiens
  misc_RNA (1)...(19): siRNA sense strand
gaaguugguuaugaugcua

SEQ ID NO: 1484768 - RNA, 19 nt, Homo sapiens
  misc_RNA (1)...(19): siRNA sense strand
agucaaggcuccaggguuu

SEQ ID NO: 1484769 - RNA, 19 nt, Homo sapiens
  misc_RNA (1)...(19): siRNA sense strand
ugaagaaauugcacagguu

SEQ ID NO: 1484770 - RNA, 19 nt, Homo sapiens
  misc_RNA (1)...(19): siRNA sense strand
gcacagguugcuacgauuu

SEQ ID NO: 1484771 - RNA, 19 nt, Homo sapiens
  misc_RNA (1)...(19): siRNA sense strand
uaacacaaaugaagaagcu

SEQ ID NO: 1484772 - RNA, 19 nt, Homo sapiens
  misc_RNA (1)...(19): siRNA sense strand
gaaccagcuuaaagauaug

SEQ ID NO: 1484773 - RNA, 19 nt, Homo sapiens
  misc_RNA (1)...(19): siRNA sense strand
gaaaucaggagagguguga

SEQ ID NO: 1484774 - RNA, 19 nt, Homo sapiens
  misc_RNA (1)...(19): siRNA sense strand
guugaaggaucuuugauag

SEQ ID NO: 1484775 - RNA, 19 nt, Homo sapiens
  misc_RNA (1)...(19): siRNA sense strand
ccaaagggaagaacaguga

SEQ ID NO: 1484776 - RNA, 19 nt, Homo sapiens
  misc_RNA (1)...(19): siRNA sense strand
cacagaaauuccuaaagaa

SEQ ID NO: 1484777 - RNA, 19 nt, Homo sapiens
  misc_RNA (1)...(19): siRNA sense strand
gaucgaggcuauauuucuc

SEQ ID NO: 1484778 - RNA, 19 nt, Homo sapiens
  misc_RNA (1)...(19): siRNA sense strand
cauuggagcuaaacuuguu

SEQ ID NO: 1484779 - RNA, 19 nt, Homo sapiens
  misc_RNA (1)...(19): siRNA sense strand
cauuguaccugcucuugaa

SEQ ID NO: 1484780 - RNA, 19 nt, Homo sapiens
  misc_RNA (1)...(19): siRNA sense strand
guacacucgucuugaauag

SEQ ID NO: 1484781 - RNA, 19 nt, Homo sapiens
  misc_RNA (1)...(19): siRNA sense strand
gggaagaacagugauuauu

SEQ ID NO: 1484782 - RNA, 19 nt, Homo sapiens
  misc_RNA (1)...(19): siRNA sense strand
gcaaacggagacaaagaaa

SEQ ID NO: 1484783 - RNA, 19 nt, Homo sapiens
  misc_RNA (1)...(19): siRNA sense strand
ggaugccuauguucuguug

SEQ ID NO: 1484784 - RNA, 19 nt, Homo sapiens
  misc_RNA (1)...(19): siRNA sense strand
gaagagaaggacccuggaa

SEQ ID NO: 1484785 - RNA, 19 nt, Homo sapiens
  misc_RNA (1)...(19): siRNA sense strand
gcagaugcccgagccuuaa

SEQ ID NO: 1484786 - RNA, 19 nt, Homo sapiens
  misc_RNA (1)...(19): siRNA sense strand
uggagaagcucuaaguaca

SEQ ID NO: 1484787 - RNA, 19 nt, Homo sapiens
  misc_RNA (1)...(19): siRNA sense strand
ggugugauguuagcuguug

SEQ ID NO: 1484788 - RNA, 19 nt, Homo sapiens
  misc_RNA (1)...(19): siRNA sense strand
uuaaagauauggcuauugc

SEQ ID NO: 1484789 - RNA, 19 nt, Homo sapiens
  misc_RNA (1)...(19): siRNA sense strand
ccuauguucuguugaguga

SEQ ID NO: 1484790 - RNA, 19 nt, Homo sapiens
  misc_RNA (1)...(19): siRNA sense strand
ccaauaacacaaaugaaga

SEQ ID NO: 1484791 - RNA, 19 nt, Homo sapiens
  misc_RNA (1)...(19): siRNA sense strand
uaugggagguggcauguuc

SEQ ID NO: 1484792 - RNA, 19 nt, Homo sapiens
  misc_RNA (1)...(19): siRNA sense strand
gaaagacagaguuacagau

SEQ ID NO: 1484793 - RNA, 19 nt, Homo sapiens
  misc_RNA (1)...(19): siRNA sense strand
ugaaugaacggcuugcaaa

SEQ ID NO: 1484794 - RNA, 19 nt, Homo sapiens
  misc_RNA (1)...(19): siRNA sense strand
aaagauauggcuauugcua

SEQ ID NO: 1484795 - RNA, 19 nt, Homo sapiens
  misc_RNA (1)...(19): siRNA sense strand
uauguucuguugagugaaa

SEQ ID NO: 1484796 - RNA, 19 nt, Homo sapiens
  misc_RNA (1)...(19): siRNA sense strand
gcacuaccacugcuacugu

SEQ ID NO: 1484797 - RNA, 19 nt, Homo sapiens
  misc_RNA (1)...(19): siRNA sense strand
caagagcugcuguugaaga

SEQ ID NO: 1484798 - RNA, 19 nt, Homo sapiens
  misc_RNA (1)...(19): siRNA sense strand
gcuuaaagauauggcuauu

SEQ ID NO: 1484799 - RNA, 19 nt, Homo sapiens
  misc_RNA (1)...(19): siRNA sense strand
gauggagaagcucuaagua

SEQ ID NO: 1484800 - RNA, 19 nt, Homo sapiens
  misc_RNA (1)...(19): siRNA sense strand
gaaauuauugaaggcauga

SEQ ID NO: 1484801 - RNA, 19 nt, Homo sapiens
  misc_RNA (1)...(19): siRNA sense strand
aagaaagggugucaucaca

SEQ ID NO: 1484802 - RNA, 19 nt, Homo sapiens
  misc_RNA (1)...(19): siRNA sense strand
cguucagccucaugacuua

SEQ ID NO: 1484803 - RNA, 19 nt, Homo sapiens
  misc_RNA (1)...(19): siRNA sense strand
agaaagaaccagcuuaaag

SEQ ID NO: 1484804 - RNA, 19 nt, Homo sapiens
  misc_RNA (1)...(19): siRNA sense strand
ggagaggugugauguuagc

SEQ ID NO: 1484805 - RNA, 19 nt, Homo sapiens
  misc_RNA (1)...(19): siRNA sense strand
cagaaauuccuaaagaaga

SEQ ID NO: 1484806 - RNA, 19 nt, Homo sapiens
  misc_RNA (1)...(19): siRNA sense strand
ggacaagugauguugaagu

SEQ ID NO: 1484807 - RNA, 19 nt, Homo sapiens
  misc_RNA (1)...(19): siRNA sense strand
ugaagauguugauggagaa

SEQ ID NO: 1484808 - RNA, 19 nt, Homo sapiens
  misc_RNA (1)...(19): siRNA sense strand
gaaaugugaauuccaggau

SEQ ID NO: 1484809 - RNA, 19 nt, Homo sapiens
  misc_RNA (1)...(19): siRNA sense strand
gaaauugcacagguugcua

SEQ ID NO: 1484810 - RNA, 19 nt, Homo sapiens
  misc_RNA (1)...(19): siRNA sense strand
uaagaaugcagguguugaa

SEQ ID NO: 1484811 - RNA, 19 nt, Homo sapiens
  misc_RNA (1)...(19): siRNA sense strand
aaagguuggucuucagguu

SEQ ID NO: 1484812 - RNA, 19 nt, Homo sapiens
  misc_RNA (1)...(19): siRNA sense strand
gaccaccccugaagaaauu

SEQ ID NO: 1484813 - RNA, 19 nt, Homo sapiens
  misc_RNA (1)...(19): siRNA sense strand
acagaugcccuuaaugcua

SEQ ID NO: 1484814 - RNA, 19 nt, Homo sapiens
  misc_RNA (1)...(19): siRNA sense strand
gauguugaagugaaugaaa

SEQ ID NO: 1484815 - RNA, 19 nt, Homo sapiens
  misc_RNA (1)...(19): siRNA sense strand
ggucauaaucgcugaagau

SEQ ID NO: 1484816 - RNA, 19 nt, Homo sapiens
  misc_RNA (1)...(19): siRNA sense strand
guaagccuuuggucauaau

SEQ ID NO: 1484817 - RNA, 19 nt, Homo sapiens
  misc_RNA (1)...(19): siRNA sense strand
ccguaagccuuuggucaua

SEQ ID NO: 1484818 - RNA, 19 nt, Homo sapiens
  misc_RNA (1)...(19): siRNA sense strand
guacuggcacgcucuauag

SEQ ID NO: 1484819 - RNA, 19 nt, Homo sapiens
  misc_RNA (1)...(19): siRNA sense strand
gggcuuaugccaaagaugu

SEQ ID NO: 1484820 - RNA, 19 nt, Homo sapiens
  misc_RNA (1)...(19): siRNA sense strand
aagagcugcuguugaagaa

SEQ ID NO: 1484821 - RNA, 19 nt, Homo sapiens
  misc_RNA (1)...(19): siRNA sense strand
aaagaaagacagaguuaca

SEQ ID NO: 1484822 - RNA, 19 nt, Homo sapiens
  misc_RNA (1)...(19): siRNA sense strand
gaagguuggugggacaagu

SEQ ID NO: 1484823 - RNA, 19 nt, Homo sapiens
  misc_RNA (1)...(19): siRNA sense strand
gacgaugccaugcucuuaa

SEQ ID NO: 1484824 - RNA, 19 nt, Homo sapiens
  misc_RNA (1)...(19): siRNA sense strand
uugaaggcaugaaguuuga

SEQ ID NO: 1484825 - RNA, 19 nt, Homo sapiens
  misc_RNA (1)...(19): siRNA sense strand
gccaauaacacaaaugaag

SEQ ID NO: 1484826 - RNA, 19 nt, Homo sapiens
  misc_RNA (1)...(19): siRNA sense strand
gagaagcucuaaguacacu

SEQ ID NO: 1484827 - RNA, 19 nt, Homo sapiens
  misc_RNA (1)...(19): siRNA sense strand
cguaagccuuuggucauaa

SEQ ID NO: 1484828 - RNA, 19 nt, Homo sapiens
  misc_RNA (1)...(19): siRNA sense strand
gaagaaagggugucaucac

SEQ ID NO: 1484829 - RNA, 19 nt, Homo sapiens
  misc_RNA (1)...(19): siRNA sense strand
ggaagaaagggugucauca

SEQ ID NO: 1484830 - RNA, 19 nt, Homo sapiens
  misc_RNA (1)...(19): siRNA sense strand
agaaauuccuaaagaagag

SEQ ID NO: 1484831 - RNA, 19 nt, Homo sapiens
  misc_RNA (1)...(19): siRNA sense strand
aaagacagaguuacagaug

SEQ ID NO: 1484832 - RNA, 19 nt, Homo sapiens
  misc_RNA (1)...(19): siRNA sense strand
ggugacaaggcucaaauug

SEQ ID NO: 1484833 - RNA, 19 nt, Homo sapiens
  misc_RNA (1)...(19): siRNA sense strand
auagaaagaaccagcuuaa

SEQ ID NO: 1484834 - RNA, 19 nt, Homo sapiens
  misc_RNA (1)...(19): siRNA sense strand
caaaaggucagaaauguga

SEQ ID NO: 1484835 - RNA, 19 nt, Homo sapiens
  misc_RNA (1)...(19): siRNA sense strand
uaugcaaaguuccucagaa

SEQ ID NO: 1484836 - RNA, 19 nt, Homo sapiens
  misc_RNA (1)...(19): siRNA sense strand
gagaaggacccuggaaugg

SEQ ID NO: 1484837 - RNA, 19 nt, Homo sapiens
  misc_RNA (1)...(19): siRNA sense strand
gagaaagaguugagaaguu

SEQ ID NO: 1484838 - RNA, 19 nt, Homo sapiens
  misc_RNA (1)...(19): siRNA sense strand
agaaagaguugagaaguua

SEQ ID NO: 1484839 - RNA, 19 nt, Homo sapiens
  misc_RNA (1)...(19): siRNA sense strand
ggagaaagcccuucaagug

SEQ ID NO: 1484840 - RNA, 19 nt, Homo sapiens
  misc_RNA (1)...(19): siRNA sense strand
uaaaggcgcuguuggaaau

SEQ ID NO: 1484841 - RNA, 19 nt, Homo sapiens
  misc_RNA (1)...(19): siRNA sense strand
gaaagcccuucaaguguuu

SEQ ID NO: 1484842 - RNA, 19 nt, Homo sapiens
  misc_RNA (1)...(19): siRNA sense strand
gaaauauugcuguuccuua

SEQ ID NO: 1484843 - RNA, 19 nt, Homo sapiens
  misc_RNA (1)...(19): siRNA sense strand
gaacgggacacuuugcuaa

SEQ ID NO: 1484844 - RNA, 19 nt, Homo sapiens
  misc_RNA (1)...(19): siRNA sense strand
gaacuuccugugcucauua

SEQ ID NO: 1484845 - RNA, 19 nt, Homo sapiens
  misc_RNA (1)...(19): siRNA sense strand
gggcaaaggucauggagau

SEQ ID NO: 1484846 - RNA, 19 nt, Homo sapiens
  misc_RNA (1)...(19): siRNA sense strand
guaaagaguaccauauuga

SEQ ID NO: 1484847 - RNA, 19 nt, Homo sapiens
  misc_RNA (1)...(19): siRNA sense strand
gaacuggaggcacugauuu

SEQ ID NO: 1484848 - RNA, 19 nt, Homo sapiens
  misc_RNA (1)...(19): siRNA sense strand
gauggagacugcaguaaag

SEQ ID NO: 1484849 - RNA, 19 nt, Homo sapiens
  misc_RNA (1)...(19): siRNA sense strand
uauaaugacuggauguuca

SEQ ID NO: 1484850 - RNA, 19 nt, Homo sapiens
  misc_RNA (1)...(19): siRNA sense strand
gagaaagcccuucaagugu

SEQ ID NO: 1484851 - RNA, 19 nt, Homo sapiens
  misc_RNA (1)...(19): siRNA sense strand
agaaagcccuucaaguguu

SEQ ID NO: 1484852 - RNA, 19 nt, Homo sapiens
  misc_RNA (1)...(19): siRNA sense strand
ggacaaucaguaaagagua

SEQ ID NO: 1484853 - RNA, 19 nt, Homo sapiens
  misc_RNA (1)...(19): siRNA sense strand
gaaguacaacugagaaauc

SEQ ID NO: 1484854 - RNA, 19 nt, Homo sapiens
  misc_RNA (1)...(19): siRNA sense strand
gcaaucaaaguaauuccua

SEQ ID NO: 1484855 - RNA, 19 nt, Homo sapiens
  misc_RNA (1)...(19): siRNA sense strand
cuaaacaucugccugaucu

SEQ ID NO: 1484856 - RNA, 19 nt, Homo sapiens
  misc_RNA (1)...(19): siRNA sense strand
gaaaacuccuggacaauca

SEQ ID NO: 1484857 - RNA, 19 nt, Homo sapiens
  misc_RNA (1)...(19): siRNA sense strand
gcaagaacgggacacuuug

SEQ ID NO: 1484858 - RNA, 19 nt, Homo sapiens
  misc_RNA (1)...(19): siRNA sense strand
ugaauuuccugaagacugu

SEQ ID NO: 1484859 - RNA, 19 nt, Homo sapiens
  misc_RNA (1)...(19): siRNA sense strand
uggaggcacugauuuaaug

SEQ ID NO: 1484860 - RNA, 19 nt, Homo sapiens
  misc_RNA (1)...(19): siRNA sense strand
gacuggauguucauugcua

SEQ ID NO: 1484861 - RNA, 19 nt, Homo sapiens
  misc_RNA (1)...(19): siRNA sense strand
agaauaagaccucugaaga

SEQ ID NO: 1484862 - RNA, 19 nt, Homo sapiens
  misc_RNA (1)...(19): siRNA sense strand
gggaagacccaaaggaguu

SEQ ID NO: 1484863 - RNA, 19 nt, Homo sapiens
  misc_RNA (1)...(19): siRNA sense strand
gccaagaaauauugcuguu

SEQ ID NO: 1484864 - RNA, 19 nt, Homo sapiens
  misc_RNA (1)...(19): siRNA sense strand
gcauugaucaucucacaga

SEQ ID NO: 1484865 - RNA, 19 nt, Homo sapiens
  misc_RNA (1)...(19): siRNA sense strand
ccauauugaugaagaagug

SEQ ID NO: 1484866 - RNA, 19 nt, Homo sapiens
  misc_RNA (1)...(19): siRNA sense strand
guaagaaguacaacugaga

SEQ ID NO: 1484867 - RNA, 19 nt, Homo sapiens
  misc_RNA (1)...(19): siRNA sense strand
gaaagaguugagaaguuaa

SEQ ID NO: 1484868 - RNA, 19 nt, Homo sapiens
  misc_RNA (1)...(19): siRNA sense strand
ggaacugccuccuauuuug

SEQ ID NO: 1484869 - RNA, 19 nt, Homo sapiens
  misc_RNA (1)...(19): siRNA sense strand
ucaguguucuucgcauaua

SEQ ID NO: 1484870 - RNA, 19 nt, Homo sapiens
  misc_RNA (1)...(19): siRNA sense strand
cauagagucuggccagcuu

SEQ ID NO: 1484871 - RNA, 19 nt, Homo sapiens
  misc_RNA (1)...(19): siRNA sense strand
gaauaagaccucugaagac

SEQ ID NO: 1484872 - RNA, 19 nt, Homo sapiens
  misc_RNA (1)...(19): siRNA sense strand
acaucugccugaucucaua

SEQ ID NO: 1484873 - RNA, 19 nt, Homo sapiens
  misc_RNA (1)...(19): siRNA sense strand
ggaacuggaggcacugauu

SEQ ID NO: 1484874 - RNA, 19 nt, Homo sapiens
  misc_RNA (1)...(19): siRNA sense strand
gagcuaccaucugcaaauc

SEQ ID NO: 1484875 - RNA, 19 nt, Homo sapiens
  misc_RNA (1)...(19): siRNA sense strand
ggacaugagaagauauaug

SEQ ID NO: 1484876 - RNA, 19 nt, Homo sapiens
  misc_RNA (1)...(19): siRNA sense strand
gcaucaccauggcauaugu

SEQ ID NO: 1484877 - RNA, 19 nt, Homo sapiens
  misc_RNA (1)...(19): siRNA sense strand
cagcauugaucaucucaca

SEQ ID NO: 1484878 - RNA, 19 nt, Homo sapiens
  misc_RNA (1)...(19): siRNA sense strand
gcaaaggucauggagaugu

SEQ ID NO: 1484879 - RNA, 19 nt, Homo sapiens
  misc_RNA (1)...(19): siRNA sense strand
guaccauauugaugaagaa

SEQ ID NO: 1484880 - RNA, 19 nt, Homo sapiens
  misc_RNA (1)...(19): siRNA sense strand
aguaaagaguaccauauug

SEQ ID NO: 1484881 - RNA, 19 nt, Homo sapiens
  misc_RNA (1)...(19): siRNA sense strand
ucaaguguuucaccaaauc

SEQ ID NO: 1484882 - RNA, 19 nt, Homo sapiens
  misc_RNA (1)...(19): siRNA sense strand
gacaaucaguaaagaguac

SEQ ID NO: 1484883 - RNA, 19 nt, Homo sapiens
  misc_RNA (1)...(19): siRNA sense strand
gagaauaagaccucugaag

SEQ ID NO: 1484884 - RNA, 19 nt, Homo sapiens
  misc_RNA (1)...(19): siRNA sense strand
aagaguaccauauugauga

SEQ ID NO: 1484885 - RNA, 19 nt, Homo sapiens
  misc_RNA (1)...(19): siRNA sense strand
ggaagacccaaaggaguuu

SEQ ID NO: 1484886 - RNA, 19 nt, Homo sapiens
  misc_RNA (1)...(19): siRNA sense strand
ucacagaccacaagucaca

SEQ ID NO: 1484887 - RNA, 19 nt, Homo sapiens
  misc_RNA (1)...(19): siRNA sense strand
ccugaagacuguaagaagu

SEQ ID NO: 1484888 - RNA, 19 nt, Homo sapiens
  misc_RNA (1)...(19): siRNA sense strand
ggagcuaccaucugcaaau

SEQ ID NO: 1484889 - RNA, 19 nt, Homo sapiens
  misc_RNA (1)...(19): siRNA sense strand
cuucaaguguuucaccaaa

SEQ ID NO: 1484890 - RNA, 19 nt, Homo sapiens
  misc_RNA (1)...(19): siRNA sense strand
caguaaagaguaccauauu

SEQ ID NO: 1484891 - RNA, 19 nt, Homo sapiens
  misc_RNA (1)...(19): siRNA sense strand
aaauauugcuguuccuuac

SEQ ID NO: 1484892 - RNA, 19 nt, Homo sapiens
  misc_RNA (1)...(19): siRNA sense strand
guucauugcuaaacaucug

SEQ ID NO: 1484893 - RNA, 19 nt, Homo sapiens
  misc_RNA (1)...(19): siRNA sense strand
ugcaaaucgugacuaagua

SEQ ID NO: 1484894 - RNA, 19 nt, Homo sapiens
  misc_RNA (1)...(19): siRNA sense strand
caggacaugagaagauaua

SEQ ID NO: 1484895 - RNA, 19 nt, Homo sapiens
  misc_RNA (1)...(19): siRNA sense strand
caaauccacgaucauguga

SEQ ID NO: 1484896 - RNA, 19 nt, Homo sapiens
  misc_RNA (1)...(19): siRNA sense strand
ggcacugauuuaaugaauu

SEQ ID NO: 1484897 - RNA, 19 nt, Homo sapiens
  misc_RNA (1)...(19): siRNA sense strand
gaggacaugcugcucaguu

SEQ ID NO: 1484898 - RNA, 19 nt, Homo sapiens
  misc_RNA (1)...(19): siRNA sense strand
guucuucgcauauauuugu

SEQ ID NO: 1484899 - RNA, 19 nt, Homo sapiens
  misc_RNA (1)...(19): siRNA sense strand
caaaggucauggagauguc

SEQ ID NO: 1484900 - RNA, 19 nt, Homo sapiens
  misc_RNA (1)...(19): siRNA sense strand
uaagaaguacaacugagaa

SEQ ID NO: 1484901 - RNA, 19 nt, Homo sapiens
  misc_RNA (1)...(19): siRNA sense strand
gacaugagaagauauaugc

SEQ ID NO: 1484902 - RNA, 19 nt, Homo sapiens
  misc_RNA (1)...(19): siRNA sense strand
ccaaauccacgaucaugug

SEQ ID NO: 1484903 - RNA, 19 nt, Homo sapiens
  misc_RNA (1)...(19): siRNA sense strand
gcuaaaggcgcuguuggaa

SEQ ID NO: 1484904 - RNA, 19 nt, Homo sapiens
  misc_RNA (1)...(19): siRNA sense strand
uccaggacaugagaagaua

SEQ ID NO: 1484905 - RNA, 19 nt, Homo sapiens
  misc_RNA (1)...(19): siRNA sense strand
aaacuggaacugccuccua

SEQ ID NO: 1484906 - RNA, 19 nt, Homo sapiens
  misc_RNA (1)...(19): siRNA sense strand
ugcaagaacgggacacuuu

SEQ ID NO: 1484907 - RNA, 19 nt, Homo sapiens
  misc_RNA (1)...(19): siRNA sense strand
agacugcaguaaaggauuc

SEQ ID NO: 1484908 - RNA, 19 nt, Homo sapiens
  misc_RNA (1)...(19): siRNA sense strand
cuaaaggcgcuguuggaaa

SEQ ID NO: 1484909 - RNA, 19 nt, Homo sapiens
  misc_RNA (1)...(19): siRNA sense strand
ucaguaaagaguaccauau

SEQ ID NO: 1484910 - RNA, 19 nt, Homo sapiens
  misc_RNA (1)...(19): siRNA sense strand
gcaaaucgugacuaaguac

SEQ ID NO: 1484911 - RNA, 19 nt, Homo sapiens
  misc_RNA (1)...(19): siRNA sense strand
ugauggagacugcaguaaa

SEQ ID NO: 1484912 - RNA, 19 nt, Homo sapiens
  misc_RNA (1)...(19): siRNA sense strand
ggaggcacugauuuaauga

SEQ ID NO: 1484913 - RNA, 19 nt, Homo sapiens
  misc_RNA (1)...(19): siRNA sense strand
agaguaccauauugaugaa

SEQ ID NO: 1484914 - RNA, 19 nt, Homo sapiens
  misc_RNA (1)...(19): siRNA sense strand
ucauggagauguccguaag

SEQ ID NO: 1484915 - RNA, 19 nt, Homo sapiens
  misc_RNA (1)...(19): siRNA sense strand
caagccagcagccaaagga

SEQ ID NO: 1484916 - RNA, 19 nt, Homo sapiens
  misc_RNA (1)...(19): siRNA sense strand
gaggagcuaccaucugcaa

SEQ ID NO: 1484917 - RNA, 19 nt, Homo sapiens
  misc_RNA (1)...(19): siRNA sense strand
uuucaguguucuucgcaua

SEQ ID NO: 1484918 - RNA, 19 nt, Homo sapiens
  misc_RNA (1)...(19): siRNA sense strand
gaguugagaaguuaaacau

SEQ ID NO: 1484919 - RNA, 19 nt, Homo sapiens
  misc_RNA (1)...(19): siRNA sense strand
cugaagacuguaagaagua

SEQ ID NO: 1484920 - RNA, 19 nt, Homo sapiens
  misc_RNA (1)...(19): siRNA sense strand
uaaugaauuuccugaagac

SEQ ID NO: 1484921 - RNA, 19 nt, Homo sapiens
  misc_RNA (1)...(19): siRNA sense strand
cuaaguacauccugauucc

SEQ ID NO: 1484922 - RNA, 19 nt, Homo sapiens
  misc_RNA (1)...(19): siRNA sense strand
gcuuaugacgccuguguga

SEQ ID NO: 1484923 - RNA, 19 nt, Homo sapiens
  misc_RNA (1)...(19): siRNA sense strand
auauuugucuggcuggaaa

SEQ ID NO: 1484924 - RNA, 19 nt, Homo sapiens
  misc_RNA (1)...(19): siRNA sense strand
gcucagcauugaucaucuc

SEQ ID NO: 1484925 - RNA, 19 nt, Homo sapiens
  misc_RNA (1)...(19): siRNA sense strand
uuaugacgccugugugaaa

SEQ ID NO: 1484926 - RNA, 19 nt, Homo sapiens
  misc_RNA (1)...(19): siRNA sense strand
ggagacugcaguaaaggau

SEQ ID NO: 1484927 - RNA, 19 nt, Homo sapiens
  misc_RNA (1)...(19): siRNA sense strand
uaugagaacauggacguuu

SEQ ID NO: 1484928 - RNA, 19 nt, Homo sapiens
  misc_RNA (1)...(19): siRNA sense strand
ugacuuaugagaacaugga

SEQ ID NO: 1484929 - RNA, 19 nt, Homo sapiens
  misc_RNA (1)...(19): siRNA sense strand
aaagaguaccauauugaug

SEQ ID NO: 1484930 - RNA, 19 nt, Homo sapiens
  misc_RNA (1)...(19): siRNA sense strand
gcuaccaucugcaaaucgu

SEQ ID NO: 1484931 - RNA, 19 nt, Homo sapiens
  misc_RNA (1)...(19): siRNA sense strand
cagcgucuuucagugcuuu

SEQ ID NO: 1484932 - RNA, 19 nt, Homo sapiens
  misc_RNA (1)...(19): siRNA sense strand
guucucauuucgugaugga

SEQ ID NO: 1484933 - RNA, 19 nt, Homo sapiens
  misc_RNA (1)...(19): siRNA sense strand
acgaucaugugaacccaaa

SEQ ID NO: 1484934 - RNA, 19 nt, Homo sapiens
  misc_RNA (1)...(19): siRNA sense strand
gccagcagccaaaggagaa

SEQ ID NO: 1484935 - RNA, 19 nt, Homo sapiens
  misc_RNA (1)...(19): siRNA sense strand
cugcaaaucgugacuaagu

SEQ ID NO: 1484936 - RNA, 19 nt, Homo sapiens
  misc_RNA (1)...(19): siRNA sense strand
aaacuggaagccaaaggaa

SEQ ID NO: 1484937 - RNA, 19 nt, Homo sapiens
  misc_RNA (1)...(19): siRNA sense strand
gaaauucuucucuuuguca

SEQ ID NO: 1484938 - RNA, 19 nt, Homo sapiens
  misc_RNA (1)...(19): siRNA sense strand
gggaacgccuccucugcua

SEQ ID NO: 1484939 - RNA, 19 nt, Homo sapiens
  misc_RNA (1)...(19): siRNA sense strand
guccauuacucacaaagaa

SEQ ID NO: 1484940 - RNA, 19 nt, Homo sapiens
  misc_RNA (1)...(19): siRNA sense strand
gaacgccuccucugcuaug

SEQ ID NO: 1484941 - RNA, 19 nt, Homo sapiens
  misc_RNA (1)...(19): siRNA sense strand
ggaaguucagcacaucugu

SEQ ID NO: 1484942 - RNA, 19 nt, Homo sapiens
  misc_RNA (1)...(19): siRNA sense strand
ggaacgccuccucugcuau

SEQ ID NO: 1484943 - RNA, 19 nt, Homo sapiens
  misc_RNA (1)...(19): siRNA sense strand
acagugcuccaguguguga

SEQ ID NO: 1484944 - RNA, 19 nt, Homo sapiens
  misc_RNA (1)...(19): siRNA sense strand
auucuucucuuugucaaug

SEQ ID NO: 1484945 - RNA, 19 nt, Homo sapiens
  misc_RNA (1)...(19): siRNA sense strand
ggaaugagaccuuuguguu

SEQ ID NO: 1484946 - RNA, 19 nt, Homo sapiens
  misc_RNA (1)...(19): siRNA sense strand
caacagcugggcaaguuua

SEQ ID NO: 1484947 - RNA, 19 nt, Homo sapiens
  misc_RNA (1)...(19): siRNA sense strand
gaaugagaccuuuguguuc

SEQ ID NO: 1484948 - RNA, 19 nt, Homo sapiens
  misc_RNA (1)...(19): siRNA sense strand
guucaccgcucgcuucuuc

SEQ ID NO: 1484949 - RNA, 19 nt, Homo sapiens
  misc_RNA (1)...(19): siRNA sense strand
gggagcggcuggaacgauu

SEQ ID NO: 1484950 - RNA, 19 nt, Homo sapiens
  misc_RNA (1)...(19): siRNA sense strand
gcagaugagauccacguaa

SEQ ID NO: 1484951 - RNA, 19 nt, Homo sapiens
  misc_RNA (1)...(19): siRNA sense strand
ggauggcugguacaaguua

SEQ ID NO: 1484952 - RNA, 19 nt, Homo sapiens
  misc_RNA (1)...(19): siRNA sense strand
gcccguaaccuaauuccua

SEQ ID NO: 1484953 - RNA, 19 nt, Homo sapiens
  misc_RNA (1)...(19): siRNA sense strand
guggauggcugguacaagu

SEQ ID NO: 1484954 - RNA, 19 nt, Homo sapiens
  misc_RNA (1)...(19): siRNA sense strand
gcuaaacccuguguggaau

SEQ ID NO: 1484955 - RNA, 19 nt, Homo sapiens
  misc_RNA (1)...(19): siRNA sense strand
gaucccgccuccuuucaga

SEQ ID NO: 1484956 - RNA, 19 nt, Homo sapiens
  misc_RNA (1)...(19): siRNA sense strand
gggcgaguauuacaaugug

SEQ ID NO: 1484957 - RNA, 19 nt, Homo sapiens
  misc_RNA (1)...(19): siRNA sense strand
ggacgaggaggagcuguuu

SEQ ID NO: 1484958 - RNA, 19 nt, Homo sapiens
  misc_RNA (1)...(19): siRNA sense strand
ggaguucugcuguaugaga

SEQ ID NO: 1484959 - RNA, 19 nt, Homo sapiens
  misc_RNA (1)...(19): siRNA sense strand
aggaggagggcgaguauua

SEQ ID NO: 1484960 - RNA, 19 nt, Homo sapiens
  misc_RNA (1)...(19): siRNA sense strand
gagauccacguaacuguug

SEQ ID NO: 1484961 - RNA, 19 nt, Homo sapiens
  misc_RNA (1)...(19): siRNA sense strand
gcagccuccuccagaaguu

SEQ ID NO: 1484962 - RNA, 19 nt, Homo sapiens
  misc_RNA (1)...(19): siRNA sense strand
cagaugagauccacguaac

SEQ ID NO: 1484963 - RNA, 19 nt, Homo sapiens
  misc_RNA (1)...(19): siRNA sense strand
gaagcuggacaaugugaug

SEQ ID NO: 1484964 - RNA, 19 nt, Homo sapiens
  misc_RNA (1)...(19): siRNA sense strand
ggagggcgaguauuacaau

SEQ ID NO: 1484965 - RNA, 19 nt, Homo sapiens
  misc_RNA (1)...(19): siRNA sense strand
uaaacccuguguggaauga

SEQ ID NO: 1484966 - RNA, 19 nt, Homo sapiens
  misc_RNA (1)...(19): siRNA sense strand
aaugagaccuuuguguuca

SEQ ID NO: 1484967 - RNA, 19 nt, Homo sapiens
  misc_RNA (1)...(19): siRNA sense strand
cgaggcccguaaccuaauu

SEQ ID NO: 1484968 - RNA, 19 nt, Homo sapiens
  misc_RNA (1)...(19): siRNA sense strand
guuugaggcuuguaacuac

SEQ ID NO: 1484969 - RNA, 19 nt, Homo sapiens
  misc_RNA (1)...(19): siRNA sense strand
uguauuucgugauggagua

SEQ ID NO: 1484970 - RNA, 19 nt, Homo sapiens
  misc_RNA (1)...(19): siRNA sense strand
uuggaguucugcuguauga

SEQ ID NO: 1484971 - RNA, 19 nt, Homo sapiens
  misc_RNA (1)...(19): siRNA sense strand
gagggacacaucaagauca

SEQ ID NO: 1484972 - RNA, 19 nt, Homo sapiens
  misc_RNA (1)...(19): siRNA sense strand
ccacugcaccgacuucauc

SEQ ID NO: 1484973 - RNA, 19 nt, Homo sapiens
  misc_RNA (1)...(19): siRNA sense strand
caucaagaucacugacuuu

SEQ ID NO: 1484974 - RNA, 19 nt, Homo sapiens
  misc_RNA (1)...(19): siRNA sense strand
ggcgaggcccguaaccuaa

SEQ ID NO: 1484975 - RNA, 19 nt, Homo sapiens
  misc_RNA (1)...(19): siRNA sense strand
gaguucugcuguaugagau

SEQ ID NO: 1484976 - RNA, 19 nt, Homo sapiens
  misc_RNA (1)...(19): siRNA sense strand
gcucuacgccaucaagauc

SEQ ID NO: 1484977 - RNA, 19 nt, Homo sapiens
  misc_RNA (1)...(19): siRNA sense strand
cgacuucagcuuccucaug

SEQ ID NO: 1484978 - RNA, 19 nt, Homo sapiens
  misc_RNA (1)...(19): siRNA sense strand
gaaccugacgaaacagaag

SEQ ID NO: 1484979 - RNA, 19 nt, Homo sapiens
  misc_RNA (1)...(19): siRNA sense strand
gucaagagccacaaguuca

SEQ ID NO: 1484980 - RNA, 19 nt, Homo sapiens
  misc_RNA (1)...(19): siRNA sense strand
acaucaagaucacugacuu

SEQ ID NO: 1484981 - RNA, 19 nt, Homo sapiens
  misc_RNA (1)...(19): siRNA sense strand
gagggcgaguauuacaaug

SEQ ID NO: 1484982 - RNA, 19 nt, Homo sapiens
  misc_RNA (1)...(19): siRNA sense strand
gaagucaagagccacaagu

SEQ ID NO: 1484983 - RNA, 19 nt, Homo sapiens
  misc_RNA (1)...(19): siRNA sense strand
cacaaguuccgccugcaua

SEQ ID NO: 1484984 - RNA, 19 nt, Homo sapiens
  misc_RNA (1)...(19): siRNA sense strand
gaggagggcgaguauuaca

SEQ ID NO: 1484985 - RNA, 19 nt, Homo sapiens
  misc_RNA (1)...(19): siRNA sense strand
gaugagauccacguaacug

SEQ ID NO: 1484986 - RNA, 19 nt, Homo sapiens
  misc_RNA (1)...(19): siRNA sense strand
cccguaaccuaauuccuau

SEQ ID NO: 1484987 - RNA, 19 nt, Homo sapiens
  misc_RNA (1)...(19): siRNA sense strand
gcugagggacacaucaaga

SEQ ID NO: 1484988 - RNA, 19 nt, Homo sapiens
  misc_RNA (1)...(19): siRNA sense strand
acaaucagggcaucaucua

SEQ ID NO: 1484989 - RNA, 19 nt, Homo sapiens
  misc_RNA (1)...(19): siRNA sense strand
gguacaaguuacugaacca

SEQ ID NO: 1484990 - RNA, 19 nt, Homo sapiens
  misc_RNA (1)...(19): siRNA sense strand
ucgacgaugccacgaauuu

SEQ ID NO: 1484991 - RNA, 19 nt, Homo sapiens
  misc_RNA (1)...(19): siRNA sense strand
gacgaugccacgaauuugu

SEQ ID NO: 1484992 - RNA, 19 nt, Homo sapiens
  misc_RNA (1)...(19): siRNA sense strand
uaugggaagucugucgauu

SEQ ID NO: 1484993 - RNA, 19 nt, Homo sapiens
  misc_RNA (1)...(19): siRNA sense strand
accugaagcuggacaaugu

SEQ ID NO: 1484994 - RNA, 19 nt, Homo sapiens
  misc_RNA (1)...(19): siRNA sense strand
uucaacagcugggcaaguu

SEQ ID NO: 1484995 - RNA, 19 nt, Homo sapiens
  misc_RNA (1)...(19): siRNA sense strand
gcacgcugguggagaaacg

SEQ ID NO: 1484996 - RNA, 19 nt, Homo sapiens
  misc_RNA (1)...(19): siRNA sense strand
ucaagcagcccaccuucug

SEQ ID NO: 1484997 - RNA, 19 nt, Homo sapiens
  misc_RNA (1)...(19): siRNA sense strand
ggaaccugacgaaacagaa

SEQ ID NO: 1484998 - RNA, 19 nt, Homo sapiens
  misc_RNA (1)...(19): siRNA sense strand
ucucugaucccuaugugaa

SEQ ID NO: 1484999 - RNA, 19 nt, Homo sapiens
  misc_RNA (1)...(19): siRNA sense strand
ggaccucccgcaacgacuu

SEQ ID NO: 1485000 - RNA, 19 nt, Homo sapiens
  misc_RNA (1)...(19): siRNA sense strand
gcaagggguuccugaccaa

SEQ ID NO: 1485001 - RNA, 19 nt, Homo sapiens
  misc_RNA (1)...(19): siRNA sense strand
ugggaagucugucgauugg

SEQ ID NO: 1485002 - RNA, 19 nt, Homo sapiens
  misc_RNA (1)...(19): siRNA sense strand
ucacugacuuuggcaugug

SEQ ID NO: 1485003 - RNA, 19 nt, Homo sapiens
  misc_RNA (1)...(19): siRNA sense strand
guaaccuaauuccuaugga

SEQ ID NO: 1485004 - RNA, 19 nt, Homo sapiens
  misc_RNA (1)...(19): siRNA sense strand
ggccugcaaugucaagucu

SEQ ID NO: 1485005 - RNA, 19 nt, Homo sapiens
  misc_RNA (1)...(19): siRNA sense strand
uggcgaggcccguaaccua

SEQ ID NO: 1485006 - RNA, 19 nt, Homo sapiens
  misc_RNA (1)...(19): siRNA sense strand
uggaacaaacugucaccua

SEQ ID NO: 1485007 - RNA, 19 nt, Homo sapiens
  misc_RNA (1)...(19): siRNA sense strand
gccacgaauuugugaccuu

SEQ ID NO: 1485008 - RNA, 19 nt, Homo sapiens
  misc_RNA (1)...(19): siRNA sense strand
ugagauccacguaacuguu

SEQ ID NO: 1485009 - RNA, 19 nt, Homo sapiens
  misc_RNA (1)...(19): siRNA sense strand
gcagcggcgagaacuuuga

SEQ ID NO: 1485010 - RNA, 19 nt, Homo sapiens
  misc_RNA (1)...(19): siRNA sense strand
gucgauuggugguccuuug

SEQ ID NO: 1485011 - RNA, 19 nt, Homo sapiens
  misc_RNA (1)...(19): siRNA sense strand
ccucaugguucuaggaaaa

SEQ ID NO: 1485012 - RNA, 19 nt, Homo sapiens
  misc_RNA (1)...(19): siRNA sense strand
ggugaaagccacgcuaaac

SEQ ID NO: 1485013 - RNA, 19 nt, Homo sapiens
  misc_RNA (1)...(19): siRNA sense strand
cucggaaccugacgaaaca

SEQ ID NO: 1485014 - RNA, 19 nt, Homo sapiens
  misc_RNA (1)...(19): siRNA sense strand
gccugugcccgucauguaa

SEQ ID NO: 1485015 - RNA, 19 nt, Homo sapiens
  misc_RNA (1)...(19): siRNA sense strand
caggacagccucccuucga

SEQ ID NO: 1485016 - RNA, 19 nt, Homo sapiens
  misc_RNA (1)...(19): siRNA sense strand
cgacaacccgcaccuucug

SEQ ID NO: 1485017 - RNA, 19 nt, Homo sapiens
  misc_RNA (1)...(19): siRNA sense strand
gaccugaagcuggacaaug

SEQ ID NO: 1485018 - RNA, 19 nt, Homo sapiens
  misc_RNA (1)...(19): siRNA sense strand
ccgccuguauuucgugaug

SEQ ID NO: 1485019 - RNA, 19 nt, Homo sapiens
  misc_RNA (1)...(19): siRNA sense strand
gcugguacaaguuacugaa

SEQ ID NO: 1485020 - RNA, 19 nt, Homo sapiens
  misc_RNA (1)...(19): siRNA sense strand
gagaucccgccuccuuuca

SEQ ID NO: 1485021 - RNA, 19 nt, Homo sapiens
  misc_RNA (1)...(19): siRNA sense strand
ccuuuggaguucugcugua

SEQ ID NO: 1485022 - RNA, 19 nt, Homo sapiens
  misc_RNA (1)...(19): siRNA sense strand
cgacgaugccacgaauuug

SEQ ID NO: 1485023 - RNA, 19 nt, Homo sapiens
  misc_RNA (1)...(19): siRNA sense strand
ccaggaggagggcgaguau

SEQ ID NO: 1485024 - RNA, 19 nt, Homo sapiens
  misc_RNA (1)...(19): siRNA sense strand
ccagaaguuugaggcuugu

SEQ ID NO: 1485025 - RNA, 19 nt, Homo sapiens
  misc_RNA (1)...(19): siRNA sense strand
agaaguuugaggcuuguaa

SEQ ID NO: 1485026 - RNA, 19 nt, Homo sapiens
  misc_RNA (1)...(19): siRNA sense strand
ggaggagggcgaguauuac

SEQ ID NO: 1485027 - RNA, 19 nt, Homo sapiens
  misc_RNA (1)...(19): siRNA sense strand
ggacgacaacccgcaccuu

SEQ ID NO: 1485028 - RNA, 19 nt, Homo sapiens
  misc_RNA (1)...(19): siRNA sense strand
acugcacgcugguggagaa

SEQ ID NO: 1485029 - RNA, 19 nt, Homo sapiens
  misc_RNA (1)...(19): siRNA sense strand
gaagacccgaacggugaaa

SEQ ID NO: 1485030 - RNA, 19 nt, Homo sapiens
  misc_RNA (1)...(19): siRNA sense strand
aaucagggcaucaucuaca

SEQ ID NO: 1485031 - RNA, 19 nt, Homo sapiens
  misc_RNA (1)...(19): siRNA sense strand
ggccucuucuuccuucaca

SEQ ID NO: 1485032 - RNA, 19 nt, Homo sapiens
  misc_RNA (1)...(19): siRNA sense strand
gagcucuacgccaucaaga

SEQ ID NO: 1485033 - RNA, 19 nt, Homo sapiens
  misc_RNA (1)...(19): siRNA sense strand
cugcacaucuccgacuuca

SEQ ID NO: 1485034 - RNA, 19 nt, Homo sapiens
  misc_RNA (1)...(19): siRNA sense strand
gcgaggcccguaaccuaau

SEQ ID NO: 1485035 - RNA, 19 nt, Homo sapiens
  misc_RNA (1)...(19): siRNA sense strand
cauccgugcacauggcuuu

SEQ ID NO: 1485036 - RNA, 19 nt, Homo sapiens
  misc_RNA (1)...(19): siRNA sense strand
gccuguauuucgugaugga

SEQ ID NO: 1485037 - RNA, 19 nt, Homo sapiens
  misc_RNA (1)...(19): siRNA sense strand
gaaguuugaggcuuguaac

SEQ ID NO: 1485038 - RNA, 19 nt, Homo sapiens
  misc_RNA (1)...(19): siRNA sense strand
gcacugauuuccuauuuga

SEQ ID NO: 1485039 - RNA, 19 nt, Homo sapiens
  misc_RNA (1)...(19): siRNA sense strand
ugacccaucuguccaauua

SEQ ID NO: 1485040 - RNA, 19 nt, Homo sapiens
  misc_RNA (1)...(19): siRNA sense strand
gggaagaacugcagcauuc

SEQ ID NO: 1485041 - RNA, 19 nt, Homo sapiens
  misc_RNA (1)...(19): siRNA sense strand
gcaaagaguucuggugguu

SEQ ID NO: 1485042 - RNA, 19 nt, Homo sapiens
  misc_RNA (1)...(19): siRNA sense strand
gaagguggcugauguugag

SEQ ID NO: 1485043 - RNA, 19 nt, Homo sapiens
  misc_RNA (1)...(19): siRNA sense strand
gacaagaggcacaaagaua

SEQ ID NO: 1485044 - RNA, 19 nt, Homo sapiens
  misc_RNA (1)...(19): siRNA sense strand
aaacuuaucuucguugaug

SEQ ID NO: 1485045 - RNA, 19 nt, Homo sapiens
  misc_RNA (1)...(19): siRNA sense strand
gcaugaagguggcugaugu

SEQ ID NO: 1485046 - RNA, 19 nt, Homo sapiens
  misc_RNA (1)...(19): siRNA sense strand
cagcacugauuuccuauuu

SEQ ID NO: 1485047 - RNA, 19 nt, Homo sapiens
  misc_RNA (1)...(19): siRNA sense strand
caacuucaccuucaacuug

SEQ ID NO: 1485048 - RNA, 19 nt, Homo sapiens
  misc_RNA (1)...(19): siRNA sense strand
gaacaaacucaggaccuua

SEQ ID NO: 1485049 - RNA, 19 nt, Homo sapiens
  misc_RNA (1)...(19): siRNA sense strand
gcagacauguggccucuuc

SEQ ID NO: 1485050 - RNA, 19 nt, Homo sapiens
  misc_RNA (1)...(19): siRNA sense strand
gcacagaaguacuuugaac

SEQ ID NO: 1485051 - RNA, 19 nt, Homo sapiens
  misc_RNA (1)...(19): siRNA sense strand
cuacaacgcuggcugacuu

SEQ ID NO: 1485052 - RNA, 19 nt, Homo sapiens
  misc_RNA (1)...(19): siRNA sense strand
cacacaaucuucuauaaug

SEQ ID NO: 1485053 - RNA, 19 nt, Homo sapiens
  misc_RNA (1)...(19): siRNA sense strand
gcuaugucuuggucauuua

SEQ ID NO: 1485054 - RNA, 19 nt, Homo sapiens
  misc_RNA (1)...(19): siRNA sense strand
ccacaaacuuaucuucguu

SEQ ID NO: 1485055 - RNA, 19 nt, Homo sapiens
  misc_RNA (1)...(19): siRNA sense strand
gagccaagaucaucacagu

SEQ ID NO: 1485056 - RNA, 19 nt, Homo sapiens
  misc_RNA (1)...(19): siRNA sense strand
gagauucaguucuucaaca

SEQ ID NO: 1485057 - RNA, 19 nt, Homo sapiens
  misc_RNA (1)...(19): siRNA sense strand
ggacauggccuuuccuucu

SEQ ID NO: 1485058 - RNA, 19 nt, Homo sapiens
  misc_RNA (1)...(19): siRNA sense strand
agagacagcucgaacugaa

SEQ ID NO: 1485059 - RNA, 19 nt, Homo sapiens
  misc_RNA (1)...(19): siRNA sense strand
acaaggguauugacuggua

SEQ ID NO: 1485060 - RNA, 19 nt, Homo sapiens
  misc_RNA (1)...(19): siRNA sense strand
gaccagcacugaggaguau

SEQ ID NO: 1485061 - RNA, 19 nt, Homo sapiens
  misc_RNA (1)...(19): siRNA sense strand
gaaccauaauuuggaguug

SEQ ID NO: 1485062 - RNA, 19 nt, Homo sapiens
  misc_RNA (1)...(19): siRNA sense strand
gaacugcaccgccucauac

SEQ ID NO: 1485063 - RNA, 19 nt, Homo sapiens
  misc_RNA (1)...(19): siRNA sense strand
ggcaagagcugcguaccaa

SEQ ID NO: 1485064 - RNA, 19 nt, Homo sapiens
  misc_RNA (1)...(19): siRNA sense strand
ccaccuacuuugacucuga

SEQ ID NO: 1485065 - RNA, 19 nt, Homo sapiens
  misc_RNA (1)...(19): siRNA sense strand
gacuacagcuauucacuuc

SEQ ID NO: 1485066 - RNA, 19 nt, Homo sapiens
  misc_RNA (1)...(19): siRNA sense strand
ggaacugcaccgccucaua

SEQ ID NO: 1485067 - RNA, 19 nt, Homo sapiens
  misc_RNA (1)...(19): siRNA sense strand
cuacagcuauucacuucuu

SEQ ID NO: 1485068 - RNA, 19 nt, Homo sapiens
  misc_RNA (1)...(19): siRNA sense strand
gacacugagucccgucuuu

SEQ ID NO: 1485069 - RNA, 19 nt, Homo sapiens
  misc_RNA (1)...(19): siRNA sense strand
ucacacccuuucugaacua

SEQ ID NO: 1485070 - RNA, 19 nt, Homo sapiens
  misc_RNA (1)...(19): siRNA sense strand
uggaggcucucgugaacua

SEQ ID NO: 1485071 - RNA, 19 nt, Homo sapiens
  misc_RNA (1)...(19): siRNA sense strand
aaacagggacuacagcuau

SEQ ID NO: 1485072 - RNA, 19 nt, Homo sapiens
  misc_RNA (1)...(19): siRNA sense strand
ggacuacagcuauucacuu

SEQ ID NO: 1485073 - RNA, 19 nt, Homo sapiens
  misc_RNA (1)...(19): siRNA sense strand
gcucugaacuauaccuucu

SEQ ID NO: 1485074 - RNA, 19 nt, Homo sapiens
  misc_RNA (1)...(19): siRNA sense strand
ccgaucagcaucuuuauga

SEQ ID NO: 1485075 - RNA, 19 nt, Homo sapiens
  misc_RNA (1)...(19): siRNA sense strand
acaaagauaucugguccaa

SEQ ID NO: 1485076 - RNA, 19 nt, Homo sapiens
  misc_RNA (1)...(19): siRNA sense strand
ugacagugcugcuuaaucc

SEQ ID NO: 1485077 - RNA, 19 nt, Homo sapiens
  misc_RNA (1)...(19): siRNA sense strand
gagcaaaggccggagguau

SEQ ID NO: 1485078 - RNA, 19 nt, Homo sapiens
  misc_RNA (1)...(19): siRNA sense strand
gugaucgucucccgaaguu

SEQ ID NO: 1485079 - RNA, 19 nt, Homo sapiens
  misc_RNA (1)...(19): siRNA sense strand
gacauggccuuuccuucug

SEQ ID NO: 1485080 - RNA, 19 nt, Homo sapiens
  misc_RNA (1)...(19): siRNA sense strand
cauguggccucuucacuca

SEQ ID NO: 1485081 - RNA, 19 nt, Homo sapiens
  misc_RNA (1)...(19): siRNA sense strand
ccacauugacugauaauac

SEQ ID NO: 1485082 - RNA, 19 nt, Homo sapiens
  misc_RNA (1)...(19): siRNA sense strand
ugaacuauaccuucuauca

SEQ ID NO: 1485083 - RNA, 19 nt, Homo sapiens
  misc_RNA (1)...(19): siRNA sense strand
ugccagcacugauuuccua

SEQ ID NO: 1485084 - RNA, 19 nt, Homo sapiens
  misc_RNA (1)...(19): siRNA sense strand
acaagaggcacaaagauau

SEQ ID NO: 1485085 - RNA, 19 nt, Homo sapiens
  misc_RNA (1)...(19): siRNA sense strand
ccacaccuguuccacaauc

SEQ ID NO: 1485086 - RNA, 19 nt, Homo sapiens
  misc_RNA (1)...(19): siRNA sense strand
ggaagggacccgcaugaag

SEQ ID NO: 1485087 - RNA, 19 nt, Homo sapiens
  misc_RNA (1)...(19): siRNA sense strand
ucgggcaaguucuaucaua

SEQ ID NO: 1485088 - RNA, 19 nt, Homo sapiens
  misc_RNA (1)...(19): siRNA sense strand
cuacuauucuacccaucua

SEQ ID NO: 1485089 - RNA, 19 nt, Homo sapiens
  misc_RNA (1)...(19): siRNA sense strand
cagaaucccugugaugaca

SEQ ID NO: 1485090 - RNA, 19 nt, Homo sapiens
  misc_RNA (1)...(19): siRNA sense strand
ugggcuuccuggcuuauua

SEQ ID NO: 1485091 - RNA, 19 nt, Homo sapiens
  misc_RNA (1)...(19): siRNA sense strand
gguaucacacccuuucuga

SEQ ID NO: 1485092 - RNA, 19 nt, Homo sapiens
  misc_RNA (1)...(19): siRNA sense strand
ccaaugccagcacugauuu

SEQ ID NO: 1485093 - RNA, 19 nt, Homo sapiens
  misc_RNA (1)...(19): siRNA sense strand
ccucuucacucacacaauc

SEQ ID NO: 1485094 - RNA, 19 nt, Homo sapiens
  misc_RNA (1)...(19): siRNA sense strand
gggacgacaugcugcugaa

SEQ ID NO: 1485095 - RNA, 19 nt, Homo sapiens
  misc_RNA (1)...(19): siRNA sense strand
gaacuauaccuucuaucag

SEQ ID NO: 1485096 - RNA, 19 nt, Homo sapiens
  misc_RNA (1)...(19): siRNA sense strand
ccaugggcuuccuggcuua

SEQ ID NO: 1485097 - RNA, 19 nt, Homo sapiens
  misc_RNA (1)...(19): siRNA sense strand
cagcacauuugaggagauu

SEQ ID NO: 1485098 - RNA, 19 nt, Homo sapiens
  misc_RNA (1)...(19): siRNA sense strand
caacccagcagccucaaug

SEQ ID NO: 1485099 - RNA, 19 nt, Homo sapiens
  misc_RNA (1)...(19): siRNA sense strand
gcacauuugaggagauuca

SEQ ID NO: 1485100 - RNA, 19 nt, Homo sapiens
  misc_RNA (1)...(19): siRNA sense strand
ggacaugcccacauugacu

SEQ ID NO: 1485101 - RNA, 19 nt, Homo sapiens
  misc_RNA (1)...(19): siRNA sense strand
ggaaccauaauuuggaguu

SEQ ID NO: 1485102 - RNA, 19 nt, Homo sapiens
  misc_RNA (1)...(19): siRNA sense strand
acacggacccucagguuug

SEQ ID NO: 1485103 - RNA, 19 nt, Homo sapiens
  misc_RNA (1)...(19): siRNA sense strand
aauccgaucagcaucuuua

SEQ ID NO: 1485104 - RNA, 19 nt, Homo sapiens
  misc_RNA (1)...(19): siRNA sense strand
acaaacuuaucuucguuga

SEQ ID NO: 1485105 - RNA, 19 nt, Homo sapiens
  misc_RNA (1)...(19): siRNA sense strand
uaucuucguugaugcuguu

SEQ ID NO: 1485106 - RNA, 19 nt, Homo sapiens
  misc_RNA (1)...(19): siRNA sense strand
cugcagaaccgcugucuug

SEQ ID NO: 1485107 - RNA, 19 nt, Homo sapiens
  misc_RNA (1)...(19): siRNA sense strand
agaaccugcucaaguaugu

SEQ ID NO: 1485108 - RNA, 19 nt, Homo sapiens
  misc_RNA (1)...(19): siRNA sense strand
ggacuugaaggugguaaga

SEQ ID NO: 1485109 - RNA, 19 nt, Homo sapiens
  misc_RNA (1)...(19): siRNA sense strand
uugaggagauucaguucuu

SEQ ID NO: 1485110 - RNA, 19 nt, Homo sapiens
  misc_RNA (1)...(19): siRNA sense strand
ccaauccaaucauaguaca

SEQ ID NO: 1485111 - RNA, 19 nt, Homo sapiens
  misc_RNA (1)...(19): siRNA sense strand
agaacaaacucaggaccuu

SEQ ID NO: 1485112 - RNA, 19 nt, Homo sapiens
  misc_RNA (1)...(19): siRNA sense strand
cuuugacucugaaguugua

SEQ ID NO: 1485113 - RNA, 19 nt, Homo sapiens
  misc_RNA (1)...(19): siRNA sense strand
ggcagaaucccugugauga

SEQ ID NO: 1485114 - RNA, 19 nt, Homo sapiens
  misc_RNA (1)...(19): siRNA sense strand
cucacacaaucuucuauaa

SEQ ID NO: 1485115 - RNA, 19 nt, Homo sapiens
  misc_RNA (1)...(19): siRNA sense strand
ggcaaguucuaucauacug

SEQ ID NO: 1485116 - RNA, 19 nt, Homo sapiens
  misc_RNA (1)...(19): siRNA sense strand
guucccaacuucaccuuca

SEQ ID NO: 1485117 - RNA, 19 nt, Homo sapiens
  misc_RNA (1)...(19): siRNA sense strand
aacgcuggcugacuuacua

SEQ ID NO: 1485118 - RNA, 19 nt, Homo sapiens
  misc_RNA (1)...(19): siRNA sense strand
gucccuggcuacuauucua

SEQ ID NO: 1485119 - RNA, 19 nt, Homo sapiens
  misc_RNA (1)...(19): siRNA sense strand
cuaccgccguggcuucauu

SEQ ID NO: 1485120 - RNA, 19 nt, Homo sapiens
  misc_RNA (1)...(19): siRNA sense strand
uaauacccauggccgcuau

SEQ ID NO: 1485121 - RNA, 19 nt, Homo sapiens
  misc_RNA (1)...(19): siRNA sense strand
cgccguggcuucauucaca

SEQ ID NO: 1485122 - RNA, 19 nt, Homo sapiens
  misc_RNA (1)...(19): siRNA sense strand
ggaccaucuuccaauccaa

SEQ ID NO: 1485123 - RNA, 19 nt, Homo sapiens
  misc_RNA (1)...(19): siRNA sense strand
gagaaccugcucaaguaug

SEQ ID NO: 1485124 - RNA, 19 nt, Homo sapiens
  misc_RNA (1)...(19): siRNA sense strand
ucugaacuauaccuucuau

SEQ ID NO: 1485125 - RNA, 19 nt, Homo sapiens
  misc_RNA (1)...(19): siRNA sense strand
ugaagcaccgcaaagaguu

SEQ ID NO: 1485126 - RNA, 19 nt, Homo sapiens
  misc_RNA (1)...(19): siRNA sense strand
gaggggacaugcccacauu

SEQ ID NO: 1485127 - RNA, 19 nt, Homo sapiens
  misc_RNA (1)...(19): siRNA sense strand
cuuccuggcuuauuaugug

SEQ ID NO: 1485128 - RNA, 19 nt, Homo sapiens
  misc_RNA (1)...(19): siRNA sense strand
gagacccaguugcucugaa

SEQ ID NO: 1485129 - RNA, 19 nt, Homo sapiens
  misc_RNA (1)...(19): siRNA sense strand
gcagaaccgcugucuuguc

SEQ ID NO: 1485130 - RNA, 19 nt, Homo sapiens
  misc_RNA (1)...(19): siRNA sense strand
cgcuaugucuuggucauuu

SEQ ID NO: 1485131 - RNA, 19 nt, Homo sapiens
  misc_RNA (1)...(19): siRNA sense strand
gaaucccugugaugacaag

SEQ ID NO: 1485132 - RNA, 19 nt, Homo sapiens
  misc_RNA (1)...(19): siRNA sense strand
gguggagagcucuuucuga

SEQ ID NO: 1485133 - RNA, 19 nt, Homo sapiens
  misc_RNA (1)...(19): siRNA sense strand
caagaggcacaaagauauc

SEQ ID NO: 1485134 - RNA, 19 nt, Homo sapiens
  misc_RNA (1)...(19): siRNA sense strand
cagguuugaugaugauaag

SEQ ID NO: 1485135 - RNA, 19 nt, Homo sapiens
  misc_RNA (1)...(19): siRNA sense strand
ucuggacaguugcugauug

SEQ ID NO: 1485136 - RNA, 19 nt, Homo sapiens
  misc_RNA (1)...(19): siRNA sense strand
ugacaagaggcacaaagau

SEQ ID NO: 1485137 - RNA, 19 nt, Homo sapiens
  misc_RNA (1)...(19): siRNA sense strand
ccucagguuugaugaugau

SEQ ID NO: 1485138 - RNA, 19 nt, Homo sapiens
  misc_RNA (1)...(19): siRNA sense strand
ggacaaggauggcucauuc

SEQ ID NO: 1485139 - RNA, 19 nt, Homo sapiens
  misc_RNA (1)...(19): siRNA sense strand
ggaagaauacgccuugaua

SEQ ID NO: 1485140 - RNA, 19 nt, Homo sapiens
  misc_RNA (1)...(19): siRNA sense strand
gaagaaugcugaccuccaa

SEQ ID NO: 1485141 - RNA, 19 nt, Homo sapiens
  misc_RNA (1)...(19): siRNA sense strand
gaacaaagccauucaggau

SEQ ID NO: 1485142 - RNA, 19 nt, Homo sapiens
  misc_RNA (1)...(19): siRNA sense strand
gggcuaaccucaccaacuu

SEQ ID NO: 1485143 - RNA, 19 nt, Homo sapiens
  misc_RNA (1)...(19): siRNA sense strand
gcagaacggugaccaucaa

SEQ ID NO: 1485144 - RNA, 19 nt, Homo sapiens
  misc_RNA (1)...(19): siRNA sense strand
gaacgucgaccgaguuuca

SEQ ID NO: 1485145 - RNA, 19 nt, Homo sapiens
  misc_RNA (1)...(19): siRNA sense strand
ugaauaguguggaagguaa

SEQ ID NO: 1485146 - RNA, 19 nt, Homo sapiens
  misc_RNA (1)...(19): siRNA sense strand
guccugggcuccuaaauga

SEQ ID NO: 1485147 - RNA, 19 nt, Homo sapiens
  misc_RNA (1)...(19): siRNA sense strand
caacuauacaggaagaaua

SEQ ID NO: 1485148 - RNA, 19 nt, Homo sapiens
  misc_RNA (1)...(19): siRNA sense strand
gagaaauacuggugcaagu

SEQ ID NO: 1485149 - RNA, 19 nt, Homo sapiens
  misc_RNA (1)...(19): siRNA sense strand
gaagaauacgccuugauau

SEQ ID NO: 1485150 - RNA, 19 nt, Homo sapiens
  misc_RNA (1)...(19): siRNA sense strand
gcuccuaaaugacacuaaa

SEQ ID NO: 1485151 - RNA, 19 nt, Homo sapiens
  misc_RNA (1)...(19): siRNA sense strand
cacgaagagucccauauuu

SEQ ID NO: 1485152 - RNA, 19 nt, Homo sapiens
  misc_RNA (1)...(19): siRNA sense strand
gaucaagauuaucgaagga

SEQ ID NO: 1485153 - RNA, 19 nt, Homo sapiens
  misc_RNA (1)...(19): siRNA sense strand
cgaccgaguuucaaucaga

SEQ ID NO: 1485154 - RNA, 19 nt, Homo sapiens
  misc_RNA (1)...(19): siRNA sense strand
gaagaacgucgaccgaguu

SEQ ID NO: 1485155 - RNA, 19 nt, Homo sapiens
  misc_RNA (1)...(19): siRNA sense strand
caacugcccuuucaagacu

SEQ ID NO: 1485156 - RNA, 19 nt, Homo sapiens
  misc_RNA (1)...(19): siRNA sense strand
gggaugauuccaauaguaa

SEQ ID NO: 1485157 - RNA, 19 nt, Homo sapiens
  misc_RNA (1)...(19): siRNA sense strand
ggaggugaauaguguggaa

SEQ ID NO: 1485158 - RNA, 19 nt, Homo sapiens
  misc_RNA (1)...(19): siRNA sense strand
ccacgaagagucccauauu

SEQ ID NO: 1485159 - RNA, 19 nt, Homo sapiens
  misc_RNA (1)...(19): siRNA sense strand
gccgaggccuguccuuuga

SEQ ID NO: 1485160 - RNA, 19 nt, Homo sapiens
  misc_RNA (1)...(19): siRNA sense strand
gagaacagccggcuugucu

SEQ ID NO: 1485161 - RNA, 19 nt, Homo sapiens
  misc_RNA (1)...(19): siRNA sense strand
ccgaggaggugaauagugu

SEQ ID NO: 1485162 - RNA, 19 nt, Homo sapiens
  misc_RNA (1)...(19): siRNA sense strand
acacuaaagucuacacagu

SEQ ID NO: 1485163 - RNA, 19 nt, Homo sapiens
  misc_RNA (1)...(19): siRNA sense strand
gcaaggccuucgugaacug

SEQ ID NO: 1485164 - RNA, 19 nt, Homo sapiens
  misc_RNA (1)...(19): siRNA sense strand
ucacaggccugaggaagga

SEQ ID NO: 1485165 - RNA, 19 nt, Homo sapiens
  misc_RNA (1)...(19): siRNA sense strand
gaacggugaccaucaacug

SEQ ID NO: 1485166 - RNA, 19 nt, Homo sapiens
  misc_RNA (1)...(19): siRNA sense strand
guacugguguggagugaag

SEQ ID NO: 1485167 - RNA, 19 nt, Homo sapiens
  misc_RNA (1)...(19): siRNA sense strand
agcccgagcugguuuauga

SEQ ID NO: 1485168 - RNA, 19 nt, Homo sapiens
  misc_RNA (1)...(19): siRNA sense strand
gaccgaguuucaaucagaa

SEQ ID NO: 1485169 - RNA, 19 nt, Homo sapiens
  misc_RNA (1)...(19): siRNA sense strand
gcaaaagcaucaaguacug

SEQ ID NO: 1485170 - RNA, 19 nt, Homo sapiens
  misc_RNA (1)...(19): siRNA sense strand
ccagccaucuccacgaaga

SEQ ID NO: 1485171 - RNA, 19 nt, Homo sapiens
  misc_RNA (1)...(19): siRNA sense strand
ccguggagaucaagauuau

SEQ ID NO: 1485172 - RNA, 19 nt, Homo sapiens
  misc_RNA (1)...(19): siRNA sense strand
ggcaaacguggccaaauuu

SEQ ID NO: 1485173 - RNA, 19 nt, Homo sapiens
  misc_RNA (1)...(19): siRNA sense strand
gagauggccuacaaagacu

SEQ ID NO: 1485174 - RNA, 19 nt, Homo sapiens
  misc_RNA (1)...(19): siRNA sense strand
ccacugagagcaccacaga

SEQ ID NO: 1485175 - RNA, 19 nt, Homo sapiens
  misc_RNA (1)...(19): siRNA sense strand
cgagaacuccagggaauuu

SEQ ID NO: 1485176 - RNA, 19 nt, Homo sapiens
  misc_RNA (1)...(19): siRNA sense strand
caugcaaauucuccucgua

SEQ ID NO: 1485177 - RNA, 19 nt, Homo sapiens
  misc_RNA (1)...(19): siRNA sense strand
gcaaacguggccaaauuuc

SEQ ID NO: 1485178 - RNA, 19 nt, Homo sapiens
  misc_RNA (1)...(19): siRNA sense strand
ggagaucaagauuaucgaa

SEQ ID NO: 1485179 - RNA, 19 nt, Homo sapiens
  misc_RNA (1)...(19): siRNA sense strand
gaccaaagaacccaagaag

SEQ ID NO: 1485180 - RNA, 19 nt, Homo sapiens
  misc_RNA (1)...(19): siRNA sense strand
cuacgucuccagcaaauau

SEQ ID NO: 1485181 - RNA, 19 nt, Homo sapiens
  misc_RNA (1)...(19): siRNA sense strand
aagccgagauggccuacaa

SEQ ID NO: 1485182 - RNA, 19 nt, Homo sapiens
  misc_RNA (1)...(19): siRNA sense strand
gaguuucaaucagaagcua

SEQ ID NO: 1485183 - RNA, 19 nt, Homo sapiens
  misc_RNA (1)...(19): siRNA sense strand
ucaccaacuucccggagaa

SEQ ID NO: 1485184 - RNA, 19 nt, Homo sapiens
  misc_RNA (1)...(19): siRNA sense strand
cgaagagucccauauuugg

SEQ ID NO: 1485185 - RNA, 19 nt, Homo sapiens
  misc_RNA (1)...(19): siRNA sense strand
gcuagagguggcugcauaa

SEQ ID NO: 1485186 - RNA, 19 nt, Homo sapiens
  misc_RNA (1)...(19): siRNA sense strand
cgagauggccuacaaagac

SEQ ID NO: 1485187 - RNA, 19 nt, Homo sapiens
  misc_RNA (1)...(19): siRNA sense strand
gcaccacagagaccaaaga

SEQ ID NO: 1485188 - RNA, 19 nt, Homo sapiens
  misc_RNA (1)...(19): siRNA sense strand
cggcagcucugaggaacaa

SEQ ID NO: 1485189 - RNA, 19 nt, Homo sapiens
  misc_RNA (1)...(19): siRNA sense strand
ccacuucuauggagagacu

SEQ ID NO: 1485190 - RNA, 19 nt, Homo sapiens
  misc_RNA (1)...(19): siRNA sense strand
gcccugagguggcaaacgu

SEQ ID NO: 1485191 - RNA, 19 nt, Homo sapiens
  misc_RNA (1)...(19): siRNA sense strand
uggcaacucuucgucaaug

SEQ ID NO: 1485192 - RNA, 19 nt, Homo sapiens
  misc_RNA (1)...(19): siRNA sense strand
gaagagucccauauuuggu

SEQ ID NO: 1485193 - RNA, 19 nt, Homo sapiens
  misc_RNA (1)...(19): siRNA sense strand
ggggaugauuccaauagua

SEQ ID NO: 1485194 - RNA, 19 nt, Homo sapiens
  misc_RNA (1)...(19): siRNA sense strand
gguggcagauacaagagau

SEQ ID NO: 1485195 - RNA, 19 nt, Homo sapiens
  misc_RNA (1)...(19): siRNA sense strand
ggcaacucuucgucaauga

SEQ ID NO: 1485196 - RNA, 19 nt, Homo sapiens
  misc_RNA (1)...(19): siRNA sense strand
gugaauaguguggaaggua

SEQ ID NO: 1485197 - RNA, 19 nt, Homo sapiens
  misc_RNA (1)...(19): siRNA sense strand
gcaaauucuccucguacga

SEQ ID NO: 1485198 - RNA, 19 nt, Homo sapiens
  misc_RNA (1)...(19): siRNA sense strand
gcaacggcaccuucacugu

SEQ ID NO: 1485199 - RNA, 19 nt, Homo sapiens
  misc_RNA (1)...(19): siRNA sense strand
aaugaggaguccacgauuc

SEQ ID NO: 1485200 - RNA, 19 nt, Homo sapiens
  misc_RNA (1)...(19): siRNA sense strand
acgaagagucccauauuug

SEQ ID NO: 1485201 - RNA, 19 nt, Homo sapiens
  misc_RNA (1)...(19): siRNA sense strand
aaaugacacuaaagucuac

SEQ ID NO: 1485202 - RNA, 19 nt, Homo sapiens
  misc_RNA (1)...(19): siRNA sense strand
cuaaaugacacuaaagucu

SEQ ID NO: 1485203 - RNA, 19 nt, Homo sapiens
  misc_RNA (1)...(19): siRNA sense strand
gguccugggcuccuaaaug

SEQ ID NO: 1485204 - RNA, 19 nt, Homo sapiens
  misc_RNA (1)...(19): siRNA sense strand
ccggagaacggcacauuug

SEQ ID NO: 1485205 - RNA, 19 nt, Homo sapiens
  misc_RNA (1)...(19): siRNA sense strand
gcagauacaagagaucaag

SEQ ID NO: 1485206 - RNA, 19 nt, Homo sapiens
  misc_RNA (1)...(19): siRNA sense strand
gcagggccacuucuaugga

SEQ ID NO: 1485207 - RNA, 19 nt, Homo sapiens
  misc_RNA (1)...(19): siRNA sense strand
cagcaaggccuucgugaac

SEQ ID NO: 1485208 - RNA, 19 nt, Homo sapiens
  misc_RNA (1)...(19): siRNA sense strand
ucacuuuccaugcaaauuc

SEQ ID NO: 1485209 - RNA, 19 nt, Homo sapiens
  misc_RNA (1)...(19): siRNA sense strand
agcuagagguggcugcaua

SEQ ID NO: 1485210 - RNA, 19 nt, Homo sapiens
  misc_RNA (1)...(19): siRNA sense strand
acaagcagauaggccugua

SEQ ID NO: 1485211 - RNA, 19 nt, Homo sapiens
  misc_RNA (1)...(19): siRNA sense strand
cgaggccuguccuuugaug

SEQ ID NO: 1485212 - RNA, 19 nt, Homo sapiens
  misc_RNA (1)...(19): siRNA sense strand
aaucccaacuauacaggaa

SEQ ID NO: 1485213 - RNA, 19 nt, Homo sapiens
  misc_RNA (1)...(19): siRNA sense strand
caaggaggaagccgagaug

SEQ ID NO: 1485214 - RNA, 19 nt, Homo sapiens
  misc_RNA (1)...(19): siRNA sense strand
caagauuaucgaaggagaa

SEQ ID NO: 1485215 - RNA, 19 nt, Homo sapiens
  misc_RNA (1)...(19): siRNA sense strand
aaacguggccaaauuucug

SEQ ID NO: 1485216 - RNA, 19 nt, Homo sapiens
  misc_RNA (1)...(19): siRNA sense strand
gaccaucaacugcccuuuc

SEQ ID NO: 1485217 - RNA, 19 nt, Homo sapiens
  misc_RNA (1)...(19): siRNA sense strand
gaaaaggcgguggcagaua

SEQ ID NO: 1485218 - RNA, 19 nt, Homo sapiens
  misc_RNA (1)...(19): siRNA sense strand
ucaaugaggaguccacgau

SEQ ID NO: 1485219 - RNA, 19 nt, Homo sapiens
  misc_RNA (1)...(19): siRNA sense strand
gucaucgacuccagugguu

SEQ ID NO: 1485220 - RNA, 19 nt, Homo sapiens
  misc_RNA (1)...(19): siRNA sense strand
caguguccaucacgugcua

SEQ ID NO: 1485221 - RNA, 19 nt, Homo sapiens
  misc_RNA (1)...(19): siRNA sense strand
gggcuacgucuccagcaaa

SEQ ID NO: 1485222 - RNA, 19 nt, Homo sapiens
  misc_RNA (1)...(19): siRNA sense strand
caaugaggaguccacgauu

SEQ ID NO: 1485223 - RNA, 19 nt, Homo sapiens
  misc_RNA (1)...(19): siRNA sense strand
caagguccccugucacuuu

SEQ ID NO: 1485224 - RNA, 19 nt, Homo sapiens
  misc_RNA (1)...(19): siRNA sense strand
ggcuacgucuccagcaaau

SEQ ID NO: 1485225 - RNA, 19 nt, Homo sapiens
  misc_RNA (1)...(19): siRNA sense strand
gaagcuacaggacagacau

SEQ ID NO: 1485226 - RNA, 19 nt, Homo sapiens
  misc_RNA (1)...(19): siRNA sense strand
gaaugcugaccuccaagug

SEQ ID NO: 1485227 - RNA, 19 nt, Homo sapiens
  misc_RNA (1)...(19): siRNA sense strand
gagcaccacagagaccaaa

SEQ ID NO: 1485228 - RNA, 19 nt, Homo sapiens
  misc_RNA (1)...(19): siRNA sense strand
ugucagacuucgagaacuc

SEQ ID NO: 1485229 - RNA, 19 nt, Homo sapiens
  misc_RNA (1)...(19): siRNA sense strand
gcaugucagacuucgagaa

SEQ ID NO: 1485230 - RNA, 19 nt, Homo sapiens
  misc_RNA (1)...(19): siRNA sense strand
ccagcaaggccuucgugaa

SEQ ID NO: 1485231 - RNA, 19 nt, Homo sapiens
  misc_RNA (1)...(19): siRNA sense strand
ccgagcugguuuaugaaga

SEQ ID NO: 1485232 - RNA, 19 nt, Homo sapiens
  misc_RNA (1)...(19): siRNA sense strand
caucaacugcccuuucaag

SEQ ID NO: 1485233 - RNA, 19 nt, Homo sapiens
  misc_RNA (1)...(19): siRNA sense strand
acugagagcaccacagaga

SEQ ID NO: 1485234 - RNA, 19 nt, Homo sapiens
  misc_RNA (1)...(19): siRNA sense strand
ggaaaagaagaguuuguug

SEQ ID NO: 1485235 - RNA, 19 nt, Homo sapiens
  misc_RNA (1)...(19): siRNA sense strand
gaugagaaggugcuagacu

SEQ ID NO: 1485236 - RNA, 19 nt, Homo sapiens
  misc_RNA (1)...(19): siRNA sense strand
ccuggcaacucuucgucaa

SEQ ID NO: 1485237 - RNA, 19 nt, Homo sapiens
  misc_RNA (1)...(19): siRNA sense strand
ggccuguccuuugauguca

SEQ ID NO: 1485238 - RNA, 19 nt, Homo sapiens
  misc_RNA (1)...(19): siRNA sense strand
aggagaagcuguucacuua

SEQ ID NO: 1485239 - RNA, 19 nt, Homo sapiens
  misc_RNA (1)...(19): siRNA sense strand
ggaccagucugucauuaaa

SEQ ID NO: 1485240 - RNA, 19 nt, Homo sapiens
  misc_RNA (1)...(19): siRNA sense strand
caaaguaacugugggagaa

SEQ ID NO: 1485241 - RNA, 19 nt, Homo sapiens
  misc_RNA (1)...(19): siRNA sense strand
ccaaagccgucucugagua

SEQ ID NO: 1485242 - RNA, 19 nt, Homo sapiens
  misc_RNA (1)...(19): siRNA sense strand
gcaaaugucacguuacuca

SEQ ID NO: 1485243 - RNA, 19 nt, Homo sapiens
  misc_RNA (1)...(19): siRNA sense strand
ucacggcccugcagaacua

SEQ ID NO: 1485244 - RNA, 19 nt, Homo sapiens
  misc_RNA (1)...(19): siRNA sense strand
gaccugcacucccgaaaga

SEQ ID NO: 1485245 - RNA, 19 nt, Homo sapiens
  misc_RNA (1)...(19): siRNA sense strand
ccaaaucggugacuucucu

SEQ ID NO: 1485246 - RNA, 19 nt, Homo sapiens
  misc_RNA (1)...(19): siRNA sense strand
ugacuucucuaaugaugaa

SEQ ID NO: 1485247 - RNA, 19 nt, Homo sapiens
  misc_RNA (1)...(19): siRNA sense strand
cagaagagccaaaucgaaa

SEQ ID NO: 1485248 - RNA, 19 nt, Homo sapiens
  misc_RNA (1)...(19): siRNA sense strand
guacgaagauaucuaugag

SEQ ID NO: 1485249 - RNA, 19 nt, Homo sapiens
  misc_RNA (1)...(19): siRNA sense strand
ucaaaggcauggacaagau

SEQ ID NO: 1485250 - RNA, 19 nt, Homo sapiens
  misc_RNA (1)...(19): siRNA sense strand
gaagacguccagucaguug

SEQ ID NO: 1485251 - RNA, 19 nt, Homo sapiens
  misc_RNA (1)...(19): siRNA sense strand
ggagaaacacaggaaauga

SEQ ID NO: 1485252 - RNA, 19 nt, Homo sapiens
  misc_RNA (1)...(19): siRNA sense strand
ccaccaagcaacuuuguaa

SEQ ID NO: 1485253 - RNA, 19 nt, Homo sapiens
  misc_RNA (1)...(19): siRNA sense strand
ucuggaagcuuguggagaa

SEQ ID NO: 1485254 - RNA, 19 nt, Homo sapiens
  misc_RNA (1)...(19): siRNA sense strand
ggaagcuuguggagaaugu

SEQ ID NO: 1485255 - RNA, 19 nt, Homo sapiens
  misc_RNA (1)...(19): siRNA sense strand
ggaaggcccagguaguaaa

SEQ ID NO: 1485256 - RNA, 19 nt, Homo sapiens
  misc_RNA (1)...(19): siRNA sense strand
caaguacgaagauaucuau

SEQ ID NO: 1485257 - RNA, 19 nt, Homo sapiens
  misc_RNA (1)...(19): siRNA sense strand
cagcaaaugucacguuacu

SEQ ID NO: 1485258 - RNA, 19 nt, Homo sapiens
  misc_RNA (1)...(19): siRNA sense strand
ugaacaacaccaccacuaa

SEQ ID NO: 1485259 - RNA, 19 nt, Homo sapiens
  misc_RNA (1)...(19): siRNA sense strand
gcgcaaagcagcaaauguc

SEQ ID NO: 1485260 - RNA, 19 nt, Homo sapiens
  misc_RNA (1)...(19): siRNA sense strand
ggugacuucucuaaugaug

SEQ ID NO: 1485261 - RNA, 19 nt, Homo sapiens
  misc_RNA (1)...(19): siRNA sense strand
gaacaacaccaccacuaac

SEQ ID NO: 1485262 - RNA, 19 nt, Homo sapiens
  misc_RNA (1)...(19): siRNA sense strand
gagaagcuguucacuuagc

SEQ ID NO: 1485263 - RNA, 19 nt, Homo sapiens
  misc_RNA (1)...(19): siRNA sense strand
ucacuuagcuagggauuuu

SEQ ID NO: 1485264 - RNA, 19 nt, Homo sapiens
  misc_RNA (1)...(19): siRNA sense strand
ucggugacuucucuaauga

SEQ ID NO: 1485265 - RNA, 19 nt, Homo sapiens
  misc_RNA (1)...(19): siRNA sense strand
gaggagaaacacaggaaau

SEQ ID NO: 1485266 - RNA, 19 nt, Homo sapiens
  misc_RNA (1)...(19): siRNA sense strand
gggagaucuuugcgagaaa

SEQ ID NO: 1485267 - RNA, 19 nt, Homo sapiens
  misc_RNA (1)...(19): siRNA sense strand
uggagaaugucaaguacga

SEQ ID NO: 1485268 - RNA, 19 nt, Homo sapiens
  misc_RNA (1)...(19): siRNA sense strand
caaagccgucucugaguau

SEQ ID NO: 1485269 - RNA, 19 nt, Homo sapiens
  misc_RNA (1)...(19): siRNA sense strand
ggaggcaugucugucaaca

SEQ ID NO: 1485270 - RNA, 19 nt, Homo sapiens
  misc_RNA (1)...(19): siRNA sense strand
uaacagcggcaugaaucua

SEQ ID NO: 1485271 - RNA, 19 nt, Homo sapiens
  misc_RNA (1)...(19): siRNA sense strand
gggaaggcccagguaguaa

SEQ ID NO: 1485272 - RNA, 19 nt, Homo sapiens
  misc_RNA (1)...(19): siRNA sense strand
caguugaagaugccaauaa

SEQ ID NO: 1485273 - RNA, 19 nt, Homo sapiens
  misc_RNA (1)...(19): siRNA sense strand
gaaugucaaguacgaagau

SEQ ID NO: 1485274 - RNA, 19 nt, Homo sapiens
  misc_RNA (1)...(19): siRNA sense strand
ggaggagaaacacaggaaa

SEQ ID NO: 1485275 - RNA, 19 nt, Homo sapiens
  misc_RNA (1)...(19): siRNA sense strand
agcagcaaaugucacguua

SEQ ID NO: 1485276 - RNA, 19 nt, Homo sapiens
  misc_RNA (1)...(19): siRNA sense strand
ggaagacguccagucaguu

SEQ ID NO: 1485277 - RNA, 19 nt, Homo sapiens
  misc_RNA (1)...(19): siRNA sense strand
guuugucucugcucaguuc

SEQ ID NO: 1485278 - RNA, 19 nt, Homo sapiens
  misc_RNA (1)...(19): siRNA sense strand
gccaauaacagcggcauga

SEQ ID NO: 1485279 - RNA, 19 nt, Homo sapiens
  misc_RNA (1)...(19): siRNA sense strand
caauaacagcggcaugaau

SEQ ID NO: 1485280 - RNA, 19 nt, Homo sapiens
  misc_RNA (1)...(19): siRNA sense strand
ucagaagagccaaaucgaa

SEQ ID NO: 1485281 - RNA, 19 nt, Homo sapiens
  misc_RNA (1)...(19): siRNA sense strand
ucaaguacgaagauaucua

SEQ ID NO: 1485282 - RNA, 19 nt, Homo sapiens
  misc_RNA (1)...(19): siRNA sense strand
ccgaaagaauaugcuguug

SEQ ID NO: 1485283 - RNA, 19 nt, Homo sapiens
  misc_RNA (1)...(19): siRNA sense strand
cgaaguacaaaguaacugu

SEQ ID NO: 1485284 - RNA, 19 nt, Homo sapiens
  misc_RNA (1)...(19): siRNA sense strand
ggacaccgauagggaacag

SEQ ID NO: 1485285 - RNA, 19 nt, Homo sapiens
  misc_RNA (1)...(19): siRNA sense strand
aauaacagcggcaugaauc

SEQ ID NO: 1485286 - RNA, 19 nt, Homo sapiens
  misc_RNA (1)...(19): siRNA sense strand
gcgacaaggaggagaaaca

SEQ ID NO: 1485287 - RNA, 19 nt, Homo sapiens
  misc_RNA (1)...(19): siRNA sense strand
ggggagaucuuugcgagaa

SEQ ID NO: 1485288 - RNA, 19 nt, Homo sapiens
  misc_RNA (1)...(19): siRNA sense strand
caaaggcauggacaagaug

SEQ ID NO: 1485289 - RNA, 19 nt, Homo sapiens
  misc_RNA (1)...(19): siRNA sense strand
gcaggaccggacaccgaua

SEQ ID NO: 1485290 - RNA, 19 nt, Homo sapiens
  misc_RNA (1)...(19): siRNA sense strand
ggaaggagaagcuguucac

SEQ ID NO: 1485291 - RNA, 19 nt, Homo sapiens
  misc_RNA (1)...(19): siRNA sense strand
acagcggcaugaaucuauu

SEQ ID NO: 1485292 - RNA, 19 nt, Homo sapiens
  misc_RNA (1)...(19): siRNA sense strand
aaugucaaguacgaagaua

SEQ ID NO: 1485293 - RNA, 19 nt, Homo sapiens
  misc_RNA (1)...(19): siRNA sense strand
cggacgugcugcugcauuc

SEQ ID NO: 1485294 - RNA, 19 nt, Homo sapiens
  misc_RNA (1)...(19): siRNA sense strand
caacggcagcggcaagaag

SEQ ID NO: 1485295 - RNA, 19 nt, Homo sapiens
  misc_RNA (1)...(19): siRNA sense strand
gguggaaggagaagcuguu

SEQ ID NO: 1485296 - RNA, 19 nt, Homo sapiens
  misc_RNA (1)...(19): siRNA sense strand
ccaauaacagcggcaugaa

SEQ ID NO: 1485297 - RNA, 19 nt, Homo sapiens
  misc_RNA (1)...(19): siRNA sense strand
ggagaagcuguucacuuag

SEQ ID NO: 1485298 - RNA, 19 nt, Homo sapiens
  misc_RNA (1)...(19): siRNA sense strand
gcucaaaggcauggacaag

SEQ ID NO: 1485299 - RNA, 19 nt, Homo sapiens
  misc_RNA (1)...(19): siRNA sense strand
uuggaccagucugucauua

SEQ ID NO: 1485300 - RNA, 19 nt, Homo sapiens
  misc_RNA (1)...(19): siRNA sense strand
agagcugccucacgcacuu

SEQ ID NO: 1485301 - RNA, 19 nt, Homo sapiens
  misc_RNA (1)...(19): siRNA sense strand
aaagccgucucugaguauu

SEQ ID NO: 1485302 - RNA, 19 nt, Homo sapiens
  misc_RNA (1)...(19): siRNA sense strand
caccaagcaacuuuguaaa

SEQ ID NO: 1485303 - RNA, 19 nt, Homo sapiens
  misc_RNA (1)...(19): siRNA sense strand
cugcacucccgaaagaaua

SEQ ID NO: 1485304 - RNA, 19 nt, Homo sapiens
  misc_RNA (1)...(19): siRNA sense strand
cggcggaguccucagaaga

SEQ ID NO: 1485305 - RNA, 19 nt, Homo sapiens
  misc_RNA (1)...(19): siRNA sense strand
ggagaaugucaaguacgaa

SEQ ID NO: 1485306 - RNA, 19 nt, Homo sapiens
  misc_RNA (1)...(19): siRNA sense strand
ucaccgaggcgcucaaagg

SEQ ID NO: 1485307 - RNA, 19 nt, Homo sapiens
  misc_RNA (1)...(19): siRNA sense strand
aaggagaagcuguucacuu

SEQ ID NO: 1485308 - RNA, 19 nt, Homo sapiens
  misc_RNA (1)...(19): siRNA sense strand
aguacgaagauaucuauga

SEQ ID NO: 1485309 - RNA, 19 nt, Homo sapiens
  misc_RNA (1)...(19): siRNA sense strand
gguaguggcucaaaccuua

SEQ ID NO: 1485310 - RNA, 19 nt, Homo sapiens
  misc_RNA (1)...(19): siRNA sense strand
ugagaaaccuuaugaaugu

SEQ ID NO: 1485311 - RNA, 19 nt, Homo sapiens
  misc_RNA (1)...(19): siRNA sense strand
gaaagacccuaugaaugua

SEQ ID NO: 1485312 - RNA, 19 nt, Homo sapiens
  misc_RNA (1)...(19): siRNA sense strand
gggaagaccuuuaguagug

SEQ ID NO: 1485313 - RNA, 19 nt, Homo sapiens
  misc_RNA (1)...(19): siRNA sense strand
ugagaaaccuuauguaugu

SEQ ID NO: 1485314 - RNA, 19 nt, Homo sapiens
  misc_RNA (1)...(19): siRNA sense strand
caacaucacagaauucaua

SEQ ID NO: 1485315 - RNA, 19 nt, Homo sapiens
  misc_RNA (1)...(19): siRNA sense strand
caacaucggcggauucaua

SEQ ID NO: 1485316 - RNA, 19 nt, Homo sapiens
  misc_RNA (1)...(19): siRNA sense strand
agagaaaccuuaugaaugu

SEQ ID NO: 1485317 - RNA, 19 nt, Homo sapiens
  misc_RNA (1)...(19): siRNA sense strand
gagaaacccuaugaaugua

SEQ ID NO: 1485318 - RNA, 19 nt, Homo sapiens
  misc_RNA (1)...(19): siRNA sense strand
gugagaaacuuuaugaaug

SEQ ID NO: 1485319 - RNA, 19 nt, Homo sapiens
  misc_RNA (1)...(19): siRNA sense strand
gagaaacccuaugaaugua

SEQ ID NO: 1485320 - RNA, 19 nt, Homo sapiens
  misc_RNA (1)...(19): siRNA sense strand
guucaaaccuuacucaaca

SEQ ID NO: 1485321 - RNA, 19 nt, Homo sapiens
  misc_RNA (1)...(19): siRNA sense strand
gagagaaaccuuaugaaug

SEQ ID NO: 1485322 - RNA, 19 nt, Homo sapiens
  misc_RNA (1)...(19): siRNA sense strand
ugaaagacccuaugaaugu

SEQ ID NO: 1485323 - RNA, 19 nt, Homo sapiens
  misc_RNA (1)...(19): siRNA sense strand
ugagaaaccuuaugaaugc

SEQ ID NO: 1485324 - RNA, 19 nt, Homo sapiens
  misc_RNA (1)...(19): siRNA sense strand
guucagaccuuacucaaca

SEQ ID NO: 1485325 - RNA, 19 nt, Homo sapiens
  misc_RNA (1)...(19): siRNA sense strand
ugagaaaccuuaugaaugc

SEQ ID NO: 1485326 - RNA, 19 nt, Homo sapiens
  misc_RNA (1)...(19): siRNA sense strand
cgacaucagcgaauucaua

SEQ ID NO: 1485327 - RNA, 19 nt, Homo sapiens
  misc_RNA (1)...(19): siRNA sense strand
ggagagaaaccuuaugaau

SEQ ID NO: 1485328 - RNA, 19 nt, Homo sapiens
  misc_RNA (1)...(19): siRNA sense strand
gagaaacuccuugaaugua

SEQ ID NO: 1485329 - RNA, 19 nt, Homo sapiens
  misc_RNA (1)...(19): siRNA sense strand
gagaaacccuaugagugua

SEQ ID NO: 1485330 - RNA, 19 nt, Homo sapiens
  misc_RNA (1)...(19): siRNA sense strand
gagaaacccuaugagugua

SEQ ID NO: 1485331 - RNA, 19 nt, Homo sapiens
  misc_RNA (1)...(19): siRNA sense strand
agaaacuccuugaauguaa

SEQ ID NO: 1485332 - RNA, 19 nt, Homo sapiens
  misc_RNA (1)...(19): siRNA sense strand
ggugagaaaccauauauau

SEQ ID NO: 1485333 - RNA, 19 nt, Homo sapiens
  misc_RNA (1)...(19): siRNA sense strand
cgacaucaaagaauucaua

SEQ ID NO: 1485334 - RNA, 19 nt, Homo sapiens
  misc_RNA (1)...(19): siRNA sense strand
ugagaagccuuaugagugu

SEQ ID NO: 1485335 - RNA, 19 nt, Homo sapiens
  misc_RNA (1)...(19): siRNA sense strand
ugagaaacccuaugaaugu

SEQ ID NO: 1485336 - RNA, 19 nt, Homo sapiens
  misc_RNA (1)...(19): siRNA sense strand
ugagaaacccuaugaaugu

SEQ ID NO: 1485337 - RNA, 19 nt, Homo sapiens
  misc_RNA (1)...(19): siRNA sense strand
cugaagacaugcccacuuu

SEQ ID NO: 1485338 - RNA, 19 nt, Homo sapiens
  misc_RNA (1)...(19): siRNA sense strand
gaagacaugcccacuuuca

SEQ ID NO: 1485339 - RNA, 19 nt, Homo sapiens
  misc_RNA (1)...(19): siRNA sense strand
gaaaccuuaugaaugcaaa

SEQ ID NO: 1485340 - RNA, 19 nt, Homo sapiens
  misc_RNA (1)...(19): siRNA sense strand
caacaccagcuaauccaua

SEQ ID NO: 1485341 - RNA, 19 nt, Homo sapiens
  misc_RNA (1)...(19): siRNA sense strand
gaaaccuuaugaaugcaaa

SEQ ID NO: 1485342 - RNA, 19 nt, Homo sapiens
  misc_RNA (1)...(19): siRNA sense strand
gagaaaccuuaugaaugua

SEQ ID NO: 1485343 - RNA, 19 nt, Homo sapiens
  misc_RNA (1)...(19): siRNA sense strand
gagaaaccuuaugaaugua

SEQ ID NO: 1485344 - RNA, 19 nt, Homo sapiens
  misc_RNA (1)...(19): siRNA sense strand
gagaaaccuuauguaugua

SEQ ID NO: 1485345 - RNA, 19 nt, Homo sapiens
  misc_RNA (1)...(19): siRNA sense strand
gaugagaaacuccuugaau

SEQ ID NO: 1485346 - RNA, 19 nt, Homo sapiens
  misc_RNA (1)...(19): siRNA sense strand
gaauguauagauuguggua

SEQ ID NO: 1485347 - RNA, 19 nt, Homo sapiens
  misc_RNA (1)...(19): siRNA sense strand
ggugagaaaccuuauguau

SEQ ID NO: 1485348 - RNA, 19 nt, Homo sapiens
  misc_RNA (1)...(19): siRNA sense strand
ugggagggauucagaguuu

SEQ ID NO: 1485349 - RNA, 19 nt, Homo sapiens
  misc_RNA (1)...(19): siRNA sense strand
gggaaggccuuugguagug

SEQ ID NO: 1485350 - RNA, 19 nt, Homo sapiens
  misc_RNA (1)...(19): siRNA sense strand
ggugaaagacccuaugaau

SEQ ID NO: 1485351 - RNA, 19 nt, Homo sapiens
  misc_RNA (1)...(19): siRNA sense strand
gggaaggccuuugguagug

SEQ ID NO: 1485352 - RNA, 19 nt, Homo sapiens
  misc_RNA (1)...(19): siRNA sense strand
gaaugugggaagaccuuua

SEQ ID NO: 1485353 - RNA, 19 nt, Homo sapiens
  misc_RNA (1)...(19): siRNA sense strand
gaaugugggaaguccuuua

SEQ ID NO: 1485354 - RNA, 19 nt, Homo sapiens
  misc_RNA (1)...(19): siRNA sense strand
ugagaaacccuaugagugu

SEQ ID NO: 1485355 - RNA, 19 nt, Homo sapiens
  misc_RNA (1)...(19): siRNA sense strand
ugagaaacccuaugagugu

SEQ ID NO: 1485356 - RNA, 19 nt, Homo sapiens
  misc_RNA (1)...(19): siRNA sense strand
gguaaggccuuuaguuuug

SEQ ID NO: 1485357 - RNA, 19 nt, Homo sapiens
  misc_RNA (1)...(19): siRNA sense strand
gugagaaaccuuaugaaug

SEQ ID NO: 1485358 - RNA, 19 nt, Homo sapiens
  misc_RNA (1)...(19): siRNA sense strand
gugguaaggccuuuaguuu

SEQ ID NO: 1485359 - RNA, 19 nt, Homo sapiens
  misc_RNA (1)...(19): siRNA sense strand
gugagaaaccuuaugaaug

SEQ ID NO: 1485360 - RNA, 19 nt, Homo sapiens
  misc_RNA (1)...(19): siRNA sense strand
gugagaaaccuuaugaaug

SEQ ID NO: 1485361 - RNA, 19 nt, Homo sapiens
  misc_RNA (1)...(19): siRNA sense strand
cagcaucagagaauucaua

SEQ ID NO: 1485362 - RNA, 19 nt, Homo sapiens
  misc_RNA (1)...(19): siRNA sense strand
ggugagaaacuuuaugaau

SEQ ID NO: 1485363 - RNA, 19 nt, Homo sapiens
  misc_RNA (1)...(19): siRNA sense strand
cagcaucagagaauucaua

SEQ ID NO: 1485364 - RNA, 19 nt, Homo sapiens
  misc_RNA (1)...(19): siRNA sense strand
gauauuuacuccugaagac

SEQ ID NO: 1485365 - RNA, 19 nt, Homo sapiens
  misc_RNA (1)...(19): siRNA sense strand
gaaacuccuugaauguaag

SEQ ID NO: 1485366 - RNA, 19 nt, Homo sapiens
  misc_RNA (1)...(19): siRNA sense strand
aaaccuugcuuaccaucaa

SEQ ID NO: 1485367 - RNA, 19 nt, Homo sapiens
  misc_RNA (1)...(19): siRNA sense strand
gaaacccuaugaauguaag

SEQ ID NO: 1485368 - RNA, 19 nt, Homo sapiens
  misc_RNA (1)...(19): siRNA sense strand
gcuaauccauacuggugaa

SEQ ID NO: 1485369 - RNA, 19 nt, Homo sapiens
  misc_RNA (1)...(19): siRNA sense strand
gaaacccuaugaauguaag

SEQ ID NO: 1485370 - RNA, 19 nt, Homo sapiens
  misc_RNA (1)...(19): siRNA sense strand
caucaaagaauucauacug

SEQ ID NO: 1485371 - RNA, 19 nt, Homo sapiens
  misc_RNA (1)...(19): siRNA sense strand
gugagaaacccuaugaaug

SEQ ID NO: 1485372 - RNA, 19 nt, Homo sapiens
  misc_RNA (1)...(19): siRNA sense strand
aauacacacuggugagaaa

SEQ ID NO: 1485373 - RNA, 19 nt, Homo sapiens
  misc_RNA (1)...(19): siRNA sense strand
gugagaaacccuaugaaug

SEQ ID NO: 1485374 - RNA, 19 nt, Homo sapiens
  misc_RNA (1)...(19): siRNA sense strand
caucaaagaauucauacug

SEQ ID NO: 1485375 - RNA, 19 nt, Homo sapiens
  misc_RNA (1)...(19): siRNA sense strand
ggugagaaaccuuaugaau

SEQ ID NO: 1485376 - RNA, 19 nt, Homo sapiens
  misc_RNA (1)...(19): siRNA sense strand
ggugagaaaccuuaugaau

SEQ ID NO: 1485377 - RNA, 19 nt, Homo sapiens
  misc_RNA (1)...(19): siRNA sense strand
ggugagaaaccuuaugaau

SEQ ID NO: 1485378 - RNA, 19 nt, Homo sapiens
  misc_RNA (1)...(19): siRNA sense strand
gacaugcccacuuucagua

SEQ ID NO: 1485379 - RNA, 19 nt, Homo sapiens
  misc_RNA (1)...(19): siRNA sense strand
gugaaagacccuaugaaug

SEQ ID NO: 1485380 - RNA, 19 nt, Homo sapiens
  misc_RNA (1)...(19): siRNA sense strand
gauucauacuggugagaaa

SEQ ID NO: 1485381 - RNA, 19 nt, Homo sapiens
  misc_RNA (1)...(19): siRNA sense strand
gaggugauugggaauguaa

SEQ ID NO: 1485382 - RNA, 19 nt, Homo sapiens
  misc_RNA (1)...(19): siRNA sense strand
caucagagaauucauacug

SEQ ID NO: 1485383 - RNA, 19 nt, Homo sapiens
  misc_RNA (1)...(19): siRNA sense strand
gaauguaaagaauguggaa

SEQ ID NO: 1485384 - RNA, 19 nt, Homo sapiens
  misc_RNA (1)...(19): siRNA sense strand
caucaaagaaugcauacug

SEQ ID NO: 1485385 - RNA, 19 nt, Homo sapiens
  misc_RNA (1)...(19): siRNA sense strand
caucagagaauucauacug

SEQ ID NO: 1485386 - RNA, 19 nt, Homo sapiens
  misc_RNA (1)...(19): siRNA sense strand
gagaagccuuaugagugua

SEQ ID NO: 1485387 - RNA, 19 nt, Homo sapiens
  misc_RNA (1)...(19): siRNA sense strand
ggugagaaacccuaugaau

SEQ ID NO: 1485388 - RNA, 19 nt, Homo sapiens
  misc_RNA (1)...(19): siRNA sense strand
ggugagaaacccuaugaau

SEQ ID NO: 1485389 - RNA, 19 nt, Homo sapiens
  misc_RNA (1)...(19): siRNA sense strand
gugagaaaccuuauguaug

SEQ ID NO: 1485390 - RNA, 19 nt, Homo sapiens
  misc_RNA (1)...(19): siRNA sense strand
ggcaaggccuuugguagug

SEQ ID NO: 1485391 - RNA, 19 nt, Homo sapiens
  misc_RNA (1)...(19): siRNA sense strand
ugugggaaguccuuuaguu

SEQ ID NO: 1485392 - RNA, 19 nt, Homo sapiens
  misc_RNA (1)...(19): siRNA sense strand
augagaaacuccuugaaug

SEQ ID NO: 1485393 - RNA, 19 nt, Homo sapiens
  misc_RNA (1)...(19): siRNA sense strand
aauaguggcucagaucuca

SEQ ID NO: 1485394 - RNA, 19 nt, Homo sapiens
  misc_RNA (1)...(19): siRNA sense strand
gugggaaguccuuuaguuu

SEQ ID NO: 1485395 - RNA, 19 nt, Homo sapiens
  misc_RNA (1)...(19): siRNA sense strand
acagggaucucaggaagga

SEQ ID NO: 1485396 - RNA, 19 nt, Homo sapiens
  misc_RNA (1)...(19): siRNA sense strand
gaauacacacuggugagaa

SEQ ID NO: 1485397 - RNA, 19 nt, Homo sapiens
  misc_RNA (1)...(19): siRNA sense strand
ugagaaacuccuugaaugu

SEQ ID NO: 1485398 - RNA, 19 nt, Homo sapiens
  misc_RNA (1)...(19): siRNA sense strand
ucacucagcaucagagaau

SEQ ID NO: 1485399 - RNA, 19 nt, Homo sapiens
  misc_RNA (1)...(19): siRNA sense strand
ugagaagccuuuugaaugu

SEQ ID NO: 1485400 - RNA, 19 nt, Homo sapiens
  misc_RNA (1)...(19): siRNA sense strand
caggugagaaacuuuauga

SEQ ID NO: 1485401 - RNA, 19 nt, Homo sapiens
  misc_RNA (1)...(19): siRNA sense strand
ucauacaggugagaaacuu

SEQ ID NO: 1485402 - RNA, 19 nt, Homo sapiens
  misc_RNA (1)...(19): siRNA sense strand
gggaaguccuuuaguuuug

SEQ ID NO: 1485403 - RNA, 19 nt, Homo sapiens
  misc_RNA (1)...(19): siRNA sense strand
guggugagaagccuuauga

SEQ ID NO: 1485404 - RNA, 19 nt, Homo sapiens
  misc_RNA (1)...(19): siRNA sense strand
caccaucagagaauucaua

SEQ ID NO: 1485405 - RNA, 19 nt, Homo sapiens
  misc_RNA (1)...(19): siRNA sense strand
uaaggaaugugggaaggau

SEQ ID NO: 1485406 - RNA, 19 nt, Homo sapiens
  misc_RNA (1)...(19): siRNA sense strand
auacaggugagaaacuuua

SEQ ID NO: 1485407 - RNA, 19 nt, Homo sapiens
  misc_RNA (1)...(19): siRNA sense strand
aguagugguucagcucuua

SEQ ID NO: 1485408 - RNA, 19 nt, Homo sapiens
  misc_RNA (1)...(19): siRNA sense strand
cggcaucagagaauucaua

SEQ ID NO: 1485409 - RNA, 19 nt, Homo sapiens
  misc_RNA (1)...(19): siRNA sense strand
gagaugauuugcacuauaa

SEQ ID NO: 1485410 - RNA, 19 nt, Homo sapiens
  misc_RNA (1)...(19): siRNA sense strand
gaucauaucuucaaguuca

SEQ ID NO: 1485411 - RNA, 19 nt, Homo sapiens
  misc_RNA (1)...(19): siRNA sense strand
caagagaguuaaucaagua

SEQ ID NO: 1485412 - RNA, 19 nt, Homo sapiens
  misc_RNA (1)...(19): siRNA sense strand
gguaagggcuucagucgua

SEQ ID NO: 1485413 - RNA, 19 nt, Homo sapiens
  misc_RNA (1)...(19): siRNA sense strand
gcucucaucuucaaauuaa

SEQ ID NO: 1485414 - RNA, 19 nt, Homo sapiens
  misc_RNA (1)...(19): siRNA sense strand
gagcucagaucuuaaugua

SEQ ID NO: 1485415 - RNA, 19 nt, Homo sapiens
  misc_RNA (1)...(19): siRNA sense strand
gagagaauccauacaaaua

SEQ ID NO: 1485416 - RNA, 19 nt, Homo sapiens
  misc_RNA (1)...(19): siRNA sense strand
gaaagaaaccauauaagug

SEQ ID NO: 1485417 - RNA, 19 nt, Homo sapiens
  misc_RNA (1)...(19): siRNA sense strand
gguaagcgcuucagacaga

SEQ ID NO: 1485418 - RNA, 19 nt, Homo sapiens
  misc_RNA (1)...(19): siRNA sense strand
uaagguaccugccucauga

SEQ ID NO: 1485419 - RNA, 19 nt, Homo sapiens
  misc_RNA (1)...(19): siRNA sense strand
gagagaagcccuacaaaug

SEQ ID NO: 1485420 - RNA, 19 nt, Homo sapiens
  misc_RNA (1)...(19): siRNA sense strand
gcucacaccuuaauauuca

SEQ ID NO: 1485421 - RNA, 19 nt, Homo sapiens
  misc_RNA (1)...(19): siRNA sense strand
gcucaagucuuaucauuca

SEQ ID NO: 1485422 - RNA, 19 nt, Homo sapiens
  misc_RNA (1)...(19): siRNA sense strand
gagagaaacccuauaaaug

SEQ ID NO: 1485423 - RNA, 19 nt, Homo sapiens
  misc_RNA (1)...(19): siRNA sense strand
gagagaaacccuauaaaug

SEQ ID NO: 1485424 - RNA, 19 nt, Homo sapiens
  misc_RNA (1)...(19): siRNA sense strand
ggcaagagcuuuaguuaca

SEQ ID NO: 1485425 - RNA, 19 nt, Homo sapiens
  misc_RNA (1)...(19): siRNA sense strand
ggaaagaaaccauauaagu

SEQ ID NO: 1485426 - RNA, 19 nt, Homo sapiens
  misc_RNA (1)...(19): siRNA sense strand
gcucagaucuuaauguaca

SEQ ID NO: 1485427 - RNA, 19 nt, Homo sapiens
  misc_RNA (1)...(19): siRNA sense strand
gagcucaagucuuaucauu

SEQ ID NO: 1485428 - RNA, 19 nt, Homo sapiens
  misc_RNA (1)...(19): siRNA sense strand
gagagaaacccuacaaaug

SEQ ID NO: 1485429 - RNA, 19 nt, Homo sapiens
  misc_RNA (1)...(19): siRNA sense strand
gagagaagccauacaaaug

SEQ ID NO: 1485430 - RNA, 19 nt, Homo sapiens
  misc_RNA (1)...(19): siRNA sense strand
ggagagaaacccuauaaau

SEQ ID NO: 1485431 - RNA, 19 nt, Homo sapiens
  misc_RNA (1)...(19): siRNA sense strand
ggagagagaccauacaaau

SEQ ID NO: 1485432 - RNA, 19 nt, Homo sapiens
  misc_RNA (1)...(19): siRNA sense strand
ggagagaaacccuauaaau

SEQ ID NO: 1485433 - RNA, 19 nt, Homo sapiens
  misc_RNA (1)...(19): siRNA sense strand
gagaaacccuauaaaugug

SEQ ID NO: 1485434 - RNA, 19 nt, Homo sapiens
  misc_RNA (1)...(19): siRNA sense strand
gaaaagcuguggaugauga

SEQ ID NO: 1485435 - RNA, 19 nt, Homo sapiens
  misc_RNA (1)...(19): siRNA sense strand
guaucaagauucuguggua

SEQ ID NO: 1485436 - RNA, 19 nt, Homo sapiens
  misc_RNA (1)...(19): siRNA sense strand
ggacguggcuguggucuuc

SEQ ID NO: 1485437 - RNA, 19 nt, Homo sapiens
  misc_RNA (1)...(19): siRNA sense strand
acacaaaugaugcaaguua

SEQ ID NO: 1485438 - RNA, 19 nt, Homo sapiens
  misc_RNA (1)...(19): siRNA sense strand
gagaaacccuaucaaugug

SEQ ID NO: 1485439 - RNA, 19 nt, Homo sapiens
  misc_RNA (1)...(19): siRNA sense strand
gagagaaacccuaucaaug

SEQ ID NO: 1485440 - RNA, 19 nt, Homo sapiens
  misc_RNA (1)...(19): siRNA sense strand
gagaaacccuacaaaugug

SEQ ID NO: 1485441 - RNA, 19 nt, Homo sapiens
  misc_RNA (1)...(19): siRNA sense strand
gagagaaacccuauaagug

SEQ ID NO: 1485442 - RNA, 19 nt, Homo sapiens
  misc_RNA (1)...(19): siRNA sense strand
agucggagcucagaucuua

SEQ ID NO: 1485443 - RNA, 19 nt, Homo sapiens
  misc_RNA (1)...(19): siRNA sense strand
ggcaacagauuacaagaga

SEQ ID NO: 1485444 - RNA, 19 nt, Homo sapiens
  misc_RNA (1)...(19): siRNA sense strand
aguuggagcucaagucuua

SEQ ID NO: 1485445 - RNA, 19 nt, Homo sapiens
  misc_RNA (1)...(19): siRNA sense strand
gagaguuaaucaaguauca

SEQ ID NO: 1485446 - RNA, 19 nt, Homo sapiens
  misc_RNA (1)...(19): siRNA sense strand
gagaagcccuacaaaugug

SEQ ID NO: 1485447 - RNA, 19 nt, Homo sapiens
  misc_RNA (1)...(19): siRNA sense strand
cgagaugauuugcacuaua

SEQ ID NO: 1485448 - RNA, 19 nt, Homo sapiens
  misc_RNA (1)...(19): siRNA sense strand
ggagagaaacccuauaagu

SEQ ID NO: 1485449 - RNA, 19 nt, Homo sapiens
  misc_RNA (1)...(19): siRNA sense strand
ggagagaaacccuaucaau

SEQ ID NO: 1485450 - RNA, 19 nt, Homo sapiens
  misc_RNA (1)...(19): siRNA sense strand
ggagagaaacccuacaaau

SEQ ID NO: 1485451 - RNA, 19 nt, Homo sapiens
  misc_RNA (1)...(19): siRNA sense strand
caaaucugcuggaccauca

SEQ ID NO: 1485452 - RNA, 19 nt, Homo sapiens
  misc_RNA (1)...(19): siRNA sense strand
ggagagaagccauacaaau

SEQ ID NO: 1485453 - RNA, 19 nt, Homo sapiens
  misc_RNA (1)...(19): siRNA sense strand
gaugugaugugugugguaa

SEQ ID NO: 1485454 - RNA, 19 nt, Homo sapiens
  misc_RNA (1)...(19): siRNA sense strand
gaagauggcaacccagaga

SEQ ID NO: 1485455 - RNA, 19 nt, Homo sapiens
  misc_RNA (1)...(19): siRNA sense strand
gguaaggccuucagucagu

SEQ ID NO: 1485456 - RNA, 19 nt, Homo sapiens
  misc_RNA (1)...(19): siRNA sense strand
gagaugugaugcuggagaa

SEQ ID NO: 1485457 - RNA, 19 nt, Homo sapiens
  misc_RNA (1)...(19): siRNA sense strand
ggagagaagcccuacaaau

SEQ ID NO: 1485458 - RNA, 19 nt, Homo sapiens
  misc_RNA (1)...(19): siRNA sense strand
gagcucucaucuucaaauu

SEQ ID NO: 1485459 - RNA, 19 nt, Homo sapiens
  misc_RNA (1)...(19): siRNA sense strand
agagaaacccuauaaaugu

SEQ ID NO: 1485460 - RNA, 19 nt, Homo sapiens
  misc_RNA (1)...(19): siRNA sense strand
caucagagaguccacagua

SEQ ID NO: 1485461 - RNA, 19 nt, Homo sapiens
  misc_RNA (1)...(19): siRNA sense strand
aguuacagcucacaccuua

SEQ ID NO: 1485462 - RNA, 19 nt, Homo sapiens
  misc_RNA (1)...(19): siRNA sense strand
ggagagaauccauacaaau

SEQ ID NO: 1485463 - RNA, 19 nt, Homo sapiens
  misc_RNA (1)...(19): siRNA sense strand
ggagagaaaccauaucagu

SEQ ID NO: 1485464 - RNA, 19 nt, Homo sapiens
  misc_RNA (1)...(19): siRNA sense strand
gagaagccauacaaaugug

SEQ ID NO: 1485465 - RNA, 19 nt, Homo sapiens
  misc_RNA (1)...(19): siRNA sense strand
aaucagaguucccaucuuc

SEQ ID NO: 1485466 - RNA, 19 nt, Homo sapiens
  misc_RNA (1)...(19): siRNA sense strand
agagaaacccuaucaaugu

SEQ ID NO: 1485467 - RNA, 19 nt, Homo sapiens
  misc_RNA (1)...(19): siRNA sense strand
agagaaacccuacaaaugu

SEQ ID NO: 1485468 - RNA, 19 nt, Homo sapiens
  misc_RNA (1)...(19): siRNA sense strand
gcgagaaaccauacaaaug

SEQ ID NO: 1485469 - RNA, 19 nt, Homo sapiens
  misc_RNA (1)...(19): siRNA sense strand
gauuugcacuauaaagaug

SEQ ID NO: 1485470 - RNA, 19 nt, Homo sapiens
  misc_RNA (1)...(19): siRNA sense strand
agucagaggucacaucuuc

SEQ ID NO: 1485471 - RNA, 19 nt, Homo sapiens
  misc_RNA (1)...(19): siRNA sense strand
gagagagaccauacaaaug

SEQ ID NO: 1485472 - RNA, 19 nt, Homo sapiens
  misc_RNA (1)...(19): siRNA sense strand
caaaucuucuggcccauca

SEQ ID NO: 1485473 - RNA, 19 nt, Homo sapiens
  misc_RNA (1)...(19): siRNA sense strand
gcauguggcaagagcuuua

SEQ ID NO: 1485474 - RNA, 19 nt, Homo sapiens
  misc_RNA (1)...(19): siRNA sense strand
gaagaaaagcuguggauga

SEQ ID NO: 1485475 - RNA, 19 nt, Homo sapiens
  misc_RNA (1)...(19): siRNA sense strand
gagaaaccauacaaaugca

SEQ ID NO: 1485476 - RNA, 19 nt, Homo sapiens
  misc_RNA (1)...(19): siRNA sense strand
caggagagaaacccuauaa

SEQ ID NO: 1485477 - RNA, 19 nt, Homo sapiens
  misc_RNA (1)...(19): siRNA sense strand
caggagagaaacccuauaa

SEQ ID NO: 1485478 - RNA, 19 nt, Homo sapiens
  misc_RNA (1)...(19): siRNA sense strand
guaccugccucaugaagag

SEQ ID NO: 1485479 - RNA, 19 nt, Homo sapiens
  misc_RNA (1)...(19): siRNA sense strand
auacaaaugugaggaaugu

SEQ ID NO: 1485480 - RNA, 19 nt, Homo sapiens
  misc_RNA (1)...(19): siRNA sense strand
cuggagaacuucaggaaug

SEQ ID NO: 1485481 - RNA, 19 nt, Homo sapiens
  misc_RNA (1)...(19): siRNA sense strand
agagaaacccuauaagugu

SEQ ID NO: 1485482 - RNA, 19 nt, Homo sapiens
  misc_RNA (1)...(19): siRNA sense strand
gaaaccauauaagugugaa

SEQ ID NO: 1485483 - RNA, 19 nt, Homo sapiens
  misc_RNA (1)...(19): siRNA sense strand
aggagaacauugugugaaa

SEQ ID NO: 1485484 - RNA, 19 nt, Homo sapiens
  misc_RNA (1)...(19): siRNA sense strand
gggaaaagcucacauuguc

SEQ ID NO: 1485485 - RNA, 19 nt, Homo sapiens
  misc_RNA (1)...(19): siRNA sense strand
gagagaccauacaaaugug

SEQ ID NO: 1485486 - RNA, 19 nt, Homo sapiens
  misc_RNA (1)...(19): siRNA sense strand
gugccacacuggagagaaa

SEQ ID NO: 1485487 - RNA, 19 nt, Homo sapiens
  misc_RNA (1)...(19): siRNA sense strand
cuauaaagaugagggauuc

SEQ ID NO: 1485488 - RNA, 19 nt, Homo sapiens
  misc_RNA (1)...(19): siRNA sense strand
gaugcaaguuacaggaguu

SEQ ID NO: 1485489 - RNA, 19 nt, Homo sapiens
  misc_RNA (1)...(19): siRNA sense strand
ucaagauucugugguaaau

SEQ ID NO: 1485490 - RNA, 19 nt, Homo sapiens
  misc_RNA (1)...(19): siRNA sense strand
agagagaccauacaaaugu

SEQ ID NO: 1485491 - RNA, 19 nt, Homo sapiens
  misc_RNA (1)...(19): siRNA sense strand
cagauggccuaccacaguu

SEQ ID NO: 1485492 - RNA, 19 nt, Homo sapiens
  misc_RNA (1)...(19): siRNA sense strand
guggcaagagcuuuaguua

SEQ ID NO: 1485493 - RNA, 19 nt, Homo sapiens
  misc_RNA (1)...(19): siRNA sense strand
acaagagaguuaaucaagu

SEQ ID NO: 1485494 - RNA, 19 nt, Homo sapiens
  misc_RNA (1)...(19): siRNA sense strand
caagucuuaucauucauca

SEQ ID NO: 1485495 - RNA, 19 nt, Homo sapiens
  misc_RNA (1)...(19): siRNA sense strand
ucaagcccaucaaagaguu

SEQ ID NO: 1485496 - RNA, 19 nt, Homo sapiens
  misc_RNA (1)...(19): siRNA sense strand
gggcuucaguguagguuca

SEQ ID NO: 1485497 - RNA, 19 nt, Homo sapiens
  misc_RNA (1)...(19): siRNA sense strand
cgagaaaccauacaaaugc

SEQ ID NO: 1485498 - RNA, 19 nt, Homo sapiens
  misc_RNA (1)...(19): siRNA sense strand
uugucaagcuccucugaua

SEQ ID NO: 1485499 - RNA, 19 nt, Homo sapiens
  misc_RNA (1)...(19): siRNA sense strand
gcaaaaucauacacaaaug

SEQ ID NO: 1485500 - RNA, 19 nt, Homo sapiens
  misc_RNA (1)...(19): siRNA sense strand
gaguucccaucuucaaguu

SEQ ID NO: 1485501 - RNA, 19 nt, Homo sapiens
  misc_RNA (1)...(19): siRNA sense strand
agagaagcccuacaaaugu

SEQ ID NO: 1485502 - RNA, 19 nt, Homo sapiens
  misc_RNA (1)...(19): siRNA sense strand
acagagauccuaccuucaa

SEQ ID NO: 1485503 - RNA, 19 nt, Homo sapiens
  misc_RNA (1)...(19): siRNA sense strand
ucaggaauguggucucagu

SEQ ID NO: 1485504 - RNA, 19 nt, Homo sapiens
  misc_RNA (1)...(19): siRNA sense strand
agagaaacccuauaaaugc

SEQ ID NO: 1485505 - RNA, 19 nt, Homo sapiens
  misc_RNA (1)...(19): siRNA sense strand
cuaaggaggcagugacauu

SEQ ID NO: 1485506 - RNA, 19 nt, Homo sapiens
  misc_RNA (1)...(19): siRNA sense strand
aauccacacuggcgagaaa

SEQ ID NO: 1485507 - RNA, 19 nt, Homo sapiens
  misc_RNA (1)...(19): siRNA sense strand
gcaaguuacaggaguuuua

SEQ ID NO: 1485508 - RNA, 19 nt, Homo sapiens
  misc_RNA (1)...(19): siRNA sense strand
ccagauggccuaccacagu

SEQ ID NO: 1485509 - RNA, 19 nt, Homo sapiens
  misc_RNA (1)...(19): siRNA sense strand
gaaagaaguucaugaauug

SEQ ID NO: 1485510 - RNA, 19 nt, Homo sapiens
  misc_RNA (1)...(19): siRNA sense strand
ggaaagaaguucaugaauu

SEQ ID NO: 1485511 - RNA, 19 nt, Homo sapiens
  misc_RNA (1)...(19): siRNA sense strand
gaacauagauuaguuagag

SEQ ID NO: 1485512 - RNA, 19 nt, Homo sapiens
  misc_RNA (1)...(19): siRNA sense strand
ggaaugacaucaaaugguu

SEQ ID NO: 1485513 - RNA, 19 nt, Homo sapiens
  misc_RNA (1)...(19): siRNA sense strand
ggaggaaucuguaaaccaa

SEQ ID NO: 1485514 - RNA, 19 nt, Homo sapiens
  misc_RNA (1)...(19): siRNA sense strand
cagaggaugugaagugaua

SEQ ID NO: 1485515 - RNA, 19 nt, Homo sapiens
  misc_RNA (1)...(19): siRNA sense strand
gaaggugggacuuauuaua

SEQ ID NO: 1485516 - RNA, 19 nt, Homo sapiens
  misc_RNA (1)...(19): siRNA sense strand
gcugaugucuucauuguau

SEQ ID NO: 1485517 - RNA, 19 nt, Homo sapiens
  misc_RNA (1)...(19): siRNA sense strand
uaagaaagaucugaaggaa

SEQ ID NO: 1485518 - RNA, 19 nt, Homo sapiens
  misc_RNA (1)...(19): siRNA sense strand
uaggaaagaugacugcuaa

SEQ ID NO: 1485519 - RNA, 19 nt, Homo sapiens
  misc_RNA (1)...(19): siRNA sense strand
gaugugaagugauacaaga

SEQ ID NO: 1485520 - RNA, 19 nt, Homo sapiens
  misc_RNA (1)...(19): siRNA sense strand
ccagcuaaauugauuguuu

SEQ ID NO: 1485521 - RNA, 19 nt, Homo sapiens
  misc_RNA (1)...(19): siRNA sense strand
gaaagaugacugcuaauuc

SEQ ID NO: 1485522 - RNA, 19 nt, Homo sapiens
  misc_RNA (1)...(19): siRNA sense strand
aaagaugacugcuaauuca

SEQ ID NO: 1485523 - RNA, 19 nt, Homo sapiens
  misc_RNA (1)...(19): siRNA sense strand
agaaagaucugaaggaaag

SEQ ID NO: 1485524 - RNA, 19 nt, Homo sapiens
  misc_RNA (1)...(19): siRNA sense strand
gcaauugugaccaaauaua

SEQ ID NO: 1485525 - RNA, 19 nt, Homo sapiens
  misc_RNA (1)...(19): siRNA sense strand
gauagaggcauguuggaua

SEQ ID NO: 1485526 - RNA, 19 nt, Homo sapiens
  misc_RNA (1)...(19): siRNA sense strand
cuacccaucucuuuacuuu

SEQ ID NO: 1485527 - RNA, 19 nt, Homo sapiens
  misc_RNA (1)...(19): siRNA sense strand
ggaaagaugacugcuaauu

SEQ ID NO: 1485528 - RNA, 19 nt, Homo sapiens
  misc_RNA (1)...(19): siRNA sense strand
ggauauguauggcaaguca

SEQ ID NO: 1485529 - RNA, 19 nt, Homo sapiens
  misc_RNA (1)...(19): siRNA sense strand
gagggaguaucgaaagaaa

SEQ ID NO: 1485530 - RNA, 19 nt, Homo sapiens
  misc_RNA (1)...(19): siRNA sense strand
agaaauggcuggucucaca

SEQ ID NO: 1485531 - RNA, 19 nt, Homo sapiens
  misc_RNA (1)...(19): siRNA sense strand
gauaugugcggcuuugaua

SEQ ID NO: 1485532 - RNA, 19 nt, Homo sapiens
  misc_RNA (1)...(19): siRNA sense strand
ugaaaaugcugaagcuuua

SEQ ID NO: 1485533 - RNA, 19 nt, Homo sapiens
  misc_RNA (1)...(19): siRNA sense strand
acaaagggcuggaaagaag

SEQ ID NO: 1485534 - RNA, 19 nt, Homo sapiens
  misc_RNA (1)...(19): siRNA sense strand
gugaaggacuugcaauugu

SEQ ID NO: 1485535 - RNA, 19 nt, Homo sapiens
  misc_RNA (1)...(19): siRNA sense strand
cuacagauaugaccuuaca

SEQ ID NO: 1485536 - RNA, 19 nt, Homo sapiens
  misc_RNA (1)...(19): siRNA sense strand
cacaagagaugagcuagaa

SEQ ID NO: 1485537 - RNA, 19 nt, Homo sapiens
  misc_RNA (1)...(19): siRNA sense strand
cuuaaagucuaaagaggua

SEQ ID NO: 1485538 - RNA, 19 nt, Homo sapiens
  misc_RNA (1)...(19): siRNA sense strand
cagcuaaauugauuguuug

SEQ ID NO: 1485539 - RNA, 19 nt, Homo sapiens
  misc_RNA (1)...(19): siRNA sense strand
aaacacaccugcugauguc

SEQ ID NO: 1485540 - RNA, 19 nt, Homo sapiens
  misc_RNA (1)...(19): siRNA sense strand
cuacaccgguucuuauguu

SEQ ID NO: 1485541 - RNA, 19 nt, Homo sapiens
  misc_RNA (1)...(19): siRNA sense strand
ccacaaagcaagagccuau

SEQ ID NO: 1485542 - RNA, 19 nt, Homo sapiens
  misc_RNA (1)...(19): siRNA sense strand
ccaauucucaggauggaua

SEQ ID NO: 1485543 - RNA, 19 nt, Homo sapiens
  misc_RNA (1)...(19): siRNA sense strand
gguauggaaggcuuuguua

SEQ ID NO: 1485544 - RNA, 19 nt, Homo sapiens
  misc_RNA (1)...(19): siRNA sense strand
gaaagugaagcgcacaaga

SEQ ID NO: 1485545 - RNA, 19 nt, Homo sapiens
  misc_RNA (1)...(19): siRNA sense strand
ggacugguacaaugagaaa

SEQ ID NO: 1485546 - RNA, 19 nt, Homo sapiens
  misc_RNA (1)...(19): siRNA sense strand
ggaacugauugcucucuuc

SEQ ID NO: 1485547 - RNA, 19 nt, Homo sapiens
  misc_RNA (1)...(19): siRNA sense strand
ggauauuccagcuaaauug

SEQ ID NO: 1485548 - RNA, 19 nt, Homo sapiens
  misc_RNA (1)...(19): siRNA sense strand
agaagcagauagccaauuc

SEQ ID NO: 1485549 - RNA, 19 nt, Homo sapiens
  misc_RNA (1)...(19): siRNA sense strand
caagaaggcagaaccacaa

SEQ ID NO: 1485550 - RNA, 19 nt, Homo sapiens
  misc_RNA (1)...(19): siRNA sense strand
gauauuccagcuaaauuga

SEQ ID NO: 1485551 - RNA, 19 nt, Homo sapiens
  misc_RNA (1)...(19): siRNA sense strand
gacuacagauaugaccuua

SEQ ID NO: 1485552 - RNA, 19 nt, Homo sapiens
  misc_RNA (1)...(19): siRNA sense strand
ucuggaggcuguagagaaa

SEQ ID NO: 1485553 - RNA, 19 nt, Homo sapiens
  misc_RNA (1)...(19): siRNA sense strand
uaaagcuguuucugaaguu

SEQ ID NO: 1485554 - RNA, 19 nt, Homo sapiens
  misc_RNA (1)...(19): siRNA sense strand
gcugaagcuuuaauuagau

SEQ ID NO: 1485555 - RNA, 19 nt, Homo sapiens
  misc_RNA (1)...(19): siRNA sense strand
cuauuaagauugucacauc

SEQ ID NO: 1485556 - RNA, 19 nt, Homo sapiens
  misc_RNA (1)...(19): siRNA sense strand
accaggaaauucagaagua

SEQ ID NO: 1485557 - RNA, 19 nt, Homo sapiens
  misc_RNA (1)...(19): siRNA sense strand
caagaaaugccgcuuacug

SEQ ID NO: 1485558 - RNA, 19 nt, Homo sapiens
  misc_RNA (1)...(19): siRNA sense strand
uugcaauugugaccaaaua

SEQ ID NO: 1485559 - RNA, 19 nt, Homo sapiens
  misc_RNA (1)...(19): siRNA sense strand
ggugggacuuauuauauca

SEQ ID NO: 1485560 - RNA, 19 nt, Homo sapiens
  misc_RNA (1)...(19): siRNA sense strand
gaaggaaagcaugaaaugu

SEQ ID NO: 1485561 - RNA, 19 nt, Homo sapiens
  misc_RNA (1)...(19): siRNA sense strand
gaaguuugucgcauuccua

SEQ ID NO: 1485562 - RNA, 19 nt, Homo sapiens
  misc_RNA (1)...(19): siRNA sense strand
gaagauggcagaggaugug

SEQ ID NO: 1485563 - RNA, 19 nt, Homo sapiens
  misc_RNA (1)...(19): siRNA sense strand
ugaaggacuugcaauugug

SEQ ID NO: 1485564 - RNA, 19 nt, Homo sapiens
  misc_RNA (1)...(19): siRNA sense strand
acucaacgcuaguacaguu

SEQ ID NO: 1485565 - RNA, 19 nt, Homo sapiens
  misc_RNA (1)...(19): siRNA sense strand
gaaggacuugcaauuguga

SEQ ID NO: 1485566 - RNA, 19 nt, Homo sapiens
  misc_RNA (1)...(19): siRNA sense strand
uuaaagcuguuucugaagu

SEQ ID NO: 1485567 - RNA, 19 nt, Homo sapiens
  misc_RNA (1)...(19): siRNA sense strand
ucuaugaaccaaagaguuu

SEQ ID NO: 1485568 - RNA, 19 nt, Homo sapiens
  misc_RNA (1)...(19): siRNA sense strand
guacuugaaccaggaaauu

SEQ ID NO: 1485569 - RNA, 19 nt, Homo sapiens
  misc_RNA (1)...(19): siRNA sense strand
gaagucauucaucuaauag

SEQ ID NO: 1485570 - RNA, 19 nt, Homo sapiens
  misc_RNA (1)...(19): siRNA sense strand
gcacaagagaugagcuaga

SEQ ID NO: 1485571 - RNA, 19 nt, Homo sapiens
  misc_RNA (1)...(19): siRNA sense strand
gaucugaaggaaagcauga

SEQ ID NO: 1485572 - RNA, 19 nt, Homo sapiens
  misc_RNA (1)...(19): siRNA sense strand
caaaugcagccacugaaug

SEQ ID NO: 1485573 - RNA, 19 nt, Homo sapiens
  misc_RNA (1)...(19): siRNA sense strand
ugaaggaaagcaugaaaug

SEQ ID NO: 1485574 - RNA, 19 nt, Homo sapiens
  misc_RNA (1)...(19): siRNA sense strand
ccaggaaauucagaaguau

SEQ ID NO: 1485575 - RNA, 19 nt, Homo sapiens
  misc_RNA (1)...(19): siRNA sense strand
gauagccaauucucaggau

SEQ ID NO: 1485576 - RNA, 19 nt, Homo sapiens
  misc_RNA (1)...(19): siRNA sense strand
cgacuacaccgguucuuau

SEQ ID NO: 1485577 - RNA, 19 nt, Homo sapiens
  misc_RNA (1)...(19): siRNA sense strand
ggcagaggaugugaaguga

SEQ ID NO: 1485578 - RNA, 19 nt, Homo sapiens
  misc_RNA (1)...(19): siRNA sense strand
ggagguguccauccugcua

SEQ ID NO: 1485579 - RNA, 19 nt, Homo sapiens
  misc_RNA (1)...(19): siRNA sense strand
caaacacaccugcugaugu

SEQ ID NO: 1485580 - RNA, 19 nt, Homo sapiens
  misc_RNA (1)...(19): siRNA sense strand
gaugucagugcuucuauga

SEQ ID NO: 1485581 - RNA, 19 nt, Homo sapiens
  misc_RNA (1)...(19): siRNA sense strand
gcagaaccacaaagcaaga

SEQ ID NO: 1485582 - RNA, 19 nt, Homo sapiens
  misc_RNA (1)...(19): siRNA sense strand
ugcugaagcuuuaauuaga

SEQ ID NO: 1485583 - RNA, 19 nt, Homo sapiens
  misc_RNA (1)...(19): siRNA sense strand
gaaagaaaauggauauucc

SEQ ID NO: 1485584 - RNA, 19 nt, Homo sapiens
  misc_RNA (1)...(19): siRNA sense strand
gcgcccugaugaagaaauu

SEQ ID NO: 1485585 - RNA, 19 nt, Homo sapiens
  misc_RNA (1)...(19): siRNA sense strand
uuacaagaaaugccgcuua

SEQ ID NO: 1485586 - RNA, 19 nt, Homo sapiens
  misc_RNA (1)...(19): siRNA sense strand
ucuuaaaccuuccagugaa

SEQ ID NO: 1485587 - RNA, 19 nt, Homo sapiens
  misc_RNA (1)...(19): siRNA sense strand
ccuaugcucuuugcacuug

SEQ ID NO: 1485588 - RNA, 19 nt, Homo sapiens
  misc_RNA (1)...(19): siRNA sense strand
gugaagugauacaagaaau

SEQ ID NO: 1485589 - RNA, 19 nt, Homo sapiens
  misc_RNA (1)...(19): siRNA sense strand
cugaaggugggacuuauua

SEQ ID NO: 1485590 - RNA, 19 nt, Homo sapiens
  misc_RNA (1)...(19): siRNA sense strand
auagaggcauguuggauau

SEQ ID NO: 1485591 - RNA, 19 nt, Homo sapiens
  misc_RNA (1)...(19): siRNA sense strand
aaaugcagccacugaauga

SEQ ID NO: 1485592 - RNA, 19 nt, Homo sapiens
  misc_RNA (1)...(19): siRNA sense strand
uaucaaagaacagaaguug

SEQ ID NO: 1485593 - RNA, 19 nt, Homo sapiens
  misc_RNA (1)...(19): siRNA sense strand
guucuuauguuucgguucu

SEQ ID NO: 1485594 - RNA, 19 nt, Homo sapiens
  misc_RNA (1)...(19): siRNA sense strand
gaaugacaucaaaugguuu

SEQ ID NO: 1485595 - RNA, 19 nt, Homo sapiens
  misc_RNA (1)...(19): siRNA sense strand
caagagaugagcuagaagu

SEQ ID NO: 1485596 - RNA, 19 nt, Homo sapiens
  misc_RNA (1)...(19): siRNA sense strand
gugaagcgcacaagagaug

SEQ ID NO: 1485597 - RNA, 19 nt, Homo sapiens
  misc_RNA (1)...(19): siRNA sense strand
uggcuggucucacaaagau

SEQ ID NO: 1485598 - RNA, 19 nt, Homo sapiens
  misc_RNA (1)...(19): siRNA sense strand
gaaguaucuuuaguaugug

SEQ ID NO: 1485599 - RNA, 19 nt, Homo sapiens
  misc_RNA (1)...(19): siRNA sense strand
aaacaagcagcauuuaaag

SEQ ID NO: 1485600 - RNA, 19 nt, Homo sapiens
  misc_RNA (1)...(19): siRNA sense strand
uacuggagcucuggaugua

SEQ ID NO: 1485601 - RNA, 19 nt, Homo sapiens
  misc_RNA (1)...(19): siRNA sense strand
gacaggucauggucucaga

SEQ ID NO: 1485602 - RNA, 19 nt, Homo sapiens
  misc_RNA (1)...(19): siRNA sense strand
gaaauggcuggucucacaa

SEQ ID NO: 1485603 - RNA, 19 nt, Homo sapiens
  misc_RNA (1)...(19): siRNA sense strand
cguauacauccauuucaua

SEQ ID NO: 1485604 - RNA, 19 nt, Homo sapiens
  misc_RNA (1)...(19): siRNA sense strand
gagaagcagauagccaauu

SEQ ID NO: 1485605 - RNA, 19 nt, Homo sapiens
  misc_RNA (1)...(19): siRNA sense strand
cugcugaugucuucauugu

SEQ ID NO: 1485606 - RNA, 19 nt, Homo sapiens
  misc_RNA (1)...(19): siRNA sense strand
gcaaugugcaugguuguca

SEQ ID NO: 1485607 - RNA, 19 nt, Homo sapiens
  misc_RNA (1)...(19): siRNA sense strand
cuuacuagcuguugauguc

SEQ ID NO: 1485608 - RNA, 19 nt, Homo sapiens
  misc_RNA (1)...(19): siRNA sense strand
gaaguugggccuugaaaau

SEQ ID NO: 1485609 - RNA, 19 nt, Homo sapiens
  misc_RNA (1)...(19): siRNA sense strand
ggacggaucucaaucgaaa

SEQ ID NO: 1485610 - RNA, 19 nt, Homo sapiens
  misc_RNA (1)...(19): siRNA sense strand
gcaaaugcauugaaagcaa

SEQ ID NO: 1485611 - RNA, 19 nt, Homo sapiens
  misc_RNA (1)...(19): siRNA sense strand
caaaguauggaaccaauua

SEQ ID NO: 1485612 - RNA, 19 nt, Homo sapiens
  misc_RNA (1)...(19): siRNA sense strand
aaagacaacucaaguauac

SEQ ID NO: 1485613 - RNA, 19 nt, Homo sapiens
  misc_RNA (1)...(19): siRNA sense strand
caaaugcauugaaagcaaa

SEQ ID NO: 1485614 - RNA, 19 nt, Homo sapiens
  misc_RNA (1)...(19): siRNA sense strand
cugcaugucucuucucuaa

SEQ ID NO: 1485615 - RNA, 19 nt, Homo sapiens
  misc_RNA (1)...(19): siRNA sense strand
gaaggcagcaaaugcauug

SEQ ID NO: 1485616 - RNA, 19 nt, Homo sapiens
  misc_RNA (1)...(19): siRNA sense strand
gcacucuuaugggcaguua

SEQ ID NO: 1485617 - RNA, 19 nt, Homo sapiens
  misc_RNA (1)...(19): siRNA sense strand
ugagagagaucagugagaa

SEQ ID NO: 1485618 - RNA, 19 nt, Homo sapiens
  misc_RNA (1)...(19): siRNA sense strand
caagaaggaugauauuuug

SEQ ID NO: 1485619 - RNA, 19 nt, Homo sapiens
  misc_RNA (1)...(19): siRNA sense strand
gccaaugguucgucaaaga

SEQ ID NO: 1485620 - RNA, 19 nt, Homo sapiens
  misc_RNA (1)...(19): siRNA sense strand
uuaggaaccuggacuucua

SEQ ID NO: 1485621 - RNA, 19 nt, Homo sapiens
  misc_RNA (1)...(19): siRNA sense strand
gcaucuugguguaguauug

SEQ ID NO: 1485622 - RNA, 19 nt, Homo sapiens
  misc_RNA (1)...(19): siRNA sense strand
gagggacaguggaacauau

SEQ ID NO: 1485623 - RNA, 19 nt, Homo sapiens
  misc_RNA (1)...(19): siRNA sense strand
gaaauuucaaugcaucuug

SEQ ID NO: 1485624 - RNA, 19 nt, Homo sapiens
  misc_RNA (1)...(19): siRNA sense strand
ggaaccaauuauagaguug

SEQ ID NO: 1485625 - RNA, 19 nt, Homo sapiens
  misc_RNA (1)...(19): siRNA sense strand
cauggagccuggagacgua

SEQ ID NO: 1485626 - RNA, 19 nt, Homo sapiens
  misc_RNA (1)...(19): siRNA sense strand
ggugacaucugccacuaug

SEQ ID NO: 1485627 - RNA, 19 nt, Homo sapiens
  misc_RNA (1)...(19): siRNA sense strand
gguuauaucuacacuugga

SEQ ID NO: 1485628 - RNA, 19 nt, Homo sapiens
  misc_RNA (1)...(19): siRNA sense strand
cauaaagacaacucaagua

SEQ ID NO: 1485629 - RNA, 19 nt, Homo sapiens
  misc_RNA (1)...(19): siRNA sense strand
ggcagcaaaugcauugaaa

SEQ ID NO: 1485630 - RNA, 19 nt, Homo sapiens
  misc_RNA (1)...(19): siRNA sense strand
gcaagaaggaugauauuuu

SEQ ID NO: 1485631 - RNA, 19 nt, Homo sapiens
  misc_RNA (1)...(19): siRNA sense strand
gagcaagaaggaugauauu

SEQ ID NO: 1485632 - RNA, 19 nt, Homo sapiens
  misc_RNA (1)...(19): siRNA sense strand
gaucgucuuuggaggaaau

SEQ ID NO: 1485633 - RNA, 19 nt, Homo sapiens
  misc_RNA (1)...(19): siRNA sense strand
cuugaaacccuuuaucuuu

SEQ ID NO: 1485634 - RNA, 19 nt, Homo sapiens
  misc_RNA (1)...(19): siRNA sense strand
ggacagaaggcagcaaaug

SEQ ID NO: 1485635 - RNA, 19 nt, Homo sapiens
  misc_RNA (1)...(19): siRNA sense strand
ccagaaaugauucaaguug

SEQ ID NO: 1485636 - RNA, 19 nt, Homo sapiens
  misc_RNA (1)...(19): siRNA sense strand
ucaaguaaccacccagaaa

SEQ ID NO: 1485637 - RNA, 19 nt, Homo sapiens
  misc_RNA (1)...(19): siRNA sense strand
ggagggcugggauaugaua

SEQ ID NO: 1485638 - RNA, 19 nt, Homo sapiens
  misc_RNA (1)...(19): siRNA sense strand
gacguauuccuauaacaua

SEQ ID NO: 1485639 - RNA, 19 nt, Homo sapiens
  misc_RNA (1)...(19): siRNA sense strand
caacacagacaagagauug

SEQ ID NO: 1485640 - RNA, 19 nt, Homo sapiens
  misc_RNA (1)...(19): siRNA sense strand
caaguaaccacccagaaau

SEQ ID NO: 1485641 - RNA, 19 nt, Homo sapiens
  misc_RNA (1)...(19): siRNA sense strand
ucuagaaacugccaagauc

SEQ ID NO: 1485642 - RNA, 19 nt, Homo sapiens
  misc_RNA (1)...(19): siRNA sense strand
ggaucucaaucgaaauuuc

SEQ ID NO: 1485643 - RNA, 19 nt, Homo sapiens
  misc_RNA (1)...(19): siRNA sense strand
ggagacguauuccuauaac

SEQ ID NO: 1485644 - RNA, 19 nt, Homo sapiens
  misc_RNA (1)...(19): siRNA sense strand
acaaggaaguggugacaca

SEQ ID NO: 1485645 - RNA, 19 nt, Homo sapiens
  misc_RNA (1)...(19): siRNA sense strand
agaaaugauucaaguugga

SEQ ID NO: 1485646 - RNA, 19 nt, Homo sapiens
  misc_RNA (1)...(19): siRNA sense strand
guugccagcuucauagaga

SEQ ID NO: 1485647 - RNA, 19 nt, Homo sapiens
  misc_RNA (1)...(19): siRNA sense strand
gaaccuggacuucuauguc

SEQ ID NO: 1485648 - RNA, 19 nt, Homo sapiens
  misc_RNA (1)...(19): siRNA sense strand
gaaguggugacacagcauu

SEQ ID NO: 1485649 - RNA, 19 nt, Homo sapiens
  misc_RNA (1)...(19): siRNA sense strand
guauggaaccaauuauaga

SEQ ID NO: 1485650 - RNA, 19 nt, Homo sapiens
  misc_RNA (1)...(19): siRNA sense strand
gcaaaguauggaaccaauu

SEQ ID NO: 1485651 - RNA, 19 nt, Homo sapiens
  misc_RNA (1)...(19): siRNA sense strand
gagagaucagugagaagua

SEQ ID NO: 1485652 - RNA, 19 nt, Homo sapiens
  misc_RNA (1)...(19): siRNA sense strand
uaaccacccagaaaugauu

SEQ ID NO: 1485653 - RNA, 19 nt, Homo sapiens
  misc_RNA (1)...(19): siRNA sense strand
gacacagcauuuccuagga

SEQ ID NO: 1485654 - RNA, 19 nt, Homo sapiens
  misc_RNA (1)...(19): siRNA sense strand
cuggagggcugggauauga

SEQ ID NO: 1485655 - RNA, 19 nt, Homo sapiens
  misc_RNA (1)...(19): siRNA sense strand
aguuaauucucacaccuua

SEQ ID NO: 1485656 - RNA, 19 nt, Homo sapiens
  misc_RNA (1)...(19): siRNA sense strand
gaucucaaucgaaauuuca

SEQ ID NO: 1485657 - RNA, 19 nt, Homo sapiens
  misc_RNA (1)...(19): siRNA sense strand
caaucgaaauuucaaugca

SEQ ID NO: 1485658 - RNA, 19 nt, Homo sapiens
  misc_RNA (1)...(19): siRNA sense strand
cuggagacguauuccuaua

SEQ ID NO: 1485659 - RNA, 19 nt, Homo sapiens
  misc_RNA (1)...(19): siRNA sense strand
cugccaagaucaaacauuc

SEQ ID NO: 1485660 - RNA, 19 nt, Homo sapiens
  misc_RNA (1)...(19): siRNA sense strand
ccaaugguucgucaaagaa

SEQ ID NO: 1485661 - RNA, 19 nt, Homo sapiens
  misc_RNA (1)...(19): siRNA sense strand
gagcugagggacaguggaa

SEQ ID NO: 1485662 - RNA, 19 nt, Homo sapiens
  misc_RNA (1)...(19): siRNA sense strand
uggaaccaauuauagaguu

SEQ ID NO: 1485663 - RNA, 19 nt, Homo sapiens
  misc_RNA (1)...(19): siRNA sense strand
ggacaacugaucgucuuug

SEQ ID NO: 1485664 - RNA, 19 nt, Homo sapiens
  misc_RNA (1)...(19): siRNA sense strand
cauggaggcugugcuguca

SEQ ID NO: 1485665 - RNA, 19 nt, Homo sapiens
  misc_RNA (1)...(19): siRNA sense strand
ucagugagaaguacaagga

SEQ ID NO: 1485666 - RNA, 19 nt, Homo sapiens
  misc_RNA (1)...(19): siRNA sense strand
gauucaaguuggacagaag

SEQ ID NO: 1485667 - RNA, 19 nt, Homo sapiens
  misc_RNA (1)...(19): siRNA sense strand
uaugggcaguuaauucuca

SEQ ID NO: 1485668 - RNA, 19 nt, Homo sapiens
  misc_RNA (1)...(19): siRNA sense strand
cauaauaauggcacauguu

SEQ ID NO: 1485669 - RNA, 19 nt, Homo sapiens
  misc_RNA (1)...(19): siRNA sense strand
gacaacugaucgucuuugg

SEQ ID NO: 1485670 - RNA, 19 nt, Homo sapiens
  misc_RNA (1)...(19): siRNA sense strand
ucauagagagcaagaagga

SEQ ID NO: 1485671 - RNA, 19 nt, Homo sapiens
  misc_RNA (1)...(19): siRNA sense strand
gcuugaaacccuuuaucuu

SEQ ID NO: 1485672 - RNA, 19 nt, Homo sapiens
  misc_RNA (1)...(19): siRNA sense strand
ugucaguccuggaugaugu

SEQ ID NO: 1485673 - RNA, 19 nt, Homo sapiens
  misc_RNA (1)...(19): siRNA sense strand
gcauugaaagcaaaguaug

SEQ ID NO: 1485674 - RNA, 19 nt, Homo sapiens
  misc_RNA (1)...(19): siRNA sense strand
uggauggacuguggaauuc

SEQ ID NO: 1485675 - RNA, 19 nt, Homo sapiens
  misc_RNA (1)...(19): siRNA sense strand
ggaucgagugcagauauuu

SEQ ID NO: 1485676 - RNA, 19 nt, Homo sapiens
  misc_RNA (1)...(19): siRNA sense strand
gggcugggauaugauagau

SEQ ID NO: 1485677 - RNA, 19 nt, Homo sapiens
  misc_RNA (1)...(19): siRNA sense strand
gagacguauuccuauaaca

SEQ ID NO: 1485678 - RNA, 19 nt, Homo sapiens
  misc_RNA (1)...(19): siRNA sense strand
ggaugagagagaucaguga

SEQ ID NO: 1485679 - RNA, 19 nt, Homo sapiens
  misc_RNA (1)...(19): siRNA sense strand
ggauucccuucucauauac

SEQ ID NO: 1485680 - RNA, 19 nt, Homo sapiens
  misc_RNA (1)...(19): siRNA sense strand
guauuggugccucuagaaa

SEQ ID NO: 1485681 - RNA, 19 nt, Homo sapiens
  misc_RNA (1)...(19): siRNA sense strand
ccuuccaguucuuaacaua

SEQ ID NO: 1485682 - RNA, 19 nt, Homo sapiens
  misc_RNA (1)...(19): siRNA sense strand
ccauaaagacaacucaagu

SEQ ID NO: 1485683 - RNA, 19 nt, Homo sapiens
  misc_RNA (1)...(19): siRNA sense strand
gcccaacacagacaagaga

SEQ ID NO: 1485684 - RNA, 19 nt, Homo sapiens
  misc_RNA (1)...(19): siRNA sense strand
augguuauaucuacacuug

SEQ ID NO: 1485685 - RNA, 19 nt, Homo sapiens
  misc_RNA (1)...(19): siRNA sense strand
caaugguucgucaaagaaa

SEQ ID NO: 1485686 - RNA, 19 nt, Homo sapiens
  misc_RNA (1)...(19): siRNA sense strand
caguggaacauauggguuu

SEQ ID NO: 1485687 - RNA, 19 nt, Homo sapiens
  misc_RNA (1)...(19): siRNA sense strand
ggugacacagcauuuccua

SEQ ID NO: 1485688 - RNA, 19 nt, Homo sapiens
  misc_RNA (1)...(19): siRNA sense strand
aguccuggaugauguguau

SEQ ID NO: 1485689 - RNA, 19 nt, Homo sapiens
  misc_RNA (1)...(19): siRNA sense strand
guucuuaacauagaugguu

SEQ ID NO: 1485690 - RNA, 19 nt, Homo sapiens
  misc_RNA (1)...(19): siRNA sense strand
uggagacguauuccuauaa

SEQ ID NO: 1485691 - RNA, 19 nt, Homo sapiens
  misc_RNA (1)...(19): siRNA sense strand
uggaucgagugcagauauu

SEQ ID NO: 1485692 - RNA, 19 nt, Homo sapiens
  misc_RNA (1)...(19): siRNA sense strand
acccagaaaugauucaagu

SEQ ID NO: 1485693 - RNA, 19 nt, Homo sapiens
  misc_RNA (1)...(19): siRNA sense strand
gagagcaagaaggaugaua

SEQ ID NO: 1485694 - RNA, 19 nt, Homo sapiens
  misc_RNA (1)...(19): siRNA sense strand
caaugcaucuugguguagu

SEQ ID NO: 1485695 - RNA, 19 nt, Homo sapiens
  misc_RNA (1)...(19): siRNA sense strand
cagcauuuccuaggaguga

SEQ ID NO: 1485696 - RNA, 19 nt, Homo sapiens
  misc_RNA (1)...(19): siRNA sense strand
gacagaaggcagcaaaugc

SEQ ID NO: 1485697 - RNA, 19 nt, Homo sapiens
  misc_RNA (1)...(19): siRNA sense strand
gaaacugccaagaucaaac

SEQ ID NO: 1485698 - RNA, 19 nt, Homo sapiens
  misc_RNA (1)...(19): siRNA sense strand
uucaaugcaucuuggugua

SEQ ID NO: 1485699 - RNA, 19 nt, Homo sapiens
  misc_RNA (1)...(19): siRNA sense strand
aguauacgcaagcuccuua

SEQ ID NO: 1485700 - RNA, 19 nt, Homo sapiens
  misc_RNA (1)...(19): siRNA sense strand
gaauggauugcuccugcuu

SEQ ID NO: 1485701 - RNA, 19 nt, Homo sapiens
  misc_RNA (1)...(19): siRNA sense strand
caucugguaaucccaagaa

SEQ ID NO: 1485702 - RNA, 19 nt, Homo sapiens
  misc_RNA (1)...(19): siRNA sense strand
ccaacacagacaagagauu

SEQ ID NO: 1485703 - RNA, 19 nt, Homo sapiens
  misc_RNA (1)...(19): siRNA sense strand
ugagggacaguggaacaua

SEQ ID NO: 1485704 - RNA, 19 nt, Homo sapiens
  misc_RNA (1)...(19): siRNA sense strand
uccugaccaugcacucuua

SEQ ID NO: 1485705 - RNA, 19 nt, Homo sapiens
  misc_RNA (1)...(19): siRNA sense strand
aaacugccaagaucaaaca

SEQ ID NO: 1485706 - RNA, 19 nt, Homo sapiens
  misc_RNA (1)...(19): siRNA sense strand
uagaaacugccaagaucaa

SEQ ID NO: 1485707 - RNA, 19 nt, Homo sapiens
  misc_RNA (1)...(19): siRNA sense strand
guacaaggaaguggugaca

SEQ ID NO: 1485708 - RNA, 19 nt, Homo sapiens
  misc_RNA (1)...(19): siRNA sense strand
gccuggagacguauuccua

SEQ ID NO: 1485709 - RNA, 19 nt, Homo sapiens
  misc_RNA (1)...(19): siRNA sense strand
ugaaagaacugaaauguga

SEQ ID NO: 1485710 - RNA, 19 nt, Homo sapiens
  misc_RNA (1)...(19): siRNA sense strand
gaacaugccauauaacauu

SEQ ID NO: 1485711 - RNA, 19 nt, Homo sapiens
  misc_RNA (1)...(19): siRNA sense strand
ccaaacaucuuuacacaga

SEQ ID NO: 1485712 - RNA, 19 nt, Homo sapiens
  misc_RNA (1)...(19): siRNA sense strand
ucagucagauugugucuua

SEQ ID NO: 1485713 - RNA, 19 nt, Homo sapiens
  misc_RNA (1)...(19): siRNA sense strand
gagacucuauccugaaaua

SEQ ID NO: 1485714 - RNA, 19 nt, Homo sapiens
  misc_RNA (1)...(19): siRNA sense strand
gaacgaggagccuucaaua

SEQ ID NO: 1485715 - RNA, 19 nt, Homo sapiens
  misc_RNA (1)...(19): siRNA sense strand
caagaucucuggaaucguu

SEQ ID NO: 1485716 - RNA, 19 nt, Homo sapiens
  misc_RNA (1)...(19): siRNA sense strand
gaacuguagcugugauuua

SEQ ID NO: 1485717 - RNA, 19 nt, Homo sapiens
  misc_RNA (1)...(19): siRNA sense strand
ggacuguacuugugacuug

SEQ ID NO: 1485718 - RNA, 19 nt, Homo sapiens
  misc_RNA (1)...(19): siRNA sense strand
cuaaagagccugccuguuu

SEQ ID NO: 1485719 - RNA, 19 nt, Homo sapiens
  misc_RNA (1)...(19): siRNA sense strand
caacaaauccuuccaagau

SEQ ID NO: 1485720 - RNA, 19 nt, Homo sapiens
  misc_RNA (1)...(19): siRNA sense strand
ucaauaagcuccacaaacu

SEQ ID NO: 1485721 - RNA, 19 nt, Homo sapiens
  misc_RNA (1)...(19): siRNA sense strand
ggacuggauuugcuucauu

SEQ ID NO: 1485722 - RNA, 19 nt, Homo sapiens
  misc_RNA (1)...(19): siRNA sense strand
aaacacacccuucagauuu

SEQ ID NO: 1485723 - RNA, 19 nt, Homo sapiens
  misc_RNA (1)...(19): siRNA sense strand
cgaagaagcugcacgucaa

SEQ ID NO: 1485724 - RNA, 19 nt, Homo sapiens
  misc_RNA (1)...(19): siRNA sense strand
gaacugaagucccucaaaa

SEQ ID NO: 1485725 - RNA, 19 nt, Homo sapiens
  misc_RNA (1)...(19): siRNA sense strand
ggacagaaaguuguuauga

SEQ ID NO: 1485726 - RNA, 19 nt, Homo sapiens
  misc_RNA (1)...(19): siRNA sense strand
gagauccgcuauccagaaa

SEQ ID NO: 1485727 - RNA, 19 nt, Homo sapiens
  misc_RNA (1)...(19): siRNA sense strand
uggagaacaugccauauaa

SEQ ID NO: 1485728 - RNA, 19 nt, Homo sapiens
  misc_RNA (1)...(19): siRNA sense strand
gcauagagaacuuggagua

SEQ ID NO: 1485729 - RNA, 19 nt, Homo sapiens
  misc_RNA (1)...(19): siRNA sense strand
gaacugauaccgaaaccuu

SEQ ID NO: 1485730 - RNA, 19 nt, Homo sapiens
  misc_RNA (1)...(19): siRNA sense strand
gaagauaacccuuggaacu

SEQ ID NO: 1485731 - RNA, 19 nt, Homo sapiens
  misc_RNA (1)...(19): siRNA sense strand
cgacaaggagaaagauuua

SEQ ID NO: 1485732 - RNA, 19 nt, Homo sapiens
  misc_RNA (1)...(19): siRNA sense strand
ggaagagacugagcacaau

SEQ ID NO: 1485733 - RNA, 19 nt, Homo sapiens
  misc_RNA (1)...(19): siRNA sense strand
uaaagcaguugcacuugaa

SEQ ID NO: 1485734 - RNA, 19 nt, Homo sapiens
  misc_RNA (1)...(19): siRNA sense strand
aaaggaagagugaguauuu

SEQ ID NO: 1485735 - RNA, 19 nt, Homo sapiens
  misc_RNA (1)...(19): siRNA sense strand
acagaaaguuguuaugaga

SEQ ID NO: 1485736 - RNA, 19 nt, Homo sapiens
  misc_RNA (1)...(19): siRNA sense strand
ugagacgccuguucaguuu

SEQ ID NO: 1485737 - RNA, 19 nt, Homo sapiens
  misc_RNA (1)...(19): siRNA sense strand
acaauaaucuccuaaagag

SEQ ID NO: 1485738 - RNA, 19 nt, Homo sapiens
  misc_RNA (1)...(19): siRNA sense strand
uccagaagcucccuuauau

SEQ ID NO: 1485739 - RNA, 19 nt, Homo sapiens
  misc_RNA (1)...(19): siRNA sense strand
uugaugagcuggaugaauu

SEQ ID NO: 1485740 - RNA, 19 nt, Homo sapiens
  misc_RNA (1)...(19): siRNA sense strand
gugagaagguuucagucua

SEQ ID NO: 1485741 - RNA, 19 nt, Homo sapiens
  misc_RNA (1)...(19): siRNA sense strand
gaacaaaggaagagugagu

SEQ ID NO: 1485742 - RNA, 19 nt, Homo sapiens
  misc_RNA (1)...(19): siRNA sense strand
gagcacagaagcuuucauu

SEQ ID NO: 1485743 - RNA, 19 nt, Homo sapiens
  misc_RNA (1)...(19): siRNA sense strand
gauugugucuuaccaaaca

SEQ ID NO: 1485744 - RNA, 19 nt, Homo sapiens
  misc_RNA (1)...(19): siRNA sense strand
uaacgguguuuguugcuuu

SEQ ID NO: 1485745 - RNA, 19 nt, Homo sapiens
  misc_RNA (1)...(19): siRNA sense strand
gaucaguugcaaucucuua

SEQ ID NO: 1485746 - RNA, 19 nt, Homo sapiens
  misc_RNA (1)...(19): siRNA sense strand
gaacaacaaauucauguac

SEQ ID NO: 1485747 - RNA, 19 nt, Homo sapiens
  misc_RNA (1)...(19): siRNA sense strand
gauaacccuuggaacugua

SEQ ID NO: 1485748 - RNA, 19 nt, Homo sapiens
  misc_RNA (1)...(19): siRNA sense strand
ggagacguauuucacaauc

SEQ ID NO: 1485749 - RNA, 19 nt, Homo sapiens
  misc_RNA (1)...(19): siRNA sense strand
gauuaagggagacguauuu

SEQ ID NO: 1485750 - RNA, 19 nt, Homo sapiens
  misc_RNA (1)...(19): siRNA sense strand
gaagcuaucugugaaacuc

SEQ ID NO: 1485751 - RNA, 19 nt, Homo sapiens
  misc_RNA (1)...(19): siRNA sense strand
gucuaugucugaacugaua

SEQ ID NO: 1485752 - RNA, 19 nt, Homo sapiens
  misc_RNA (1)...(19): siRNA sense strand
ugacauaucgguggaaauu

SEQ ID NO: 1485753 - RNA, 19 nt, Homo sapiens
  misc_RNA (1)...(19): siRNA sense strand
aaacagcuuugaacaagau

SEQ ID NO: 1485754 - RNA, 19 nt, Homo sapiens
  misc_RNA (1)...(19): siRNA sense strand
gaaauguggccgacaagga

SEQ ID NO: 1485755 - RNA, 19 nt, Homo sapiens
  misc_RNA (1)...(19): siRNA sense strand
uuacacagauugacuugga

SEQ ID NO: 1485756 - RNA, 19 nt, Homo sapiens
  misc_RNA (1)...(19): siRNA sense strand
gagaacaugccauauaaca

SEQ ID NO: 1485757 - RNA, 19 nt, Homo sapiens
  misc_RNA (1)...(19): siRNA sense strand
ccaauguguuuauucagaa

SEQ ID NO: 1485758 - RNA, 19 nt, Homo sapiens
  misc_RNA (1)...(19): siRNA sense strand
acauaucgguggaaauuug

SEQ ID NO: 1485759 - RNA, 19 nt, Homo sapiens
  misc_RNA (1)...(19): siRNA sense strand
cgacgggauuguugugaaa

SEQ ID NO: 1485760 - RNA, 19 nt, Homo sapiens
  misc_RNA (1)...(19): siRNA sense strand
ggaauaauaaacugcagaa

SEQ ID NO: 1485761 - RNA, 19 nt, Homo sapiens
  misc_RNA (1)...(19): siRNA sense strand
ugagaaauguggccgacaa

SEQ ID NO: 1485762 - RNA, 19 nt, Homo sapiens
  misc_RNA (1)...(19): siRNA sense strand
gacuggauuugcuucauuu

SEQ ID NO: 1485763 - RNA, 19 nt, Homo sapiens
  misc_RNA (1)...(19): siRNA sense strand
cagauugugucuuaccaaa

SEQ ID NO: 1485764 - RNA, 19 nt, Homo sapiens
  misc_RNA (1)...(19): siRNA sense strand
uuaaagcaguugcacuuga

SEQ ID NO: 1485765 - RNA, 19 nt, Homo sapiens
  misc_RNA (1)...(19): siRNA sense strand
gagccugccuguuuacauc

SEQ ID NO: 1485766 - RNA, 19 nt, Homo sapiens
  misc_RNA (1)...(19): siRNA sense strand
gaagagacugagcacaauu

SEQ ID NO: 1485767 - RNA, 19 nt, Homo sapiens
  misc_RNA (1)...(19): siRNA sense strand
gagaaugugcucuauguca

SEQ ID NO: 1485768 - RNA, 19 nt, Homo sapiens
  misc_RNA (1)...(19): siRNA sense strand
ggaacaacaaauucaugua

SEQ ID NO: 1485769 - RNA, 19 nt, Homo sapiens
  misc_RNA (1)...(19): siRNA sense strand
gaauugcaacuggaagaua

SEQ ID NO: 1485770 - RNA, 19 nt, Homo sapiens
  misc_RNA (1)...(19): siRNA sense strand
aaucuuaugucccaaacuu

SEQ ID NO: 1485771 - RNA, 19 nt, Homo sapiens
  misc_RNA (1)...(19): siRNA sense strand
uuaggcagcaaucaaauua

SEQ ID NO: 1485772 - RNA, 19 nt, Homo sapiens
  misc_RNA (1)...(19): siRNA sense strand
uuucauuccuuccugauaa

SEQ ID NO: 1485773 - RNA, 19 nt, Homo sapiens
  misc_RNA (1)...(19): siRNA sense strand
gacagaaaguuguuaugag

SEQ ID NO: 1485774 - RNA, 19 nt, Homo sapiens
  misc_RNA (1)...(19): siRNA sense strand
gaauccagaagcucccuua

SEQ ID NO: 1485775 - RNA, 19 nt, Homo sapiens
  misc_RNA (1)...(19): siRNA sense strand
aauugcaacuggaagauaa

SEQ ID NO: 1485776 - RNA, 19 nt, Homo sapiens
  misc_RNA (1)...(19): siRNA sense strand
uagcagggauuccaaugug

SEQ ID NO: 1485777 - RNA, 19 nt, Homo sapiens
  misc_RNA (1)...(19): siRNA sense strand
ggacugagcacagaagcuu

SEQ ID NO: 1485778 - RNA, 19 nt, Homo sapiens
  misc_RNA (1)...(19): siRNA sense strand
gaaguugagcgacgggauu

SEQ ID NO: 1485779 - RNA, 19 nt, Homo sapiens
  misc_RNA (1)...(19): siRNA sense strand
caacaaacaagagcuaugu

SEQ ID NO: 1485780 - RNA, 19 nt, Homo sapiens
  misc_RNA (1)...(19): siRNA sense strand
gcacuugaacaacaaugaa

SEQ ID NO: 1485781 - RNA, 19 nt, Homo sapiens
  misc_RNA (1)...(19): siRNA sense strand
agacugagcacaauugaug

SEQ ID NO: 1485782 - RNA, 19 nt, Homo sapiens
  misc_RNA (1)...(19): siRNA sense strand
uaaggaagcaugaccacaa

SEQ ID NO: 1485783 - RNA, 19 nt, Homo sapiens
  misc_RNA (1)...(19): siRNA sense strand
caggcugacuacaauuuaa

SEQ ID NO: 1485784 - RNA, 19 nt, Homo sapiens
  misc_RNA (1)...(19): siRNA sense strand
gauauacgagggaacagaa

SEQ ID NO: 1485785 - RNA, 19 nt, Homo sapiens
  misc_RNA (1)...(19): siRNA sense strand
cacagaagcuuucauucca

SEQ ID NO: 1485786 - RNA, 19 nt, Homo sapiens
  misc_RNA (1)...(19): siRNA sense strand
guggaaauuugcaaugugu

SEQ ID NO: 1485787 - RNA, 19 nt, Homo sapiens
  misc_RNA (1)...(19): siRNA sense strand
aguaagaagucacugauag

SEQ ID NO: 1485788 - RNA, 19 nt, Homo sapiens
  misc_RNA (1)...(19): siRNA sense strand
gaagguuucagucuacaga

SEQ ID NO: 1485789 - RNA, 19 nt, Homo sapiens
  misc_RNA (1)...(19): siRNA sense strand
caagaaacccacagugaag

SEQ ID NO: 1485790 - RNA, 19 nt, Homo sapiens
  misc_RNA (1)...(19): siRNA sense strand
gaaaucuuaugucccaaac

SEQ ID NO: 1485791 - RNA, 19 nt, Homo sapiens
  misc_RNA (1)...(19): siRNA sense strand
caaauuacagugauuaagg

SEQ ID NO: 1485792 - RNA, 19 nt, Homo sapiens
  misc_RNA (1)...(19): siRNA sense strand
ucaaggauguggacguauc

SEQ ID NO: 1485793 - RNA, 19 nt, Homo sapiens
  misc_RNA (1)...(19): siRNA sense strand
gaagcuuucauuccacaaa

SEQ ID NO: 1485794 - RNA, 19 nt, Homo sapiens
  misc_RNA (1)...(19): siRNA sense strand
ggacguaucagacuucacu

SEQ ID NO: 1485795 - RNA, 19 nt, Homo sapiens
  misc_RNA (1)...(19): siRNA sense strand
ggagaagcuaucugugaaa

SEQ ID NO: 1485796 - RNA, 19 nt, Homo sapiens
  misc_RNA (1)...(19): siRNA sense strand
caaacuauagaacagauga

SEQ ID NO: 1485797 - RNA, 19 nt, Homo sapiens
  misc_RNA (1)...(19): siRNA sense strand
gcacagaagcuuucauucc

SEQ ID NO: 1485798 - RNA, 19 nt, Homo sapiens
  misc_RNA (1)...(19): siRNA sense strand
caugccaaauuugcaguua

SEQ ID NO: 1485799 - RNA, 19 nt, Homo sapiens
  misc_RNA (1)...(19): siRNA sense strand
agaaugugcucuaugucaa

SEQ ID NO: 1485800 - RNA, 19 nt, Homo sapiens
  misc_RNA (1)...(19): siRNA sense strand
gcacgucaauggcaauagc

SEQ ID NO: 1485801 - RNA, 19 nt, Homo sapiens
  misc_RNA (1)...(19): siRNA sense strand
gauuugggacuaaguguga

SEQ ID NO: 1485802 - RNA, 19 nt, Homo sapiens
  misc_RNA (1)...(19): siRNA sense strand
ugaaacucccagugacuua

SEQ ID NO: 1485803 - RNA, 19 nt, Homo sapiens
  misc_RNA (1)...(19): siRNA sense strand
cccagugacuuauauggaa

SEQ ID NO: 1485804 - RNA, 19 nt, Homo sapiens
  misc_RNA (1)...(19): siRNA sense strand
uauaauagcauagguguca

SEQ ID NO: 1485805 - RNA, 19 nt, Homo sapiens
  misc_RNA (1)...(19): siRNA sense strand
ggauuccaauguguuuauu

SEQ ID NO: 1485806 - RNA, 19 nt, Homo sapiens
  misc_RNA (1)...(19): siRNA sense strand
aaggaagcaugaccacaaa

SEQ ID NO: 1485807 - RNA, 19 nt, Homo sapiens
  misc_RNA (1)...(19): siRNA sense strand
gcgacgggauuguugugaa

SEQ ID NO: 1485808 - RNA, 19 nt, Homo sapiens
  misc_RNA (1)...(19): siRNA sense strand
acaagaaacccacagugaa

SEQ ID NO: 1485809 - RNA, 19 nt, Homo sapiens
  misc_RNA (1)...(19): siRNA sense strand
gaaaggagauuugggauau

SEQ ID NO: 1485810 - RNA, 19 nt, Homo sapiens
  misc_RNA (1)...(19): siRNA sense strand
gaacacugcugcacuaauc

SEQ ID NO: 1485811 - RNA, 19 nt, Homo sapiens
  misc_RNA (1)...(19): siRNA sense strand
gggcagagaugaaaguaaa

SEQ ID NO: 1485812 - RNA, 19 nt, Homo sapiens
  misc_RNA (1)...(19): siRNA sense strand
caacacaucuguaggaaca

SEQ ID NO: 1485813 - RNA, 19 nt, Homo sapiens
  misc_RNA (1)...(19): siRNA sense strand
ggaagcaccugccucuuga

SEQ ID NO: 1485814 - RNA, 19 nt, Homo sapiens
  misc_RNA (1)...(19): siRNA sense strand
guagcugacuccuugguua

SEQ ID NO: 1485815 - RNA, 19 nt, Homo sapiens
  misc_RNA (1)...(19): siRNA sense strand
gaacagagccauccaaagc

SEQ ID NO: 1485816 - RNA, 19 nt, Homo sapiens
  misc_RNA (1)...(19): siRNA sense strand
gcaaauggagcaacaacaa

SEQ ID NO: 1485817 - RNA, 19 nt, Homo sapiens
  misc_RNA (1)...(19): siRNA sense strand
gccagcagcuccaucguuu

SEQ ID NO: 1485818 - RNA, 19 nt, Homo sapiens
  misc_RNA (1)...(19): siRNA sense strand
gcaccugccucuugagugu

SEQ ID NO: 1485819 - RNA, 19 nt, Homo sapiens
  misc_RNA (1)...(19): siRNA sense strand
cagaagaaauagacgauuc

SEQ ID NO: 1485820 - RNA, 19 nt, Homo sapiens
  misc_RNA (1)...(19): siRNA sense strand
cagagaccauggcaacuuu

SEQ ID NO: 1485821 - RNA, 19 nt, Homo sapiens
  misc_RNA (1)...(19): siRNA sense strand
acaacaacaucacaaagaa

SEQ ID NO: 1485822 - RNA, 19 nt, Homo sapiens
  misc_RNA (1)...(19): siRNA sense strand
caucaccuacguuuauuua

SEQ ID NO: 1485823 - RNA, 19 nt, Homo sapiens
  misc_RNA (1)...(19): siRNA sense strand
agacgauucuuucaugauu

SEQ ID NO: 1485824 - RNA, 19 nt, Homo sapiens
  misc_RNA (1)...(19): siRNA sense strand
gauccaggcucugcaguau

SEQ ID NO: 1485825 - RNA, 19 nt, Homo sapiens
  misc_RNA (1)...(19): siRNA sense strand
gcaacaacaacaucacaaa

SEQ ID NO: 1485826 - RNA, 19 nt, Homo sapiens
  misc_RNA (1)...(19): siRNA sense strand
gagcaccuuugcauuaugu

SEQ ID NO: 1485827 - RNA, 19 nt, Homo sapiens
  misc_RNA (1)...(19): siRNA sense strand
gacgauucuuucaugauuu

SEQ ID NO: 1485828 - RNA, 19 nt, Homo sapiens
  misc_RNA (1)...(19): siRNA sense strand
ccagguaguuguuggaauc

SEQ ID NO: 1485829 - RNA, 19 nt, Homo sapiens
  misc_RNA (1)...(19): siRNA sense strand
aauagacgauucuuucaug

SEQ ID NO: 1485830 - RNA, 19 nt, Homo sapiens
  misc_RNA (1)...(19): siRNA sense strand
aagccaagauccacagauu

SEQ ID NO: 1485831 - RNA, 19 nt, Homo sapiens
  misc_RNA (1)...(19): siRNA sense strand
caacaacaucacaaagaaa

SEQ ID NO: 1485832 - RNA, 19 nt, Homo sapiens
  misc_RNA (1)...(19): siRNA sense strand
gcaccuuugcauuauguua

SEQ ID NO: 1485833 - RNA, 19 nt, Homo sapiens
  misc_RNA (1)...(19): siRNA sense strand
gcuggacccuacacuauuc

SEQ ID NO: 1485834 - RNA, 19 nt, Homo sapiens
  misc_RNA (1)...(19): siRNA sense strand
uuauuuagcucucuucgau

SEQ ID NO: 1485835 - RNA, 19 nt, Homo sapiens
  misc_RNA (1)...(19): siRNA sense strand
gccaagauccacagauuug

SEQ ID NO: 1485836 - RNA, 19 nt, Homo sapiens
  misc_RNA (1)...(19): siRNA sense strand
gcacaaacagcagguacaa

SEQ ID NO: 1485837 - RNA, 19 nt, Homo sapiens
  misc_RNA (1)...(19): siRNA sense strand
ucacaaagaaaggagauuu

SEQ ID NO: 1485838 - RNA, 19 nt, Homo sapiens
  misc_RNA (1)...(19): siRNA sense strand
gcacuaaucauugccuguu

SEQ ID NO: 1485839 - RNA, 19 nt, Homo sapiens
  misc_RNA (1)...(19): siRNA sense strand
gugagcaccuuugcauuau

SEQ ID NO: 1485840 - RNA, 19 nt, Homo sapiens
  misc_RNA (1)...(19): siRNA sense strand
ccaaagcauccuugcauug

SEQ ID NO: 1485841 - RNA, 19 nt, Homo sapiens
  misc_RNA (1)...(19): siRNA sense strand
cuaccagucuccugcuuug

SEQ ID NO: 1485842 - RNA, 19 nt, Homo sapiens
  misc_RNA (1)...(19): siRNA sense strand
ggagagaaacccaccaaac

SEQ ID NO: 1485843 - RNA, 19 nt, Homo sapiens
  misc_RNA (1)...(19): siRNA sense strand
gcagguacaacacaucugu

SEQ ID NO: 1485844 - RNA, 19 nt, Homo sapiens
  misc_RNA (1)...(19): siRNA sense strand
gaagucacaaagucaguau

SEQ ID NO: 1485845 - RNA, 19 nt, Homo sapiens
  misc_RNA (1)...(19): siRNA sense strand
uuauacaacuggcaaaugg

SEQ ID NO: 1485846 - RNA, 19 nt, Homo sapiens
  misc_RNA (1)...(19): siRNA sense strand
gggcuggacccuacacuau

SEQ ID NO: 1485847 - RNA, 19 nt, Homo sapiens
  misc_RNA (1)...(19): siRNA sense strand
gggaacagagccauccaaa

SEQ ID NO: 1485848 - RNA, 19 nt, Homo sapiens
  misc_RNA (1)...(19): siRNA sense strand
acacagcugucuuuucuuu

SEQ ID NO: 1485849 - RNA, 19 nt, Homo sapiens
  misc_RNA (1)...(19): siRNA sense strand
ccagucuccugcuuuguau

SEQ ID NO: 1485850 - RNA, 19 nt, Homo sapiens
  misc_RNA (1)...(19): siRNA sense strand
agaaaggagauuugggaua

SEQ ID NO: 1485851 - RNA, 19 nt, Homo sapiens
  misc_RNA (1)...(19): siRNA sense strand
ugucuugugucuuuauuuc

SEQ ID NO: 1485852 - RNA, 19 nt, Homo sapiens
  misc_RNA (1)...(19): siRNA sense strand
aaggagauuugggauauug

SEQ ID NO: 1485853 - RNA, 19 nt, Homo sapiens
  misc_RNA (1)...(19): siRNA sense strand
caacaacaacaucacaaag

SEQ ID NO: 1485854 - RNA, 19 nt, Homo sapiens
  misc_RNA (1)...(19): siRNA sense strand
caacaucacaaagaaagga

SEQ ID NO: 1485855 - RNA, 19 nt, Homo sapiens
  misc_RNA (1)...(19): siRNA sense strand
uuagcucucuucgauaauu

SEQ ID NO: 1485856 - RNA, 19 nt, Homo sapiens
  misc_RNA (1)...(19): siRNA sense strand
auuuagcucucuucgauaa

SEQ ID NO: 1485857 - RNA, 19 nt, Homo sapiens
  misc_RNA (1)...(19): siRNA sense strand
acaaacagcagguacaaca

SEQ ID NO: 1485858 - RNA, 19 nt, Homo sapiens
  misc_RNA (1)...(19): siRNA sense strand
ggagauuugggauauuguu

SEQ ID NO: 1485859 - RNA, 19 nt, Homo sapiens
  misc_RNA (1)...(19): siRNA sense strand
gagcaacaacaacaucaca

SEQ ID NO: 1485860 - RNA, 19 nt, Homo sapiens
  misc_RNA (1)...(19): siRNA sense strand
gcagaagaaauagacgauu

SEQ ID NO: 1485861 - RNA, 19 nt, Homo sapiens
  misc_RNA (1)...(19): siRNA sense strand
cuucaucaccuacguuuau

SEQ ID NO: 1485862 - RNA, 19 nt, Homo sapiens
  misc_RNA (1)...(19): siRNA sense strand
gagagaaacccaccaaacc

SEQ ID NO: 1485863 - RNA, 19 nt, Homo sapiens
  misc_RNA (1)...(19): siRNA sense strand
ucacaaagucaguauaugc

SEQ ID NO: 1485864 - RNA, 19 nt, Homo sapiens
  misc_RNA (1)...(19): siRNA sense strand
gauuugggauauuguucug

SEQ ID NO: 1485865 - RNA, 19 nt, Homo sapiens
  misc_RNA (1)...(19): siRNA sense strand
aaaggagauuugggauauu

SEQ ID NO: 1485866 - RNA, 19 nt, Homo sapiens
  misc_RNA (1)...(19): siRNA sense strand
gugcugggccuuccacaug

SEQ ID NO: 1485867 - RNA, 19 nt, Homo sapiens
  misc_RNA (1)...(19): siRNA sense strand
cacuaaucauugccuguuu

SEQ ID NO: 1485868 - RNA, 19 nt, Homo sapiens
  misc_RNA (1)...(19): siRNA sense strand
uggaagcaccugccucuug

SEQ ID NO: 1485869 - RNA, 19 nt, Homo sapiens
  misc_RNA (1)...(19): siRNA sense strand
caaagcauccuugcauugg

SEQ ID NO: 1485870 - RNA, 19 nt, Homo sapiens
  misc_RNA (1)...(19): siRNA sense strand
uccaaagcauccuugcauu

SEQ ID NO: 1485871 - RNA, 19 nt, Homo sapiens
  misc_RNA (1)...(19): siRNA sense strand
ccagagaccauggcaacuu

SEQ ID NO: 1485872 - RNA, 19 nt, Homo sapiens
  misc_RNA (1)...(19): siRNA sense strand
ucaccuacguuuauuuagc

SEQ ID NO: 1485873 - RNA, 19 nt, Homo sapiens
  misc_RNA (1)...(19): siRNA sense strand
caagauccacagauuugau

SEQ ID NO: 1485874 - RNA, 19 nt, Homo sapiens
  misc_RNA (1)...(19): siRNA sense strand
cagcgcagccuggcauuug

SEQ ID NO: 1485875 - RNA, 19 nt, Homo sapiens
  misc_RNA (1)...(19): siRNA sense strand
auagacgauucuuucauga

SEQ ID NO: 1485876 - RNA, 19 nt, Homo sapiens
  misc_RNA (1)...(19): siRNA sense strand
aacaacaacaucacaaaga

SEQ ID NO: 1485877 - RNA, 19 nt, Homo sapiens
  misc_RNA (1)...(19): siRNA sense strand
acacaucuguaggaacaau

SEQ ID NO: 1485878 - RNA, 19 nt, Homo sapiens
  misc_RNA (1)...(19): siRNA sense strand
cucuuugucuugugucuuu

SEQ ID NO: 1485879 - RNA, 19 nt, Homo sapiens
  misc_RNA (1)...(19): siRNA sense strand
ggaacagagccauccaaag

SEQ ID NO: 1485880 - RNA, 19 nt, Homo sapiens
  misc_RNA (1)...(19): siRNA sense strand
ccuugguuauccuaucuaa

SEQ ID NO: 1485881 - RNA, 19 nt, Homo sapiens
  misc_RNA (1)...(19): siRNA sense strand
gagauuugggauauuguuc

SEQ ID NO: 1485882 - RNA, 19 nt, Homo sapiens
  misc_RNA (1)...(19): siRNA sense strand
gcauuauguuacgcccuuu

SEQ ID NO: 1485883 - RNA, 19 nt, Homo sapiens
  misc_RNA (1)...(19): siRNA sense strand
aaacagcagguacaacaca

SEQ ID NO: 1485884 - RNA, 19 nt, Homo sapiens
  misc_RNA (1)...(19): siRNA sense strand
acagagccauccaaagcau

SEQ ID NO: 1485885 - RNA, 19 nt, Homo sapiens
  misc_RNA (1)...(19): siRNA sense strand
uuucuacacucucuugucu

SEQ ID NO: 1485886 - RNA, 19 nt, Homo sapiens
  misc_RNA (1)...(19): siRNA sense strand
guuacgcccuuuccuucau

SEQ ID NO: 1485887 - RNA, 19 nt, Homo sapiens
  misc_RNA (1)...(19): siRNA sense strand
ugaagucacaaagucagua

SEQ ID NO: 1485888 - RNA, 19 nt, Homo sapiens
  misc_RNA (1)...(19): siRNA sense strand
uuucaucucuuugucuugu

SEQ ID NO: 1485889 - RNA, 19 nt, Homo sapiens
  misc_RNA (1)...(19): siRNA sense strand
acgauucuuucaugauuuc

SEQ ID NO: 1485890 - RNA, 19 nt, Homo sapiens
  misc_RNA (1)...(19): siRNA sense strand
ugagcaccuuugcauuaug

SEQ ID NO: 1485891 - RNA, 19 nt, Homo sapiens
  misc_RNA (1)...(19): siRNA sense strand
agucacaaagucaguauau

SEQ ID NO: 1485892 - RNA, 19 nt, Homo sapiens
  misc_RNA (1)...(19): siRNA sense strand
ccugcuuuguauccaauaa

SEQ ID NO: 1485893 - RNA, 19 nt, Homo sapiens
  misc_RNA (1)...(19): siRNA sense strand
ccaagauccacagauuuga

SEQ ID NO: 1485894 - RNA, 19 nt, Homo sapiens
  misc_RNA (1)...(19): siRNA sense strand
uccaggcucugcaguaucu

SEQ ID NO: 1485895 - RNA, 19 nt, Homo sapiens
  misc_RNA (1)...(19): siRNA sense strand
ggcuggacccuacacuauu

SEQ ID NO: 1485896 - RNA, 19 nt, Homo sapiens
  misc_RNA (1)...(19): siRNA sense strand
uccaguugguggcuaguga

SEQ ID NO: 1485897 - RNA, 19 nt, Homo sapiens
  misc_RNA (1)...(19): siRNA sense strand
caccuacguuuauuuagcu

SEQ ID NO: 1485898 - RNA, 19 nt, Homo sapiens
  misc_RNA (1)...(19): siRNA sense strand
ucuacacucucuugucucu

SEQ ID NO: 1485899 - RNA, 19 nt, Homo sapiens
  misc_RNA (1)...(19): siRNA sense strand
ggccagcagcuccaucguu

SEQ ID NO: 1485900 - RNA, 19 nt, Homo sapiens
  misc_RNA (1)...(19): siRNA sense strand
gucacaaagucaguauaug

SEQ ID NO: 1485901 - RNA, 19 nt, Homo sapiens
  misc_RNA (1)...(19): siRNA sense strand
aaauggagcaacaacaaca

SEQ ID NO: 1485902 - RNA, 19 nt, Homo sapiens
  misc_RNA (1)...(19): siRNA sense strand
ccaggugggcagagaugaa

SEQ ID NO: 1485903 - RNA, 19 nt, Homo sapiens
  misc_RNA (1)...(19): siRNA sense strand
aagauccacagauuugauu

SEQ ID NO: 1485904 - RNA, 19 nt, Homo sapiens
  misc_RNA (1)...(19): siRNA sense strand
caaauggagcaacaacaac

SEQ ID NO: 1485905 - RNA, 19 nt, Homo sapiens
  misc_RNA (1)...(19): siRNA sense strand
guaaaagccccgacauaca

SEQ ID NO: 1485906 - RNA, 19 nt, Homo sapiens
  misc_RNA (1)...(19): siRNA sense strand
uagcugacuccuugguuau

SEQ ID NO: 1485907 - RNA, 19 nt, Homo sapiens
  misc_RNA (1)...(19): siRNA sense strand
uagcucucuucgauaauuc

SEQ ID NO: 1485908 - RNA, 19 nt, Homo sapiens
  misc_RNA (1)...(19): siRNA sense strand
caggugggcagagaugaaa

SEQ ID NO: 1485909 - RNA, 19 nt, Homo sapiens
  misc_RNA (1)...(19): siRNA sense strand
acaagcugcugguguugga

SEQ ID NO: 1485910 - RNA, 19 nt, Homo sapiens
  misc_RNA (1)...(19): siRNA sense strand
ugcacaagcugcugguguu

SEQ ID NO: 1485911 - RNA, 19 nt, Homo sapiens
  misc_RNA (1)...(19): siRNA sense strand
gcacaagcugcugguguug

SEQ ID NO: 1485912 - RNA, 19 nt, Homo sapiens
  misc_RNA (1)...(19): siRNA sense strand
uaaagaaacuggacaugaa

SEQ ID NO: 1485913 - RNA, 19 nt, Homo sapiens
  misc_RNA (1)...(19): siRNA sense strand
gcagaacgccuccaggaaa

SEQ ID NO: 1485914 - RNA, 19 nt, Homo sapiens
  misc_RNA (1)...(19): siRNA sense strand
guaaaguacuaccaugcua

SEQ ID NO: 1485915 - RNA, 19 nt, Homo sapiens
  misc_RNA (1)...(19): siRNA sense strand
gaacggccgugcuuaugug

SEQ ID NO: 1485916 - RNA, 19 nt, Homo sapiens
  misc_RNA (1)...(19): siRNA sense strand
ugacagagcaugacccuuu

SEQ ID NO: 1485917 - RNA, 19 nt, Homo sapiens
  misc_RNA (1)...(19): siRNA sense strand
uagaugaccuggaaacguu

SEQ ID NO: 1485918 - RNA, 19 nt, Homo sapiens
  misc_RNA (1)...(19): siRNA sense strand
cgugggagcucuuuguaaa

SEQ ID NO: 1485919 - RNA, 19 nt, Homo sapiens
  misc_RNA (1)...(19): siRNA sense strand
cuccagaucuuugcuguua

SEQ ID NO: 1485920 - RNA, 19 nt, Homo sapiens
  misc_RNA (1)...(19): siRNA sense strand
gaagcagaaagaacugaua

SEQ ID NO: 1485921 - RNA, 19 nt, Homo sapiens
  misc_RNA (1)...(19): siRNA sense strand
gcaaggaugagcugacuau

SEQ ID NO: 1485922 - RNA, 19 nt, Homo sapiens
  misc_RNA (1)...(19): siRNA sense strand
caacccagcccgagucaaa

SEQ ID NO: 1485923 - RNA, 19 nt, Homo sapiens
  misc_RNA (1)...(19): siRNA sense strand
ggaaacguuugccuaucaa

SEQ ID NO: 1485924 - RNA, 19 nt, Homo sapiens
  misc_RNA (1)...(19): siRNA sense strand
gcccucacguccuagguua

SEQ ID NO: 1485925 - RNA, 19 nt, Homo sapiens
  misc_RNA (1)...(19): siRNA sense strand
cagaggaugugaagaaagu

SEQ ID NO: 1485926 - RNA, 19 nt, Homo sapiens
  misc_RNA (1)...(19): siRNA sense strand
ggacaugaaucugaaugag

SEQ ID NO: 1485927 - RNA, 19 nt, Homo sapiens
  misc_RNA (1)...(19): siRNA sense strand
ccagggaugagccuuguua

SEQ ID NO: 1485928 - RNA, 19 nt, Homo sapiens
  misc_RNA (1)...(19): siRNA sense strand
gcacacacaggcuuugaga

SEQ ID NO: 1485929 - RNA, 19 nt, Homo sapiens
  misc_RNA (1)...(19): siRNA sense strand
aaacaaaggcagaggaugu

SEQ ID NO: 1485930 - RNA, 19 nt, Homo sapiens
  misc_RNA (1)...(19): siRNA sense strand
aaacuggacaugaaucuga

SEQ ID NO: 1485931 - RNA, 19 nt, Homo sapiens
  misc_RNA (1)...(19): siRNA sense strand
gauccgagaccuugagaug

SEQ ID NO: 1485932 - RNA, 19 nt, Homo sapiens
  misc_RNA (1)...(19): siRNA sense strand
uggaaacguuugccuauca

SEQ ID NO: 1485933 - RNA, 19 nt, Homo sapiens
  misc_RNA (1)...(19): siRNA sense strand
gggugaaccucaucugcaa

SEQ ID NO: 1485934 - RNA, 19 nt, Homo sapiens
  misc_RNA (1)...(19): siRNA sense strand
uaaaguacuaccaugcuaa

SEQ ID NO: 1485935 - RNA, 19 nt, Homo sapiens
  misc_RNA (1)...(19): siRNA sense strand
gacagcgggugaucauaga

SEQ ID NO: 1485936 - RNA, 19 nt, Homo sapiens
  misc_RNA (1)...(19): siRNA sense strand
gcuguuagccaguuugguu

SEQ ID NO: 1485937 - RNA, 19 nt, Homo sapiens
  misc_RNA (1)...(19): siRNA sense strand
guacuaccaugcuaagaac

SEQ ID NO: 1485938 - RNA, 19 nt, Homo sapiens
  misc_RNA (1)...(19): siRNA sense strand
ggcagaggaugugaagaaa

SEQ ID NO: 1485939 - RNA, 19 nt, Homo sapiens
  misc_RNA (1)...(19): siRNA sense strand
aaagggagaagcagaaaga

SEQ ID NO: 1485940 - RNA, 19 nt, Homo sapiens
  misc_RNA (1)...(19): siRNA sense strand
gggaugagccuuguuaugg

SEQ ID NO: 1485941 - RNA, 19 nt, Homo sapiens
  misc_RNA (1)...(19): siRNA sense strand
gcagaaagaacugauacug

SEQ ID NO: 1485942 - RNA, 19 nt, Homo sapiens
  misc_RNA (1)...(19): siRNA sense strand
ugaaugaggacaucaguuc

SEQ ID NO: 1485943 - RNA, 19 nt, Homo sapiens
  misc_RNA (1)...(19): siRNA sense strand
gaaagacagcgggugauca

SEQ ID NO: 1485944 - RNA, 19 nt, Homo sapiens
  misc_RNA (1)...(19): siRNA sense strand
gcuaagaacggccgugcuu

SEQ ID NO: 1485945 - RNA, 19 nt, Homo sapiens
  misc_RNA (1)...(19): siRNA sense strand
ggaccagagugagcaggaa

SEQ ID NO: 1485946 - RNA, 19 nt, Homo sapiens
  misc_RNA (1)...(19): siRNA sense strand
uccgagaccuugagauguu

SEQ ID NO: 1485947 - RNA, 19 nt, Homo sapiens
  misc_RNA (1)...(19): siRNA sense strand
gcagugcagacucagaauu

SEQ ID NO: 1485948 - RNA, 19 nt, Homo sapiens
  misc_RNA (1)...(19): siRNA sense strand
ucaagacccagcuagauga

SEQ ID NO: 1485949 - RNA, 19 nt, Homo sapiens
  misc_RNA (1)...(19): siRNA sense strand
ugagauguuuaucaacuuc

SEQ ID NO: 1485950 - RNA, 19 nt, Homo sapiens
  misc_RNA (1)...(19): siRNA sense strand
ugaagcagcuagccaugag

SEQ ID NO: 1485951 - RNA, 19 nt, Homo sapiens
  misc_RNA (1)...(19): siRNA sense strand
ggacagagugaagcagcua

SEQ ID NO: 1485952 - RNA, 19 nt, Homo sapiens
  misc_RNA (1)...(19): siRNA sense strand
ucagcagccucaaguuuag

SEQ ID NO: 1485953 - RNA, 19 nt, Homo sapiens
  misc_RNA (1)...(19): siRNA sense strand
caagagggcaguuaugacu

SEQ ID NO: 1485954 - RNA, 19 nt, Homo sapiens
  misc_RNA (1)...(19): siRNA sense strand
ccucagcagccucaaguuu

SEQ ID NO: 1485955 - RNA, 19 nt, Homo sapiens
  misc_RNA (1)...(19): siRNA sense strand
uggcuccuauugcuuguuu

SEQ ID NO: 1485956 - RNA, 19 nt, Homo sapiens
  misc_RNA (1)...(19): siRNA sense strand
gggagaagcagaaagaacu

SEQ ID NO: 1485957 - RNA, 19 nt, Homo sapiens
  misc_RNA (1)...(19): siRNA sense strand
gcgcagugcagacucagaa

SEQ ID NO: 1485958 - RNA, 19 nt, Homo sapiens
  misc_RNA (1)...(19): siRNA sense strand
caaaggcgaaagacgaaga

SEQ ID NO: 1485959 - RNA, 19 nt, Homo sapiens
  misc_RNA (1)...(19): siRNA sense strand
ggaaagacagcgggugauc

SEQ ID NO: 1485960 - RNA, 19 nt, Homo sapiens
  misc_RNA (1)...(19): siRNA sense strand
cucagcagccucaaguuua

SEQ ID NO: 1485961 - RNA, 19 nt, Homo sapiens
  misc_RNA (1)...(19): siRNA sense strand
uaagcgcagugcagacuca

SEQ ID NO: 1485962 - RNA, 19 nt, Homo sapiens
  misc_RNA (1)...(19): siRNA sense strand
ugaggcagcagccacauga

SEQ ID NO: 1485963 - RNA, 19 nt, Homo sapiens
  misc_RNA (1)...(19): siRNA sense strand
auaaagaaacuggacauga

SEQ ID NO: 1485964 - RNA, 19 nt, Homo sapiens
  misc_RNA (1)...(19): siRNA sense strand
gaccuugagauguuuauca

SEQ ID NO: 1485965 - RNA, 19 nt, Homo sapiens
  misc_RNA (1)...(19): siRNA sense strand
gaaucugaaugaggacauc

SEQ ID NO: 1485966 - RNA, 19 nt, Homo sapiens
  misc_RNA (1)...(19): siRNA sense strand
gcucaagacccagcuagau

SEQ ID NO: 1485967 - RNA, 19 nt, Homo sapiens
  misc_RNA (1)...(19): siRNA sense strand
gcuggcccauggacuguau

SEQ ID NO: 1485968 - RNA, 19 nt, Homo sapiens
  misc_RNA (1)...(19): siRNA sense strand
gagcuaacgguggcuguga

SEQ ID NO: 1485969 - RNA, 19 nt, Homo sapiens
  misc_RNA (1)...(19): siRNA sense strand
cagaacgccuccaggaaac

SEQ ID NO: 1485970 - RNA, 19 nt, Homo sapiens
  misc_RNA (1)...(19): siRNA sense strand
gccaaaggcgaaagacgaa

SEQ ID NO: 1485971 - RNA, 19 nt, Homo sapiens
  misc_RNA (1)...(19): siRNA sense strand
aggcagaggaugugaagaa

SEQ ID NO: 1485972 - RNA, 19 nt, Homo sapiens
  misc_RNA (1)...(19): siRNA sense strand
acacacaggcuuugagagu

SEQ ID NO: 1485973 - RNA, 19 nt, Homo sapiens
  misc_RNA (1)...(19): siRNA sense strand
cagugcagacucagaauug

SEQ ID NO: 1485974 - RNA, 19 nt, Homo sapiens
  misc_RNA (1)...(19): siRNA sense strand
cggccgugcuuauguggaa

SEQ ID NO: 1485975 - RNA, 19 nt, Homo sapiens
  misc_RNA (1)...(19): siRNA sense strand
aaagaaacuggacaugaau

SEQ ID NO: 1485976 - RNA, 19 nt, Homo sapiens
  misc_RNA (1)...(19): siRNA sense strand
ugcgggagcucgaagacuu

SEQ ID NO: 1485977 - RNA, 19 nt, Homo sapiens
  misc_RNA (1)...(19): siRNA sense strand
gaccagagugagcaggaaa

SEQ ID NO: 1485978 - RNA, 19 nt, Homo sapiens
  misc_RNA (1)...(19): siRNA sense strand
caaaggcagaggaugugaa

SEQ ID NO: 1485979 - RNA, 19 nt, Homo sapiens
  misc_RNA (1)...(19): siRNA sense strand
ccaaagggagaagcagaaa

SEQ ID NO: 1485980 - RNA, 19 nt, Homo sapiens
  misc_RNA (1)...(19): siRNA sense strand
caaguuuagccucccugua

SEQ ID NO: 1485981 - RNA, 19 nt, Homo sapiens
  misc_RNA (1)...(19): siRNA sense strand
ccgagaccuugagauguuu

SEQ ID NO: 1485982 - RNA, 19 nt, Homo sapiens
  misc_RNA (1)...(19): siRNA sense strand
gagaagcagaaagaacuga

SEQ ID NO: 1485983 - RNA, 19 nt, Homo sapiens
  misc_RNA (1)...(19): siRNA sense strand
aaacguuugccuaucaaga

SEQ ID NO: 1485984 - RNA, 19 nt, Homo sapiens
  misc_RNA (1)...(19): siRNA sense strand
gacagagcaugacccuuuu

SEQ ID NO: 1485985 - RNA, 19 nt, Homo sapiens
  misc_RNA (1)...(19): siRNA sense strand
caaacagagccuacugaca

SEQ ID NO: 1485986 - RNA, 19 nt, Homo sapiens
  misc_RNA (1)...(19): siRNA sense strand
agacagcgggugaucauag

SEQ ID NO: 1485987 - RNA, 19 nt, Homo sapiens
  misc_RNA (1)...(19): siRNA sense strand
ggagaagcagaaagaacug

SEQ ID NO: 1485988 - RNA, 19 nt, Homo sapiens
  misc_RNA (1)...(19): siRNA sense strand
aaagcaagagcgucuggaa

SEQ ID NO: 1485989 - RNA, 19 nt, Homo sapiens
  misc_RNA (1)...(19): siRNA sense strand
aaagacagcgggugaucau

SEQ ID NO: 1485990 - RNA, 19 nt, Homo sapiens
  misc_RNA (1)...(19): siRNA sense strand
gcagaggaugugaagaaag

SEQ ID NO: 1485991 - RNA, 19 nt, Homo sapiens
  misc_RNA (1)...(19): siRNA sense strand
gcaagagcgucuggaaacc

SEQ ID NO: 1485992 - RNA, 19 nt, Homo sapiens
  misc_RNA (1)...(19): siRNA sense strand
gugcagacucagaauugaa

SEQ ID NO: 1485993 - RNA, 19 nt, Homo sapiens
  misc_RNA (1)...(19): siRNA sense strand
cacaguccgugguguugga

SEQ ID NO: 1485994 - RNA, 19 nt, Homo sapiens
  misc_RNA (1)...(19): siRNA sense strand
ggaaacagcaaaacaaagg

SEQ ID NO: 1485995 - RNA, 19 nt, Homo sapiens
  misc_RNA (1)...(19): siRNA sense strand
caaggccggugggaagaca

SEQ ID NO: 1485996 - RNA, 19 nt, Homo sapiens
  misc_RNA (1)...(19): siRNA sense strand
gaaacuggacaugaaucug

SEQ ID NO: 1485997 - RNA, 19 nt, Homo sapiens
  misc_RNA (1)...(19): siRNA sense strand
gagcuucgucagcguguag

SEQ ID NO: 1485998 - RNA, 19 nt, Homo sapiens
  misc_RNA (1)...(19): siRNA sense strand
uagccucccuguagaucug

SEQ ID NO: 1485999 - RNA, 19 nt, Homo sapiens
  misc_RNA (1)...(19): siRNA sense strand
aaguuuagccucccuguag

SEQ ID NO: 1486000 - RNA, 19 nt, Homo sapiens
  misc_RNA (1)...(19): siRNA sense strand
aagcaagagcgucuggaaa

SEQ ID NO: 1486001 - RNA, 19 nt, Homo sapiens
  misc_RNA (1)...(19): siRNA sense strand
ccagaucuuugcuguuagc

SEQ ID NO: 1486002 - RNA, 19 nt, Homo sapiens
  misc_RNA (1)...(19): siRNA sense strand
gaacaggcagcagcagaac

SEQ ID NO: 1486003 - RNA, 19 nt, Homo sapiens
  misc_RNA (1)...(19): siRNA sense strand
agaacaggcagcagcagaa

SEQ ID NO: 1486004 - RNA, 19 nt, Homo sapiens
  misc_RNA (1)...(19): siRNA sense strand
uaucaagagggcaguuaug

SEQ ID NO: 1486005 - RNA, 19 nt, Homo sapiens
  misc_RNA (1)...(19): siRNA sense strand
acgaagaggaggaggaaga

SEQ ID NO: 1486006 - RNA, 19 nt, Homo sapiens
  misc_RNA (1)...(19): siRNA sense strand
gagcgucuggaaacccaaa

SEQ ID NO: 1486007 - RNA, 19 nt, Homo sapiens
  misc_RNA (1)...(19): siRNA sense strand
gugaagcagcuagccauga

SEQ ID NO: 1486008 - RNA, 19 nt, Homo sapiens
  misc_RNA (1)...(19): siRNA sense strand
gaagaggcuggagguguca

SEQ ID NO: 1486009 - RNA, 19 nt, Homo sapiens
  misc_RNA (1)...(19): siRNA sense strand
ccuguccacugaagagcuu

SEQ ID NO: 1486010 - RNA, 19 nt, Homo sapiens
  misc_RNA (1)...(19): siRNA sense strand
aguacuaccaugcuaagaa

SEQ ID NO: 1486011 - RNA, 19 nt, Homo sapiens
  misc_RNA (1)...(19): siRNA sense strand
uuaucaacuucauccaaga

SEQ ID NO: 1486012 - RNA, 19 nt, Homo sapiens
  misc_RNA (1)...(19): siRNA sense strand
gaagcaaugcccaccgaaa

SEQ ID NO: 1486013 - RNA, 19 nt, Homo sapiens
  misc_RNA (1)...(19): siRNA sense strand
ccuguuaaaugucaagaga

SEQ ID NO: 1486014 - RNA, 19 nt, Homo sapiens
  misc_RNA (1)...(19): siRNA sense strand
agagacaugugcacccaaa

SEQ ID NO: 1486015 - RNA, 19 nt, Homo sapiens
  misc_RNA (1)...(19): siRNA sense strand
gaaaggcaccaucauucca

SEQ ID NO: 1486016 - RNA, 19 nt, Homo sapiens
  misc_RNA (1)...(19): siRNA sense strand
ccgaaaggcaccaucauuc

SEQ ID NO: 1486017 - RNA, 19 nt, Homo sapiens
  misc_RNA (1)...(19): siRNA sense strand
ccaccgaaaggcaccauca

SEQ ID NO: 1486018 - RNA, 19 nt, Homo sapiens
  misc_RNA (1)...(19): siRNA sense strand
gcccagcagcagcaaguga

SEQ ID NO: 1486019 - RNA, 19 nt, Homo sapiens
  misc_RNA (1)...(19): siRNA sense strand
gcacaucucuuuccauaaa

SEQ ID NO: 1486020 - RNA, 19 nt, Homo sapiens
  misc_RNA (1)...(19): siRNA sense strand
gagcacaucucuuuccaua

SEQ ID NO: 1486021 - RNA, 19 nt, Homo sapiens
  misc_RNA (1)...(19): siRNA sense strand
ccaacaagcucacauuuau

SEQ ID NO: 1486022 - RNA, 19 nt, Homo sapiens
  misc_RNA (1)...(19): siRNA sense strand
gcaaugagaucggagcuuu

SEQ ID NO: 1486023 - RNA, 19 nt, Homo sapiens
  misc_RNA (1)...(19): siRNA sense strand
gaaugcagcagaaauauuu

SEQ ID NO: 1486024 - RNA, 19 nt, Homo sapiens
  misc_RNA (1)...(19): siRNA sense strand
gaacuuggaucuguccuau

SEQ ID NO: 1486025 - RNA, 19 nt, Homo sapiens
  misc_RNA (1)...(19): siRNA sense strand
gaacgaggaugcccuaagg

SEQ ID NO: 1486026 - RNA, 19 nt, Homo sapiens
  misc_RNA (1)...(19): siRNA sense strand
ucacauggcuauaccuuga

SEQ ID NO: 1486027 - RNA, 19 nt, Homo sapiens
  misc_RNA (1)...(19): siRNA sense strand
aaacacaccuagagacuga

SEQ ID NO: 1486028 - RNA, 19 nt, Homo sapiens
  misc_RNA (1)...(19): siRNA sense strand
ggcuauaccuugaccauaa

SEQ ID NO: 1486029 - RNA, 19 nt, Homo sapiens
  misc_RNA (1)...(19): siRNA sense strand
ucagaccugugacaaauuu

SEQ ID NO: 1486030 - RNA, 19 nt, Homo sapiens
  misc_RNA (1)...(19): siRNA sense strand
aauauuugcucccuuguaa

SEQ ID NO: 1486031 - RNA, 19 nt, Homo sapiens
  misc_RNA (1)...(19): siRNA sense strand
gcugcugaguuuacauuua

SEQ ID NO: 1486032 - RNA, 19 nt, Homo sapiens
  misc_RNA (1)...(19): siRNA sense strand
uauaucugcugguugcuua

SEQ ID NO: 1486033 - RNA, 19 nt, Homo sapiens
  misc_RNA (1)...(19): siRNA sense strand
ucugggaucugaacaguuu

SEQ ID NO: 1486034 - RNA, 19 nt, Homo sapiens
  misc_RNA (1)...(19): siRNA sense strand
uacaaaggcuugauuuauc

SEQ ID NO: 1486035 - RNA, 19 nt, Homo sapiens
  misc_RNA (1)...(19): siRNA sense strand
ggauaucccucaaugacau

SEQ ID NO: 1486036 - RNA, 19 nt, Homo sapiens
  misc_RNA (1)...(19): siRNA sense strand
auaaacagcagcuagcuua

SEQ ID NO: 1486037 - RNA, 19 nt, Homo sapiens
  misc_RNA (1)...(19): siRNA sense strand
caaugaaugugucaaccuu

SEQ ID NO: 1486038 - RNA, 19 nt, Homo sapiens
  misc_RNA (1)...(19): siRNA sense strand
ccgaaucagugaccauaaa

SEQ ID NO: 1486039 - RNA, 19 nt, Homo sapiens
  misc_RNA (1)...(19): siRNA sense strand
caggagauacccucaagua

SEQ ID NO: 1486040 - RNA, 19 nt, Homo sapiens
  misc_RNA (1)...(19): siRNA sense strand
acuuggaucuguccuauaa

SEQ ID NO: 1486041 - RNA, 19 nt, Homo sapiens
  misc_RNA (1)...(19): siRNA sense strand
gcaaaaugguauauuguga

SEQ ID NO: 1486042 - RNA, 19 nt, Homo sapiens
  misc_RNA (1)...(19): siRNA sense strand
ucccaaagccgacguuuaa

SEQ ID NO: 1486043 - RNA, 19 nt, Homo sapiens
  misc_RNA (1)...(19): siRNA sense strand
ggaaugcagcagaaauauu

SEQ ID NO: 1486044 - RNA, 19 nt, Homo sapiens
  misc_RNA (1)...(19): siRNA sense strand
ugcggaagcugcugaguuu

SEQ ID NO: 1486045 - RNA, 19 nt, Homo sapiens
  misc_RNA (1)...(19): siRNA sense strand
ggaauacgcagacucaaag

SEQ ID NO: 1486046 - RNA, 19 nt, Homo sapiens
  misc_RNA (1)...(19): siRNA sense strand
gugaagaacuacagcaucu

SEQ ID NO: 1486047 - RNA, 19 nt, Homo sapiens
  misc_RNA (1)...(19): siRNA sense strand
ucccauaaguccuuugaaa

SEQ ID NO: 1486048 - RNA, 19 nt, Homo sapiens
  misc_RNA (1)...(19): siRNA sense strand
gcgagaugcugcugaaugg

SEQ ID NO: 1486049 - RNA, 19 nt, Homo sapiens
  misc_RNA (1)...(19): siRNA sense strand
ucaaguauaucugcugguu

SEQ ID NO: 1486050 - RNA, 19 nt, Homo sapiens
  misc_RNA (1)...(19): siRNA sense strand
cacaacagcuggccgaauc

SEQ ID NO: 1486051 - RNA, 19 nt, Homo sapiens
  misc_RNA (1)...(19): siRNA sense strand
ugaaacgaaugcacaggaa

SEQ ID NO: 1486052 - RNA, 19 nt, Homo sapiens
  misc_RNA (1)...(19): siRNA sense strand
gacagucccuaaagcaaau

SEQ ID NO: 1486053 - RNA, 19 nt, Homo sapiens
  misc_RNA (1)...(19): siRNA sense strand
caacaagcucacauuuauu

SEQ ID NO: 1486054 - RNA, 19 nt, Homo sapiens
  misc_RNA (1)...(19): siRNA sense strand
gaccagcccacaauaaguu

SEQ ID NO: 1486055 - RNA, 19 nt, Homo sapiens
  misc_RNA (1)...(19): siRNA sense strand
uaucagcaauauugacgaa

SEQ ID NO: 1486056 - RNA, 19 nt, Homo sapiens
  misc_RNA (1)...(19): siRNA sense strand
gaccugagcacaaucacaa

SEQ ID NO: 1486057 - RNA, 19 nt, Homo sapiens
  misc_RNA (1)...(19): siRNA sense strand
caaccuuucuggcauacga

SEQ ID NO: 1486058 - RNA, 19 nt, Homo sapiens
  misc_RNA (1)...(19): siRNA sense strand
auaaucagcugcauucucu

SEQ ID NO: 1486059 - RNA, 19 nt, Homo sapiens
  misc_RNA (1)...(19): siRNA sense strand
cuaagggagaauacaauua

SEQ ID NO: 1486060 - RNA, 19 nt, Homo sapiens
  misc_RNA (1)...(19): siRNA sense strand
gaucagacucaaagaacuu

SEQ ID NO: 1486061 - RNA, 19 nt, Homo sapiens
  misc_RNA (1)...(19): siRNA sense strand
ggaagcugcugaguuuaca

SEQ ID NO: 1486062 - RNA, 19 nt, Homo sapiens
  misc_RNA (1)...(19): siRNA sense strand
uuacggaacuuggaucugu

SEQ ID NO: 1486063 - RNA, 19 nt, Homo sapiens
  misc_RNA (1)...(19): siRNA sense strand
gggaauauaugggaaugca

SEQ ID NO: 1486064 - RNA, 19 nt, Homo sapiens
  misc_RNA (1)...(19): siRNA sense strand
uaaaaucagugucauagga

SEQ ID NO: 1486065 - RNA, 19 nt, Homo sapiens
  misc_RNA (1)...(19): siRNA sense strand
aaccaucccugugcgaaua

SEQ ID NO: 1486066 - RNA, 19 nt, Homo sapiens
  misc_RNA (1)...(19): siRNA sense strand
guuugucccuucgcuauaa

SEQ ID NO: 1486067 - RNA, 19 nt, Homo sapiens
  misc_RNA (1)...(19): siRNA sense strand
ugucaaccuuucuggcaua

SEQ ID NO: 1486068 - RNA, 19 nt, Homo sapiens
  misc_RNA (1)...(19): siRNA sense strand
ucgaugcagugaagaacua

SEQ ID NO: 1486069 - RNA, 19 nt, Homo sapiens
  misc_RNA (1)...(19): siRNA sense strand
ggagugugagauaccuuua

SEQ ID NO: 1486070 - RNA, 19 nt, Homo sapiens
  misc_RNA (1)...(19): siRNA sense strand
ugacaaauuuacggaacuu

SEQ ID NO: 1486071 - RNA, 19 nt, Homo sapiens
  misc_RNA (1)...(19): siRNA sense strand
gauuuuggauucuuggaua

SEQ ID NO: 1486072 - RNA, 19 nt, Homo sapiens
  misc_RNA (1)...(19): siRNA sense strand
cuucagaccugugacaaau

SEQ ID NO: 1486073 - RNA, 19 nt, Homo sapiens
  misc_RNA (1)...(19): siRNA sense strand
gagcuggaccugagcacaa

SEQ ID NO: 1486074 - RNA, 19 nt, Homo sapiens
  misc_RNA (1)...(19): siRNA sense strand
ggaaacacaccuagagacu

SEQ ID NO: 1486075 - RNA, 19 nt, Homo sapiens
  misc_RNA (1)...(19): siRNA sense strand
ucacauuuauuggucaaga

SEQ ID NO: 1486076 - RNA, 19 nt, Homo sapiens
  misc_RNA (1)...(19): siRNA sense strand
gagcggaucagcuguagca

SEQ ID NO: 1486077 - RNA, 19 nt, Homo sapiens
  misc_RNA (1)...(19): siRNA sense strand
aagauacgauggaaacaca

SEQ ID NO: 1486078 - RNA, 19 nt, Homo sapiens
  misc_RNA (1)...(19): siRNA sense strand
gauuauaaacccaccaaca

SEQ ID NO: 1486079 - RNA, 19 nt, Homo sapiens
  misc_RNA (1)...(19): siRNA sense strand
uuaaaggucuaagggagaa

SEQ ID NO: 1486080 - RNA, 19 nt, Homo sapiens
  misc_RNA (1)...(19): siRNA sense strand
uaaccggauccgaaguuua

SEQ ID NO: 1486081 - RNA, 19 nt, Homo sapiens
  misc_RNA (1)...(19): siRNA sense strand
cauaaguccuuugaaacga

SEQ ID NO: 1486082 - RNA, 19 nt, Homo sapiens
  misc_RNA (1)...(19): siRNA sense strand
gaaaagacagucccuaaag

SEQ ID NO: 1486083 - RNA, 19 nt, Homo sapiens
  misc_RNA (1)...(19): siRNA sense strand
gcaaggaguaaaugugauc

SEQ ID NO: 1486084 - RNA, 19 nt, Homo sapiens
  misc_RNA (1)...(19): siRNA sense strand
caaagagcugcaaggagua

SEQ ID NO: 1486085 - RNA, 19 nt, Homo sapiens
  misc_RNA (1)...(19): siRNA sense strand
uccaacaagcucacauuua

SEQ ID NO: 1486086 - RNA, 19 nt, Homo sapiens
  misc_RNA (1)...(19): siRNA sense strand
ggucuaagggagaauacaa

SEQ ID NO: 1486087 - RNA, 19 nt, Homo sapiens
  misc_RNA (1)...(19): siRNA sense strand
ggagaauacaauuaucugu

SEQ ID NO: 1486088 - RNA, 19 nt, Homo sapiens
  misc_RNA (1)...(19): siRNA sense strand
ugggaaugcagcagaaaua

SEQ ID NO: 1486089 - RNA, 19 nt, Homo sapiens
  misc_RNA (1)...(19): siRNA sense strand
caaauuuacggaacuugga

SEQ ID NO: 1486090 - RNA, 19 nt, Homo sapiens
  misc_RNA (1)...(19): siRNA sense strand
gauggaaacacaccuagag

SEQ ID NO: 1486091 - RNA, 19 nt, Homo sapiens
  misc_RNA (1)...(19): siRNA sense strand
aaacgaaugcacaggaaga

SEQ ID NO: 1486092 - RNA, 19 nt, Homo sapiens
  misc_RNA (1)...(19): siRNA sense strand
cuacagagagguuugaucu

SEQ ID NO: 1486093 - RNA, 19 nt, Homo sapiens
  misc_RNA (1)...(19): siRNA sense strand
aacaagcucacauuuauug

SEQ ID NO: 1486094 - RNA, 19 nt, Homo sapiens
  misc_RNA (1)...(19): siRNA sense strand
gugcgaauauuccaagacu

SEQ ID NO: 1486095 - RNA, 19 nt, Homo sapiens
  misc_RNA (1)...(19): siRNA sense strand
gaaccaucccugugcgaau

SEQ ID NO: 1486096 - RNA, 19 nt, Homo sapiens
  misc_RNA (1)...(19): siRNA sense strand
gcugguugcuuagguuugu

SEQ ID NO: 1486097 - RNA, 19 nt, Homo sapiens
  misc_RNA (1)...(19): siRNA sense strand
agacagucccuaaagcaaa

SEQ ID NO: 1486098 - RNA, 19 nt, Homo sapiens
  misc_RNA (1)...(19): siRNA sense strand
gucaagagauuuuggauuc

SEQ ID NO: 1486099 - RNA, 19 nt, Homo sapiens
  misc_RNA (1)...(19): siRNA sense strand
gcucacauuuauuggucaa

SEQ ID NO: 1486100 - RNA, 19 nt, Homo sapiens
  misc_RNA (1)...(19): siRNA sense strand
ggaacuuggaucuguccua

SEQ ID NO: 1486101 - RNA, 19 nt, Homo sapiens
  misc_RNA (1)...(19): siRNA sense strand
ucagaaauuacaggagaua

SEQ ID NO: 1486102 - RNA, 19 nt, Homo sapiens
  misc_RNA (1)...(19): siRNA sense strand
acaggaagauacgauggaa

SEQ ID NO: 1486103 - RNA, 19 nt, Homo sapiens
  misc_RNA (1)...(19): siRNA sense strand
accuggagcuccuuacaaa

SEQ ID NO: 1486104 - RNA, 19 nt, Homo sapiens
  misc_RNA (1)...(19): siRNA sense strand
ccuauaaucagcugcauuc

SEQ ID NO: 1486105 - RNA, 19 nt, Homo sapiens
  misc_RNA (1)...(19): siRNA sense strand
cauaaccauaucagcaaua

SEQ ID NO: 1486106 - RNA, 19 nt, Homo sapiens
  misc_RNA (1)...(19): siRNA sense strand
uaaacagcagcuagcuuaa

SEQ ID NO: 1486107 - RNA, 19 nt, Homo sapiens
  misc_RNA (1)...(19): siRNA sense strand
auaaguccuuugaaacgaa

SEQ ID NO: 1486108 - RNA, 19 nt, Homo sapiens
  misc_RNA (1)...(19): siRNA sense strand
gacgggacccugcaccuau

SEQ ID NO: 1486109 - RNA, 19 nt, Homo sapiens
  misc_RNA (1)...(19): siRNA sense strand
ggccgaagcaugagagcaa

SEQ ID NO: 1486110 - RNA, 19 nt, Homo sapiens
  misc_RNA (1)...(19): siRNA sense strand
gugaaucucagaaauuaca

SEQ ID NO: 1486111 - RNA, 19 nt, Homo sapiens
  misc_RNA (1)...(19): siRNA sense strand
cugcugaguuuacauuuac

SEQ ID NO: 1486112 - RNA, 19 nt, Homo sapiens
  misc_RNA (1)...(19): siRNA sense strand
caugaacuucucucccaua

SEQ ID NO: 1486113 - RNA, 19 nt, Homo sapiens
  misc_RNA (1)...(19): siRNA sense strand
gggagugugagauaccuuu

SEQ ID NO: 1486114 - RNA, 19 nt, Homo sapiens
  misc_RNA (1)...(19): siRNA sense strand
acgggacccugcaccuaua

SEQ ID NO: 1486115 - RNA, 19 nt, Homo sapiens
  misc_RNA (1)...(19): siRNA sense strand
gggaaugcagcagaaauau

SEQ ID NO: 1486116 - RNA, 19 nt, Homo sapiens
  misc_RNA (1)...(19): siRNA sense strand
cuuacaaaggcuugauuua

SEQ ID NO: 1486117 - RNA, 19 nt, Homo sapiens
  misc_RNA (1)...(19): siRNA sense strand
ugucuuugcuggcaugauc

SEQ ID NO: 1486118 - RNA, 19 nt, Homo sapiens
  misc_RNA (1)...(19): siRNA sense strand
gaaguuuagccaggaaugu

SEQ ID NO: 1486119 - RNA, 19 nt, Homo sapiens
  misc_RNA (1)...(19): siRNA sense strand
ggacacagauccugacuuu

SEQ ID NO: 1486120 - RNA, 19 nt, Homo sapiens
  misc_RNA (1)...(19): siRNA sense strand
gugaugagcuuuccuuuga

SEQ ID NO: 1486121 - RNA, 19 nt, Homo sapiens
  misc_RNA (1)...(19): siRNA sense strand
gcagucggcuuugauuaua

SEQ ID NO: 1486122 - RNA, 19 nt, Homo sapiens
  misc_RNA (1)...(19): siRNA sense strand
caaagcagcucugggauau

SEQ ID NO: 1486123 - RNA, 19 nt, Homo sapiens
  misc_RNA (1)...(19): siRNA sense strand
gaccacagcuuauaagaag

SEQ ID NO: 1486124 - RNA, 19 nt, Homo sapiens
  misc_RNA (1)...(19): siRNA sense strand
gaaaggcugugacaaagag

SEQ ID NO: 1486125 - RNA, 19 nt, Homo sapiens
  misc_RNA (1)...(19): siRNA sense strand
gcacagaacacaucaacau

SEQ ID NO: 1486126 - RNA, 19 nt, Homo sapiens
  misc_RNA (1)...(19): siRNA sense strand
caaauuaugucaagcuucu

SEQ ID NO: 1486127 - RNA, 19 nt, Homo sapiens
  misc_RNA (1)...(19): siRNA sense strand
ggacagggcagacaaguca

SEQ ID NO: 1486128 - RNA, 19 nt, Homo sapiens
  misc_RNA (1)...(19): siRNA sense strand
gaucucagcuguggcucua

SEQ ID NO: 1486129 - RNA, 19 nt, Homo sapiens
  misc_RNA (1)...(19): siRNA sense strand
gaagacgacgcccauagaa

SEQ ID NO: 1486130 - RNA, 19 nt, Homo sapiens
  misc_RNA (1)...(19): siRNA sense strand
gcgaaaggcugugacaaag

SEQ ID NO: 1486131 - RNA, 19 nt, Homo sapiens
  misc_RNA (1)...(19): siRNA sense strand
caaagcaucccauggcuau

SEQ ID NO: 1486132 - RNA, 19 nt, Homo sapiens
  misc_RNA (1)...(19): siRNA sense strand
acacagauccugacuuugu

SEQ ID NO: 1486133 - RNA, 19 nt, Homo sapiens
  misc_RNA (1)...(19): siRNA sense strand
aagcagcucugggauauga

SEQ ID NO: 1486134 - RNA, 19 nt, Homo sapiens
  misc_RNA (1)...(19): siRNA sense strand
caagucagcagucggcuuu

SEQ ID NO: 1486135 - RNA, 19 nt, Homo sapiens
  misc_RNA (1)...(19): siRNA sense strand
gauccugacuuugugaaug

SEQ ID NO: 1486136 - RNA, 19 nt, Homo sapiens
  misc_RNA (1)...(19): siRNA sense strand
gaagaggaagcgagaggaa

SEQ ID NO: 1486137 - RNA, 19 nt, Homo sapiens
  misc_RNA (1)...(19): siRNA sense strand
gaaugacuaugaggacguu

SEQ ID NO: 1486138 - RNA, 19 nt, Homo sapiens
  misc_RNA (1)...(19): siRNA sense strand
gaagaaagagauggaguca

SEQ ID NO: 1486139 - RNA, 19 nt, Homo sapiens
  misc_RNA (1)...(19): siRNA sense strand
gaagugaugagcuuuccuu

SEQ ID NO: 1486140 - RNA, 19 nt, Homo sapiens
  misc_RNA (1)...(19): siRNA sense strand
ucucagcuguggcucuaua

SEQ ID NO: 1486141 - RNA, 19 nt, Homo sapiens
  misc_RNA (1)...(19): siRNA sense strand
gaaacacgagucccagaga

SEQ ID NO: 1486142 - RNA, 19 nt, Homo sapiens
  misc_RNA (1)...(19): siRNA sense strand
ggaggucgguuuggaguag

SEQ ID NO: 1486143 - RNA, 19 nt, Homo sapiens
  misc_RNA (1)...(19): siRNA sense strand
gcucgagccugaagauucu

SEQ ID NO: 1486144 - RNA, 19 nt, Homo sapiens
  misc_RNA (1)...(19): siRNA sense strand
gaugagcuuuccuuugauc

SEQ ID NO: 1486145 - RNA, 19 nt, Homo sapiens
  misc_RNA (1)...(19): siRNA sense strand
aagcauacaucucagaaag

SEQ ID NO: 1486146 - RNA, 19 nt, Homo sapiens
  misc_RNA (1)...(19): siRNA sense strand
ggcaugagcaggaggauga

SEQ ID NO: 1486147 - RNA, 19 nt, Homo sapiens
  misc_RNA (1)...(19): siRNA sense strand
gggcuuugguggccaguau

SEQ ID NO: 1486148 - RNA, 19 nt, Homo sapiens
  misc_RNA (1)...(19): siRNA sense strand
gugaaugacaucucugaaa

SEQ ID NO: 1486149 - RNA, 19 nt, Homo sapiens
  misc_RNA (1)...(19): siRNA sense strand
gccaugaugugucuguuuc

SEQ ID NO: 1486150 - RNA, 19 nt, Homo sapiens
  misc_RNA (1)...(19): siRNA sense strand
agauuacucucguggcuuu

SEQ ID NO: 1486151 - RNA, 19 nt, Homo sapiens
  misc_RNA (1)...(19): siRNA sense strand
ucagacggaugcugccaaa

SEQ ID NO: 1486152 - RNA, 19 nt, Homo sapiens
  misc_RNA (1)...(19): siRNA sense strand
ugaaugacaucucugaaaa

SEQ ID NO: 1486153 - RNA, 19 nt, Homo sapiens
  misc_RNA (1)...(19): siRNA sense strand
ucacugacauugagauggu

SEQ ID NO: 1486154 - RNA, 19 nt, Homo sapiens
  misc_RNA (1)...(19): siRNA sense strand
gaagcauacaucucagaaa

SEQ ID NO: 1486155 - RNA, 19 nt, Homo sapiens
  misc_RNA (1)...(19): siRNA sense strand
ggagaaguggagaagcaua

SEQ ID NO: 1486156 - RNA, 19 nt, Homo sapiens
  misc_RNA (1)...(19): siRNA sense strand
acucuucccugcaaauuau

SEQ ID NO: 1486157 - RNA, 19 nt, Homo sapiens
  misc_RNA (1)...(19): siRNA sense strand
acaaagcagcucugggaua

SEQ ID NO: 1486158 - RNA, 19 nt, Homo sapiens
  misc_RNA (1)...(19): siRNA sense strand
cguaaucacugacauugag

SEQ ID NO: 1486159 - RNA, 19 nt, Homo sapiens
  misc_RNA (1)...(19): siRNA sense strand
agaaggaccgaguggauaa

SEQ ID NO: 1486160 - RNA, 19 nt, Homo sapiens
  misc_RNA (1)...(19): siRNA sense strand
ggacuccuccaucaucaga

SEQ ID NO: 1486161 - RNA, 19 nt, Homo sapiens
  misc_RNA (1)...(19): siRNA sense strand
ggaggcaacaggagcgaaa

SEQ ID NO: 1486162 - RNA, 19 nt, Homo sapiens
  misc_RNA (1)...(19): siRNA sense strand
cagaaggaccgaguggaua

SEQ ID NO: 1486163 - RNA, 19 nt, Homo sapiens
  misc_RNA (1)...(19): siRNA sense strand
cuguggcucuauaugauua

SEQ ID NO: 1486164 - RNA, 19 nt, Homo sapiens
  misc_RNA (1)...(19): siRNA sense strand
ccaagaaaaucuccucaga

SEQ ID NO: 1486165 - RNA, 19 nt, Homo sapiens
  misc_RNA (1)...(19): siRNA sense strand
guagaaagagaccgaaugg

SEQ ID NO: 1486166 - RNA, 19 nt, Homo sapiens
  misc_RNA (1)...(19): siRNA sense strand
ggacucuucccugcaaauu

SEQ ID NO: 1486167 - RNA, 19 nt, Homo sapiens
  misc_RNA (1)...(19): siRNA sense strand
ggaggaagagccaguguac

SEQ ID NO: 1486168 - RNA, 19 nt, Homo sapiens
  misc_RNA (1)...(19): siRNA sense strand
gggcugaaggcgaaauuug

SEQ ID NO: 1486169 - RNA, 19 nt, Homo sapiens
  misc_RNA (1)...(19): siRNA sense strand
ggauaaaugggacaaagca

SEQ ID NO: 1486170 - RNA, 19 nt, Homo sapiens
  misc_RNA (1)...(19): siRNA sense strand
cagcagucggcuuugauua

SEQ ID NO: 1486171 - RNA, 19 nt, Homo sapiens
  misc_RNA (1)...(19): siRNA sense strand
ccacagccagugauagcua

SEQ ID NO: 1486172 - RNA, 19 nt, Homo sapiens
  misc_RNA (1)...(19): siRNA sense strand
agagggaagugaugagcuu

SEQ ID NO: 1486173 - RNA, 19 nt, Homo sapiens
  misc_RNA (1)...(19): siRNA sense strand
ucuauaugauuaccaagga

SEQ ID NO: 1486174 - RNA, 19 nt, Homo sapiens
  misc_RNA (1)...(19): siRNA sense strand
cagcuguggcucuauauga

SEQ ID NO: 1486175 - RNA, 19 nt, Homo sapiens
  misc_RNA (1)...(19): siRNA sense strand
ggaagagccaguguacgaa

SEQ ID NO: 1486176 - RNA, 19 nt, Homo sapiens
  misc_RNA (1)...(19): siRNA sense strand
cgaccacagcuuauaagaa

SEQ ID NO: 1486177 - RNA, 19 nt, Homo sapiens
  misc_RNA (1)...(19): siRNA sense strand
cgacguaaucacugacauu

SEQ ID NO: 1486178 - RNA, 19 nt, Homo sapiens
  misc_RNA (1)...(19): siRNA sense strand
gacucuucccugcaaauua

SEQ ID NO: 1486179 - RNA, 19 nt, Homo sapiens
  misc_RNA (1)...(19): siRNA sense strand
cagucggcuuugauuauaa

SEQ ID NO: 1486180 - RNA, 19 nt, Homo sapiens
  misc_RNA (1)...(19): siRNA sense strand
cagaacacaucaacaucca

SEQ ID NO: 1486181 - RNA, 19 nt, Homo sapiens
  misc_RNA (1)...(19): siRNA sense strand
cgaaaggcugugacaaaga

SEQ ID NO: 1486182 - RNA, 19 nt, Homo sapiens
  misc_RNA (1)...(19): siRNA sense strand
aaggagaaguggagaagca

SEQ ID NO: 1486183 - RNA, 19 nt, Homo sapiens
  misc_RNA (1)...(19): siRNA sense strand
uauggaagagccagcagua

SEQ ID NO: 1486184 - RNA, 19 nt, Homo sapiens
  misc_RNA (1)...(19): siRNA sense strand
cagcugaggaacaaaguau

SEQ ID NO: 1486185 - RNA, 19 nt, Homo sapiens
  misc_RNA (1)...(19): siRNA sense strand
cggacgacguaaucacuga

SEQ ID NO: 1486186 - RNA, 19 nt, Homo sapiens
  misc_RNA (1)...(19): siRNA sense strand
aaagagaccgaauggacaa

SEQ ID NO: 1486187 - RNA, 19 nt, Homo sapiens
  misc_RNA (1)...(19): siRNA sense strand
gacguaaucacugacauug

SEQ ID NO: 1486188 - RNA, 19 nt, Homo sapiens
  misc_RNA (1)...(19): siRNA sense strand
gcugaggaacaaaguauca

SEQ ID NO: 1486189 - RNA, 19 nt, Homo sapiens
  misc_RNA (1)...(19): siRNA sense strand
ggcugaaggcgaaauuuga

SEQ ID NO: 1486190 - RNA, 19 nt, Homo sapiens
  misc_RNA (1)...(19): siRNA sense strand
ggguggagaaggauaaaug

SEQ ID NO: 1486191 - RNA, 19 nt, Homo sapiens
  misc_RNA (1)...(19): siRNA sense strand
agucggcuuugauuauaaa

SEQ ID NO: 1486192 - RNA, 19 nt, Homo sapiens
  misc_RNA (1)...(19): siRNA sense strand
gaaggauaaaugggacaaa

SEQ ID NO: 1486193 - RNA, 19 nt, Homo sapiens
  misc_RNA (1)...(19): siRNA sense strand
guccauggcugaggagaag

SEQ ID NO: 1486194 - RNA, 19 nt, Homo sapiens
  misc_RNA (1)...(19): siRNA sense strand
agaagacgacgcccauaga

SEQ ID NO: 1486195 - RNA, 19 nt, Homo sapiens
  misc_RNA (1)...(19): siRNA sense strand
ccagaaggaccgaguggau

SEQ ID NO: 1486196 - RNA, 19 nt, Homo sapiens
  misc_RNA (1)...(19): siRNA sense strand
ggacgcacagaacacauca

SEQ ID NO: 1486197 - RNA, 19 nt, Homo sapiens
  misc_RNA (1)...(19): siRNA sense strand
gguuuggaguagaaagaga

SEQ ID NO: 1486198 - RNA, 19 nt, Homo sapiens
  misc_RNA (1)...(19): siRNA sense strand
caaaguaucagaggagcau

SEQ ID NO: 1486199 - RNA, 19 nt, Homo sapiens
  misc_RNA (1)...(19): siRNA sense strand
agcaugauguucucaggaa

SEQ ID NO: 1486200 - RNA, 19 nt, Homo sapiens
  misc_RNA (1)...(19): siRNA sense strand
cagaggagcaugauguucu

SEQ ID NO: 1486201 - RNA, 19 nt, Homo sapiens
  misc_RNA (1)...(19): siRNA sense strand
gagaccgaauggacaagag

SEQ ID NO: 1486202 - RNA, 19 nt, Homo sapiens
  misc_RNA (1)...(19): siRNA sense strand
ccaaggagagggaagugau

SEQ ID NO: 1486203 - RNA, 19 nt, Homo sapiens
  misc_RNA (1)...(19): siRNA sense strand
ggccaugaugugucuguuu

SEQ ID NO: 1486204 - RNA, 19 nt, Homo sapiens
  misc_RNA (1)...(19): siRNA sense strand
uaagaagacgacgcccaua

SEQ ID NO: 1486205 - RNA, 19 nt, Homo sapiens
  misc_RNA (1)...(19): siRNA sense strand
caagggagagacggagaaa

SEQ ID NO: 1486206 - RNA, 19 nt, Homo sapiens
  misc_RNA (1)...(19): siRNA sense strand
ggagucagggcccaaagca

SEQ ID NO: 1486207 - RNA, 19 nt, Homo sapiens
  misc_RNA (1)...(19): siRNA sense strand
gagaaguggagaagcauac

SEQ ID NO: 1486208 - RNA, 19 nt, Homo sapiens
  misc_RNA (1)...(19): siRNA sense strand
gcagugggccaugaguaug

SEQ ID NO: 1486209 - RNA, 19 nt, Homo sapiens
  misc_RNA (1)...(19): siRNA sense strand
uaaaggagaaguggagaag

SEQ ID NO: 1486210 - RNA, 19 nt, Homo sapiens
  misc_RNA (1)...(19): siRNA sense strand
ucugggauaugacuacaag

SEQ ID NO: 1486211 - RNA, 19 nt, Homo sapiens
  misc_RNA (1)...(19): siRNA sense strand
caaggagagggaagugaug

SEQ ID NO: 1486212 - RNA, 19 nt, Homo sapiens
  misc_RNA (1)...(19): siRNA sense strand
gcuguggcucuauaugauu

SEQ ID NO: 1486213 - RNA, 19 nt, Homo sapiens
  misc_RNA (1)...(19): siRNA sense strand
agaggaagcgagaggaaga

SEQ ID NO: 1486214 - RNA, 19 nt, Homo sapiens
  misc_RNA (1)...(19): siRNA sense strand
gaaguggagaagcauacau

SEQ ID NO: 1486215 - RNA, 19 nt, Homo sapiens
  misc_RNA (1)...(19): siRNA sense strand
ggcucuauaugauuaccaa

SEQ ID NO: 1486216 - RNA, 19 nt, Homo sapiens
  misc_RNA (1)...(19): siRNA sense strand
auccugacuuugugaauga

SEQ ID NO: 1486217 - RNA, 19 nt, Homo sapiens
  misc_RNA (1)...(19): siRNA sense strand
aggaagagccaguguacga

SEQ ID NO: 1486218 - RNA, 19 nt, Homo sapiens
  misc_RNA (1)...(19): siRNA sense strand
aaggauaaaugggacaaag

SEQ ID NO: 1486219 - RNA, 19 nt, Homo sapiens
  misc_RNA (1)...(19): siRNA sense strand
acaagaagcugauugaaua

SEQ ID NO: 1486220 - RNA, 19 nt, Homo sapiens
  misc_RNA (1)...(19): siRNA sense strand
ugaagacugucaaguauuu

SEQ ID NO: 1486221 - RNA, 19 nt, Homo sapiens
  misc_RNA (1)...(19): siRNA sense strand
gaagcugauugaauacuau

SEQ ID NO: 1486222 - RNA, 19 nt, Homo sapiens
  misc_RNA (1)...(19): siRNA sense strand
gagaccacccggagaguua

SEQ ID NO: 1486223 - RNA, 19 nt, Homo sapiens
  misc_RNA (1)...(19): siRNA sense strand
ggaacaacuucuucaagca

SEQ ID NO: 1486224 - RNA, 19 nt, Homo sapiens
  misc_RNA (1)...(19): siRNA sense strand
gagaggugaugauccuuau

SEQ ID NO: 1486225 - RNA, 19 nt, Homo sapiens
  misc_RNA (1)...(19): siRNA sense strand
ugaagacgcuggccaugga

SEQ ID NO: 1486226 - RNA, 19 nt, Homo sapiens
  misc_RNA (1)...(19): siRNA sense strand
gaccuguccuuuaaauaug

SEQ ID NO: 1486227 - RNA, 19 nt, Homo sapiens
  misc_RNA (1)...(19): siRNA sense strand
ucaaagagaaagaaacuga

SEQ ID NO: 1486228 - RNA, 19 nt, Homo sapiens
  misc_RNA (1)...(19): siRNA sense strand
gcaccguguuuguguguga

SEQ ID NO: 1486229 - RNA, 19 nt, Homo sapiens
  misc_RNA (1)...(19): siRNA sense strand
ggaaugcagucgaccuaca

SEQ ID NO: 1486230 - RNA, 19 nt, Homo sapiens
  misc_RNA (1)...(19): siRNA sense strand
agaagcugauugaauacua

SEQ ID NO: 1486231 - RNA, 19 nt, Homo sapiens
  misc_RNA (1)...(19): siRNA sense strand
agaaugugaugccuuugaa

SEQ ID NO: 1486232 - RNA, 19 nt, Homo sapiens
  misc_RNA (1)...(19): siRNA sense strand
uaucacaggugcucacaag

SEQ ID NO: 1486233 - RNA, 19 nt, Homo sapiens
  misc_RNA (1)...(19): siRNA sense strand
agugaagacugucaaguau

SEQ ID NO: 1486234 - RNA, 19 nt, Homo sapiens
  misc_RNA (1)...(19): siRNA sense strand
gaaagaaacugagaaaagc

SEQ ID NO: 1486235 - RNA, 19 nt, Homo sapiens
  misc_RNA (1)...(19): siRNA sense strand
gcuacaagaagcugauuga

SEQ ID NO: 1486236 - RNA, 19 nt, Homo sapiens
  misc_RNA (1)...(19): siRNA sense strand
ccuuggagcugaaagugaa

SEQ ID NO: 1486237 - RNA, 19 nt, Homo sapiens
  misc_RNA (1)...(19): siRNA sense strand
caggugggaucgagcuauu

SEQ ID NO: 1486238 - RNA, 19 nt, Homo sapiens
  misc_RNA (1)...(19): siRNA sense strand
acaaggcauuugcucugua

SEQ ID NO: 1486239 - RNA, 19 nt, Homo sapiens
  misc_RNA (1)...(19): siRNA sense strand
ggugggcacugucauggau

SEQ ID NO: 1486240 - RNA, 19 nt, Homo sapiens
  misc_RNA (1)...(19): siRNA sense strand
agagaaagaaacugagaaa

SEQ ID NO: 1486241 - RNA, 19 nt, Homo sapiens
  misc_RNA (1)...(19): siRNA sense strand
gaaaccauacagcgauuag

SEQ ID NO: 1486242 - RNA, 19 nt, Homo sapiens
  misc_RNA (1)...(19): siRNA sense strand
aagugaagacugucaagua

SEQ ID NO: 1486243 - RNA, 19 nt, Homo sapiens
  misc_RNA (1)...(19): siRNA sense strand
gguuuaaugcuuguucaua

SEQ ID NO: 1486244 - RNA, 19 nt, Homo sapiens
  misc_RNA (1)...(19): siRNA sense strand
ugucaaguauuucaaaggu

SEQ ID NO: 1486245 - RNA, 19 nt, Homo sapiens
  misc_RNA (1)...(19): siRNA sense strand
gugaugccuuugaagagaa

SEQ ID NO: 1486246 - RNA, 19 nt, Homo sapiens
  misc_RNA (1)...(19): siRNA sense strand
aagaaaccauacagcgauu

SEQ ID NO: 1486247 - RNA, 19 nt, Homo sapiens
  misc_RNA (1)...(19): siRNA sense strand
ucaaagguuuaaugcuugu

SEQ ID NO: 1486248 - RNA, 19 nt, Homo sapiens
  misc_RNA (1)...(19): siRNA sense strand
caaggcauuugcucuguac

SEQ ID NO: 1486249 - RNA, 19 nt, Homo sapiens
  misc_RNA (1)...(19): siRNA sense strand
cagaaugugaugccuuuga

SEQ ID NO: 1486250 - RNA, 19 nt, Homo sapiens
  misc_RNA (1)...(19): siRNA sense strand
agagaggugaugauccuua

SEQ ID NO: 1486251 - RNA, 19 nt, Homo sapiens
  misc_RNA (1)...(19): siRNA sense strand
gaaagugaagacugucaag

SEQ ID NO: 1486252 - RNA, 19 nt, Homo sapiens
  misc_RNA (1)...(19): siRNA sense strand
ccuucaacauggaugagua

SEQ ID NO: 1486253 - RNA, 19 nt, Homo sapiens
  misc_RNA (1)...(19): siRNA sense strand
aaagagaaagaaacugaga

SEQ ID NO: 1486254 - RNA, 19 nt, Homo sapiens
  misc_RNA (1)...(19): siRNA sense strand
guacaguaucaaagagaaa

SEQ ID NO: 1486255 - RNA, 19 nt, Homo sapiens
  misc_RNA (1)...(19): siRNA sense strand
uacaagaagcugauugaau

SEQ ID NO: 1486256 - RNA, 19 nt, Homo sapiens
  misc_RNA (1)...(19): siRNA sense strand
ugugaugccuuugaagaga

SEQ ID NO: 1486257 - RNA, 19 nt, Homo sapiens
  misc_RNA (1)...(19): siRNA sense strand
ggccaaugcuagguucuuc

SEQ ID NO: 1486258 - RNA, 19 nt, Homo sapiens
  misc_RNA (1)...(19): siRNA sense strand
ggugggaucgagcuauuug

SEQ ID NO: 1486259 - RNA, 19 nt, Homo sapiens
  misc_RNA (1)...(19): siRNA sense strand
gggaucgagcuauuuguug

SEQ ID NO: 1486260 - RNA, 19 nt, Homo sapiens
  misc_RNA (1)...(19): siRNA sense strand
uguacaguaucaaagagaa

SEQ ID NO: 1486261 - RNA, 19 nt, Homo sapiens
  misc_RNA (1)...(19): siRNA sense strand
cuagagaggugaugauccu

SEQ ID NO: 1486262 - RNA, 19 nt, Homo sapiens
  misc_RNA (1)...(19): siRNA sense strand
ggagggagugaaccacaug

SEQ ID NO: 1486263 - RNA, 19 nt, Homo sapiens
  misc_RNA (1)...(19): siRNA sense strand
gagaaaagccaaucuucga

SEQ ID NO: 1486264 - RNA, 19 nt, Homo sapiens
  misc_RNA (1)...(19): siRNA sense strand
cgaccuacaggcagaaugu

SEQ ID NO: 1486265 - RNA, 19 nt, Homo sapiens
  misc_RNA (1)...(19): siRNA sense strand
gugaagacugucaaguauu

SEQ ID NO: 1486266 - RNA, 19 nt, Homo sapiens
  misc_RNA (1)...(19): siRNA sense strand
gucaaguauuucaaagguu

SEQ ID NO: 1486267 - RNA, 19 nt, Homo sapiens
  misc_RNA (1)...(19): siRNA sense strand
cacaaggcauuugcucugu

SEQ ID NO: 1486268 - RNA, 19 nt, Homo sapiens
  misc_RNA (1)...(19): siRNA sense strand
ggcauuugcucuguacaag

SEQ ID NO: 1486269 - RNA, 19 nt, Homo sapiens
  misc_RNA (1)...(19): siRNA sense strand
gauaccauccuggccaaug

SEQ ID NO: 1486270 - RNA, 19 nt, Homo sapiens
  misc_RNA (1)...(19): siRNA sense strand
auggagaacucaccaaggu

SEQ ID NO: 1486271 - RNA, 19 nt, Homo sapiens
  misc_RNA (1)...(19): siRNA sense strand
acccagggccagagaagua

SEQ ID NO: 1486272 - RNA, 19 nt, Homo sapiens
  misc_RNA (1)...(19): siRNA sense strand
caacuucuucaagcacauu

SEQ ID NO: 1486273 - RNA, 19 nt, Homo sapiens
  misc_RNA (1)...(19): siRNA sense strand
ucaucauccuggagcacua

SEQ ID NO: 1486274 - RNA, 19 nt, Homo sapiens
  misc_RNA (1)...(19): siRNA sense strand
aaugugaugccuuugaaga

SEQ ID NO: 1486275 - RNA, 19 nt, Homo sapiens
  misc_RNA (1)...(19): siRNA sense strand
gaaugcagucgaccuacag

SEQ ID NO: 1486276 - RNA, 19 nt, Homo sapiens
  misc_RNA (1)...(19): siRNA sense strand
gacugucaaguauuucaaa

SEQ ID NO: 1486277 - RNA, 19 nt, Homo sapiens
  misc_RNA (1)...(19): siRNA sense strand
gcaggugggaucgagcuau

SEQ ID NO: 1486278 - RNA, 19 nt, Homo sapiens
  misc_RNA (1)...(19): siRNA sense strand
guggaccccuuguacagua

SEQ ID NO: 1486279 - RNA, 19 nt, Homo sapiens
  misc_RNA (1)...(19): siRNA sense strand
gaucgagcuauuuguugga

SEQ ID NO: 1486280 - RNA, 19 nt, Homo sapiens
  misc_RNA (1)...(19): siRNA sense strand
gcugauugaauacuauaag

SEQ ID NO: 1486281 - RNA, 19 nt, Homo sapiens
  misc_RNA (1)...(19): siRNA sense strand
agaaaccauacagcgauua

SEQ ID NO: 1486282 - RNA, 19 nt, Homo sapiens
  misc_RNA (1)...(19): siRNA sense strand
caagaagcugauugaauac

SEQ ID NO: 1486283 - RNA, 19 nt, Homo sapiens
  misc_RNA (1)...(19): siRNA sense strand
ggagacagcuuucuuaaua

SEQ ID NO: 1486284 - RNA, 19 nt, Homo sapiens
  misc_RNA (1)...(19): siRNA sense strand
gcacuaugcugaccaauuu

SEQ ID NO: 1486285 - RNA, 19 nt, Homo sapiens
  misc_RNA (1)...(19): siRNA sense strand
ccaaacaacuuccaacuaa

SEQ ID NO: 1486286 - RNA, 19 nt, Homo sapiens
  misc_RNA (1)...(19): siRNA sense strand
gaacaaacgugggauaaau

SEQ ID NO: 1486287 - RNA, 19 nt, Homo sapiens
  misc_RNA (1)...(19): siRNA sense strand
uaagaagcuucgaguauua

SEQ ID NO: 1486288 - RNA, 19 nt, Homo sapiens
  misc_RNA (1)...(19): siRNA sense strand
caucauccauggcuucuua

SEQ ID NO: 1486289 - RNA, 19 nt, Homo sapiens
  misc_RNA (1)...(19): siRNA sense strand
ggaaggaauugguggcuuu

SEQ ID NO: 1486290 - RNA, 19 nt, Homo sapiens
  misc_RNA (1)...(19): siRNA sense strand
ggagagagugguaacuuua

SEQ ID NO: 1486291 - RNA, 19 nt, Homo sapiens
  misc_RNA (1)...(19): siRNA sense strand
gaaaugcccggauguaaga

SEQ ID NO: 1486292 - RNA, 19 nt, Homo sapiens
  misc_RNA (1)...(19): siRNA sense strand
cuaagaagcuucgaguauu

SEQ ID NO: 1486293 - RNA, 19 nt, Homo sapiens
  misc_RNA (1)...(19): siRNA sense strand
gaaaacaagugcuguggaa

SEQ ID NO: 1486294 - RNA, 19 nt, Homo sapiens
  misc_RNA (1)...(19): siRNA sense strand
gaaagugaauggguacauc

SEQ ID NO: 1486295 - RNA, 19 nt, Homo sapiens
  misc_RNA (1)...(19): siRNA sense strand
gaagaugggacugaguaua

SEQ ID NO: 1486296 - RNA, 19 nt, Homo sapiens
  misc_RNA (1)...(19): siRNA sense strand
ucagcgaccuguaaaauua

SEQ ID NO: 1486297 - RNA, 19 nt, Homo sapiens
  misc_RNA (1)...(19): siRNA sense strand
gcaaucaccuaagaagcuu

SEQ ID NO: 1486298 - RNA, 19 nt, Homo sapiens
  misc_RNA (1)...(19): siRNA sense strand
caucaggauugcuuuguau

SEQ ID NO: 1486299 - RNA, 19 nt, Homo sapiens
  misc_RNA (1)...(19): siRNA sense strand
caaacaacuuccaacuaau

SEQ ID NO: 1486300 - RNA, 19 nt, Homo sapiens
  misc_RNA (1)...(19): siRNA sense strand
gauggaauaugggaaggaa

SEQ ID NO: 1486301 - RNA, 19 nt, Homo sapiens
  misc_RNA (1)...(19): siRNA sense strand
ggacauugacacccgcuuu

SEQ ID NO: 1486302 - RNA, 19 nt, Homo sapiens
  misc_RNA (1)...(19): siRNA sense strand
caaaggaucccucaaacca

SEQ ID NO: 1486303 - RNA, 19 nt, Homo sapiens
  misc_RNA (1)...(19): siRNA sense strand
ggaaaugcccggauguaag

SEQ ID NO: 1486304 - RNA, 19 nt, Homo sapiens
  misc_RNA (1)...(19): siRNA sense strand
gcaagaaaauguuugaagu

SEQ ID NO: 1486305 - RNA, 19 nt, Homo sapiens
  misc_RNA (1)...(19): siRNA sense strand
ggaacaaacgugggauaaa

SEQ ID NO: 1486306 - RNA, 19 nt, Homo sapiens
  misc_RNA (1)...(19): siRNA sense strand
ccaaauggaggaaaggaaa

SEQ ID NO: 1486307 - RNA, 19 nt, Homo sapiens
  misc_RNA (1)...(19): siRNA sense strand
caucggacaugugcaagaa

SEQ ID NO: 1486308 - RNA, 19 nt, Homo sapiens
  misc_RNA (1)...(19): siRNA sense strand
aagaugggacugaguauaa

SEQ ID NO: 1486309 - RNA, 19 nt, Homo sapiens
  misc_RNA (1)...(19): siRNA sense strand
cacagauucuucucccaua

SEQ ID NO: 1486310 - RNA, 19 nt, Homo sapiens
  misc_RNA (1)...(19): siRNA sense strand
gaaggugaacugcaucugu

SEQ ID NO: 1486311 - RNA, 19 nt, Homo sapiens
  misc_RNA (1)...(19): siRNA sense strand
cagcgacacuguggaagaa

SEQ ID NO: 1486312 - RNA, 19 nt, Homo sapiens
  misc_RNA (1)...(19): siRNA sense strand
gacacccgcuuucuucugu

SEQ ID NO: 1486313 - RNA, 19 nt, Homo sapiens
  misc_RNA (1)...(19): siRNA sense strand
gagacagcuuucuuaauac

SEQ ID NO: 1486314 - RNA, 19 nt, Homo sapiens
  misc_RNA (1)...(19): siRNA sense strand
gugaagaugggacugagua

SEQ ID NO: 1486315 - RNA, 19 nt, Homo sapiens
  misc_RNA (1)...(19): siRNA sense strand
aaacgugggauaaaucuau

SEQ ID NO: 1486316 - RNA, 19 nt, Homo sapiens
  misc_RNA (1)...(19): siRNA sense strand
gaguaaguguuucccuugu

SEQ ID NO: 1486317 - RNA, 19 nt, Homo sapiens
  misc_RNA (1)...(19): siRNA sense strand
gcggagacagcuuucuuaa

SEQ ID NO: 1486318 - RNA, 19 nt, Homo sapiens
  misc_RNA (1)...(19): siRNA sense strand
ccuaagaagcuucgaguau

SEQ ID NO: 1486319 - RNA, 19 nt, Homo sapiens
  misc_RNA (1)...(19): siRNA sense strand
agacagcuuucuuaauaca

SEQ ID NO: 1486320 - RNA, 19 nt, Homo sapiens
  misc_RNA (1)...(19): siRNA sense strand
ggaauugguggcuuugugu

SEQ ID NO: 1486321 - RNA, 19 nt, Homo sapiens
  misc_RNA (1)...(19): siRNA sense strand
gaaaagagaaagugaaugg

SEQ ID NO: 1486322 - RNA, 19 nt, Homo sapiens
  misc_RNA (1)...(19): siRNA sense strand
uaagguaucagucacacuu

SEQ ID NO: 1486323 - RNA, 19 nt, Homo sapiens
  misc_RNA (1)...(19): siRNA sense strand
aggagagagugguaacuuu

SEQ ID NO: 1486324 - RNA, 19 nt, Homo sapiens
  misc_RNA (1)...(19): siRNA sense strand
gcacggaaccagacaccau

SEQ ID NO: 1486325 - RNA, 19 nt, Homo sapiens
  misc_RNA (1)...(19): siRNA sense strand
gaaaacgucuugcaaucuc

SEQ ID NO: 1486326 - RNA, 19 nt, Homo sapiens
  misc_RNA (1)...(19): siRNA sense strand
caaaucacagugcaaagug

SEQ ID NO: 1486327 - RNA, 19 nt, Homo sapiens
  misc_RNA (1)...(19): siRNA sense strand
acaucaggauugcuuugua

SEQ ID NO: 1486328 - RNA, 19 nt, Homo sapiens
  misc_RNA (1)...(19): siRNA sense strand
caacuuggcugcuuuucug

SEQ ID NO: 1486329 - RNA, 19 nt, Homo sapiens
  misc_RNA (1)...(19): siRNA sense strand
aaacaacuuccaacuaauc

SEQ ID NO: 1486330 - RNA, 19 nt, Homo sapiens
  misc_RNA (1)...(19): siRNA sense strand
gcagcgacacuguggaaga

SEQ ID NO: 1486331 - RNA, 19 nt, Homo sapiens
  misc_RNA (1)...(19): siRNA sense strand
caagugcuguggaacaaac

SEQ ID NO: 1486332 - RNA, 19 nt, Homo sapiens
  misc_RNA (1)...(19): siRNA sense strand
caaccauuacugauauuga

SEQ ID NO: 1486333 - RNA, 19 nt, Homo sapiens
  misc_RNA (1)...(19): siRNA sense strand
ggcggagacagcuuucuua

SEQ ID NO: 1486334 - RNA, 19 nt, Homo sapiens
  misc_RNA (1)...(19): siRNA sense strand
caagacacgcuucaucauc

SEQ ID NO: 1486335 - RNA, 19 nt, Homo sapiens
  misc_RNA (1)...(19): siRNA sense strand
gcaagacacgcuucaucau

SEQ ID NO: 1486336 - RNA, 19 nt, Homo sapiens
  misc_RNA (1)...(19): siRNA sense strand
aaaucuaucugagcccaaa

SEQ ID NO: 1486337 - RNA, 19 nt, Homo sapiens
  misc_RNA (1)...(19): siRNA sense strand
caggauugcuuuguaugga

SEQ ID NO: 1486338 - RNA, 19 nt, Homo sapiens
  misc_RNA (1)...(19): siRNA sense strand
gcuuucuucuguacacaaa

SEQ ID NO: 1486339 - RNA, 19 nt, Homo sapiens
  misc_RNA (1)...(19): siRNA sense strand
gcugaaggaugccccaaaa

SEQ ID NO: 1486340 - RNA, 19 nt, Homo sapiens
  misc_RNA (1)...(19): siRNA sense strand
cauaguuccuucccuaggu

SEQ ID NO: 1486341 - RNA, 19 nt, Homo sapiens
  misc_RNA (1)...(19): siRNA sense strand
gaugggacugaguauaauu

SEQ ID NO: 1486342 - RNA, 19 nt, Homo sapiens
  misc_RNA (1)...(19): siRNA sense strand
gaauggguacaucaggauu

SEQ ID NO: 1486343 - RNA, 19 nt, Homo sapiens
  misc_RNA (1)...(19): siRNA sense strand
aaacaagugcuguggaaca

SEQ ID NO: 1486344 - RNA, 19 nt, Homo sapiens
  misc_RNA (1)...(19): siRNA sense strand
uggaauaugggaaggaauu

SEQ ID NO: 1486345 - RNA, 19 nt, Homo sapiens
  misc_RNA (1)...(19): siRNA sense strand
guacaucaggauugcuuug

SEQ ID NO: 1486346 - RNA, 19 nt, Homo sapiens
  misc_RNA (1)...(19): siRNA sense strand
uggagaaggugaacugcau

SEQ ID NO: 1486347 - RNA, 19 nt, Homo sapiens
  misc_RNA (1)...(19): siRNA sense strand
gcaaucucuuuacccuugu

SEQ ID NO: 1486348 - RNA, 19 nt, Homo sapiens
  misc_RNA (1)...(19): siRNA sense strand
cggacaacuuggcugcuuu

SEQ ID NO: 1486349 - RNA, 19 nt, Homo sapiens
  misc_RNA (1)...(19): siRNA sense strand
ggaauaugggaaggaauug

SEQ ID NO: 1486350 - RNA, 19 nt, Homo sapiens
  misc_RNA (1)...(19): siRNA sense strand
ggccgugcuuccaggauga

SEQ ID NO: 1486351 - RNA, 19 nt, Homo sapiens
  misc_RNA (1)...(19): siRNA sense strand
uuucaaaggaucccucaaa

SEQ ID NO: 1486352 - RNA, 19 nt, Homo sapiens
  misc_RNA (1)...(19): siRNA sense strand
ccaaaucacagugcaaagu

SEQ ID NO: 1486353 - RNA, 19 nt, Homo sapiens
  misc_RNA (1)...(19): siRNA sense strand
gaaggaauugguggcuuug

SEQ ID NO: 1486354 - RNA, 19 nt, Homo sapiens
  misc_RNA (1)...(19): siRNA sense strand
caucugacgccguguuugu

SEQ ID NO: 1486355 - RNA, 19 nt, Homo sapiens
  misc_RNA (1)...(19): siRNA sense strand
gauguggauuuuaauguug

SEQ ID NO: 1486356 - RNA, 19 nt, Homo sapiens
  misc_RNA (1)...(19): siRNA sense strand
ggcacuaugcugaccaauu

SEQ ID NO: 1486357 - RNA, 19 nt, Homo sapiens
  misc_RNA (1)...(19): siRNA sense strand
ggucugcuacggacaacuu

SEQ ID NO: 1486358 - RNA, 19 nt, Homo sapiens
  misc_RNA (1)...(19): siRNA sense strand
gggcggagacagcuuucuu

SEQ ID NO: 1486359 - RNA, 19 nt, Homo sapiens
  misc_RNA (1)...(19): siRNA sense strand
ccucaaaccagaugcaagu

SEQ ID NO: 1486360 - RNA, 19 nt, Homo sapiens
  misc_RNA (1)...(19): siRNA sense strand
caaauggaggaaaggaaau

SEQ ID NO: 1486361 - RNA, 19 nt, Homo sapiens
  misc_RNA (1)...(19): siRNA sense strand
gagguucgguuggauccau

SEQ ID NO: 1486362 - RNA, 19 nt, Homo sapiens
  misc_RNA (1)...(19): siRNA sense strand
aacaagugcuguggaacaa

SEQ ID NO: 1486363 - RNA, 19 nt, Homo sapiens
  misc_RNA (1)...(19): siRNA sense strand
auccauggcuucuuagaca

SEQ ID NO: 1486364 - RNA, 19 nt, Homo sapiens
  misc_RNA (1)...(19): siRNA sense strand
agauucuucucccauaguu

SEQ ID NO: 1486365 - RNA, 19 nt, Homo sapiens
  misc_RNA (1)...(19): siRNA sense strand
ucagucacacuuucuggaa

SEQ ID NO: 1486366 - RNA, 19 nt, Homo sapiens
  misc_RNA (1)...(19): siRNA sense strand
uccaaacaacuuccaacua

SEQ ID NO: 1486367 - RNA, 19 nt, Homo sapiens
  misc_RNA (1)...(19): siRNA sense strand
guacacaaaugaaaaucca

SEQ ID NO: 1486368 - RNA, 19 nt, Homo sapiens
  misc_RNA (1)...(19): siRNA sense strand
uagcagcgacacuguggaa

SEQ ID NO: 1486369 - RNA, 19 nt, Homo sapiens
  misc_RNA (1)...(19): siRNA sense strand
uuucuucuguacacaaaug

SEQ ID NO: 1486370 - RNA, 19 nt, Homo sapiens
  misc_RNA (1)...(19): siRNA sense strand
ggugggccaucuggauuuc

SEQ ID NO: 1486371 - RNA, 19 nt, Homo sapiens
  misc_RNA (1)...(19): siRNA sense strand
acacgugugcuauugaugu

SEQ ID NO: 1486372 - RNA, 19 nt, Homo sapiens
  misc_RNA (1)...(19): siRNA sense strand
gacauugacacccgcuuuc

SEQ ID NO: 1486373 - RNA, 19 nt, Homo sapiens
  misc_RNA (1)...(19): siRNA sense strand
gaaggaugccccaaaaugg

SEQ ID NO: 1486374 - RNA, 19 nt, Homo sapiens
  misc_RNA (1)...(19): siRNA sense strand
aggaauugguggcuuugug

SEQ ID NO: 1486375 - RNA, 19 nt, Homo sapiens
  misc_RNA (1)...(19): siRNA sense strand
agaugggacugaguauaau

SEQ ID NO: 1486376 - RNA, 19 nt, Homo sapiens
  misc_RNA (1)...(19): siRNA sense strand
caaacgugggauaaaucua

SEQ ID NO: 1486377 - RNA, 19 nt, Homo sapiens
  misc_RNA (1)...(19): siRNA sense strand
uggaacaaacgugggauaa

SEQ ID NO: 1486378 - RNA, 19 nt, Homo sapiens
  misc_RNA (1)...(19): siRNA sense strand
caacuuccaacuaaucacu

SEQ ID NO: 1486379 - RNA, 19 nt, Homo sapiens
  misc_RNA (1)...(19): siRNA sense strand
gaaguaaugaaaacucgaa

SEQ ID NO: 1486380 - RNA, 19 nt, Homo sapiens
  misc_RNA (1)...(19): siRNA sense strand
aggauugcuuuguauggaa

SEQ ID NO: 1486381 - RNA, 19 nt, Homo sapiens
  misc_RNA (1)...(19): siRNA sense strand
caggagagagugguaacuu

SEQ ID NO: 1486382 - RNA, 19 nt, Homo sapiens
  misc_RNA (1)...(19): siRNA sense strand
cgcaagacacgcuucauca

SEQ ID NO: 1486383 - RNA, 19 nt, Homo sapiens
  misc_RNA (1)...(19): siRNA sense strand
ucagggaccuugacacuua

SEQ ID NO: 1486384 - RNA, 19 nt, Homo sapiens
  misc_RNA (1)...(19): siRNA sense strand
gaaccuagccuccaagauu

SEQ ID NO: 1486385 - RNA, 19 nt, Homo sapiens
  misc_RNA (1)...(19): siRNA sense strand
gagaggagguuuaugugaa

SEQ ID NO: 1486386 - RNA, 19 nt, Homo sapiens
  misc_RNA (1)...(19): siRNA sense strand
gggaggacaucaccuuuga

SEQ ID NO: 1486387 - RNA, 19 nt, Homo sapiens
  misc_RNA (1)...(19): siRNA sense strand
gggacagccucuacccuua

SEQ ID NO: 1486388 - RNA, 19 nt, Homo sapiens
  misc_RNA (1)...(19): siRNA sense strand
gaaguucugugcaaauugg

SEQ ID NO: 1486389 - RNA, 19 nt, Homo sapiens
  misc_RNA (1)...(19): siRNA sense strand
caacauggccucagaacug

SEQ ID NO: 1486390 - RNA, 19 nt, Homo sapiens
  misc_RNA (1)...(19): siRNA sense strand
gagagaaccuagccuccaa

SEQ ID NO: 1486391 - RNA, 19 nt, Homo sapiens
  misc_RNA (1)...(19): siRNA sense strand
ggacaggccugaggagaca

SEQ ID NO: 1486392 - RNA, 19 nt, Homo sapiens
  misc_RNA (1)...(19): siRNA sense strand
ggaucuggcuggagaggaa

SEQ ID NO: 1486393 - RNA, 19 nt, Homo sapiens
  misc_RNA (1)...(19): siRNA sense strand
caacggauccuacuucuac

SEQ ID NO: 1486394 - RNA, 19 nt, Homo sapiens
  misc_RNA (1)...(19): siRNA sense strand
ucaaaaugcugaaagagua

SEQ ID NO: 1486395 - RNA, 19 nt, Homo sapiens
  misc_RNA (1)...(19): siRNA sense strand
ggagcagccucgaaacugu

SEQ ID NO: 1486396 - RNA, 19 nt, Homo sapiens
  misc_RNA (1)...(19): siRNA sense strand
ugacaccgcuguacuuucu

SEQ ID NO: 1486397 - RNA, 19 nt, Homo sapiens
  misc_RNA (1)...(19): siRNA sense strand
aaaugaccaucgugacuuu

SEQ ID NO: 1486398 - RNA, 19 nt, Homo sapiens
  misc_RNA (1)...(19): siRNA sense strand
ggagaggagguuuauguga

SEQ ID NO: 1486399 - RNA, 19 nt, Homo sapiens
  misc_RNA (1)...(19): siRNA sense strand
acgggaaccugcuagauuu

SEQ ID NO: 1486400 - RNA, 19 nt, Homo sapiens
  misc_RNA (1)...(19): siRNA sense strand
uaaugaaccugaggccaaa

SEQ ID NO: 1486401 - RNA, 19 nt, Homo sapiens
  misc_RNA (1)...(19): siRNA sense strand
gcauggagcagccucgaaa

SEQ ID NO: 1486402 - RNA, 19 nt, Homo sapiens
  misc_RNA (1)...(19): siRNA sense strand
gaagaccacagcugaguuc

SEQ ID NO: 1486403 - RNA, 19 nt, Homo sapiens
  misc_RNA (1)...(19): siRNA sense strand
acaugucgcuguuugagaa

SEQ ID NO: 1486404 - RNA, 19 nt, Homo sapiens
  misc_RNA (1)...(19): siRNA sense strand
gaacuacagugucuauacc

SEQ ID NO: 1486405 - RNA, 19 nt, Homo sapiens
  misc_RNA (1)...(19): siRNA sense strand
gagcaacggauccuacuuc

SEQ ID NO: 1486406 - RNA, 19 nt, Homo sapiens
  misc_RNA (1)...(19): siRNA sense strand
ggagugcacugugagaagu

SEQ ID NO: 1486407 - RNA, 19 nt, Homo sapiens
  misc_RNA (1)...(19): siRNA sense strand
gaacgcagccaucaaaaug

SEQ ID NO: 1486408 - RNA, 19 nt, Homo sapiens
  misc_RNA (1)...(19): siRNA sense strand
ggaagccagugccaagaag

SEQ ID NO: 1486409 - RNA, 19 nt, Homo sapiens
  misc_RNA (1)...(19): siRNA sense strand
caaggucaaugugaaagug

SEQ ID NO: 1486410 - RNA, 19 nt, Homo sapiens
  misc_RNA (1)...(19): siRNA sense strand
ggcauggagugcacuguga

SEQ ID NO: 1486411 - RNA, 19 nt, Homo sapiens
  misc_RNA (1)...(19): siRNA sense strand
gagcaacacaguagaagag

SEQ ID NO: 1486412 - RNA, 19 nt, Homo sapiens
  misc_RNA (1)...(19): siRNA sense strand
ucgaaacugugacgaugaa

SEQ ID NO: 1486413 - RNA, 19 nt, Homo sapiens
  misc_RNA (1)...(19): siRNA sense strand
uggaaguucugugcaaauu

SEQ ID NO: 1486414 - RNA, 19 nt, Homo sapiens
  misc_RNA (1)...(19): siRNA sense strand
gaacuucggccaggucauc

SEQ ID NO: 1486415 - RNA, 19 nt, Homo sapiens
  misc_RNA (1)...(19): siRNA sense strand
aaccuagccuccaagauug

SEQ ID NO: 1486416 - RNA, 19 nt, Homo sapiens
  misc_RNA (1)...(19): siRNA sense strand
ggagaaggacgaccguauc

SEQ ID NO: 1486417 - RNA, 19 nt, Homo sapiens
  misc_RNA (1)...(19): siRNA sense strand
ggagacgcaccuucaccua

SEQ ID NO: 1486418 - RNA, 19 nt, Homo sapiens
  misc_RNA (1)...(19): siRNA sense strand
ccuccaagauugcagacuu

SEQ ID NO: 1486419 - RNA, 19 nt, Homo sapiens
  misc_RNA (1)...(19): siRNA sense strand
cuucuuggcuucucaugug

SEQ ID NO: 1486420 - RNA, 19 nt, Homo sapiens
  misc_RNA (1)...(19): siRNA sense strand
gaggagacaagcaccauca

SEQ ID NO: 1486421 - RNA, 19 nt, Homo sapiens
  misc_RNA (1)...(19): siRNA sense strand
ccaggaaggccuaugugaa

SEQ ID NO: 1486422 - RNA, 19 nt, Homo sapiens
  misc_RNA (1)...(19): siRNA sense strand
gugccgagcucuaugaaaa

SEQ ID NO: 1486423 - RNA, 19 nt, Homo sapiens
  misc_RNA (1)...(19): siRNA sense strand
ccauugagucccugaacua

SEQ ID NO: 1486424 - RNA, 19 nt, Homo sapiens
  misc_RNA (1)...(19): siRNA sense strand
ggaaguucugugcaaauug

SEQ ID NO: 1486425 - RNA, 19 nt, Homo sapiens
  misc_RNA (1)...(19): siRNA sense strand
gggccaugaucaagaagga

SEQ ID NO: 1486426 - RNA, 19 nt, Homo sapiens
  misc_RNA (1)...(19): siRNA sense strand
ccagauugcgcuacagcua

SEQ ID NO: 1486427 - RNA, 19 nt, Homo sapiens
  misc_RNA (1)...(19): siRNA sense strand
cgagguuacuuguauaucg

SEQ ID NO: 1486428 - RNA, 19 nt, Homo sapiens
  misc_RNA (1)...(19): siRNA sense strand
uguuugagaacuucacuua

SEQ ID NO: 1486429 - RNA, 19 nt, Homo sapiens
  misc_RNA (1)...(19): siRNA sense strand
gcaacggauccuacuucua

SEQ ID NO: 1486430 - RNA, 19 nt, Homo sapiens
  misc_RNA (1)...(19): siRNA sense strand
agugaugucugguccuuug

SEQ ID NO: 1486431 - RNA, 19 nt, Homo sapiens
  misc_RNA (1)...(19): siRNA sense strand
ucagaaugguggcacuugu

SEQ ID NO: 1486432 - RNA, 19 nt, Homo sapiens
  misc_RNA (1)...(19): siRNA sense strand
acaaggagaagcagacaga

SEQ ID NO: 1486433 - RNA, 19 nt, Homo sapiens
  misc_RNA (1)...(19): siRNA sense strand
ggagauagugagccuugga

SEQ ID NO: 1486434 - RNA, 19 nt, Homo sapiens
  misc_RNA (1)...(19): siRNA sense strand
ggacagccucuacccuuag

SEQ ID NO: 1486435 - RNA, 19 nt, Homo sapiens
  misc_RNA (1)...(19): siRNA sense strand
ggagcaacacaguagaaga

SEQ ID NO: 1486436 - RNA, 19 nt, Homo sapiens
  misc_RNA (1)...(19): siRNA sense strand
gagaagaccacagcugagu

SEQ ID NO: 1486437 - RNA, 19 nt, Homo sapiens
  misc_RNA (1)...(19): siRNA sense strand
gcacgcgcgucaucuacgu

SEQ ID NO: 1486438 - RNA, 19 nt, Homo sapiens
  misc_RNA (1)...(19): siRNA sense strand
gaagcagacagacgugauc

SEQ ID NO: 1486439 - RNA, 19 nt, Homo sapiens
  misc_RNA (1)...(19): siRNA sense strand
gaaacugugacgaugaagu

SEQ ID NO: 1486440 - RNA, 19 nt, Homo sapiens
  misc_RNA (1)...(19): siRNA sense strand
gaaggacgggcugaagaug

SEQ ID NO: 1486441 - RNA, 19 nt, Homo sapiens
  misc_RNA (1)...(19): siRNA sense strand
acuuguauaucgcuauuga

SEQ ID NO: 1486442 - RNA, 19 nt, Homo sapiens
  misc_RNA (1)...(19): siRNA sense strand
cagacuguccugagccuuu

SEQ ID NO: 1486443 - RNA, 19 nt, Homo sapiens
  misc_RNA (1)...(19): siRNA sense strand
aaacugugacgaugaagug

SEQ ID NO: 1486444 - RNA, 19 nt, Homo sapiens
  misc_RNA (1)...(19): siRNA sense strand
auagugagccuuggaggua

SEQ ID NO: 1486445 - RNA, 19 nt, Homo sapiens
  misc_RNA (1)...(19): siRNA sense strand
gaggagguuuaugugaaga

SEQ ID NO: 1486446 - RNA, 19 nt, Homo sapiens
  misc_RNA (1)...(19): siRNA sense strand
aggacgggcugaagaugaa

SEQ ID NO: 1486447 - RNA, 19 nt, Homo sapiens
  misc_RNA (1)...(19): siRNA sense strand
gagaccauccugcaguuca

SEQ ID NO: 1486448 - RNA, 19 nt, Homo sapiens
  misc_RNA (1)...(19): siRNA sense strand
caucggagacgcaccuuca

SEQ ID NO: 1486449 - RNA, 19 nt, Homo sapiens
  misc_RNA (1)...(19): siRNA sense strand
ggagacaagcaccaucauc

SEQ ID NO: 1486450 - RNA, 19 nt, Homo sapiens
  misc_RNA (1)...(19): siRNA sense strand
gccaauauccaaguacguu

SEQ ID NO: 1486451 - RNA, 19 nt, Homo sapiens
  misc_RNA (1)...(19): siRNA sense strand
caccucggcuccugaccaa

SEQ ID NO: 1486452 - RNA, 19 nt, Homo sapiens
  misc_RNA (1)...(19): siRNA sense strand
caucauccguggccucaac

SEQ ID NO: 1486453 - RNA, 19 nt, Homo sapiens
  misc_RNA (1)...(19): siRNA sense strand
aaagacaggauacaguguu

SEQ ID NO: 1486454 - RNA, 19 nt, Homo sapiens
  misc_RNA (1)...(19): siRNA sense strand
gaaccugaggccaaagaca

SEQ ID NO: 1486455 - RNA, 19 nt, Homo sapiens
  misc_RNA (1)...(19): siRNA sense strand
gcaugcaguaccugaguga

SEQ ID NO: 1486456 - RNA, 19 nt, Homo sapiens
  misc_RNA (1)...(19): siRNA sense strand
ggaagagcaacggauccua

SEQ ID NO: 1486457 - RNA, 19 nt, Homo sapiens
  misc_RNA (1)...(19): siRNA sense strand
ggagguuuaugugaagaag

SEQ ID NO: 1486458 - RNA, 19 nt, Homo sapiens
  misc_RNA (1)...(19): siRNA sense strand
gagaaccuagccuccaaga

SEQ ID NO: 1486459 - RNA, 19 nt, Homo sapiens
  misc_RNA (1)...(19): siRNA sense strand
ccaugacggcgaaugugua

SEQ ID NO: 1486460 - RNA, 19 nt, Homo sapiens
  misc_RNA (1)...(19): siRNA sense strand
ugcaguaccugagugagaa

SEQ ID NO: 1486461 - RNA, 19 nt, Homo sapiens
  misc_RNA (1)...(19): siRNA sense strand
uacgggaaccugcuagauu

SEQ ID NO: 1486462 - RNA, 19 nt, Homo sapiens
  misc_RNA (1)...(19): siRNA sense strand
ggagggcuggcauguggaa

SEQ ID NO: 1486463 - RNA, 19 nt, Homo sapiens
  misc_RNA (1)...(19): siRNA sense strand
gccaggaaggccuauguga

SEQ ID NO: 1486464 - RNA, 19 nt, Homo sapiens
  misc_RNA (1)...(19): siRNA sense strand
agaggagguuuaugugaag

SEQ ID NO: 1486465 - RNA, 19 nt, Homo sapiens
  misc_RNA (1)...(19): siRNA sense strand
uggcugcucuuguggaucu

SEQ ID NO: 1486466 - RNA, 19 nt, Homo sapiens
  misc_RNA (1)...(19): siRNA sense strand
caggaaggccuaugugaac

SEQ ID NO: 1486467 - RNA, 19 nt, Homo sapiens
  misc_RNA (1)...(19): siRNA sense strand
ccaauggcaugcaguaccu

SEQ ID NO: 1486468 - RNA, 19 nt, Homo sapiens
  misc_RNA (1)...(19): siRNA sense strand
ccagugaugcggccaaugg

SEQ ID NO: 1486469 - RNA, 19 nt, Homo sapiens
  misc_RNA (1)...(19): siRNA sense strand
gagcaugggacagccucua

SEQ ID NO: 1486470 - RNA, 19 nt, Homo sapiens
  misc_RNA (1)...(19): siRNA sense strand
gaguaugccucugaaaaug

SEQ ID NO: 1486471 - RNA, 19 nt, Homo sapiens
  misc_RNA (1)...(19): siRNA sense strand
caaagacaggauacagugu

SEQ ID NO: 1486472 - RNA, 19 nt, Homo sapiens
  misc_RNA (1)...(19): siRNA sense strand
ugugaccgguucagugguu

SEQ ID NO: 1486473 - RNA, 19 nt, Homo sapiens
  misc_RNA (1)...(19): siRNA sense strand
gcacaaggagaagcagaca

SEQ ID NO: 1486474 - RNA, 19 nt, Homo sapiens
  misc_RNA (1)...(19): siRNA sense strand
gcucagggaccuugacacu

SEQ ID NO: 1486475 - RNA, 19 nt, Homo sapiens
  misc_RNA (1)...(19): siRNA sense strand
cccuauggcugcucuugug

SEQ ID NO: 1486476 - RNA, 19 nt, Homo sapiens
  misc_RNA (1)...(19): siRNA sense strand
gggagaggagguuuaugug

SEQ ID NO: 1486477 - RNA, 19 nt, Homo sapiens
  misc_RNA (1)...(19): siRNA sense strand
cagcgcuucuuccugacuu

SEQ ID NO: 1486478 - RNA, 19 nt, Homo sapiens
  misc_RNA (1)...(19): siRNA sense strand
guccugagccuuuguugca

SEQ ID NO: 1486479 - RNA, 19 nt, Homo sapiens
  misc_RNA (1)...(19): siRNA sense strand
agacuguccugagccuuug

SEQ ID NO: 1486480 - RNA, 19 nt, Homo sapiens
  misc_RNA (1)...(19): siRNA sense strand
aagacaggauacaguguuc

SEQ ID NO: 1486481 - RNA, 19 nt, Homo sapiens
  misc_RNA (1)...(19): siRNA sense strand
gagaaggacgaccguaucg

SEQ ID NO: 1486482 - RNA, 19 nt, Homo sapiens
  misc_RNA (1)...(19): siRNA sense strand
gaggaagccagugccaaga

SEQ ID NO: 1486483 - RNA, 19 nt, Homo sapiens
  misc_RNA (1)...(19): siRNA sense strand
gaaauuagcugcucuuaug

SEQ ID NO: 1486484 - RNA, 19 nt, Homo sapiens
  misc_RNA (1)...(19): siRNA sense strand
gaaguuggcuggaauguga

SEQ ID NO: 1486485 - RNA, 19 nt, Homo sapiens
  misc_RNA (1)...(19): siRNA sense strand
gaaagcagcuauaaggauu

SEQ ID NO: 1486486 - RNA, 19 nt, Homo sapiens
  misc_RNA (1)...(19): siRNA sense strand
ggaaaugguuugccaguga

SEQ ID NO: 1486487 - RNA, 19 nt, Homo sapiens
  misc_RNA (1)...(19): siRNA sense strand
gaaggugacuuuagguauu

SEQ ID NO: 1486488 - RNA, 19 nt, Homo sapiens
  misc_RNA (1)...(19): siRNA sense strand
caagaaagcucguaagagu

SEQ ID NO: 1486489 - RNA, 19 nt, Homo sapiens
  misc_RNA (1)...(19): siRNA sense strand
gaaaagcucuuccuauauu

SEQ ID NO: 1486490 - RNA, 19 nt, Homo sapiens
  misc_RNA (1)...(19): siRNA sense strand
gcuggaaugugaugacuua

SEQ ID NO: 1486491 - RNA, 19 nt, Homo sapiens
  misc_RNA (1)...(19): siRNA sense strand
guagaaggcuuaccacaga

SEQ ID NO: 1486492 - RNA, 19 nt, Homo sapiens
  misc_RNA (1)...(19): siRNA sense strand
ugaagaaacuauccagaaa

SEQ ID NO: 1486493 - RNA, 19 nt, Homo sapiens
  misc_RNA (1)...(19): siRNA sense strand
ggacacagcuguaacucau

SEQ ID NO: 1486494 - RNA, 19 nt, Homo sapiens
  misc_RNA (1)...(19): siRNA sense strand
caucucagguaucuaauuu

SEQ ID NO: 1486495 - RNA, 19 nt, Homo sapiens
  misc_RNA (1)...(19): siRNA sense strand
aaauaaaccuguagcagaa

SEQ ID NO: 1486496 - RNA, 19 nt, Homo sapiens
  misc_RNA (1)...(19): siRNA sense strand
gaaugaaguuagagaugaa

SEQ ID NO: 1486497 - RNA, 19 nt, Homo sapiens
  misc_RNA (1)...(19): siRNA sense strand
acuaauggcuucuucagua

SEQ ID NO: 1486498 - RNA, 19 nt, Homo sapiens
  misc_RNA (1)...(19): siRNA sense strand
ggagugaagucaguagaaa

SEQ ID NO: 1486499 - RNA, 19 nt, Homo sapiens
  misc_RNA (1)...(19): siRNA sense strand
caaacauaauggagaagua

SEQ ID NO: 1486500 - RNA, 19 nt, Homo sapiens
  misc_RNA (1)...(19): siRNA sense strand
gagcuaccauauccaauug

SEQ ID NO: 1486501 - RNA, 19 nt, Homo sapiens
  misc_RNA (1)...(19): siRNA sense strand
gcacaagaaauuugaaguu

SEQ ID NO: 1486502 - RNA, 19 nt, Homo sapiens
  misc_RNA (1)...(19): siRNA sense strand
cauuagaccuaccucauuu

SEQ ID NO: 1486503 - RNA, 19 nt, Homo sapiens
  misc_RNA (1)...(19): siRNA sense strand
ugagacaggaccauaauua

SEQ ID NO: 1486504 - RNA, 19 nt, Homo sapiens
  misc_RNA (1)...(19): siRNA sense strand
ucaaugauguuucccagaa

SEQ ID NO: 1486505 - RNA, 19 nt, Homo sapiens
  misc_RNA (1)...(19): siRNA sense strand
cgaaaccucgucaaacuua

SEQ ID NO: 1486506 - RNA, 19 nt, Homo sapiens
  misc_RNA (1)...(19): siRNA sense strand
guaacucacccuaaagaua

SEQ ID NO: 1486507 - RNA, 19 nt, Homo sapiens
  misc_RNA (1)...(19): siRNA sense strand
aaacuuaccugauaguagu

SEQ ID NO: 1486508 - RNA, 19 nt, Homo sapiens
  misc_RNA (1)...(19): siRNA sense strand
uaaaugagcuaccauaucc

SEQ ID NO: 1486509 - RNA, 19 nt, Homo sapiens
  misc_RNA (1)...(19): siRNA sense strand
gaaaggcacaagaaauuug

SEQ ID NO: 1486510 - RNA, 19 nt, Homo sapiens
  misc_RNA (1)...(19): siRNA sense strand
cagcuuagaugcacauuag

SEQ ID NO: 1486511 - RNA, 19 nt, Homo sapiens
  misc_RNA (1)...(19): siRNA sense strand
ucaauugagugguguuaaa

SEQ ID NO: 1486512 - RNA, 19 nt, Homo sapiens
  misc_RNA (1)...(19): siRNA sense strand
gaaggacgcucaguuaaaa

SEQ ID NO: 1486513 - RNA, 19 nt, Homo sapiens
  misc_RNA (1)...(19): siRNA sense strand
gacaggaccauaauuauug

SEQ ID NO: 1486514 - RNA, 19 nt, Homo sapiens
  misc_RNA (1)...(19): siRNA sense strand
caagugaauucaaugaugu

SEQ ID NO: 1486515 - RNA, 19 nt, Homo sapiens
  misc_RNA (1)...(19): siRNA sense strand
ggaaugggagauagucaua

SEQ ID NO: 1486516 - RNA, 19 nt, Homo sapiens
  misc_RNA (1)...(19): siRNA sense strand
uagaggacuuguuaaauga

SEQ ID NO: 1486517 - RNA, 19 nt, Homo sapiens
  misc_RNA (1)...(19): siRNA sense strand
ugaaugaaguuagagauga

SEQ ID NO: 1486518 - RNA, 19 nt, Homo sapiens
  misc_RNA (1)...(19): siRNA sense strand
ccaagugaauucaaugaug

SEQ ID NO: 1486519 - RNA, 19 nt, Homo sapiens
  misc_RNA (1)...(19): siRNA sense strand
cacauuaggugauauggaa

SEQ ID NO: 1486520 - RNA, 19 nt, Homo sapiens
  misc_RNA (1)...(19): siRNA sense strand
cuuaaagacuuaccgaauu

SEQ ID NO: 1486521 - RNA, 19 nt, Homo sapiens
  misc_RNA (1)...(19): siRNA sense strand
uaacucacccuaaagauau

SEQ ID NO: 1486522 - RNA, 19 nt, Homo sapiens
  misc_RNA (1)...(19): siRNA sense strand
caacagaauccaauuagga

SEQ ID NO: 1486523 - RNA, 19 nt, Homo sapiens
  misc_RNA (1)...(19): siRNA sense strand
cagcaaacauaauggagaa

SEQ ID NO: 1486524 - RNA, 19 nt, Homo sapiens
  misc_RNA (1)...(19): siRNA sense strand
cagcuaaaguuccaucaga

SEQ ID NO: 1486525 - RNA, 19 nt, Homo sapiens
  misc_RNA (1)...(19): siRNA sense strand
caauagaggacuuguuaaa

SEQ ID NO: 1486526 - RNA, 19 nt, Homo sapiens
  misc_RNA (1)...(19): siRNA sense strand
ucacaucucagguaucuaa

SEQ ID NO: 1486527 - RNA, 19 nt, Homo sapiens
  misc_RNA (1)...(19): siRNA sense strand
gagaaggacgcucaguuaa

SEQ ID NO: 1486528 - RNA, 19 nt, Homo sapiens
  misc_RNA (1)...(19): siRNA sense strand
caguacagcugaauacaga

SEQ ID NO: 1486529 - RNA, 19 nt, Homo sapiens
  misc_RNA (1)...(19): siRNA sense strand
ucacaagaaucacuaaugg

SEQ ID NO: 1486530 - RNA, 19 nt, Homo sapiens
  misc_RNA (1)...(19): siRNA sense strand
ggaaugugaugacuuaaaa

SEQ ID NO: 1486531 - RNA, 19 nt, Homo sapiens
  misc_RNA (1)...(19): siRNA sense strand
gaacagcaaacauaaugga

SEQ ID NO: 1486532 - RNA, 19 nt, Homo sapiens
  misc_RNA (1)...(19): siRNA sense strand
ggucaacagaauccaauua

SEQ ID NO: 1486533 - RNA, 19 nt, Homo sapiens
  misc_RNA (1)...(19): siRNA sense strand
ggaaagcccuguguuugca

SEQ ID NO: 1486534 - RNA, 19 nt, Homo sapiens
  misc_RNA (1)...(19): siRNA sense strand
auagaggacuuguuaaaug

SEQ ID NO: 1486535 - RNA, 19 nt, Homo sapiens
  misc_RNA (1)...(19): siRNA sense strand
caggaugggucuccaaaug

SEQ ID NO: 1486536 - RNA, 19 nt, Homo sapiens
  misc_RNA (1)...(19): siRNA sense strand
ucauggagaucauuuacuu

SEQ ID NO: 1486537 - RNA, 19 nt, Homo sapiens
  misc_RNA (1)...(19): siRNA sense strand
ggcucuaaaucacuuaaua

SEQ ID NO: 1486538 - RNA, 19 nt, Homo sapiens
  misc_RNA (1)...(19): siRNA sense strand
gauuuacaaccuucaguua

SEQ ID NO: 1486539 - RNA, 19 nt, Homo sapiens
  misc_RNA (1)...(19): siRNA sense strand
aaaaguaucucccauauuc

SEQ ID NO: 1486540 - RNA, 19 nt, Homo sapiens
  misc_RNA (1)...(19): siRNA sense strand
ccuaauuucuccugauuug

SEQ ID NO: 1486541 - RNA, 19 nt, Homo sapiens
  misc_RNA (1)...(19): siRNA sense strand
gaaaugguuugccagugau

SEQ ID NO: 1486542 - RNA, 19 nt, Homo sapiens
  misc_RNA (1)...(19): siRNA sense strand
ccacaguucuuaugggaau

SEQ ID NO: 1486543 - RNA, 19 nt, Homo sapiens
  misc_RNA (1)...(19): siRNA sense strand
gagagaagggaaaguuaaa

SEQ ID NO: 1486544 - RNA, 19 nt, Homo sapiens
  misc_RNA (1)...(19): siRNA sense strand
ucucagguaucuaauuuga

SEQ ID NO: 1486545 - RNA, 19 nt, Homo sapiens
  misc_RNA (1)...(19): siRNA sense strand
ugaagucaguagaaauuga

SEQ ID NO: 1486546 - RNA, 19 nt, Homo sapiens
  misc_RNA (1)...(19): siRNA sense strand
ccaacacgcucucaguaau

SEQ ID NO: 1486547 - RNA, 19 nt, Homo sapiens
  misc_RNA (1)...(19): siRNA sense strand
ucagaaauauuugcagaga

SEQ ID NO: 1486548 - RNA, 19 nt, Homo sapiens
  misc_RNA (1)...(19): siRNA sense strand
ggagaaguauaugacgaaa

SEQ ID NO: 1486549 - RNA, 19 nt, Homo sapiens
  misc_RNA (1)...(19): siRNA sense strand
ugaagagucuggucaccuu

SEQ ID NO: 1486550 - RNA, 19 nt, Homo sapiens
  misc_RNA (1)...(19): siRNA sense strand
ggaugggucuccaaaugau

SEQ ID NO: 1486551 - RNA, 19 nt, Homo sapiens
  misc_RNA (1)...(19): siRNA sense strand
uagcugcucuuaugucuuc

SEQ ID NO: 1486552 - RNA, 19 nt, Homo sapiens
  misc_RNA (1)...(19): siRNA sense strand
cuaaagguauaaaccagaa

SEQ ID NO: 1486553 - RNA, 19 nt, Homo sapiens
  misc_RNA (1)...(19): siRNA sense strand
caguagaaauugagaagga

SEQ ID NO: 1486554 - RNA, 19 nt, Homo sapiens
  misc_RNA (1)...(19): siRNA sense strand
gauggaaguuggcuggaau

SEQ ID NO: 1486555 - RNA, 19 nt, Homo sapiens
  misc_RNA (1)...(19): siRNA sense strand
gcacuuuguagaaggcuua

SEQ ID NO: 1486556 - RNA, 19 nt, Homo sapiens
  misc_RNA (1)...(19): siRNA sense strand
uucugaagcuuuccuguua

SEQ ID NO: 1486557 - RNA, 19 nt, Homo sapiens
  misc_RNA (1)...(19): siRNA sense strand
gaaacagccucaguaacuc

SEQ ID NO: 1486558 - RNA, 19 nt, Homo sapiens
  misc_RNA (1)...(19): siRNA sense strand
ccaagugacagauaaagaa

SEQ ID NO: 1486559 - RNA, 19 nt, Homo sapiens
  misc_RNA (1)...(19): siRNA sense strand
ucaagcaaauacacuucua

SEQ ID NO: 1486560 - RNA, 19 nt, Homo sapiens
  misc_RNA (1)...(19): siRNA sense strand
aauaaugccugcguuagaa

SEQ ID NO: 1486561 - RNA, 19 nt, Homo sapiens
  misc_RNA (1)...(19): siRNA sense strand
ucagguaucuaauuugaag

SEQ ID NO: 1486562 - RNA, 19 nt, Homo sapiens
  misc_RNA (1)...(19): siRNA sense strand
gaauaauacugaugcuacu

SEQ ID NO: 1486563 - RNA, 19 nt, Homo sapiens
  misc_RNA (1)...(19): siRNA sense strand
guuaaauucugaagcuuuc

SEQ ID NO: 1486564 - RNA, 19 nt, Homo sapiens
  misc_RNA (1)...(19): siRNA sense strand
gaccaacacgcucucagua

SEQ ID NO: 1486565 - RNA, 19 nt, Homo sapiens
  misc_RNA (1)...(19): siRNA sense strand
agaaugacuugcagcacua

SEQ ID NO: 1486566 - RNA, 19 nt, Homo sapiens
  misc_RNA (1)...(19): siRNA sense strand
ugacauggcuacuacaaaa

SEQ ID NO: 1486567 - RNA, 19 nt, Homo sapiens
  misc_RNA (1)...(19): siRNA sense strand
gaugaagacugauauuuuc

SEQ ID NO: 1486568 - RNA, 19 nt, Homo sapiens
  misc_RNA (1)...(19): siRNA sense strand
cagaagauacuguaaauac

SEQ ID NO: 1486569 - RNA, 19 nt, Homo sapiens
  misc_RNA (1)...(19): siRNA sense strand
guaauucaguaucgagcaa

SEQ ID NO: 1486570 - RNA, 19 nt, Homo sapiens
  misc_RNA (1)...(19): siRNA sense strand
uguaacaauugcaacagua

SEQ ID NO: 1486571 - RNA, 19 nt, Homo sapiens
  misc_RNA (1)...(19): siRNA sense strand
cuagaaacccacauugaaa

SEQ ID NO: 1486572 - RNA, 19 nt, Homo sapiens
  misc_RNA (1)...(19): siRNA sense strand
gagagcaaauguacaucau

SEQ ID NO: 1486573 - RNA, 19 nt, Homo sapiens
  misc_RNA (1)...(19): siRNA sense strand
acaaauaaugccugcguua

SEQ ID NO: 1486574 - RNA, 19 nt, Homo sapiens
  misc_RNA (1)...(19): siRNA sense strand
gagacaggaccauaauuau

SEQ ID NO: 1486575 - RNA, 19 nt, Homo sapiens
  misc_RNA (1)...(19): siRNA sense strand
ggaaggugacuuuagguau

SEQ ID NO: 1486576 - RNA, 19 nt, Homo sapiens
  misc_RNA (1)...(19): siRNA sense strand
ccagaaggccagccacgua

SEQ ID NO: 1486577 - RNA, 19 nt, Homo sapiens
  misc_RNA (1)...(19): siRNA sense strand
agacuuaccgaauuaguuu

SEQ ID NO: 1486578 - RNA, 19 nt, Homo sapiens
  misc_RNA (1)...(19): siRNA sense strand
cuucagagauacauauugu

SEQ ID NO: 1486579 - RNA, 19 nt, Homo sapiens
  misc_RNA (1)...(19): siRNA sense strand
cacaagaaauuugaaguuc

SEQ ID NO: 1486580 - RNA, 19 nt, Homo sapiens
  misc_RNA (1)...(19): siRNA sense strand
gaaaauacaggaauucuca

SEQ ID NO: 1486581 - RNA, 19 nt, Homo sapiens
  misc_RNA (1)...(19): siRNA sense strand
gcggaauuauugucuccua

SEQ ID NO: 1486582 - RNA, 19 nt, Homo sapiens
  misc_RNA (1)...(19): siRNA sense strand
uagucaaacucaugaagaa

SEQ ID NO: 1486583 - RNA, 19 nt, Homo sapiens
  misc_RNA (1)...(19): siRNA sense strand
gcaaagcgguugagggaaa

SEQ ID NO: 1486584 - RNA, 19 nt, Homo sapiens
  misc_RNA (1)...(19): siRNA sense strand
gcaacgagcugaccuucau

SEQ ID NO: 1486585 - RNA, 19 nt, Homo sapiens
  misc_RNA (1)...(19): siRNA sense strand
gccacaaucucaucucuga

SEQ ID NO: 1486586 - RNA, 19 nt, Homo sapiens
  misc_RNA (1)...(19): siRNA sense strand
acaauguggucaucaucua

SEQ ID NO: 1486587 - RNA, 19 nt, Homo sapiens
  misc_RNA (1)...(19): siRNA sense strand
ccagauacccaguggcauu

SEQ ID NO: 1486588 - RNA, 19 nt, Homo sapiens
  misc_RNA (1)...(19): siRNA sense strand
gagggaaagggcugcuaua

SEQ ID NO: 1486589 - RNA, 19 nt, Homo sapiens
  misc_RNA (1)...(19): siRNA sense strand
caaccucagugcccuccaa

SEQ ID NO: 1486590 - RNA, 19 nt, Homo sapiens
  misc_RNA (1)...(19): siRNA sense strand
gccaaagccuccuccucuu

SEQ ID NO: 1486591 - RNA, 19 nt, Homo sapiens
  misc_RNA (1)...(19): siRNA sense strand
ccucagugcccuccaauug

SEQ ID NO: 1486592 - RNA, 19 nt, Homo sapiens
  misc_RNA (1)...(19): siRNA sense strand
ggagcgaccugcacaaccu

SEQ ID NO: 1486593 - RNA, 19 nt, Homo sapiens
  misc_RNA (1)...(19): siRNA sense strand
ggaggacaauguggucauc

SEQ ID NO: 1486594 - RNA, 19 nt, Homo sapiens
  misc_RNA (1)...(19): siRNA sense strand
gaccucagccacaaucuca

SEQ ID NO: 1486595 - RNA, 19 nt, Homo sapiens
  misc_RNA (1)...(19): siRNA sense strand
aaucucaucucugacuuug

SEQ ID NO: 1486596 - RNA, 19 nt, Homo sapiens
  misc_RNA (1)...(19): siRNA sense strand
ccaguggcauuguggagau

SEQ ID NO: 1486597 - RNA, 19 nt, Homo sapiens
  misc_RNA (1)...(19): siRNA sense strand
cacaaccgcuugcacacau

SEQ ID NO: 1486598 - RNA, 19 nt, Homo sapiens
  misc_RNA (1)...(19): siRNA sense strand
ggacaauguggucaucauc

SEQ ID NO: 1486599 - RNA, 19 nt, Homo sapiens
  misc_RNA (1)...(19): siRNA sense strand
gcccuccaauugcucaaga

SEQ ID NO: 1486600 - RNA, 19 nt, Homo sapiens
  misc_RNA (1)...(19): siRNA sense strand
gagcugggcagugcugaga

SEQ ID NO: 1486601 - RNA, 19 nt, Homo sapiens
  misc_RNA (1)...(19): siRNA sense strand
gauacccaguggcauugug

SEQ ID NO: 1486602 - RNA, 19 nt, Homo sapiens
  misc_RNA (1)...(19): siRNA sense strand
gccaaugugacuacacuga

SEQ ID NO: 1486603 - RNA, 19 nt, Homo sapiens
  misc_RNA (1)...(19): siRNA sense strand
ucguguggcucaagacaug

SEQ ID NO: 1486604 - RNA, 19 nt, Homo sapiens
  misc_RNA (1)...(19): siRNA sense strand
ccaaagccuccuccucuuc

SEQ ID NO: 1486605 - RNA, 19 nt, Homo sapiens
  misc_RNA (1)...(19): siRNA sense strand
ggcaucguguggcucaaga

SEQ ID NO: 1486606 - RNA, 19 nt, Homo sapiens
  misc_RNA (1)...(19): siRNA sense strand
gcgcagguuccauggcaaa

SEQ ID NO: 1486607 - RNA, 19 nt, Homo sapiens
  misc_RNA (1)...(19): siRNA sense strand
caaucucaucucugacuuu

SEQ ID NO: 1486608 - RNA, 19 nt, Homo sapiens
  misc_RNA (1)...(19): siRNA sense strand
caaagcgguugagggaaag

SEQ ID NO: 1486609 - RNA, 19 nt, Homo sapiens
  misc_RNA (1)...(19): siRNA sense strand
cagccacaaucucaucucu

SEQ ID NO: 1486610 - RNA, 19 nt, Homo sapiens
  misc_RNA (1)...(19): siRNA sense strand
caaagccuccuccucuucu

SEQ ID NO: 1486611 - RNA, 19 nt, Homo sapiens
  misc_RNA (1)...(19): siRNA sense strand
ucagugcccuccaauugcu

SEQ ID NO: 1486612 - RNA, 19 nt, Homo sapiens
  misc_RNA (1)...(19): siRNA sense strand
gacaauguggucaucaucu

SEQ ID NO: 1486613 - RNA, 19 nt, Homo sapiens
  misc_RNA (1)...(19): siRNA sense strand
caaccgcuugcacacauug

SEQ ID NO: 1486614 - RNA, 19 nt, Homo sapiens
  misc_RNA (1)...(19): siRNA sense strand
ugucccaccugcagaucaa

SEQ ID NO: 1486615 - RNA, 19 nt, Homo sapiens
  misc_RNA (1)...(19): siRNA sense strand
acagcugccuggccaccaa

SEQ ID NO: 1486616 - RNA, 19 nt, Homo sapiens
  misc_RNA (1)...(19): siRNA sense strand
acaaucucaucucugacuu

SEQ ID NO: 1486617 - RNA, 19 nt, Homo sapiens
  misc_RNA (1)...(19): siRNA sense strand
gcugcuauacgguugacaa

SEQ ID NO: 1486618 - RNA, 19 nt, Homo sapiens
  misc_RNA (1)...(19): siRNA sense strand
acaaccgcuugcacacauu

SEQ ID NO: 1486619 - RNA, 19 nt, Homo sapiens
  misc_RNA (1)...(19): siRNA sense strand
gaacaagcgccaugucuuc

SEQ ID NO: 1486620 - RNA, 19 nt, Homo sapiens
  misc_RNA (1)...(19): siRNA sense strand
aaacucagcuggagccaau

SEQ ID NO: 1486621 - RNA, 19 nt, Homo sapiens
  misc_RNA (1)...(19): siRNA sense strand
ggaaggagacgaagucaca

SEQ ID NO: 1486622 - RNA, 19 nt, Homo sapiens
  misc_RNA (1)...(19): siRNA sense strand
gugcuuuccuuaccucuaa

SEQ ID NO: 1486623 - RNA, 19 nt, Homo sapiens
  misc_RNA (1)...(19): siRNA sense strand
gaggugcgcuugucuguac

SEQ ID NO: 1486624 - RNA, 19 nt, Homo sapiens
  misc_RNA (1)...(19): siRNA sense strand
gcugcagaguggaggauua

SEQ ID NO: 1486625 - RNA, 19 nt, Homo sapiens
  misc_RNA (1)...(19): siRNA sense strand
gcuaaagacagcggaaaua

SEQ ID NO: 1486626 - RNA, 19 nt, Homo sapiens
  misc_RNA (1)...(19): siRNA sense strand
gaacccacgaccauuauau

SEQ ID NO: 1486627 - RNA, 19 nt, Homo sapiens
  misc_RNA (1)...(19): siRNA sense strand
gagcagaccggccuucuca

SEQ ID NO: 1486628 - RNA, 19 nt, Homo sapiens
  misc_RNA (1)...(19): siRNA sense strand
gcagcucucugacccugaa

SEQ ID NO: 1486629 - RNA, 19 nt, Homo sapiens
  misc_RNA (1)...(19): siRNA sense strand
gaggaagugcugaauguga

SEQ ID NO: 1486630 - RNA, 19 nt, Homo sapiens
  misc_RNA (1)...(19): siRNA sense strand
ggaacaagcgccaugucuu

SEQ ID NO: 1486631 - RNA, 19 nt, Homo sapiens
  misc_RNA (1)...(19): siRNA sense strand
ggaggugcccguagagaug

SEQ ID NO: 1486632 - RNA, 19 nt, Homo sapiens
  misc_RNA (1)...(19): siRNA sense strand
gaacccagagggcuacaug

SEQ ID NO: 1486633 - RNA, 19 nt, Homo sapiens
  misc_RNA (1)...(19): siRNA sense strand
cgaggaaagucugucauuc

SEQ ID NO: 1486634 - RNA, 19 nt, Homo sapiens
  misc_RNA (1)...(19): siRNA sense strand
uaaagacagcggaaauaga

SEQ ID NO: 1486635 - RNA, 19 nt, Homo sapiens
  misc_RNA (1)...(19): siRNA sense strand
gcgaggaaagucugucauu

SEQ ID NO: 1486636 - RNA, 19 nt, Homo sapiens
  misc_RNA (1)...(19): siRNA sense strand
gcagaccggccuucucaug

SEQ ID NO: 1486637 - RNA, 19 nt, Homo sapiens
  misc_RNA (1)...(19): siRNA sense strand
gaggaaagucugucauucu

SEQ ID NO: 1486638 - RNA, 19 nt, Homo sapiens
  misc_RNA (1)...(19): siRNA sense strand
ggaacccacgaccauuaua

SEQ ID NO: 1486639 - RNA, 19 nt, Homo sapiens
  misc_RNA (1)...(19): siRNA sense strand
ucucugacccugaaaguga

SEQ ID NO: 1486640 - RNA, 19 nt, Homo sapiens
  misc_RNA (1)...(19): siRNA sense strand
caauggcaccuacguaugu

SEQ ID NO: 1486641 - RNA, 19 nt, Homo sapiens
  misc_RNA (1)...(19): siRNA sense strand
cgggaacccacgaccauua

SEQ ID NO: 1486642 - RNA, 19 nt, Homo sapiens
  misc_RNA (1)...(19): siRNA sense strand
aggaggaagugcugaaugu

SEQ ID NO: 1486643 - RNA, 19 nt, Homo sapiens
  misc_RNA (1)...(19): siRNA sense strand
aggaagugcugaaugugaa

SEQ ID NO: 1486644 - RNA, 19 nt, Homo sapiens
  misc_RNA (1)...(19): siRNA sense strand
aaagacagcggaaauagag

SEQ ID NO: 1486645 - RNA, 19 nt, Homo sapiens
  misc_RNA (1)...(19): siRNA sense strand
gagacgaagucacacucau

SEQ ID NO: 1486646 - RNA, 19 nt, Homo sapiens
  misc_RNA (1)...(19): siRNA sense strand
aggaaagucugucauucug

SEQ ID NO: 1486647 - RNA, 19 nt, Homo sapiens
  misc_RNA (1)...(19): siRNA sense strand
cgucguugcugucuucuac

SEQ ID NO: 1486648 - RNA, 19 nt, Homo sapiens
  misc_RNA (1)...(19): siRNA sense strand
ccucgucguugcugucuuc

SEQ ID NO: 1486649 - RNA, 19 nt, Homo sapiens
  misc_RNA (1)...(19): siRNA sense strand
gcagaguggaggauuacga

SEQ ID NO: 1486650 - RNA, 19 nt, Homo sapiens
  misc_RNA (1)...(19): siRNA sense strand
auuauaugcuggaaugguu

SEQ ID NO: 1486651 - RNA, 19 nt, Homo sapiens
  misc_RNA (1)...(19): siRNA sense strand
gggaacccacgaccauuau

SEQ ID NO: 1486652 - RNA, 19 nt, Homo sapiens
  misc_RNA (1)...(19): siRNA sense strand
gagggaaggagacgaaguc

SEQ ID NO: 1486653 - RNA, 19 nt, Homo sapiens
  misc_RNA (1)...(19): siRNA sense strand
ucaguucuaucaccuucga

SEQ ID NO: 1486654 - RNA, 19 nt, Homo sapiens
  misc_RNA (1)...(19): siRNA sense strand
gagcuaaagacagcggaaa

SEQ ID NO: 1486655 - RNA, 19 nt, Homo sapiens
  misc_RNA (1)...(19): siRNA sense strand
ggagacgaagucacacuca

SEQ ID NO: 1486656 - RNA, 19 nt, Homo sapiens
  misc_RNA (1)...(19): siRNA sense strand
caaagccagaggccacuga

SEQ ID NO: 1486657 - RNA, 19 nt, Homo sapiens
  misc_RNA (1)...(19): siRNA sense strand
ggaggugcgcuugucugua

SEQ ID NO: 1486658 - RNA, 19 nt, Homo sapiens
  misc_RNA (1)...(19): siRNA sense strand
cuaaagacagcggaaauag

SEQ ID NO: 1486659 - RNA, 19 nt, Homo sapiens
  misc_RNA (1)...(19): siRNA sense strand
ccaauggcaccuacguaug

SEQ ID NO: 1486660 - RNA, 19 nt, Homo sapiens
  misc_RNA (1)...(19): siRNA sense strand
ggcucaacguguuugcaaa

SEQ ID NO: 1486661 - RNA, 19 nt, Homo sapiens
  misc_RNA (1)...(19): siRNA sense strand
gaggugcccguagagauga

SEQ ID NO: 1486662 - RNA, 19 nt, Homo sapiens
  misc_RNA (1)...(19): siRNA sense strand
ggaagugcugaaugugaau

SEQ ID NO: 1486663 - RNA, 19 nt, Homo sapiens
  misc_RNA (1)...(19): siRNA sense strand
gggaacaagcgccaugucu

SEQ ID NO: 1486664 - RNA, 19 nt, Homo sapiens
  misc_RNA (1)...(19): siRNA sense strand
gcucaacguguuugcaaag

SEQ ID NO: 1486665 - RNA, 19 nt, Homo sapiens
  misc_RNA (1)...(19): siRNA sense strand
gcaggaggaagugcugaau

SEQ ID NO: 1486666 - RNA, 19 nt, Homo sapiens
  misc_RNA (1)...(19): siRNA sense strand
gaggugaugcgaggaaagu

SEQ ID NO: 1486667 - RNA, 19 nt, Homo sapiens
  misc_RNA (1)...(19): siRNA sense strand
ggaggaagugcugaaugug

SEQ ID NO: 1486668 - RNA, 19 nt, Homo sapiens
  misc_RNA (1)...(19): siRNA sense strand
gacgaagucacacucaucu

SEQ ID NO: 1486669 - RNA, 19 nt, Homo sapiens
  misc_RNA (1)...(19): siRNA sense strand
cccaugcugucgcucaguu

SEQ ID NO: 1486670 - RNA, 19 nt, Homo sapiens
  misc_RNA (1)...(19): siRNA sense strand
ccaccucacccugcacuau

SEQ ID NO: 1486671 - RNA, 19 nt, Homo sapiens
  misc_RNA (1)...(19): siRNA sense strand
ggacucugcccaggagauc

SEQ ID NO: 1486672 - RNA, 19 nt, Homo sapiens
  misc_RNA (1)...(19): siRNA sense strand
ggagggaaggagacgaagu

SEQ ID NO: 1486673 - RNA, 19 nt, Homo sapiens
  misc_RNA (1)...(19): siRNA sense strand
gagaucgccaccugcaaca

SEQ ID NO: 1486674 - RNA, 19 nt, Homo sapiens
  misc_RNA (1)...(19): siRNA sense strand
gaagauaaaucagauguug

SEQ ID NO: 1486675 - RNA, 19 nt, Homo sapiens
  misc_RNA (1)...(19): siRNA sense strand
gcaccaaacuguugccuuu

SEQ ID NO: 1486676 - RNA, 19 nt, Homo sapiens
  misc_RNA (1)...(19): siRNA sense strand
caacgcugcuacaguauua

SEQ ID NO: 1486677 - RNA, 19 nt, Homo sapiens
  misc_RNA (1)...(19): siRNA sense strand
ggaguuagaugucaugaau

SEQ ID NO: 1486678 - RNA, 19 nt, Homo sapiens
  misc_RNA (1)...(19): siRNA sense strand
ugcaauaccuccuaucuua

SEQ ID NO: 1486679 - RNA, 19 nt, Homo sapiens
  misc_RNA (1)...(19): siRNA sense strand
gaaauacuguucucagcaa

SEQ ID NO: 1486680 - RNA, 19 nt, Homo sapiens
  misc_RNA (1)...(19): siRNA sense strand
gaaggaagcucugacaaag

SEQ ID NO: 1486681 - RNA, 19 nt, Homo sapiens
  misc_RNA (1)...(19): siRNA sense strand
ggaaugcauuuacaacuug

SEQ ID NO: 1486682 - RNA, 19 nt, Homo sapiens
  misc_RNA (1)...(19): siRNA sense strand
gcagaaaacucuacaauuc

SEQ ID NO: 1486683 - RNA, 19 nt, Homo sapiens
  misc_RNA (1)...(19): siRNA sense strand
ccaguaaagugcaaauauu

SEQ ID NO: 1486684 - RNA, 19 nt, Homo sapiens
  misc_RNA (1)...(19): siRNA sense strand
gaaguuaacguaucaggaa

SEQ ID NO: 1486685 - RNA, 19 nt, Homo sapiens
  misc_RNA (1)...(19): siRNA sense strand
gauaaggagucucgaacaa

SEQ ID NO: 1486686 - RNA, 19 nt, Homo sapiens
  misc_RNA (1)...(19): siRNA sense strand
gaacaaugcuaagagacaa

SEQ ID NO: 1486687 - RNA, 19 nt, Homo sapiens
  misc_RNA (1)...(19): siRNA sense strand
uaauaaaccuccugucuag

SEQ ID NO: 1486688 - RNA, 19 nt, Homo sapiens
  misc_RNA (1)...(19): siRNA sense strand
ggauguguuugacccauua

SEQ ID NO: 1486689 - RNA, 19 nt, Homo sapiens
  misc_RNA (1)...(19): siRNA sense strand
ggauuggaccaucuuauua

SEQ ID NO: 1486690 - RNA, 19 nt, Homo sapiens
  misc_RNA (1)...(19): siRNA sense strand
gagcuaaacuucaagaacu

SEQ ID NO: 1486691 - RNA, 19 nt, Homo sapiens
  misc_RNA (1)...(19): siRNA sense strand
ccuacgggcuguacucuua

SEQ ID NO: 1486692 - RNA, 19 nt, Homo sapiens
  misc_RNA (1)...(19): siRNA sense strand
ggacugaguuaagaaauuc

SEQ ID NO: 1486693 - RNA, 19 nt, Homo sapiens
  misc_RNA (1)...(19): siRNA sense strand
gaagaaaugcuacuaugau

SEQ ID NO: 1486694 - RNA, 19 nt, Homo sapiens
  misc_RNA (1)...(19): siRNA sense strand
gacaaaguauuucuucuuc

SEQ ID NO: 1486695 - RNA, 19 nt, Homo sapiens
  misc_RNA (1)...(19): siRNA sense strand
aagagaaacuaccugauuu

SEQ ID NO: 1486696 - RNA, 19 nt, Homo sapiens
  misc_RNA (1)...(19): siRNA sense strand
gcugacggccaaugaauua

SEQ ID NO: 1486697 - RNA, 19 nt, Homo sapiens
  misc_RNA (1)...(19): siRNA sense strand
uaaagcaugugaagccauu

SEQ ID NO: 1486698 - RNA, 19 nt, Homo sapiens
  misc_RNA (1)...(19): siRNA sense strand
ugaagaaguuaacguauca

SEQ ID NO: 1486699 - RNA, 19 nt, Homo sapiens
  misc_RNA (1)...(19): siRNA sense strand
uaaggagucucgaacaaug

SEQ ID NO: 1486700 - RNA, 19 nt, Homo sapiens
  misc_RNA (1)...(19): siRNA sense strand
aaacaugucugcagaguac

SEQ ID NO: 1486701 - RNA, 19 nt, Homo sapiens
  misc_RNA (1)...(19): siRNA sense strand
ggacaaaguauuucuucuu

SEQ ID NO: 1486702 - RNA, 19 nt, Homo sapiens
  misc_RNA (1)...(19): siRNA sense strand
aagaagaacucuauggaau

SEQ ID NO: 1486703 - RNA, 19 nt, Homo sapiens
  misc_RNA (1)...(19): siRNA sense strand
uugaggaucuggcaaagua

SEQ ID NO: 1486704 - RNA, 19 nt, Homo sapiens
  misc_RNA (1)...(19): siRNA sense strand
gaaagaggaggaagagguu

SEQ ID NO: 1486705 - RNA, 19 nt, Homo sapiens
  misc_RNA (1)...(19): siRNA sense strand
ggaauccuggcuucuaaua

SEQ ID NO: 1486706 - RNA, 19 nt, Homo sapiens
  misc_RNA (1)...(19): siRNA sense strand
ccagcucgcuccagaagaa

SEQ ID NO: 1486707 - RNA, 19 nt, Homo sapiens
  misc_RNA (1)...(19): siRNA sense strand
ggauuuggaucucccauag

SEQ ID NO: 1486708 - RNA, 19 nt, Homo sapiens
  misc_RNA (1)...(19): siRNA sense strand
gaagaacucuauggaaugc

SEQ ID NO: 1486709 - RNA, 19 nt, Homo sapiens
  misc_RNA (1)...(19): siRNA sense strand
caugugaagccauuuauaa

SEQ ID NO: 1486710 - RNA, 19 nt, Homo sapiens
  misc_RNA (1)...(19): siRNA sense strand
ggaagagguuaugguggua

SEQ ID NO: 1486711 - RNA, 19 nt, Homo sapiens
  misc_RNA (1)...(19): siRNA sense strand
gauuggaccaucuuauuaa

SEQ ID NO: 1486712 - RNA, 19 nt, Homo sapiens
  misc_RNA (1)...(19): siRNA sense strand
uggcaaaccuaaccacuug

SEQ ID NO: 1486713 - RNA, 19 nt, Homo sapiens
  misc_RNA (1)...(19): siRNA sense strand
aaagagaaacuaccugauu

SEQ ID NO: 1486714 - RNA, 19 nt, Homo sapiens
  misc_RNA (1)...(19): siRNA sense strand
ugccaacgcugcuacagua

SEQ ID NO: 1486715 - RNA, 19 nt, Homo sapiens
  misc_RNA (1)...(19): siRNA sense strand
uaaaccuccugucuaguaa

SEQ ID NO: 1486716 - RNA, 19 nt, Homo sapiens
  misc_RNA (1)...(19): siRNA sense strand
ugaaggagcucugcuuaca

SEQ ID NO: 1486717 - RNA, 19 nt, Homo sapiens
  misc_RNA (1)...(19): siRNA sense strand
gcaaacaugucugcagagu

SEQ ID NO: 1486718 - RNA, 19 nt, Homo sapiens
  misc_RNA (1)...(19): siRNA sense strand
cagguggacugaugaaguu

SEQ ID NO: 1486719 - RNA, 19 nt, Homo sapiens
  misc_RNA (1)...(19): siRNA sense strand
gcugggaacuucacauaag

SEQ ID NO: 1486720 - RNA, 19 nt, Homo sapiens
  misc_RNA (1)...(19): siRNA sense strand
ggcaaaguauguagcagaa

SEQ ID NO: 1486721 - RNA, 19 nt, Homo sapiens
  misc_RNA (1)...(19): siRNA sense strand
gcuaagagacaaucaagga

SEQ ID NO: 1486722 - RNA, 19 nt, Homo sapiens
  misc_RNA (1)...(19): siRNA sense strand
aaacaacccuccuugaacu

SEQ ID NO: 1486723 - RNA, 19 nt, Homo sapiens
  misc_RNA (1)...(19): siRNA sense strand
ucaaggcucuggcugauag

SEQ ID NO: 1486724 - RNA, 19 nt, Homo sapiens
  misc_RNA (1)...(19): siRNA sense strand
aggaagcucugacaaagaa

SEQ ID NO: 1486725 - RNA, 19 nt, Homo sapiens
  misc_RNA (1)...(19): siRNA sense strand
gcuguacucuuaaucaaca

SEQ ID NO: 1486726 - RNA, 19 nt, Homo sapiens
  misc_RNA (1)...(19): siRNA sense strand
ucagugaggcagcuuauaa

SEQ ID NO: 1486727 - RNA, 19 nt, Homo sapiens
  misc_RNA (1)...(19): siRNA sense strand
gauagccaauugccuugaa

SEQ ID NO: 1486728 - RNA, 19 nt, Homo sapiens
  misc_RNA (1)...(19): siRNA sense strand
ccuagaaacuaaggaauug

SEQ ID NO: 1486729 - RNA, 19 nt, Homo sapiens
  misc_RNA (1)...(19): siRNA sense strand
gucagaauauccagugauu

SEQ ID NO: 1486730 - RNA, 19 nt, Homo sapiens
  misc_RNA (1)...(19): siRNA sense strand
aagaagaaaugcuacuaug

SEQ ID NO: 1486731 - RNA, 19 nt, Homo sapiens
  misc_RNA (1)...(19): siRNA sense strand
ccaauugccuugaagacau

SEQ ID NO: 1486732 - RNA, 19 nt, Homo sapiens
  misc_RNA (1)...(19): siRNA sense strand
uaaaugcaauaccuccuau

SEQ ID NO: 1486733 - RNA, 19 nt, Homo sapiens
  misc_RNA (1)...(19): siRNA sense strand
gaaguagagccuccuccua

SEQ ID NO: 1486734 - RNA, 19 nt, Homo sapiens
  misc_RNA (1)...(19): siRNA sense strand
cagcaacugugguguuaau

SEQ ID NO: 1486735 - RNA, 19 nt, Homo sapiens
  misc_RNA (1)...(19): siRNA sense strand
gaagucaugcugcagaaug

SEQ ID NO: 1486736 - RNA, 19 nt, Homo sapiens
  misc_RNA (1)...(19): siRNA sense strand
uguaugaggugaccaaauc

SEQ ID NO: 1486737 - RNA, 19 nt, Homo sapiens
  misc_RNA (1)...(19): siRNA sense strand
uaaagaagaacucuaugga

SEQ ID NO: 1486738 - RNA, 19 nt, Homo sapiens
  misc_RNA (1)...(19): siRNA sense strand
guacgugauugaccucaug

SEQ ID NO: 1486739 - RNA, 19 nt, Homo sapiens
  misc_RNA (1)...(19): siRNA sense strand
gguuauggacaaaguauuu

SEQ ID NO: 1486740 - RNA, 19 nt, Homo sapiens
  misc_RNA (1)...(19): siRNA sense strand
gaaacuaaggaauugaaug

SEQ ID NO: 1486741 - RNA, 19 nt, Homo sapiens
  misc_RNA (1)...(19): siRNA sense strand
uugaagacauggauacuau

SEQ ID NO: 1486742 - RNA, 19 nt, Homo sapiens
  misc_RNA (1)...(19): siRNA sense strand
caaaguauguagcagaaaa

SEQ ID NO: 1486743 - RNA, 19 nt, Homo sapiens
  misc_RNA (1)...(19): siRNA sense strand
ccaaaucaauacugccaau

SEQ ID NO: 1486744 - RNA, 19 nt, Homo sapiens
  misc_RNA (1)...(19): siRNA sense strand
ugaaggaagcucugacaaa

SEQ ID NO: 1486745 - RNA, 19 nt, Homo sapiens
  misc_RNA (1)...(19): siRNA sense strand
gauaaaucccggcaccaaa

SEQ ID NO: 1486746 - RNA, 19 nt, Homo sapiens
  misc_RNA (1)...(19): siRNA sense strand
gcuacaguauuaacaaaca

SEQ ID NO: 1486747 - RNA, 19 nt, Homo sapiens
  misc_RNA (1)...(19): siRNA sense strand
acgauggauucuaugauua

SEQ ID NO: 1486748 - RNA, 19 nt, Homo sapiens
  misc_RNA (1)...(19): siRNA sense strand
gucgagaggcugaucuuua

SEQ ID NO: 1486749 - RNA, 19 nt, Homo sapiens
  misc_RNA (1)...(19): siRNA sense strand
gauuucagcugggaacuuc

SEQ ID NO: 1486750 - RNA, 19 nt, Homo sapiens
  misc_RNA (1)...(19): siRNA sense strand
gggcuguacucuuaaucaa

SEQ ID NO: 1486751 - RNA, 19 nt, Homo sapiens
  misc_RNA (1)...(19): siRNA sense strand
gcaugugaagccauuuaua

SEQ ID NO: 1486752 - RNA, 19 nt, Homo sapiens
  misc_RNA (1)...(19): siRNA sense strand
aauccuggcuucuaauaau

SEQ ID NO: 1486753 - RNA, 19 nt, Homo sapiens
  misc_RNA (1)...(19): siRNA sense strand
ggacugaugaaguugagaa

SEQ ID NO: 1486754 - RNA, 19 nt, Homo sapiens
  misc_RNA (1)...(19): siRNA sense strand
aacgauggauucuaugauu

SEQ ID NO: 1486755 - RNA, 19 nt, Homo sapiens
  misc_RNA (1)...(19): siRNA sense strand
caucaugcaugccaucauc

SEQ ID NO: 1486756 - RNA, 19 nt, Homo sapiens
  misc_RNA (1)...(19): siRNA sense strand
uggaaugcauuuacaacuu

SEQ ID NO: 1486757 - RNA, 19 nt, Homo sapiens
  misc_RNA (1)...(19): siRNA sense strand
guaagaagaaaugcuacua

SEQ ID NO: 1486758 - RNA, 19 nt, Homo sapiens
  misc_RNA (1)...(19): siRNA sense strand
ugaggugaccaaaucaaua

SEQ ID NO: 1486759 - RNA, 19 nt, Homo sapiens
  misc_RNA (1)...(19): siRNA sense strand
auaacaaucuuucccugaa

SEQ ID NO: 1486760 - RNA, 19 nt, Homo sapiens
  misc_RNA (1)...(19): siRNA sense strand
cggacugaguuaagaaauu

SEQ ID NO: 1486761 - RNA, 19 nt, Homo sapiens
  misc_RNA (1)...(19): siRNA sense strand
uuaauaaaccuccugucua

SEQ ID NO: 1486762 - RNA, 19 nt, Homo sapiens
  misc_RNA (1)...(19): siRNA sense strand
acaacuuggugcaggauuu

SEQ ID NO: 1486763 - RNA, 19 nt, Homo sapiens
  misc_RNA (1)...(19): siRNA sense strand
aagaaguaguuauccauga

SEQ ID NO: 1486764 - RNA, 19 nt, Homo sapiens
  misc_RNA (1)...(19): siRNA sense strand
gaauccuggcuucuaauaa

SEQ ID NO: 1486765 - RNA, 19 nt, Homo sapiens
  misc_RNA (1)...(19): siRNA sense strand
auaaaccuccugucuagua

SEQ ID NO: 1486766 - RNA, 19 nt, Homo sapiens
  misc_RNA (1)...(19): siRNA sense strand
gguguuauugcaaaugaua

SEQ ID NO: 1486767 - RNA, 19 nt, Homo sapiens
  misc_RNA (1)...(19): siRNA sense strand
guacaccaguaaagugcaa

SEQ ID NO: 1486768 - RNA, 19 nt, Homo sapiens
  misc_RNA (1)...(19): siRNA sense strand
cugcuacgcuccaagaaug

SEQ ID NO: 1486769 - RNA, 19 nt, Homo sapiens
  misc_RNA (1)...(19): siRNA sense strand
cagcugggaacuucacaua

SEQ ID NO: 1486770 - RNA, 19 nt, Homo sapiens
  misc_RNA (1)...(19): siRNA sense strand
ggcuauuugucaucaagua

SEQ ID NO: 1486771 - RNA, 19 nt, Homo sapiens
  misc_RNA (1)...(19): siRNA sense strand
ugaggaagcacgccaguug

SEQ ID NO: 1486772 - RNA, 19 nt, Homo sapiens
  misc_RNA (1)...(19): siRNA sense strand
guaaagaagaacucuaugg

SEQ ID NO: 1486773 - RNA, 19 nt, Homo sapiens
  misc_RNA (1)...(19): siRNA sense strand
gaaggagcucugcuuacaa

SEQ ID NO: 1486774 - RNA, 19 nt, Homo sapiens
  misc_RNA (1)...(19): siRNA sense strand
gaaggaaaguggagucaua

SEQ ID NO: 1486775 - RNA, 19 nt, Homo sapiens
  misc_RNA (1)...(19): siRNA sense strand
gaagaaugguacaaaguua

SEQ ID NO: 1486776 - RNA, 19 nt, Homo sapiens
  misc_RNA (1)...(19): siRNA sense strand
caaagaagcuucacauuag

SEQ ID NO: 1486777 - RNA, 19 nt, Homo sapiens
  misc_RNA (1)...(19): siRNA sense strand
gcaagaagcugugcaaugu

SEQ ID NO: 1486778 - RNA, 19 nt, Homo sapiens
  misc_RNA (1)...(19): siRNA sense strand
ggaagaggaugacaaauca

SEQ ID NO: 1486779 - RNA, 19 nt, Homo sapiens
  misc_RNA (1)...(19): siRNA sense strand
gaagaaacagugaauguaa

SEQ ID NO: 1486780 - RNA, 19 nt, Homo sapiens
  misc_RNA (1)...(19): siRNA sense strand
ucaaagaagcuucacauua

SEQ ID NO: 1486781 - RNA, 19 nt, Homo sapiens
  misc_RNA (1)...(19): siRNA sense strand
caacaaaucacauaccuuu

SEQ ID NO: 1486782 - RNA, 19 nt, Homo sapiens
  misc_RNA (1)...(19): siRNA sense strand
uaaagcaacuggagaagaa

SEQ ID NO: 1486783 - RNA, 19 nt, Homo sapiens
  misc_RNA (1)...(19): siRNA sense strand
gagaagaaauuacagaaag

SEQ ID NO: 1486784 - RNA, 19 nt, Homo sapiens
  misc_RNA (1)...(19): siRNA sense strand
cuaacaggcucuuaugaua

SEQ ID NO: 1486785 - RNA, 19 nt, Homo sapiens
  misc_RNA (1)...(19): siRNA sense strand
ugaaugcuguguagaauuu

SEQ ID NO: 1486786 - RNA, 19 nt, Homo sapiens
  misc_RNA (1)...(19): siRNA sense strand
guagaagucucaugcuuga

SEQ ID NO: 1486787 - RNA, 19 nt, Homo sapiens
  misc_RNA (1)...(19): siRNA sense strand
ggacauacugggcauauuu

SEQ ID NO: 1486788 - RNA, 19 nt, Homo sapiens
  misc_RNA (1)...(19): siRNA sense strand
gaaaguggagucauaaaug

SEQ ID NO: 1486789 - RNA, 19 nt, Homo sapiens
  misc_RNA (1)...(19): siRNA sense strand
cuuaauagguccauucaaa

SEQ ID NO: 1486790 - RNA, 19 nt, Homo sapiens
  misc_RNA (1)...(19): siRNA sense strand
ccaaaucucuucagaacau

SEQ ID NO: 1486791 - RNA, 19 nt, Homo sapiens
  misc_RNA (1)...(19): siRNA sense strand
ugaagaggcuugugucaug

SEQ ID NO: 1486792 - RNA, 19 nt, Homo sapiens
  misc_RNA (1)...(19): siRNA sense strand
gcacaaggacaaagugauu

SEQ ID NO: 1486793 - RNA, 19 nt, Homo sapiens
  misc_RNA (1)...(19): siRNA sense strand
gaucagcagcagaaucuua

SEQ ID NO: 1486794 - RNA, 19 nt, Homo sapiens
  misc_RNA (1)...(19): siRNA sense strand
agauaagacuguuggauuu

SEQ ID NO: 1486795 - RNA, 19 nt, Homo sapiens
  misc_RNA (1)...(19): siRNA sense strand
ggaagaaugguacaaaguu

SEQ ID NO: 1486796 - RNA, 19 nt, Homo sapiens
  misc_RNA (1)...(19): siRNA sense strand
caacagaacaauuucaaga

SEQ ID NO: 1486797 - RNA, 19 nt, Homo sapiens
  misc_RNA (1)...(19): siRNA sense strand
gcaacaggaucaaaugaca

SEQ ID NO: 1486798 - RNA, 19 nt, Homo sapiens
  misc_RNA (1)...(19): siRNA sense strand
gcagauauaccaacagaug

SEQ ID NO: 1486799 - RNA, 19 nt, Homo sapiens
  misc_RNA (1)...(19): siRNA sense strand
ggacagggccuccaugcuu

SEQ ID NO: 1486800 - RNA, 19 nt, Homo sapiens
  misc_RNA (1)...(19): siRNA sense strand
gcacucaaccagcaaugua

SEQ ID NO: 1486801 - RNA, 19 nt, Homo sapiens
  misc_RNA (1)...(19): siRNA sense strand
gacagggccuccaugcuuu

SEQ ID NO: 1486802 - RNA, 19 nt, Homo sapiens
  misc_RNA (1)...(19): siRNA sense strand
ggaauaaacaucauaaagg

SEQ ID NO: 1486803 - RNA, 19 nt, Homo sapiens
  misc_RNA (1)...(19): siRNA sense strand
gaagacacacaagcuguua

SEQ ID NO: 1486804 - RNA, 19 nt, Homo sapiens
  misc_RNA (1)...(19): siRNA sense strand
ggcaauggaucuaaugguu

SEQ ID NO: 1486805 - RNA, 19 nt, Homo sapiens
  misc_RNA (1)...(19): siRNA sense strand
agucauaaauggccuguuu

SEQ ID NO: 1486806 - RNA, 19 nt, Homo sapiens
  misc_RNA (1)...(19): siRNA sense strand
ggagcucacuacuugcuaa

SEQ ID NO: 1486807 - RNA, 19 nt, Homo sapiens
  misc_RNA (1)...(19): siRNA sense strand
guucuucugugacuaguuu

SEQ ID NO: 1486808 - RNA, 19 nt, Homo sapiens
  misc_RNA (1)...(19): siRNA sense strand
aagaagcugugcaauguuu

SEQ ID NO: 1486809 - RNA, 19 nt, Homo sapiens
  misc_RNA (1)...(19): siRNA sense strand
uaagagaauuucagaccuu

SEQ ID NO: 1486810 - RNA, 19 nt, Homo sapiens
  misc_RNA (1)...(19): siRNA sense strand
gaccaaucaugccgaguuu

SEQ ID NO: 1486811 - RNA, 19 nt, Homo sapiens
  misc_RNA (1)...(19): siRNA sense strand
gaauucaucccugcugaua

SEQ ID NO: 1486812 - RNA, 19 nt, Homo sapiens
  misc_RNA (1)...(19): siRNA sense strand
caucauaaaggauccauuu

SEQ ID NO: 1486813 - RNA, 19 nt, Homo sapiens
  misc_RNA (1)...(19): siRNA sense strand
caaaggcaauggaucuaau

SEQ ID NO: 1486814 - RNA, 19 nt, Homo sapiens
  misc_RNA (1)...(19): siRNA sense strand
aaacaaaacuucuccaaug

SEQ ID NO: 1486815 - RNA, 19 nt, Homo sapiens
  misc_RNA (1)...(19): siRNA sense strand
gguaaugguugugaugauu

SEQ ID NO: 1486816 - RNA, 19 nt, Homo sapiens
  misc_RNA (1)...(19): siRNA sense strand
ggagaagaaauuacagaaa

SEQ ID NO: 1486817 - RNA, 19 nt, Homo sapiens
  misc_RNA (1)...(19): siRNA sense strand
agucagagauuaacacaug

SEQ ID NO: 1486818 - RNA, 19 nt, Homo sapiens
  misc_RNA (1)...(19): siRNA sense strand
ucaaagugcugcccuucaa

SEQ ID NO: 1486819 - RNA, 19 nt, Homo sapiens
  misc_RNA (1)...(19): siRNA sense strand
ucaaaagcuuggugaauua

SEQ ID NO: 1486820 - RNA, 19 nt, Homo sapiens
  misc_RNA (1)...(19): siRNA sense strand
gaucuggaauuuaguaugc

SEQ ID NO: 1486821 - RNA, 19 nt, Homo sapiens
  misc_RNA (1)...(19): siRNA sense strand
ggaaaguggagucauaaau

SEQ ID NO: 1486822 - RNA, 19 nt, Homo sapiens
  misc_RNA (1)...(19): siRNA sense strand
gauucuagcugcauguugu

SEQ ID NO: 1486823 - RNA, 19 nt, Homo sapiens
  misc_RNA (1)...(19): siRNA sense strand
gaaagcggaggagcuauuu

SEQ ID NO: 1486824 - RNA, 19 nt, Homo sapiens
  misc_RNA (1)...(19): siRNA sense strand
ucagaacauucggucauua

SEQ ID NO: 1486825 - RNA, 19 nt, Homo sapiens
  misc_RNA (1)...(19): siRNA sense strand
caacagcauuuagaacaga

SEQ ID NO: 1486826 - RNA, 19 nt, Homo sapiens
  misc_RNA (1)...(19): siRNA sense strand
gaagugauacaccuguuga

SEQ ID NO: 1486827 - RNA, 19 nt, Homo sapiens
  misc_RNA (1)...(19): siRNA sense strand
caucuucugucuucucuug

SEQ ID NO: 1486828 - RNA, 19 nt, Homo sapiens
  misc_RNA (1)...(19): siRNA sense strand
ugucauggcuucagaaucu

SEQ ID NO: 1486829 - RNA, 19 nt, Homo sapiens
  misc_RNA (1)...(19): siRNA sense strand
uacaugcucuagaagaaua

SEQ ID NO: 1486830 - RNA, 19 nt, Homo sapiens
  misc_RNA (1)...(19): siRNA sense strand
ucaaugggaugaaguucuu

SEQ ID NO: 1486831 - RNA, 19 nt, Homo sapiens
  misc_RNA (1)...(19): siRNA sense strand
ugaggcagcuaauacuuga

SEQ ID NO: 1486832 - RNA, 19 nt, Homo sapiens
  misc_RNA (1)...(19): siRNA sense strand
uggaguggcuggaugauug

SEQ ID NO: 1486833 - RNA, 19 nt, Homo sapiens
  misc_RNA (1)...(19): siRNA sense strand
cagaaugucacaguauuua

SEQ ID NO: 1486834 - RNA, 19 nt, Homo sapiens
  misc_RNA (1)...(19): siRNA sense strand
gcaacuggagaagaaauua

SEQ ID NO: 1486835 - RNA, 19 nt, Homo sapiens
  misc_RNA (1)...(19): siRNA sense strand
gcaaauggagcacagaauc

SEQ ID NO: 1486836 - RNA, 19 nt, Homo sapiens
  misc_RNA (1)...(19): siRNA sense strand
gaggaagaaugguacaaag

SEQ ID NO: 1486837 - RNA, 19 nt, Homo sapiens
  misc_RNA (1)...(19): siRNA sense strand
gcagugcaguggcaucugu

SEQ ID NO: 1486838 - RNA, 19 nt, Homo sapiens
  misc_RNA (1)...(19): siRNA sense strand
gcaaaggcaauggaucuaa

SEQ ID NO: 1486839 - RNA, 19 nt, Homo sapiens
  misc_RNA (1)...(19): siRNA sense strand
ccaaucaugccgaguuuaa

SEQ ID NO: 1486840 - RNA, 19 nt, Homo sapiens
  misc_RNA (1)...(19): siRNA sense strand
uaacacaugaugcuucaaa

SEQ ID NO: 1486841 - RNA, 19 nt, Homo sapiens
  misc_RNA (1)...(19): siRNA sense strand
ucuaaugguucuucuguga

SEQ ID NO: 1486842 - RNA, 19 nt, Homo sapiens
  misc_RNA (1)...(19): siRNA sense strand
guacaaaaccucaguagaa

SEQ ID NO: 1486843 - RNA, 19 nt, Homo sapiens
  misc_RNA (1)...(19): siRNA sense strand
gaucugaguuuacugucau

SEQ ID NO: 1486844 - RNA, 19 nt, Homo sapiens
  misc_RNA (1)...(19): siRNA sense strand
ugauuuggaucugaguuua

SEQ ID NO: 1486845 - RNA, 19 nt, Homo sapiens
  misc_RNA (1)...(19): siRNA sense strand
gaucuucgaguaccaaguu

SEQ ID NO: 1486846 - RNA, 19 nt, Homo sapiens
  misc_RNA (1)...(19): siRNA sense strand
gaauuuaguaugcaugaug

SEQ ID NO: 1486847 - RNA, 19 nt, Homo sapiens
  misc_RNA (1)...(19): siRNA sense strand
caugaugcuucaaauauuc

SEQ ID NO: 1486848 - RNA, 19 nt, Homo sapiens
  misc_RNA (1)...(19): siRNA sense strand
gaauggauggccuugguaa

SEQ ID NO: 1486849 - RNA, 19 nt, Homo sapiens
  misc_RNA (1)...(19): siRNA sense strand
ucacaguauuuacgaagaa

SEQ ID NO: 1486850 - RNA, 19 nt, Homo sapiens
  misc_RNA (1)...(19): siRNA sense strand
gcaaagauuacgcuaucaa

SEQ ID NO: 1486851 - RNA, 19 nt, Homo sapiens
  misc_RNA (1)...(19): siRNA sense strand
gggaagaggaugacaaauc

SEQ ID NO: 1486852 - RNA, 19 nt, Homo sapiens
  misc_RNA (1)...(19): siRNA sense strand
gaauuuaccaugcaagaag

SEQ ID NO: 1486853 - RNA, 19 nt, Homo sapiens
  misc_RNA (1)...(19): siRNA sense strand
ggaggaagaaugguacaaa

SEQ ID NO: 1486854 - RNA, 19 nt, Homo sapiens
  misc_RNA (1)...(19): siRNA sense strand
uuagagacuuggcauuuau

SEQ ID NO: 1486855 - RNA, 19 nt, Homo sapiens
  misc_RNA (1)...(19): siRNA sense strand
caggaucaaaugacaaaua

SEQ ID NO: 1486856 - RNA, 19 nt, Homo sapiens
  misc_RNA (1)...(19): siRNA sense strand
gcagcagaaucuuacugaa

SEQ ID NO: 1486857 - RNA, 19 nt, Homo sapiens
  misc_RNA (1)...(19): siRNA sense strand
gagcaacagcggcagauau

SEQ ID NO: 1486858 - RNA, 19 nt, Homo sapiens
  misc_RNA (1)...(19): siRNA sense strand
uauaugacccgcucucuga

SEQ ID NO: 1486859 - RNA, 19 nt, Homo sapiens
  misc_RNA (1)...(19): siRNA sense strand
uaacaggcucuuaugauau

SEQ ID NO: 1486860 - RNA, 19 nt, Homo sapiens
  misc_RNA (1)...(19): siRNA sense strand
gauguucgcucuguucgau

SEQ ID NO: 1486861 - RNA, 19 nt, Homo sapiens
  misc_RNA (1)...(19): siRNA sense strand
gagaguaugugccuaucca

SEQ ID NO: 1486862 - RNA, 19 nt, Homo sapiens
  misc_RNA (1)...(19): siRNA sense strand
cauacaagcacuccucgua

SEQ ID NO: 1486863 - RNA, 19 nt, Homo sapiens
  misc_RNA (1)...(19): siRNA sense strand
gcaauguaaugggagcaaa

SEQ ID NO: 1486864 - RNA, 19 nt, Homo sapiens
  misc_RNA (1)...(19): siRNA sense strand
uaucggcagugaaaucuug

SEQ ID NO: 1486865 - RNA, 19 nt, Homo sapiens
  misc_RNA (1)...(19): siRNA sense strand
ugucaugguugcagaauuc

SEQ ID NO: 1486866 - RNA, 19 nt, Homo sapiens
  misc_RNA (1)...(19): siRNA sense strand
cauaagaggaggaagaaug

SEQ ID NO: 1486867 - RNA, 19 nt, Homo sapiens
  misc_RNA (1)...(19): siRNA sense strand
gcuucgagauucaacagaa

SEQ ID NO: 1486868 - RNA, 19 nt, Homo sapiens
  misc_RNA (1)...(19): siRNA sense strand
ggccucaccuguggacuaa

SEQ ID NO: 1486869 - RNA, 19 nt, Homo sapiens
  misc_RNA (1)...(19): siRNA sense strand
gaucuaaugguucuucugu

SEQ ID NO: 1486870 - RNA, 19 nt, Homo sapiens
  misc_RNA (1)...(19): siRNA sense strand
ucccaguggucgucucuua

SEQ ID NO: 1486871 - RNA, 19 nt, Homo sapiens
  misc_RNA (1)...(19): siRNA sense strand
ggcacaacauuucauggaa

SEQ ID NO: 1486872 - RNA, 19 nt, Homo sapiens
  misc_RNA (1)...(19): siRNA sense strand
ugaagaaacagugaaugua

SEQ ID NO: 1486873 - RNA, 19 nt, Homo sapiens
  misc_RNA (1)...(19): siRNA sense strand
acacaugaugcuucaaaua

SEQ ID NO: 1486874 - RNA, 19 nt, Homo sapiens
  misc_RNA (1)...(19): siRNA sense strand
gcacagaguuuaauugaaa

SEQ ID NO: 1486875 - RNA, 19 nt, Homo sapiens
  misc_RNA (1)...(19): siRNA sense strand
gcacaaaucagucguguua

SEQ ID NO: 1486876 - RNA, 19 nt, Homo sapiens
  misc_RNA (1)...(19): siRNA sense strand
gaagaaauguggaacugaa

SEQ ID NO: 1486877 - RNA, 19 nt, Homo sapiens
  misc_RNA (1)...(19): siRNA sense strand
gaauauaaguugcuucaug

SEQ ID NO: 1486878 - RNA, 19 nt, Homo sapiens
  misc_RNA (1)...(19): siRNA sense strand
caaagugugugaauuauga

SEQ ID NO: 1486879 - RNA, 19 nt, Homo sapiens
  misc_RNA (1)...(19): siRNA sense strand
gauagaagaugaagaagga

SEQ ID NO: 1486880 - RNA, 19 nt, Homo sapiens
  misc_RNA (1)...(19): siRNA sense strand
guacauguaucucugaauu

SEQ ID NO: 1486881 - RNA, 19 nt, Homo sapiens
  misc_RNA (1)...(19): siRNA sense strand
ggucuucaguucuuacuua

SEQ ID NO: 1486882 - RNA, 19 nt, Homo sapiens
  misc_RNA (1)...(19): siRNA sense strand
ucaaucagcucaugaagaa

SEQ ID NO: 1486883 - RNA, 19 nt, Homo sapiens
  misc_RNA (1)...(19): siRNA sense strand
gcacacagguucuaaugga

SEQ ID NO: 1486884 - RNA, 19 nt, Homo sapiens
  misc_RNA (1)...(19): siRNA sense strand
gaaaugaaauaaccagcaa

SEQ ID NO: 1486885 - RNA, 19 nt, Homo sapiens
  misc_RNA (1)...(19): siRNA sense strand
ccacagagcaauagaauuu

SEQ ID NO: 1486886 - RNA, 19 nt, Homo sapiens
  misc_RNA (1)...(19): siRNA sense strand
gaccacaucucacaaagaa

SEQ ID NO: 1486887 - RNA, 19 nt, Homo sapiens
  misc_RNA (1)...(19): siRNA sense strand
agacagaaauccagaauau

SEQ ID NO: 1486888 - RNA, 19 nt, Homo sapiens
  misc_RNA (1)...(19): siRNA sense strand
gaaaucacauuaucaaggu

SEQ ID NO: 1486889 - RNA, 19 nt, Homo sapiens
  misc_RNA (1)...(19): siRNA sense strand
ggagaaccuuucagcauuu

SEQ ID NO: 1486890 - RNA, 19 nt, Homo sapiens
  misc_RNA (1)...(19): siRNA sense strand
gaaaggaguauuacauuga

SEQ ID NO: 1486891 - RNA, 19 nt, Homo sapiens
  misc_RNA (1)...(19): siRNA sense strand
ggacugugcugaaucucua

SEQ ID NO: 1486892 - RNA, 19 nt, Homo sapiens
  misc_RNA (1)...(19): siRNA sense strand
gaagaaggaauauaaguug

SEQ ID NO: 1486893 - RNA, 19 nt, Homo sapiens
  misc_RNA (1)...(19): siRNA sense strand
cagcaucucuacagcuuua

SEQ ID NO: 1486894 - RNA, 19 nt, Homo sapiens
  misc_RNA (1)...(19): siRNA sense strand
gcaacaaacuggcaagcuu

SEQ ID NO: 1486895 - RNA, 19 nt, Homo sapiens
  misc_RNA (1)...(19): siRNA sense strand
gaaggacugucaccucuau

SEQ ID NO: 1486896 - RNA, 19 nt, Homo sapiens
  misc_RNA (1)...(19): siRNA sense strand
uggaagagcuaaauaaaug

SEQ ID NO: 1486897 - RNA, 19 nt, Homo sapiens
  misc_RNA (1)...(19): siRNA sense strand
gaaaggucuucaguucuua

SEQ ID NO: 1486898 - RNA, 19 nt, Homo sapiens
  misc_RNA (1)...(19): siRNA sense strand
acaaagaaaucucguaugu

SEQ ID NO: 1486899 - RNA, 19 nt, Homo sapiens
  misc_RNA (1)...(19): siRNA sense strand
ggaagaggaugaagaugau

SEQ ID NO: 1486900 - RNA, 19 nt, Homo sapiens
  misc_RNA (1)...(19): siRNA sense strand
gcacaucgacagcuaguuu

SEQ ID NO: 1486901 - RNA, 19 nt, Homo sapiens
  misc_RNA (1)...(19): siRNA sense strand
caacggaacaggagucuuu

SEQ ID NO: 1486902 - RNA, 19 nt, Homo sapiens
  misc_RNA (1)...(19): siRNA sense strand
gaacaggagucuuuugaaa

SEQ ID NO: 1486903 - RNA, 19 nt, Homo sapiens
  misc_RNA (1)...(19): siRNA sense strand
ggagaaaucgcaguaaauu

SEQ ID NO: 1486904 - RNA, 19 nt, Homo sapiens
  misc_RNA (1)...(19): siRNA sense strand
aaagaaaucucguaugucu

SEQ ID NO: 1486905 - RNA, 19 nt, Homo sapiens
  misc_RNA (1)...(19): siRNA sense strand
gaaccuaucaucauaagug

SEQ ID NO: 1486906 - RNA, 19 nt, Homo sapiens
  misc_RNA (1)...(19): siRNA sense strand
gaugauagaagaugaagaa

SEQ ID NO: 1486907 - RNA, 19 nt, Homo sapiens
  misc_RNA (1)...(19): siRNA sense strand
caaggucacuguccagcua

SEQ ID NO: 1486908 - RNA, 19 nt, Homo sapiens
  misc_RNA (1)...(19): siRNA sense strand
gaagaggauauaugugaua

SEQ ID NO: 1486909 - RNA, 19 nt, Homo sapiens
  misc_RNA (1)...(19): siRNA sense strand
gggaaagaauuacaaggaa

SEQ ID NO: 1486910 - RNA, 19 nt, Homo sapiens
  misc_RNA (1)...(19): siRNA sense strand
cgaaaggaguauuacauug

SEQ ID NO: 1486911 - RNA, 19 nt, Homo sapiens
  misc_RNA (1)...(19): siRNA sense strand
ggaagaaggaauauaaguu

SEQ ID NO: 1486912 - RNA, 19 nt, Homo sapiens
  misc_RNA (1)...(19): siRNA sense strand
aaagagaggcugucaauug

SEQ ID NO: 1486913 - RNA, 19 nt, Homo sapiens
  misc_RNA (1)...(19): siRNA sense strand
agaauuaacucuucagcuu

SEQ ID NO: 1486914 - RNA, 19 nt, Homo sapiens
  misc_RNA (1)...(19): siRNA sense strand
ugaaacggaugcugaaaug

SEQ ID NO: 1486915 - RNA, 19 nt, Homo sapiens
  misc_RNA (1)...(19): siRNA sense strand
gagaaccuuucagcauuua

SEQ ID NO: 1486916 - RNA, 19 nt, Homo sapiens
  misc_RNA (1)...(19): siRNA sense strand
cacagaagcuccauuaagu

SEQ ID NO: 1486917 - RNA, 19 nt, Homo sapiens
  misc_RNA (1)...(19): siRNA sense strand
agagaaaggucuucaguuc

SEQ ID NO: 1486918 - RNA, 19 nt, Homo sapiens
  misc_RNA (1)...(19): siRNA sense strand
gaaauggcccagcguuuga

SEQ ID NO: 1486919 - RNA, 19 nt, Homo sapiens
  misc_RNA (1)...(19): siRNA sense strand
guacugcguucagaauuaa

SEQ ID NO: 1486920 - RNA, 19 nt, Homo sapiens
  misc_RNA (1)...(19): siRNA sense strand
gaagagacuguugguauuu

SEQ ID NO: 1486921 - RNA, 19 nt, Homo sapiens
  misc_RNA (1)...(19): siRNA sense strand
ggaccuccaucucguaaug

SEQ ID NO: 1486922 - RNA, 19 nt, Homo sapiens
  misc_RNA (1)...(19): siRNA sense strand
gccagaagcuaguaagaga

SEQ ID NO: 1486923 - RNA, 19 nt, Homo sapiens
  misc_RNA (1)...(19): siRNA sense strand
uccaugagcuucaaagaaa

SEQ ID NO: 1486924 - RNA, 19 nt, Homo sapiens
  misc_RNA (1)...(19): siRNA sense strand
gcaggcauucauauuauua

SEQ ID NO: 1486925 - RNA, 19 nt, Homo sapiens
  misc_RNA (1)...(19): siRNA sense strand
gcagaacaggauauaguua

SEQ ID NO: 1486926 - RNA, 19 nt, Homo sapiens
  misc_RNA (1)...(19): siRNA sense strand
gucugaaacucuacuauaa

SEQ ID NO: 1486927 - RNA, 19 nt, Homo sapiens
  misc_RNA (1)...(19): siRNA sense strand
ggugaaauguuagaagauu

SEQ ID NO: 1486928 - RNA, 19 nt, Homo sapiens
  misc_RNA (1)...(19): siRNA sense strand
gauguaccaccuucuaaua

SEQ ID NO: 1486929 - RNA, 19 nt, Homo sapiens
  misc_RNA (1)...(19): siRNA sense strand
ggcaagauguauuagauau

SEQ ID NO: 1486930 - RNA, 19 nt, Homo sapiens
  misc_RNA (1)...(19): siRNA sense strand
gaaauaaccagcaacuaca

SEQ ID NO: 1486931 - RNA, 19 nt, Homo sapiens
  misc_RNA (1)...(19): siRNA sense strand
gaaacaaacacaucagcaa

SEQ ID NO: 1486932 - RNA, 19 nt, Homo sapiens
  misc_RNA (1)...(19): siRNA sense strand
uuguaaagcugaugaauug

SEQ ID NO: 1486933 - RNA, 19 nt, Homo sapiens
  misc_RNA (1)...(19): siRNA sense strand
caaagaaagaugugauuga

SEQ ID NO: 1486934 - RNA, 19 nt, Homo sapiens
  misc_RNA (1)...(19): siRNA sense strand
gaaagaauuacaaggaaga

SEQ ID NO: 1486935 - RNA, 19 nt, Homo sapiens
  misc_RNA (1)...(19): siRNA sense strand
ccaccuaccuugcgugaug

SEQ ID NO: 1486936 - RNA, 19 nt, Homo sapiens
  misc_RNA (1)...(19): siRNA sense strand
ggcagcagcuucauuggaa

SEQ ID NO: 1486937 - RNA, 19 nt, Homo sapiens
  misc_RNA (1)...(19): siRNA sense strand
ggucugaaacucuacuaua

SEQ ID NO: 1486938 - RNA, 19 nt, Homo sapiens
  misc_RNA (1)...(19): siRNA sense strand
gcugagagaaguaucuaua

SEQ ID NO: 1486939 - RNA, 19 nt, Homo sapiens
  misc_RNA (1)...(19): siRNA sense strand
uaacuaauuuggagaaguc

SEQ ID NO: 1486940 - RNA, 19 nt, Homo sapiens
  misc_RNA (1)...(19): siRNA sense strand
ugauaaagcuguugcuaca

SEQ ID NO: 1486941 - RNA, 19 nt, Homo sapiens
  misc_RNA (1)...(19): siRNA sense strand
gcacuucaauggaucucuu

SEQ ID NO: 1486942 - RNA, 19 nt, Homo sapiens
  misc_RNA (1)...(19): siRNA sense strand
aagaaggacugguggauga

SEQ ID NO: 1486943 - RNA, 19 nt, Homo sapiens
  misc_RNA (1)...(19): siRNA sense strand
guggaggucugcaaagaaa

SEQ ID NO: 1486944 - RNA, 19 nt, Homo sapiens
  misc_RNA (1)...(19): siRNA sense strand
gcaguugcuugguggaauu

SEQ ID NO: 1486945 - RNA, 19 nt, Homo sapiens
  misc_RNA (1)...(19): siRNA sense strand
agaagagacuguugguauu

SEQ ID NO: 1486946 - RNA, 19 nt, Homo sapiens
  misc_RNA (1)...(19): siRNA sense strand
gaaaucucguaugucuuua

SEQ ID NO: 1486947 - RNA, 19 nt, Homo sapiens
  misc_RNA (1)...(19): siRNA sense strand
gaaggaauauaaguugcuu

SEQ ID NO: 1486948 - RNA, 19 nt, Homo sapiens
  misc_RNA (1)...(19): siRNA sense strand
caaauggaagagcuaaaua

SEQ ID NO: 1486949 - RNA, 19 nt, Homo sapiens
  misc_RNA (1)...(19): siRNA sense strand
cagcagaauuguacagaga

SEQ ID NO: 1486950 - RNA, 19 nt, Homo sapiens
  misc_RNA (1)...(19): siRNA sense strand
gaauaugcaugaggacaga

SEQ ID NO: 1486951 - RNA, 19 nt, Homo sapiens
  misc_RNA (1)...(19): siRNA sense strand
uggaagagcugcugacauc

SEQ ID NO: 1486952 - RNA, 19 nt, Homo sapiens
  misc_RNA (1)...(19): siRNA sense strand
gagcaacucugaucaucuc

SEQ ID NO: 1486953 - RNA, 19 nt, Homo sapiens
  misc_RNA (1)...(19): siRNA sense strand
gaaccagugucaacaagag

SEQ ID NO: 1486954 - RNA, 19 nt, Homo sapiens
  misc_RNA (1)...(19): siRNA sense strand
uaacugauguugcuauguc

SEQ ID NO: 1486955 - RNA, 19 nt, Homo sapiens
  misc_RNA (1)...(19): siRNA sense strand
agaaaucgcaguaaauuga

SEQ ID NO: 1486956 - RNA, 19 nt, Homo sapiens
  misc_RNA (1)...(19): siRNA sense strand
caggagaaaucgcaguaaa

SEQ ID NO: 1486957 - RNA, 19 nt, Homo sapiens
  misc_RNA (1)...(19): siRNA sense strand
ggaagaggauauaugugau

SEQ ID NO: 1486958 - RNA, 19 nt, Homo sapiens
  misc_RNA (1)...(19): siRNA sense strand
ugacagcugugaaagaaau

SEQ ID NO: 1486959 - RNA, 19 nt, Homo sapiens
  misc_RNA (1)...(19): siRNA sense strand
gaagauguagagaaacaaa

SEQ ID NO: 1486960 - RNA, 19 nt, Homo sapiens
  misc_RNA (1)...(19): siRNA sense strand
cauggaagaaggaauauaa

SEQ ID NO: 1486961 - RNA, 19 nt, Homo sapiens
  misc_RNA (1)...(19): siRNA sense strand
uagcaggcauucauauuau

SEQ ID NO: 1486962 - RNA, 19 nt, Homo sapiens
  misc_RNA (1)...(19): siRNA sense strand
uuaguggucuuucuuggua

SEQ ID NO: 1486963 - RNA, 19 nt, Homo sapiens
  misc_RNA (1)...(19): siRNA sense strand
gaaagacaguggagguuuu

SEQ ID NO: 1486964 - RNA, 19 nt, Homo sapiens
  misc_RNA (1)...(19): siRNA sense strand
ccagaaggaaaucacauua

SEQ ID NO: 1486965 - RNA, 19 nt, Homo sapiens
  misc_RNA (1)...(19): siRNA sense strand
agaaaucucguaugucuuu

SEQ ID NO: 1486966 - RNA, 19 nt, Homo sapiens
  misc_RNA (1)...(19): siRNA sense strand
gaacaaaaccgaauaaaac

SEQ ID NO: 1486967 - RNA, 19 nt, Homo sapiens
  misc_RNA (1)...(19): siRNA sense strand
gaguaugaaucaaagcuau

SEQ ID NO: 1486968 - RNA, 19 nt, Homo sapiens
  misc_RNA (1)...(19): siRNA sense strand
uguacugcguucagaauua

SEQ ID NO: 1486969 - RNA, 19 nt, Homo sapiens
  misc_RNA (1)...(19): siRNA sense strand
gaacaaggacacagauucu

SEQ ID NO: 1486970 - RNA, 19 nt, Homo sapiens
  misc_RNA (1)...(19): siRNA sense strand
caaggaagaggauauaugu

SEQ ID NO: 1486971 - RNA, 19 nt, Homo sapiens
  misc_RNA (1)...(19): siRNA sense strand
gaaggaaaucacauuauca

SEQ ID NO: 1486972 - RNA, 19 nt, Homo sapiens
  misc_RNA (1)...(19): siRNA sense strand
gaaggucucgugaaacaga

SEQ ID NO: 1486973 - RNA, 19 nt, Homo sapiens
  misc_RNA (1)...(19): siRNA sense strand
caacaaacuggcaagcuuu

SEQ ID NO: 1486974 - RNA, 19 nt, Homo sapiens
  misc_RNA (1)...(19): siRNA sense strand
guacagaucuugaaacaaa

SEQ ID NO: 1486975 - RNA, 19 nt, Homo sapiens
  misc_RNA (1)...(19): siRNA sense strand
caagaagagucuccacuua

SEQ ID NO: 1486976 - RNA, 19 nt, Homo sapiens
  misc_RNA (1)...(19): siRNA sense strand
gaacagaaauuggacaaau

SEQ ID NO: 1486977 - RNA, 19 nt, Homo sapiens
  misc_RNA (1)...(19): siRNA sense strand
caacuggcauugaaucuuu

SEQ ID NO: 1486978 - RNA, 19 nt, Homo sapiens
  misc_RNA (1)...(19): siRNA sense strand
gcacuaagggcuauuauug

SEQ ID NO: 1486979 - RNA, 19 nt, Homo sapiens
  misc_RNA (1)...(19): siRNA sense strand
guacugccaugcucucaua

SEQ ID NO: 1486980 - RNA, 19 nt, Homo sapiens
  misc_RNA (1)...(19): siRNA sense strand
gauguuggcaaucuaauua

SEQ ID NO: 1486981 - RNA, 19 nt, Homo sapiens
  misc_RNA (1)...(19): siRNA sense strand
gaauauacuccacaaauug

SEQ ID NO: 1486982 - RNA, 19 nt, Homo sapiens
  misc_RNA (1)...(19): siRNA sense strand
gaauggagcagaacagaaa

SEQ ID NO: 1486983 - RNA, 19 nt, Homo sapiens
  misc_RNA (1)...(19): siRNA sense strand
gaucuuacccaucuuauug

SEQ ID NO: 1486984 - RNA, 19 nt, Homo sapiens
  misc_RNA (1)...(19): siRNA sense strand
gccaugcucucauacauuu

SEQ ID NO: 1486985 - RNA, 19 nt, Homo sapiens
  misc_RNA (1)...(19): siRNA sense strand
ucaggcaucugguaacuuu

SEQ ID NO: 1486986 - RNA, 19 nt, Homo sapiens
  misc_RNA (1)...(19): siRNA sense strand
caagaagaccauccagaua

SEQ ID NO: 1486987 - RNA, 19 nt, Homo sapiens
  misc_RNA (1)...(19): siRNA sense strand
agaagagucuccacuuaaa

SEQ ID NO: 1486988 - RNA, 19 nt, Homo sapiens
  misc_RNA (1)...(19): siRNA sense strand
ugaaauuuauccucgagua

SEQ ID NO: 1486989 - RNA, 19 nt, Homo sapiens
  misc_RNA (1)...(19): siRNA sense strand
gaaggaauuuguguggaaa

SEQ ID NO: 1486990 - RNA, 19 nt, Homo sapiens
  misc_RNA (1)...(19): siRNA sense strand
gaaauuuauccucgaguaa

SEQ ID NO: 1486991 - RNA, 19 nt, Homo sapiens
  misc_RNA (1)...(19): siRNA sense strand
gcaagaagaccauccagau

SEQ ID NO: 1486992 - RNA, 19 nt, Homo sapiens
  misc_RNA (1)...(19): siRNA sense strand
gagagcagcagcuugaauu

SEQ ID NO: 1486993 - RNA, 19 nt, Homo sapiens
  misc_RNA (1)...(19): siRNA sense strand
gagcagaacagaaauugga

SEQ ID NO: 1486994 - RNA, 19 nt, Homo sapiens
  misc_RNA (1)...(19): siRNA sense strand
aaagaagaauggagcagaa

SEQ ID NO: 1486995 - RNA, 19 nt, Homo sapiens
  misc_RNA (1)...(19): siRNA sense strand
aagcuguucuccaguauuu

SEQ ID NO: 1486996 - RNA, 19 nt, Homo sapiens
  misc_RNA (1)...(19): siRNA sense strand
ugaaggaauuuguguggaa

SEQ ID NO: 1486997 - RNA, 19 nt, Homo sapiens
  misc_RNA (1)...(19): siRNA sense strand
gguaaagaauauacugugu

SEQ ID NO: 1486998 - RNA, 19 nt, Homo sapiens
  misc_RNA (1)...(19): siRNA sense strand
ucaccugcccugaacauua

SEQ ID NO: 1486999 - RNA, 19 nt, Homo sapiens
  misc_RNA (1)...(19): siRNA sense strand
agaagaccauccagauauu

SEQ ID NO: 1487000 - RNA, 19 nt, Homo sapiens
  misc_RNA (1)...(19): siRNA sense strand
gcagcagcuugaauuaaug

SEQ ID NO: 1487001 - RNA, 19 nt, Homo sapiens
  misc_RNA (1)...(19): siRNA sense strand
acuaagggcuauuauugaa

SEQ ID NO: 1487002 - RNA, 19 nt, Homo sapiens
  misc_RNA (1)...(19): siRNA sense strand
gagcagcagcuugaauuaa

SEQ ID NO: 1487003 - RNA, 19 nt, Homo sapiens
  misc_RNA (1)...(19): siRNA sense strand
ucaagaauauacuccacaa

SEQ ID NO: 1487004 - RNA, 19 nt, Homo sapiens
  misc_RNA (1)...(19): siRNA sense strand
ggaagcuguucuccaguau

SEQ ID NO: 1487005 - RNA, 19 nt, Homo sapiens
  misc_RNA (1)...(19): siRNA sense strand
gauccaaggcgauaaggaa

SEQ ID NO: 1487006 - RNA, 19 nt, Homo sapiens
  misc_RNA (1)...(19): siRNA sense strand
cauugaaucuuuaccuguu

SEQ ID NO: 1487007 - RNA, 19 nt, Homo sapiens
  misc_RNA (1)...(19): siRNA sense strand
ccacaaauugaaagaauga

SEQ ID NO: 1487008 - RNA, 19 nt, Homo sapiens
  misc_RNA (1)...(19): siRNA sense strand
uaacggcucucugugaugu

SEQ ID NO: 1487009 - RNA, 19 nt, Homo sapiens
  misc_RNA (1)...(19): siRNA sense strand
uaauggcacugacaauauc

SEQ ID NO: 1487010 - RNA, 19 nt, Homo sapiens
  misc_RNA (1)...(19): siRNA sense strand
gcacugacaauaucuuuac

SEQ ID NO: 1487011 - RNA, 19 nt, Homo sapiens
  misc_RNA (1)...(19): siRNA sense strand
auggagaccuuuacgaauu

SEQ ID NO: 1487012 - RNA, 19 nt, Homo sapiens
  misc_RNA (1)...(19): siRNA sense strand
ugucccauauguuauagua

SEQ ID NO: 1487013 - RNA, 19 nt, Homo sapiens
  misc_RNA (1)...(19): siRNA sense strand
aagccucucuaucuguuua

SEQ ID NO: 1487014 - RNA, 19 nt, Homo sapiens
  misc_RNA (1)...(19): siRNA sense strand
gaagagucuccacuuaaau

SEQ ID NO: 1487015 - RNA, 19 nt, Homo sapiens
  misc_RNA (1)...(19): siRNA sense strand
ggucauugccuuaccauag

SEQ ID NO: 1487016 - RNA, 19 nt, Homo sapiens
  misc_RNA (1)...(19): siRNA sense strand
ugaagccucucuaucuguu

SEQ ID NO: 1487017 - RNA, 19 nt, Homo sapiens
  misc_RNA (1)...(19): siRNA sense strand
aagaagagucuccacuuaa

SEQ ID NO: 1487018 - RNA, 19 nt, Homo sapiens
  misc_RNA (1)...(19): siRNA sense strand
uaucuaacagucugcauaa

SEQ ID NO: 1487019 - RNA, 19 nt, Homo sapiens
  misc_RNA (1)...(19): siRNA sense strand
gaacauuacaggcaaccau

SEQ ID NO: 1487020 - RNA, 19 nt, Homo sapiens
  misc_RNA (1)...(19): siRNA sense strand
cugcauaagguaaagaaua

SEQ ID NO: 1487021 - RNA, 19 nt, Homo sapiens
  misc_RNA (1)...(19): siRNA sense strand
gaauuaauggcacugacaa

SEQ ID NO: 1487022 - RNA, 19 nt, Homo sapiens
  misc_RNA (1)...(19): siRNA sense strand
aggaagcuguucuccagua

SEQ ID NO: 1487023 - RNA, 19 nt, Homo sapiens
  misc_RNA (1)...(19): siRNA sense strand
uaccauaggucaacaucau

SEQ ID NO: 1487024 - RNA, 19 nt, Homo sapiens
  misc_RNA (1)...(19): siRNA sense strand
aagaagaccauccagauau

SEQ ID NO: 1487025 - RNA, 19 nt, Homo sapiens
  misc_RNA (1)...(19): siRNA sense strand
caacaucauggucauccua

SEQ ID NO: 1487026 - RNA, 19 nt, Homo sapiens
  misc_RNA (1)...(19): siRNA sense strand
gaagaccauccagauauug

SEQ ID NO: 1487027 - RNA, 19 nt, Homo sapiens
  misc_RNA (1)...(19): siRNA sense strand
gacacacacuggacagauc

SEQ ID NO: 1487028 - RNA, 19 nt, Homo sapiens
  misc_RNA (1)...(19): siRNA sense strand
gaaagaaugaaggaaauac

SEQ ID NO: 1487029 - RNA, 19 nt, Homo sapiens
  misc_RNA (1)...(19): siRNA sense strand
ugaagauccucguguacug

SEQ ID NO: 1487030 - RNA, 19 nt, Homo sapiens
  misc_RNA (1)...(19): siRNA sense strand
caacacaucauaaccuuuu

SEQ ID NO: 1487031 - RNA, 19 nt, Homo sapiens
  misc_RNA (1)...(19): siRNA sense strand
gcauguacagaucuugaaa

SEQ ID NO: 1487032 - RNA, 19 nt, Homo sapiens
  misc_RNA (1)...(19): siRNA sense strand
cuaacagucugcauaaggu

SEQ ID NO: 1487033 - RNA, 19 nt, Homo sapiens
  misc_RNA (1)...(19): siRNA sense strand
ucauguuccuggccuggua

SEQ ID NO: 1487034 - RNA, 19 nt, Homo sapiens
  misc_RNA (1)...(19): siRNA sense strand
gggcuauuauugaaaagua

SEQ ID NO: 1487035 - RNA, 19 nt, Homo sapiens
  misc_RNA (1)...(19): siRNA sense strand
uuaauggcacugacaauau

SEQ ID NO: 1487036 - RNA, 19 nt, Homo sapiens
  misc_RNA (1)...(19): siRNA sense strand
ccuaacggcucucugugau

SEQ ID NO: 1487037 - RNA, 19 nt, Homo sapiens
  misc_RNA (1)...(19): siRNA sense strand
auacugaugucgauacucu

SEQ ID NO: 1487038 - RNA, 19 nt, Homo sapiens
  misc_RNA (1)...(19): siRNA sense strand
aagagucuccacuuaaauu

SEQ ID NO: 1487039 - RNA, 19 nt, Homo sapiens
  misc_RNA (1)...(19): siRNA sense strand
agcagcagcuugaauuaau

SEQ ID NO: 1487040 - RNA, 19 nt, Homo sapiens
  misc_RNA (1)...(19): siRNA sense strand
cauuacaggcaaccauuaa

SEQ ID NO: 1487041 - RNA, 19 nt, Homo sapiens
  misc_RNA (1)...(19): siRNA sense strand
gaagcuguucuccaguauu

SEQ ID NO: 1487042 - RNA, 19 nt, Homo sapiens
  misc_RNA (1)...(19): siRNA sense strand
uaacagucugcauaaggua

SEQ ID NO: 1487043 - RNA, 19 nt, Homo sapiens
  misc_RNA (1)...(19): siRNA sense strand
caccugcccugaacauuac

SEQ ID NO: 1487044 - RNA, 19 nt, Homo sapiens
  misc_RNA (1)...(19): siRNA sense strand
gaacguucucauucccaaa

SEQ ID NO: 1487045 - RNA, 19 nt, Homo sapiens
  misc_RNA (1)...(19): siRNA sense strand
ugcccuaauugcagaagua

SEQ ID NO: 1487046 - RNA, 19 nt, Homo sapiens
  misc_RNA (1)...(19): siRNA sense strand
caucauggucauccuauag

SEQ ID NO: 1487047 - RNA, 19 nt, Homo sapiens
  misc_RNA (1)...(19): siRNA sense strand
uggagaccuuuacgaauuc

SEQ ID NO: 1487048 - RNA, 19 nt, Homo sapiens
  misc_RNA (1)...(19): siRNA sense strand
gaagaauggagcagaacag

SEQ ID NO: 1487049 - RNA, 19 nt, Homo sapiens
  misc_RNA (1)...(19): siRNA sense strand
acaagaagagucuccacuu

SEQ ID NO: 1487050 - RNA, 19 nt, Homo sapiens
  misc_RNA (1)...(19): siRNA sense strand
agagcagcagcuugaauua

SEQ ID NO: 1487051 - RNA, 19 nt, Homo sapiens
  misc_RNA (1)...(19): siRNA sense strand
caagaauauacuccacaaa

SEQ ID NO: 1487052 - RNA, 19 nt, Homo sapiens
  misc_RNA (1)...(19): siRNA sense strand
auagaugaccuucaaagug

SEQ ID NO: 1487053 - RNA, 19 nt, Homo sapiens
  misc_RNA (1)...(19): siRNA sense strand
cuccacaaauugaaagaau

SEQ ID NO: 1487054 - RNA, 19 nt, Homo sapiens
  misc_RNA (1)...(19): siRNA sense strand
cacuaagggcuauuauuga

SEQ ID NO: 1487055 - RNA, 19 nt, Homo sapiens
  misc_RNA (1)...(19): siRNA sense strand
cagcauguacagaucuuga

SEQ ID NO: 1487056 - RNA, 19 nt, Homo sapiens
  misc_RNA (1)...(19): siRNA sense strand
ggcacugacaauaucuuua

SEQ ID NO: 1487057 - RNA, 19 nt, Homo sapiens
  misc_RNA (1)...(19): siRNA sense strand
uacgagagcagcagcuuga

SEQ ID NO: 1487058 - RNA, 19 nt, Homo sapiens
  misc_RNA (1)...(19): siRNA sense strand
uugaaaagcugaaagaaca

SEQ ID NO: 1487059 - RNA, 19 nt, Homo sapiens
  misc_RNA (1)...(19): siRNA sense strand
uccuauagaugaccuucaa

SEQ ID NO: 1487060 - RNA, 19 nt, Homo sapiens
  misc_RNA (1)...(19): siRNA sense strand
uuacaggcaaccauuaaau

SEQ ID NO: 1487061 - RNA, 19 nt, Homo sapiens
  misc_RNA (1)...(19): siRNA sense strand
acauuacaggcaaccauua

SEQ ID NO: 1487062 - RNA, 19 nt, Homo sapiens
  misc_RNA (1)...(19): siRNA sense strand
ucugaagccucucuaucug

SEQ ID NO: 1487063 - RNA, 19 nt, Homo sapiens
  misc_RNA (1)...(19): siRNA sense strand
guaauacugaugucgauac

SEQ ID NO: 1487064 - RNA, 19 nt, Homo sapiens
  misc_RNA (1)...(19): siRNA sense strand
acaucauggucauccuaua

SEQ ID NO: 1487065 - RNA, 19 nt, Homo sapiens
  misc_RNA (1)...(19): siRNA sense strand
gaagccucucuaucuguuu

SEQ ID NO: 1487066 - RNA, 19 nt, Homo sapiens
  misc_RNA (1)...(19): siRNA sense strand
gucauugccuuaccauagg

SEQ ID NO: 1487067 - RNA, 19 nt, Homo sapiens
  misc_RNA (1)...(19): siRNA sense strand
uuucaaccaacacaucaua

SEQ ID NO: 1487068 - RNA, 19 nt, Homo sapiens
  misc_RNA (1)...(19): siRNA sense strand
cgaguaagcaaaauauuga

SEQ ID NO: 1487069 - RNA, 19 nt, Homo sapiens
  misc_RNA (1)...(19): siRNA sense strand
cugacaauaucuuuacaag

SEQ ID NO: 1487070 - RNA, 19 nt, Homo sapiens
  misc_RNA (1)...(19): siRNA sense strand
auuaauggcacugacaaua

SEQ ID NO: 1487071 - RNA, 19 nt, Homo sapiens
  misc_RNA (1)...(19): siRNA sense strand
gcuguucuccaguauuuua

SEQ ID NO: 1487072 - RNA, 19 nt, Homo sapiens
  misc_RNA (1)...(19): siRNA sense strand
gccagcauguacagaucuu

SEQ ID NO: 1487073 - RNA, 19 nt, Homo sapiens
  misc_RNA (1)...(19): siRNA sense strand
cagaacagaaauuggacaa

SEQ ID NO: 1487074 - RNA, 19 nt, Homo sapiens
  misc_RNA (1)...(19): siRNA sense strand
gaacacaggucuggaagaa

SEQ ID NO: 1487075 - RNA, 19 nt, Homo sapiens
  misc_RNA (1)...(19): siRNA sense strand
gaagaaaggagccaucuau

SEQ ID NO: 1487076 - RNA, 19 nt, Homo sapiens
  misc_RNA (1)...(19): siRNA sense strand
guggaaaggugauaagaaa

SEQ ID NO: 1487077 - RNA, 19 nt, Homo sapiens
  misc_RNA (1)...(19): siRNA sense strand
acacaggucuggaagaaga

SEQ ID NO: 1487078 - RNA, 19 nt, Homo sapiens
  misc_RNA (1)...(19): siRNA sense strand
gaaaggagccaucuaugag

SEQ ID NO: 1487079 - RNA, 19 nt, Homo sapiens
  misc_RNA (1)...(19): siRNA sense strand
ggaaaggugauaagaaauc

SEQ ID NO: 1487080 - RNA, 19 nt, Homo sapiens
  misc_RNA (1)...(19): siRNA sense strand
ggaaggacaacgugaaaca

SEQ ID NO: 1487081 - RNA, 19 nt, Homo sapiens
  misc_RNA (1)...(19): siRNA sense strand
agaaaggagccaucuauga

SEQ ID NO: 1487082 - RNA, 19 nt, Homo sapiens
  misc_RNA (1)...(19): siRNA sense strand
gacccaaggaguauuauga

SEQ ID NO: 1487083 - RNA, 19 nt, Homo sapiens
  misc_RNA (1)...(19): siRNA sense strand
gugauaagaaaucggguua

SEQ ID NO: 1487084 - RNA, 19 nt, Homo sapiens
  misc_RNA (1)...(19): siRNA sense strand
gaaaggugauaagaaaucg

SEQ ID NO: 1487085 - RNA, 19 nt, Homo sapiens
  misc_RNA (1)...(19): siRNA sense strand
gaauggcgacuacuaugug

SEQ ID NO: 1487086 - RNA, 19 nt, Homo sapiens
  misc_RNA (1)...(19): siRNA sense strand
ggaaagugcaggagagucu

SEQ ID NO: 1487087 - RNA, 19 nt, Homo sapiens
  misc_RNA (1)...(19): siRNA sense strand
gguggaaaggugauaagaa

SEQ ID NO: 1487088 - RNA, 19 nt, Homo sapiens
  misc_RNA (1)...(19): siRNA sense strand
gugaaacacgggaaaggaa

SEQ ID NO: 1487089 - RNA, 19 nt, Homo sapiens
  misc_RNA (1)...(19): siRNA sense strand
ccagguauacgcugugaau

SEQ ID NO: 1487090 - RNA, 19 nt, Homo sapiens
  misc_RNA (1)...(19): siRNA sense strand
gaaagugcaggagagucua

SEQ ID NO: 1487091 - RNA, 19 nt, Homo sapiens
  misc_RNA (1)...(19): siRNA sense strand
gaaacacgggaaaggaaca

SEQ ID NO: 1487092 - RNA, 19 nt, Homo sapiens
  misc_RNA (1)...(19): siRNA sense strand
ggaacacaggucuggaaga

SEQ ID NO: 1487093 - RNA, 19 nt, Homo sapiens
  misc_RNA (1)...(19): siRNA sense strand
guggaaggacaacgugaaa

SEQ ID NO: 1487094 - RNA, 19 nt, Homo sapiens
  misc_RNA (1)...(19): siRNA sense strand
cagcaacggcgacaucuac

SEQ ID NO: 1487095 - RNA, 19 nt, Homo sapiens
  misc_RNA (1)...(19): siRNA sense strand
ugaauggcgacuacuaugu

SEQ ID NO: 1487096 - RNA, 19 nt, Homo sapiens
  misc_RNA (1)...(19): siRNA sense strand
gugaauggcgacuacuaug

SEQ ID NO: 1487097 - RNA, 19 nt, Homo sapiens
  misc_RNA (1)...(19): siRNA sense strand
ucggacccaaggaguauua

SEQ ID NO: 1487098 - RNA, 19 nt, Homo sapiens
  misc_RNA (1)...(19): siRNA sense strand
gacagugggagaacgacaa

SEQ ID NO: 1487099 - RNA, 19 nt, Homo sapiens
  misc_RNA (1)...(19): siRNA sense strand
ggacccaaggaguauuaug

SEQ ID NO: 1487100 - RNA, 19 nt, Homo sapiens
  misc_RNA (1)...(19): siRNA sense strand
agaagaaaggagccaucua

SEQ ID NO: 1487101 - RNA, 19 nt, Homo sapiens
  misc_RNA (1)...(19): siRNA sense strand
gcaacggcgacaucuacga

SEQ ID NO: 1487102 - RNA, 19 nt, Homo sapiens
  misc_RNA (1)...(19): siRNA sense strand
gaaaauaguuggugguuua

SEQ ID NO: 1487103 - RNA, 19 nt, Homo sapiens
  misc_RNA (1)...(19): siRNA sense strand
ggaacuugcucaaaucuau

SEQ ID NO: 1487104 - RNA, 19 nt, Homo sapiens
  misc_RNA (1)...(19): siRNA sense strand
ccauagagcugaaggaaga

SEQ ID NO: 1487105 - RNA, 19 nt, Homo sapiens
  misc_RNA (1)...(19): siRNA sense strand
uaauugagcuuguugauca

SEQ ID NO: 1487106 - RNA, 19 nt, Homo sapiens
  misc_RNA (1)...(19): siRNA sense strand
gcucggaacuugcucaaau

SEQ ID NO: 1487107 - RNA, 19 nt, Homo sapiens
  misc_RNA (1)...(19): siRNA sense strand
gcucaaaucuauagcaaag

SEQ ID NO: 1487108 - RNA, 19 nt, Homo sapiens
  misc_RNA (1)...(19): siRNA sense strand
ggacaaaauuggccaguuu

SEQ ID NO: 1487109 - RNA, 19 nt, Homo sapiens
  misc_RNA (1)...(19): siRNA sense strand
gaacuugcucaaaucuaua

SEQ ID NO: 1487110 - RNA, 19 nt, Homo sapiens
  misc_RNA (1)...(19): siRNA sense strand
aaaugcagcuagaaaggua

SEQ ID NO: 1487111 - RNA, 19 nt, Homo sapiens
  misc_RNA (1)...(19): siRNA sense strand
aagcagggcuacacuuuga

SEQ ID NO: 1487112 - RNA, 19 nt, Homo sapiens
  misc_RNA (1)...(19): siRNA sense strand
gaagcagggcuacacuuug

SEQ ID NO: 1487113 - RNA, 19 nt, Homo sapiens
  misc_RNA (1)...(19): siRNA sense strand
ucaaaucuauagcaaagca

SEQ ID NO: 1487114 - RNA, 19 nt, Homo sapiens
  misc_RNA (1)...(19): siRNA sense strand
gcaacuucaagcccuaaua

SEQ ID NO: 1487115 - RNA, 19 nt, Homo sapiens
  misc_RNA (1)...(19): siRNA sense strand
gaaggaagagugcaaagac

SEQ ID NO: 1487116 - RNA, 19 nt, Homo sapiens
  misc_RNA (1)...(19): siRNA sense strand
caaaagaagcagaaaauga

SEQ ID NO: 1487117 - RNA, 19 nt, Homo sapiens
  misc_RNA (1)...(19): siRNA sense strand
ugaagcagggcuacacuuu

SEQ ID NO: 1487118 - RNA, 19 nt, Homo sapiens
  misc_RNA (1)...(19): siRNA sense strand
caacuucaagcccuaauag

SEQ ID NO: 1487119 - RNA, 19 nt, Homo sapiens
  misc_RNA (1)...(19): siRNA sense strand
gcagagagaagcucaacag

SEQ ID NO: 1487120 - RNA, 19 nt, Homo sapiens
  misc_RNA (1)...(19): siRNA sense strand
caucggugcucggaacuug

SEQ ID NO: 1487121 - RNA, 19 nt, Homo sapiens
  misc_RNA (1)...(19): siRNA sense strand
gaccauagagcugaaggaa

SEQ ID NO: 1487122 - RNA, 19 nt, Homo sapiens
  misc_RNA (1)...(19): siRNA sense strand
ccuaauagcagaaaagaaa

SEQ ID NO: 1487123 - RNA, 19 nt, Homo sapiens
  misc_RNA (1)...(19): siRNA sense strand
aaaagaaaaugcagcuaga

SEQ ID NO: 1487124 - RNA, 19 nt, Homo sapiens
  misc_RNA (1)...(19): siRNA sense strand
caacagcagcaacuucaag

SEQ ID NO: 1487125 - RNA, 19 nt, Homo sapiens
  misc_RNA (1)...(19): siRNA sense strand
gggcuacacuuugaugaac

SEQ ID NO: 1487126 - RNA, 19 nt, Homo sapiens
  misc_RNA (1)...(19): siRNA sense strand
gcagggcuacacuuugaug

SEQ ID NO: 1487127 - RNA, 19 nt, Homo sapiens
  misc_RNA (1)...(19): siRNA sense strand
gcuacacuuugaugaacug

SEQ ID NO: 1487128 - RNA, 19 nt, Homo sapiens
  misc_RNA (1)...(19): siRNA sense strand
caccucacccucccgagua

SEQ ID NO: 1487129 - RNA, 19 nt, Homo sapiens
  misc_RNA (1)...(19): siRNA sense strand
ggacauccugggugaagca

SEQ ID NO: 1487130 - RNA, 19 nt, Homo sapiens
  misc_RNA (1)...(19): siRNA sense strand
gguguuggacccagagguu

SEQ ID NO: 1487131 - RNA, 19 nt, Homo sapiens
  misc_RNA (1)...(19): siRNA sense strand
gcucaacagcagcaacuuc

SEQ ID NO: 1487132 - RNA, 19 nt, Homo sapiens
  misc_RNA (1)...(19): siRNA sense strand
acacuuugaugaacugaac

SEQ ID NO: 1487133 - RNA, 19 nt, Homo sapiens
  misc_RNA (1)...(19): siRNA sense strand
uugaugaacugaacaagcu

SEQ ID NO: 1487134 - RNA, 19 nt, Homo sapiens
  misc_RNA (1)...(19): siRNA sense strand
ugaaggaagagugcaaaga

SEQ ID NO: 1487135 - RNA, 19 nt, Homo sapiens
  misc_RNA (1)...(19): siRNA sense strand
aaauuggccaguuucagaa

SEQ ID NO: 1487136 - RNA, 19 nt, Homo sapiens
  misc_RNA (1)...(19): siRNA sense strand
gaaaaugcagcuagaaagg

SEQ ID NO: 1487137 - RNA, 19 nt, Homo sapiens
  misc_RNA (1)...(19): siRNA sense strand
gcagaaaaugaaaagauga

SEQ ID NO: 1487138 - RNA, 19 nt, Homo sapiens
  misc_RNA (1)...(19): siRNA sense strand
gcugaaggaagagugcaaa

SEQ ID NO: 1487139 - RNA, 19 nt, Homo sapiens
  misc_RNA (1)...(19): siRNA sense strand
uuacccagcagaccauaga

SEQ ID NO: 1487140 - RNA, 19 nt, Homo sapiens
  misc_RNA (1)...(19): siRNA sense strand
gcaaaagaagcagaaaaug

SEQ ID NO: 1487141 - RNA, 19 nt, Homo sapiens
  misc_RNA (1)...(19): siRNA sense strand
ccaauggcguccucaauga

SEQ ID NO: 1487142 - RNA, 19 nt, Homo sapiens
  misc_RNA (1)...(19): siRNA sense strand
ugaggucuauuguaagaua

SEQ ID NO: 1487143 - RNA, 19 nt, Homo sapiens
  misc_RNA (1)...(19): siRNA sense strand
ggaaagguuuggagugauc

SEQ ID NO: 1487144 - RNA, 19 nt, Homo sapiens
  misc_RNA (1)...(19): siRNA sense strand
caacauagaguaucagauc

SEQ ID NO: 1487145 - RNA, 19 nt, Homo sapiens
  misc_RNA (1)...(19): siRNA sense strand
gagauugucuuuggcuuug

SEQ ID NO: 1487146 - RNA, 19 nt, Homo sapiens
  misc_RNA (1)...(19): siRNA sense strand
gaauauugcagccuucuug

SEQ ID NO: 1487147 - RNA, 19 nt, Homo sapiens
  misc_RNA (1)...(19): siRNA sense strand
cagaaccucuucaucuuug

SEQ ID NO: 1487148 - RNA, 19 nt, Homo sapiens
  misc_RNA (1)...(19): siRNA sense strand
gcagcugccucccucuuug

SEQ ID NO: 1487149 - RNA, 19 nt, Homo sapiens
  misc_RNA (1)...(19): siRNA sense strand
ucuuugaggucuauuguaa

SEQ ID NO: 1487150 - RNA, 19 nt, Homo sapiens
  misc_RNA (1)...(19): siRNA sense strand
caaagcaccaacucaauga

SEQ ID NO: 1487151 - RNA, 19 nt, Homo sapiens
  misc_RNA (1)...(19): siRNA sense strand
ugguauaccugauucauau

SEQ ID NO: 1487152 - RNA, 19 nt, Homo sapiens
  misc_RNA (1)...(19): siRNA sense strand
gagaaagccaugacaagga

SEQ ID NO: 1487153 - RNA, 19 nt, Homo sapiens
  misc_RNA (1)...(19): siRNA sense strand
gguaguaucacauuguuug

SEQ ID NO: 1487154 - RNA, 19 nt, Homo sapiens
  misc_RNA (1)...(19): siRNA sense strand
gggaacauaacaacaguuu

SEQ ID NO: 1487155 - RNA, 19 nt, Homo sapiens
  misc_RNA (1)...(19): siRNA sense strand
ggagauugucuuuggcuuu

SEQ ID NO: 1487156 - RNA, 19 nt, Homo sapiens
  misc_RNA (1)...(19): siRNA sense strand
uuugaacccuggauaauug

SEQ ID NO: 1487157 - RNA, 19 nt, Homo sapiens
  misc_RNA (1)...(19): siRNA sense strand
gcgguaguaucacauuguu

SEQ ID NO: 1487158 - RNA, 19 nt, Homo sapiens
  misc_RNA (1)...(19): siRNA sense strand
gauccuggccuccacaaug

SEQ ID NO: 1487159 - RNA, 19 nt, Homo sapiens
  misc_RNA (1)...(19): siRNA sense strand
caauauuucgcuuuggaua

SEQ ID NO: 1487160 - RNA, 19 nt, Homo sapiens
  misc_RNA (1)...(19): siRNA sense strand
uuggauaccucccgccuuu

SEQ ID NO: 1487161 - RNA, 19 nt, Homo sapiens
  misc_RNA (1)...(19): siRNA sense strand
cccauucagugcauacuuu

SEQ ID NO: 1487162 - RNA, 19 nt, Homo sapiens
  misc_RNA (1)...(19): siRNA sense strand
cacagaaacuggccgagau

SEQ ID NO: 1487163 - RNA, 19 nt, Homo sapiens
  misc_RNA (1)...(19): siRNA sense strand
gaaaugugugcaugagaga

SEQ ID NO: 1487164 - RNA, 19 nt, Homo sapiens
  misc_RNA (1)...(19): siRNA sense strand
ccagaaccucuucaucuuu

SEQ ID NO: 1487165 - RNA, 19 nt, Homo sapiens
  misc_RNA (1)...(19): siRNA sense strand
gguacaaccugcccuacuc

SEQ ID NO: 1487166 - RNA, 19 nt, Homo sapiens
  misc_RNA (1)...(19): siRNA sense strand
ucaaaacacuggaaagguu

SEQ ID NO: 1487167 - RNA, 19 nt, Homo sapiens
  misc_RNA (1)...(19): siRNA sense strand
gaagaugcaguucaagucu

SEQ ID NO: 1487168 - RNA, 19 nt, Homo sapiens
  misc_RNA (1)...(19): siRNA sense strand
gggcaugcaaaggauauua

SEQ ID NO: 1487169 - RNA, 19 nt, Homo sapiens
  misc_RNA (1)...(19): siRNA sense strand
gagagaaagccaugacaag

SEQ ID NO: 1487170 - RNA, 19 nt, Homo sapiens
  misc_RNA (1)...(19): siRNA sense strand
ucaaagcaccaacucaaug

SEQ ID NO: 1487171 - RNA, 19 nt, Homo sapiens
  misc_RNA (1)...(19): siRNA sense strand
cuggaaagguuuggaguga

SEQ ID NO: 1487172 - RNA, 19 nt, Homo sapiens
  misc_RNA (1)...(19): siRNA sense strand
gauugucuuuggcuuugaa

SEQ ID NO: 1487173 - RNA, 19 nt, Homo sapiens
  misc_RNA (1)...(19): siRNA sense strand
uggaggagauugucuuugg

SEQ ID NO: 1487174 - RNA, 19 nt, Homo sapiens
  misc_RNA (1)...(19): siRNA sense strand
cacauuguuugcagucauu

SEQ ID NO: 1487175 - RNA, 19 nt, Homo sapiens
  misc_RNA (1)...(19): siRNA sense strand
gcagguauauuuucuuugg

SEQ ID NO: 1487176 - RNA, 19 nt, Homo sapiens
  misc_RNA (1)...(19): siRNA sense strand
gcugucgaccugaguauga

SEQ ID NO: 1487177 - RNA, 19 nt, Homo sapiens
  misc_RNA (1)...(19): siRNA sense strand
aguaugggcugaucguguu

SEQ ID NO: 1487178 - RNA, 19 nt, Homo sapiens
  misc_RNA (1)...(19): siRNA sense strand
gugguauaccugauucaua

SEQ ID NO: 1487179 - RNA, 19 nt, Homo sapiens
  misc_RNA (1)...(19): siRNA sense strand
uuugaggucuauuguaaga

SEQ ID NO: 1487180 - RNA, 19 nt, Homo sapiens
  misc_RNA (1)...(19): siRNA sense strand
uccagaaccucuucaucuu

SEQ ID NO: 1487181 - RNA, 19 nt, Homo sapiens
  misc_RNA (1)...(19): siRNA sense strand
agaugcaguucaagucuga

SEQ ID NO: 1487182 - RNA, 19 nt, Homo sapiens
  misc_RNA (1)...(19): siRNA sense strand
gcgcgguaguaucacauug

SEQ ID NO: 1487183 - RNA, 19 nt, Homo sapiens
  misc_RNA (1)...(19): siRNA sense strand
caucauguucuaccuguau

SEQ ID NO: 1487184 - RNA, 19 nt, Homo sapiens
  misc_RNA (1)...(19): siRNA sense strand
agucggcacucaucauguu

SEQ ID NO: 1487185 - RNA, 19 nt, Homo sapiens
  misc_RNA (1)...(19): siRNA sense strand
gcucaucacucuggguuuu

SEQ ID NO: 1487186 - RNA, 19 nt, Homo sapiens
  misc_RNA (1)...(19): siRNA sense strand
gaggucuauuguaagauau

SEQ ID NO: 1487187 - RNA, 19 nt, Homo sapiens
  misc_RNA (1)...(19): siRNA sense strand
guggagguguggccagaga

SEQ ID NO: 1487188 - RNA, 19 nt, Homo sapiens
  misc_RNA (1)...(19): siRNA sense strand
guauaccugauucauauug

SEQ ID NO: 1487189 - RNA, 19 nt, Homo sapiens
  misc_RNA (1)...(19): siRNA sense strand
gcacaaggaacggcucauc

SEQ ID NO: 1487190 - RNA, 19 nt, Homo sapiens
  misc_RNA (1)...(19): siRNA sense strand
agagcgaccugcugugcuu

SEQ ID NO: 1487191 - RNA, 19 nt, Homo sapiens
  misc_RNA (1)...(19): siRNA sense strand
uggcgaucguggagaagua

SEQ ID NO: 1487192 - RNA, 19 nt, Homo sapiens
  misc_RNA (1)...(19): siRNA sense strand
ucacccugcugaugcuuau

SEQ ID NO: 1487193 - RNA, 19 nt, Homo sapiens
  misc_RNA (1)...(19): siRNA sense strand
gaaggaguuuucccaguca

SEQ ID NO: 1487194 - RNA, 19 nt, Homo sapiens
  misc_RNA (1)...(19): siRNA sense strand
uuguuccucugcaauauuu

SEQ ID NO: 1487195 - RNA, 19 nt, Homo sapiens
  misc_RNA (1)...(19): siRNA sense strand
guacauccagaaccucuuc

SEQ ID NO: 1487196 - RNA, 19 nt, Homo sapiens
  misc_RNA (1)...(19): siRNA sense strand
caggauagacgagaaguca

SEQ ID NO: 1487197 - RNA, 19 nt, Homo sapiens
  misc_RNA (1)...(19): siRNA sense strand
accagaagaugcaguucaa

SEQ ID NO: 1487198 - RNA, 19 nt, Homo sapiens
  misc_RNA (1)...(19): siRNA sense strand
gaccugaguaugacaaugg

SEQ ID NO: 1487199 - RNA, 19 nt, Homo sapiens
  misc_RNA (1)...(19): siRNA sense strand
uuggauacuucauuggauu

SEQ ID NO: 1487200 - RNA, 19 nt, Homo sapiens
  misc_RNA (1)...(19): siRNA sense strand
ugcaauauuucgcuuugga

SEQ ID NO: 1487201 - RNA, 19 nt, Homo sapiens
  misc_RNA (1)...(19): siRNA sense strand
agaaguacauccagaaccu

SEQ ID NO: 1487202 - RNA, 19 nt, Homo sapiens
  misc_RNA (1)...(19): siRNA sense strand
ugagagaaagccaugacaa

SEQ ID NO: 1487203 - RNA, 19 nt, Homo sapiens
  misc_RNA (1)...(19): siRNA sense strand
ucugcaauauuucgcuuug

SEQ ID NO: 1487204 - RNA, 19 nt, Homo sapiens
  misc_RNA (1)...(19): siRNA sense strand
aggaacggcucaucacucu

SEQ ID NO: 1487205 - RNA, 19 nt, Homo sapiens
  misc_RNA (1)...(19): siRNA sense strand
cagaagaugcaguucaagu

SEQ ID NO: 1487206 - RNA, 19 nt, Homo sapiens
  misc_RNA (1)...(19): siRNA sense strand
gccaucagcaccagaagau

SEQ ID NO: 1487207 - RNA, 19 nt, Homo sapiens
  misc_RNA (1)...(19): siRNA sense strand
uugcugugguggugguaua

SEQ ID NO: 1487208 - RNA, 19 nt, Homo sapiens
  misc_RNA (1)...(19): siRNA sense strand
ucacauuguuugcagucau

SEQ ID NO: 1487209 - RNA, 19 nt, Homo sapiens
  misc_RNA (1)...(19): siRNA sense strand
gcaauauuucgcuuuggau

SEQ ID NO: 1487210 - RNA, 19 nt, Homo sapiens
  misc_RNA (1)...(19): siRNA sense strand
ggagguguggccagagaug

SEQ ID NO: 1487211 - RNA, 19 nt, Homo sapiens
  misc_RNA (1)...(19): siRNA sense strand
cggcacucaucauguucua

SEQ ID NO: 1487212 - RNA, 19 nt, Homo sapiens
  misc_RNA (1)...(19): siRNA sense strand
ggauaauuguggucaaccu

SEQ ID NO: 1487213 - RNA, 19 nt, Homo sapiens
  misc_RNA (1)...(19): siRNA sense strand
agucaaagcaccaacucaa

SEQ ID NO: 1487214 - RNA, 19 nt, Homo sapiens
  misc_RNA (1)...(19): siRNA sense strand
uauugcagccuucuuguuc

SEQ ID NO: 1487215 - RNA, 19 nt, Homo sapiens
  misc_RNA (1)...(19): siRNA sense strand
ggaauauugcagccuucuu

SEQ ID NO: 1487216 - RNA, 19 nt, Homo sapiens
  misc_RNA (1)...(19): siRNA sense strand
ggagaaguacauccagaac

SEQ ID NO: 1487217 - RNA, 19 nt, Homo sapiens
  misc_RNA (1)...(19): siRNA sense strand
gcaaaguugacagccauca

SEQ ID NO: 1487218 - RNA, 19 nt, Homo sapiens
  misc_RNA (1)...(19): siRNA sense strand
ggauaccucccgccuuugg

SEQ ID NO: 1487219 - RNA, 19 nt, Homo sapiens
  misc_RNA (1)...(19): siRNA sense strand
ggauagacgagaagucacu

SEQ ID NO: 1487220 - RNA, 19 nt, Homo sapiens
  misc_RNA (1)...(19): siRNA sense strand
guggugguauaccugauuc

SEQ ID NO: 1487221 - RNA, 19 nt, Homo sapiens
  misc_RNA (1)...(19): siRNA sense strand
ggcaugcaaaggauauuau

SEQ ID NO: 1487222 - RNA, 19 nt, Homo sapiens
  misc_RNA (1)...(19): siRNA sense strand
gauuggaggagauugucuu

SEQ ID NO: 1487223 - RNA, 19 nt, Homo sapiens
  misc_RNA (1)...(19): siRNA sense strand
acaaggaggaggagaagca

SEQ ID NO: 1487224 - RNA, 19 nt, Homo sapiens
  misc_RNA (1)...(19): siRNA sense strand
uggcugcgcgguaguauca

SEQ ID NO: 1487225 - RNA, 19 nt, Homo sapiens
  misc_RNA (1)...(19): siRNA sense strand
caccagcagccaauggaaa

SEQ ID NO: 1487226 - RNA, 19 nt, Homo sapiens
  misc_RNA (1)...(19): siRNA sense strand
gguggugguauaccugauu

SEQ ID NO: 1487227 - RNA, 19 nt, Homo sapiens
  misc_RNA (1)...(19): siRNA sense strand
cgaccugaguaugacaaug

SEQ ID NO: 1487228 - RNA, 19 nt, Homo sapiens
  misc_RNA (1)...(19): siRNA sense strand
cacaaggaacggcucauca

SEQ ID NO: 1487229 - RNA, 19 nt, Homo sapiens
  misc_RNA (1)...(19): siRNA sense strand
gcuuugaacccuggauaau

SEQ ID NO: 1487230 - RNA, 19 nt, Homo sapiens
  misc_RNA (1)...(19): siRNA sense strand
aaucuuggccauccucugu

SEQ ID NO: 1487231 - RNA, 19 nt, Homo sapiens
  misc_RNA (1)...(19): siRNA sense strand
gguauaccugauucauauu

SEQ ID NO: 1487232 - RNA, 19 nt, Homo sapiens
  misc_RNA (1)...(19): siRNA sense strand
ccuucaacauagaguauca

SEQ ID NO: 1487233 - RNA, 19 nt, Homo sapiens
  misc_RNA (1)...(19): siRNA sense strand
gucaaagcaccaacucaau

SEQ ID NO: 1487234 - RNA, 19 nt, Homo sapiens
  misc_RNA (1)...(19): siRNA sense strand
ggcuuugaacccuggauaa

SEQ ID NO: 1487235 - RNA, 19 nt, Homo sapiens
  misc_RNA (1)...(19): siRNA sense strand
gcugcgcgguaguaucaca

SEQ ID NO: 1487236 - RNA, 19 nt, Homo sapiens
  misc_RNA (1)...(19): siRNA sense strand
ugcuguggaugcuguggua

SEQ ID NO: 1487237 - RNA, 19 nt, Homo sapiens
  misc_RNA (1)...(19): siRNA sense strand
gaacaaauaugaggaugaa

SEQ ID NO: 1487238 - RNA, 19 nt, Homo sapiens
  misc_RNA (1)...(19): siRNA sense strand
ggaagcagcuacuccuaug

SEQ ID NO: 1487239 - RNA, 19 nt, Homo sapiens
  misc_RNA (1)...(19): siRNA sense strand
ucaagacccucaacaacaa

SEQ ID NO: 1487240 - RNA, 19 nt, Homo sapiens
  misc_RNA (1)...(19): siRNA sense strand
gcacagcagcagagaauga

SEQ ID NO: 1487241 - RNA, 19 nt, Homo sapiens
  misc_RNA (1)...(19): siRNA sense strand
gcaguuccaccaucaagua

SEQ ID NO: 1487242 - RNA, 19 nt, Homo sapiens
  misc_RNA (1)...(19): siRNA sense strand
gcagagaaugaauuuguga

SEQ ID NO: 1487243 - RNA, 19 nt, Homo sapiens
  misc_RNA (1)...(19): siRNA sense strand
gaagaaggauguggaugcu

SEQ ID NO: 1487244 - RNA, 19 nt, Homo sapiens
  misc_RNA (1)...(19): siRNA sense strand
ggagauugcugagaucaac

SEQ ID NO: 1487245 - RNA, 19 nt, Homo sapiens
  misc_RNA (1)...(19): siRNA sense strand
cagcagagaaugaauuugu

SEQ ID NO: 1487246 - RNA, 19 nt, Homo sapiens
  misc_RNA (1)...(19): siRNA sense strand
caucaucgcugaggucaag

SEQ ID NO: 1487247 - RNA, 19 nt, Homo sapiens
  misc_RNA (1)...(19): siRNA sense strand
gaucaagacccucaacaac

SEQ ID NO: 1487248 - RNA, 19 nt, Homo sapiens
  misc_RNA (1)...(19): siRNA sense strand
gcaguggucuuggcauugg

SEQ ID NO: 1487249 - RNA, 19 nt, Homo sapiens
  misc_RNA (1)...(19): siRNA sense strand
gcaggagauugcugagauc

SEQ ID NO: 1487250 - RNA, 19 nt, Homo sapiens
  misc_RNA (1)...(19): siRNA sense strand
gcgcacagcagcagagaau

SEQ ID NO: 1487251 - RNA, 19 nt, Homo sapiens
  misc_RNA (1)...(19): siRNA sense strand
caaauaugaggaugaaauc

SEQ ID NO: 1487252 - RNA, 19 nt, Homo sapiens
  misc_RNA (1)...(19): siRNA sense strand
agaaugaauuugugacucu

SEQ ID NO: 1487253 - RNA, 19 nt, Homo sapiens
  misc_RNA (1)...(19): siRNA sense strand
gcugagaucaaccgcauga

SEQ ID NO: 1487254 - RNA, 19 nt, Homo sapiens
  misc_RNA (1)...(19): siRNA sense strand
ccaagacugugaggcagaa

SEQ ID NO: 1487255 - RNA, 19 nt, Homo sapiens
  misc_RNA (1)...(19): siRNA sense strand
gaauuugugacucugaaga

SEQ ID NO: 1487256 - RNA, 19 nt, Homo sapiens
  misc_RNA (1)...(19): siRNA sense strand
acaacaaguuugccuccuu

SEQ ID NO: 1487257 - RNA, 19 nt, Homo sapiens
  misc_RNA (1)...(19): siRNA sense strand
augcagagcugucccagau

SEQ ID NO: 1487258 - RNA, 19 nt, Homo sapiens
  misc_RNA (1)...(19): siRNA sense strand
caaguuugccuccuucauc

SEQ ID NO: 1487259 - RNA, 19 nt, Homo sapiens
  misc_RNA (1)...(19): siRNA sense strand
cgaaggcauuggacaaguc

SEQ ID NO: 1487260 - RNA, 19 nt, Homo sapiens
  misc_RNA (1)...(19): siRNA sense strand
gaugcugccuacaugaaca

SEQ ID NO: 1487261 - RNA, 19 nt, Homo sapiens
  misc_RNA (1)...(19): siRNA sense strand
uccaagaggucacugucaa

SEQ ID NO: 1487262 - RNA, 19 nt, Homo sapiens
  misc_RNA (1)...(19): siRNA sense strand
gaggagugcaggcugaaug

SEQ ID NO: 1487263 - RNA, 19 nt, Homo sapiens
  misc_RNA (1)...(19): siRNA sense strand
cagcagcagagaaugaauu

SEQ ID NO: 1487264 - RNA, 19 nt, Homo sapiens
  misc_RNA (1)...(19): siRNA sense strand
caagaacaaauaugaggau

SEQ ID NO: 1487265 - RNA, 19 nt, Homo sapiens
  misc_RNA (1)...(19): siRNA sense strand
cggccuugcugguggcuuu

SEQ ID NO: 1487266 - RNA, 19 nt, Homo sapiens
  misc_RNA (1)...(19): siRNA sense strand
gaaggcauuggacaaguca

SEQ ID NO: 1487267 - RNA, 19 nt, Homo sapiens
  misc_RNA (1)...(19): siRNA sense strand
gcgaaggcauuggacaagu

SEQ ID NO: 1487268 - RNA, 19 nt, Homo sapiens
  misc_RNA (1)...(19): siRNA sense strand
acacauccguggugcuauc

SEQ ID NO: 1487269 - RNA, 19 nt, Homo sapiens
  misc_RNA (1)...(19): siRNA sense strand
uggcaguggucuuggcauu

SEQ ID NO: 1487270 - RNA, 19 nt, Homo sapiens
  misc_RNA (1)...(19): siRNA sense strand
cagaggcagcuauggcuuu

SEQ ID NO: 1487271 - RNA, 19 nt, Homo sapiens
  misc_RNA (1)...(19): siRNA sense strand
gagcgugagcagaucaaga

SEQ ID NO: 1487272 - RNA, 19 nt, Homo sapiens
  misc_RNA (1)...(19): siRNA sense strand
agacacauccguggugcua

SEQ ID NO: 1487273 - RNA, 19 nt, Homo sapiens
  misc_RNA (1)...(19): siRNA sense strand
gcacauccaccaccaucag

SEQ ID NO: 1487274 - RNA, 19 nt, Homo sapiens
  misc_RNA (1)...(19): siRNA sense strand
gacccucaacaacaaguuu

SEQ ID NO: 1487275 - RNA, 19 nt, Homo sapiens
  misc_RNA (1)...(19): siRNA sense strand
ggaccuggacagcaucauc

SEQ ID NO: 1487276 - RNA, 19 nt, Homo sapiens
  misc_RNA (1)...(19): siRNA sense strand
uguggaugcugccuacaug

SEQ ID NO: 1487277 - RNA, 19 nt, Homo sapiens
  misc_RNA (1)...(19): siRNA sense strand
agaggcagcuauggcuuug

SEQ ID NO: 1487278 - RNA, 19 nt, Homo sapiens
  misc_RNA (1)...(19): siRNA sense strand
uccaagaggaucuccauug

SEQ ID NO: 1487279 - RNA, 19 nt, Homo sapiens
  misc_RNA (1)...(19): siRNA sense strand
caacaccaagcaggagauu

SEQ ID NO: 1487280 - RNA, 19 nt, Homo sapiens
  misc_RNA (1)...(19): siRNA sense strand
gggaguggauuugguuucg

SEQ ID NO: 1487281 - RNA, 19 nt, Homo sapiens
  misc_RNA (1)...(19): siRNA sense strand
ggcggcaguuccaccauca

SEQ ID NO: 1487282 - RNA, 19 nt, Homo sapiens
  misc_RNA (1)...(19): siRNA sense strand
agaacaaauaugaggauga

SEQ ID NO: 1487283 - RNA, 19 nt, Homo sapiens
  misc_RNA (1)...(19): siRNA sense strand
ccgaggagcgugagcagau

SEQ ID NO: 1487284 - RNA, 19 nt, Homo sapiens
  misc_RNA (1)...(19): siRNA sense strand
cgacaaggugcgguuccua

SEQ ID NO: 1487285 - RNA, 19 nt, Homo sapiens
  misc_RNA (1)...(19): siRNA sense strand
uagagcagcagaacaaggu

SEQ ID NO: 1487286 - RNA, 19 nt, Homo sapiens
  misc_RNA (1)...(19): siRNA sense strand
gcaacaccaagcaggagau

SEQ ID NO: 1487287 - RNA, 19 nt, Homo sapiens
  misc_RNA (1)...(19): siRNA sense strand
caccaucuccaguggcuau

SEQ ID NO: 1487288 - RNA, 19 nt, Homo sapiens
  misc_RNA (1)...(19): siRNA sense strand
cccggcugcugaaggagua

SEQ ID NO: 1487289 - RNA, 19 nt, Homo sapiens
  misc_RNA (1)...(19): siRNA sense strand
gcaaauauaucgagaacca

SEQ ID NO: 1487290 - RNA, 19 nt, Homo sapiens
  misc_RNA (1)...(19): siRNA sense strand
gaauuaacguccaguucaa

SEQ ID NO: 1487291 - RNA, 19 nt, Homo sapiens
  misc_RNA (1)...(19): siRNA sense strand
gagcgaacaucgacacagu

SEQ ID NO: 1487292 - RNA, 19 nt, Homo sapiens
  misc_RNA (1)...(19): siRNA sense strand
ggaugcugcucccuaaaga

SEQ ID NO: 1487293 - RNA, 19 nt, Homo sapiens
  misc_RNA (1)...(19): siRNA sense strand
gagcaccgguacaaaguca

SEQ ID NO: 1487294 - RNA, 19 nt, Homo sapiens
  misc_RNA (1)...(19): siRNA sense strand
gagcacggcuuugacaaca

SEQ ID NO: 1487295 - RNA, 19 nt, Homo sapiens
  misc_RNA (1)...(19): siRNA sense strand
gcacggcuuugacaacaag

SEQ ID NO: 1487296 - RNA, 19 nt, Homo sapiens
  misc_RNA (1)...(19): siRNA sense strand
acacagugauggcgugguu

SEQ ID NO: 1487297 - RNA, 19 nt, Homo sapiens
  misc_RNA (1)...(19): siRNA sense strand
aguuugagcuccuggacua

SEQ ID NO: 1487298 - RNA, 19 nt, Homo sapiens
  misc_RNA (1)...(19): siRNA sense strand
ggccaacgaugggcaccua

SEQ ID NO: 1487299 - RNA, 19 nt, Homo sapiens
  misc_RNA (1)...(19): siRNA sense strand
gagaauuaacguccaguuc

SEQ ID NO: 1487300 - RNA, 19 nt, Homo sapiens
  misc_RNA (1)...(19): siRNA sense strand
gcgaacaucgacacaguga

SEQ ID NO: 1487301 - RNA, 19 nt, Homo sapiens
  misc_RNA (1)...(19): siRNA sense strand
ggugaaggcacgcuacaug

SEQ ID NO: 1487302 - RNA, 19 nt, Homo sapiens
  misc_RNA (1)...(19): siRNA sense strand
agucagggcucccagaaca

SEQ ID NO: 1487303 - RNA, 19 nt, Homo sapiens
  misc_RNA (1)...(19): siRNA sense strand
gguguacgaugcccucaag

SEQ ID NO: 1487304 - RNA, 19 nt, Homo sapiens
  misc_RNA (1)...(19): siRNA sense strand
cgucauccaugggagaauu

SEQ ID NO: 1487305 - RNA, 19 nt, Homo sapiens
  misc_RNA (1)...(19): siRNA sense strand
gugaaggcacgcuacauga

SEQ ID NO: 1487306 - RNA, 19 nt, Homo sapiens
  misc_RNA (1)...(19): siRNA sense strand
aagaaggcaucgcacacaa

SEQ ID NO: 1487307 - RNA, 19 nt, Homo sapiens
  misc_RNA (1)...(19): siRNA sense strand
agaauuaacguccaguuca

SEQ ID NO: 1487308 - RNA, 19 nt, Homo sapiens
  misc_RNA (1)...(19): siRNA sense strand
ucacaccccugcugaugua

SEQ ID NO: 1487309 - RNA, 19 nt, Homo sapiens
  misc_RNA (1)...(19): siRNA sense strand
ggagaauuaacguccaguu

SEQ ID NO: 1487310 - RNA, 19 nt, Homo sapiens
  misc_RNA (1)...(19): siRNA sense strand
gaaggcaucgcacacaacu

SEQ ID NO: 1487311 - RNA, 19 nt, Homo sapiens
  misc_RNA (1)...(19): siRNA sense strand
cuggcgaccugguugaauu

SEQ ID NO: 1487312 - RNA, 19 nt, Homo sapiens
  misc_RNA (1)...(19): siRNA sense strand
cggcaaauauaucgagaac

SEQ ID NO: 1487313 - RNA, 19 nt, Homo sapiens
  misc_RNA (1)...(19): siRNA sense strand
uaacguccaguucaacaau

SEQ ID NO: 1487314 - RNA, 19 nt, Homo sapiens
  misc_RNA (1)...(19): siRNA sense strand
gcgggaacgucaccuacca

SEQ ID NO: 1487315 - RNA, 19 nt, Homo sapiens
  misc_RNA (1)...(19): siRNA sense strand
gcaugacgaccguggacaa

SEQ ID NO: 1487316 - RNA, 19 nt, Homo sapiens
  misc_RNA (1)...(19): siRNA sense strand
gaccgugauucuucugucu

SEQ ID NO: 1487317 - RNA, 19 nt, Homo sapiens
  misc_RNA (1)...(19): siRNA sense strand
aagggaggcuggagaaggu

SEQ ID NO: 1487318 - RNA, 19 nt, Homo sapiens
  misc_RNA (1)...(19): siRNA sense strand
gagguggagcccuuugaga

SEQ ID NO: 1487319 - RNA, 19 nt, Homo sapiens
  misc_RNA (1)...(19): siRNA sense strand
gcugugggcccuagcuuca

SEQ ID NO: 1487320 - RNA, 19 nt, Homo sapiens
  misc_RNA (1)...(19): siRNA sense strand
ccuggucaccggcaaauau

SEQ ID NO: 1487321 - RNA, 19 nt, Homo sapiens
  misc_RNA (1)...(19): siRNA sense strand
caucgcacacaacuacaaa

SEQ ID NO: 1487322 - RNA, 19 nt, Homo sapiens
  misc_RNA (1)...(19): siRNA sense strand
ccgugauucuucugucuga

SEQ ID NO: 1487323 - RNA, 19 nt, Homo sapiens
  misc_RNA (1)...(19): siRNA sense strand
uccgggacaucgaguuuga

SEQ ID NO: 1487324 - RNA, 19 nt, Homo sapiens
  misc_RNA (1)...(19): siRNA sense strand
gcaucgcacacaacuacaa

SEQ ID NO: 1487325 - RNA, 19 nt, Homo sapiens
  misc_RNA (1)...(19): siRNA sense strand
ugguugaauuccacaaguu

SEQ ID NO: 1487326 - RNA, 19 nt, Homo sapiens
  misc_RNA (1)...(19): siRNA sense strand
ugacgaccguggacaaacg

SEQ ID NO: 1487327 - RNA, 19 nt, Homo sapiens
  misc_RNA (1)...(19): siRNA sense strand
gcagcgugcccaucuggau

SEQ ID NO: 1487328 - RNA, 19 nt, Homo sapiens
  misc_RNA (1)...(19): siRNA sense strand
aaagucagggcucccagaa

SEQ ID NO: 1487329 - RNA, 19 nt, Homo sapiens
  misc_RNA (1)...(19): siRNA sense strand
ggucaccggcaaauauauc

SEQ ID NO: 1487330 - RNA, 19 nt, Homo sapiens
  misc_RNA (1)...(19): siRNA sense strand
gggcuggcuccuucuucua

SEQ ID NO: 1487331 - RNA, 19 nt, Homo sapiens
  misc_RNA (1)...(19): siRNA sense strand
gaugcugcucccuaaagaa

SEQ ID NO: 1487332 - RNA, 19 nt, Homo sapiens
  misc_RNA (1)...(19): siRNA sense strand
aaagaaggcaucgcacaca

SEQ ID NO: 1487333 - RNA, 19 nt, Homo sapiens
  misc_RNA (1)...(19): siRNA sense strand
uugagagcguccacgugua

SEQ ID NO: 1487334 - RNA, 19 nt, Homo sapiens
  misc_RNA (1)...(19): siRNA sense strand
aagaagggaggcuggagaa

SEQ ID NO: 1487335 - RNA, 19 nt, Homo sapiens
  misc_RNA (1)...(19): siRNA sense strand
gguugaauuccacaaguuc

SEQ ID NO: 1487336 - RNA, 19 nt, Homo sapiens
  misc_RNA (1)...(19): siRNA sense strand
ggagcacggcuuugacaac

SEQ ID NO: 1487337 - RNA, 19 nt, Homo sapiens
  misc_RNA (1)...(19): siRNA sense strand
ggaggcuggagaaggugua

SEQ ID NO: 1487338 - RNA, 19 nt, Homo sapiens
  misc_RNA (1)...(19): siRNA sense strand
caaagaaggugaagucaga

SEQ ID NO: 1487339 - RNA, 19 nt, Homo sapiens
  misc_RNA (1)...(19): siRNA sense strand
gcgacuaugugaauuguua

SEQ ID NO: 1487340 - RNA, 19 nt, Homo sapiens
  misc_RNA (1)...(19): siRNA sense strand
gaugaugccuuaacuguga

SEQ ID NO: 1487341 - RNA, 19 nt, Homo sapiens
  misc_RNA (1)...(19): siRNA sense strand
gaaaugaucccagaaagaa

SEQ ID NO: 1487342 - RNA, 19 nt, Homo sapiens
  misc_RNA (1)...(19): siRNA sense strand
ccacagaagucaccgauga

SEQ ID NO: 1487343 - RNA, 19 nt, Homo sapiens
  misc_RNA (1)...(19): siRNA sense strand
gagaaagauuugcuacauu

SEQ ID NO: 1487344 - RNA, 19 nt, Homo sapiens
  misc_RNA (1)...(19): siRNA sense strand
acugagaggucuaauauaa

SEQ ID NO: 1487345 - RNA, 19 nt, Homo sapiens
  misc_RNA (1)...(19): siRNA sense strand
ggaggaaucugaugugucu

SEQ ID NO: 1487346 - RNA, 19 nt, Homo sapiens
  misc_RNA (1)...(19): siRNA sense strand
cgaaauuucuucaguuaug

SEQ ID NO: 1487347 - RNA, 19 nt, Homo sapiens
  misc_RNA (1)...(19): siRNA sense strand
agaaagugauggaugauuu

SEQ ID NO: 1487348 - RNA, 19 nt, Homo sapiens
  misc_RNA (1)...(19): siRNA sense strand
ggaaauucaccaagcuaua

SEQ ID NO: 1487349 - RNA, 19 nt, Homo sapiens
  misc_RNA (1)...(19): siRNA sense strand
ucaccaagcuauacugaga

SEQ ID NO: 1487350 - RNA, 19 nt, Homo sapiens
  misc_RNA (1)...(19): siRNA sense strand
acaaauggguugccugaga

SEQ ID NO: 1487351 - RNA, 19 nt, Homo sapiens
  misc_RNA (1)...(19): siRNA sense strand
agaaagauuugcuacauuc

SEQ ID NO: 1487352 - RNA, 19 nt, Homo sapiens
  misc_RNA (1)...(19): siRNA sense strand
gaaggaaagaauacugaaa

SEQ ID NO: 1487353 - RNA, 19 nt, Homo sapiens
  misc_RNA (1)...(19): siRNA sense strand
gagaaaugaucccagaaag

SEQ ID NO: 1487354 - RNA, 19 nt, Homo sapiens
  misc_RNA (1)...(19): siRNA sense strand
gauccaaggagaaacuaua

SEQ ID NO: 1487355 - RNA, 19 nt, Homo sapiens
  misc_RNA (1)...(19): siRNA sense strand
aggaggcgcugaaagauuu

SEQ ID NO: 1487356 - RNA, 19 nt, Homo sapiens
  misc_RNA (1)...(19): siRNA sense strand
gaaaugaaggaaagaauac

SEQ ID NO: 1487357 - RNA, 19 nt, Homo sapiens
  misc_RNA (1)...(19): siRNA sense strand
gagaaacuauacaggaaca

SEQ ID NO: 1487358 - RNA, 19 nt, Homo sapiens
  misc_RNA (1)...(19): siRNA sense strand
uaacagauccaaggagaaa

SEQ ID NO: 1487359 - RNA, 19 nt, Homo sapiens
  misc_RNA (1)...(19): siRNA sense strand
agaagaggaugaagaggaa

SEQ ID NO: 1487360 - RNA, 19 nt, Homo sapiens
  misc_RNA (1)...(19): siRNA sense strand
caaacgacuuccagcgaaa

SEQ ID NO: 1487361 - RNA, 19 nt, Homo sapiens
  misc_RNA (1)...(19): siRNA sense strand
ggaugaagaggaagaagaa

SEQ ID NO: 1487362 - RNA, 19 nt, Homo sapiens
  misc_RNA (1)...(19): siRNA sense strand
gaaggugaagucagagaaa

SEQ ID NO: 1487363 - RNA, 19 nt, Homo sapiens
  misc_RNA (1)...(19): siRNA sense strand
agaaucugaugaugccuua

SEQ ID NO: 1487364 - RNA, 19 nt, Homo sapiens
  misc_RNA (1)...(19): siRNA sense strand
guacagaagaggaugaaga

SEQ ID NO: 1487365 - RNA, 19 nt, Homo sapiens
  misc_RNA (1)...(19): siRNA sense strand
cagcgaaauuucuucaguu

SEQ ID NO: 1487366 - RNA, 19 nt, Homo sapiens
  misc_RNA (1)...(19): siRNA sense strand
uggagaaagugauggauga

SEQ ID NO: 1487367 - RNA, 19 nt, Homo sapiens
  misc_RNA (1)...(19): siRNA sense strand
ugagaaagauuugcuacau

SEQ ID NO: 1487368 - RNA, 19 nt, Homo sapiens
  misc_RNA (1)...(19): siRNA sense strand
gaaugaaugguguuauguu

SEQ ID NO: 1487369 - RNA, 19 nt, Homo sapiens
  misc_RNA (1)...(19): siRNA sense strand
ucagaaguuuccucaguga

SEQ ID NO: 1487370 - RNA, 19 nt, Homo sapiens
  misc_RNA (1)...(19): siRNA sense strand
uacaggaacagacaaauuu

SEQ ID NO: 1487371 - RNA, 19 nt, Homo sapiens
  misc_RNA (1)...(19): siRNA sense strand
cuggagagauucuuucaga

SEQ ID NO: 1487372 - RNA, 19 nt, Homo sapiens
  misc_RNA (1)...(19): siRNA sense strand
ugacugccgugaaacagaa

SEQ ID NO: 1487373 - RNA, 19 nt, Homo sapiens
  misc_RNA (1)...(19): siRNA sense strand
gaaauuucuucaguuaugg

SEQ ID NO: 1487374 - RNA, 19 nt, Homo sapiens
  misc_RNA (1)...(19): siRNA sense strand
ggagaaacaaugauucagu

SEQ ID NO: 1487375 - RNA, 19 nt, Homo sapiens
  misc_RNA (1)...(19): siRNA sense strand
ccgugaaacagaagaauua

SEQ ID NO: 1487376 - RNA, 19 nt, Homo sapiens
  misc_RNA (1)...(19): siRNA sense strand
cagaagaggaugaagaaga

SEQ ID NO: 1487377 - RNA, 19 nt, Homo sapiens
  misc_RNA (1)...(19): siRNA sense strand
agcgaaauuucuucaguua

SEQ ID NO: 1487378 - RNA, 19 nt, Homo sapiens
  misc_RNA (1)...(19): siRNA sense strand
gaaauucaccaagcuauac

SEQ ID NO: 1487379 - RNA, 19 nt, Homo sapiens
  misc_RNA (1)...(19): siRNA sense strand
auucaguggucccaauuua

SEQ ID NO: 1487380 - RNA, 19 nt, Homo sapiens
  misc_RNA (1)...(19): siRNA sense strand
aagauuugcuacauucuga

SEQ ID NO: 1487381 - RNA, 19 nt, Homo sapiens
  misc_RNA (1)...(19): siRNA sense strand
agaugaagaugcuguggaa

SEQ ID NO: 1487382 - RNA, 19 nt, Homo sapiens
  misc_RNA (1)...(19): siRNA sense strand
guuguuagcuguguuuauc

SEQ ID NO: 1487383 - RNA, 19 nt, Homo sapiens
  misc_RNA (1)...(19): siRNA sense strand
gucacuggauuuaauggua

SEQ ID NO: 1487384 - RNA, 19 nt, Homo sapiens
  misc_RNA (1)...(19): siRNA sense strand
aaucagaaguuuccucagu

SEQ ID NO: 1487385 - RNA, 19 nt, Homo sapiens
  misc_RNA (1)...(19): siRNA sense strand
cgaaggcccuguaaguagu

SEQ ID NO: 1487386 - RNA, 19 nt, Homo sapiens
  misc_RNA (1)...(19): siRNA sense strand
aaacgaaggcccuguaagu

SEQ ID NO: 1487387 - RNA, 19 nt, Homo sapiens
  misc_RNA (1)...(19): siRNA sense strand
ucacuggauuuaaugguau

SEQ ID NO: 1487388 - RNA, 19 nt, Homo sapiens
  misc_RNA (1)...(19): siRNA sense strand
gaaacagccagucaaacga

SEQ ID NO: 1487389 - RNA, 19 nt, Homo sapiens
  misc_RNA (1)...(19): siRNA sense strand
ucaguggucccaauuuaaa

SEQ ID NO: 1487390 - RNA, 19 nt, Homo sapiens
  misc_RNA (1)...(19): siRNA sense strand
agaagaggaugaagaagag

SEQ ID NO: 1487391 - RNA, 19 nt, Homo sapiens
  misc_RNA (1)...(19): siRNA sense strand
caggauaaagacaaagaua

SEQ ID NO: 1487392 - RNA, 19 nt, Homo sapiens
  misc_RNA (1)...(19): siRNA sense strand
ucgaaugaaugguguuaug

SEQ ID NO: 1487393 - RNA, 19 nt, Homo sapiens
  misc_RNA (1)...(19): siRNA sense strand
ucagaaucauccauggaaa

SEQ ID NO: 1487394 - RNA, 19 nt, Homo sapiens
  misc_RNA (1)...(19): siRNA sense strand
ugacaaagaaggugaaguc

SEQ ID NO: 1487395 - RNA, 19 nt, Homo sapiens
  misc_RNA (1)...(19): siRNA sense strand
aggagaaacuauacaggaa

SEQ ID NO: 1487396 - RNA, 19 nt, Homo sapiens
  misc_RNA (1)...(19): siRNA sense strand
ggacacccaggccacuuaa

SEQ ID NO: 1487397 - RNA, 19 nt, Homo sapiens
  misc_RNA (1)...(19): siRNA sense strand
gaaacuauacaggaacaga

SEQ ID NO: 1487398 - RNA, 19 nt, Homo sapiens
  misc_RNA (1)...(19): siRNA sense strand
gauuuaaugguaucccuuu

SEQ ID NO: 1487399 - RNA, 19 nt, Homo sapiens
  misc_RNA (1)...(19): siRNA sense strand
gaaggcccuguaaguagua

SEQ ID NO: 1487400 - RNA, 19 nt, Homo sapiens
  misc_RNA (1)...(19): siRNA sense strand
auacugagaggucuaauau

SEQ ID NO: 1487401 - RNA, 19 nt, Homo sapiens
  misc_RNA (1)...(19): siRNA sense strand
agugauggaugauuucaga

SEQ ID NO: 1487402 - RNA, 19 nt, Homo sapiens
  misc_RNA (1)...(19): siRNA sense strand
cggcagcacuguacagaag

SEQ ID NO: 1487403 - RNA, 19 nt, Homo sapiens
  misc_RNA (1)...(19): siRNA sense strand
ccagcgaaauuucuucagu

SEQ ID NO: 1487404 - RNA, 19 nt, Homo sapiens
  misc_RNA (1)...(19): siRNA sense strand
gggacacccaggccacuua

SEQ ID NO: 1487405 - RNA, 19 nt, Homo sapiens
  misc_RNA (1)...(19): siRNA sense strand
gaaacagaagcaucaucuu

SEQ ID NO: 1487406 - RNA, 19 nt, Homo sapiens
  misc_RNA (1)...(19): siRNA sense strand
ugacgaagccacagaaguc

SEQ ID NO: 1487407 - RNA, 19 nt, Homo sapiens
  misc_RNA (1)...(19): siRNA sense strand
ggaacagacaaauuucuca

SEQ ID NO: 1487408 - RNA, 19 nt, Homo sapiens
  misc_RNA (1)...(19): siRNA sense strand
gagaaagugauggaugauu

SEQ ID NO: 1487409 - RNA, 19 nt, Homo sapiens
  misc_RNA (1)...(19): siRNA sense strand
uaaguaguaguucuucuga

SEQ ID NO: 1487410 - RNA, 19 nt, Homo sapiens
  misc_RNA (1)...(19): siRNA sense strand
ucaguuucuuugucaugua

SEQ ID NO: 1487411 - RNA, 19 nt, Homo sapiens
  misc_RNA (1)...(19): siRNA sense strand
gcugaaagauuuugagaag

SEQ ID NO: 1487412 - RNA, 19 nt, Homo sapiens
  misc_RNA (1)...(19): siRNA sense strand
gaaacagaagaauuaguag

SEQ ID NO: 1487413 - RNA, 19 nt, Homo sapiens
  misc_RNA (1)...(19): siRNA sense strand
agagaaaugaucccagaaa

SEQ ID NO: 1487414 - RNA, 19 nt, Homo sapiens
  misc_RNA (1)...(19): siRNA sense strand
caucuucaucucaggauaa

SEQ ID NO: 1487415 - RNA, 19 nt, Homo sapiens
  misc_RNA (1)...(19): siRNA sense strand
gauggaugauuucagaacu

SEQ ID NO: 1487416 - RNA, 19 nt, Homo sapiens
  misc_RNA (1)...(19): siRNA sense strand
agaaugugaugguuguuag

SEQ ID NO: 1487417 - RNA, 19 nt, Homo sapiens
  misc_RNA (1)...(19): siRNA sense strand
agaaaugaucccagaaaga

SEQ ID NO: 1487418 - RNA, 19 nt, Homo sapiens
  misc_RNA (1)...(19): siRNA sense strand
agagaaacagccagucaaa

SEQ ID NO: 1487419 - RNA, 19 nt, Homo sapiens
  misc_RNA (1)...(19): siRNA sense strand
uggaucaguuucuuuguca

SEQ ID NO: 1487420 - RNA, 19 nt, Homo sapiens
  misc_RNA (1)...(19): siRNA sense strand
gagcacagacagcaaagag

SEQ ID NO: 1487421 - RNA, 19 nt, Homo sapiens
  misc_RNA (1)...(19): siRNA sense strand
gaugaaaugaaggaaagaa

SEQ ID NO: 1487422 - RNA, 19 nt, Homo sapiens
  misc_RNA (1)...(19): siRNA sense strand
gaucaguuucuuugucaug

SEQ ID NO: 1487423 - RNA, 19 nt, Homo sapiens
  misc_RNA (1)...(19): siRNA sense strand
ccuuaacugugaaugaaga

SEQ ID NO: 1487424 - RNA, 19 nt, Homo sapiens
  misc_RNA (1)...(19): siRNA sense strand
uacagaagaggaugaagaa

SEQ ID NO: 1487425 - RNA, 19 nt, Homo sapiens
  misc_RNA (1)...(19): siRNA sense strand
guaaguaguaguucuucug

SEQ ID NO: 1487426 - RNA, 19 nt, Homo sapiens
  misc_RNA (1)...(19): siRNA sense strand
gaaaacgaaggcccuguaa

SEQ ID NO: 1487427 - RNA, 19 nt, Homo sapiens
  misc_RNA (1)...(19): siRNA sense strand
ggaaucugaugugucucaa

SEQ ID NO: 1487428 - RNA, 19 nt, Homo sapiens
  misc_RNA (1)...(19): siRNA sense strand
auaaucaaauggaggaauc

SEQ ID NO: 1487429 - RNA, 19 nt, Homo sapiens
  misc_RNA (1)...(19): siRNA sense strand
ugccuuaacugugaaugaa

SEQ ID NO: 1487430 - RNA, 19 nt, Homo sapiens
  misc_RNA (1)...(19): siRNA sense strand
ugaagaagaggaugaagag

SEQ ID NO: 1487431 - RNA, 19 nt, Homo sapiens
  misc_RNA (1)...(19): siRNA sense strand
guguuuauccuucuucaga

SEQ ID NO: 1487432 - RNA, 19 nt, Homo sapiens
  misc_RNA (1)...(19): siRNA sense strand
ggaugaagaagaggaugaa

SEQ ID NO: 1487433 - RNA, 19 nt, Homo sapiens
  misc_RNA (1)...(19): siRNA sense strand
ggauaaagacaaagauagc

SEQ ID NO: 1487434 - RNA, 19 nt, Homo sapiens
  misc_RNA (1)...(19): siRNA sense strand
ugagagcacagacagcaaa

SEQ ID NO: 1487435 - RNA, 19 nt, Homo sapiens
  misc_RNA (1)...(19): siRNA sense strand
uauacugagaggucuaaua

SEQ ID NO: 1487436 - RNA, 19 nt, Homo sapiens
  misc_RNA (1)...(19): siRNA sense strand
gcacuguacagaagaggau

SEQ ID NO: 1487437 - RNA, 19 nt, Homo sapiens
  misc_RNA (1)...(19): siRNA sense strand
agucaccgaugaaccaaug

SEQ ID NO: 1487438 - RNA, 19 nt, Homo sapiens
  misc_RNA (1)...(19): siRNA sense strand
ggagaagaauguaaaguuc

SEQ ID NO: 1487439 - RNA, 19 nt, Homo sapiens
  misc_RNA (1)...(19): siRNA sense strand
ucauaaagcucaccauguu

SEQ ID NO: 1487440 - RNA, 19 nt, Homo sapiens
  misc_RNA (1)...(19): siRNA sense strand
gaagaacggucacaaacag

SEQ ID NO: 1487441 - RNA, 19 nt, Homo sapiens
  misc_RNA (1)...(19): siRNA sense strand
gggagaagaauguaaaguu

SEQ ID NO: 1487442 - RNA, 19 nt, Homo sapiens
  misc_RNA (1)...(19): siRNA sense strand
cauaaagcucaccauguua

SEQ ID NO: 1487443 - RNA, 19 nt, Homo sapiens
  misc_RNA (1)...(19): siRNA sense strand
cggaaaggauggagcuguu

SEQ ID NO: 1487444 - RNA, 19 nt, Homo sapiens
  misc_RNA (1)...(19): siRNA sense strand
aaaguuguauccagugcaa

SEQ ID NO: 1487445 - RNA, 19 nt, Homo sapiens
  misc_RNA (1)...(19): siRNA sense strand
ggaauaaagucaaaacaac

SEQ ID NO: 1487446 - RNA, 19 nt, Homo sapiens
  misc_RNA (1)...(19): siRNA sense strand
auaaagcucaccauguuaa

SEQ ID NO: 1487447 - RNA, 19 nt, Homo sapiens
  misc_RNA (1)...(19): siRNA sense strand
gaaagcaacaaaaggaaaa

SEQ ID NO: 1487448 - RNA, 19 nt, Homo sapiens
  misc_RNA (1)...(19): siRNA sense strand
ccagugcaaaccaucauaa

SEQ ID NO: 1487449 - RNA, 19 nt, Homo sapiens
  misc_RNA (1)...(19): siRNA sense strand
gaacggucacaaacaguca

SEQ ID NO: 1487450 - RNA, 19 nt, Homo sapiens
  misc_RNA (1)...(19): siRNA sense strand
gauagaagaacggucacaa

SEQ ID NO: 1487451 - RNA, 19 nt, Homo sapiens
  misc_RNA (1)...(19): siRNA sense strand
uguggaugcuucaauagug

SEQ ID NO: 1487452 - RNA, 19 nt, Homo sapiens
  misc_RNA (1)...(19): siRNA sense strand
gcuguaauaagaacaagau

SEQ ID NO: 1487453 - RNA, 19 nt, Homo sapiens
  misc_RNA (1)...(19): siRNA sense strand
agagggagaagaauguaaa

SEQ ID NO: 1487454 - RNA, 19 nt, Homo sapiens
  misc_RNA (1)...(19): siRNA sense strand
ggucacaaacagucaagug

SEQ ID NO: 1487455 - RNA, 19 nt, Homo sapiens
  misc_RNA (1)...(19): siRNA sense strand
uaaagcucaccauguuaaa

SEQ ID NO: 1487456 - RNA, 19 nt, Homo sapiens
  misc_RNA (1)...(19): siRNA sense strand
aagagauacuuacagaaag

SEQ ID NO: 1487457 - RNA, 19 nt, Homo sapiens
  misc_RNA (1)...(19): siRNA sense strand
cuucaauaguggaacagaa

SEQ ID NO: 1487458 - RNA, 19 nt, Homo sapiens
  misc_RNA (1)...(19): siRNA sense strand
gugcaaaccaucauaaagc

SEQ ID NO: 1487459 - RNA, 19 nt, Homo sapiens
  misc_RNA (1)...(19): siRNA sense strand
auguguggaugcuucaaua

SEQ ID NO: 1487460 - RNA, 19 nt, Homo sapiens
  misc_RNA (1)...(19): siRNA sense strand
uagaagaacggucacaaac

SEQ ID NO: 1487461 - RNA, 19 nt, Homo sapiens
  misc_RNA (1)...(19): siRNA sense strand
agaagaacggucacaaaca

SEQ ID NO: 1487462 - RNA, 19 nt, Homo sapiens
  misc_RNA (1)...(19): siRNA sense strand
auagaagaacggucacaaa

SEQ ID NO: 1487463 - RNA, 19 nt, Homo sapiens
  misc_RNA (1)...(19): siRNA sense strand
ggaaaggauggagcuguuc

SEQ ID NO: 1487464 - RNA, 19 nt, Homo sapiens
  misc_RNA (1)...(19): siRNA sense strand
cagaugcuguaauaagaac

SEQ ID NO: 1487465 - RNA, 19 nt, Homo sapiens
  misc_RNA (1)...(19): siRNA sense strand
caauaguggaacagaaaug

SEQ ID NO: 1487466 - RNA, 19 nt, Homo sapiens
  misc_RNA (1)...(19): siRNA sense strand
gaugcuguaauaagaacaa

SEQ ID NO: 1487467 - RNA, 19 nt, Homo sapiens
  misc_RNA (1)...(19): siRNA sense strand
cauaugcagccaugucuag

SEQ ID NO: 1487468 - RNA, 19 nt, Homo sapiens
  misc_RNA (1)...(19): siRNA sense strand
agagauacuuacagaaagc

SEQ ID NO: 1487469 - RNA, 19 nt, Homo sapiens
  misc_RNA (1)...(19): siRNA sense strand
gggaauaaagucaaaacaa

SEQ ID NO: 1487470 - RNA, 19 nt, Homo sapiens
  misc_RNA (1)...(19): siRNA sense strand
uagagggagaagaauguaa

SEQ ID NO: 1487471 - RNA, 19 nt, Homo sapiens
  misc_RNA (1)...(19): siRNA sense strand
cagugcaaaccaucauaaa

SEQ ID NO: 1487472 - RNA, 19 nt, Homo sapiens
  misc_RNA (1)...(19): siRNA sense strand
aaacagagcugcccaauga

SEQ ID NO: 1487473 - RNA, 19 nt, Homo sapiens
  misc_RNA (1)...(19): siRNA sense strand
cgacaucgcuuucaaauuc

SEQ ID NO: 1487474 - RNA, 19 nt, Homo sapiens
  misc_RNA (1)...(19): siRNA sense strand
ucaaggaaaugcugaaaua

SEQ ID NO: 1487475 - RNA, 19 nt, Homo sapiens
  misc_RNA (1)...(19): siRNA sense strand
caacaggccuucacaacaa

SEQ ID NO: 1487476 - RNA, 19 nt, Homo sapiens
  misc_RNA (1)...(19): siRNA sense strand
gcacggccaucgaaaguuu

SEQ ID NO: 1487477 - RNA, 19 nt, Homo sapiens
  misc_RNA (1)...(19): siRNA sense strand
gaagggagaugcuaagaag

SEQ ID NO: 1487478 - RNA, 19 nt, Homo sapiens
  misc_RNA (1)...(19): siRNA sense strand
ugaaggagcuggccagguu

SEQ ID NO: 1487479 - RNA, 19 nt, Homo sapiens
  misc_RNA (1)...(19): siRNA sense strand
ucaagaagcuggaagaaag

SEQ ID NO: 1487480 - RNA, 19 nt, Homo sapiens
  misc_RNA (1)...(19): siRNA sense strand
caauagagaugacuuuaag

SEQ ID NO: 1487481 - RNA, 19 nt, Homo sapiens
  misc_RNA (1)...(19): siRNA sense strand
gagaugacuuuaagaugaa

SEQ ID NO: 1487482 - RNA, 19 nt, Homo sapiens
  misc_RNA (1)...(19): siRNA sense strand
agagaugacuuuaagauga

SEQ ID NO: 1487483 - RNA, 19 nt, Homo sapiens
  misc_RNA (1)...(19): siRNA sense strand
agagaaagcuggaccacaa

SEQ ID NO: 1487484 - RNA, 19 nt, Homo sapiens
  misc_RNA (1)...(19): siRNA sense strand
ggaccgagcuggcugaaac

SEQ ID NO: 1487485 - RNA, 19 nt, Homo sapiens
  misc_RNA (1)...(19): siRNA sense strand
caagaaggauguuuuguuu

SEQ ID NO: 1487486 - RNA, 19 nt, Homo sapiens
  misc_RNA (1)...(19): siRNA sense strand
gagaaguacugucagaaca

SEQ ID NO: 1487487 - RNA, 19 nt, Homo sapiens
  misc_RNA (1)...(19): siRNA sense strand
gggcaaagcaucagcagaa

SEQ ID NO: 1487488 - RNA, 19 nt, Homo sapiens
  misc_RNA (1)...(19): siRNA sense strand
gcaagaagagggaggagaa

SEQ ID NO: 1487489 - RNA, 19 nt, Homo sapiens
  misc_RNA (1)...(19): siRNA sense strand
gcaacagccuggcgcaugu

SEQ ID NO: 1487490 - RNA, 19 nt, Homo sapiens
  misc_RNA (1)...(19): siRNA sense strand
gacaaggaguuccagaaug

SEQ ID NO: 1487491 - RNA, 19 nt, Homo sapiens
  misc_RNA (1)...(19): siRNA sense strand
acaaggaguuccagaaugu

SEQ ID NO: 1487492 - RNA, 19 nt, Homo sapiens
  misc_RNA (1)...(19): siRNA sense strand
gaaggugccggucauaaug

SEQ ID NO: 1487493 - RNA, 19 nt, Homo sapiens
  misc_RNA (1)...(19): siRNA sense strand
ggacaaggaguuccagaau

SEQ ID NO: 1487494 - RNA, 19 nt, Homo sapiens
  misc_RNA (1)...(19): siRNA sense strand
uggagaggauggaagauuu

SEQ ID NO: 1487495 - RNA, 19 nt, Homo sapiens
  misc_RNA (1)...(19): siRNA sense strand
gcaccucugugaccaguuc

SEQ ID NO: 1487496 - RNA, 19 nt, Homo sapiens
  misc_RNA (1)...(19): siRNA sense strand
gcuacaagcaguccuuaaa

SEQ ID NO: 1487497 - RNA, 19 nt, Homo sapiens
  misc_RNA (1)...(19): siRNA sense strand
aaacauggaggaaaucuau

SEQ ID NO: 1487498 - RNA, 19 nt, Homo sapiens
  misc_RNA (1)...(19): siRNA sense strand
gcugcaggcuuguagagaa

SEQ ID NO: 1487499 - RNA, 19 nt, Homo sapiens
  misc_RNA (1)...(19): siRNA sense strand
ucaacgcgauuuacaagga

SEQ ID NO: 1487500 - RNA, 19 nt, Homo sapiens
  misc_RNA (1)...(19): siRNA sense strand
ucagggagcuggaaaacua

SEQ ID NO: 1487501 - RNA, 19 nt, Homo sapiens
  misc_RNA (1)...(19): siRNA sense strand
agaggaaacucaaggaaca

SEQ ID NO: 1487502 - RNA, 19 nt, Homo sapiens
  misc_RNA (1)...(19): siRNA sense strand
gaagcccgguuaucaccuu

SEQ ID NO: 1487503 - RNA, 19 nt, Homo sapiens
  misc_RNA (1)...(19): siRNA sense strand
caaggaacaucaagaagcu

SEQ ID NO: 1487504 - RNA, 19 nt, Homo sapiens
  misc_RNA (1)...(19): siRNA sense strand
gaaguacugucagaacaag

SEQ ID NO: 1487505 - RNA, 19 nt, Homo sapiens
  misc_RNA (1)...(19): siRNA sense strand
uaccagacuuacacgguua

SEQ ID NO: 1487506 - RNA, 19 nt, Homo sapiens
  misc_RNA (1)...(19): siRNA sense strand
caacgcgauuuacaaggaa

SEQ ID NO: 1487507 - RNA, 19 nt, Homo sapiens
  misc_RNA (1)...(19): siRNA sense strand
ggaggaaaucuaucacuuc

SEQ ID NO: 1487508 - RNA, 19 nt, Homo sapiens
  misc_RNA (1)...(19): siRNA sense strand
gcuaagaaguucgagaucu

SEQ ID NO: 1487509 - RNA, 19 nt, Homo sapiens
  misc_RNA (1)...(19): siRNA sense strand
gaaacagagcugcccaaug

SEQ ID NO: 1487510 - RNA, 19 nt, Homo sapiens
  misc_RNA (1)...(19): siRNA sense strand
ugcagaggaucaccaagua

SEQ ID NO: 1487511 - RNA, 19 nt, Homo sapiens
  misc_RNA (1)...(19): siRNA sense strand
gaaacauggaggaaaucua

SEQ ID NO: 1487512 - RNA, 19 nt, Homo sapiens
  misc_RNA (1)...(19): siRNA sense strand
ugagggaccuggccagcuu

SEQ ID NO: 1487513 - RNA, 19 nt, Homo sapiens
  misc_RNA (1)...(19): siRNA sense strand
gaagcuggaagaaaggaaa

SEQ ID NO: 1487514 - RNA, 19 nt, Homo sapiens
  misc_RNA (1)...(19): siRNA sense strand
uaugagaaguacugucaga

SEQ ID NO: 1487515 - RNA, 19 nt, Homo sapiens
  misc_RNA (1)...(19): siRNA sense strand
gcucugugcugccgacauc

SEQ ID NO: 1487516 - RNA, 19 nt, Homo sapiens
  misc_RNA (1)...(19): siRNA sense strand
gagcuccguaccagacuua

SEQ ID NO: 1487517 - RNA, 19 nt, Homo sapiens
  misc_RNA (1)...(19): siRNA sense strand
cuaagaaguucgagaucug

SEQ ID NO: 1487518 - RNA, 19 nt, Homo sapiens
  misc_RNA (1)...(19): siRNA sense strand
ggcaaagcaucagcagaaa

SEQ ID NO: 1487519 - RNA, 19 nt, Homo sapiens
  misc_RNA (1)...(19): siRNA sense strand
caaauggaccuccgugaag

SEQ ID NO: 1487520 - RNA, 19 nt, Homo sapiens
  misc_RNA (1)...(19): siRNA sense strand
ccaugcaccucaucgcuau

SEQ ID NO: 1487521 - RNA, 19 nt, Homo sapiens
  misc_RNA (1)...(19): siRNA sense strand
uuacacgguuacaucgaua

SEQ ID NO: 1487522 - RNA, 19 nt, Homo sapiens
  misc_RNA (1)...(19): siRNA sense strand
cagcaucuuucccggcaaa

SEQ ID NO: 1487523 - RNA, 19 nt, Homo sapiens
  misc_RNA (1)...(19): siRNA sense strand
gcgaggaggucuacaucgu

SEQ ID NO: 1487524 - RNA, 19 nt, Homo sapiens
  misc_RNA (1)...(19): siRNA sense strand
ugcgaaaggucuuccagaa

SEQ ID NO: 1487525 - RNA, 19 nt, Homo sapiens
  misc_RNA (1)...(19): siRNA sense strand
gaaacucaaggaacaucaa

SEQ ID NO: 1487526 - RNA, 19 nt, Homo sapiens
  misc_RNA (1)...(19): siRNA sense strand
cgccaacuccugagauuaa

SEQ ID NO: 1487527 - RNA, 19 nt, Homo sapiens
  misc_RNA (1)...(19): siRNA sense strand
caagcaguccuuaaacaug

SEQ ID NO: 1487528 - RNA, 19 nt, Homo sapiens
  misc_RNA (1)...(19): siRNA sense strand
uacaagcaguccuuaaaca

SEQ ID NO: 1487529 - RNA, 19 nt, Homo sapiens
  misc_RNA (1)...(19): siRNA sense strand
ucagcgagauuccggacaa

SEQ ID NO: 1487530 - RNA, 19 nt, Homo sapiens
  misc_RNA (1)...(19): siRNA sense strand
uccaggaaaucgagaaguu

SEQ ID NO: 1487531 - RNA, 19 nt, Homo sapiens
  misc_RNA (1)...(19): siRNA sense strand
gaacaucaagaagcuggaa

SEQ ID NO: 1487532 - RNA, 19 nt, Homo sapiens
  misc_RNA (1)...(19): siRNA sense strand
caagaggaaacucaaggaa

SEQ ID NO: 1487533 - RNA, 19 nt, Homo sapiens
  misc_RNA (1)...(19): siRNA sense strand
gcgcaucgcagcaucuuuc

SEQ ID NO: 1487534 - RNA, 19 nt, Homo sapiens
  misc_RNA (1)...(19): siRNA sense strand
ccgcgugggugaaugaaau

SEQ ID NO: 1487535 - RNA, 19 nt, Homo sapiens
  misc_RNA (1)...(19): siRNA sense strand
ugaccuaccucaccagcau

SEQ ID NO: 1487536 - RNA, 19 nt, Homo sapiens
  misc_RNA (1)...(19): siRNA sense strand
uggaggaaaucuaucacuu

SEQ ID NO: 1487537 - RNA, 19 nt, Homo sapiens
  misc_RNA (1)...(19): siRNA sense strand
caaauucaauagagaugac

SEQ ID NO: 1487538 - RNA, 19 nt, Homo sapiens
  misc_RNA (1)...(19): siRNA sense strand
cagcaccagucccucaaga

SEQ ID NO: 1487539 - RNA, 19 nt, Homo sapiens
  misc_RNA (1)...(19): siRNA sense strand
gacggaagcccgguuauca

SEQ ID NO: 1487540 - RNA, 19 nt, Homo sapiens
  misc_RNA (1)...(19): siRNA sense strand
ggaggucaaagccaucuug

SEQ ID NO: 1487541 - RNA, 19 nt, Homo sapiens
  misc_RNA (1)...(19): siRNA sense strand
acacagagaagaaggacaa

SEQ ID NO: 1487542 - RNA, 19 nt, Homo sapiens
  misc_RNA (1)...(19): siRNA sense strand
gaagcagacggcucagaug

SEQ ID NO: 1487543 - RNA, 19 nt, Homo sapiens
  misc_RNA (1)...(19): siRNA sense strand
uccagaaugucaugaccua

SEQ ID NO: 1487544 - RNA, 19 nt, Homo sapiens
  misc_RNA (1)...(19): siRNA sense strand
acaaggcgaaggaggauuu

SEQ ID NO: 1487545 - RNA, 19 nt, Homo sapiens
  misc_RNA (1)...(19): siRNA sense strand
aaaggacucucuccgacau

SEQ ID NO: 1487546 - RNA, 19 nt, Homo sapiens
  misc_RNA (1)...(19): siRNA sense strand
gggagaugcuaagaaguuc

SEQ ID NO: 1487547 - RNA, 19 nt, Homo sapiens
  misc_RNA (1)...(19): siRNA sense strand
caaagcaucagcagaaacu

SEQ ID NO: 1487548 - RNA, 19 nt, Homo sapiens
  misc_RNA (1)...(19): siRNA sense strand
gagcucaacgcgauuuaca

SEQ ID NO: 1487549 - RNA, 19 nt, Homo sapiens
  misc_RNA (1)...(19): siRNA sense strand
ggcgccaacuccugagauu

SEQ ID NO: 1487550 - RNA, 19 nt, Homo sapiens
  misc_RNA (1)...(19): siRNA sense strand
gacaucgcuuucaaauuca

SEQ ID NO: 1487551 - RNA, 19 nt, Homo sapiens
  misc_RNA (1)...(19): siRNA sense strand
ccaagagugagaugaguga

SEQ ID NO: 1487552 - RNA, 19 nt, Homo sapiens
  misc_RNA (1)...(19): siRNA sense strand
cgacauccaggaccagcua

SEQ ID NO: 1487553 - RNA, 19 nt, Homo sapiens
  misc_RNA (1)...(19): siRNA sense strand
gauucauccuggugauaga

SEQ ID NO: 1487554 - RNA, 19 nt, Homo sapiens
  misc_RNA (1)...(19): siRNA sense strand
gccaacuccugagauuaaa

SEQ ID NO: 1487555 - RNA, 19 nt, Homo sapiens
  misc_RNA (1)...(19): siRNA sense strand
ccagaucuaugagaaguac

SEQ ID NO: 1487556 - RNA, 19 nt, Homo sapiens
  misc_RNA (1)...(19): siRNA sense strand
acaaauggaccuccgugaa

SEQ ID NO: 1487557 - RNA, 19 nt, Homo sapiens
  misc_RNA (1)...(19): siRNA sense strand
gauuugaggcuggcacuga

SEQ ID NO: 1487558 - RNA, 19 nt, Homo sapiens
  misc_RNA (1)...(19): siRNA sense strand
gcuuucaaauucaauagag

SEQ ID NO: 1487559 - RNA, 19 nt, Homo sapiens
  misc_RNA (1)...(19): siRNA sense strand
ggagaggauggaagauuuc

SEQ ID NO: 1487560 - RNA, 19 nt, Homo sapiens
  misc_RNA (1)...(19): siRNA sense strand
ucacuuccacaacaggaua

SEQ ID NO: 1487561 - RNA, 19 nt, Homo sapiens
  misc_RNA (1)...(19): siRNA sense strand
gcgagcuccuggacacaga

SEQ ID NO: 1487562 - RNA, 19 nt, Homo sapiens
  misc_RNA (1)...(19): siRNA sense strand
guuaucaccuucccugacu

SEQ ID NO: 1487563 - RNA, 19 nt, Homo sapiens
  misc_RNA (1)...(19): siRNA sense strand
gcucaacgcgauuuacaag

SEQ ID NO: 1487564 - RNA, 19 nt, Homo sapiens
  misc_RNA (1)...(19): siRNA sense strand
ucacagacaucggcaacag

SEQ ID NO: 1487565 - RNA, 19 nt, Homo sapiens
  misc_RNA (1)...(19): siRNA sense strand
ccgaggcacuggcaaaguc

SEQ ID NO: 1487566 - RNA, 19 nt, Homo sapiens
  misc_RNA (1)...(19): siRNA sense strand
ugaaggugccggucauaau

SEQ ID NO: 1487567 - RNA, 19 nt, Homo sapiens
  misc_RNA (1)...(19): siRNA sense strand
ccaggaaaucgagaaguuu

SEQ ID NO: 1487568 - RNA, 19 nt, Homo sapiens
  misc_RNA (1)...(19): siRNA sense strand
gcgccaacuccugagauua

SEQ ID NO: 1487569 - RNA, 19 nt, Homo sapiens
  misc_RNA (1)...(19): siRNA sense strand
gaugcuuucuggagaggau

SEQ ID NO: 1487570 - RNA, 19 nt, Homo sapiens
  misc_RNA (1)...(19): siRNA sense strand
uuggaaacauggaggaaau

SEQ ID NO: 1487571 - RNA, 19 nt, Homo sapiens
  misc_RNA (1)...(19): siRNA sense strand
ucaacaggccuucacaaca

SEQ ID NO: 1487572 - RNA, 19 nt, Homo sapiens
  misc_RNA (1)...(19): siRNA sense strand
gaauagagcugcccugaga

SEQ ID NO: 1487573 - RNA, 19 nt, Homo sapiens
  misc_RNA (1)...(19): siRNA sense strand
gaaagcaucuccucauuca

SEQ ID NO: 1487574 - RNA, 19 nt, Homo sapiens
  misc_RNA (1)...(19): siRNA sense strand
gaacaagaaugaacaagag

SEQ ID NO: 1487575 - RNA, 19 nt, Homo sapiens
  misc_RNA (1)...(19): siRNA sense strand
cuaaacagcucgcagaauu

SEQ ID NO: 1487576 - RNA, 19 nt, Homo sapiens
  misc_RNA (1)...(19): siRNA sense strand
gaacaacagcuuucucaaa

SEQ ID NO: 1487577 - RNA, 19 nt, Homo sapiens
  misc_RNA (1)...(19): siRNA sense strand
caaauacgaacaagaauga

SEQ ID NO: 1487578 - RNA, 19 nt, Homo sapiens
  misc_RNA (1)...(19): siRNA sense strand
aaagagacauuuccugguu

SEQ ID NO: 1487579 - RNA, 19 nt, Homo sapiens
  misc_RNA (1)...(19): siRNA sense strand
aaagauaguuggagagaau

SEQ ID NO: 1487580 - RNA, 19 nt, Homo sapiens
  misc_RNA (1)...(19): siRNA sense strand
agaaagagcuuccacaaaa

SEQ ID NO: 1487581 - RNA, 19 nt, Homo sapiens
  misc_RNA (1)...(19): siRNA sense strand
ggagguuuauucagucaaa

SEQ ID NO: 1487582 - RNA, 19 nt, Homo sapiens
  misc_RNA (1)...(19): siRNA sense strand
uuacauagaaugcgucaua

SEQ ID NO: 1487583 - RNA, 19 nt, Homo sapiens
  misc_RNA (1)...(19): siRNA sense strand
ggagagaauucgcuugagu

SEQ ID NO: 1487584 - RNA, 19 nt, Homo sapiens
  misc_RNA (1)...(19): siRNA sense strand
gcgcuucucucuggacuuu

SEQ ID NO: 1487585 - RNA, 19 nt, Homo sapiens
  misc_RNA (1)...(19): siRNA sense strand
gaaaggaucagaacaacag

SEQ ID NO: 1487586 - RNA, 19 nt, Homo sapiens
  misc_RNA (1)...(19): siRNA sense strand
acuaggaaguugaggaaua

SEQ ID NO: 1487587 - RNA, 19 nt, Homo sapiens
  misc_RNA (1)...(19): siRNA sense strand
gagagaauucgcuugagua

SEQ ID NO: 1487588 - RNA, 19 nt, Homo sapiens
  misc_RNA (1)...(19): siRNA sense strand
gcaaauacgaacaagaaug

SEQ ID NO: 1487589 - RNA, 19 nt, Homo sapiens
  misc_RNA (1)...(19): siRNA sense strand
gaagaaacgggcaaagaca

SEQ ID NO: 1487590 - RNA, 19 nt, Homo sapiens
  misc_RNA (1)...(19): siRNA sense strand
ucgcagaauuugcuagaaa

SEQ ID NO: 1487591 - RNA, 19 nt, Homo sapiens
  misc_RNA (1)...(19): siRNA sense strand
gcacuaggaaguugaggaa

SEQ ID NO: 1487592 - RNA, 19 nt, Homo sapiens
  misc_RNA (1)...(19): siRNA sense strand
gcuucucucuggacuuuaa

SEQ ID NO: 1487593 - RNA, 19 nt, Homo sapiens
  misc_RNA (1)...(19): siRNA sense strand
aaagaaaggaucagaacaa

SEQ ID NO: 1487594 - RNA, 19 nt, Homo sapiens
  misc_RNA (1)...(19): siRNA sense strand
ggccuuaugugauggcuau

SEQ ID NO: 1487595 - RNA, 19 nt, Homo sapiens
  misc_RNA (1)...(19): siRNA sense strand
ccugaaagcccacauccua

SEQ ID NO: 1487596 - RNA, 19 nt, Homo sapiens
  misc_RNA (1)...(19): siRNA sense strand
gcaaucgcuuguccucaga

SEQ ID NO: 1487597 - RNA, 19 nt, Homo sapiens
  misc_RNA (1)...(19): siRNA sense strand
gaucagaacaacagcuuuc

SEQ ID NO: 1487598 - RNA, 19 nt, Homo sapiens
  misc_RNA (1)...(19): siRNA sense strand
uggaauaccuaaagaaagg

SEQ ID NO: 1487599 - RNA, 19 nt, Homo sapiens
  misc_RNA (1)...(19): siRNA sense strand
gaugauuucucagacuguu

SEQ ID NO: 1487600 - RNA, 19 nt, Homo sapiens
  misc_RNA (1)...(19): siRNA sense strand
gggaaagcguucguugaga

SEQ ID NO: 1487601 - RNA, 19 nt, Homo sapiens
  misc_RNA (1)...(19): siRNA sense strand
ggaggaauaccuggcauug

SEQ ID NO: 1487602 - RNA, 19 nt, Homo sapiens
  misc_RNA (1)...(19): siRNA sense strand
cgaacaagaaugaacaaga

SEQ ID NO: 1487603 - RNA, 19 nt, Homo sapiens
  misc_RNA (1)...(19): siRNA sense strand
gcaacaggagguuuauuca

SEQ ID NO: 1487604 - RNA, 19 nt, Homo sapiens
  misc_RNA (1)...(19): siRNA sense strand
gagcugcccugagaaagca

SEQ ID NO: 1487605 - RNA, 19 nt, Homo sapiens
  misc_RNA (1)...(19): siRNA sense strand
uaaacagcucgcagaauuu

SEQ ID NO: 1487606 - RNA, 19 nt, Homo sapiens
  misc_RNA (1)...(19): siRNA sense strand
aaagaaagagcuuccacaa

SEQ ID NO: 1487607 - RNA, 19 nt, Homo sapiens
  misc_RNA (1)...(19): siRNA sense strand
gacauuuccugguucauac

SEQ ID NO: 1487608 - RNA, 19 nt, Homo sapiens
  misc_RNA (1)...(19): siRNA sense strand
guacaugacaggcaagaag

SEQ ID NO: 1487609 - RNA, 19 nt, Homo sapiens
  misc_RNA (1)...(19): siRNA sense strand
agaauuugcuagaaagaag

SEQ ID NO: 1487610 - RNA, 19 nt, Homo sapiens
  misc_RNA (1)...(19): siRNA sense strand
agacauuuccugguucaua

SEQ ID NO: 1487611 - RNA, 19 nt, Homo sapiens
  misc_RNA (1)...(19): siRNA sense strand
gcucaaaacuaaagagaca

SEQ ID NO: 1487612 - RNA, 19 nt, Homo sapiens
  misc_RNA (1)...(19): siRNA sense strand
ugaauguucuuuggaauac

SEQ ID NO: 1487613 - RNA, 19 nt, Homo sapiens
  misc_RNA (1)...(19): siRNA sense strand
ccacgucugugcggaaugu

SEQ ID NO: 1487614 - RNA, 19 nt, Homo sapiens
  misc_RNA (1)...(19): siRNA sense strand
cuaggaaguugaggaauag

SEQ ID NO: 1487615 - RNA, 19 nt, Homo sapiens
  misc_RNA (1)...(19): siRNA sense strand
gaaagagcuuccacaaaag

SEQ ID NO: 1487616 - RNA, 19 nt, Homo sapiens
  misc_RNA (1)...(19): siRNA sense strand
gaaacgggcaaagacaaga

SEQ ID NO: 1487617 - RNA, 19 nt, Homo sapiens
  misc_RNA (1)...(19): siRNA sense strand
aacaggagguuuauucagu

SEQ ID NO: 1487618 - RNA, 19 nt, Homo sapiens
  misc_RNA (1)...(19): siRNA sense strand
gcggaaagcgcuucucucu

SEQ ID NO: 1487619 - RNA, 19 nt, Homo sapiens
  misc_RNA (1)...(19): siRNA sense strand
gaaaggccuggguggaaga

SEQ ID NO: 1487620 - RNA, 19 nt, Homo sapiens
  misc_RNA (1)...(19): siRNA sense strand
aaacagcucgcagaauuug

SEQ ID NO: 1487621 - RNA, 19 nt, Homo sapiens
  misc_RNA (1)...(19): siRNA sense strand
ugaccuaucagauccuaaa

SEQ ID NO: 1487622 - RNA, 19 nt, Homo sapiens
  misc_RNA (1)...(19): siRNA sense strand
uacauagaaugcgucauaa

SEQ ID NO: 1487623 - RNA, 19 nt, Homo sapiens
  misc_RNA (1)...(19): siRNA sense strand
aacaacagcuuucucaaaa

SEQ ID NO: 1487624 - RNA, 19 nt, Homo sapiens
  misc_RNA (1)...(19): siRNA sense strand
ccuugaauguucuuuggaa

SEQ ID NO: 1487625 - RNA, 19 nt, Homo sapiens
  misc_RNA (1)...(19): siRNA sense strand
uuucucagacuguuacaua

SEQ ID NO: 1487626 - RNA, 19 nt, Homo sapiens
  misc_RNA (1)...(19): siRNA sense strand
aagcaucuccucauucaug

SEQ ID NO: 1487627 - RNA, 19 nt, Homo sapiens
  misc_RNA (1)...(19): siRNA sense strand
gcagaauuugcuagaaaga

SEQ ID NO: 1487628 - RNA, 19 nt, Homo sapiens
  misc_RNA (1)...(19): siRNA sense strand
cagaaaggccuggguggaa

SEQ ID NO: 1487629 - RNA, 19 nt, Homo sapiens
  misc_RNA (1)...(19): siRNA sense strand
aaagacaagacaccagaaa

SEQ ID NO: 1487630 - RNA, 19 nt, Homo sapiens
  misc_RNA (1)...(19): siRNA sense strand
aagaaagagcuuccacaaa

SEQ ID NO: 1487631 - RNA, 19 nt, Homo sapiens
  misc_RNA (1)...(19): siRNA sense strand
uaacgcaugcaaauacgaa

SEQ ID NO: 1487632 - RNA, 19 nt, Homo sapiens
  misc_RNA (1)...(19): siRNA sense strand
gaggaauaccuggcauuga

SEQ ID NO: 1487633 - RNA, 19 nt, Homo sapiens
  misc_RNA (1)...(19): siRNA sense strand
ccuaucagauccuaaacag

SEQ ID NO: 1487634 - RNA, 19 nt, Homo sapiens
  misc_RNA (1)...(19): siRNA sense strand
agaaugaacaagagggaaa

SEQ ID NO: 1487635 - RNA, 19 nt, Homo sapiens
  misc_RNA (1)...(19): siRNA sense strand
ugaguauucugaguacaug

SEQ ID NO: 1487636 - RNA, 19 nt, Homo sapiens
  misc_RNA (1)...(19): siRNA sense strand
gccagcaacugaagaaacg

SEQ ID NO: 1487637 - RNA, 19 nt, Homo sapiens
  misc_RNA (1)...(19): siRNA sense strand
gugugggccuuaugugaug

SEQ ID NO: 1487638 - RNA, 19 nt, Homo sapiens
  misc_RNA (1)...(19): siRNA sense strand
uaaagaaaggaucagaaca

SEQ ID NO: 1487639 - RNA, 19 nt, Homo sapiens
  misc_RNA (1)...(19): siRNA sense strand
ugaacaagagggaaaguag

SEQ ID NO: 1487640 - RNA, 19 nt, Homo sapiens
  misc_RNA (1)...(19): siRNA sense strand
ucucuggacuuuaauuugc

SEQ ID NO: 1487641 - RNA, 19 nt, Homo sapiens
  misc_RNA (1)...(19): siRNA sense strand
caaagacaagacaccagaa

SEQ ID NO: 1487642 - RNA, 19 nt, Homo sapiens
  misc_RNA (1)...(19): siRNA sense strand
cauagaaugcgucauaagg

SEQ ID NO: 1487643 - RNA, 19 nt, Homo sapiens
  misc_RNA (1)...(19): siRNA sense strand
gaccacgucugugcggaau

SEQ ID NO: 1487644 - RNA, 19 nt, Homo sapiens
  misc_RNA (1)...(19): siRNA sense strand
aggaauaccuggcauugac

SEQ ID NO: 1487645 - RNA, 19 nt, Homo sapiens
  misc_RNA (1)...(19): siRNA sense strand
cucagacuguuacauagaa

SEQ ID NO: 1487646 - RNA, 19 nt, Homo sapiens
  misc_RNA (1)...(19): siRNA sense strand
gagaauucgcuugaguauu

SEQ ID NO: 1487647 - RNA, 19 nt, Homo sapiens
  misc_RNA (1)...(19): siRNA sense strand
augcaaauacgaacaagaa

SEQ ID NO: 1487648 - RNA, 19 nt, Homo sapiens
  misc_RNA (1)...(19): siRNA sense strand
cauccuaacgcaugcaaau

SEQ ID NO: 1487649 - RNA, 19 nt, Homo sapiens
  misc_RNA (1)...(19): siRNA sense strand
caggagguuuauucaguca

SEQ ID NO: 1487650 - RNA, 19 nt, Homo sapiens
  misc_RNA (1)...(19): siRNA sense strand
agagacauuuccugguuca

SEQ ID NO: 1487651 - RNA, 19 nt, Homo sapiens
  misc_RNA (1)...(19): siRNA sense strand
gcuugaguauucugaguac

SEQ ID NO: 1487652 - RNA, 19 nt, Homo sapiens
  misc_RNA (1)...(19): siRNA sense strand
gcucgcagaauuugcuaga

SEQ ID NO: 1487653 - RNA, 19 nt, Homo sapiens
  misc_RNA (1)...(19): siRNA sense strand
ggcauugaccuaucagauc

SEQ ID NO: 1487654 - RNA, 19 nt, Homo sapiens
  misc_RNA (1)...(19): siRNA sense strand
cuuggaauaccuaaagaaa

SEQ ID NO: 1487655 - RNA, 19 nt, Homo sapiens
  misc_RNA (1)...(19): siRNA sense strand
ugaagaaacgggcaaagac

SEQ ID NO: 1487656 - RNA, 19 nt, Homo sapiens
  misc_RNA (1)...(19): siRNA sense strand
ggugugggccuuaugugau

SEQ ID NO: 1487657 - RNA, 19 nt, Homo sapiens
  misc_RNA (1)...(19): siRNA sense strand
agaaagcaucuccucauuc

SEQ ID NO: 1487658 - RNA, 19 nt, Homo sapiens
  misc_RNA (1)...(19): siRNA sense strand
gaauguucuuuggaauaca

SEQ ID NO: 1487659 - RNA, 19 nt, Homo sapiens
  misc_RNA (1)...(19): siRNA sense strand
ccuaaagaaaggaucagaa

SEQ ID NO: 1487660 - RNA, 19 nt, Homo sapiens
  misc_RNA (1)...(19): siRNA sense strand
cugaaagcccacauccuaa

SEQ ID NO: 1487661 - RNA, 19 nt, Homo sapiens
  misc_RNA (1)...(19): siRNA sense strand
uggaugcacuaggaaguug

SEQ ID NO: 1487662 - RNA, 19 nt, Homo sapiens
  misc_RNA (1)...(19): siRNA sense strand
cagaauuugcuagaaagaa

SEQ ID NO: 1487663 - RNA, 19 nt, Homo sapiens
  misc_RNA (1)...(19): siRNA sense strand
gcggaaauagaaccuguca

SEQ ID NO: 1487664 - RNA, 19 nt, Homo sapiens
  misc_RNA (1)...(19): siRNA sense strand
aagaaaggaucagaacaac

SEQ ID NO: 1487665 - RNA, 19 nt, Homo sapiens
  misc_RNA (1)...(19): siRNA sense strand
cuaaagaaaggaucagaac

SEQ ID NO: 1487666 - RNA, 19 nt, Homo sapiens
  misc_RNA (1)...(19): siRNA sense strand
ggaucagaacaacagcuuu

SEQ ID NO: 1487667 - RNA, 19 nt, Homo sapiens
  misc_RNA (1)...(19): siRNA sense strand
caacaggagguuuauucag

SEQ ID NO: 1487668 - RNA, 19 nt, Homo sapiens
  misc_RNA (1)...(19): siRNA sense strand
agagaauucgcuugaguau

SEQ ID NO: 1487669 - RNA, 19 nt, Homo sapiens
  misc_RNA (1)...(19): siRNA sense strand
agacaagacaccagaaagg

SEQ ID NO: 1487670 - RNA, 19 nt, Homo sapiens
  misc_RNA (1)...(19): siRNA sense strand
gugggaaagcguucguuga

SEQ ID NO: 1487671 - RNA, 19 nt, Homo sapiens
  misc_RNA (1)...(19): siRNA sense strand
gagguuuauucagucaaau

SEQ ID NO: 1487672 - RNA, 19 nt, Homo sapiens
  misc_RNA (1)...(19): siRNA sense strand
gaauuucuaucaccacuac

SEQ ID NO: 1487673 - RNA, 19 nt, Homo sapiens
  misc_RNA (1)...(19): siRNA sense strand
gaaugaacacggaggaguu

SEQ ID NO: 1487674 - RNA, 19 nt, Homo sapiens
  misc_RNA (1)...(19): siRNA sense strand
gugaacggcuuuggccuuu

SEQ ID NO: 1487675 - RNA, 19 nt, Homo sapiens
  misc_RNA (1)...(19): siRNA sense strand
gccaggacgugaugguuca

SEQ ID NO: 1487676 - RNA, 19 nt, Homo sapiens
  misc_RNA (1)...(19): siRNA sense strand
ggaugcagacggagaaagu

SEQ ID NO: 1487677 - RNA, 19 nt, Homo sapiens
  misc_RNA (1)...(19): siRNA sense strand
gagacgaaccgggaacuuc

SEQ ID NO: 1487678 - RNA, 19 nt, Homo sapiens
  misc_RNA (1)...(19): siRNA sense strand
ugaccggguuggaggaaug

SEQ ID NO: 1487679 - RNA, 19 nt, Homo sapiens
  misc_RNA (1)...(19): siRNA sense strand
ggaauuucuaucaccacua

SEQ ID NO: 1487680 - RNA, 19 nt, Homo sapiens
  misc_RNA (1)...(19): siRNA sense strand
gcgucguccugguggauuu

SEQ ID NO: 1487681 - RNA, 19 nt, Homo sapiens
  misc_RNA (1)...(19): siRNA sense strand
cacgguggguggcacaguu

SEQ ID NO: 1487682 - RNA, 19 nt, Homo sapiens
  misc_RNA (1)...(19): siRNA sense strand
gccugcgacuguccgagua

SEQ ID NO: 1487683 - RNA, 19 nt, Homo sapiens
  misc_RNA (1)...(19): siRNA sense strand
ccacuucccacccaacauc

SEQ ID NO: 1487684 - RNA, 19 nt, Homo sapiens
  misc_RNA (1)...(19): siRNA sense strand
ggacuuugaccggguugga

SEQ ID NO: 1487685 - RNA, 19 nt, Homo sapiens
  misc_RNA (1)...(19): siRNA sense strand
gcacugaaaugaacaacaa

SEQ ID NO: 1487686 - RNA, 19 nt, Homo sapiens
  misc_RNA (1)...(19): siRNA sense strand
acaaggagcucuuugauga

SEQ ID NO: 1487687 - RNA, 19 nt, Homo sapiens
  misc_RNA (1)...(19): siRNA sense strand
gaacauuuauggacucaug

SEQ ID NO: 1487688 - RNA, 19 nt, Homo sapiens
  misc_RNA (1)...(19): siRNA sense strand
gggaagagaugacugacaa

SEQ ID NO: 1487689 - RNA, 19 nt, Homo sapiens
  misc_RNA (1)...(19): siRNA sense strand
caaagacuguggcaucaug

SEQ ID NO: 1487690 - RNA, 19 nt, Homo sapiens
  misc_RNA (1)...(19): siRNA sense strand
cagaugaaguccuggagaa

SEQ ID NO: 1487691 - RNA, 19 nt, Homo sapiens
  misc_RNA (1)...(19): siRNA sense strand
ggacaucguguucagcaaa

SEQ ID NO: 1487692 - RNA, 19 nt, Homo sapiens
  misc_RNA (1)...(19): siRNA sense strand
gaaaugaacaacaagaacu

SEQ ID NO: 1487693 - RNA, 19 nt, Homo sapiens
  misc_RNA (1)...(19): siRNA sense strand
ugacagacaccagcaagua

SEQ ID NO: 1487694 - RNA, 19 nt, Homo sapiens
  misc_RNA (1)...(19): siRNA sense strand
agagaugacugacaacaca

SEQ ID NO: 1487695 - RNA, 19 nt, Homo sapiens
  misc_RNA (1)...(19): siRNA sense strand
ucaaagaggcagugaagga

SEQ ID NO: 1487696 - RNA, 19 nt, Homo sapiens
  misc_RNA (1)...(19): siRNA sense strand
gcaaagucaaggccaagaa

SEQ ID NO: 1487697 - RNA, 19 nt, Homo sapiens
  misc_RNA (1)...(19): siRNA sense strand
ggacguggacaucguguuc

SEQ ID NO: 1487698 - RNA, 19 nt, Homo sapiens
  misc_RNA (1)...(19): siRNA sense strand
ucuccaagcugugcaaaga

SEQ ID NO: 1487699 - RNA, 19 nt, Homo sapiens
  misc_RNA (1)...(19): siRNA sense strand
caaagaggcagugaaggaa

SEQ ID NO: 1487700 - RNA, 19 nt, Homo sapiens
  misc_RNA (1)...(19): siRNA sense strand
gaagaguccagaugaaguc

SEQ ID NO: 1487701 - RNA, 19 nt, Homo sapiens
  misc_RNA (1)...(19): siRNA sense strand
ggaagaguccagaugaagu

SEQ ID NO: 1487702 - RNA, 19 nt, Homo sapiens
  misc_RNA (1)...(19): siRNA sense strand
gaagagaugacugacaaca

SEQ ID NO: 1487703 - RNA, 19 nt, Homo sapiens
  misc_RNA (1)...(19): siRNA sense strand
caggcuaugugagugguua

SEQ ID NO: 1487704 - RNA, 19 nt, Homo sapiens
  misc_RNA (1)...(19): siRNA sense strand
gagaacauuuauggacuca

SEQ ID NO: 1487705 - RNA, 19 nt, Homo sapiens
  misc_RNA (1)...(19): siRNA sense strand
gaaguccuggagaacauuu

SEQ ID NO: 1487706 - RNA, 19 nt, Homo sapiens
  misc_RNA (1)...(19): siRNA sense strand
acgauaagaagaccaagua

SEQ ID NO: 1487707 - RNA, 19 nt, Homo sapiens
  misc_RNA (1)...(19): siRNA sense strand
caucacguuucaacaguuc

SEQ ID NO: 1487708 - RNA, 19 nt, Homo sapiens
  misc_RNA (1)...(19): siRNA sense strand
guucuggcaccuacgauaa

SEQ ID NO: 1487709 - RNA, 19 nt, Homo sapiens
  misc_RNA (1)...(19): siRNA sense strand
ccacaaggagcucuuugau

SEQ ID NO: 1487710 - RNA, 19 nt, Homo sapiens
  misc_RNA (1)...(19): siRNA sense strand
aaggagcucuuugaugaga

SEQ ID NO: 1487711 - RNA, 19 nt, Homo sapiens
  misc_RNA (1)...(19): siRNA sense strand
gaaccaucacguuucaaca

SEQ ID NO: 1487712 - RNA, 19 nt, Homo sapiens
  misc_RNA (1)...(19): siRNA sense strand
gacaucguguucagcaaag

SEQ ID NO: 1487713 - RNA, 19 nt, Homo sapiens
  misc_RNA (1)...(19): siRNA sense strand
gaugaaguccuggagaaca

SEQ ID NO: 1487714 - RNA, 19 nt, Homo sapiens
  misc_RNA (1)...(19): siRNA sense strand
ccaucacguuucaacaguu

SEQ ID NO: 1487715 - RNA, 19 nt, Homo sapiens
  misc_RNA (1)...(19): siRNA sense strand
gacgggaagagaugacuga

SEQ ID NO: 1487716 - RNA, 19 nt, Homo sapiens
  misc_RNA (1)...(19): siRNA sense strand
ccaccacuggcgcuacuaa

SEQ ID NO: 1487717 - RNA, 19 nt, Homo sapiens
  misc_RNA (1)...(19): siRNA sense strand
gcaccuacgauaagaagac

SEQ ID NO: 1487718 - RNA, 19 nt, Homo sapiens
  misc_RNA (1)...(19): siRNA sense strand
aaagggaagaguccagaug

SEQ ID NO: 1487719 - RNA, 19 nt, Homo sapiens
  misc_RNA (1)...(19): siRNA sense strand
ugcaaagacuguggcauca

SEQ ID NO: 1487720 - RNA, 19 nt, Homo sapiens
  misc_RNA (1)...(19): siRNA sense strand
gguucuggcaccuacgaua

SEQ ID NO: 1487721 - RNA, 19 nt, Homo sapiens
  misc_RNA (1)...(19): siRNA sense strand
cacaaggagcucuuugaug

SEQ ID NO: 1487722 - RNA, 19 nt, Homo sapiens
  misc_RNA (1)...(19): siRNA sense strand
gggaagaguccagaugaag

SEQ ID NO: 1487723 - RNA, 19 nt, Homo sapiens
  misc_RNA (1)...(19): siRNA sense strand
agggaagaguccagaugaa

SEQ ID NO: 1487724 - RNA, 19 nt, Homo sapiens
  misc_RNA (1)...(19): siRNA sense strand
aagggaagaguccagauga

SEQ ID NO: 1487725 - RNA, 19 nt, Homo sapiens
  misc_RNA (1)...(19): siRNA sense strand
ugggugcaguggaccguuu

SEQ ID NO: 1487726 - RNA, 19 nt, Homo sapiens
  misc_RNA (1)...(19): siRNA sense strand
gcccgaaccaucacguuuc

SEQ ID NO: 1487727 - RNA, 19 nt, Homo sapiens
  misc_RNA (1)...(19): siRNA sense strand
ccaucgguuugcugcguuu

SEQ ID NO: 1487728 - RNA, 19 nt, Homo sapiens
  misc_RNA (1)...(19): siRNA sense strand
cccgaaccaucacguuuca

SEQ ID NO: 1487729 - RNA, 19 nt, Homo sapiens
  misc_RNA (1)...(19): siRNA sense strand
cuacuaaagcaacaacagu

SEQ ID NO: 1487730 - RNA, 19 nt, Homo sapiens
  misc_RNA (1)...(19): siRNA sense strand
gccaagaacgcccgaacca

SEQ ID NO: 1487731 - RNA, 19 nt, Homo sapiens
  misc_RNA (1)...(19): siRNA sense strand
gcaaagacuguggcaucau

SEQ ID NO: 1487732 - RNA, 19 nt, Homo sapiens
  misc_RNA (1)...(19): siRNA sense strand
guggaccguuugacagaca

SEQ ID NO: 1487733 - RNA, 19 nt, Homo sapiens
  misc_RNA (1)...(19): siRNA sense strand
caaagucaaggccaagaac

SEQ ID NO: 1487734 - RNA, 19 nt, Homo sapiens
  misc_RNA (1)...(19): siRNA sense strand
cugaaaugaacaacaagaa

SEQ ID NO: 1487735 - RNA, 19 nt, Homo sapiens
  misc_RNA (1)...(19): siRNA sense strand
cuaugugagugguuacaag

SEQ ID NO: 1487736 - RNA, 19 nt, Homo sapiens
  misc_RNA (1)...(19): siRNA sense strand
gacagacaccagcaaguac

SEQ ID NO: 1487737 - RNA, 19 nt, Homo sapiens
  misc_RNA (1)...(19): siRNA sense strand
caguggaccguuugacaga

SEQ ID NO: 1487738 - RNA, 19 nt, Homo sapiens
  misc_RNA (1)...(19): siRNA sense strand
ugaaaugaacaacaagaac

SEQ ID NO: 1487739 - RNA, 19 nt, Homo sapiens
  misc_RNA (1)...(19): siRNA sense strand
ggaauuaacuggcuucauc

SEQ ID NO: 1487740 - RNA, 19 nt, Homo sapiens
  misc_RNA (1)...(19): siRNA sense strand
ucaagggcaucaccaauuu

SEQ ID NO: 1487741 - RNA, 19 nt, Homo sapiens
  misc_RNA (1)...(19): siRNA sense strand
ugaaguggcuguagcuuau

SEQ ID NO: 1487742 - RNA, 19 nt, Homo sapiens
  misc_RNA (1)...(19): siRNA sense strand
cagaaguccuuucauguga

SEQ ID NO: 1487743 - RNA, 19 nt, Homo sapiens
  misc_RNA (1)...(19): siRNA sense strand
cgacccagaucaagauaaa

SEQ ID NO: 1487744 - RNA, 19 nt, Homo sapiens
  misc_RNA (1)...(19): siRNA sense strand
ccaagauggucaacaaguu

SEQ ID NO: 1487745 - RNA, 19 nt, Homo sapiens
  misc_RNA (1)...(19): siRNA sense strand
ucaaauauguucugauguc

SEQ ID NO: 1487746 - RNA, 19 nt, Homo sapiens
  misc_RNA (1)...(19): siRNA sense strand
cgucaaauauguucugaug

SEQ ID NO: 1487747 - RNA, 19 nt, Homo sapiens
  misc_RNA (1)...(19): siRNA sense strand
gacccuggcucgcuucauu

SEQ ID NO: 1487748 - RNA, 19 nt, Homo sapiens
  misc_RNA (1)...(19): siRNA sense strand
gcagauggccacuucuuug

SEQ ID NO: 1487749 - RNA, 19 nt, Homo sapiens
  misc_RNA (1)...(19): siRNA sense strand
agacuaaccugccuagcaa

SEQ ID NO: 1487750 - RNA, 19 nt, Homo sapiens
  misc_RNA (1)...(19): siRNA sense strand
uaaagaagccucccaaggu

SEQ ID NO: 1487751 - RNA, 19 nt, Homo sapiens
  misc_RNA (1)...(19): siRNA sense strand
ggacagcacccugcacaaa

SEQ ID NO: 1487752 - RNA, 19 nt, Homo sapiens
  misc_RNA (1)...(19): siRNA sense strand
gcagaaguccuuucaugug

SEQ ID NO: 1487753 - RNA, 19 nt, Homo sapiens
  misc_RNA (1)...(19): siRNA sense strand
ccacuucuuuggacagauu

SEQ ID NO: 1487754 - RNA, 19 nt, Homo sapiens
  misc_RNA (1)...(19): siRNA sense strand
ucaaugaugugcuucaagu

SEQ ID NO: 1487755 - RNA, 19 nt, Homo sapiens
  misc_RNA (1)...(19): siRNA sense strand
gaugggcaccgucaaauau

SEQ ID NO: 1487756 - RNA, 19 nt, Homo sapiens
  misc_RNA (1)...(19): siRNA sense strand
uagcuuaucccaagucaaa

SEQ ID NO: 1487757 - RNA, 19 nt, Homo sapiens
  misc_RNA (1)...(19): siRNA sense strand
caccagcuaucucgaagaa

SEQ ID NO: 1487758 - RNA, 19 nt, Homo sapiens
  misc_RNA (1)...(19): siRNA sense strand
cggaaguccucaucgauug

SEQ ID NO: 1487759 - RNA, 19 nt, Homo sapiens
  misc_RNA (1)...(19): siRNA sense strand
uaaccugccuagcaacaug

SEQ ID NO: 1487760 - RNA, 19 nt, Homo sapiens
  misc_RNA (1)...(19): siRNA sense strand
uggcugagcuggacauagu

SEQ ID NO: 1487761 - RNA, 19 nt, Homo sapiens
  misc_RNA (1)...(19): siRNA sense strand
gagggaacauggagaucau

SEQ ID NO: 1487762 - RNA, 19 nt, Homo sapiens
  misc_RNA (1)...(19): siRNA sense strand
gaaacagccagggaugaaa

SEQ ID NO: 1487763 - RNA, 19 nt, Homo sapiens
  misc_RNA (1)...(19): siRNA sense strand
cugcagaaguccuuucaug

SEQ ID NO: 1487764 - RNA, 19 nt, Homo sapiens
  misc_RNA (1)...(19): siRNA sense strand
gcuccaaugucccucuuuc

SEQ ID NO: 1487765 - RNA, 19 nt, Homo sapiens
  misc_RNA (1)...(19): siRNA sense strand
ggagugggcaucuuccaau

SEQ ID NO: 1487766 - RNA, 19 nt, Homo sapiens
  misc_RNA (1)...(19): siRNA sense strand
gagugggcaucuuccaaug

SEQ ID NO: 1487767 - RNA, 19 nt, Homo sapiens
  misc_RNA (1)...(19): siRNA sense strand
ggccaugaauuacaaucug

SEQ ID NO: 1487768 - RNA, 19 nt, Homo sapiens
  misc_RNA (1)...(19): siRNA sense strand
gaauuaacuggcuucauca

SEQ ID NO: 1487769 - RNA, 19 nt, Homo sapiens
  misc_RNA (1)...(19): siRNA sense strand
ccucaucgauuggcaacuu

SEQ ID NO: 1487770 - RNA, 19 nt, Homo sapiens
  misc_RNA (1)...(19): siRNA sense strand
cugcagagcuugcccuucu

SEQ ID NO: 1487771 - RNA, 19 nt, Homo sapiens
  misc_RNA (1)...(19): siRNA sense strand
gaaguggaccaaccucagu

SEQ ID NO: 1487772 - RNA, 19 nt, Homo sapiens
  misc_RNA (1)...(19): siRNA sense strand
agagucauauccuggagaa

SEQ ID NO: 1487773 - RNA, 19 nt, Homo sapiens
  misc_RNA (1)...(19): siRNA sense strand
ggagggaacauggagauca

SEQ ID NO: 1487774 - RNA, 19 nt, Homo sapiens
  misc_RNA (1)...(19): siRNA sense strand
caaggucacuaugaagaca

SEQ ID NO: 1487775 - RNA, 19 nt, Homo sapiens
  misc_RNA (1)...(19): siRNA sense strand
caagauggucaacaaguuc

SEQ ID NO: 1487776 - RNA, 19 nt, Homo sapiens
  misc_RNA (1)...(19): siRNA sense strand
ccagaugggcaccgucaaa

SEQ ID NO: 1487777 - RNA, 19 nt, Homo sapiens
  misc_RNA (1)...(19): siRNA sense strand
gugggcaucuuccaaugug

SEQ ID NO: 1487778 - RNA, 19 nt, Homo sapiens
  misc_RNA (1)...(19): siRNA sense strand
cuacaucccaguugucaau

SEQ ID NO: 1487779 - RNA, 19 nt, Homo sapiens
  misc_RNA (1)...(19): siRNA sense strand
ucaucacacugaacuuugu

SEQ ID NO: 1487780 - RNA, 19 nt, Homo sapiens
  misc_RNA (1)...(19): siRNA sense strand
gggcaucaccaauuugaag

SEQ ID NO: 1487781 - RNA, 19 nt, Homo sapiens
  misc_RNA (1)...(19): siRNA sense strand
ccacagcacccuggagaug

SEQ ID NO: 1487782 - RNA, 19 nt, Homo sapiens
  misc_RNA (1)...(19): siRNA sense strand
uggucaaugugaagacuaa

SEQ ID NO: 1487783 - RNA, 19 nt, Homo sapiens
  misc_RNA (1)...(19): siRNA sense strand
gcaacaugcuccccaagau

SEQ ID NO: 1487784 - RNA, 19 nt, Homo sapiens
  misc_RNA (1)...(19): siRNA sense strand
acagcacccuggagauguu

SEQ ID NO: 1487785 - RNA, 19 nt, Homo sapiens
  misc_RNA (1)...(19): siRNA sense strand
ucgaugcaguccuggugua

SEQ ID NO: 1487786 - RNA, 19 nt, Homo sapiens
  misc_RNA (1)...(19): siRNA sense strand
cgucaucacacugaacuuu

SEQ ID NO: 1487787 - RNA, 19 nt, Homo sapiens
  misc_RNA (1)...(19): siRNA sense strand
gagcuggacauaguagaga

SEQ ID NO: 1487788 - RNA, 19 nt, Homo sapiens
  misc_RNA (1)...(19): siRNA sense strand
cugaaguggcuguagcuua

SEQ ID NO: 1487789 - RNA, 19 nt, Homo sapiens
  misc_RNA (1)...(19): siRNA sense strand
gcaguccugguguauguga

SEQ ID NO: 1487790 - RNA, 19 nt, Homo sapiens
  misc_RNA (1)...(19): siRNA sense strand
gucauauccuggagaagau

SEQ ID NO: 1487791 - RNA, 19 nt, Homo sapiens
  misc_RNA (1)...(19): siRNA sense strand
agccagggaugaaaccuau

SEQ ID NO: 1487792 - RNA, 19 nt, Homo sapiens
  misc_RNA (1)...(19): siRNA sense strand
ucaaugagagggaauuaac

SEQ ID NO: 1487793 - RNA, 19 nt, Homo sapiens
  misc_RNA (1)...(19): siRNA sense strand
agaugggcaccgucaaaua

SEQ ID NO: 1487794 - RNA, 19 nt, Homo sapiens
  misc_RNA (1)...(19): siRNA sense strand
acagcacccugcacaaagu

SEQ ID NO: 1487795 - RNA, 19 nt, Homo sapiens
  misc_RNA (1)...(19): siRNA sense strand
ccaauuugaaggugaagga

SEQ ID NO: 1487796 - RNA, 19 nt, Homo sapiens
  misc_RNA (1)...(19): siRNA sense strand
gaggucauccuggucaaug

SEQ ID NO: 1487797 - RNA, 19 nt, Homo sapiens
  misc_RNA (1)...(19): siRNA sense strand
caucccaguugucaaugau

SEQ ID NO: 1487798 - RNA, 19 nt, Homo sapiens
  misc_RNA (1)...(19): siRNA sense strand
ugacgacccagaucaagau

SEQ ID NO: 1487799 - RNA, 19 nt, Homo sapiens
  misc_RNA (1)...(19): siRNA sense strand
agaaacagccagggaugaa

SEQ ID NO: 1487800 - RNA, 19 nt, Homo sapiens
  misc_RNA (1)...(19): siRNA sense strand
gacagcacccugcacaaag

SEQ ID NO: 1487801 - RNA, 19 nt, Homo sapiens
  misc_RNA (1)...(19): siRNA sense strand
ccggaaguccucaucgauu

SEQ ID NO: 1487802 - RNA, 19 nt, Homo sapiens
  misc_RNA (1)...(19): siRNA sense strand
ugguguaugugaacaggaa

SEQ ID NO: 1487803 - RNA, 19 nt, Homo sapiens
  misc_RNA (1)...(19): siRNA sense strand
caaaagggcaaaaccauca

SEQ ID NO: 1487804 - RNA, 19 nt, Homo sapiens
  misc_RNA (1)...(19): siRNA sense strand
gaagccuacaucccaguug

SEQ ID NO: 1487805 - RNA, 19 nt, Homo sapiens
  misc_RNA (1)...(19): siRNA sense strand
caucaccagcuaucucgaa

SEQ ID NO: 1487806 - RNA, 19 nt, Homo sapiens
  misc_RNA (1)...(19): siRNA sense strand
cucccaaggucacuaugaa

SEQ ID NO: 1487807 - RNA, 19 nt, Homo sapiens
  misc_RNA (1)...(19): siRNA sense strand
agucauauccuggagaaga

SEQ ID NO: 1487808 - RNA, 19 nt, Homo sapiens
  misc_RNA (1)...(19): siRNA sense strand
aguagagaaugcccugaug

SEQ ID NO: 1487809 - RNA, 19 nt, Homo sapiens
  misc_RNA (1)...(19): siRNA sense strand
ccagggaugaaaccuauca

SEQ ID NO: 1487810 - RNA, 19 nt, Homo sapiens
  misc_RNA (1)...(19): siRNA sense strand
caucacacugaacuuugua

SEQ ID NO: 1487811 - RNA, 19 nt, Homo sapiens
  misc_RNA (1)...(19): siRNA sense strand
cggacuuucuggccaugaa

SEQ ID NO: 1487812 - RNA, 19 nt, Homo sapiens
  misc_RNA (1)...(19): siRNA sense strand
ggccacuucuuuggacaga

SEQ ID NO: 1487813 - RNA, 19 nt, Homo sapiens
  misc_RNA (1)...(19): siRNA sense strand
caagggcaucaccaauuug

SEQ ID NO: 1487814 - RNA, 19 nt, Homo sapiens
  misc_RNA (1)...(19): siRNA sense strand
augcaguccugguguaugu

SEQ ID NO: 1487815 - RNA, 19 nt, Homo sapiens
  misc_RNA (1)...(19): siRNA sense strand
aagccuacaucccaguugu

SEQ ID NO: 1487816 - RNA, 19 nt, Homo sapiens
  misc_RNA (1)...(19): siRNA sense strand
caccacagccagcuacauc

SEQ ID NO: 1487817 - RNA, 19 nt, Homo sapiens
  misc_RNA (1)...(19): siRNA sense strand
acaucccaguugucaauga

SEQ ID NO: 1487818 - RNA, 19 nt, Homo sapiens
  misc_RNA (1)...(19): siRNA sense strand
ucaaucugaagguccagua

SEQ ID NO: 1487819 - RNA, 19 nt, Homo sapiens
  misc_RNA (1)...(19): siRNA sense strand
gggcaccgucaaauauguu

SEQ ID NO: 1487820 - RNA, 19 nt, Homo sapiens
  misc_RNA (1)...(19): siRNA sense strand
ugucaaugaugugcuucaa

SEQ ID NO: 1487821 - RNA, 19 nt, Homo sapiens
  misc_RNA (1)...(19): siRNA sense strand
gacgacccagaucaagaua

SEQ ID NO: 1487822 - RNA, 19 nt, Homo sapiens
  misc_RNA (1)...(19): siRNA sense strand
caucguggcccugaacauc

SEQ ID NO: 1487823 - RNA, 19 nt, Homo sapiens
  misc_RNA (1)...(19): siRNA sense strand
ggaaguccucaucgauugg

SEQ ID NO: 1487824 - RNA, 19 nt, Homo sapiens
  misc_RNA (1)...(19): siRNA sense strand
uaucaagggcaucaccaau

SEQ ID NO: 1487825 - RNA, 19 nt, Homo sapiens
  misc_RNA (1)...(19): siRNA sense strand
cccaaggucacuaugaaga

SEQ ID NO: 1487826 - RNA, 19 nt, Homo sapiens
  misc_RNA (1)...(19): siRNA sense strand
ggaaagaacuggaguggau

SEQ ID NO: 1487827 - RNA, 19 nt, Homo sapiens
  misc_RNA (1)...(19): siRNA sense strand
ggucaaccgucauccuuuc

SEQ ID NO: 1487828 - RNA, 19 nt, Homo sapiens
  misc_RNA (1)...(19): siRNA sense strand
ccuguaagacuucuggaua

SEQ ID NO: 1487829 - RNA, 19 nt, Homo sapiens
  misc_RNA (1)...(19): siRNA sense strand
cguccuggcuguucuccaa

SEQ ID NO: 1487830 - RNA, 19 nt, Homo sapiens
  misc_RNA (1)...(19): siRNA sense strand
cauguauuauugugugaga

SEQ ID NO: 1487831 - RNA, 19 nt, Homo sapiens
  misc_RNA (1)...(19): siRNA sense strand
ccagauacagcccauccuu

SEQ ID NO: 1487832 - RNA, 19 nt, Homo sapiens
  misc_RNA (1)...(19): siRNA sense strand
ugugagagggaccaucuaa

SEQ ID NO: 1487833 - RNA, 19 nt, Homo sapiens
  misc_RNA (1)...(19): siRNA sense strand
gccauguauuauuguguga

SEQ ID NO: 1487834 - RNA, 19 nt, Homo sapiens
  misc_RNA (1)...(19): siRNA sense strand
gggagucucugaggaucuc

SEQ ID NO: 1487835 - RNA, 19 nt, Homo sapiens
  misc_RNA (1)...(19): siRNA sense strand
gggucaaccgucauccuuu

SEQ ID NO: 1487836 - RNA, 19 nt, Homo sapiens
  misc_RNA (1)...(19): siRNA sense strand
cuguaagacuucuggauac

SEQ ID NO: 1487837 - RNA, 19 nt, Homo sapiens
  misc_RNA (1)...(19): siRNA sense strand
gcacucagcuuccauguuc

SEQ ID NO: 1487838 - RNA, 19 nt, Homo sapiens
  misc_RNA (1)...(19): siRNA sense strand
gagauaagcaguacaagua

SEQ ID NO: 1487839 - RNA, 19 nt, Homo sapiens
  misc_RNA (1)...(19): siRNA sense strand
gaagauaagaggacagaua

SEQ ID NO: 1487840 - RNA, 19 nt, Homo sapiens
  misc_RNA (1)...(19): siRNA sense strand
gcacaugccucuuguucaa

SEQ ID NO: 1487841 - RNA, 19 nt, Homo sapiens
  misc_RNA (1)...(19): siRNA sense strand
gcucuaaccucaccucauu

SEQ ID NO: 1487842 - RNA, 19 nt, Homo sapiens
  misc_RNA (1)...(19): siRNA sense strand
gaacagagggacagaagaa

SEQ ID NO: 1487843 - RNA, 19 nt, Homo sapiens
  misc_RNA (1)...(19): siRNA sense strand
ggaggaaguuucuggaaga

SEQ ID NO: 1487844 - RNA, 19 nt, Homo sapiens
  misc_RNA (1)...(19): siRNA sense strand
uaaguucuuucccaaguua

SEQ ID NO: 1487845 - RNA, 19 nt, Homo sapiens
  misc_RNA (1)...(19): siRNA sense strand
ggugaggaauuucuuguuu

SEQ ID NO: 1487846 - RNA, 19 nt, Homo sapiens
  misc_RNA (1)...(19): siRNA sense strand
ggauuuggauguaggcuuu

SEQ ID NO: 1487847 - RNA, 19 nt, Homo sapiens
  misc_RNA (1)...(19): siRNA sense strand
ccacaaacauucaccaauc

SEQ ID NO: 1487848 - RNA, 19 nt, Homo sapiens
  misc_RNA (1)...(19): siRNA sense strand
aaacacagauggccugaga

SEQ ID NO: 1487849 - RNA, 19 nt, Homo sapiens
  misc_RNA (1)...(19): siRNA sense strand
uaaacgacccuuccucaua

SEQ ID NO: 1487850 - RNA, 19 nt, Homo sapiens
  misc_RNA (1)...(19): siRNA sense strand
caucucaaauugucucuaa

SEQ ID NO: 1487851 - RNA, 19 nt, Homo sapiens
  misc_RNA (1)...(19): siRNA sense strand
gagaaacccuuuguaagug

SEQ ID NO: 1487852 - RNA, 19 nt, Homo sapiens
  misc_RNA (1)...(19): siRNA sense strand
aaacgacccuuccucauau

SEQ ID NO: 1487853 - RNA, 19 nt, Homo sapiens
  misc_RNA (1)...(19): siRNA sense strand
ggguagagguggugauuga

SEQ ID NO: 1487854 - RNA, 19 nt, Homo sapiens
  misc_RNA (1)...(19): siRNA sense strand
gcaaugauccuguuucuac

SEQ ID NO: 1487855 - RNA, 19 nt, Homo sapiens
  misc_RNA (1)...(19): siRNA sense strand
guaagugggcucuggauuu

SEQ ID NO: 1487856 - RNA, 19 nt, Homo sapiens
  misc_RNA (1)...(19): siRNA sense strand
gaacgggacuggcccuucu

SEQ ID NO: 1487857 - RNA, 19 nt, Homo sapiens
  misc_RNA (1)...(19): siRNA sense strand
gcucaaccaguauuuauuu

SEQ ID NO: 1487858 - RNA, 19 nt, Homo sapiens
  misc_RNA (1)...(19): siRNA sense strand
caaccuucaucucaaauug

SEQ ID NO: 1487859 - RNA, 19 nt, Homo sapiens
  misc_RNA (1)...(19): siRNA sense strand
ccagggauuugaagaggua

SEQ ID NO: 1487860 - RNA, 19 nt, Homo sapiens
  misc_RNA (1)...(19): siRNA sense strand
ucauagaaccguagaauug

SEQ ID NO: 1487861 - RNA, 19 nt, Homo sapiens
  misc_RNA (1)...(19): siRNA sense strand
gauggccacuucaguauuc

SEQ ID NO: 1487862 - RNA, 19 nt, Homo sapiens
  misc_RNA (1)...(19): siRNA sense strand
gaaaugacccuggcaucaa

SEQ ID NO: 1487863 - RNA, 19 nt, Homo sapiens
  misc_RNA (1)...(19): siRNA sense strand
gaagaagagagaaagcaaa

SEQ ID NO: 1487864 - RNA, 19 nt, Homo sapiens
  misc_RNA (1)...(19): siRNA sense strand
caacagaauucauuaacac

SEQ ID NO: 1487865 - RNA, 19 nt, Homo sapiens
  misc_RNA (1)...(19): siRNA sense strand
gacaucaucugguuguuuc

SEQ ID NO: 1487866 - RNA, 19 nt, Homo sapiens
  misc_RNA (1)...(19): siRNA sense strand
gcacucuucucccuguuga

SEQ ID NO: 1487867 - RNA, 19 nt, Homo sapiens
  misc_RNA (1)...(19): siRNA sense strand
ccucugcacuuucuauuug

SEQ ID NO: 1487868 - RNA, 19 nt, Homo sapiens
  misc_RNA (1)...(19): siRNA sense strand
ggacuagcuuggucacuca

SEQ ID NO: 1487869 - RNA, 19 nt, Homo sapiens
  misc_RNA (1)...(19): siRNA sense strand
caagggagguguuguacuc

SEQ ID NO: 1487870 - RNA, 19 nt, Homo sapiens
  misc_RNA (1)...(19): siRNA sense strand
gaugaucacugggaacaug

SEQ ID NO: 1487871 - RNA, 19 nt, Homo sapiens
  misc_RNA (1)...(19): siRNA sense strand
ggacuucacuuugauacca

SEQ ID NO: 1487872 - RNA, 19 nt, Homo sapiens
  misc_RNA (1)...(19): siRNA sense strand
caaccugucuuggcccuaa

SEQ ID NO: 1487873 - RNA, 19 nt, Homo sapiens
  misc_RNA (1)...(19): siRNA sense strand
gagccaaguuuguauagca

SEQ ID NO: 1487874 - RNA, 19 nt, Homo sapiens
  misc_RNA (1)...(19): siRNA sense strand
caucgcagccgucgucuuu

SEQ ID NO: 1487875 - RNA, 19 nt, Homo sapiens
  misc_RNA (1)...(19): siRNA sense strand
ggagaaugguuuggagguu

SEQ ID NO: 1487876 - RNA, 19 nt, Homo sapiens
  misc_RNA (1)...(19): siRNA sense strand
ggacugacuuuucaauuug

SEQ ID NO: 1487877 - RNA, 19 nt, Homo sapiens
  misc_RNA (1)...(19): siRNA sense strand
ggaaaugacccuggcauca

SEQ ID NO: 1487878 - RNA, 19 nt, Homo sapiens
  misc_RNA (1)...(19): siRNA sense strand
ccaacagaauucauuaaca

SEQ ID NO: 1487879 - RNA, 19 nt, Homo sapiens
  misc_RNA (1)...(19): siRNA sense strand
ggacaucaucugguuguuu

SEQ ID NO: 1487880 - RNA, 19 nt, Homo sapiens
  misc_RNA (1)...(19): siRNA sense strand
gaaacauucuuugagcaau

SEQ ID NO: 1487881 - RNA, 19 nt, Homo sapiens
  misc_RNA (1)...(19): siRNA sense strand
ugagaaacccuuuguaagu

SEQ ID NO: 1487882 - RNA, 19 nt, Homo sapiens
  misc_RNA (1)...(19): siRNA sense strand
cagagggacagaagaauaa

SEQ ID NO: 1487883 - RNA, 19 nt, Homo sapiens
  misc_RNA (1)...(19): siRNA sense strand
gauaagaggacagauacuu

SEQ ID NO: 1487884 - RNA, 19 nt, Homo sapiens
  misc_RNA (1)...(19): siRNA sense strand
guacagaucuggggauuug

SEQ ID NO: 1487885 - RNA, 19 nt, Homo sapiens
  misc_RNA (1)...(19): siRNA sense strand
acacagauggccugagaua

SEQ ID NO: 1487886 - RNA, 19 nt, Homo sapiens
  misc_RNA (1)...(19): siRNA sense strand
gaauuugguugagcucuuc

SEQ ID NO: 1487887 - RNA, 19 nt, Homo sapiens
  misc_RNA (1)...(19): siRNA sense strand
gacagaagaauaaguaaca

SEQ ID NO: 1487888 - RNA, 19 nt, Homo sapiens
  misc_RNA (1)...(19): siRNA sense strand
gcacaaaauugggagaaaa

SEQ ID NO: 1487889 - RNA, 19 nt, Homo sapiens
  misc_RNA (1)...(19): siRNA sense strand
ucaauggccuggucaacau

SEQ ID NO: 1487890 - RNA, 19 nt, Homo sapiens
  misc_RNA (1)...(19): siRNA sense strand
aaagggaaccuggaaauga

SEQ ID NO: 1487891 - RNA, 19 nt, Homo sapiens
  misc_RNA (1)...(19): siRNA sense strand
ggaaggaauuuuagagguu

SEQ ID NO: 1487892 - RNA, 19 nt, Homo sapiens
  misc_RNA (1)...(19): siRNA sense strand
gaggaggagugaugagaag

SEQ ID NO: 1487893 - RNA, 19 nt, Homo sapiens
  misc_RNA (1)...(19): siRNA sense strand
acacucaucuucaucaucu

SEQ ID NO: 1487894 - RNA, 19 nt, Homo sapiens
  misc_RNA (1)...(19): siRNA sense strand
aaugagaaacccuuuguaa

SEQ ID NO: 1487895 - RNA, 19 nt, Homo sapiens
  misc_RNA (1)...(19): siRNA sense strand
uaccaacacugcaccuuau

SEQ ID NO: 1487896 - RNA, 19 nt, Homo sapiens
  misc_RNA (1)...(19): siRNA sense strand
ggucugaaacauucuuuga

SEQ ID NO: 1487897 - RNA, 19 nt, Homo sapiens
  misc_RNA (1)...(19): siRNA sense strand
aaccacaggugucucauug

SEQ ID NO: 1487898 - RNA, 19 nt, Homo sapiens
  misc_RNA (1)...(19): siRNA sense strand
aaggagcucuggcggauga

SEQ ID NO: 1487899 - RNA, 19 nt, Homo sapiens
  misc_RNA (1)...(19): siRNA sense strand
cacaaacauucaccaauca

SEQ ID NO: 1487900 - RNA, 19 nt, Homo sapiens
  misc_RNA (1)...(19): siRNA sense strand
ccaaacacagacauacuuu

SEQ ID NO: 1487901 - RNA, 19 nt, Homo sapiens
  misc_RNA (1)...(19): siRNA sense strand
cauguucucuggcucauag

SEQ ID NO: 1487902 - RNA, 19 nt, Homo sapiens
  misc_RNA (1)...(19): siRNA sense strand
ggugugugcuuucuuugug

SEQ ID NO: 1487903 - RNA, 19 nt, Homo sapiens
  misc_RNA (1)...(19): siRNA sense strand
gcaaguacuguucccauuc

SEQ ID NO: 1487904 - RNA, 19 nt, Homo sapiens
  misc_RNA (1)...(19): siRNA sense strand
gaucaacccagacaaugug

SEQ ID NO: 1487905 - RNA, 19 nt, Homo sapiens
  misc_RNA (1)...(19): siRNA sense strand
cauuggcucucgcaagauu

SEQ ID NO: 1487906 - RNA, 19 nt, Homo sapiens
  misc_RNA (1)...(19): siRNA sense strand
gcacuguguucugaaagau

SEQ ID NO: 1487907 - RNA, 19 nt, Homo sapiens
  misc_RNA (1)...(19): siRNA sense strand
gaaggaauuuuagagguuu

SEQ ID NO: 1487908 - RNA, 19 nt, Homo sapiens
  misc_RNA (1)...(19): siRNA sense strand
cuaccaacacugcaccuua

SEQ ID NO: 1487909 - RNA, 19 nt, Homo sapiens
  misc_RNA (1)...(19): siRNA sense strand
guauuugcaucuacuucaa

SEQ ID NO: 1487910 - RNA, 19 nt, Homo sapiens
  misc_RNA (1)...(19): siRNA sense strand
gggauuugaagagguauua

SEQ ID NO: 1487911 - RNA, 19 nt, Homo sapiens
  misc_RNA (1)...(19): siRNA sense strand
ucugaaagauuugaacuca

SEQ ID NO: 1487912 - RNA, 19 nt, Homo sapiens
  misc_RNA (1)...(19): siRNA sense strand
uaaguaacacucccaaaca

SEQ ID NO: 1487913 - RNA, 19 nt, Homo sapiens
  misc_RNA (1)...(19): siRNA sense strand
ugacagaggucuucauccu

SEQ ID NO: 1487914 - RNA, 19 nt, Homo sapiens
  misc_RNA (1)...(19): siRNA sense strand
acagagggacagaagaaua

SEQ ID NO: 1487915 - RNA, 19 nt, Homo sapiens
  misc_RNA (1)...(19): siRNA sense strand
guacuggguaugaucauga

SEQ ID NO: 1487916 - RNA, 19 nt, Homo sapiens
  misc_RNA (1)...(19): siRNA sense strand
gugaggaauuucuuguuuc

SEQ ID NO: 1487917 - RNA, 19 nt, Homo sapiens
  misc_RNA (1)...(19): siRNA sense strand
ggguggacaucaucugguu

SEQ ID NO: 1487918 - RNA, 19 nt, Homo sapiens
  misc_RNA (1)...(19): siRNA sense strand
ccaccuuccugcacaugaa

SEQ ID NO: 1487919 - RNA, 19 nt, Homo sapiens
  misc_RNA (1)...(19): siRNA sense strand
aggaauuucuuguuucuuc

SEQ ID NO: 1487920 - RNA, 19 nt, Homo sapiens
  misc_RNA (1)...(19): siRNA sense strand
gagugccuacuauguguua

SEQ ID NO: 1487921 - RNA, 19 nt, Homo sapiens
  misc_RNA (1)...(19): siRNA sense strand
caccaaucauuuauucguu

SEQ ID NO: 1487922 - RNA, 19 nt, Homo sapiens
  misc_RNA (1)...(19): siRNA sense strand
ccaaguuuguauagcaaga

SEQ ID NO: 1487923 - RNA, 19 nt, Homo sapiens
  misc_RNA (1)...(19): siRNA sense strand
gcucaaagggaaccuggaa

SEQ ID NO: 1487924 - RNA, 19 nt, Homo sapiens
  misc_RNA (1)...(19): siRNA sense strand
cgaaggacguccaccaacu

SEQ ID NO: 1487925 - RNA, 19 nt, Homo sapiens
  misc_RNA (1)...(19): siRNA sense strand
gcgcugcucucaggcauca

SEQ ID NO: 1487926 - RNA, 19 nt, Homo sapiens
  misc_RNA (1)...(19): siRNA sense strand
caaacauucaccaaucauu

SEQ ID NO: 1487927 - RNA, 19 nt, Homo sapiens
  misc_RNA (1)...(19): siRNA sense strand
acacagacauacuuuugua

SEQ ID NO: 1487928 - RNA, 19 nt, Homo sapiens
  misc_RNA (1)...(19): siRNA sense strand
uaagugggcucuggauuuu

SEQ ID NO: 1487929 - RNA, 19 nt, Homo sapiens
  misc_RNA (1)...(19): siRNA sense strand
ggcacuguguucugaaaga

SEQ ID NO: 1487930 - RNA, 19 nt, Homo sapiens
  misc_RNA (1)...(19): siRNA sense strand
gaaggacguccaccaacug

SEQ ID NO: 1487931 - RNA, 19 nt, Homo sapiens
  misc_RNA (1)...(19): siRNA sense strand
gggaaggcuuaggcaauga

SEQ ID NO: 1487932 - RNA, 19 nt, Homo sapiens
  misc_RNA (1)...(19): siRNA sense strand
agaaacccuuccaucugua

SEQ ID NO: 1487933 - RNA, 19 nt, Homo sapiens
  misc_RNA (1)...(19): siRNA sense strand
cuucaaccuucaucucaaa

SEQ ID NO: 1487934 - RNA, 19 nt, Homo sapiens
  misc_RNA (1)...(19): siRNA sense strand
agaaugguuuggagguuga

SEQ ID NO: 1487935 - RNA, 19 nt, Homo sapiens
  misc_RNA (1)...(19): siRNA sense strand
ugacagagcccagccaaag

SEQ ID NO: 1487936 - RNA, 19 nt, Homo sapiens
  misc_RNA (1)...(19): siRNA sense strand
ccaaucauuuauucguuca

SEQ ID NO: 1487937 - RNA, 19 nt, Homo sapiens
  misc_RNA (1)...(19): siRNA sense strand
gugcugguguccaucauua

SEQ ID NO: 1487938 - RNA, 19 nt, Homo sapiens
  misc_RNA (1)...(19): siRNA sense strand
ggucagcccuauccaguau

SEQ ID NO: 1487939 - RNA, 19 nt, Homo sapiens
  misc_RNA (1)...(19): siRNA sense strand
caguaucccugaacagaaa

SEQ ID NO: 1487940 - RNA, 19 nt, Homo sapiens
  misc_RNA (1)...(19): siRNA sense strand
ggugagacccggaagauga

SEQ ID NO: 1487941 - RNA, 19 nt, Homo sapiens
  misc_RNA (1)...(19): siRNA sense strand
gcaggccucuucuucuuca

SEQ ID NO: 1487942 - RNA, 19 nt, Homo sapiens
  misc_RNA (1)...(19): siRNA sense strand
caacaucugguucuacuuc

SEQ ID NO: 1487943 - RNA, 19 nt, Homo sapiens
  misc_RNA (1)...(19): siRNA sense strand
guacgcaggccucuucuuc

SEQ ID NO: 1487944 - RNA, 19 nt, Homo sapiens
  misc_RNA (1)...(19): siRNA sense strand
ggagugcccaccuaugcua

SEQ ID NO: 1487945 - RNA, 19 nt, Homo sapiens
  misc_RNA (1)...(19): siRNA sense strand
ugaugacgcucaccaacug

SEQ ID NO: 1487946 - RNA, 19 nt, Homo sapiens
  misc_RNA (1)...(19): siRNA sense strand
ucacucuccucuucuacuu

SEQ ID NO: 1487947 - RNA, 19 nt, Homo sapiens
  misc_RNA (1)...(19): siRNA sense strand
gcgauucccgugccuggua

SEQ ID NO: 1487948 - RNA, 19 nt, Homo sapiens
  misc_RNA (1)...(19): siRNA sense strand
cuucuucacucuccucuuc

SEQ ID NO: 1487949 - RNA, 19 nt, Homo sapiens
  misc_RNA (1)...(19): siRNA sense strand
gcgcugauguucauguacu

SEQ ID NO: 1487950 - RNA, 19 nt, Homo sapiens
  misc_RNA (1)...(19): siRNA sense strand
cuacagcuacuccuucuuc

SEQ ID NO: 1487951 - RNA, 19 nt, Homo sapiens
  misc_RNA (1)...(19): siRNA sense strand
acgcaggccucuucuucuu

SEQ ID NO: 1487952 - RNA, 19 nt, Homo sapiens
  misc_RNA (1)...(19): siRNA sense strand
gaggagugcccaccuaugc

SEQ ID NO: 1487953 - RNA, 19 nt, Homo sapiens
  misc_RNA (1)...(19): siRNA sense strand
ccaguaucccugaacagaa

SEQ ID NO: 1487954 - RNA, 19 nt, Homo sapiens
  misc_RNA (1)...(19): siRNA sense strand
uggcgcugauguucaugua

SEQ ID NO: 1487955 - RNA, 19 nt, Homo sapiens
  misc_RNA (1)...(19): siRNA sense strand
gcuacuccuucuuccacuu

SEQ ID NO: 1487956 - RNA, 19 nt, Homo sapiens
  misc_RNA (1)...(19): siRNA sense strand
gcugguguccaucauuaug

SEQ ID NO: 1487957 - RNA, 19 nt, Homo sapiens
  misc_RNA (1)...(19): siRNA sense strand
uauccaguaucccugaaca

SEQ ID NO: 1487958 - RNA, 19 nt, Homo sapiens
  misc_RNA (1)...(19): siRNA sense strand
gagggcaaggucuucauca

SEQ ID NO: 1487959 - RNA, 19 nt, Homo sapiens
  misc_RNA (1)...(19): siRNA sense strand
cugcaggccucggucauca

SEQ ID NO: 1487960 - RNA, 19 nt, Homo sapiens
  misc_RNA (1)...(19): siRNA sense strand
aaccucaccuucugugucu

SEQ ID NO: 1487961 - RNA, 19 nt, Homo sapiens
  misc_RNA (1)...(19): siRNA sense strand
ucuucacucuccucuucua

SEQ ID NO: 1487962 - RNA, 19 nt, Homo sapiens
  misc_RNA (1)...(19): siRNA sense strand
gcucgaaucuccuaaaugu

SEQ ID NO: 1487963 - RNA, 19 nt, Homo sapiens
  misc_RNA (1)...(19): siRNA sense strand
ccacaagaaucuaugauac

SEQ ID NO: 1487964 - RNA, 19 nt, Homo sapiens
  misc_RNA (1)...(19): siRNA sense strand
ucacagagaaguuggguuu

SEQ ID NO: 1487965 - RNA, 19 nt, Homo sapiens
  misc_RNA (1)...(19): siRNA sense strand
gagcucgaaucuccuaaau

SEQ ID NO: 1487966 - RNA, 19 nt, Homo sapiens
  misc_RNA (1)...(19): siRNA sense strand
ucgaaucuccuaaauguaa

SEQ ID NO: 1487967 - RNA, 19 nt, Homo sapiens
  misc_RNA (1)...(19): siRNA sense strand
guaaaaggcaggaaaauga

SEQ ID NO: 1487968 - RNA, 19 nt, Homo sapiens
  misc_RNA (1)...(19): siRNA sense strand
ggaaaugacagagcucgaa

SEQ ID NO: 1487969 - RNA, 19 nt, Homo sapiens
  misc_RNA (1)...(19): siRNA sense strand
gaaauccgggcaucacaga

SEQ ID NO: 1487970 - RNA, 19 nt, Homo sapiens
  misc_RNA (1)...(19): siRNA sense strand
gaaaugacagagcucgaau

SEQ ID NO: 1487971 - RNA, 19 nt, Homo sapiens
  misc_RNA (1)...(19): siRNA sense strand
aggcugcucuaucugguua

SEQ ID NO: 1487972 - RNA, 19 nt, Homo sapiens
  misc_RNA (1)...(19): siRNA sense strand
cgaaucuccuaaauguaaa

SEQ ID NO: 1487973 - RNA, 19 nt, Homo sapiens
  misc_RNA (1)...(19): siRNA sense strand
gagcagcuacuggaucaaa

SEQ ID NO: 1487974 - RNA, 19 nt, Homo sapiens
  misc_RNA (1)...(19): siRNA sense strand
ggaguacaccguagccaau

SEQ ID NO: 1487975 - RNA, 19 nt, Homo sapiens
  misc_RNA (1)...(19): siRNA sense strand
uagccaaugucaucucugu

SEQ ID NO: 1487976 - RNA, 19 nt, Homo sapiens
  misc_RNA (1)...(19): siRNA sense strand
acagagaaguuggguuuag

SEQ ID NO: 1487977 - RNA, 19 nt, Homo sapiens
  misc_RNA (1)...(19): siRNA sense strand
gcagcuagaggaaaugaca

SEQ ID NO: 1487978 - RNA, 19 nt, Homo sapiens
  misc_RNA (1)...(19): siRNA sense strand
gggcaucacagagaaguug

SEQ ID NO: 1487979 - RNA, 19 nt, Homo sapiens
  misc_RNA (1)...(19): siRNA sense strand
gcaggaaaaugagcagcua

SEQ ID NO: 1487980 - RNA, 19 nt, Homo sapiens
  misc_RNA (1)...(19): siRNA sense strand
cccacaagaaucuaugaua

SEQ ID NO: 1487981 - RNA, 19 nt, Homo sapiens
  misc_RNA (1)...(19): siRNA sense strand
acaagaaucuaugauacag

SEQ ID NO: 1487982 - RNA, 19 nt, Homo sapiens
  misc_RNA (1)...(19): siRNA sense strand
ggaucaaaaucaagaaauc

SEQ ID NO: 1487983 - RNA, 19 nt, Homo sapiens
  misc_RNA (1)...(19): siRNA sense strand
caccguagccaaugucauc

SEQ ID NO: 1487984 - RNA, 19 nt, Homo sapiens
  misc_RNA (1)...(19): siRNA sense strand
ggcacuagcucuggugaac

SEQ ID NO: 1487985 - RNA, 19 nt, Homo sapiens
  misc_RNA (1)...(19): siRNA sense strand
gaucccuucuuugcucaug

SEQ ID NO: 1487986 - RNA, 19 nt, Homo sapiens
  misc_RNA (1)...(19): siRNA sense strand
cacaagaaucuaugauaca

SEQ ID NO: 1487987 - RNA, 19 nt, Homo sapiens
  misc_RNA (1)...(19): siRNA sense strand
acugcuggauccucuggua

SEQ ID NO: 1487988 - RNA, 19 nt, Homo sapiens
  misc_RNA (1)...(19): siRNA sense strand
augagcagcuacuggauca

SEQ ID NO: 1487989 - RNA, 19 nt, Homo sapiens
  misc_RNA (1)...(19): siRNA sense strand
gaguugggcccugcaggaa

SEQ ID NO: 1487990 - RNA, 19 nt, Homo sapiens
  misc_RNA (1)...(19): siRNA sense strand
gggcagcuagaggaaauga

SEQ ID NO: 1487991 - RNA, 19 nt, Homo sapiens
  misc_RNA (1)...(19): siRNA sense strand
gcuacuggaucaaaaucaa

SEQ ID NO: 1487992 - RNA, 19 nt, Homo sapiens
  misc_RNA (1)...(19): siRNA sense strand
acagagcucgaaucuccua

SEQ ID NO: 1487993 - RNA, 19 nt, Homo sapiens
  misc_RNA (1)...(19): siRNA sense strand
ucccugggccuccuucuug

SEQ ID NO: 1487994 - RNA, 19 nt, Homo sapiens
  misc_RNA (1)...(19): siRNA sense strand
gaacaaauacuacuacauc

SEQ ID NO: 1487995 - RNA, 19 nt, Homo sapiens
  misc_RNA (1)...(19): siRNA sense strand
gaaagacuccaccuacuau

SEQ ID NO: 1487996 - RNA, 19 nt, Homo sapiens
  misc_RNA (1)...(19): siRNA sense strand
gaaugggaagcuuggauua

SEQ ID NO: 1487997 - RNA, 19 nt, Homo sapiens
  misc_RNA (1)...(19): siRNA sense strand
gaggaaauacuaaagaaug

SEQ ID NO: 1487998 - RNA, 19 nt, Homo sapiens
  misc_RNA (1)...(19): siRNA sense strand
gaaaagaauuguagaagca

SEQ ID NO: 1487999 - RNA, 19 nt, Homo sapiens
  misc_RNA (1)...(19): siRNA sense strand
acacagagaagaaaucaaa

SEQ ID NO: 1488000 - RNA, 19 nt, Homo sapiens
  misc_RNA (1)...(19): siRNA sense strand
ggacaaacuauucgagaga

SEQ ID NO: 1488001 - RNA, 19 nt, Homo sapiens
  misc_RNA (1)...(19): siRNA sense strand
gcaagagccacaaucaaug

SEQ ID NO: 1488002 - RNA, 19 nt, Homo sapiens
  misc_RNA (1)...(19): siRNA sense strand
gacaaacuauucgagagaa

SEQ ID NO: 1488003 - RNA, 19 nt, Homo sapiens
  misc_RNA (1)...(19): siRNA sense strand
caagagccacaaucaauga

SEQ ID NO: 1488004 - RNA, 19 nt, Homo sapiens
  misc_RNA (1)...(19): siRNA sense strand
uguagaagcagcaaauaaa

SEQ ID NO: 1488005 - RNA, 19 nt, Homo sapiens
  misc_RNA (1)...(19): siRNA sense strand
ggcaagagccacaaucaau

SEQ ID NO: 1488006 - RNA, 19 nt, Homo sapiens
  misc_RNA (1)...(19): siRNA sense strand
uggaggaaauacuaaagaa

SEQ ID NO: 1488007 - RNA, 19 nt, Homo sapiens
  misc_RNA (1)...(19): siRNA sense strand
agaaagacuccaccuacua

SEQ ID NO: 1488008 - RNA, 19 nt, Homo sapiens
  misc_RNA (1)...(19): siRNA sense strand
gaagcuuggauuagaagaa

SEQ ID NO: 1488009 - RNA, 19 nt, Homo sapiens
  misc_RNA (1)...(19): siRNA sense strand
uaaagagaccagugaggaa

SEQ ID NO: 1488010 - RNA, 19 nt, Homo sapiens
  misc_RNA (1)...(19): siRNA sense strand
gggaacaaauacuacuaca

SEQ ID NO: 1488011 - RNA, 19 nt, Homo sapiens
  misc_RNA (1)...(19): siRNA sense strand
agaaguagacuaugaagca

SEQ ID NO: 1488012 - RNA, 19 nt, Homo sapiens
  misc_RNA (1)...(19): siRNA sense strand
gaaaggaagaacccucagu

SEQ ID NO: 1488013 - RNA, 19 nt, Homo sapiens
  misc_RNA (1)...(19): siRNA sense strand
ggaggaaauacuaaagaau

SEQ ID NO: 1488014 - RNA, 19 nt, Homo sapiens
  misc_RNA (1)...(19): siRNA sense strand
gaacuggagaggacaaacu

SEQ ID NO: 1488015 - RNA, 19 nt, Homo sapiens
  misc_RNA (1)...(19): siRNA sense strand
uggauuagaagaacaagaa

SEQ ID NO: 1488016 - RNA, 19 nt, Homo sapiens
  misc_RNA (1)...(19): siRNA sense strand
ggaccaauucgggaacaaa

SEQ ID NO: 1488017 - RNA, 19 nt, Homo sapiens
  misc_RNA (1)...(19): siRNA sense strand
acaaacuauucgagagaaa

SEQ ID NO: 1488018 - RNA, 19 nt, Homo sapiens
  misc_RNA (1)...(19): siRNA sense strand
ggguuggucucaggauuug

SEQ ID NO: 1488019 - RNA, 19 nt, Homo sapiens
  misc_RNA (1)...(19): siRNA sense strand
caccuacuauggaggaaau

SEQ ID NO: 1488020 - RNA, 19 nt, Homo sapiens
  misc_RNA (1)...(19): siRNA sense strand
ugggaagcuuggauuagaa

SEQ ID NO: 1488021 - RNA, 19 nt, Homo sapiens
  misc_RNA (1)...(19): siRNA sense strand
ugccucugcuccauacuuu

SEQ ID NO: 1488022 - RNA, 19 nt, Homo sapiens
  misc_RNA (1)...(19): siRNA sense strand
acaagaaagacuccaccua

SEQ ID NO: 1488023 - RNA, 19 nt, Homo sapiens
  misc_RNA (1)...(19): siRNA sense strand
ggaacaaauacuacuacau

SEQ ID NO: 1488024 - RNA, 19 nt, Homo sapiens
  misc_RNA (1)...(19): siRNA sense strand
ggauuagaagaacaagaaa

SEQ ID NO: 1488025 - RNA, 19 nt, Homo sapiens
  misc_RNA (1)...(19): siRNA sense strand
aaacacagagaagaaauca

SEQ ID NO: 1488026 - RNA, 19 nt, Homo sapiens
  misc_RNA (1)...(19): siRNA sense strand
gaccaauucgggaacaaau

SEQ ID NO: 1488027 - RNA, 19 nt, Homo sapiens
  misc_RNA (1)...(19): siRNA sense strand
aagaaagacuccaccuacu

SEQ ID NO: 1488028 - RNA, 19 nt, Homo sapiens
  misc_RNA (1)...(19): siRNA sense strand
ccaauucgggaacaaauac

SEQ ID NO: 1488029 - RNA, 19 nt, Homo sapiens
  misc_RNA (1)...(19): siRNA sense strand
agaaugggaagcuuggauu

SEQ ID NO: 1488030 - RNA, 19 nt, Homo sapiens
  misc_RNA (1)...(19): siRNA sense strand
uuaguaaagagaccaguga

SEQ ID NO: 1488031 - RNA, 19 nt, Homo sapiens
  misc_RNA (1)...(19): siRNA sense strand
ggagaggacaaacuauucg

SEQ ID NO: 1488032 - RNA, 19 nt, Homo sapiens
  misc_RNA (1)...(19): siRNA sense strand
augggaagcuuggauuaga

SEQ ID NO: 1488033 - RNA, 19 nt, Homo sapiens
  misc_RNA (1)...(19): siRNA sense strand
ccaacagaaugggaagcuu

SEQ ID NO: 1488034 - RNA, 19 nt, Homo sapiens
  misc_RNA (1)...(19): siRNA sense strand
guagaagcagcaaauaaaa

SEQ ID NO: 1488035 - RNA, 19 nt, Homo sapiens
  misc_RNA (1)...(19): siRNA sense strand
gagaggacaaacuauucga

SEQ ID NO: 1488036 - RNA, 19 nt, Homo sapiens
  misc_RNA (1)...(19): siRNA sense strand
ccaugccucugcuccauac

SEQ ID NO: 1488037 - RNA, 19 nt, Homo sapiens
  misc_RNA (1)...(19): siRNA sense strand
gauuagaagaacaagaaag

SEQ ID NO: 1488038 - RNA, 19 nt, Homo sapiens
  misc_RNA (1)...(19): siRNA sense strand
ggccaugccucugcuccau

SEQ ID NO: 1488039 - RNA, 19 nt, Homo sapiens
  misc_RNA (1)...(19): siRNA sense strand
caagaacuggagaggacaa

SEQ ID NO: 1488040 - RNA, 19 nt, Homo sapiens
  misc_RNA (1)...(19): siRNA sense strand
uuguagaagcagcaaauaa

SEQ ID NO: 1488041 - RNA, 19 nt, Homo sapiens
  misc_RNA (1)...(19): siRNA sense strand
cuggagaggacaaacuauu

SEQ ID NO: 1488042 - RNA, 19 nt, Homo sapiens
  misc_RNA (1)...(19): siRNA sense strand
gccaugccucugcuccaua

SEQ ID NO: 1488043 - RNA, 19 nt, Homo sapiens
  misc_RNA (1)...(19): siRNA sense strand
acuccugccuccaccaguu

SEQ ID NO: 1488044 - RNA, 19 nt, Homo sapiens
  misc_RNA (1)...(19): siRNA sense strand
uacuauggaggaaauacua

SEQ ID NO: 1488045 - RNA, 19 nt, Homo sapiens
  misc_RNA (1)...(19): siRNA sense strand
uagaagaacaagaaagacu

SEQ ID NO: 1488046 - RNA, 19 nt, Homo sapiens
  misc_RNA (1)...(19): siRNA sense strand
uggagaggacaaacuauuc

SEQ ID NO: 1488047 - RNA, 19 nt, Homo sapiens
  misc_RNA (1)...(19): siRNA sense strand
gcaaagaucuucccugaga

SEQ ID NO: 1488048 - RNA, 19 nt, Homo sapiens
  misc_RNA (1)...(19): siRNA sense strand
gcaaaggauuccaagcaaa

SEQ ID NO: 1488049 - RNA, 19 nt, Homo sapiens
  misc_RNA (1)...(19): siRNA sense strand
ucaauaaucuggagaaucu

SEQ ID NO: 1488050 - RNA, 19 nt, Homo sapiens
  misc_RNA (1)...(19): siRNA sense strand
ggcaaaggauuccaagcaa

SEQ ID NO: 1488051 - RNA, 19 nt, Homo sapiens
  misc_RNA (1)...(19): siRNA sense strand
gcaagagcaagaagagaaa

SEQ ID NO: 1488052 - RNA, 19 nt, Homo sapiens
  misc_RNA (1)...(19): siRNA sense strand
uggagaaucuugucuuugg

SEQ ID NO: 1488053 - RNA, 19 nt, Homo sapiens
  misc_RNA (1)...(19): siRNA sense strand
ggcaagagcaagaagagaa

SEQ ID NO: 1488054 - RNA, 19 nt, Homo sapiens
  misc_RNA (1)...(19): siRNA sense strand
guucgggucucuucguguu

SEQ ID NO: 1488055 - RNA, 19 nt, Homo sapiens
  misc_RNA (1)...(19): siRNA sense strand
gagcaagaagagaaacuga

SEQ ID NO: 1488056 - RNA, 19 nt, Homo sapiens
  misc_RNA (1)...(19): siRNA sense strand
ucuggagaaucuugucuuu

SEQ ID NO: 1488057 - RNA, 19 nt, Homo sapiens
  misc_RNA (1)...(19): siRNA sense strand
ucacugccuucaauaaucu

SEQ ID NO: 1488058 - RNA, 19 nt, Homo sapiens
  misc_RNA (1)...(19): siRNA sense strand
uugcugggaugcagaugua

SEQ ID NO: 1488059 - RNA, 19 nt, Homo sapiens
  misc_RNA (1)...(19): siRNA sense strand
caaaggauuccaagcaaag

SEQ ID NO: 1488060 - RNA, 19 nt, Homo sapiens
  misc_RNA (1)...(19): siRNA sense strand
gcucacugccuucaauaau

SEQ ID NO: 1488061 - RNA, 19 nt, Homo sapiens
  misc_RNA (1)...(19): siRNA sense strand
guucagcucgccuuucuug

SEQ ID NO: 1488062 - RNA, 19 nt, Homo sapiens
  misc_RNA (1)...(19): siRNA sense strand
ccuguuggcucucuuugca

SEQ ID NO: 1488063 - RNA, 19 nt, Homo sapiens
  misc_RNA (1)...(19): siRNA sense strand
ccgaguggcucaccaucca

SEQ ID NO: 1488064 - RNA, 19 nt, Homo sapiens
  misc_RNA (1)...(19): siRNA sense strand
uggcaaaggauuccaagca

SEQ ID NO: 1488065 - RNA, 19 nt, Homo sapiens
  misc_RNA (1)...(19): siRNA sense strand
ucacaggcaagagcaagaa

SEQ ID NO: 1488066 - RNA, 19 nt, Homo sapiens
  misc_RNA (1)...(19): siRNA sense strand
cgguucagcucgccuuucu

SEQ ID NO: 1488067 - RNA, 19 nt, Homo sapiens
  misc_RNA (1)...(19): siRNA sense strand
guacuacaucaacaagauc

SEQ ID NO: 1488068 - RNA, 19 nt, Homo sapiens
  misc_RNA (1)...(19): siRNA sense strand
cucacugccuucaauaauc

SEQ ID NO: 1488069 - RNA, 19 nt, Homo sapiens
  misc_RNA (1)...(19): siRNA sense strand
aauaaucuggagaaucuug

SEQ ID NO: 1488070 - RNA, 19 nt, Homo sapiens
  misc_RNA (1)...(19): siRNA sense strand
uaagaaagcugucaagaua

SEQ ID NO: 1488071 - RNA, 19 nt, Homo sapiens
  misc_RNA (1)...(19): siRNA sense strand
gauaauagcugggagaaua

SEQ ID NO: 1488072 - RNA, 19 nt, Homo sapiens
  misc_RNA (1)...(19): siRNA sense strand
gaacugggcugucuacaaa

SEQ ID NO: 1488073 - RNA, 19 nt, Homo sapiens
  misc_RNA (1)...(19): siRNA sense strand
caaacuaccuccucagaua

SEQ ID NO: 1488074 - RNA, 19 nt, Homo sapiens
  misc_RNA (1)...(19): siRNA sense strand
gaacaugaaucucagcaaa

SEQ ID NO: 1488075 - RNA, 19 nt, Homo sapiens
  misc_RNA (1)...(19): siRNA sense strand
ggaauggaauuucaaguuu

SEQ ID NO: 1488076 - RNA, 19 nt, Homo sapiens
  misc_RNA (1)...(19): siRNA sense strand
cuacaaaccuccagcauuu

SEQ ID NO: 1488077 - RNA, 19 nt, Homo sapiens
  misc_RNA (1)...(19): siRNA sense strand
ggaauaacauggaacuuga

SEQ ID NO: 1488078 - RNA, 19 nt, Homo sapiens
  misc_RNA (1)...(19): siRNA sense strand
gaaaaguucuccccaguua

SEQ ID NO: 1488079 - RNA, 19 nt, Homo sapiens
  misc_RNA (1)...(19): siRNA sense strand
uaacaaggcuuccaaagag

SEQ ID NO: 1488080 - RNA, 19 nt, Homo sapiens
  misc_RNA (1)...(19): siRNA sense strand
guagagacuucaguucuua

SEQ ID NO: 1488081 - RNA, 19 nt, Homo sapiens
  misc_RNA (1)...(19): siRNA sense strand
gaaggugcgugcaaaguga

SEQ ID NO: 1488082 - RNA, 19 nt, Homo sapiens
  misc_RNA (1)...(19): siRNA sense strand
ggaaacaacuucugugcau

SEQ ID NO: 1488083 - RNA, 19 nt, Homo sapiens
  misc_RNA (1)...(19): siRNA sense strand
ucacagaaaugacuaacaa

SEQ ID NO: 1488084 - RNA, 19 nt, Homo sapiens
  misc_RNA (1)...(19): siRNA sense strand
ccauggagcucuucauuga

SEQ ID NO: 1488085 - RNA, 19 nt, Homo sapiens
  misc_RNA (1)...(19): siRNA sense strand
cgacaacacuuaauuugga

SEQ ID NO: 1488086 - RNA, 19 nt, Homo sapiens
  misc_RNA (1)...(19): siRNA sense strand
ggaauuaaguccucacaag

SEQ ID NO: 1488087 - RNA, 19 nt, Homo sapiens
  misc_RNA (1)...(19): siRNA sense strand
gaucugauguuauuuccaa

SEQ ID NO: 1488088 - RNA, 19 nt, Homo sapiens
  misc_RNA (1)...(19): siRNA sense strand
gaauggaauuucaaguuug

SEQ ID NO: 1488089 - RNA, 19 nt, Homo sapiens
  misc_RNA (1)...(19): siRNA sense strand
gauguuauuuccaaaguug

SEQ ID NO: 1488090 - RNA, 19 nt, Homo sapiens
  misc_RNA (1)...(19): siRNA sense strand
gaauuucuuuccugcagua

SEQ ID NO: 1488091 - RNA, 19 nt, Homo sapiens
  misc_RNA (1)...(19): siRNA sense strand
gaaacuugccaucuaguaa

SEQ ID NO: 1488092 - RNA, 19 nt, Homo sapiens
  misc_RNA (1)...(19): siRNA sense strand
agaaggagaucaauugaau

SEQ ID NO: 1488093 - RNA, 19 nt, Homo sapiens
  misc_RNA (1)...(19): siRNA sense strand
aaacaggacuggcuaguag

SEQ ID NO: 1488094 - RNA, 19 nt, Homo sapiens
  misc_RNA (1)...(19): siRNA sense strand
agaaagcugucaagauaaa

SEQ ID NO: 1488095 - RNA, 19 nt, Homo sapiens
  misc_RNA (1)...(19): siRNA sense strand
gggaaaagaucugauguua

SEQ ID NO: 1488096 - RNA, 19 nt, Homo sapiens
  misc_RNA (1)...(19): siRNA sense strand
gaacaaucacuucuaccua

SEQ ID NO: 1488097 - RNA, 19 nt, Homo sapiens
  misc_RNA (1)...(19): siRNA sense strand
aaacugagccuucuucuuc

SEQ ID NO: 1488098 - RNA, 19 nt, Homo sapiens
  misc_RNA (1)...(19): siRNA sense strand
caaagagccuguugguugu

SEQ ID NO: 1488099 - RNA, 19 nt, Homo sapiens
  misc_RNA (1)...(19): siRNA sense strand
gaagauggcagaguacuug

SEQ ID NO: 1488100 - RNA, 19 nt, Homo sapiens
  misc_RNA (1)...(19): siRNA sense strand
uuaggaagauggcagagua

SEQ ID NO: 1488101 - RNA, 19 nt, Homo sapiens
  misc_RNA (1)...(19): siRNA sense strand
gagagacaguccaaauguu

SEQ ID NO: 1488102 - RNA, 19 nt, Homo sapiens
  misc_RNA (1)...(19): siRNA sense strand
uuaggaaacuugccaucua

SEQ ID NO: 1488103 - RNA, 19 nt, Homo sapiens
  misc_RNA (1)...(19): siRNA sense strand
ggaaugaauggaaauaaug

SEQ ID NO: 1488104 - RNA, 19 nt, Homo sapiens
  misc_RNA (1)...(19): siRNA sense strand
caaagugaaucuggaguug

SEQ ID NO: 1488105 - RNA, 19 nt, Homo sapiens
  misc_RNA (1)...(19): siRNA sense strand
agacuucauuucugugaua

SEQ ID NO: 1488106 - RNA, 19 nt, Homo sapiens
  misc_RNA (1)...(19): siRNA sense strand
gaagaccuccugcagcaaa

SEQ ID NO: 1488107 - RNA, 19 nt, Homo sapiens
  misc_RNA (1)...(19): siRNA sense strand
gaauuaaguccucacaaga

SEQ ID NO: 1488108 - RNA, 19 nt, Homo sapiens
  misc_RNA (1)...(19): siRNA sense strand
gaacagagcagcggcuuag

SEQ ID NO: 1488109 - RNA, 19 nt, Homo sapiens
  misc_RNA (1)...(19): siRNA sense strand
agaaggaaaugcugaugaa

SEQ ID NO: 1488110 - RNA, 19 nt, Homo sapiens
  misc_RNA (1)...(19): siRNA sense strand
aacaaucacuucuaccuaa

SEQ ID NO: 1488111 - RNA, 19 nt, Homo sapiens
  misc_RNA (1)...(19): siRNA sense strand
cagcaaacaaguuacauuu

SEQ ID NO: 1488112 - RNA, 19 nt, Homo sapiens
  misc_RNA (1)...(19): siRNA sense strand
ggaaacuugccaucuagua

SEQ ID NO: 1488113 - RNA, 19 nt, Homo sapiens
  misc_RNA (1)...(19): siRNA sense strand
gaaugcagauguggaaaca

SEQ ID NO: 1488114 - RNA, 19 nt, Homo sapiens
  misc_RNA (1)...(19): siRNA sense strand
ugaagcugcugaaggcuaa

SEQ ID NO: 1488115 - RNA, 19 nt, Homo sapiens
  misc_RNA (1)...(19): siRNA sense strand
gagaauguacuacucauca

SEQ ID NO: 1488116 - RNA, 19 nt, Homo sapiens
  misc_RNA (1)...(19): siRNA sense strand
gaacauugucuuaccuuca

SEQ ID NO: 1488117 - RNA, 19 nt, Homo sapiens
  misc_RNA (1)...(19): siRNA sense strand
gcacaagcagaaauagauu

SEQ ID NO: 1488118 - RNA, 19 nt, Homo sapiens
  misc_RNA (1)...(19): siRNA sense strand
ggagcuugcugacucuguu

SEQ ID NO: 1488119 - RNA, 19 nt, Homo sapiens
  misc_RNA (1)...(19): siRNA sense strand
gggaaucaguagagacuuc

SEQ ID NO: 1488120 - RNA, 19 nt, Homo sapiens
  misc_RNA (1)...(19): siRNA sense strand
gcaaagugaaucuggaguu

SEQ ID NO: 1488121 - RNA, 19 nt, Homo sapiens
  misc_RNA (1)...(19): siRNA sense strand
gacaacacuuaauuuggaa

SEQ ID NO: 1488122 - RNA, 19 nt, Homo sapiens
  misc_RNA (1)...(19): siRNA sense strand
ggaccuauaaauacuagaa

SEQ ID NO: 1488123 - RNA, 19 nt, Homo sapiens
  misc_RNA (1)...(19): siRNA sense strand
gugguucuauguauaauuc

SEQ ID NO: 1488124 - RNA, 19 nt, Homo sapiens
  misc_RNA (1)...(19): siRNA sense strand
cuagaagaguuccuacaga

SEQ ID NO: 1488125 - RNA, 19 nt, Homo sapiens
  misc_RNA (1)...(19): siRNA sense strand
gcagcaaacaaguuacauu

SEQ ID NO: 1488126 - RNA, 19 nt, Homo sapiens
  misc_RNA (1)...(19): siRNA sense strand
guuagaacauacaggaguu

SEQ ID NO: 1488127 - RNA, 19 nt, Homo sapiens
  misc_RNA (1)...(19): siRNA sense strand
ggaacugggcugucuacaa

SEQ ID NO: 1488128 - RNA, 19 nt, Homo sapiens
  misc_RNA (1)...(19): siRNA sense strand
gggagcacaagcagaaaua

SEQ ID NO: 1488129 - RNA, 19 nt, Homo sapiens
  misc_RNA (1)...(19): siRNA sense strand
gagaaggagaucaauugaa

SEQ ID NO: 1488130 - RNA, 19 nt, Homo sapiens
  misc_RNA (1)...(19): siRNA sense strand
caaauccugugguuaaugc

SEQ ID NO: 1488131 - RNA, 19 nt, Homo sapiens
  misc_RNA (1)...(19): siRNA sense strand
gcuaagaugaagaacauga

SEQ ID NO: 1488132 - RNA, 19 nt, Homo sapiens
  misc_RNA (1)...(19): siRNA sense strand
gaguugaggucugggagaa

SEQ ID NO: 1488133 - RNA, 19 nt, Homo sapiens
  misc_RNA (1)...(19): siRNA sense strand
acucauggcuguaccuaug

SEQ ID NO: 1488134 - RNA, 19 nt, Homo sapiens
  misc_RNA (1)...(19): siRNA sense strand
guucuuaacuaccgggaau

SEQ ID NO: 1488135 - RNA, 19 nt, Homo sapiens
  misc_RNA (1)...(19): siRNA sense strand
cccgaaaucuccaggaaug

SEQ ID NO: 1488136 - RNA, 19 nt, Homo sapiens
  misc_RNA (1)...(19): siRNA sense strand
gggcaacagauaauugaaa

SEQ ID NO: 1488137 - RNA, 19 nt, Homo sapiens
  misc_RNA (1)...(19): siRNA sense strand
gaguggugguucuauguau

SEQ ID NO: 1488138 - RNA, 19 nt, Homo sapiens
  misc_RNA (1)...(19): siRNA sense strand
gagcugagaguuucaccuu

SEQ ID NO: 1488139 - RNA, 19 nt, Homo sapiens
  misc_RNA (1)...(19): siRNA sense strand
gaaacugagccuucuucuu

SEQ ID NO: 1488140 - RNA, 19 nt, Homo sapiens
  misc_RNA (1)...(19): siRNA sense strand
aggcaaauccugugguuaa

SEQ ID NO: 1488141 - RNA, 19 nt, Homo sapiens
  misc_RNA (1)...(19): siRNA sense strand
cgaggcaaauccugugguu

SEQ ID NO: 1488142 - RNA, 19 nt, Homo sapiens
  misc_RNA (1)...(19): siRNA sense strand
ccuguugguuguguaaaua

SEQ ID NO: 1488143 - RNA, 19 nt, Homo sapiens
  misc_RNA (1)...(19): siRNA sense strand
cuaacaaggcuuccaaaga

SEQ ID NO: 1488144 - RNA, 19 nt, Homo sapiens
  misc_RNA (1)...(19): siRNA sense strand
gggcucaccggcuucauuu

SEQ ID NO: 1488145 - RNA, 19 nt, Homo sapiens
  misc_RNA (1)...(19): siRNA sense strand
acaaucacuucuaccuaaa

SEQ ID NO: 1488146 - RNA, 19 nt, Homo sapiens
  misc_RNA (1)...(19): siRNA sense strand
caacuucugugcaucucau

SEQ ID NO: 1488147 - RNA, 19 nt, Homo sapiens
  misc_RNA (1)...(19): siRNA sense strand
gagcacaagcagaaauaga

SEQ ID NO: 1488148 - RNA, 19 nt, Homo sapiens
  misc_RNA (1)...(19): siRNA sense strand
cauaacugauucuucuuuc

SEQ ID NO: 1488149 - RNA, 19 nt, Homo sapiens
  misc_RNA (1)...(19): siRNA sense strand
agagacaguccaaauguuu

SEQ ID NO: 1488150 - RNA, 19 nt, Homo sapiens
  misc_RNA (1)...(19): siRNA sense strand
gagcagcggcuuagaaggu

SEQ ID NO: 1488151 - RNA, 19 nt, Homo sapiens
  misc_RNA (1)...(19): siRNA sense strand
gcugagaguuucaccuuuu

SEQ ID NO: 1488152 - RNA, 19 nt, Homo sapiens
  misc_RNA (1)...(19): siRNA sense strand
ggaagaaaacuuuaggaaa

SEQ ID NO: 1488153 - RNA, 19 nt, Homo sapiens
  misc_RNA (1)...(19): siRNA sense strand
gaauaacauggaacuugaa

SEQ ID NO: 1488154 - RNA, 19 nt, Homo sapiens
  misc_RNA (1)...(19): siRNA sense strand
ccagagagacaguccaaau

SEQ ID NO: 1488155 - RNA, 19 nt, Homo sapiens
  misc_RNA (1)...(19): siRNA sense strand
ccgagaaggagaucaauug

SEQ ID NO: 1488156 - RNA, 19 nt, Homo sapiens
  misc_RNA (1)...(19): siRNA sense strand
cuucaaugaugauaacaug

SEQ ID NO: 1488157 - RNA, 19 nt, Homo sapiens
  misc_RNA (1)...(19): siRNA sense strand
uaggaaacuugccaucuag

SEQ ID NO: 1488158 - RNA, 19 nt, Homo sapiens
  misc_RNA (1)...(19): siRNA sense strand
ggagauggcacuuuaacac

SEQ ID NO: 1488159 - RNA, 19 nt, Homo sapiens
  misc_RNA (1)...(19): siRNA sense strand
gaaagccccucuucagaca

SEQ ID NO: 1488160 - RNA, 19 nt, Homo sapiens
  misc_RNA (1)...(19): siRNA sense strand
cacaagcagaaauagauua

SEQ ID NO: 1488161 - RNA, 19 nt, Homo sapiens
  misc_RNA (1)...(19): siRNA sense strand
aggcuaagaugaagaacau

SEQ ID NO: 1488162 - RNA, 19 nt, Homo sapiens
  misc_RNA (1)...(19): siRNA sense strand
gcugaaggcuaagaugaag

SEQ ID NO: 1488163 - RNA, 19 nt, Homo sapiens
  misc_RNA (1)...(19): siRNA sense strand
acauggaacuugaaaauga

SEQ ID NO: 1488164 - RNA, 19 nt, Homo sapiens
  misc_RNA (1)...(19): siRNA sense strand
ggaagauggcagaguacuu

SEQ ID NO: 1488165 - RNA, 19 nt, Homo sapiens
  misc_RNA (1)...(19): siRNA sense strand
gcaaauccugugguuaaug

SEQ ID NO: 1488166 - RNA, 19 nt, Homo sapiens
  misc_RNA (1)...(19): siRNA sense strand
ccucuucgcuguucugcau

SEQ ID NO: 1488167 - RNA, 19 nt, Homo sapiens
  misc_RNA (1)...(19): siRNA sense strand
cuaagaaagcugucaagau

SEQ ID NO: 1488168 - RNA, 19 nt, Homo sapiens
  misc_RNA (1)...(19): siRNA sense strand
cgagaaggagaucaauuga

SEQ ID NO: 1488169 - RNA, 19 nt, Homo sapiens
  misc_RNA (1)...(19): siRNA sense strand
gauaucacagaaaugacua

SEQ ID NO: 1488170 - RNA, 19 nt, Homo sapiens
  misc_RNA (1)...(19): siRNA sense strand
gaacguaucuugugaauga

SEQ ID NO: 1488171 - RNA, 19 nt, Homo sapiens
  misc_RNA (1)...(19): siRNA sense strand
ggagaucuauuucagagua

SEQ ID NO: 1488172 - RNA, 19 nt, Homo sapiens
  misc_RNA (1)...(19): siRNA sense strand
uaauugaccugaccaguuu

SEQ ID NO: 1488173 - RNA, 19 nt, Homo sapiens
  misc_RNA (1)...(19): siRNA sense strand
gaauuacaguggugugaaa

SEQ ID NO: 1488174 - RNA, 19 nt, Homo sapiens
  misc_RNA (1)...(19): siRNA sense strand
ugauaaagcugccaagaug

SEQ ID NO: 1488175 - RNA, 19 nt, Homo sapiens
  misc_RNA (1)...(19): siRNA sense strand
caacagaaaccggugaaua

SEQ ID NO: 1488176 - RNA, 19 nt, Homo sapiens
  misc_RNA (1)...(19): siRNA sense strand
ccaaagagccugaauuaca

SEQ ID NO: 1488177 - RNA, 19 nt, Homo sapiens
  misc_RNA (1)...(19): siRNA sense strand
caucgaagccucccucuaa

SEQ ID NO: 1488178 - RNA, 19 nt, Homo sapiens
  misc_RNA (1)...(19): siRNA sense strand
ggagagaaauugcuaaagc

SEQ ID NO: 1488179 - RNA, 19 nt, Homo sapiens
  misc_RNA (1)...(19): siRNA sense strand
gaaacucuguucugcuuca

SEQ ID NO: 1488180 - RNA, 19 nt, Homo sapiens
  misc_RNA (1)...(19): siRNA sense strand
agaaaccggugaauaaaga

SEQ ID NO: 1488181 - RNA, 19 nt, Homo sapiens
  misc_RNA (1)...(19): siRNA sense strand
gcuaauuagugcacuuauu

SEQ ID NO: 1488182 - RNA, 19 nt, Homo sapiens
  misc_RNA (1)...(19): siRNA sense strand
caaagagccugaauuacag

SEQ ID NO: 1488183 - RNA, 19 nt, Homo sapiens
  misc_RNA (1)...(19): siRNA sense strand
gacccaaucugcacauuca

SEQ ID NO: 1488184 - RNA, 19 nt, Homo sapiens
  misc_RNA (1)...(19): siRNA sense strand
guaauucucucagcucaug

SEQ ID NO: 1488185 - RNA, 19 nt, Homo sapiens
  misc_RNA (1)...(19): siRNA sense strand
caucuggucucuaacaaug

SEQ ID NO: 1488186 - RNA, 19 nt, Homo sapiens
  misc_RNA (1)...(19): siRNA sense strand
cugcacaucuggucucuaa

SEQ ID NO: 1488187 - RNA, 19 nt, Homo sapiens
  misc_RNA (1)...(19): siRNA sense strand
caagaugcaugcuuucaca

SEQ ID NO: 1488188 - RNA, 19 nt, Homo sapiens
  misc_RNA (1)...(19): siRNA sense strand
gaugcaugcuuucacacua

SEQ ID NO: 1488189 - RNA, 19 nt, Homo sapiens
  misc_RNA (1)...(19): siRNA sense strand
gcaauaugcuucauuuuca

SEQ ID NO: 1488190 - RNA, 19 nt, Homo sapiens
  misc_RNA (1)...(19): siRNA sense strand
uaaaggacuucuccaucuu

SEQ ID NO: 1488191 - RNA, 19 nt, Homo sapiens
  misc_RNA (1)...(19): siRNA sense strand
gcacauugcugggagucuu

SEQ ID NO: 1488192 - RNA, 19 nt, Homo sapiens
  misc_RNA (1)...(19): siRNA sense strand
gaguaucagugugcuaauu

SEQ ID NO: 1488193 - RNA, 19 nt, Homo sapiens
  misc_RNA (1)...(19): siRNA sense strand
ugccaaagagccugaauua

SEQ ID NO: 1488194 - RNA, 19 nt, Homo sapiens
  misc_RNA (1)...(19): siRNA sense strand
aacagaaaccggugaauaa

SEQ ID NO: 1488195 - RNA, 19 nt, Homo sapiens
  misc_RNA (1)...(19): siRNA sense strand
uuaaaggacuucuccaucu

SEQ ID NO: 1488196 - RNA, 19 nt, Homo sapiens
  misc_RNA (1)...(19): siRNA sense strand
gguggugacuggcgugcua

SEQ ID NO: 1488197 - RNA, 19 nt, Homo sapiens
  misc_RNA (1)...(19): siRNA sense strand
ugacuggcgugcuagugua

SEQ ID NO: 1488198 - RNA, 19 nt, Homo sapiens
  misc_RNA (1)...(19): siRNA sense strand
gcacaucuggucucuaaca

SEQ ID NO: 1488199 - RNA, 19 nt, Homo sapiens
  misc_RNA (1)...(19): siRNA sense strand
uaguguaccuggcauguga

SEQ ID NO: 1488200 - RNA, 19 nt, Homo sapiens
  misc_RNA (1)...(19): siRNA sense strand
caccaucacuaucuuaaag

SEQ ID NO: 1488201 - RNA, 19 nt, Homo sapiens
  misc_RNA (1)...(19): siRNA sense strand
uggaaacucuguucugcuu

SEQ ID NO: 1488202 - RNA, 19 nt, Homo sapiens
  misc_RNA (1)...(19): siRNA sense strand
ggucgugggugggcacauu

SEQ ID NO: 1488203 - RNA, 19 nt, Homo sapiens
  misc_RNA (1)...(19): siRNA sense strand
aaaggacuucuccaucuua

SEQ ID NO: 1488204 - RNA, 19 nt, Homo sapiens
  misc_RNA (1)...(19): siRNA sense strand
gagaugccuuggccacaau

SEQ ID NO: 1488205 - RNA, 19 nt, Homo sapiens
  misc_RNA (1)...(19): siRNA sense strand
ccucuaagcggcugacauu

SEQ ID NO: 1488206 - RNA, 19 nt, Homo sapiens
  misc_RNA (1)...(19): siRNA sense strand
cugccaagaugcaugcuuu

SEQ ID NO: 1488207 - RNA, 19 nt, Homo sapiens
  misc_RNA (1)...(19): siRNA sense strand
ggugugaaagagcuuauuu

SEQ ID NO: 1488208 - RNA, 19 nt, Homo sapiens
  misc_RNA (1)...(19): siRNA sense strand
cuaagcggcugacauuugg

SEQ ID NO: 1488209 - RNA, 19 nt, Homo sapiens
  misc_RNA (1)...(19): siRNA sense strand
gaaauugcuaaagcccuua

SEQ ID NO: 1488210 - RNA, 19 nt, Homo sapiens
  misc_RNA (1)...(19): siRNA sense strand
ugaaagagcuuauuuuagc

SEQ ID NO: 1488211 - RNA, 19 nt, Homo sapiens
  misc_RNA (1)...(19): siRNA sense strand
gcaccaucacuaucuuaaa

SEQ ID NO: 1488212 - RNA, 19 nt, Homo sapiens
  misc_RNA (1)...(19): siRNA sense strand
uaaaauagccgacccaauc

SEQ ID NO: 1488213 - RNA, 19 nt, Homo sapiens
  misc_RNA (1)...(19): siRNA sense strand
gagaucuauuucagaguau

SEQ ID NO: 1488214 - RNA, 19 nt, Homo sapiens
  misc_RNA (1)...(19): siRNA sense strand
ccaagugguucggagagaa

SEQ ID NO: 1488215 - RNA, 19 nt, Homo sapiens
  misc_RNA (1)...(19): siRNA sense strand
caugugagcgccugcugua

SEQ ID NO: 1488216 - RNA, 19 nt, Homo sapiens
  misc_RNA (1)...(19): siRNA sense strand
ggacuucuccaucuuacuc

SEQ ID NO: 1488217 - RNA, 19 nt, Homo sapiens
  misc_RNA (1)...(19): siRNA sense strand
aaucugcacauucaucuuu

SEQ ID NO: 1488218 - RNA, 19 nt, Homo sapiens
  misc_RNA (1)...(19): siRNA sense strand
aguaucagugugcuaauua

SEQ ID NO: 1488219 - RNA, 19 nt, Homo sapiens
  misc_RNA (1)...(19): siRNA sense strand
acuuuaagccagaguauaa

SEQ ID NO: 1488220 - RNA, 19 nt, Homo sapiens
  misc_RNA (1)...(19): siRNA sense strand
uuaauugaccugaccaguu

SEQ ID NO: 1488221 - RNA, 19 nt, Homo sapiens
  misc_RNA (1)...(19): siRNA sense strand
gaucagugucccagagaga

SEQ ID NO: 1488222 - RNA, 19 nt, Homo sapiens
  misc_RNA (1)...(19): siRNA sense strand
gugcacuuauuaucuacuu

SEQ ID NO: 1488223 - RNA, 19 nt, Homo sapiens
  misc_RNA (1)...(19): siRNA sense strand
cagaguaucagugugcuaa

SEQ ID NO: 1488224 - RNA, 19 nt, Homo sapiens
  misc_RNA (1)...(19): siRNA sense strand
cgucagagcugcuuuugug

SEQ ID NO: 1488225 - RNA, 19 nt, Homo sapiens
  misc_RNA (1)...(19): siRNA sense strand
gcaccgagcagagauccuu

SEQ ID NO: 1488226 - RNA, 19 nt, Homo sapiens
  misc_RNA (1)...(19): siRNA sense strand
cugcccaccucuuaauuga

SEQ ID NO: 1488227 - RNA, 19 nt, Homo sapiens
  misc_RNA (1)...(19): siRNA sense strand
caagugguucggagagaaa

SEQ ID NO: 1488228 - RNA, 19 nt, Homo sapiens
  misc_RNA (1)...(19): siRNA sense strand
acagaaaccggugaauaaa

SEQ ID NO: 1488229 - RNA, 19 nt, Homo sapiens
  misc_RNA (1)...(19): siRNA sense strand
ccaucacuaucuuaaagga

SEQ ID NO: 1488230 - RNA, 19 nt, Homo sapiens
  misc_RNA (1)...(19): siRNA sense strand
ucuaagcggcugacauuug

SEQ ID NO: 1488231 - RNA, 19 nt, Homo sapiens
  misc_RNA (1)...(19): siRNA sense strand
gcaugcccuuggagaucua

SEQ ID NO: 1488232 - RNA, 19 nt, Homo sapiens
  misc_RNA (1)...(19): siRNA sense strand
guaucagugugcuaauuag

SEQ ID NO: 1488233 - RNA, 19 nt, Homo sapiens
  misc_RNA (1)...(19): siRNA sense strand
gagucuugcuguugucaca

SEQ ID NO: 1488234 - RNA, 19 nt, Homo sapiens
  misc_RNA (1)...(19): siRNA sense strand
cagcaccaucacuaucuua

SEQ ID NO: 1488235 - RNA, 19 nt, Homo sapiens
  misc_RNA (1)...(19): siRNA sense strand
ccaguuuccugcucagucu

SEQ ID NO: 1488236 - RNA, 19 nt, Homo sapiens
  misc_RNA (1)...(19): siRNA sense strand
ggccaacauuguacuaacu

SEQ ID NO: 1488237 - RNA, 19 nt, Homo sapiens
  misc_RNA (1)...(19): siRNA sense strand
agagaugccuuggccacaa

SEQ ID NO: 1488238 - RNA, 19 nt, Homo sapiens
  misc_RNA (1)...(19): siRNA sense strand
guucggagagaaauugcua

SEQ ID NO: 1488239 - RNA, 19 nt, Homo sapiens
  misc_RNA (1)...(19): siRNA sense strand
gaaagagcuuauuuuagca

SEQ ID NO: 1488240 - RNA, 19 nt, Homo sapiens
  misc_RNA (1)...(19): siRNA sense strand
caaggaaguacaagccaau

SEQ ID NO: 1488241 - RNA, 19 nt, Homo sapiens
  misc_RNA (1)...(19): siRNA sense strand
ccagcaccaucacuaucuu

SEQ ID NO: 1488242 - RNA, 19 nt, Homo sapiens
  misc_RNA (1)...(19): siRNA sense strand
ucuggucucuaacaaugaa

SEQ ID NO: 1488243 - RNA, 19 nt, Homo sapiens
  misc_RNA (1)...(19): siRNA sense strand
cauggaaggugugccaaag

SEQ ID NO: 1488244 - RNA, 19 nt, Homo sapiens
  misc_RNA (1)...(19): siRNA sense strand
gaugcugcccaccucuuaa

SEQ ID NO: 1488245 - RNA, 19 nt, Homo sapiens
  misc_RNA (1)...(19): siRNA sense strand
gccaagugguucggagaga

SEQ ID NO: 1488246 - RNA, 19 nt, Homo sapiens
  misc_RNA (1)...(19): siRNA sense strand
ccacaaucacaaggaagua

SEQ ID NO: 1488247 - RNA, 19 nt, Homo sapiens
  misc_RNA (1)...(19): siRNA sense strand
gcuccaagcccacagaaaa

SEQ ID NO: 1488248 - RNA, 19 nt, Homo sapiens
  misc_RNA (1)...(19): siRNA sense strand
gcaaaagcuuuacgaugca

SEQ ID NO: 1488249 - RNA, 19 nt, Homo sapiens
  misc_RNA (1)...(19): siRNA sense strand
ggagucaggaggcauguac

SEQ ID NO: 1488250 - RNA, 19 nt, Homo sapiens
  misc_RNA (1)...(19): siRNA sense strand
gauccaggcgacugugaug

SEQ ID NO: 1488251 - RNA, 19 nt, Homo sapiens
  misc_RNA (1)...(19): siRNA sense strand
gcugcccaccucuuaauug

SEQ ID NO: 1488252 - RNA, 19 nt, Homo sapiens
  misc_RNA (1)...(19): siRNA sense strand
ccaaguggaaacucuguuc

SEQ ID NO: 1488253 - RNA, 19 nt, Homo sapiens
  misc_RNA (1)...(19): siRNA sense strand
ccaacauuguacuaacugu

SEQ ID NO: 1488254 - RNA, 19 nt, Homo sapiens
  misc_RNA (1)...(19): siRNA sense strand
gcgaaugaguacgccuaug

SEQ ID NO: 1488255 - RNA, 19 nt, Homo sapiens
  misc_RNA (1)...(19): siRNA sense strand
cagaaaccggugaauaaag

SEQ ID NO: 1488256 - RNA, 19 nt, Homo sapiens
  misc_RNA (1)...(19): siRNA sense strand
gaugcacucacucaccauu

SEQ ID NO: 1488257 - RNA, 19 nt, Homo sapiens
  misc_RNA (1)...(19): siRNA sense strand
cacaucuggucucuaacaa

SEQ ID NO: 1488258 - RNA, 19 nt, Homo sapiens
  misc_RNA (1)...(19): siRNA sense strand
uggaaggugugccaaagag

SEQ ID NO: 1488259 - RNA, 19 nt, Homo sapiens
  misc_RNA (1)...(19): siRNA sense strand
gcacauucaucuuuuccau

SEQ ID NO: 1488260 - RNA, 19 nt, Homo sapiens
  misc_RNA (1)...(19): siRNA sense strand
cccuguggcugucaucgaa

SEQ ID NO: 1488261 - RNA, 19 nt, Homo sapiens
  misc_RNA (1)...(19): siRNA sense strand
gcuuuacgaugcacucacu

SEQ ID NO: 1488262 - RNA, 19 nt, Homo sapiens
  misc_RNA (1)...(19): siRNA sense strand
gcccuuagcaaaagcuuua

SEQ ID NO: 1488263 - RNA, 19 nt, Homo sapiens
  misc_RNA (1)...(19): siRNA sense strand
ucucucagcucauguugcu

SEQ ID NO: 1488264 - RNA, 19 nt, Homo sapiens
  misc_RNA (1)...(19): siRNA sense strand
agaugcugcccaccucuua

SEQ ID NO: 1488265 - RNA, 19 nt, Homo sapiens
  misc_RNA (1)...(19): siRNA sense strand
cgaaugaguacgccuaugc

SEQ ID NO: 1488266 - RNA, 19 nt, Homo sapiens
  misc_RNA (1)...(19): siRNA sense strand
gaucuauuucagaguauca

SEQ ID NO: 1488267 - RNA, 19 nt, Homo sapiens
  misc_RNA (1)...(19): siRNA sense strand
gaaaccggugaauaaagau

SEQ ID NO: 1488268 - RNA, 19 nt, Homo sapiens
  misc_RNA (1)...(19): siRNA sense strand
ggauggcaccgagcagaga

SEQ ID NO: 1488269 - RNA, 19 nt, Homo sapiens
  misc_RNA (1)...(19): siRNA sense strand
gcugggagucuugcuguug

SEQ ID NO: 1488270 - RNA, 19 nt, Homo sapiens
  misc_RNA (1)...(19): siRNA sense strand
ggaagauugugaccucaaa

SEQ ID NO: 1488271 - RNA, 19 nt, Homo sapiens
  misc_RNA (1)...(19): siRNA sense strand
ggagguggccagcacauca

SEQ ID NO: 1488272 - RNA, 19 nt, Homo sapiens
  misc_RNA (1)...(19): siRNA sense strand
gcuucugucuccagcauug

SEQ ID NO: 1488273 - RNA, 19 nt, Homo sapiens
  misc_RNA (1)...(19): siRNA sense strand
ggccagcacaucacuauuc

SEQ ID NO: 1488274 - RNA, 19 nt, Homo sapiens
  misc_RNA (1)...(19): siRNA sense strand
ccucaaagagccugaagga

SEQ ID NO: 1488275 - RNA, 19 nt, Homo sapiens
  misc_RNA (1)...(19): siRNA sense strand
cagcacaucacuauuccaa

SEQ ID NO: 1488276 - RNA, 19 nt, Homo sapiens
  misc_RNA (1)...(19): siRNA sense strand
cagcuucugucuccagcau

SEQ ID NO: 1488277 - RNA, 19 nt, Homo sapiens
  misc_RNA (1)...(19): siRNA sense strand
gaagauugugaccucaaag

SEQ ID NO: 1488278 - RNA, 19 nt, Homo sapiens
  misc_RNA (1)...(19): siRNA sense strand
gaucaacgcugacaucuua

SEQ ID NO: 1488279 - RNA, 19 nt, Homo sapiens
  misc_RNA (1)...(19): siRNA sense strand
gaacagcugcucacagaua

SEQ ID NO: 1488280 - RNA, 19 nt, Homo sapiens
  misc_RNA (1)...(19): siRNA sense strand
gggaacagcugcucacaga

SEQ ID NO: 1488281 - RNA, 19 nt, Homo sapiens
  misc_RNA (1)...(19): siRNA sense strand
ucacagauaugcuagaguu

SEQ ID NO: 1488282 - RNA, 19 nt, Homo sapiens
  misc_RNA (1)...(19): siRNA sense strand
gcagggagcaguuaucaaa

SEQ ID NO: 1488283 - RNA, 19 nt, Homo sapiens
  misc_RNA (1)...(19): siRNA sense strand
caaagaaucaggucaagug

SEQ ID NO: 1488284 - RNA, 19 nt, Homo sapiens
  misc_RNA (1)...(19): siRNA sense strand
aaacuggacuucaagaaca

SEQ ID NO: 1488285 - RNA, 19 nt, Homo sapiens
  misc_RNA (1)...(19): siRNA sense strand
gcaucaaacuggacuucaa

SEQ ID NO: 1488286 - RNA, 19 nt, Homo sapiens
  misc_RNA (1)...(19): siRNA sense strand
gacaggaguucccaucaug

SEQ ID NO: 1488287 - RNA, 19 nt, Homo sapiens
  misc_RNA (1)...(19): siRNA sense strand
uaacacugcuguccaccaa

SEQ ID NO: 1488288 - RNA, 19 nt, Homo sapiens
  misc_RNA (1)...(19): siRNA sense strand
gagcaguuaucaaagaauc

SEQ ID NO: 1488289 - RNA, 19 nt, Homo sapiens
  misc_RNA (1)...(19): siRNA sense strand
gggagcaguuaucaaagaa

SEQ ID NO: 1488290 - RNA, 19 nt, Homo sapiens
  misc_RNA (1)...(19): siRNA sense strand
ggacaggacccgagucuac

SEQ ID NO: 1488291 - RNA, 19 nt, Homo sapiens
  misc_RNA (1)...(19): siRNA sense strand
agucuacuaugacaucuuu

SEQ ID NO: 1488292 - RNA, 19 nt, Homo sapiens
  misc_RNA (1)...(19): siRNA sense strand
uggaagaucugcucuacgu

SEQ ID NO: 1488293 - RNA, 19 nt, Homo sapiens
  misc_RNA (1)...(19): siRNA sense strand
cgagggaacuguggcugaa

SEQ ID NO: 1488294 - RNA, 19 nt, Homo sapiens
  misc_RNA (1)...(19): siRNA sense strand
ccuggaggcugacgucaau

SEQ ID NO: 1488295 - RNA, 19 nt, Homo sapiens
  misc_RNA (1)...(19): siRNA sense strand
cagauaugcuagaguugug

SEQ ID NO: 1488296 - RNA, 19 nt, Homo sapiens
  misc_RNA (1)...(19): siRNA sense strand
caccaagucuacuaugaca

SEQ ID NO: 1488297 - RNA, 19 nt, Homo sapiens
  misc_RNA (1)...(19): siRNA sense strand
ggaggcugacgucaaugua

SEQ ID NO: 1488298 - RNA, 19 nt, Homo sapiens
  misc_RNA (1)...(19): siRNA sense strand
ggaugacggucugaaugug

SEQ ID NO: 1488299 - RNA, 19 nt, Homo sapiens
  misc_RNA (1)...(19): siRNA sense strand
ccaacaugcucaucucaac

SEQ ID NO: 1488300 - RNA, 19 nt, Homo sapiens
  misc_RNA (1)...(19): siRNA sense strand
gccuuggccucuugcauug

SEQ ID NO: 1488301 - RNA, 19 nt, Homo sapiens
  misc_RNA (1)...(19): siRNA sense strand
gguggaagaucugcucuac

SEQ ID NO: 1488302 - RNA, 19 nt, Homo sapiens
  misc_RNA (1)...(19): siRNA sense strand
ggucaaugccacacaguuc

SEQ ID NO: 1488303 - RNA, 19 nt, Homo sapiens
  misc_RNA (1)...(19): siRNA sense strand
gggaugacggucugaaugu

SEQ ID NO: 1488304 - RNA, 19 nt, Homo sapiens
  misc_RNA (1)...(19): siRNA sense strand
gcucacagauaugcuagag

SEQ ID NO: 1488305 - RNA, 19 nt, Homo sapiens
  misc_RNA (1)...(19): siRNA sense strand
ggaccaccuucuacauguc

SEQ ID NO: 1488306 - RNA, 19 nt, Homo sapiens
  misc_RNA (1)...(19): siRNA sense strand
agggagcaguuaucaaaga

SEQ ID NO: 1488307 - RNA, 19 nt, Homo sapiens
  misc_RNA (1)...(19): siRNA sense strand
ccacacggaaaccaaugua

SEQ ID NO: 1488308 - RNA, 19 nt, Homo sapiens
  misc_RNA (1)...(19): siRNA sense strand
uaucaaagaaucaggucaa

SEQ ID NO: 1488309 - RNA, 19 nt, Homo sapiens
  misc_RNA (1)...(19): siRNA sense strand
ggcaugauccugcugaaca

SEQ ID NO: 1488310 - RNA, 19 nt, Homo sapiens
  misc_RNA (1)...(19): siRNA sense strand
acaaugacccucccagaca

SEQ ID NO: 1488311 - RNA, 19 nt, Homo sapiens
  misc_RNA (1)...(19): siRNA sense strand
gguaaaacagcaacaauga

SEQ ID NO: 1488312 - RNA, 19 nt, Homo sapiens
  misc_RNA (1)...(19): siRNA sense strand
agacaggaguucccaucau

SEQ ID NO: 1488313 - RNA, 19 nt, Homo sapiens
  misc_RNA (1)...(19): siRNA sense strand
cacggaaaccaauguacua

SEQ ID NO: 1488314 - RNA, 19 nt, Homo sapiens
  misc_RNA (1)...(19): siRNA sense strand
ccaagucuacuaugacauc

SEQ ID NO: 1488315 - RNA, 19 nt, Homo sapiens
  misc_RNA (1)...(19): siRNA sense strand
gcugacagaggaaggcaaa

SEQ ID NO: 1488316 - RNA, 19 nt, Homo sapiens
  misc_RNA (1)...(19): siRNA sense strand
ccaugucgguggaagaucu

SEQ ID NO: 1488317 - RNA, 19 nt, Homo sapiens
  misc_RNA (1)...(19): siRNA sense strand
ucauguugguagaaacuga

SEQ ID NO: 1488318 - RNA, 19 nt, Homo sapiens
  misc_RNA (1)...(19): siRNA sense strand
gaaaaccccgugcccauug

SEQ ID NO: 1488319 - RNA, 19 nt, Homo sapiens
  misc_RNA (1)...(19): siRNA sense strand
cccaagccaugguggagaa

SEQ ID NO: 1488320 - RNA, 19 nt, Homo sapiens
  misc_RNA (1)...(19): siRNA sense strand
ggacuugcuggcucauguu

SEQ ID NO: 1488321 - RNA, 19 nt, Homo sapiens
  misc_RNA (1)...(19): siRNA sense strand
caaacuggacuucaagaac

SEQ ID NO: 1488322 - RNA, 19 nt, Homo sapiens
  misc_RNA (1)...(19): siRNA sense strand
acacugcuguccaccaagu

SEQ ID NO: 1488323 - RNA, 19 nt, Homo sapiens
  misc_RNA (1)...(19): siRNA sense strand
ucccaaggcuacccuaucu

SEQ ID NO: 1488324 - RNA, 19 nt, Homo sapiens
  misc_RNA (1)...(19): siRNA sense strand
aggcugacgucaauguaga

SEQ ID NO: 1488325 - RNA, 19 nt, Homo sapiens
  misc_RNA (1)...(19): siRNA sense strand
uggaccaccuucuacaugu

SEQ ID NO: 1488326 - RNA, 19 nt, Homo sapiens
  misc_RNA (1)...(19): siRNA sense strand
ucaaacuggacuucaagaa

SEQ ID NO: 1488327 - RNA, 19 nt, Homo sapiens
  misc_RNA (1)...(19): siRNA sense strand
gagacaggaguucccauca

SEQ ID NO: 1488328 - RNA, 19 nt, Homo sapiens
  misc_RNA (1)...(19): siRNA sense strand
uccaccaagucuacuauga

SEQ ID NO: 1488329 - RNA, 19 nt, Homo sapiens
  misc_RNA (1)...(19): siRNA sense strand
ggacccgagucuacuacag

SEQ ID NO: 1488330 - RNA, 19 nt, Homo sapiens
  misc_RNA (1)...(19): siRNA sense strand
ggacuucaagaacaucaag

SEQ ID NO: 1488331 - RNA, 19 nt, Homo sapiens
  misc_RNA (1)...(19): siRNA sense strand
uggcucauguugguagaaa

SEQ ID NO: 1488332 - RNA, 19 nt, Homo sapiens
  misc_RNA (1)...(19): siRNA sense strand
aacagcugcucacagauau

SEQ ID NO: 1488333 - RNA, 19 nt, Homo sapiens
  misc_RNA (1)...(19): siRNA sense strand
ggaucaacgcugacaucuu

SEQ ID NO: 1488334 - RNA, 19 nt, Homo sapiens
  misc_RNA (1)...(19): siRNA sense strand
gaauguggaguggcugguu

SEQ ID NO: 1488335 - RNA, 19 nt, Homo sapiens
  misc_RNA (1)...(19): siRNA sense strand
cugcugagccaaucugaga

SEQ ID NO: 1488336 - RNA, 19 nt, Homo sapiens
  misc_RNA (1)...(19): siRNA sense strand
agacacagaaggcaugauc

SEQ ID NO: 1488337 - RNA, 19 nt, Homo sapiens
  misc_RNA (1)...(19): siRNA sense strand
gcaugauccugcugaacac

SEQ ID NO: 1488338 - RNA, 19 nt, Homo sapiens
  misc_RNA (1)...(19): siRNA sense strand
uaccuacagugacaacaca

SEQ ID NO: 1488339 - RNA, 19 nt, Homo sapiens
  misc_RNA (1)...(19): siRNA sense strand
cggcacagccaaugagaca

SEQ ID NO: 1488340 - RNA, 19 nt, Homo sapiens
  misc_RNA (1)...(19): siRNA sense strand
gcagccaacagcaagaaag

SEQ ID NO: 1488341 - RNA, 19 nt, Homo sapiens
  misc_RNA (1)...(19): siRNA sense strand
ucaacgcugacaucuuaaa

SEQ ID NO: 1488342 - RNA, 19 nt, Homo sapiens
  misc_RNA (1)...(19): siRNA sense strand
gacagaggaaggcaaaguc

SEQ ID NO: 1488343 - RNA, 19 nt, Homo sapiens
  misc_RNA (1)...(19): siRNA sense strand
gcugcucacagauaugcua

SEQ ID NO: 1488344 - RNA, 19 nt, Homo sapiens
  misc_RNA (1)...(19): siRNA sense strand
caauaguccuugccaucac

SEQ ID NO: 1488345 - RNA, 19 nt, Homo sapiens
  misc_RNA (1)...(19): siRNA sense strand
caucaaacuggacuucaag

SEQ ID NO: 1488346 - RNA, 19 nt, Homo sapiens
  misc_RNA (1)...(19): siRNA sense strand
gaggcugacgucaauguag

SEQ ID NO: 1488347 - RNA, 19 nt, Homo sapiens
  misc_RNA (1)...(19): siRNA sense strand
caggucaaguggguguuug

SEQ ID NO: 1488348 - RNA, 19 nt, Homo sapiens
  misc_RNA (1)...(19): siRNA sense strand
caacgcugacaucuuaaag

SEQ ID NO: 1488349 - RNA, 19 nt, Homo sapiens
  misc_RNA (1)...(19): siRNA sense strand
ugacagaggaaggcaaagu

SEQ ID NO: 1488350 - RNA, 19 nt, Homo sapiens
  misc_RNA (1)...(19): siRNA sense strand
gaacuugauuguggaauua

SEQ ID NO: 1488351 - RNA, 19 nt, Homo sapiens
  misc_RNA (1)...(19): siRNA sense strand
ggaacuugauuguggaauu

SEQ ID NO: 1488352 - RNA, 19 nt, Homo sapiens
  misc_RNA (1)...(19): siRNA sense strand
ggagaucacucaacacaac

SEQ ID NO: 1488353 - RNA, 19 nt, Homo sapiens
  misc_RNA (1)...(19): siRNA sense strand
cgggauauuuggaggauaa

SEQ ID NO: 1488354 - RNA, 19 nt, Homo sapiens
  misc_RNA (1)...(19): siRNA sense strand
gauuccagcuccucuaugu

SEQ ID NO: 1488355 - RNA, 19 nt, Homo sapiens
  misc_RNA (1)...(19): siRNA sense strand
gcaggagguucaacuucuu

SEQ ID NO: 1488356 - RNA, 19 nt, Homo sapiens
  misc_RNA (1)...(19): siRNA sense strand
ucagagaccuucgcacguu

SEQ ID NO: 1488357 - RNA, 19 nt, Homo sapiens
  misc_RNA (1)...(19): siRNA sense strand
ucuuugugcuggagaauaa

SEQ ID NO: 1488358 - RNA, 19 nt, Homo sapiens
  misc_RNA (1)...(19): siRNA sense strand
cagagaccuucgcacguuu

SEQ ID NO: 1488359 - RNA, 19 nt, Homo sapiens
  misc_RNA (1)...(19): siRNA sense strand
gcuggagaauaaucuggaa

SEQ ID NO: 1488360 - RNA, 19 nt, Homo sapiens
  misc_RNA (1)...(19): siRNA sense strand
aggagcagcugcagggauu

SEQ ID NO: 1488361 - RNA, 19 nt, Homo sapiens
  misc_RNA (1)...(19): siRNA sense strand
cgacacaugcugaucuuca

SEQ ID NO: 1488362 - RNA, 19 nt, Homo sapiens
  misc_RNA (1)...(19): siRNA sense strand
ggaggaaccggagaagaug

SEQ ID NO: 1488363 - RNA, 19 nt, Homo sapiens
  misc_RNA (1)...(19): siRNA sense strand
gggcgucccgggauauuug

SEQ ID NO: 1488364 - RNA, 19 nt, Homo sapiens
  misc_RNA (1)...(19): siRNA sense strand
cgagcuagaugugcugcuu

SEQ ID NO: 1488365 - RNA, 19 nt, Homo sapiens
  misc_RNA (1)...(19): siRNA sense strand
ucaggcagcuggauuugcu

SEQ ID NO: 1488366 - RNA, 19 nt, Homo sapiens
  misc_RNA (1)...(19): siRNA sense strand
gagguucaacuucuuugug

SEQ ID NO: 1488367 - RNA, 19 nt, Homo sapiens
  misc_RNA (1)...(19): siRNA sense strand
ccgauacagugcacagcaa

SEQ ID NO: 1488368 - RNA, 19 nt, Homo sapiens
  misc_RNA (1)...(19): siRNA sense strand
ggagaauaaucuggaagcu

SEQ ID NO: 1488369 - RNA, 19 nt, Homo sapiens
  misc_RNA (1)...(19): siRNA sense strand
gauauuuggaggauaaagg

SEQ ID NO: 1488370 - RNA, 19 nt, Homo sapiens
  misc_RNA (1)...(19): siRNA sense strand
uggaggaaccggagaagau

SEQ ID NO: 1488371 - RNA, 19 nt, Homo sapiens
  misc_RNA (1)...(19): siRNA sense strand
gcacagcaaccccgagcua

SEQ ID NO: 1488372 - RNA, 19 nt, Homo sapiens
  misc_RNA (1)...(19): siRNA sense strand
gcacccggagggaacuuga

SEQ ID NO: 1488373 - RNA, 19 nt, Homo sapiens
  misc_RNA (1)...(19): siRNA sense strand
ccacaagagcugcuacaac

SEQ ID NO: 1488374 - RNA, 19 nt, Homo sapiens
  misc_RNA (1)...(19): siRNA sense strand
cagccuagcccuggaggaa

SEQ ID NO: 1488375 - RNA, 19 nt, Homo sapiens
  misc_RNA (1)...(19): siRNA sense strand
cgcaggagguucaacuucu

SEQ ID NO: 1488376 - RNA, 19 nt, Homo sapiens
  misc_RNA (1)...(19): siRNA sense strand
caggagguucaacuucuuu

SEQ ID NO: 1488377 - RNA, 19 nt, Homo sapiens
  misc_RNA (1)...(19): siRNA sense strand
gacugggaccugcgcauga

SEQ ID NO: 1488378 - RNA, 19 nt, Homo sapiens
  misc_RNA (1)...(19): siRNA sense strand
ggagguucaacuucuuugu

SEQ ID NO: 1488379 - RNA, 19 nt, Homo sapiens
  misc_RNA (1)...(19): siRNA sense strand
ccagcaacccagcccuuga

SEQ ID NO: 1488380 - RNA, 19 nt, Homo sapiens
  misc_RNA (1)...(19): siRNA sense strand
uauguggccugugguaugg

SEQ ID NO: 1488381 - RNA, 19 nt, Homo sapiens
  misc_RNA (1)...(19): siRNA sense strand
gcaacggccagccagucaa

SEQ ID NO: 1488382 - RNA, 19 nt, Homo sapiens
  misc_RNA (1)...(19): siRNA sense strand
uggcuccgcccaacuguga

SEQ ID NO: 1488383 - RNA, 19 nt, Homo sapiens
  misc_RNA (1)...(19): siRNA sense strand
gcucaggcagcuggauuug

SEQ ID NO: 1488384 - RNA, 19 nt, Homo sapiens
  misc_RNA (1)...(19): siRNA sense strand
gaaaagaccucacugaaug

SEQ ID NO: 1488385 - RNA, 19 nt, Homo sapiens
  misc_RNA (1)...(19): siRNA sense strand
gggucugccuugcuuauuu

SEQ ID NO: 1488386 - RNA, 19 nt, Homo sapiens
  misc_RNA (1)...(19): siRNA sense strand
cagcugggaucauguuguu

SEQ ID NO: 1488387 - RNA, 19 nt, Homo sapiens
  misc_RNA (1)...(19): siRNA sense strand
gcucuacggucguugugaa

SEQ ID NO: 1488388 - RNA, 19 nt, Homo sapiens
  misc_RNA (1)...(19): siRNA sense strand
guacugcucagauuuguug

SEQ ID NO: 1488389 - RNA, 19 nt, Homo sapiens
  misc_RNA (1)...(19): siRNA sense strand
ccaugaagauaacccaaga

SEQ ID NO: 1488390 - RNA, 19 nt, Homo sapiens
  misc_RNA (1)...(19): siRNA sense strand
ccagagugcuacaugacuu

SEQ ID NO: 1488391 - RNA, 19 nt, Homo sapiens
  misc_RNA (1)...(19): siRNA sense strand
ggauggcugugacuucuag

SEQ ID NO: 1488392 - RNA, 19 nt, Homo sapiens
  misc_RNA (1)...(19): siRNA sense strand
ggucugccuugcuuauuuc

SEQ ID NO: 1488393 - RNA, 19 nt, Homo sapiens
  misc_RNA (1)...(19): siRNA sense strand
gauguacugcucagauuug

SEQ ID NO: 1488394 - RNA, 19 nt, Homo sapiens
  misc_RNA (1)...(19): siRNA sense strand
ggauguacugcucagauuu

SEQ ID NO: 1488395 - RNA, 19 nt, Homo sapiens
  misc_RNA (1)...(19): siRNA sense strand
cggauguacugcucagauu

SEQ ID NO: 1488396 - RNA, 19 nt, Homo sapiens
  misc_RNA (1)...(19): siRNA sense strand
guugugaacuggccagagu

SEQ ID NO: 1488397 - RNA, 19 nt, Homo sapiens
  misc_RNA (1)...(19): siRNA sense strand
ggaaaagaccucacugaau

SEQ ID NO: 1488398 - RNA, 19 nt, Homo sapiens
  misc_RNA (1)...(19): siRNA sense strand
ccagugaggccaagcucua

SEQ ID NO: 1488399 - RNA, 19 nt, Homo sapiens
  misc_RNA (1)...(19): siRNA sense strand
gcacucaagcccuguuucu

SEQ ID NO: 1488400 - RNA, 19 nt, Homo sapiens
  misc_RNA (1)...(19): siRNA sense strand
gccaagcucuacggucguu

SEQ ID NO: 1488401 - RNA, 19 nt, Homo sapiens
  misc_RNA (1)...(19): siRNA sense strand
ugaacuggccagagugcua

SEQ ID NO: 1488402 - RNA, 19 nt, Homo sapiens
  misc_RNA (1)...(19): siRNA sense strand
gacugggucugccuugcuu

SEQ ID NO: 1488403 - RNA, 19 nt, Homo sapiens
  misc_RNA (1)...(19): siRNA sense strand
cagcugcuuuggacuacga

SEQ ID NO: 1488404 - RNA, 19 nt, Homo sapiens
  misc_RNA (1)...(19): siRNA sense strand
uggccagagugcuacauga

SEQ ID NO: 1488405 - RNA, 19 nt, Homo sapiens
  misc_RNA (1)...(19): siRNA sense strand
guggauggcugugacuucu

SEQ ID NO: 1488406 - RNA, 19 nt, Homo sapiens
  misc_RNA (1)...(19): siRNA sense strand
acucaagcccuguuucuuc

SEQ ID NO: 1488407 - RNA, 19 nt, Homo sapiens
  misc_RNA (1)...(19): siRNA sense strand
gggaaaagaccucacugaa

SEQ ID NO: 1488408 - RNA, 19 nt, Homo sapiens
  misc_RNA (1)...(19): siRNA sense strand
cugcucagauuuguugaau

SEQ ID NO: 1488409 - RNA, 19 nt, Homo sapiens
  misc_RNA (1)...(19): siRNA sense strand
cuacggucguugugaacug

SEQ ID NO: 1488410 - RNA, 19 nt, Homo sapiens
  misc_RNA (1)...(19): siRNA sense strand
acuucgggcuggacggaua

SEQ ID NO: 1488411 - RNA, 19 nt, Homo sapiens
  misc_RNA (1)...(19): siRNA sense strand
accguuaucugugccauga

SEQ ID NO: 1488412 - RNA, 19 nt, Homo sapiens
  misc_RNA (1)...(19): siRNA sense strand
cugccuugcuuauuucaca

SEQ ID NO: 1488413 - RNA, 19 nt, Homo sapiens
  misc_RNA (1)...(19): siRNA sense strand
aaucucaaggauaccguua

SEQ ID NO: 1488414 - RNA, 19 nt, Homo sapiens
  misc_RNA (1)...(19): siRNA sense strand
gcugaugggagcaccaaca

SEQ ID NO: 1488415 - RNA, 19 nt, Homo sapiens
  misc_RNA (1)...(19): siRNA sense strand
uuucaacgcagcugcuuug

SEQ ID NO: 1488416 - RNA, 19 nt, Homo sapiens
  misc_RNA (1)...(19): siRNA sense strand
gaacacacccugaaugaaa

SEQ ID NO: 1488417 - RNA, 19 nt, Homo sapiens
  misc_RNA (1)...(19): siRNA sense strand
gaacacagcccacuuggau

SEQ ID NO: 1488418 - RNA, 19 nt, Homo sapiens
  misc_RNA (1)...(19): siRNA sense strand
caaggacaacucaaacuua

SEQ ID NO: 1488419 - RNA, 19 nt, Homo sapiens
  misc_RNA (1)...(19): siRNA sense strand
cggagaaucugcucauuga

SEQ ID NO: 1488420 - RNA, 19 nt, Homo sapiens
  misc_RNA (1)...(19): siRNA sense strand
ccugcaagcugucaacuuu

SEQ ID NO: 1488421 - RNA, 19 nt, Homo sapiens
  misc_RNA (1)...(19): siRNA sense strand
gaaccacuaugccaugaag

SEQ ID NO: 1488422 - RNA, 19 nt, Homo sapiens
  misc_RNA (1)...(19): siRNA sense strand
gagcaaaggcuacaacaag

SEQ ID NO: 1488423 - RNA, 19 nt, Homo sapiens
  misc_RNA (1)...(19): siRNA sense strand
gagauuauccugagcaaag

SEQ ID NO: 1488424 - RNA, 19 nt, Homo sapiens
  misc_RNA (1)...(19): siRNA sense strand
cgaguaacuuugacgacua

SEQ ID NO: 1488425 - RNA, 19 nt, Homo sapiens
  misc_RNA (1)...(19): siRNA sense strand
gcgcuucccuucccacuuc

SEQ ID NO: 1488426 - RNA, 19 nt, Homo sapiens
  misc_RNA (1)...(19): siRNA sense strand
ccacuuggaucaguuugaa

SEQ ID NO: 1488427 - RNA, 19 nt, Homo sapiens
  misc_RNA (1)...(19): siRNA sense strand
gcaaggaguuuucugaguu

SEQ ID NO: 1488428 - RNA, 19 nt, Homo sapiens
  misc_RNA (1)...(19): siRNA sense strand
caacucaaacuuauacaug

SEQ ID NO: 1488429 - RNA, 19 nt, Homo sapiens
  misc_RNA (1)...(19): siRNA sense strand
ggacaacucaaacuuauac

SEQ ID NO: 1488430 - RNA, 19 nt, Homo sapiens
  misc_RNA (1)...(19): siRNA sense strand
gaaagucccgcucagaaca

SEQ ID NO: 1488431 - RNA, 19 nt, Homo sapiens
  misc_RNA (1)...(19): siRNA sense strand
ccaugaagauccucgacaa

SEQ ID NO: 1488432 - RNA, 19 nt, Homo sapiens
  misc_RNA (1)...(19): siRNA sense strand
gaguaacuuugacgacuau

SEQ ID NO: 1488433 - RNA, 19 nt, Homo sapiens
  misc_RNA (1)...(19): siRNA sense strand
ugaagauccucgacaaaca

SEQ ID NO: 1488434 - RNA, 19 nt, Homo sapiens
  misc_RNA (1)...(19): siRNA sense strand
aaggacaacucaaacuuau

SEQ ID NO: 1488435 - RNA, 19 nt, Homo sapiens
  misc_RNA (1)...(19): siRNA sense strand
gaaauccgggucuccauca

SEQ ID NO: 1488436 - RNA, 19 nt, Homo sapiens
  misc_RNA (1)...(19): siRNA sense strand
ggucaacgauaucaagaac

SEQ ID NO: 1488437 - RNA, 19 nt, Homo sapiens
  misc_RNA (1)...(19): siRNA sense strand
ccaaagccaaagaagauuu

SEQ ID NO: 1488438 - RNA, 19 nt, Homo sapiens
  misc_RNA (1)...(19): siRNA sense strand
ugacgacuaugaggaagaa

SEQ ID NO: 1488439 - RNA, 19 nt, Homo sapiens
  misc_RNA (1)...(19): siRNA sense strand
gggauacgaguaacuuuga

SEQ ID NO: 1488440 - RNA, 19 nt, Homo sapiens
  misc_RNA (1)...(19): siRNA sense strand
guucuuaucuaugaaaugg

SEQ ID NO: 1488441 - RNA, 19 nt, Homo sapiens
  misc_RNA (1)...(19): siRNA sense strand
caggagagcgugaaagaau

SEQ ID NO: 1488442 - RNA, 19 nt, Homo sapiens
  misc_RNA (1)...(19): siRNA sense strand
gaagguggugaaacugaaa

SEQ ID NO: 1488443 - RNA, 19 nt, Homo sapiens
  misc_RNA (1)...(19): siRNA sense strand
gggaaccacuaugccauga

SEQ ID NO: 1488444 - RNA, 19 nt, Homo sapiens
  misc_RNA (1)...(19): siRNA sense strand
ccauccagaucuaugagaa

SEQ ID NO: 1488445 - RNA, 19 nt, Homo sapiens
  misc_RNA (1)...(19): siRNA sense strand
ucaacgauaucaagaacca

SEQ ID NO: 1488446 - RNA, 19 nt, Homo sapiens
  misc_RNA (1)...(19): siRNA sense strand
ggagagcgugaaagaauuc

SEQ ID NO: 1488447 - RNA, 19 nt, Homo sapiens
  misc_RNA (1)...(19): siRNA sense strand
ugccacaacugacuggauu

SEQ ID NO: 1488448 - RNA, 19 nt, Homo sapiens
  misc_RNA (1)...(19): siRNA sense strand
gggugaugcuggugaaaca

SEQ ID NO: 1488449 - RNA, 19 nt, Homo sapiens
  misc_RNA (1)...(19): siRNA sense strand
gaaguguggcaaggaguuu

SEQ ID NO: 1488450 - RNA, 19 nt, Homo sapiens
  misc_RNA (1)...(19): siRNA sense strand
gaucgaacacacccugaau

SEQ ID NO: 1488451 - RNA, 19 nt, Homo sapiens
  misc_RNA (1)...(19): siRNA sense strand
agaagguggugaaacugaa

SEQ ID NO: 1488452 - RNA, 19 nt, Homo sapiens
  misc_RNA (1)...(19): siRNA sense strand
ucaaggacaacucaaacuu

SEQ ID NO: 1488453 - RNA, 19 nt, Homo sapiens
  misc_RNA (1)...(19): siRNA sense strand
caaggaguuuucugaguuu

SEQ ID NO: 1488454 - RNA, 19 nt, Homo sapiens
  misc_RNA (1)...(19): siRNA sense strand
ggaaagucccgcucagaac

SEQ ID NO: 1488455 - RNA, 19 nt, Homo sapiens
  misc_RNA (1)...(19): siRNA sense strand
cgacuaugaggaagaagaa

SEQ ID NO: 1488456 - RNA, 19 nt, Homo sapiens
  misc_RNA (1)...(19): siRNA sense strand
ucagaacacagcccacuug

SEQ ID NO: 1488457 - RNA, 19 nt, Homo sapiens
  misc_RNA (1)...(19): siRNA sense strand
cagaagguggugaaacuga

SEQ ID NO: 1488458 - RNA, 19 nt, Homo sapiens
  misc_RNA (1)...(19): siRNA sense strand
aggagagcgugaaagaauu

SEQ ID NO: 1488459 - RNA, 19 nt, Homo sapiens
  misc_RNA (1)...(19): siRNA sense strand
gcaggagagcgugaaagaa

SEQ ID NO: 1488460 - RNA, 19 nt, Homo sapiens
  misc_RNA (1)...(19): siRNA sense strand
ucgaacacacccugaauga

SEQ ID NO: 1488461 - RNA, 19 nt, Homo sapiens
  misc_RNA (1)...(19): siRNA sense strand
gaaacugaaacagaucgaa

SEQ ID NO: 1488462 - RNA, 19 nt, Homo sapiens
  misc_RNA (1)...(19): siRNA sense strand
gaagauccucgacaaacag

SEQ ID NO: 1488463 - RNA, 19 nt, Homo sapiens
  misc_RNA (1)...(19): siRNA sense strand
ggugacagacuucgguuuc

SEQ ID NO: 1488464 - RNA, 19 nt, Homo sapiens
  misc_RNA (1)...(19): siRNA sense strand
aacagaagguggugaaacu

SEQ ID NO: 1488465 - RNA, 19 nt, Homo sapiens
  misc_RNA (1)...(19): siRNA sense strand
gaucucaccaagcgcuuug

SEQ ID NO: 1488466 - RNA, 19 nt, Homo sapiens
  misc_RNA (1)...(19): siRNA sense strand
uggugaaacugaaacagau

SEQ ID NO: 1488467 - RNA, 19 nt, Homo sapiens
  misc_RNA (1)...(19): siRNA sense strand
guaacuuugacgacuauga

SEQ ID NO: 1488468 - RNA, 19 nt, Homo sapiens
  misc_RNA (1)...(19): siRNA sense strand
ugacuggauugccaucuac

SEQ ID NO: 1488469 - RNA, 19 nt, Homo sapiens
  misc_RNA (1)...(19): siRNA sense strand
uugggaaccucaagaaugg

SEQ ID NO: 1488470 - RNA, 19 nt, Homo sapiens
  misc_RNA (1)...(19): siRNA sense strand
ggagaccgggaaccacuau

SEQ ID NO: 1488471 - RNA, 19 nt, Homo sapiens
  misc_RNA (1)...(19): siRNA sense strand
ggaucaguuugaacgaauc

SEQ ID NO: 1488472 - RNA, 19 nt, Homo sapiens
  misc_RNA (1)...(19): siRNA sense strand
acauucaggugacagacuu

SEQ ID NO: 1488473 - RNA, 19 nt, Homo sapiens
  misc_RNA (1)...(19): siRNA sense strand
acacagcccacuuggauca

SEQ ID NO: 1488474 - RNA, 19 nt, Homo sapiens
  misc_RNA (1)...(19): siRNA sense strand
acaaacagaagguggugaa

SEQ ID NO: 1488475 - RNA, 19 nt, Homo sapiens
  misc_RNA (1)...(19): siRNA sense strand
cugacuggauugccaucua

SEQ ID NO: 1488476 - RNA, 19 nt, Homo sapiens
  misc_RNA (1)...(19): siRNA sense strand
guggugaaacugaaacaga

SEQ ID NO: 1488477 - RNA, 19 nt, Homo sapiens
  misc_RNA (1)...(19): siRNA sense strand
caugaagauccucgacaaa

SEQ ID NO: 1488478 - RNA, 19 nt, Homo sapiens
  misc_RNA (1)...(19): siRNA sense strand
agaauggggucaacgauau

SEQ ID NO: 1488479 - RNA, 19 nt, Homo sapiens
  misc_RNA (1)...(19): siRNA sense strand
ccagaucguccugaccuuu

SEQ ID NO: 1488480 - RNA, 19 nt, Homo sapiens
  misc_RNA (1)...(19): siRNA sense strand
uggaucaguuugaacgaau

SEQ ID NO: 1488481 - RNA, 19 nt, Homo sapiens
  misc_RNA (1)...(19): siRNA sense strand
gaccagcagggcuacauuc

SEQ ID NO: 1488482 - RNA, 19 nt, Homo sapiens
  misc_RNA (1)...(19): siRNA sense strand
cagaucguccugaccuuug

SEQ ID NO: 1488483 - RNA, 19 nt, Homo sapiens
  misc_RNA (1)...(19): siRNA sense strand
guccugaccuuugaguauc

SEQ ID NO: 1488484 - RNA, 19 nt, Homo sapiens
  misc_RNA (1)...(19): siRNA sense strand
uagccaaagccaaagaaga

SEQ ID NO: 1488485 - RNA, 19 nt, Homo sapiens
  misc_RNA (1)...(19): siRNA sense strand
uaacuuugacgacuaugag

SEQ ID NO: 1488486 - RNA, 19 nt, Homo sapiens
  misc_RNA (1)...(19): siRNA sense strand
cagcccacuuggaucaguu

SEQ ID NO: 1488487 - RNA, 19 nt, Homo sapiens
  misc_RNA (1)...(19): siRNA sense strand
gaccagcccauccagaucu

SEQ ID NO: 1488488 - RNA, 19 nt, Homo sapiens
  misc_RNA (1)...(19): siRNA sense strand
ggaaccacuaugccaugaa

SEQ ID NO: 1488489 - RNA, 19 nt, Homo sapiens
  misc_RNA (1)...(19): siRNA sense strand
ccggagaaucugcucauug

SEQ ID NO: 1488490 - RNA, 19 nt, Homo sapiens
  misc_RNA (1)...(19): siRNA sense strand
gccggagaaucugcucauu

SEQ ID NO: 1488491 - RNA, 19 nt, Homo sapiens
  misc_RNA (1)...(19): siRNA sense strand
cgaacacacccugaaugaa

SEQ ID NO: 1488492 - RNA, 19 nt, Homo sapiens
  misc_RNA (1)...(19): siRNA sense strand
cguccugaccuuugaguau

SEQ ID NO: 1488493 - RNA, 19 nt, Homo sapiens
  misc_RNA (1)...(19): siRNA sense strand
agccaaagccaaagaagau

SEQ ID NO: 1488494 - RNA, 19 nt, Homo sapiens
  misc_RNA (1)...(19): siRNA sense strand
gcuuugggaaccucaagaa

SEQ ID NO: 1488495 - RNA, 19 nt, Homo sapiens
  misc_RNA (1)...(19): siRNA sense strand
caaacagaagguggugaaa

SEQ ID NO: 1488496 - RNA, 19 nt, Homo sapiens
  misc_RNA (1)...(19): siRNA sense strand
gaucaguuugaacgaauca

SEQ ID NO: 1488497 - RNA, 19 nt, Homo sapiens
  misc_RNA (1)...(19): siRNA sense strand
auucuuagccaaagccaaa

SEQ ID NO: 1488498 - RNA, 19 nt, Homo sapiens
  misc_RNA (1)...(19): siRNA sense strand
ggaucggaagguucaguga

SEQ ID NO: 1488499 - RNA, 19 nt, Homo sapiens
  misc_RNA (1)...(19): siRNA sense strand
gauccucgacaaacagaag

SEQ ID NO: 1488500 - RNA, 19 nt, Homo sapiens
  misc_RNA (1)...(19): siRNA sense strand
cagaccagcccauccagau

SEQ ID NO: 1488501 - RNA, 19 nt, Homo sapiens
  misc_RNA (1)...(19): siRNA sense strand
guaccuggccccugagauu

SEQ ID NO: 1488502 - RNA, 19 nt, Homo sapiens
  misc_RNA (1)...(19): siRNA sense strand
agaucguccugaccuuuga

SEQ ID NO: 1488503 - RNA, 19 nt, Homo sapiens
  misc_RNA (1)...(19): siRNA sense strand
ggauacgaguaacuuugac

SEQ ID NO: 1488504 - RNA, 19 nt, Homo sapiens
  misc_RNA (1)...(19): siRNA sense strand
ggaguuuucugaguuuuag

SEQ ID NO: 1488505 - RNA, 19 nt, Homo sapiens
  misc_RNA (1)...(19): siRNA sense strand
gaagaagccuuuagacuuu

SEQ ID NO: 1488506 - RNA, 19 nt, Homo sapiens
  misc_RNA (1)...(19): siRNA sense strand
gaacagcucuucaccauga

SEQ ID NO: 1488507 - RNA, 19 nt, Homo sapiens
  misc_RNA (1)...(19): siRNA sense strand
gauuaucucuuccaaguua

SEQ ID NO: 1488508 - RNA, 19 nt, Homo sapiens
  misc_RNA (1)...(19): siRNA sense strand
gaaacuggacaauguauua

SEQ ID NO: 1488509 - RNA, 19 nt, Homo sapiens
  misc_RNA (1)...(19): siRNA sense strand
gcaggaaggucuccauuug

SEQ ID NO: 1488510 - RNA, 19 nt, Homo sapiens
  misc_RNA (1)...(19): siRNA sense strand
agaaaucagucuagcauua

SEQ ID NO: 1488511 - RNA, 19 nt, Homo sapiens
  misc_RNA (1)...(19): siRNA sense strand
ugaagaacaugccagauuu

SEQ ID NO: 1488512 - RNA, 19 nt, Homo sapiens
  misc_RNA (1)...(19): siRNA sense strand
uuacauugcuccugaaauu

SEQ ID NO: 1488513 - RNA, 19 nt, Homo sapiens
  misc_RNA (1)...(19): siRNA sense strand
caaguguucugaagaguuu

SEQ ID NO: 1488514 - RNA, 19 nt, Homo sapiens
  misc_RNA (1)...(19): siRNA sense strand
gaggagaccuaauguuuca

SEQ ID NO: 1488515 - RNA, 19 nt, Homo sapiens
  misc_RNA (1)...(19): siRNA sense strand
ggugguaccucccuuuaaa

SEQ ID NO: 1488516 - RNA, 19 nt, Homo sapiens
  misc_RNA (1)...(19): siRNA sense strand
gaaaucagucuagcauuaa

SEQ ID NO: 1488517 - RNA, 19 nt, Homo sapiens
  misc_RNA (1)...(19): siRNA sense strand
gcaaugaacaccagggaaa

SEQ ID NO: 1488518 - RNA, 19 nt, Homo sapiens
  misc_RNA (1)...(19): siRNA sense strand
ggaguuagaagaagccuuu

SEQ ID NO: 1488519 - RNA, 19 nt, Homo sapiens
  misc_RNA (1)...(19): siRNA sense strand
gauuaugguuucaguguug

SEQ ID NO: 1488520 - RNA, 19 nt, Homo sapiens
  misc_RNA (1)...(19): siRNA sense strand
gcagauuguucuuuguuau

SEQ ID NO: 1488521 - RNA, 19 nt, Homo sapiens
  misc_RNA (1)...(19): siRNA sense strand
gccauaaacucgucacaau

SEQ ID NO: 1488522 - RNA, 19 nt, Homo sapiens
  misc_RNA (1)...(19): siRNA sense strand
ggaucaaguuggugaagaa

SEQ ID NO: 1488523 - RNA, 19 nt, Homo sapiens
  misc_RNA (1)...(19): siRNA sense strand
gaaggucuccauuugauau

SEQ ID NO: 1488524 - RNA, 19 nt, Homo sapiens
  misc_RNA (1)...(19): siRNA sense strand
aaacaggauuugcugauau

SEQ ID NO: 1488525 - RNA, 19 nt, Homo sapiens
  misc_RNA (1)...(19): siRNA sense strand
ggagacccguguacaguau

SEQ ID NO: 1488526 - RNA, 19 nt, Homo sapiens
  misc_RNA (1)...(19): siRNA sense strand
gaucguauuuaugcaauga

SEQ ID NO: 1488527 - RNA, 19 nt, Homo sapiens
  misc_RNA (1)...(19): siRNA sense strand
aaacaaggauucugaacuc

SEQ ID NO: 1488528 - RNA, 19 nt, Homo sapiens
  misc_RNA (1)...(19): siRNA sense strand
gaucagucauccaugcauu

SEQ ID NO: 1488529 - RNA, 19 nt, Homo sapiens
  misc_RNA (1)...(19): siRNA sense strand
cauaagaagugccauaaac

SEQ ID NO: 1488530 - RNA, 19 nt, Homo sapiens
  misc_RNA (1)...(19): siRNA sense strand
caaauucgcauaccacguu

SEQ ID NO: 1488531 - RNA, 19 nt, Homo sapiens
  misc_RNA (1)...(19): siRNA sense strand
acauuaaacucacugacua

SEQ ID NO: 1488532 - RNA, 19 nt, Homo sapiens
  misc_RNA (1)...(19): siRNA sense strand
gagcaggcauccaaucauc

SEQ ID NO: 1488533 - RNA, 19 nt, Homo sapiens
  misc_RNA (1)...(19): siRNA sense strand
gcaaugagguucgagacau

SEQ ID NO: 1488534 - RNA, 19 nt, Homo sapiens
  misc_RNA (1)...(19): siRNA sense strand
ggauauaagugcaucaacu

SEQ ID NO: 1488535 - RNA, 19 nt, Homo sapiens
  misc_RNA (1)...(19): siRNA sense strand
guaccucccuuuaaaccaa

SEQ ID NO: 1488536 - RNA, 19 nt, Homo sapiens
  misc_RNA (1)...(19): siRNA sense strand
cagagaagcauguguuuga

SEQ ID NO: 1488537 - RNA, 19 nt, Homo sapiens
  misc_RNA (1)...(19): siRNA sense strand
cauaaacucgucacaauug

SEQ ID NO: 1488538 - RNA, 19 nt, Homo sapiens
  misc_RNA (1)...(19): siRNA sense strand
gaccuaauguuucauaugc

SEQ ID NO: 1488539 - RNA, 19 nt, Homo sapiens
  misc_RNA (1)...(19): siRNA sense strand
cauauaauccuucaaguca

SEQ ID NO: 1488540 - RNA, 19 nt, Homo sapiens
  misc_RNA (1)...(19): siRNA sense strand
gaguauaucaauccucuuu

SEQ ID NO: 1488541 - RNA, 19 nt, Homo sapiens
  misc_RNA (1)...(19): siRNA sense strand
gaggagaagauuaugguuu

SEQ ID NO: 1488542 - RNA, 19 nt, Homo sapiens
  misc_RNA (1)...(19): siRNA sense strand
ggagaccuaauguuucaua

SEQ ID NO: 1488543 - RNA, 19 nt, Homo sapiens
  misc_RNA (1)...(19): siRNA sense strand
agaagaagccuuuagacuu

SEQ ID NO: 1488544 - RNA, 19 nt, Homo sapiens
  misc_RNA (1)...(19): siRNA sense strand
aaacagaucguauuuaugc

SEQ ID NO: 1488545 - RNA, 19 nt, Homo sapiens
  misc_RNA (1)...(19): siRNA sense strand
ggaaggucuccauuugaua

SEQ ID NO: 1488546 - RNA, 19 nt, Homo sapiens
  misc_RNA (1)...(19): siRNA sense strand
gaacacagaggauuaucuc

SEQ ID NO: 1488547 - RNA, 19 nt, Homo sapiens
  misc_RNA (1)...(19): siRNA sense strand
aagaggaaguuaugccaaa

SEQ ID NO: 1488548 - RNA, 19 nt, Homo sapiens
  misc_RNA (1)...(19): siRNA sense strand
caugagcgagggauaauuu

SEQ ID NO: 1488549 - RNA, 19 nt, Homo sapiens
  misc_RNA (1)...(19): siRNA sense strand
gcagaaaucagucuagcau

SEQ ID NO: 1488550 - RNA, 19 nt, Homo sapiens
  misc_RNA (1)...(19): siRNA sense strand
gaaauggauagaugaggaa

SEQ ID NO: 1488551 - RNA, 19 nt, Homo sapiens
  misc_RNA (1)...(19): siRNA sense strand
gucuaggucuucaggauuu

SEQ ID NO: 1488552 - RNA, 19 nt, Homo sapiens
  misc_RNA (1)...(19): siRNA sense strand
caucucaguuggaguuaga

SEQ ID NO: 1488553 - RNA, 19 nt, Homo sapiens
  misc_RNA (1)...(19): siRNA sense strand
gcacagacaguaauuccau

SEQ ID NO: 1488554 - RNA, 19 nt, Homo sapiens
  misc_RNA (1)...(19): siRNA sense strand
gauucucaguuuacuaaug

SEQ ID NO: 1488555 - RNA, 19 nt, Homo sapiens
  misc_RNA (1)...(19): siRNA sense strand
ggaggagaccuaauguuuc

SEQ ID NO: 1488556 - RNA, 19 nt, Homo sapiens
  misc_RNA (1)...(19): siRNA sense strand
uauaauccuucaagucaug

SEQ ID NO: 1488557 - RNA, 19 nt, Homo sapiens
  misc_RNA (1)...(19): siRNA sense strand
uggaggagaccuaauguuu

SEQ ID NO: 1488558 - RNA, 19 nt, Homo sapiens
  misc_RNA (1)...(19): siRNA sense strand
guaaauggaggagaccuaa

SEQ ID NO: 1488559 - RNA, 19 nt, Homo sapiens
  misc_RNA (1)...(19): siRNA sense strand
caaugagguucgagacaug

SEQ ID NO: 1488560 - RNA, 19 nt, Homo sapiens
  misc_RNA (1)...(19): siRNA sense strand
gcaaguguucugaagaguu

SEQ ID NO: 1488561 - RNA, 19 nt, Homo sapiens
  misc_RNA (1)...(19): siRNA sense strand
ggagauacaaccagcacuu

SEQ ID NO: 1488562 - RNA, 19 nt, Homo sapiens
  misc_RNA (1)...(19): siRNA sense strand
gaaggccacauuaaacuca

SEQ ID NO: 1488563 - RNA, 19 nt, Homo sapiens
  misc_RNA (1)...(19): siRNA sense strand
gauauugauuggguacaga

SEQ ID NO: 1488564 - RNA, 19 nt, Homo sapiens
  misc_RNA (1)...(19): siRNA sense strand
aaucauccuuuccuuguug

SEQ ID NO: 1488565 - RNA, 19 nt, Homo sapiens
  misc_RNA (1)...(19): siRNA sense strand
aagaagccuuuagacuuua

SEQ ID NO: 1488566 - RNA, 19 nt, Homo sapiens
  misc_RNA (1)...(19): siRNA sense strand
uuugaugucugcagaagaa

SEQ ID NO: 1488567 - RNA, 19 nt, Homo sapiens
  misc_RNA (1)...(19): siRNA sense strand
uaauaaggacccuaaggaa

SEQ ID NO: 1488568 - RNA, 19 nt, Homo sapiens
  misc_RNA (1)...(19): siRNA sense strand
gagauacaaccagcacuuu

SEQ ID NO: 1488569 - RNA, 19 nt, Homo sapiens
  misc_RNA (1)...(19): siRNA sense strand
aggaaguuaugccaaagua

SEQ ID NO: 1488570 - RNA, 19 nt, Homo sapiens
  misc_RNA (1)...(19): siRNA sense strand
gaccaugcacagacaguaa

SEQ ID NO: 1488571 - RNA, 19 nt, Homo sapiens
  misc_RNA (1)...(19): siRNA sense strand
agucauccaugcauucuga

SEQ ID NO: 1488572 - RNA, 19 nt, Homo sapiens
  misc_RNA (1)...(19): siRNA sense strand
gauauaagugcaucaacug

SEQ ID NO: 1488573 - RNA, 19 nt, Homo sapiens
  misc_RNA (1)...(19): siRNA sense strand
gaggaagauugaucagucu

SEQ ID NO: 1488574 - RNA, 19 nt, Homo sapiens
  misc_RNA (1)...(19): siRNA sense strand
aggagaagauuaugguuuc

SEQ ID NO: 1488575 - RNA, 19 nt, Homo sapiens
  misc_RNA (1)...(19): siRNA sense strand
ggauuacggccaggagaua

SEQ ID NO: 1488576 - RNA, 19 nt, Homo sapiens
  misc_RNA (1)...(19): siRNA sense strand
cacagacaguaauuccaua

SEQ ID NO: 1488577 - RNA, 19 nt, Homo sapiens
  misc_RNA (1)...(19): siRNA sense strand
gaaguuaugccaaaguacu

SEQ ID NO: 1488578 - RNA, 19 nt, Homo sapiens
  misc_RNA (1)...(19): siRNA sense strand
agucugaauuugaagguuu

SEQ ID NO: 1488579 - RNA, 19 nt, Homo sapiens
  misc_RNA (1)...(19): siRNA sense strand
aggauuaucucuuccaagu

SEQ ID NO: 1488580 - RNA, 19 nt, Homo sapiens
  misc_RNA (1)...(19): siRNA sense strand
ggagaagauuaugguuuca

SEQ ID NO: 1488581 - RNA, 19 nt, Homo sapiens
  misc_RNA (1)...(19): siRNA sense strand
ccaaucauccuuuccuugu

SEQ ID NO: 1488582 - RNA, 19 nt, Homo sapiens
  misc_RNA (1)...(19): siRNA sense strand
gagaccuaauguuucauau

SEQ ID NO: 1488583 - RNA, 19 nt, Homo sapiens
  misc_RNA (1)...(19): siRNA sense strand
ccauaaacucgucacaauu

SEQ ID NO: 1488584 - RNA, 19 nt, Homo sapiens
  misc_RNA (1)...(19): siRNA sense strand
ggaauuugguuuggacaac

SEQ ID NO: 1488585 - RNA, 19 nt, Homo sapiens
  misc_RNA (1)...(19): siRNA sense strand
gaacgauuggguugucuuc

SEQ ID NO: 1488586 - RNA, 19 nt, Homo sapiens
  misc_RNA (1)...(19): siRNA sense strand
ucugugguacuccuaauua

SEQ ID NO: 1488587 - RNA, 19 nt, Homo sapiens
  misc_RNA (1)...(19): siRNA sense strand
gaaccuuccaucuccuuug

SEQ ID NO: 1488588 - RNA, 19 nt, Homo sapiens
  misc_RNA (1)...(19): siRNA sense strand
gaaggagacccguguacag

SEQ ID NO: 1488589 - RNA, 19 nt, Homo sapiens
  misc_RNA (1)...(19): siRNA sense strand
caaucauccuuuccuuguu

SEQ ID NO: 1488590 - RNA, 19 nt, Homo sapiens
  misc_RNA (1)...(19): siRNA sense strand
gacagagaagcauguguuu

SEQ ID NO: 1488591 - RNA, 19 nt, Homo sapiens
  misc_RNA (1)...(19): siRNA sense strand
guacuguugguucgauuaa

SEQ ID NO: 1488592 - RNA, 19 nt, Homo sapiens
  misc_RNA (1)...(19): siRNA sense strand
guucauaagaagugccaua

SEQ ID NO: 1488593 - RNA, 19 nt, Homo sapiens
  misc_RNA (1)...(19): siRNA sense strand
acgaugacauugugaggaa

SEQ ID NO: 1488594 - RNA, 19 nt, Homo sapiens
  misc_RNA (1)...(19): siRNA sense strand
gaugaugaggauauugauu

SEQ ID NO: 1488595 - RNA, 19 nt, Homo sapiens
  misc_RNA (1)...(19): siRNA sense strand
guuagaagaagccuuuaga

SEQ ID NO: 1488596 - RNA, 19 nt, Homo sapiens
  misc_RNA (1)...(19): siRNA sense strand
guaauaggaagaggaaguu

SEQ ID NO: 1488597 - RNA, 19 nt, Homo sapiens
  misc_RNA (1)...(19): siRNA sense strand
ggaaaguggcaaagcuuca

SEQ ID NO: 1488598 - RNA, 19 nt, Homo sapiens
  misc_RNA (1)...(19): siRNA sense strand
gaguuuggaucaaguuggu

SEQ ID NO: 1488599 - RNA, 19 nt, Homo sapiens
  misc_RNA (1)...(19): siRNA sense strand
aacaggauuugcugauauu

SEQ ID NO: 1488600 - RNA, 19 nt, Homo sapiens
  misc_RNA (1)...(19): siRNA sense strand
uguaaaagcugcaaguguu

SEQ ID NO: 1488601 - RNA, 19 nt, Homo sapiens
  misc_RNA (1)...(19): siRNA sense strand
gaccagaacacagaggauu

SEQ ID NO: 1488602 - RNA, 19 nt, Homo sapiens
  misc_RNA (1)...(19): siRNA sense strand
ccgauaacccugaccagaa

SEQ ID NO: 1488603 - RNA, 19 nt, Homo sapiens
  misc_RNA (1)...(19): siRNA sense strand
uuggagugcucauguuuga

SEQ ID NO: 1488604 - RNA, 19 nt, Homo sapiens
  misc_RNA (1)...(19): siRNA sense strand
agacagagaagcauguguu

SEQ ID NO: 1488605 - RNA, 19 nt, Homo sapiens
  misc_RNA (1)...(19): siRNA sense strand
gcacaaagaggaauccaua

SEQ ID NO: 1488606 - RNA, 19 nt, Homo sapiens
  misc_RNA (1)...(19): siRNA sense strand
caaugaggcuugagucuuu

SEQ ID NO: 1488607 - RNA, 19 nt, Homo sapiens
  misc_RNA (1)...(19): siRNA sense strand
gaacucggaugauuaugau

SEQ ID NO: 1488608 - RNA, 19 nt, Homo sapiens
  misc_RNA (1)...(19): siRNA sense strand
ccacagauguauuaaacaa

SEQ ID NO: 1488609 - RNA, 19 nt, Homo sapiens
  misc_RNA (1)...(19): siRNA sense strand
caaagccacagauguauua

SEQ ID NO: 1488610 - RNA, 19 nt, Homo sapiens
  misc_RNA (1)...(19): siRNA sense strand
ggucaaagccacagaugua

SEQ ID NO: 1488611 - RNA, 19 nt, Homo sapiens
  misc_RNA (1)...(19): siRNA sense strand
cauaugaaauccagcugua

SEQ ID NO: 1488612 - RNA, 19 nt, Homo sapiens
  misc_RNA (1)...(19): siRNA sense strand
caaagaggaauccauauga

SEQ ID NO: 1488613 - RNA, 19 nt, Homo sapiens
  misc_RNA (1)...(19): siRNA sense strand
uggcuuugaugaaacauua

SEQ ID NO: 1488614 - RNA, 19 nt, Homo sapiens
  misc_RNA (1)...(19): siRNA sense strand
aaagaggaauccauaugaa

SEQ ID NO: 1488615 - RNA, 19 nt, Homo sapiens
  misc_RNA (1)...(19): siRNA sense strand
gcaaugaagagauaagaga

SEQ ID NO: 1488616 - RNA, 19 nt, Homo sapiens
  misc_RNA (1)...(19): siRNA sense strand
gaacaaacugguugcugaa

SEQ ID NO: 1488617 - RNA, 19 nt, Homo sapiens
  misc_RNA (1)...(19): siRNA sense strand
ggugguggcuuugaugaaa

SEQ ID NO: 1488618 - RNA, 19 nt, Homo sapiens
  misc_RNA (1)...(19): siRNA sense strand
ccaaugcguuccaagaaga

SEQ ID NO: 1488619 - RNA, 19 nt, Homo sapiens
  misc_RNA (1)...(19): siRNA sense strand
ggccacaggucacauuguu

SEQ ID NO: 1488620 - RNA, 19 nt, Homo sapiens
  misc_RNA (1)...(19): siRNA sense strand
gggacaagcucuucaucau

SEQ ID NO: 1488621 - RNA, 19 nt, Homo sapiens
  misc_RNA (1)...(19): siRNA sense strand
cuggagaacucgcagauga

SEQ ID NO: 1488622 - RNA, 19 nt, Homo sapiens
  misc_RNA (1)...(19): siRNA sense strand
gaucucauguaugugaauu

SEQ ID NO: 1488623 - RNA, 19 nt, Homo sapiens
  misc_RNA (1)...(19): siRNA sense strand
gaaauccagcuguaucuca

SEQ ID NO: 1488624 - RNA, 19 nt, Homo sapiens
  misc_RNA (1)...(19): siRNA sense strand
ggacaacgaaauagacaau

SEQ ID NO: 1488625 - RNA, 19 nt, Homo sapiens
  misc_RNA (1)...(19): siRNA sense strand
ggacaagcucuucaucaug

SEQ ID NO: 1488626 - RNA, 19 nt, Homo sapiens
  misc_RNA (1)...(19): siRNA sense strand
gggauaguguucuuagcaa

SEQ ID NO: 1488627 - RNA, 19 nt, Homo sapiens
  misc_RNA (1)...(19): siRNA sense strand
cuaccaauccauaguguuu

SEQ ID NO: 1488628 - RNA, 19 nt, Homo sapiens
  misc_RNA (1)...(19): siRNA sense strand
uggaggagcucaguauguu

SEQ ID NO: 1488629 - RNA, 19 nt, Homo sapiens
  misc_RNA (1)...(19): siRNA sense strand
ucucuggucugcaguguug

SEQ ID NO: 1488630 - RNA, 19 nt, Homo sapiens
  misc_RNA (1)...(19): siRNA sense strand
ggauaguguucuuagcaau

SEQ ID NO: 1488631 - RNA, 19 nt, Homo sapiens
  misc_RNA (1)...(19): siRNA sense strand
ucauguaugugaauuugga

SEQ ID NO: 1488632 - RNA, 19 nt, Homo sapiens
  misc_RNA (1)...(19): siRNA sense strand
gaugaaacauuagccuucu

SEQ ID NO: 1488633 - RNA, 19 nt, Homo sapiens
  misc_RNA (1)...(19): siRNA sense strand
ggagcagagucuugucaca

SEQ ID NO: 1488634 - RNA, 19 nt, Homo sapiens
  misc_RNA (1)...(19): siRNA sense strand
ucucauguaugugaauuug

SEQ ID NO: 1488635 - RNA, 19 nt, Homo sapiens
  misc_RNA (1)...(19): siRNA sense strand
ggagaacucgcagaugaga

SEQ ID NO: 1488636 - RNA, 19 nt, Homo sapiens
  misc_RNA (1)...(19): siRNA sense strand
gauaguguucuuagcaaug

SEQ ID NO: 1488637 - RNA, 19 nt, Homo sapiens
  misc_RNA (1)...(19): siRNA sense strand
ggaggagcucaguauguuu

SEQ ID NO: 1488638 - RNA, 19 nt, Homo sapiens
  misc_RNA (1)...(19): siRNA sense strand
caacgaaauagacaaugga

SEQ ID NO: 1488639 - RNA, 19 nt, Homo sapiens
  misc_RNA (1)...(19): siRNA sense strand
gaggagcucaguauguuuc

SEQ ID NO: 1488640 - RNA, 19 nt, Homo sapiens
  misc_RNA (1)...(19): siRNA sense strand
ucacaggcuucaauaucug

SEQ ID NO: 1488641 - RNA, 19 nt, Homo sapiens
  misc_RNA (1)...(19): siRNA sense strand
guggguaaauggugaacug

SEQ ID NO: 1488642 - RNA, 19 nt, Homo sapiens
  misc_RNA (1)...(19): siRNA sense strand
caccuggaauucagaggaa

SEQ ID NO: 1488643 - RNA, 19 nt, Homo sapiens
  misc_RNA (1)...(19): siRNA sense strand
gaggaauccauaugaaauc

SEQ ID NO: 1488644 - RNA, 19 nt, Homo sapiens
  misc_RNA (1)...(19): siRNA sense strand
acaaagaggaauccauaug

SEQ ID NO: 1488645 - RNA, 19 nt, Homo sapiens
  misc_RNA (1)...(19): siRNA sense strand
gccggcagguugugaaaca

SEQ ID NO: 1488646 - RNA, 19 nt, Homo sapiens
  misc_RNA (1)...(19): siRNA sense strand
agacucacaggcuucaaua

SEQ ID NO: 1488647 - RNA, 19 nt, Homo sapiens
  misc_RNA (1)...(19): siRNA sense strand
acaacgaaauagacaaugg

SEQ ID NO: 1488648 - RNA, 19 nt, Homo sapiens
  misc_RNA (1)...(19): siRNA sense strand
ggaaugggacaagcucuuc

SEQ ID NO: 1488649 - RNA, 19 nt, Homo sapiens
  misc_RNA (1)...(19): siRNA sense strand
ucucagcuaccaauccaua

SEQ ID NO: 1488650 - RNA, 19 nt, Homo sapiens
  misc_RNA (1)...(19): siRNA sense strand
agaacucggaugauuauga

SEQ ID NO: 1488651 - RNA, 19 nt, Homo sapiens
  misc_RNA (1)...(19): siRNA sense strand
ggaagcgugcauccaguga

SEQ ID NO: 1488652 - RNA, 19 nt, Homo sapiens
  misc_RNA (1)...(19): siRNA sense strand
ucaaagccacagauguauu

SEQ ID NO: 1488653 - RNA, 19 nt, Homo sapiens
  misc_RNA (1)...(19): siRNA sense strand
agaggaauccauaugaaau

SEQ ID NO: 1488654 - RNA, 19 nt, Homo sapiens
  misc_RNA (1)...(19): siRNA sense strand
acagagauccagccacaug

SEQ ID NO: 1488655 - RNA, 19 nt, Homo sapiens
  misc_RNA (1)...(19): siRNA sense strand
auaguguucuuagcaauga

SEQ ID NO: 1488656 - RNA, 19 nt, Homo sapiens
  misc_RNA (1)...(19): siRNA sense strand
aagcgugcauccagugaga

SEQ ID NO: 1488657 - RNA, 19 nt, Homo sapiens
  misc_RNA (1)...(19): siRNA sense strand
ggcuaccacuguugagaug

SEQ ID NO: 1488658 - RNA, 19 nt, Homo sapiens
  misc_RNA (1)...(19): siRNA sense strand
aagaggaauccauaugaaa

SEQ ID NO: 1488659 - RNA, 19 nt, Homo sapiens
  misc_RNA (1)...(19): siRNA sense strand
uaucucagcuaccaaucca

SEQ ID NO: 1488660 - RNA, 19 nt, Homo sapiens
  misc_RNA (1)...(19): siRNA sense strand
gagacucacaggcuucaau

SEQ ID NO: 1488661 - RNA, 19 nt, Homo sapiens
  misc_RNA (1)...(19): siRNA sense strand
gauggccacaggucacauu

SEQ ID NO: 1488662 - RNA, 19 nt, Homo sapiens
  misc_RNA (1)...(19): siRNA sense strand
gagcagagucuugucacau

SEQ ID NO: 1488663 - RNA, 19 nt, Homo sapiens
  misc_RNA (1)...(19): siRNA sense strand
gaggagcagagucuuguca

SEQ ID NO: 1488664 - RNA, 19 nt, Homo sapiens
  misc_RNA (1)...(19): siRNA sense strand
ccaaugaggcuugagucuu

SEQ ID NO: 1488665 - RNA, 19 nt, Homo sapiens
  misc_RNA (1)...(19): siRNA sense strand
gucaggagcacucggaaug

SEQ ID NO: 1488666 - RNA, 19 nt, Homo sapiens
  misc_RNA (1)...(19): siRNA sense strand
agccacagauguauuaaac

SEQ ID NO: 1488667 - RNA, 19 nt, Homo sapiens
  misc_RNA (1)...(19): siRNA sense strand
agaacucgcagaugagaga

SEQ ID NO: 1488668 - RNA, 19 nt, Homo sapiens
  misc_RNA (1)...(19): siRNA sense strand
gaaugggacaagcucuuca

SEQ ID NO: 1488669 - RNA, 19 nt, Homo sapiens
  misc_RNA (1)...(19): siRNA sense strand
ugagaccaaugaggcuuga

SEQ ID NO: 1488670 - RNA, 19 nt, Homo sapiens
  misc_RNA (1)...(19): siRNA sense strand
cucacaggcuucaauaucu

SEQ ID NO: 1488671 - RNA, 19 nt, Homo sapiens
  misc_RNA (1)...(19): siRNA sense strand
cccaaugcguuccaagaag

SEQ ID NO: 1488672 - RNA, 19 nt, Homo sapiens
  misc_RNA (1)...(19): siRNA sense strand
uaugaaauccagcuguauc

SEQ ID NO: 1488673 - RNA, 19 nt, Homo sapiens
  misc_RNA (1)...(19): siRNA sense strand
cauccagugagaccaauga

SEQ ID NO: 1488674 - RNA, 19 nt, Homo sapiens
  misc_RNA (1)...(19): siRNA sense strand
gaccggaggagcagagucu

SEQ ID NO: 1488675 - RNA, 19 nt, Homo sapiens
  misc_RNA (1)...(19): siRNA sense strand
guggagaggagaacaaacu

SEQ ID NO: 1488676 - RNA, 19 nt, Homo sapiens
  misc_RNA (1)...(19): siRNA sense strand
ccaaagaacuccaaacaag

SEQ ID NO: 1488677 - RNA, 19 nt, Homo sapiens
  misc_RNA (1)...(19): siRNA sense strand
ucagaaagaucaagccaaa

SEQ ID NO: 1488678 - RNA, 19 nt, Homo sapiens
  misc_RNA (1)...(19): siRNA sense strand
ugaauuugauccucuguga

SEQ ID NO: 1488679 - RNA, 19 nt, Homo sapiens
  misc_RNA (1)...(19): siRNA sense strand
gacaagcacaugaauuuga

SEQ ID NO: 1488680 - RNA, 19 nt, Homo sapiens
  misc_RNA (1)...(19): siRNA sense strand
caaggaagagguacuguug

SEQ ID NO: 1488681 - RNA, 19 nt, Homo sapiens
  misc_RNA (1)...(19): siRNA sense strand
gaaagaucaagccaaagaa

SEQ ID NO: 1488682 - RNA, 19 nt, Homo sapiens
  misc_RNA (1)...(19): siRNA sense strand
agaaagaucaagccaaaga

SEQ ID NO: 1488683 - RNA, 19 nt, Homo sapiens
  misc_RNA (1)...(19): siRNA sense strand
gguaugagaccuccuaugg

SEQ ID NO: 1488684 - RNA, 19 nt, Homo sapiens
  misc_RNA (1)...(19): siRNA sense strand
ggaccuccucccaaagaua

SEQ ID NO: 1488685 - RNA, 19 nt, Homo sapiens
  misc_RNA (1)...(19): siRNA sense strand
gaacuccaaacaagcagaa

SEQ ID NO: 1488686 - RNA, 19 nt, Homo sapiens
  misc_RNA (1)...(19): siRNA sense strand
ugugaugaguucagaaaga

SEQ ID NO: 1488687 - RNA, 19 nt, Homo sapiens
  misc_RNA (1)...(19): siRNA sense strand
cauauugauuacaggauga

SEQ ID NO: 1488688 - RNA, 19 nt, Homo sapiens
  misc_RNA (1)...(19): siRNA sense strand
ggaagagggacuccaaugg

SEQ ID NO: 1488689 - RNA, 19 nt, Homo sapiens
  misc_RNA (1)...(19): siRNA sense strand
acaagcacaugaauuugau

SEQ ID NO: 1488690 - RNA, 19 nt, Homo sapiens
  misc_RNA (1)...(19): siRNA sense strand
uugacaagcacaugaauuu

SEQ ID NO: 1488691 - RNA, 19 nt, Homo sapiens
  misc_RNA (1)...(19): siRNA sense strand
gugaugaguucagaaagau

SEQ ID NO: 1488692 - RNA, 19 nt, Homo sapiens
  misc_RNA (1)...(19): siRNA sense strand
gaugaguucagaaagauca

SEQ ID NO: 1488693 - RNA, 19 nt, Homo sapiens
  misc_RNA (1)...(19): siRNA sense strand
ugacugugaugaguucaga

SEQ ID NO: 1488694 - RNA, 19 nt, Homo sapiens
  misc_RNA (1)...(19): siRNA sense strand
gccaaagaacuccaaacaa

SEQ ID NO: 1488695 - RNA, 19 nt, Homo sapiens
  misc_RNA (1)...(19): siRNA sense strand
gauccucugugacugugau

SEQ ID NO: 1488696 - RNA, 19 nt, Homo sapiens
  misc_RNA (1)...(19): siRNA sense strand
aaagaacuccaaacaagca

SEQ ID NO: 1488697 - RNA, 19 nt, Homo sapiens
  misc_RNA (1)...(19): siRNA sense strand
aagcagaaagggaagagaa

SEQ ID NO: 1488698 - RNA, 19 nt, Homo sapiens
  misc_RNA (1)...(19): siRNA sense strand
gaaucuggucucaaugaca

SEQ ID NO: 1488699 - RNA, 19 nt, Homo sapiens
  misc_RNA (1)...(19): siRNA sense strand
aggaagagguacuguugca

SEQ ID NO: 1488700 - RNA, 19 nt, Homo sapiens
  misc_RNA (1)...(19): siRNA sense strand
ugacaagcacaugaauuug

SEQ ID NO: 1488701 - RNA, 19 nt, Homo sapiens
  misc_RNA (1)...(19): siRNA sense strand
gggcaagagcagcaagaug

SEQ ID NO: 1488702 - RNA, 19 nt, Homo sapiens
  misc_RNA (1)...(19): siRNA sense strand
ccacaaggaagagguacug

SEQ ID NO: 1488703 - RNA, 19 nt, Homo sapiens
  misc_RNA (1)...(19): siRNA sense strand
acaaggaagagguacuguu

SEQ ID NO: 1488704 - RNA, 19 nt, Homo sapiens
  misc_RNA (1)...(19): siRNA sense strand
gaccuccucccaaagauac

SEQ ID NO: 1488705 - RNA, 19 nt, Homo sapiens
  misc_RNA (1)...(19): siRNA sense strand
ccaaagaacuccaaacaag

SEQ ID NO: 1488706 - RNA, 19 nt, Homo sapiens
  misc_RNA (1)...(19): siRNA sense strand
ucagaaagaucaagccaaa

SEQ ID NO: 1488707 - RNA, 19 nt, Homo sapiens
  misc_RNA (1)...(19): siRNA sense strand
ugaauuugauccucuguga

SEQ ID NO: 1488708 - RNA, 19 nt, Homo sapiens
  misc_RNA (1)...(19): siRNA sense strand
gacaagcacaugaauuuga

SEQ ID NO: 1488709 - RNA, 19 nt, Homo sapiens
  misc_RNA (1)...(19): siRNA sense strand
caaggaagagguacuguug

SEQ ID NO: 1488710 - RNA, 19 nt, Homo sapiens
  misc_RNA (1)...(19): siRNA sense strand
gaaagaucaagccaaagaa

SEQ ID NO: 1488711 - RNA, 19 nt, Homo sapiens
  misc_RNA (1)...(19): siRNA sense strand
agaaagaucaagccaaaga

SEQ ID NO: 1488712 - RNA, 19 nt, Homo sapiens
  misc_RNA (1)...(19): siRNA sense strand
gguaugagaccuccuaugg

SEQ ID NO: 1488713 - RNA, 19 nt, Homo sapiens
  misc_RNA (1)...(19): siRNA sense strand
ggaccuccucccaaagaua

SEQ ID NO: 1488714 - RNA, 19 nt, Homo sapiens
  misc_RNA (1)...(19): siRNA sense strand
gaacuccaaacaagcagaa

SEQ ID NO: 1488715 - RNA, 19 nt, Homo sapiens
  misc_RNA (1)...(19): siRNA sense strand
ugugaugaguucagaaaga

SEQ ID NO: 1488716 - RNA, 19 nt, Homo sapiens
  misc_RNA (1)...(19): siRNA sense strand
cauauugauuacaggauga

SEQ ID NO: 1488717 - RNA, 19 nt, Homo sapiens
  misc_RNA (1)...(19): siRNA sense strand
ggaagagggacuccaaugg

SEQ ID NO: 1488718 - RNA, 19 nt, Homo sapiens
  misc_RNA (1)...(19): siRNA sense strand
acaagcacaugaauuugau

SEQ ID NO: 1488719 - RNA, 19 nt, Homo sapiens
  misc_RNA (1)...(19): siRNA sense strand
uugacaagcacaugaauuu

SEQ ID NO: 1488720 - RNA, 19 nt, Homo sapiens
  misc_RNA (1)...(19): siRNA sense strand
gugaugaguucagaaagau

SEQ ID NO: 1488721 - RNA, 19 nt, Homo sapiens
  misc_RNA (1)...(19): siRNA sense strand
gaugaguucagaaagauca

SEQ ID NO: 1488722 - RNA, 19 nt, Homo sapiens
  misc_RNA (1)...(19): siRNA sense strand
ugacugugaugaguucaga

SEQ ID NO: 1488723 - RNA, 19 nt, Homo sapiens
  misc_RNA (1)...(19): siRNA sense strand
gccaaagaacuccaaacaa

SEQ ID NO: 1488724 - RNA, 19 nt, Homo sapiens
  misc_RNA (1)...(19): siRNA sense strand
gauccucugugacugugau

SEQ ID NO: 1488725 - RNA, 19 nt, Homo sapiens
  misc_RNA (1)...(19): siRNA sense strand
aaagaacuccaaacaagca

SEQ ID NO: 1488726 - RNA, 19 nt, Homo sapiens
  misc_RNA (1)...(19): siRNA sense strand
aagcagaaagggaagagaa

SEQ ID NO: 1488727 - RNA, 19 nt, Homo sapiens
  misc_RNA (1)...(19): siRNA sense strand
gaaucuggucucaaugaca

SEQ ID NO: 1488728 - RNA, 19 nt, Homo sapiens
  misc_RNA (1)...(19): siRNA sense strand
aggaagagguacuguugca

SEQ ID NO: 1488729 - RNA, 19 nt, Homo sapiens
  misc_RNA (1)...(19): siRNA sense strand
ugacaagcacaugaauuug

SEQ ID NO: 1488730 - RNA, 19 nt, Homo sapiens
  misc_RNA (1)...(19): siRNA sense strand
gggcaagagcagcaagaug

SEQ ID NO: 1488731 - RNA, 19 nt, Homo sapiens
  misc_RNA (1)...(19): siRNA sense strand
ccacaaggaagagguacug

SEQ ID NO: 1488732 - RNA, 19 nt, Homo sapiens
  misc_RNA (1)...(19): siRNA sense strand
acaaggaagagguacuguu

SEQ ID NO: 1488733 - RNA, 19 nt, Homo sapiens
  misc_RNA (1)...(19): siRNA sense strand
gaccuccucccaaagauac

SEQ ID NO: 1488734 - RNA, 19 nt, Homo sapiens
  misc_RNA (1)...(19): siRNA sense strand
ccaaggaagugaauaaguu

SEQ ID NO: 1488735 - RNA, 19 nt, Homo sapiens
  misc_RNA (1)...(19): siRNA sense strand
gaaccaaacccauuccaaa

SEQ ID NO: 1488736 - RNA, 19 nt, Homo sapiens
  misc_RNA (1)...(19): siRNA sense strand
ccaaacccauuccaaagaa

SEQ ID NO: 1488737 - RNA, 19 nt, Homo sapiens
  misc_RNA (1)...(19): siRNA sense strand
ucagauggcuuauucaaac

SEQ ID NO: 1488738 - RNA, 19 nt, Homo sapiens
  misc_RNA (1)...(19): siRNA sense strand
ugacggagcugaccagacu

SEQ ID NO: 1488739 - RNA, 19 nt, Homo sapiens
  misc_RNA (1)...(19): siRNA sense strand
guaugacggucgaaccaaa

SEQ ID NO: 1488740 - RNA, 19 nt, Homo sapiens
  misc_RNA (1)...(19): siRNA sense strand
caaggaagugaauaaguuu

SEQ ID NO: 1488741 - RNA, 19 nt, Homo sapiens
  misc_RNA (1)...(19): siRNA sense strand
uauaucaccuugaagaagu

SEQ ID NO: 1488742 - RNA, 19 nt, Homo sapiens
  misc_RNA (1)...(19): siRNA sense strand
gcuccaaggaagugaauaa

SEQ ID NO: 1488743 - RNA, 19 nt, Homo sapiens
  misc_RNA (1)...(19): siRNA sense strand
ucaaaccuccuuagagcua

SEQ ID NO: 1488744 - RNA, 19 nt, Homo sapiens
  misc_RNA (1)...(19): siRNA sense strand
gcgucuauaucaccuugaa

SEQ ID NO: 1488745 - RNA, 19 nt, Homo sapiens
  misc_RNA (1)...(19): siRNA sense strand
ggucgaaccaaacccauuc

SEQ ID NO: 1488746 - RNA, 19 nt, Homo sapiens
  misc_RNA (1)...(19): siRNA sense strand
aaacuaagaagaccaaagc

SEQ ID NO: 1488747 - RNA, 19 nt, Homo sapiens
  misc_RNA (1)...(19): siRNA sense strand
ucaccuugaagaaguauga

SEQ ID NO: 1488748 - RNA, 19 nt, Homo sapiens
  misc_RNA (1)...(19): siRNA sense strand
aguuucagauggcuuauuc

SEQ ID NO: 1488749 - RNA, 19 nt, Homo sapiens
  misc_RNA (1)...(19): siRNA sense strand
gaugggaagaagaagauca

SEQ ID NO: 1488750 - RNA, 19 nt, Homo sapiens
  misc_RNA (1)...(19): siRNA sense strand
cuaccgaugggaagaagaa

SEQ ID NO: 1488751 - RNA, 19 nt, Homo sapiens
  misc_RNA (1)...(19): siRNA sense strand
ugaccagacuuuuccagaa

SEQ ID NO: 1488752 - RNA, 19 nt, Homo sapiens
  misc_RNA (1)...(19): siRNA sense strand
gagcuaccgaugggaagaa

SEQ ID NO: 1488753 - RNA, 19 nt, Homo sapiens
  misc_RNA (1)...(19): siRNA sense strand
gucuauaucaccuugaaga

SEQ ID NO: 1488754 - RNA, 19 nt, Homo sapiens
  misc_RNA (1)...(19): siRNA sense strand
auaucaccuugaagaagua

SEQ ID NO: 1488755 - RNA, 19 nt, Homo sapiens
  misc_RNA (1)...(19): siRNA sense strand
cgaaccaaacccauuccaa

SEQ ID NO: 1488756 - RNA, 19 nt, Homo sapiens
  misc_RNA (1)...(19): siRNA sense strand
gagcuccaaggaagugaau

SEQ ID NO: 1488757 - RNA, 19 nt, Homo sapiens
  misc_RNA (1)...(19): siRNA sense strand
gaccagacuuuuccagaag

SEQ ID NO: 1488758 - RNA, 19 nt, Homo sapiens
  misc_RNA (1)...(19): siRNA sense strand
ggaaaucagugaagauaaa

SEQ ID NO: 1488759 - RNA, 19 nt, Homo sapiens
  misc_RNA (1)...(19): siRNA sense strand
gaaaugaaaucucuagaag

SEQ ID NO: 1488760 - RNA, 19 nt, Homo sapiens
  misc_RNA (1)...(19): siRNA sense strand
ggucguagauuuaaaggaa

SEQ ID NO: 1488761 - RNA, 19 nt, Homo sapiens
  misc_RNA (1)...(19): siRNA sense strand
ggacaaguuucuaaaggaa

SEQ ID NO: 1488762 - RNA, 19 nt, Homo sapiens
  misc_RNA (1)...(19): siRNA sense strand
gaacauugcauaaagcauu

SEQ ID NO: 1488763 - RNA, 19 nt, Homo sapiens
  misc_RNA (1)...(19): siRNA sense strand
caacaagaaucccuaaaca

SEQ ID NO: 1488764 - RNA, 19 nt, Homo sapiens
  misc_RNA (1)...(19): siRNA sense strand
gaaauuugcuagugaugau

SEQ ID NO: 1488765 - RNA, 19 nt, Homo sapiens
  misc_RNA (1)...(19): siRNA sense strand
agaagaagaugcugaaaug

SEQ ID NO: 1488766 - RNA, 19 nt, Homo sapiens
  misc_RNA (1)...(19): siRNA sense strand
agauaaaggucaaguacua

SEQ ID NO: 1488767 - RNA, 19 nt, Homo sapiens
  misc_RNA (1)...(19): siRNA sense strand
aaacgaaauuugcuaguga

SEQ ID NO: 1488768 - RNA, 19 nt, Homo sapiens
  misc_RNA (1)...(19): siRNA sense strand
agaagaaccugcauccaaa

SEQ ID NO: 1488769 - RNA, 19 nt, Homo sapiens
  misc_RNA (1)...(19): siRNA sense strand
gcuaagaaauuuguagaga

SEQ ID NO: 1488770 - RNA, 19 nt, Homo sapiens
  misc_RNA (1)...(19): siRNA sense strand
agaagaugcugaaaugaaa

SEQ ID NO: 1488771 - RNA, 19 nt, Homo sapiens
  misc_RNA (1)...(19): siRNA sense strand
cagaaggucuccaagcaaa

SEQ ID NO: 1488772 - RNA, 19 nt, Homo sapiens
  misc_RNA (1)...(19): siRNA sense strand
aaacagaccugcuaauacu

SEQ ID NO: 1488773 - RNA, 19 nt, Homo sapiens
  misc_RNA (1)...(19): siRNA sense strand
cauugaaucugcuaagaaa

SEQ ID NO: 1488774 - RNA, 19 nt, Homo sapiens
  misc_RNA (1)...(19): siRNA sense strand
gcauuuaagggaucaauuu

SEQ ID NO: 1488775 - RNA, 19 nt, Homo sapiens
  misc_RNA (1)...(19): siRNA sense strand
caaagaaacagaccugcua

SEQ ID NO: 1488776 - RNA, 19 nt, Homo sapiens
  misc_RNA (1)...(19): siRNA sense strand
gagaagaacauugcauaaa

SEQ ID NO: 1488777 - RNA, 19 nt, Homo sapiens
  misc_RNA (1)...(19): siRNA sense strand
gagaagaaacagacaaaga

SEQ ID NO: 1488778 - RNA, 19 nt, Homo sapiens
  misc_RNA (1)...(19): siRNA sense strand
gaaaagagcaagagaagaa

SEQ ID NO: 1488779 - RNA, 19 nt, Homo sapiens
  misc_RNA (1)...(19): siRNA sense strand
ggccagaaguacaaagaaa

SEQ ID NO: 1488780 - RNA, 19 nt, Homo sapiens
  misc_RNA (1)...(19): siRNA sense strand
acaagaaucccuaaacaaa

SEQ ID NO: 1488781 - RNA, 19 nt, Homo sapiens
  misc_RNA (1)...(19): siRNA sense strand
gaaacagaccugcuaauac

SEQ ID NO: 1488782 - RNA, 19 nt, Homo sapiens
  misc_RNA (1)...(19): siRNA sense strand
gaagaacauugcauaaagc

SEQ ID NO: 1488783 - RNA, 19 nt, Homo sapiens
  misc_RNA (1)...(19): siRNA sense strand
gaagauaaaggucaaguac

SEQ ID NO: 1488784 - RNA, 19 nt, Homo sapiens
  misc_RNA (1)...(19): siRNA sense strand
agaagaacauugcauaaag

SEQ ID NO: 1488785 - RNA, 19 nt, Homo sapiens
  misc_RNA (1)...(19): siRNA sense strand
gggacaaguuucuaaagga

SEQ ID NO: 1488786 - RNA, 19 nt, Homo sapiens
  misc_RNA (1)...(19): siRNA sense strand
aagaaucccuaaacaaaug

SEQ ID NO: 1488787 - RNA, 19 nt, Homo sapiens
  misc_RNA (1)...(19): siRNA sense strand
ggucaaguacuaaauauuc

SEQ ID NO: 1488788 - RNA, 19 nt, Homo sapiens
  misc_RNA (1)...(19): siRNA sense strand
agaaacagaccugcuaaua

SEQ ID NO: 1488789 - RNA, 19 nt, Homo sapiens
  misc_RNA (1)...(19): siRNA sense strand
gccaaaaucugucaucaaa

SEQ ID NO: 1488790 - RNA, 19 nt, Homo sapiens
  misc_RNA (1)...(19): siRNA sense strand
gagcuaaacaggagcaaga

SEQ ID NO: 1488791 - RNA, 19 nt, Homo sapiens
  misc_RNA (1)...(19): siRNA sense strand
aggcagaacucauggaaau

SEQ ID NO: 1488792 - RNA, 19 nt, Homo sapiens
  misc_RNA (1)...(19): siRNA sense strand
aguggaagcuaaauuaaga

SEQ ID NO: 1488793 - RNA, 19 nt, Homo sapiens
  misc_RNA (1)...(19): siRNA sense strand
agaagaaacagacaaagaa

SEQ ID NO: 1488794 - RNA, 19 nt, Homo sapiens
  misc_RNA (1)...(19): siRNA sense strand
gaaccugcauccaaacaac

SEQ ID NO: 1488795 - RNA, 19 nt, Homo sapiens
  misc_RNA (1)...(19): siRNA sense strand
caacugaugcaacucuuga

SEQ ID NO: 1488796 - RNA, 19 nt, Homo sapiens
  misc_RNA (1)...(19): siRNA sense strand
cuaaacaaauggaagucaa

SEQ ID NO: 1488797 - RNA, 19 nt, Homo sapiens
  misc_RNA (1)...(19): siRNA sense strand
caagaaucccuaaacaaau

SEQ ID NO: 1488798 - RNA, 19 nt, Homo sapiens
  misc_RNA (1)...(19): siRNA sense strand
aauagaagaccaacaagaa

SEQ ID NO: 1488799 - RNA, 19 nt, Homo sapiens
  misc_RNA (1)...(19): siRNA sense strand
gaagaagaugcugaaauga

SEQ ID NO: 1488800 - RNA, 19 nt, Homo sapiens
  misc_RNA (1)...(19): siRNA sense strand
gauaaaggucaaguacuaa

SEQ ID NO: 1488801 - RNA, 19 nt, Homo sapiens
  misc_RNA (1)...(19): siRNA sense strand
gagcaaauccaaggcagaa

SEQ ID NO: 1488802 - RNA, 19 nt, Homo sapiens
  misc_RNA (1)...(19): siRNA sense strand
gaagaaacagacaaagaag

SEQ ID NO: 1488803 - RNA, 19 nt, Homo sapiens
  misc_RNA (1)...(19): siRNA sense strand
gucaaaaggucguagauuu

SEQ ID NO: 1488804 - RNA, 19 nt, Homo sapiens
  misc_RNA (1)...(19): siRNA sense strand
ccaaagaugcaaauaaugg

SEQ ID NO: 1488805 - RNA, 19 nt, Homo sapiens
  misc_RNA (1)...(19): siRNA sense strand
gcauugaaucugcuaagaa

SEQ ID NO: 1488806 - RNA, 19 nt, Homo sapiens
  misc_RNA (1)...(19): siRNA sense strand
uuaaaggcuucccaacuga

SEQ ID NO: 1488807 - RNA, 19 nt, Homo sapiens
  misc_RNA (1)...(19): siRNA sense strand
gcagaacucauggaaauca

SEQ ID NO: 1488808 - RNA, 19 nt, Homo sapiens
  misc_RNA (1)...(19): siRNA sense strand
guuagaagauaaaggucaa

SEQ ID NO: 1488809 - RNA, 19 nt, Homo sapiens
  misc_RNA (1)...(19): siRNA sense strand
agaaacagacaaagaagaa

SEQ ID NO: 1488810 - RNA, 19 nt, Homo sapiens
  misc_RNA (1)...(19): siRNA sense strand
caaggaagcauuggguaaa

SEQ ID NO: 1488811 - RNA, 19 nt, Homo sapiens
  misc_RNA (1)...(19): siRNA sense strand
agccaaagaugcaaauaau

SEQ ID NO: 1488812 - RNA, 19 nt, Homo sapiens
  misc_RNA (1)...(19): siRNA sense strand
cucaaaucauggugaaaua

SEQ ID NO: 1488813 - RNA, 19 nt, Homo sapiens
  misc_RNA (1)...(19): siRNA sense strand
gaaaaggaaaggguaauaa

SEQ ID NO: 1488814 - RNA, 19 nt, Homo sapiens
  misc_RNA (1)...(19): siRNA sense strand
ccacgggacaaguuucuaa

SEQ ID NO: 1488815 - RNA, 19 nt, Homo sapiens
  misc_RNA (1)...(19): siRNA sense strand
ugagaagaacauugcauaa

SEQ ID NO: 1488816 - RNA, 19 nt, Homo sapiens
  misc_RNA (1)...(19): siRNA sense strand
guggaagcauugagcaaau

SEQ ID NO: 1488817 - RNA, 19 nt, Homo sapiens
  misc_RNA (1)...(19): siRNA sense strand
caaauaaugguaaccuaca

SEQ ID NO: 1488818 - RNA, 19 nt, Homo sapiens
  misc_RNA (1)...(19): siRNA sense strand
aagaagaugcugaaaugaa

SEQ ID NO: 1488819 - RNA, 19 nt, Homo sapiens
  misc_RNA (1)...(19): siRNA sense strand
ucaaaaggucguagauuua

SEQ ID NO: 1488820 - RNA, 19 nt, Homo sapiens
  misc_RNA (1)...(19): siRNA sense strand
aagaagaaccugcauccaa

SEQ ID NO: 1488821 - RNA, 19 nt, Homo sapiens
  misc_RNA (1)...(19): siRNA sense strand
uaauagaagaccaacaaga

SEQ ID NO: 1488822 - RNA, 19 nt, Homo sapiens
  misc_RNA (1)...(19): siRNA sense strand
ugaugaacaugaugaacau

SEQ ID NO: 1488823 - RNA, 19 nt, Homo sapiens
  misc_RNA (1)...(19): siRNA sense strand
caaggcagaacucauggaa

SEQ ID NO: 1488824 - RNA, 19 nt, Homo sapiens
  misc_RNA (1)...(19): siRNA sense strand
gaagaugcugaaaugaaau

SEQ ID NO: 1488825 - RNA, 19 nt, Homo sapiens
  misc_RNA (1)...(19): siRNA sense strand
aaagaaacagaccugcuaa

SEQ ID NO: 1488826 - RNA, 19 nt, Homo sapiens
  misc_RNA (1)...(19): siRNA sense strand
auuaaaggcuucccaacug

SEQ ID NO: 1488827 - RNA, 19 nt, Homo sapiens
  misc_RNA (1)...(19): siRNA sense strand
gaggggauaauucuauuua

SEQ ID NO: 1488828 - RNA, 19 nt, Homo sapiens
  misc_RNA (1)...(19): siRNA sense strand
guaaagccaaagaugcaaa

SEQ ID NO: 1488829 - RNA, 19 nt, Homo sapiens
  misc_RNA (1)...(19): siRNA sense strand
caagagaagaaacagacaa

SEQ ID NO: 1488830 - RNA, 19 nt, Homo sapiens
  misc_RNA (1)...(19): siRNA sense strand
gcaagaagcaaaacaaaag

SEQ ID NO: 1488831 - RNA, 19 nt, Homo sapiens
  misc_RNA (1)...(19): siRNA sense strand
gagcaagagaagaaacaga

SEQ ID NO: 1488832 - RNA, 19 nt, Homo sapiens
  misc_RNA (1)...(19): siRNA sense strand
ggaaaaggaaaggguaaua

SEQ ID NO: 1488833 - RNA, 19 nt, Homo sapiens
  misc_RNA (1)...(19): siRNA sense strand
ucauggaaaucagugaaga

SEQ ID NO: 1488834 - RNA, 19 nt, Homo sapiens
  misc_RNA (1)...(19): siRNA sense strand
caaaaggucguagauuuaa

SEQ ID NO: 1488835 - RNA, 19 nt, Homo sapiens
  misc_RNA (1)...(19): siRNA sense strand
aagccaaagaugcaaauaa

SEQ ID NO: 1488836 - RNA, 19 nt, Homo sapiens
  misc_RNA (1)...(19): siRNA sense strand
uagaagaagaugcugaaau

SEQ ID NO: 1488837 - RNA, 19 nt, Homo sapiens
  misc_RNA (1)...(19): siRNA sense strand
ugaaccgucuaacaacaga

SEQ ID NO: 1488838 - RNA, 19 nt, Homo sapiens
  misc_RNA (1)...(19): siRNA sense strand
acagaccugcuaauacuuu

SEQ ID NO: 1488839 - RNA, 19 nt, Homo sapiens
  misc_RNA (1)...(19): siRNA sense strand
cuagugaugaugaacauga

SEQ ID NO: 1488840 - RNA, 19 nt, Homo sapiens
  misc_RNA (1)...(19): siRNA sense strand
cgaaauuugcuagugauga

SEQ ID NO: 1488841 - RNA, 19 nt, Homo sapiens
  misc_RNA (1)...(19): siRNA sense strand
gaccaacaagaaucccuaa

SEQ ID NO: 1488842 - RNA, 19 nt, Homo sapiens
  misc_RNA (1)...(19): siRNA sense strand
aagaagcacugaagaaaau

SEQ ID NO: 1488843 - RNA, 19 nt, Homo sapiens
  misc_RNA (1)...(19): siRNA sense strand
acaaguuucuaaaggaaca

SEQ ID NO: 1488844 - RNA, 19 nt, Homo sapiens
  misc_RNA (1)...(19): siRNA sense strand
guuagaagaagaugcugaa

SEQ ID NO: 1488845 - RNA, 19 nt, Homo sapiens
  misc_RNA (1)...(19): siRNA sense strand
uagaugaucagaccuguag

SEQ ID NO: 1488846 - RNA, 19 nt, Homo sapiens
  misc_RNA (1)...(19): siRNA sense strand
gcaaauccaaggcagaacu

SEQ ID NO: 1488847 - RNA, 19 nt, Homo sapiens
  misc_RNA (1)...(19): siRNA sense strand
ccagaaguacaaagaaaca

SEQ ID NO: 1488848 - RNA, 19 nt, Homo sapiens
  misc_RNA (1)...(19): siRNA sense strand
gccugggucugguaaagga

SEQ ID NO: 1488849 - RNA, 19 nt, Homo sapiens
  misc_RNA (1)...(19): siRNA sense strand
aaaggaaaggguaauaaag

SEQ ID NO: 1488850 - RNA, 19 nt, Homo sapiens
  misc_RNA (1)...(19): siRNA sense strand
gcaaaagaggggauaauuc

SEQ ID NO: 1488851 - RNA, 19 nt, Homo sapiens
  misc_RNA (1)...(19): siRNA sense strand
gauuggaugcuugcugaaa

SEQ ID NO: 1488852 - RNA, 19 nt, Homo sapiens
  misc_RNA (1)...(19): siRNA sense strand
aagagaagaaacagacaaa

SEQ ID NO: 1488853 - RNA, 19 nt, Homo sapiens
  misc_RNA (1)...(19): siRNA sense strand
ugcaaauaaugguaaccua

SEQ ID NO: 1488854 - RNA, 19 nt, Homo sapiens
  misc_RNA (1)...(19): siRNA sense strand
gguaaccuacaauuaagga

SEQ ID NO: 1488855 - RNA, 19 nt, Homo sapiens
  misc_RNA (1)...(19): siRNA sense strand
gcaagagaagaaacagaca

SEQ ID NO: 1488856 - RNA, 19 nt, Homo sapiens
  misc_RNA (1)...(19): siRNA sense strand
ccaacaagaaucccuaaac

SEQ ID NO: 1488857 - RNA, 19 nt, Homo sapiens
  misc_RNA (1)...(19): siRNA sense strand
uagaagaccaacaagaauc

SEQ ID NO: 1488858 - RNA, 19 nt, Homo sapiens
  misc_RNA (1)...(19): siRNA sense strand
gcaagucccucuuugauga

SEQ ID NO: 1488859 - RNA, 19 nt, Homo sapiens
  misc_RNA (1)...(19): siRNA sense strand
gagcuaacauauaucauca

SEQ ID NO: 1488860 - RNA, 19 nt, Homo sapiens
  misc_RNA (1)...(19): siRNA sense strand
gaagagcuaacauauauca

SEQ ID NO: 1488861 - RNA, 19 nt, Homo sapiens
  misc_RNA (1)...(19): siRNA sense strand
ucaauagccucaacaaaca

SEQ ID NO: 1488862 - RNA, 19 nt, Homo sapiens
  misc_RNA (1)...(19): siRNA sense strand
auucagagauccucaagua

SEQ ID NO: 1488863 - RNA, 19 nt, Homo sapiens
  misc_RNA (1)...(19): siRNA sense strand
gagcccagcuggacguuga

SEQ ID NO: 1488864 - RNA, 19 nt, Homo sapiens
  misc_RNA (1)...(19): siRNA sense strand
ggaaagaccuuagcaacac

SEQ ID NO: 1488865 - RNA, 19 nt, Homo sapiens
  misc_RNA (1)...(19): siRNA sense strand
ggacagagaaccugaagca

SEQ ID NO: 1488866 - RNA, 19 nt, Homo sapiens
  misc_RNA (1)...(19): siRNA sense strand
uggagaagcugacaaucuu

SEQ ID NO: 1488867 - RNA, 19 nt, Homo sapiens
  misc_RNA (1)...(19): siRNA sense strand
auaaagcaguggaaauuga

SEQ ID NO: 1488868 - RNA, 19 nt, Homo sapiens
  misc_RNA (1)...(19): siRNA sense strand
gaaagaccuuagcaacaca

SEQ ID NO: 1488869 - RNA, 19 nt, Homo sapiens
  misc_RNA (1)...(19): siRNA sense strand
uugcucagcuccaggauuu

SEQ ID NO: 1488870 - RNA, 19 nt, Homo sapiens
  misc_RNA (1)...(19): siRNA sense strand
gaguugggcuccaucuuuc

SEQ ID NO: 1488871 - RNA, 19 nt, Homo sapiens
  misc_RNA (1)...(19): siRNA sense strand
gaccuuagcaacacauuug

SEQ ID NO: 1488872 - RNA, 19 nt, Homo sapiens
  misc_RNA (1)...(19): siRNA sense strand
gcaguuggcacacaugguu

SEQ ID NO: 1488873 - RNA, 19 nt, Homo sapiens
  misc_RNA (1)...(19): siRNA sense strand
agucgaaacuggcuucuau

SEQ ID NO: 1488874 - RNA, 19 nt, Homo sapiens
  misc_RNA (1)...(19): siRNA sense strand
ggacaucaauagccucaac

SEQ ID NO: 1488875 - RNA, 19 nt, Homo sapiens
  misc_RNA (1)...(19): siRNA sense strand
gaacaggaggaaaccauuc

SEQ ID NO: 1488876 - RNA, 19 nt, Homo sapiens
  misc_RNA (1)...(19): siRNA sense strand
ugauaaagcaguggaaauu

SEQ ID NO: 1488877 - RNA, 19 nt, Homo sapiens
  misc_RNA (1)...(19): siRNA sense strand
uggcuucuauguccaauga

SEQ ID NO: 1488878 - RNA, 19 nt, Homo sapiens
  misc_RNA (1)...(19): siRNA sense strand
gauaaagcaguggaaauug

SEQ ID NO: 1488879 - RNA, 19 nt, Homo sapiens
  misc_RNA (1)...(19): siRNA sense strand
cagagauccucaaguacuu

SEQ ID NO: 1488880 - RNA, 19 nt, Homo sapiens
  misc_RNA (1)...(19): siRNA sense strand
gggcagacaccaugcagaa

SEQ ID NO: 1488881 - RNA, 19 nt, Homo sapiens
  misc_RNA (1)...(19): siRNA sense strand
ucaaacaggacaucaauag

SEQ ID NO: 1488882 - RNA, 19 nt, Homo sapiens
  misc_RNA (1)...(19): siRNA sense strand
gggaaagaccuuagcaaca

SEQ ID NO: 1488883 - RNA, 19 nt, Homo sapiens
  misc_RNA (1)...(19): siRNA sense strand
ugaguugggcuccaucuuu

SEQ ID NO: 1488884 - RNA, 19 nt, Homo sapiens
  misc_RNA (1)...(19): siRNA sense strand
gcagacaccaugcagaaca

SEQ ID NO: 1488885 - RNA, 19 nt, Homo sapiens
  misc_RNA (1)...(19): siRNA sense strand
ggaacaggaggaaaccauu

SEQ ID NO: 1488886 - RNA, 19 nt, Homo sapiens
  misc_RNA (1)...(19): siRNA sense strand
cgacaacgcagugaauuca

SEQ ID NO: 1488887 - RNA, 19 nt, Homo sapiens
  misc_RNA (1)...(19): siRNA sense strand
uggcacacaugguuaagga

SEQ ID NO: 1488888 - RNA, 19 nt, Homo sapiens
  misc_RNA (1)...(19): siRNA sense strand
gaaauugaagagcuaacau

SEQ ID NO: 1488889 - RNA, 19 nt, Homo sapiens
  misc_RNA (1)...(19): siRNA sense strand
gcgcaagucccucuuugau

SEQ ID NO: 1488890 - RNA, 19 nt, Homo sapiens
  misc_RNA (1)...(19): siRNA sense strand
caucaaacaggacaucaau

SEQ ID NO: 1488891 - RNA, 19 nt, Homo sapiens
  misc_RNA (1)...(19): siRNA sense strand
uaaagcaguggaaauugaa

SEQ ID NO: 1488892 - RNA, 19 nt, Homo sapiens
  misc_RNA (1)...(19): siRNA sense strand
ggaaauugaagagcuaaca

SEQ ID NO: 1488893 - RNA, 19 nt, Homo sapiens
  misc_RNA (1)...(19): siRNA sense strand
gaugauaaagcaguggaaa

SEQ ID NO: 1488894 - RNA, 19 nt, Homo sapiens
  misc_RNA (1)...(19): siRNA sense strand
uauguccaaugacuucaaa

SEQ ID NO: 1488895 - RNA, 19 nt, Homo sapiens
  misc_RNA (1)...(19): siRNA sense strand
caucaauagccucaacaaa

SEQ ID NO: 1488896 - RNA, 19 nt, Homo sapiens
  misc_RNA (1)...(19): siRNA sense strand
gcagacccgucagaaugga

SEQ ID NO: 1488897 - RNA, 19 nt, Homo sapiens
  misc_RNA (1)...(19): siRNA sense strand
ucaaaucgguuuuagaagu

SEQ ID NO: 1488898 - RNA, 19 nt, Homo sapiens
  misc_RNA (1)...(19): siRNA sense strand
gaucgacgagaacgugcua

SEQ ID NO: 1488899 - RNA, 19 nt, Homo sapiens
  misc_RNA (1)...(19): siRNA sense strand
caucaucuuuguggucuuc

SEQ ID NO: 1488900 - RNA, 19 nt, Homo sapiens
  misc_RNA (1)...(19): siRNA sense strand
gucgacaauuguugaguug

SEQ ID NO: 1488901 - RNA, 19 nt, Homo sapiens
  misc_RNA (1)...(19): siRNA sense strand
cucauugucuucuucauca

SEQ ID NO: 1488902 - RNA, 19 nt, Homo sapiens
  misc_RNA (1)...(19): siRNA sense strand
ggagaagcugacaaucuug

SEQ ID NO: 1488903 - RNA, 19 nt, Homo sapiens
  misc_RNA (1)...(19): siRNA sense strand
agucgacaauuguugaguu

SEQ ID NO: 1488904 - RNA, 19 nt, Homo sapiens
  misc_RNA (1)...(19): siRNA sense strand
cugcagacccgucagaaug

SEQ ID NO: 1488905 - RNA, 19 nt, Homo sapiens
  misc_RNA (1)...(19): siRNA sense strand
aagcgcaagucccucuuug

SEQ ID NO: 1488906 - RNA, 19 nt, Homo sapiens
  misc_RNA (1)...(19): siRNA sense strand
cauccucauugucuucuuc

SEQ ID NO: 1488907 - RNA, 19 nt, Homo sapiens
  misc_RNA (1)...(19): siRNA sense strand
caaaucgguuuuagaagug

SEQ ID NO: 1488908 - RNA, 19 nt, Homo sapiens
  misc_RNA (1)...(19): siRNA sense strand
aguggaaauugaagagcua

SEQ ID NO: 1488909 - RNA, 19 nt, Homo sapiens
  misc_RNA (1)...(19): siRNA sense strand
ucagagauccucaaguacu

SEQ ID NO: 1488910 - RNA, 19 nt, Homo sapiens
  misc_RNA (1)...(19): siRNA sense strand
ggaucggacccaggaguuu

SEQ ID NO: 1488911 - RNA, 19 nt, Homo sapiens
  misc_RNA (1)...(19): siRNA sense strand
gaucggacccaggaguuuc

SEQ ID NO: 1488912 - RNA, 19 nt, Homo sapiens
  misc_RNA (1)...(19): siRNA sense strand
aggaaaccauucagaggau

SEQ ID NO: 1488913 - RNA, 19 nt, Homo sapiens
  misc_RNA (1)...(19): siRNA sense strand
gucccucuuugaugauaaa

SEQ ID NO: 1488914 - RNA, 19 nt, Homo sapiens
  misc_RNA (1)...(19): siRNA sense strand
cagacaccaugcagaacau

SEQ ID NO: 1488915 - RNA, 19 nt, Homo sapiens
  misc_RNA (1)...(19): siRNA sense strand
gggaucggacccaggaguu

SEQ ID NO: 1488916 - RNA, 19 nt, Homo sapiens
  misc_RNA (1)...(19): siRNA sense strand
acaccaugcagaacauuga

SEQ ID NO: 1488917 - RNA, 19 nt, Homo sapiens
  misc_RNA (1)...(19): siRNA sense strand
caauagccucaacaaacaa

SEQ ID NO: 1488918 - RNA, 19 nt, Homo sapiens
  misc_RNA (1)...(19): siRNA sense strand
gcuccaucuuucagcaguu

SEQ ID NO: 1488919 - RNA, 19 nt, Homo sapiens
  misc_RNA (1)...(19): siRNA sense strand
uagccucaacaaacaaauu

SEQ ID NO: 1488920 - RNA, 19 nt, Homo sapiens
  misc_RNA (1)...(19): siRNA sense strand
uagaagugaggacagagaa

SEQ ID NO: 1488921 - RNA, 19 nt, Homo sapiens
  misc_RNA (1)...(19): siRNA sense strand
agagcuaacauauaucauc

SEQ ID NO: 1488922 - RNA, 19 nt, Homo sapiens
  misc_RNA (1)...(19): siRNA sense strand
uucagaggaucgacgagaa

SEQ ID NO: 1488923 - RNA, 19 nt, Homo sapiens
  misc_RNA (1)...(19): siRNA sense strand
gaggacagagaaccugaag

SEQ ID NO: 1488924 - RNA, 19 nt, Homo sapiens
  misc_RNA (1)...(19): siRNA sense strand
gacccacuccaacaccauu

SEQ ID NO: 1488925 - RNA, 19 nt, Homo sapiens
  misc_RNA (1)...(19): siRNA sense strand
ucacaaagguuaugcauuu

SEQ ID NO: 1488926 - RNA, 19 nt, Homo sapiens
  misc_RNA (1)...(19): siRNA sense strand
caagaaaguugacauugaa

SEQ ID NO: 1488927 - RNA, 19 nt, Homo sapiens
  misc_RNA (1)...(19): siRNA sense strand
ccagcaacgucaccaauaa

SEQ ID NO: 1488928 - RNA, 19 nt, Homo sapiens
  misc_RNA (1)...(19): siRNA sense strand
gucaacagguucuaaauug

SEQ ID NO: 1488929 - RNA, 19 nt, Homo sapiens
  misc_RNA (1)...(19): siRNA sense strand
cuacagagaugauuucuac

SEQ ID NO: 1488930 - RNA, 19 nt, Homo sapiens
  misc_RNA (1)...(19): siRNA sense strand
caggagagcccaaaccaua

SEQ ID NO: 1488931 - RNA, 19 nt, Homo sapiens
  misc_RNA (1)...(19): siRNA sense strand
gaaaucagaugaguuacag

SEQ ID NO: 1488932 - RNA, 19 nt, Homo sapiens
  misc_RNA (1)...(19): siRNA sense strand
gcgguuaugucuuugacua

SEQ ID NO: 1488933 - RNA, 19 nt, Homo sapiens
  misc_RNA (1)...(19): siRNA sense strand
gaccaucaagaaagaauua

SEQ ID NO: 1488934 - RNA, 19 nt, Homo sapiens
  misc_RNA (1)...(19): siRNA sense strand
ugucagagauugcagauca

SEQ ID NO: 1488935 - RNA, 19 nt, Homo sapiens
  misc_RNA (1)...(19): siRNA sense strand
gcaauugucaagaaaguug

SEQ ID NO: 1488936 - RNA, 19 nt, Homo sapiens
  misc_RNA (1)...(19): siRNA sense strand
gaaugugugucagagauug

SEQ ID NO: 1488937 - RNA, 19 nt, Homo sapiens
  misc_RNA (1)...(19): siRNA sense strand
gaaccuuuccugucuguug

SEQ ID NO: 1488938 - RNA, 19 nt, Homo sapiens
  misc_RNA (1)...(19): siRNA sense strand
ugacuaugauuacuacaga

SEQ ID NO: 1488939 - RNA, 19 nt, Homo sapiens
  misc_RNA (1)...(19): siRNA sense strand
uggagaagauugagaaaca

SEQ ID NO: 1488940 - RNA, 19 nt, Homo sapiens
  misc_RNA (1)...(19): siRNA sense strand
guuaugcauuuguacagua

SEQ ID NO: 1488941 - RNA, 19 nt, Homo sapiens
  misc_RNA (1)...(19): siRNA sense strand
caacagguucuaaauugaa

SEQ ID NO: 1488942 - RNA, 19 nt, Homo sapiens
  misc_RNA (1)...(19): siRNA sense strand
ggucaacagguucuaaauu

SEQ ID NO: 1488943 - RNA, 19 nt, Homo sapiens
  misc_RNA (1)...(19): siRNA sense strand
gucaugagcuguuucuaca

SEQ ID NO: 1488944 - RNA, 19 nt, Homo sapiens
  misc_RNA (1)...(19): siRNA sense strand
uaacccagaucaaaacuaa

SEQ ID NO: 1488945 - RNA, 19 nt, Homo sapiens
  misc_RNA (1)...(19): siRNA sense strand
cagagaugauuucuacaau

SEQ ID NO: 1488946 - RNA, 19 nt, Homo sapiens
  misc_RNA (1)...(19): siRNA sense strand
caacgucaccaauaagaau

SEQ ID NO: 1488947 - RNA, 19 nt, Homo sapiens
  misc_RNA (1)...(19): siRNA sense strand
agaauuaacccagaucaaa

SEQ ID NO: 1488948 - RNA, 19 nt, Homo sapiens
  misc_RNA (1)...(19): siRNA sense strand
gccagugggucaacagguu

SEQ ID NO: 1488949 - RNA, 19 nt, Homo sapiens
  misc_RNA (1)...(19): siRNA sense strand
gaugacagaugggauagag

SEQ ID NO: 1488950 - RNA, 19 nt, Homo sapiens
  misc_RNA (1)...(19): siRNA sense strand
ggcagaagcucagaagaag

SEQ ID NO: 1488951 - RNA, 19 nt, Homo sapiens
  misc_RNA (1)...(19): siRNA sense strand
auacggcaauugucaagaa

SEQ ID NO: 1488952 - RNA, 19 nt, Homo sapiens
  misc_RNA (1)...(19): siRNA sense strand
uccaucaacucccguguuu

SEQ ID NO: 1488953 - RNA, 19 nt, Homo sapiens
  misc_RNA (1)...(19): siRNA sense strand
gcacuuuacagacuugaau

SEQ ID NO: 1488954 - RNA, 19 nt, Homo sapiens
  misc_RNA (1)...(19): siRNA sense strand
guuaugucuuugacuauga

SEQ ID NO: 1488955 - RNA, 19 nt, Homo sapiens
  misc_RNA (1)...(19): siRNA sense strand
gauguuccguucacaaagg

SEQ ID NO: 1488956 - RNA, 19 nt, Homo sapiens
  misc_RNA (1)...(19): siRNA sense strand
ggagaagagaugacagaug

SEQ ID NO: 1488957 - RNA, 19 nt, Homo sapiens
  misc_RNA (1)...(19): siRNA sense strand
uacagaccaucaagaaaga

SEQ ID NO: 1488958 - RNA, 19 nt, Homo sapiens
  misc_RNA (1)...(19): siRNA sense strand
agaagaagcaauuggaaga

SEQ ID NO: 1488959 - RNA, 19 nt, Homo sapiens
  misc_RNA (1)...(19): siRNA sense strand
gcagaaggcggaggcagaa

SEQ ID NO: 1488960 - RNA, 19 nt, Homo sapiens
  misc_RNA (1)...(19): siRNA sense strand
cuaaauacggcaauuguca

SEQ ID NO: 1488961 - RNA, 19 nt, Homo sapiens
  misc_RNA (1)...(19): siRNA sense strand
agaggagccugcugaagga

SEQ ID NO: 1488962 - RNA, 19 nt, Homo sapiens
  misc_RNA (1)...(19): siRNA sense strand
ggaaugugugucagagauu

SEQ ID NO: 1488963 - RNA, 19 nt, Homo sapiens
  misc_RNA (1)...(19): siRNA sense strand
gaaagaauuaacccagauc

SEQ ID NO: 1488964 - RNA, 19 nt, Homo sapiens
  misc_RNA (1)...(19): siRNA sense strand
agaaagaauuaacccagau

SEQ ID NO: 1488965 - RNA, 19 nt, Homo sapiens
  misc_RNA (1)...(19): siRNA sense strand
gcaacgucaccaauaagaa

SEQ ID NO: 1488966 - RNA, 19 nt, Homo sapiens
  misc_RNA (1)...(19): siRNA sense strand
agagaugacagaugggaua

SEQ ID NO: 1488967 - RNA, 19 nt, Homo sapiens
  misc_RNA (1)...(19): siRNA sense strand
gauugcagaucacucuaca

SEQ ID NO: 1488968 - RNA, 19 nt, Homo sapiens
  misc_RNA (1)...(19): siRNA sense strand
gguuaugucuuugacuaug

SEQ ID NO: 1488969 - RNA, 19 nt, Homo sapiens
  misc_RNA (1)...(19): siRNA sense strand
gaauuaacccagaucaaaa

SEQ ID NO: 1488970 - RNA, 19 nt, Homo sapiens
  misc_RNA (1)...(19): siRNA sense strand
uguuggcgguuaugucuuu

SEQ ID NO: 1488971 - RNA, 19 nt, Homo sapiens
  misc_RNA (1)...(19): siRNA sense strand
uagaggaggacuucgauga

SEQ ID NO: 1488972 - RNA, 19 nt, Homo sapiens
  misc_RNA (1)...(19): siRNA sense strand
gcaauuggaagagagucua

SEQ ID NO: 1488973 - RNA, 19 nt, Homo sapiens
  misc_RNA (1)...(19): siRNA sense strand
guacaugagugagcgacau

SEQ ID NO: 1488974 - RNA, 19 nt, Homo sapiens
  misc_RNA (1)...(19): siRNA sense strand
caaucuaaauacggcaauu

SEQ ID NO: 1488975 - RNA, 19 nt, Homo sapiens
  misc_RNA (1)...(19): siRNA sense strand
uaugauuacuacagagaug

SEQ ID NO: 1488976 - RNA, 19 nt, Homo sapiens
  misc_RNA (1)...(19): siRNA sense strand
ccaagaggaauguguguca

SEQ ID NO: 1488977 - RNA, 19 nt, Homo sapiens
  misc_RNA (1)...(19): siRNA sense strand
ggauagaggaggacuucga

SEQ ID NO: 1488978 - RNA, 19 nt, Homo sapiens
  misc_RNA (1)...(19): siRNA sense strand
uuacagaccaucaagaaag

SEQ ID NO: 1488979 - RNA, 19 nt, Homo sapiens
  misc_RNA (1)...(19): siRNA sense strand
acagagaugauuucuacaa

SEQ ID NO: 1488980 - RNA, 19 nt, Homo sapiens
  misc_RNA (1)...(19): siRNA sense strand
aagaagcaauuggaagaga

SEQ ID NO: 1488981 - RNA, 19 nt, Homo sapiens
  misc_RNA (1)...(19): siRNA sense strand
ggagaagauugagaaacag

SEQ ID NO: 1488982 - RNA, 19 nt, Homo sapiens
  misc_RNA (1)...(19): siRNA sense strand
cggcaauugucaagaaagu

SEQ ID NO: 1488983 - RNA, 19 nt, Homo sapiens
  misc_RNA (1)...(19): siRNA sense strand
gauagaggaggacuucgau

SEQ ID NO: 1488984 - RNA, 19 nt, Homo sapiens
  misc_RNA (1)...(19): siRNA sense strand
uaaauacggcaauugucaa

SEQ ID NO: 1488985 - RNA, 19 nt, Homo sapiens
  misc_RNA (1)...(19): siRNA sense strand
ggagagcccaaaccauaca

SEQ ID NO: 1488986 - RNA, 19 nt, Homo sapiens
  misc_RNA (1)...(19): siRNA sense strand
ggucaugagcuguuucuac

SEQ ID NO: 1488987 - RNA, 19 nt, Homo sapiens
  misc_RNA (1)...(19): siRNA sense strand
cagaugaguuacagaccau

SEQ ID NO: 1488988 - RNA, 19 nt, Homo sapiens
  misc_RNA (1)...(19): siRNA sense strand
gugcaguaauuccgcugaa

SEQ ID NO: 1488989 - RNA, 19 nt, Homo sapiens
  misc_RNA (1)...(19): siRNA sense strand
ucuacaaucgguuauuuga

SEQ ID NO: 1488990 - RNA, 19 nt, Homo sapiens
  misc_RNA (1)...(19): siRNA sense strand
gucuagugcugauccaaga

SEQ ID NO: 1488991 - RNA, 19 nt, Homo sapiens
  misc_RNA (1)...(19): siRNA sense strand
aggcagaagcucagaagaa

SEQ ID NO: 1488992 - RNA, 19 nt, Homo sapiens
  misc_RNA (1)...(19): siRNA sense strand
gaagaagcaauuggaagag

SEQ ID NO: 1488993 - RNA, 19 nt, Homo sapiens
  misc_RNA (1)...(19): siRNA sense strand
ugaaaucagaugaguuaca

SEQ ID NO: 1488994 - RNA, 19 nt, Homo sapiens
  misc_RNA (1)...(19): siRNA sense strand
ucagaagaagcaauuggaa

SEQ ID NO: 1488995 - RNA, 19 nt, Homo sapiens
  misc_RNA (1)...(19): siRNA sense strand
cagaagcucagaagaagca

SEQ ID NO: 1488996 - RNA, 19 nt, Homo sapiens
  misc_RNA (1)...(19): siRNA sense strand
ggaggcagaagcucagaag

SEQ ID NO: 1488997 - RNA, 19 nt, Homo sapiens
  misc_RNA (1)...(19): siRNA sense strand
gaagcaauuggaagagagu

SEQ ID NO: 1488998 - RNA, 19 nt, Homo sapiens
  misc_RNA (1)...(19): siRNA sense strand
gaccagcaacgucaccaau

SEQ ID NO: 1488999 - RNA, 19 nt, Homo sapiens
  misc_RNA (1)...(19): siRNA sense strand
gccagaugccgauggagaa

SEQ ID NO: 1489000 - RNA, 19 nt, Homo sapiens
  misc_RNA (1)...(19): siRNA sense strand
guuacagaccaucaagaaa

SEQ ID NO: 1489001 - RNA, 19 nt, Homo sapiens
  misc_RNA (1)...(19): siRNA sense strand
uaaaauugacuccuugcua

SEQ ID NO: 1489002 - RNA, 19 nt, Homo sapiens
  misc_RNA (1)...(19): siRNA sense strand
gcaaaacacagaccagcaa

SEQ ID NO: 1489003 - RNA, 19 nt, Homo sapiens
  misc_RNA (1)...(19): siRNA sense strand
gcugaaggagggccagaug

SEQ ID NO: 1489004 - RNA, 19 nt, Homo sapiens
  misc_RNA (1)...(19): siRNA sense strand
aggaaugugugucagagau

SEQ ID NO: 1489005 - RNA, 19 nt, Homo sapiens
  misc_RNA (1)...(19): siRNA sense strand
aagcucagaagaagcaauu

SEQ ID NO: 1489006 - RNA, 19 nt, Homo sapiens
  misc_RNA (1)...(19): siRNA sense strand
ggaaacaagaggccccuuu

SEQ ID NO: 1489007 - RNA, 19 nt, Homo sapiens
  misc_RNA (1)...(19): siRNA sense strand
agaggaggacuucgaugaa

SEQ ID NO: 1489008 - RNA, 19 nt, Homo sapiens
  misc_RNA (1)...(19): siRNA sense strand
gguuaugcauuuguacagu

SEQ ID NO: 1489009 - RNA, 19 nt, Homo sapiens
  misc_RNA (1)...(19): siRNA sense strand
uugcagaucacucuacaga

SEQ ID NO: 1489010 - RNA, 19 nt, Homo sapiens
  misc_RNA (1)...(19): siRNA sense strand
uacggcaauugucaagaaa

SEQ ID NO: 1489011 - RNA, 19 nt, Homo sapiens
  misc_RNA (1)...(19): siRNA sense strand
guuccguucacaaagguua

SEQ ID NO: 1489012 - RNA, 19 nt, Homo sapiens
  misc_RNA (1)...(19): siRNA sense strand
gagauugcagaucacucua

SEQ ID NO: 1489013 - RNA, 19 nt, Homo sapiens
  misc_RNA (1)...(19): siRNA sense strand
ggccaaccacuugauauca

SEQ ID NO: 1489014 - RNA, 19 nt, Homo sapiens
  misc_RNA (1)...(19): siRNA sense strand
caucggcaaucuaaauacg

SEQ ID NO: 1489015 - RNA, 19 nt, Homo sapiens
  misc_RNA (1)...(19): siRNA sense strand
gaggaaugugugucagaga

SEQ ID NO: 1489016 - RNA, 19 nt, Homo sapiens
  misc_RNA (1)...(19): siRNA sense strand
gcucagaagaagcaauugg

SEQ ID NO: 1489017 - RNA, 19 nt, Homo sapiens
  misc_RNA (1)...(19): siRNA sense strand
gcaggagagcccaaaccau

SEQ ID NO: 1489018 - RNA, 19 nt, Homo sapiens
  misc_RNA (1)...(19): siRNA sense strand
uggauguuccguucacaaa

SEQ ID NO: 1489019 - RNA, 19 nt, Homo sapiens
  misc_RNA (1)...(19): siRNA sense strand
cccaaaccauacagaccaa

SEQ ID NO: 1489020 - RNA, 19 nt, Homo sapiens
  misc_RNA (1)...(19): siRNA sense strand
aagagagucuagugcugau

SEQ ID NO: 1489021 - RNA, 19 nt, Homo sapiens
  misc_RNA (1)...(19): siRNA sense strand
gguucuaaauugaaaucag

SEQ ID NO: 1489022 - RNA, 19 nt, Homo sapiens
  misc_RNA (1)...(19): siRNA sense strand
gaccaaaaccuggaaacaa

SEQ ID NO: 1489023 - RNA, 19 nt, Homo sapiens
  misc_RNA (1)...(19): siRNA sense strand
gaaccauucugcagacuuu

SEQ ID NO: 1489024 - RNA, 19 nt, Homo sapiens
  misc_RNA (1)...(19): siRNA sense strand
ggcaauggcuccacaugua

SEQ ID NO: 1489025 - RNA, 19 nt, Homo sapiens
  misc_RNA (1)...(19): siRNA sense strand
gcaaucacuuggcugagaa

SEQ ID NO: 1489026 - RNA, 19 nt, Homo sapiens
  misc_RNA (1)...(19): siRNA sense strand
gggaaucacuuaccuaugc

SEQ ID NO: 1489027 - RNA, 19 nt, Homo sapiens
  misc_RNA (1)...(19): siRNA sense strand
gcaauggcuccacauguaa

SEQ ID NO: 1489028 - RNA, 19 nt, Homo sapiens
  misc_RNA (1)...(19): siRNA sense strand
cagcacaacuuucaaacuc

SEQ ID NO: 1489029 - RNA, 19 nt, Homo sapiens
  misc_RNA (1)...(19): siRNA sense strand
cagccaagcuuucauccau

SEQ ID NO: 1489030 - RNA, 19 nt, Homo sapiens
  misc_RNA (1)...(19): siRNA sense strand
cauugucuaugcucaaauu

SEQ ID NO: 1489031 - RNA, 19 nt, Homo sapiens
  misc_RNA (1)...(19): siRNA sense strand
cauguaaacccgacacuga

SEQ ID NO: 1489032 - RNA, 19 nt, Homo sapiens
  misc_RNA (1)...(19): siRNA sense strand
gccuuuaucuuccucauca

SEQ ID NO: 1489033 - RNA, 19 nt, Homo sapiens
  misc_RNA (1)...(19): siRNA sense strand
ucauaaagagcuacagaaa

SEQ ID NO: 1489034 - RNA, 19 nt, Homo sapiens
  misc_RNA (1)...(19): siRNA sense strand
gaaagacaaggcacucucu

SEQ ID NO: 1489035 - RNA, 19 nt, Homo sapiens
  misc_RNA (1)...(19): siRNA sense strand
ucacuuggcugagaaccau

SEQ ID NO: 1489036 - RNA, 19 nt, Homo sapiens
  misc_RNA (1)...(19): siRNA sense strand
ugagaugggucccucuucu

SEQ ID NO: 1489037 - RNA, 19 nt, Homo sapiens
  misc_RNA (1)...(19): siRNA sense strand
caucauaaagagcuacaga

SEQ ID NO: 1489038 - RNA, 19 nt, Homo sapiens
  misc_RNA (1)...(19): siRNA sense strand
gagaugggucccucuucuu

SEQ ID NO: 1489039 - RNA, 19 nt, Homo sapiens
  misc_RNA (1)...(19): siRNA sense strand
uucaaacucucagaagaaa

SEQ ID NO: 1489040 - RNA, 19 nt, Homo sapiens
  misc_RNA (1)...(19): siRNA sense strand
caauggcuccacauguaaa

SEQ ID NO: 1489041 - RNA, 19 nt, Homo sapiens
  misc_RNA (1)...(19): siRNA sense strand
ggagaggcuucccauuucc

SEQ ID NO: 1489042 - RNA, 19 nt, Homo sapiens
  misc_RNA (1)...(19): siRNA sense strand
agaugggucccucuucuuu

SEQ ID NO: 1489043 - RNA, 19 nt, Homo sapiens
  misc_RNA (1)...(19): siRNA sense strand
ugacacugcugcugauagc

SEQ ID NO: 1489044 - RNA, 19 nt, Homo sapiens
  misc_RNA (1)...(19): siRNA sense strand
gauccuccagccaagcuuu

SEQ ID NO: 1489045 - RNA, 19 nt, Homo sapiens
  misc_RNA (1)...(19): siRNA sense strand
ucucuaaccaccacaacaa

SEQ ID NO: 1489046 - RNA, 19 nt, Homo sapiens
  misc_RNA (1)...(19): siRNA sense strand
uaaacccgacacugaaaga

SEQ ID NO: 1489047 - RNA, 19 nt, Homo sapiens
  misc_RNA (1)...(19): siRNA sense strand
cuuucaaacucucagaaga

SEQ ID NO: 1489048 - RNA, 19 nt, Homo sapiens
  misc_RNA (1)...(19): siRNA sense strand
uuucaaacucucagaagaa

SEQ ID NO: 1489049 - RNA, 19 nt, Homo sapiens
  misc_RNA (1)...(19): siRNA sense strand
cccauugucuaugcucaaa

SEQ ID NO: 1489050 - RNA, 19 nt, Homo sapiens
  misc_RNA (1)...(19): siRNA sense strand
ccuaugccagcacaacuuu

SEQ ID NO: 1489051 - RNA, 19 nt, Homo sapiens
  misc_RNA (1)...(19): siRNA sense strand
acauuuaauccuugccuuu

SEQ ID NO: 1489052 - RNA, 19 nt, Homo sapiens
  misc_RNA (1)...(19): siRNA sense strand
gaugggucccucuucuuuc

SEQ ID NO: 1489053 - RNA, 19 nt, Homo sapiens
  misc_RNA (1)...(19): siRNA sense strand
uguaaacccgacacugaaa

SEQ ID NO: 1489054 - RNA, 19 nt, Homo sapiens
  misc_RNA (1)...(19): siRNA sense strand
ccaggcccauugcugagau

SEQ ID NO: 1489055 - RNA, 19 nt, Homo sapiens
  misc_RNA (1)...(19): siRNA sense strand
ccugcacccugucucucua

SEQ ID NO: 1489056 - RNA, 19 nt, Homo sapiens
  misc_RNA (1)...(19): siRNA sense strand
cauaaagagcuacagaaaa

SEQ ID NO: 1489057 - RNA, 19 nt, Homo sapiens
  misc_RNA (1)...(19): siRNA sense strand
agcaaucacuuggcugaga

SEQ ID NO: 1489058 - RNA, 19 nt, Homo sapiens
  misc_RNA (1)...(19): siRNA sense strand
caacuuucaaacucucaga

SEQ ID NO: 1489059 - RNA, 19 nt, Homo sapiens
  misc_RNA (1)...(19): siRNA sense strand
guaaacccgacacugaaag

SEQ ID NO: 1489060 - RNA, 19 nt, Homo sapiens
  misc_RNA (1)...(19): siRNA sense strand
gaggcaauggcuccacaug

SEQ ID NO: 1489061 - RNA, 19 nt, Homo sapiens
  misc_RNA (1)...(19): siRNA sense strand
acccgacacugaaagacaa

SEQ ID NO: 1489062 - RNA, 19 nt, Homo sapiens
  misc_RNA (1)...(19): siRNA sense strand
gggcagaacuggacguuug

SEQ ID NO: 1489063 - RNA, 19 nt, Homo sapiens
  misc_RNA (1)...(19): siRNA sense strand
gcagagugcuccuagauca

SEQ ID NO: 1489064 - RNA, 19 nt, Homo sapiens
  misc_RNA (1)...(19): siRNA sense strand
gcuccuagaucaccauaaa

SEQ ID NO: 1489065 - RNA, 19 nt, Homo sapiens
  misc_RNA (1)...(19): siRNA sense strand
cgacaucacuugccagaca

SEQ ID NO: 1489066 - RNA, 19 nt, Homo sapiens
  misc_RNA (1)...(19): siRNA sense strand
agagucugcugaaacguua

SEQ ID NO: 1489067 - RNA, 19 nt, Homo sapiens
  misc_RNA (1)...(19): siRNA sense strand
ccuauucacugucacuuug

SEQ ID NO: 1489068 - RNA, 19 nt, Homo sapiens
  misc_RNA (1)...(19): siRNA sense strand
gaccaaccaugcauacauc

SEQ ID NO: 1489069 - RNA, 19 nt, Homo sapiens
  misc_RNA (1)...(19): siRNA sense strand
ccaccaaugugcuccuuau

SEQ ID NO: 1489070 - RNA, 19 nt, Homo sapiens
  misc_RNA (1)...(19): siRNA sense strand
acacagagcaggcuucaga

SEQ ID NO: 1489071 - RNA, 19 nt, Homo sapiens
  misc_RNA (1)...(19): siRNA sense strand
gguuucagauggaccuauu

SEQ ID NO: 1489072 - RNA, 19 nt, Homo sapiens
  misc_RNA (1)...(19): siRNA sense strand
gaacuggacguuugcuuuu

SEQ ID NO: 1489073 - RNA, 19 nt, Homo sapiens
  misc_RNA (1)...(19): siRNA sense strand
ccaggccucucuccaagug

SEQ ID NO: 1489074 - RNA, 19 nt, Homo sapiens
  misc_RNA (1)...(19): siRNA sense strand
ccaaugugcuccuuaugcu

SEQ ID NO: 1489075 - RNA, 19 nt, Homo sapiens
  misc_RNA (1)...(19): siRNA sense strand
ucacuugccauugagauuu

SEQ ID NO: 1489076 - RNA, 19 nt, Homo sapiens
  misc_RNA (1)...(19): siRNA sense strand
gcuuagagcgguuucagau

SEQ ID NO: 1489077 - RNA, 19 nt, Homo sapiens
  misc_RNA (1)...(19): siRNA sense strand
gagggcgaguguccuaauc

SEQ ID NO: 1489078 - RNA, 19 nt, Homo sapiens
  misc_RNA (1)...(19): siRNA sense strand
agauggaccuauucacugu

SEQ ID NO: 1489079 - RNA, 19 nt, Homo sapiens
  misc_RNA (1)...(19): siRNA sense strand
agaacuggacguuugcuuu

SEQ ID NO: 1489080 - RNA, 19 nt, Homo sapiens
  misc_RNA (1)...(19): siRNA sense strand
ccgagucccuuccacuugu

SEQ ID NO: 1489081 - RNA, 19 nt, Homo sapiens
  misc_RNA (1)...(19): siRNA sense strand
ggauggggcuccuggauca

SEQ ID NO: 1489082 - RNA, 19 nt, Homo sapiens
  misc_RNA (1)...(19): siRNA sense strand
cgaguguccuaauccuguu

SEQ ID NO: 1489083 - RNA, 19 nt, Homo sapiens
  misc_RNA (1)...(19): siRNA sense strand
gacaugaucguggaagaau

SEQ ID NO: 1489084 - RNA, 19 nt, Homo sapiens
  misc_RNA (1)...(19): siRNA sense strand
agccaaagcccgacacaga

SEQ ID NO: 1489085 - RNA, 19 nt, Homo sapiens
  misc_RNA (1)...(19): siRNA sense strand
ugaccaggccucucuccaa

SEQ ID NO: 1489086 - RNA, 19 nt, Homo sapiens
  misc_RNA (1)...(19): siRNA sense strand
cgaccaaccaugcauacau

SEQ ID NO: 1489087 - RNA, 19 nt, Homo sapiens
  misc_RNA (1)...(19): siRNA sense strand
ccgcugagcaugcuguaug

SEQ ID NO: 1489088 - RNA, 19 nt, Homo sapiens
  misc_RNA (1)...(19): siRNA sense strand
cgagucccuuccacuuguu

SEQ ID NO: 1489089 - RNA, 19 nt, Homo sapiens
  misc_RNA (1)...(19): siRNA sense strand
caugaucguggaagaaugu

SEQ ID NO: 1489090 - RNA, 19 nt, Homo sapiens
  misc_RNA (1)...(19): siRNA sense strand
cuagaucaccauaaagaca

SEQ ID NO: 1489091 - RNA, 19 nt, Homo sapiens
  misc_RNA (1)...(19): siRNA sense strand
gacguuugcuuuugacuuc

SEQ ID NO: 1489092 - RNA, 19 nt, Homo sapiens
  misc_RNA (1)...(19): siRNA sense strand
aagacaugaucguggaaga

SEQ ID NO: 1489093 - RNA, 19 nt, Homo sapiens
  misc_RNA (1)...(19): siRNA sense strand
uagagcgguuucagaugga

SEQ ID NO: 1489094 - RNA, 19 nt, Homo sapiens
  misc_RNA (1)...(19): siRNA sense strand
gagcaugcuguauguggau

SEQ ID NO: 1489095 - RNA, 19 nt, Homo sapiens
  misc_RNA (1)...(19): siRNA sense strand
augcauacauccagagucu

SEQ ID NO: 1489096 - RNA, 19 nt, Homo sapiens
  misc_RNA (1)...(19): siRNA sense strand
ucagauggaccuauucacu

SEQ ID NO: 1489097 - RNA, 19 nt, Homo sapiens
  misc_RNA (1)...(19): siRNA sense strand
agggcucacuugccauuga

SEQ ID NO: 1489098 - RNA, 19 nt, Homo sapiens
  misc_RNA (1)...(19): siRNA sense strand
gcaccgucgacaucacuug

SEQ ID NO: 1489099 - RNA, 19 nt, Homo sapiens
  misc_RNA (1)...(19): siRNA sense strand
caagaggcaccgucgacau

SEQ ID NO: 1489100 - RNA, 19 nt, Homo sapiens
  misc_RNA (1)...(19): siRNA sense strand
agaccaagccgcugagcau

SEQ ID NO: 1489101 - RNA, 19 nt, Homo sapiens
  misc_RNA (1)...(19): siRNA sense strand
ggcuucagacagcugcuua

SEQ ID NO: 1489102 - RNA, 19 nt, Homo sapiens
  misc_RNA (1)...(19): siRNA sense strand
gcaugcuguauguggauaa

SEQ ID NO: 1489103 - RNA, 19 nt, Homo sapiens
  misc_RNA (1)...(19): siRNA sense strand
ggaaauacccuaccagaaa

SEQ ID NO: 1489104 - RNA, 19 nt, Homo sapiens
  misc_RNA (1)...(19): siRNA sense strand
gaacauggacuuaggcuuu

SEQ ID NO: 1489105 - RNA, 19 nt, Homo sapiens
  misc_RNA (1)...(19): siRNA sense strand
cuacauaggugucuccaaa

SEQ ID NO: 1489106 - RNA, 19 nt, Homo sapiens
  misc_RNA (1)...(19): siRNA sense strand
ucaagaagcuggccuuuua

SEQ ID NO: 1489107 - RNA, 19 nt, Homo sapiens
  misc_RNA (1)...(19): siRNA sense strand
gaaagauuguuaacccuau

SEQ ID NO: 1489108 - RNA, 19 nt, Homo sapiens
  misc_RNA (1)...(19): siRNA sense strand
ggugaaaggucuucuaaag

SEQ ID NO: 1489109 - RNA, 19 nt, Homo sapiens
  misc_RNA (1)...(19): siRNA sense strand
gcagaucaaugacuuuauc

SEQ ID NO: 1489110 - RNA, 19 nt, Homo sapiens
  misc_RNA (1)...(19): siRNA sense strand
gcacaaggcugagcugaag

SEQ ID NO: 1489111 - RNA, 19 nt, Homo sapiens
  misc_RNA (1)...(19): siRNA sense strand
caaguuggcuaugacgaua

SEQ ID NO: 1489112 - RNA, 19 nt, Homo sapiens
  misc_RNA (1)...(19): siRNA sense strand
gauugcagguggacacuuu

SEQ ID NO: 1489113 - RNA, 19 nt, Homo sapiens
  misc_RNA (1)...(19): siRNA sense strand
gagcaucucuacagcuuuc

SEQ ID NO: 1489114 - RNA, 19 nt, Homo sapiens
  misc_RNA (1)...(19): siRNA sense strand
gaaauacccuaccagaaaa

SEQ ID NO: 1489115 - RNA, 19 nt, Homo sapiens
  misc_RNA (1)...(19): siRNA sense strand
ccuaucugcugcugauuua

SEQ ID NO: 1489116 - RNA, 19 nt, Homo sapiens
  misc_RNA (1)...(19): siRNA sense strand
ugaugcuucuugcaaauua

SEQ ID NO: 1489117 - RNA, 19 nt, Homo sapiens
  misc_RNA (1)...(19): siRNA sense strand
caugagggcuuccauuaca

SEQ ID NO: 1489118 - RNA, 19 nt, Homo sapiens
  misc_RNA (1)...(19): siRNA sense strand
ggguucaacuucagaaaga

SEQ ID NO: 1489119 - RNA, 19 nt, Homo sapiens
  misc_RNA (1)...(19): siRNA sense strand
ugaagaagacucucuccua

SEQ ID NO: 1489120 - RNA, 19 nt, Homo sapiens
  misc_RNA (1)...(19): siRNA sense strand
uuaacaaccugaucgagaa

SEQ ID NO: 1489121 - RNA, 19 nt, Homo sapiens
  misc_RNA (1)...(19): siRNA sense strand
gauguuccguaguggcaua

SEQ ID NO: 1489122 - RNA, 19 nt, Homo sapiens
  misc_RNA (1)...(19): siRNA sense strand
ggaagaugccaagaacuuu

SEQ ID NO: 1489123 - RNA, 19 nt, Homo sapiens
  misc_RNA (1)...(19): siRNA sense strand
ucagaaagaugccagaaaa

SEQ ID NO: 1489124 - RNA, 19 nt, Homo sapiens
  misc_RNA (1)...(19): siRNA sense strand
agaagcagaucaaugacuu

SEQ ID NO: 1489125 - RNA, 19 nt, Homo sapiens
  misc_RNA (1)...(19): siRNA sense strand
ccaaggaauuauaaagcuu

SEQ ID NO: 1489126 - RNA, 19 nt, Homo sapiens
  misc_RNA (1)...(19): siRNA sense strand
gaagacucucuccuacaua

SEQ ID NO: 1489127 - RNA, 19 nt, Homo sapiens
  misc_RNA (1)...(19): siRNA sense strand
gggcuuccauuacaucauc

SEQ ID NO: 1489128 - RNA, 19 nt, Homo sapiens
  misc_RNA (1)...(19): siRNA sense strand
aggcugagcugaagaugga

SEQ ID NO: 1489129 - RNA, 19 nt, Homo sapiens
  misc_RNA (1)...(19): siRNA sense strand
agaagacucucuccuacau

SEQ ID NO: 1489130 - RNA, 19 nt, Homo sapiens
  misc_RNA (1)...(19): siRNA sense strand
gaucaaugacuuuaucagu

SEQ ID NO: 1489131 - RNA, 19 nt, Homo sapiens
  misc_RNA (1)...(19): siRNA sense strand
gaagacccaggaccucaaa

SEQ ID NO: 1489132 - RNA, 19 nt, Homo sapiens
  misc_RNA (1)...(19): siRNA sense strand
gaaaccauccuuaccaacu

SEQ ID NO: 1489133 - RNA, 19 nt, Homo sapiens
  misc_RNA (1)...(19): siRNA sense strand
guacccagacuccacauga

SEQ ID NO: 1489134 - RNA, 19 nt, Homo sapiens
  misc_RNA (1)...(19): siRNA sense strand
aaaccauccuuaccaacuu

SEQ ID NO: 1489135 - RNA, 19 nt, Homo sapiens
  misc_RNA (1)...(19): siRNA sense strand
aacauggacuuaggcuuua

SEQ ID NO: 1489136 - RNA, 19 nt, Homo sapiens
  misc_RNA (1)...(19): siRNA sense strand
cuuaccaacuuucagaauu

SEQ ID NO: 1489137 - RNA, 19 nt, Homo sapiens
  misc_RNA (1)...(19): siRNA sense strand
gcucagaagcagaucaaug

SEQ ID NO: 1489138 - RNA, 19 nt, Homo sapiens
  misc_RNA (1)...(19): siRNA sense strand
gaagcagaucaaugacuuu

SEQ ID NO: 1489139 - RNA, 19 nt, Homo sapiens
  misc_RNA (1)...(19): siRNA sense strand
cgagccagguggaaacaug

SEQ ID NO: 1489140 - RNA, 19 nt, Homo sapiens
  misc_RNA (1)...(19): siRNA sense strand
ccgaaaccauccuuaccaa

SEQ ID NO: 1489141 - RNA, 19 nt, Homo sapiens
  misc_RNA (1)...(19): siRNA sense strand
ucaaggugcccaugauguu

SEQ ID NO: 1489142 - RNA, 19 nt, Homo sapiens
  misc_RNA (1)...(19): siRNA sense strand
uccacgagcugacccagaa

SEQ ID NO: 1489143 - RNA, 19 nt, Homo sapiens
  misc_RNA (1)...(19): siRNA sense strand
agacaccacucgucgucaa

SEQ ID NO: 1489144 - RNA, 19 nt, Homo sapiens
  misc_RNA (1)...(19): siRNA sense strand
aagcagaucaaugacuuua

SEQ ID NO: 1489145 - RNA, 19 nt, Homo sapiens
  misc_RNA (1)...(19): siRNA sense strand
cucagaagcagaucaauga

SEQ ID NO: 1489146 - RNA, 19 nt, Homo sapiens
  misc_RNA (1)...(19): siRNA sense strand
gcagccacagcguaaguuu

SEQ ID NO: 1489147 - RNA, 19 nt, Homo sapiens
  misc_RNA (1)...(19): siRNA sense strand
acaaccugaucgagaauau

SEQ ID NO: 1489148 - RNA, 19 nt, Homo sapiens
  misc_RNA (1)...(19): siRNA sense strand
guaguggcauauaccaagu

SEQ ID NO: 1489149 - RNA, 19 nt, Homo sapiens
  misc_RNA (1)...(19): siRNA sense strand
ggaauuauaaagcuuugag

SEQ ID NO: 1489150 - RNA, 19 nt, Homo sapiens
  misc_RNA (1)...(19): siRNA sense strand
cccaugauguuccguagug

SEQ ID NO: 1489151 - RNA, 19 nt, Homo sapiens
  misc_RNA (1)...(19): siRNA sense strand
aaacugagcauugggaaca

SEQ ID NO: 1489152 - RNA, 19 nt, Homo sapiens
  misc_RNA (1)...(19): siRNA sense strand
aagacucucuccuacauag

SEQ ID NO: 1489153 - RNA, 19 nt, Homo sapiens
  misc_RNA (1)...(19): siRNA sense strand
uaucacagccaucuucauc

SEQ ID NO: 1489154 - RNA, 19 nt, Homo sapiens
  misc_RNA (1)...(19): siRNA sense strand
caaccugaucgagaauaua

SEQ ID NO: 1489155 - RNA, 19 nt, Homo sapiens
  misc_RNA (1)...(19): siRNA sense strand
gagcuucucaccaaggaau

SEQ ID NO: 1489156 - RNA, 19 nt, Homo sapiens
  misc_RNA (1)...(19): siRNA sense strand
gaagaugccaagaacuuuu

SEQ ID NO: 1489157 - RNA, 19 nt, Homo sapiens
  misc_RNA (1)...(19): siRNA sense strand
ggcagaacauggacuuagg

SEQ ID NO: 1489158 - RNA, 19 nt, Homo sapiens
  misc_RNA (1)...(19): siRNA sense strand
gcacuuggagaagggauug

SEQ ID NO: 1489159 - RNA, 19 nt, Homo sapiens
  misc_RNA (1)...(19): siRNA sense strand
gaugcuucuugcaaauuau

SEQ ID NO: 1489160 - RNA, 19 nt, Homo sapiens
  misc_RNA (1)...(19): siRNA sense strand
uggaagaugccaagaacuu

SEQ ID NO: 1489161 - RNA, 19 nt, Homo sapiens
  misc_RNA (1)...(19): siRNA sense strand
aaccauccuuaccaacuuu

SEQ ID NO: 1489162 - RNA, 19 nt, Homo sapiens
  misc_RNA (1)...(19): siRNA sense strand
ucucaccaaggaauuauaa

SEQ ID NO: 1489163 - RNA, 19 nt, Homo sapiens
  misc_RNA (1)...(19): siRNA sense strand
caaggcagaacauggacuu

SEQ ID NO: 1489164 - RNA, 19 nt, Homo sapiens
  misc_RNA (1)...(19): siRNA sense strand
gagcugaagauggaugaga

SEQ ID NO: 1489165 - RNA, 19 nt, Homo sapiens
  misc_RNA (1)...(19): siRNA sense strand
ugaggaacauggugaucuc

SEQ ID NO: 1489166 - RNA, 19 nt, Homo sapiens
  misc_RNA (1)...(19): siRNA sense strand
aaauaucacagccaucuuc

SEQ ID NO: 1489167 - RNA, 19 nt, Homo sapiens
  misc_RNA (1)...(19): siRNA sense strand
gauccaaauguaacuaaag

SEQ ID NO: 1489168 - RNA, 19 nt, Homo sapiens
  misc_RNA (1)...(19): siRNA sense strand
uucaugagggcuuccauua

SEQ ID NO: 1489169 - RNA, 19 nt, Homo sapiens
  misc_RNA (1)...(19): siRNA sense strand
gagccagguggaaacauga

SEQ ID NO: 1489170 - RNA, 19 nt, Homo sapiens
  misc_RNA (1)...(19): siRNA sense strand
uaccaacuuucagaauuug

SEQ ID NO: 1489171 - RNA, 19 nt, Homo sapiens
  misc_RNA (1)...(19): siRNA sense strand
gacgauaagcucucuugca

SEQ ID NO: 1489172 - RNA, 19 nt, Homo sapiens
  misc_RNA (1)...(19): siRNA sense strand
uugagcaucucuacagcuu

SEQ ID NO: 1489173 - RNA, 19 nt, Homo sapiens
  misc_RNA (1)...(19): siRNA sense strand
agggcaagcugaagcacuu

SEQ ID NO: 1489174 - RNA, 19 nt, Homo sapiens
  misc_RNA (1)...(19): siRNA sense strand
gcuucucaccaaggaauua

SEQ ID NO: 1489175 - RNA, 19 nt, Homo sapiens
  misc_RNA (1)...(19): siRNA sense strand
ucaccaaggaauuauaaag

SEQ ID NO: 1489176 - RNA, 19 nt, Homo sapiens
  misc_RNA (1)...(19): siRNA sense strand
caacuuucagaauuuggaa

SEQ ID NO: 1489177 - RNA, 19 nt, Homo sapiens
  misc_RNA (1)...(19): siRNA sense strand
ugugaugcuucuugcaaau

SEQ ID NO: 1489178 - RNA, 19 nt, Homo sapiens
  misc_RNA (1)...(19): siRNA sense strand
ccacucgucgucaagauag

SEQ ID NO: 1489179 - RNA, 19 nt, Homo sapiens
  misc_RNA (1)...(19): siRNA sense strand
gcucaagaagcuggccuuu

SEQ ID NO: 1489180 - RNA, 19 nt, Homo sapiens
  misc_RNA (1)...(19): siRNA sense strand
ucacagccaucuucauccu

SEQ ID NO: 1489181 - RNA, 19 nt, Homo sapiens
  misc_RNA (1)...(19): siRNA sense strand
gcaccauccuggaaauacc

SEQ ID NO: 1489182 - RNA, 19 nt, Homo sapiens
  misc_RNA (1)...(19): siRNA sense strand
guaacuaaagaggaagauu

SEQ ID NO: 1489183 - RNA, 19 nt, Homo sapiens
  misc_RNA (1)...(19): siRNA sense strand
cagucaaggugcccaugau

SEQ ID NO: 1489184 - RNA, 19 nt, Homo sapiens
  misc_RNA (1)...(19): siRNA sense strand
uggaaauacccuaccagaa

SEQ ID NO: 1489185 - RNA, 19 nt, Homo sapiens
  misc_RNA (1)...(19): siRNA sense strand
gagcuugcaaggcagaaca

SEQ ID NO: 1489186 - RNA, 19 nt, Homo sapiens
  misc_RNA (1)...(19): siRNA sense strand
ccucaucgcagccugaaag

SEQ ID NO: 1489187 - RNA, 19 nt, Homo sapiens
  misc_RNA (1)...(19): siRNA sense strand
ccgagcuucucaccaagga

SEQ ID NO: 1489188 - RNA, 19 nt, Homo sapiens
  misc_RNA (1)...(19): siRNA sense strand
acauggacuuaggcuuuaa

SEQ ID NO: 1489189 - RNA, 19 nt, Homo sapiens
  misc_RNA (1)...(19): siRNA sense strand
caaggugcccaugauguuc

SEQ ID NO: 1489190 - RNA, 19 nt, Homo sapiens
  misc_RNA (1)...(19): siRNA sense strand
cugugaugcuucuugcaaa

SEQ ID NO: 1489191 - RNA, 19 nt, Homo sapiens
  misc_RNA (1)...(19): siRNA sense strand
uaacaaccugaucgagaau

SEQ ID NO: 1489192 - RNA, 19 nt, Homo sapiens
  misc_RNA (1)...(19): siRNA sense strand
acccaggaccucaaacuga

SEQ ID NO: 1489193 - RNA, 19 nt, Homo sapiens
  misc_RNA (1)...(19): siRNA sense strand
acagcacccuggacgagau

SEQ ID NO: 1489194 - RNA, 19 nt, Homo sapiens
  misc_RNA (1)...(19): siRNA sense strand
cuaaagacauggccacuua

SEQ ID NO: 1489195 - RNA, 19 nt, Homo sapiens
  misc_RNA (1)...(19): siRNA sense strand
gaugggagaccuacauuaa

SEQ ID NO: 1489196 - RNA, 19 nt, Homo sapiens
  misc_RNA (1)...(19): siRNA sense strand
gagaugacgcagauguuua

SEQ ID NO: 1489197 - RNA, 19 nt, Homo sapiens
  misc_RNA (1)...(19): siRNA sense strand
ggaacagccuaucuacaug

SEQ ID NO: 1489198 - RNA, 19 nt, Homo sapiens
  misc_RNA (1)...(19): siRNA sense strand
gaacagccuaucuacauga

SEQ ID NO: 1489199 - RNA, 19 nt, Homo sapiens
  misc_RNA (1)...(19): siRNA sense strand
caugcaagauccucauuga

SEQ ID NO: 1489200 - RNA, 19 nt, Homo sapiens
  misc_RNA (1)...(19): siRNA sense strand
ggacucaagugaaagugau

SEQ ID NO: 1489201 - RNA, 19 nt, Homo sapiens
  misc_RNA (1)...(19): siRNA sense strand
gcaagauccucauugaaac

SEQ ID NO: 1489202 - RNA, 19 nt, Homo sapiens
  misc_RNA (1)...(19): siRNA sense strand
ccgaaccucugacuaaaga

SEQ ID NO: 1489203 - RNA, 19 nt, Homo sapiens
  misc_RNA (1)...(19): siRNA sense strand
gaccugaccuugggacuca

SEQ ID NO: 1489204 - RNA, 19 nt, Homo sapiens
  misc_RNA (1)...(19): siRNA sense strand
gggaacagccuaucuacau

SEQ ID NO: 1489205 - RNA, 19 nt, Homo sapiens
  misc_RNA (1)...(19): siRNA sense strand
ggaugggagaccuacauua

SEQ ID NO: 1489206 - RNA, 19 nt, Homo sapiens
  misc_RNA (1)...(19): siRNA sense strand
caucaaggacaaucagaaa

SEQ ID NO: 1489207 - RNA, 19 nt, Homo sapiens
  misc_RNA (1)...(19): siRNA sense strand
caucugggaucugcauuug

SEQ ID NO: 1489208 - RNA, 19 nt, Homo sapiens
  misc_RNA (1)...(19): siRNA sense strand
gggagcggcuuccacaaca

SEQ ID NO: 1489209 - RNA, 19 nt, Homo sapiens
  misc_RNA (1)...(19): siRNA sense strand
ucacugccauccucugguu

SEQ ID NO: 1489210 - RNA, 19 nt, Homo sapiens
  misc_RNA (1)...(19): siRNA sense strand
caagaggaaccacuacaug

SEQ ID NO: 1489211 - RNA, 19 nt, Homo sapiens
  misc_RNA (1)...(19): siRNA sense strand
ugcaagauccucauugaaa

SEQ ID NO: 1489212 - RNA, 19 nt, Homo sapiens
  misc_RNA (1)...(19): siRNA sense strand
ggugugggauugaaagaag

SEQ ID NO: 1489213 - RNA, 19 nt, Homo sapiens
  misc_RNA (1)...(19): siRNA sense strand
ucaaggacaaucagaaaga

SEQ ID NO: 1489214 - RNA, 19 nt, Homo sapiens
  misc_RNA (1)...(19): siRNA sense strand
ucaccuaccaacagcaaua

SEQ ID NO: 1489215 - RNA, 19 nt, Homo sapiens
  misc_RNA (1)...(19): siRNA sense strand
ugggagaccuacauuaagu

SEQ ID NO: 1489216 - RNA, 19 nt, Homo sapiens
  misc_RNA (1)...(19): siRNA sense strand
cgagaugacgcagauguuu

SEQ ID NO: 1489217 - RNA, 19 nt, Homo sapiens
  misc_RNA (1)...(19): siRNA sense strand
acagcaagcucaccuacca

SEQ ID NO: 1489218 - RNA, 19 nt, Homo sapiens
  misc_RNA (1)...(19): siRNA sense strand
ucuccgaaccucugacuaa

SEQ ID NO: 1489219 - RNA, 19 nt, Homo sapiens
  misc_RNA (1)...(19): siRNA sense strand
gcaucugggaucugcauuu

SEQ ID NO: 1489220 - RNA, 19 nt, Homo sapiens
  misc_RNA (1)...(19): siRNA sense strand
gagaagagugaccgugugu

SEQ ID NO: 1489221 - RNA, 19 nt, Homo sapiens
  misc_RNA (1)...(19): siRNA sense strand
gaaccucugacuaaagaca

SEQ ID NO: 1489222 - RNA, 19 nt, Homo sapiens
  misc_RNA (1)...(19): siRNA sense strand
cagaaagaccgcacguuca

SEQ ID NO: 1489223 - RNA, 19 nt, Homo sapiens
  misc_RNA (1)...(19): siRNA sense strand
cuacaugcuccugguauuu

SEQ ID NO: 1489224 - RNA, 19 nt, Homo sapiens
  misc_RNA (1)...(19): siRNA sense strand
aagugaaagugaucguuga

SEQ ID NO: 1489225 - RNA, 19 nt, Homo sapiens
  misc_RNA (1)...(19): siRNA sense strand
caggcgagaugacgcagau

SEQ ID NO: 1489226 - RNA, 19 nt, Homo sapiens
  misc_RNA (1)...(19): siRNA sense strand
agccagagcucgggcagaa

SEQ ID NO: 1489227 - RNA, 19 nt, Homo sapiens
  misc_RNA (1)...(19): siRNA sense strand
cagccuaucuacaugaacu

SEQ ID NO: 1489228 - RNA, 19 nt, Homo sapiens
  misc_RNA (1)...(19): siRNA sense strand
acagcaauauggcaguguu

SEQ ID NO: 1489229 - RNA, 19 nt, Homo sapiens
  misc_RNA (1)...(19): siRNA sense strand
ucaaugccacuauaagcaa

SEQ ID NO: 1489230 - RNA, 19 nt, Homo sapiens
  misc_RNA (1)...(19): siRNA sense strand
gaacuuccagagugcaucu

SEQ ID NO: 1489231 - RNA, 19 nt, Homo sapiens
  misc_RNA (1)...(19): siRNA sense strand
acgguucaaugccacuaua

SEQ ID NO: 1489232 - RNA, 19 nt, Homo sapiens
  misc_RNA (1)...(19): siRNA sense strand
caaggacaaucagaaagac

SEQ ID NO: 1489233 - RNA, 19 nt, Homo sapiens
  misc_RNA (1)...(19): siRNA sense strand
gugcccaucuugcucaucu

SEQ ID NO: 1489234 - RNA, 19 nt, Homo sapiens
  misc_RNA (1)...(19): siRNA sense strand
ccacuacaugcuccuggua

SEQ ID NO: 1489235 - RNA, 19 nt, Homo sapiens
  misc_RNA (1)...(19): siRNA sense strand
caauauggcaguguucauc

SEQ ID NO: 1489236 - RNA, 19 nt, Homo sapiens
  misc_RNA (1)...(19): siRNA sense strand
gcgagaugacgcagauguu

SEQ ID NO: 1489237 - RNA, 19 nt, Homo sapiens
  misc_RNA (1)...(19): siRNA sense strand
uuacuggugugggauugaa

SEQ ID NO: 1489238 - RNA, 19 nt, Homo sapiens
  misc_RNA (1)...(19): siRNA sense strand
ggucggagcaaggagagaa

SEQ ID NO: 1489239 - RNA, 19 nt, Homo sapiens
  misc_RNA (1)...(19): siRNA sense strand
aagaagaggaccugaccuu

SEQ ID NO: 1489240 - RNA, 19 nt, Homo sapiens
  misc_RNA (1)...(19): siRNA sense strand
acuacaugcuccugguauu

SEQ ID NO: 1489241 - RNA, 19 nt, Homo sapiens
  misc_RNA (1)...(19): siRNA sense strand
gggacucaagugaaaguga

SEQ ID NO: 1489242 - RNA, 19 nt, Homo sapiens
  misc_RNA (1)...(19): siRNA sense strand
cuccgaaccucugacuaaa

SEQ ID NO: 1489243 - RNA, 19 nt, Homo sapiens
  misc_RNA (1)...(19): siRNA sense strand
guucaucggcucccacaag

SEQ ID NO: 1489244 - RNA, 19 nt, Homo sapiens
  misc_RNA (1)...(19): siRNA sense strand
gcaauauggcaguguucau

SEQ ID NO: 1489245 - RNA, 19 nt, Homo sapiens
  misc_RNA (1)...(19): siRNA sense strand
ccaucaaggacaaucagaa

SEQ ID NO: 1489246 - RNA, 19 nt, Homo sapiens
  misc_RNA (1)...(19): siRNA sense strand
gcucaccuaccaacagcaa

SEQ ID NO: 1489247 - RNA, 19 nt, Homo sapiens
  misc_RNA (1)...(19): siRNA sense strand
gggcgcugcugaacgcuuu

SEQ ID NO: 1489248 - RNA, 19 nt, Homo sapiens
  misc_RNA (1)...(19): siRNA sense strand
gaguuugguugacccuaga

SEQ ID NO: 1489249 - RNA, 19 nt, Homo sapiens
  misc_RNA (1)...(19): siRNA sense strand
gcaggcaugcugggcagua

SEQ ID NO: 1489250 - RNA, 19 nt, Homo sapiens
  misc_RNA (1)...(19): siRNA sense strand
ggucuuaugugcugauacc

SEQ ID NO: 1489251 - RNA, 19 nt, Homo sapiens
  misc_RNA (1)...(19): siRNA sense strand
gcuuugagguguggaaugc

SEQ ID NO: 1489252 - RNA, 19 nt, Homo sapiens
  misc_RNA (1)...(19): siRNA sense strand
cucagggccucucggauga

SEQ ID NO: 1489253 - RNA, 19 nt, Homo sapiens
  misc_RNA (1)...(19): siRNA sense strand
gaugcagagcuuccaagga

SEQ ID NO: 1489254 - RNA, 19 nt, Homo sapiens
  misc_RNA (1)...(19): siRNA sense strand
caccgcaacuuuugagcua

SEQ ID NO: 1489255 - RNA, 19 nt, Homo sapiens
  misc_RNA (1)...(19): siRNA sense strand
caggaaugaguuugguuga

SEQ ID NO: 1489256 - RNA, 19 nt, Homo sapiens
  misc_RNA (1)...(19): siRNA sense strand
caagagacauggcuucuaa

SEQ ID NO: 1489257 - RNA, 19 nt, Homo sapiens
  misc_RNA (1)...(19): siRNA sense strand
ugccauaccuccugaaaua

SEQ ID NO: 1489258 - RNA, 19 nt, Homo sapiens
  misc_RNA (1)...(19): siRNA sense strand
ccaaguaccucaagagaca

SEQ ID NO: 1489259 - RNA, 19 nt, Homo sapiens
  misc_RNA (1)...(19): siRNA sense strand
cgugaucgcuggugucuug

SEQ ID NO: 1489260 - RNA, 19 nt, Homo sapiens
  misc_RNA (1)...(19): siRNA sense strand
cugaaaggcuggcugaaau

SEQ ID NO: 1489261 - RNA, 19 nt, Homo sapiens
  misc_RNA (1)...(19): siRNA sense strand
cugauggacuugucugaaa

SEQ ID NO: 1489262 - RNA, 19 nt, Homo sapiens
  misc_RNA (1)...(19): siRNA sense strand
ugaaaggcuggcugaaaua

SEQ ID NO: 1489263 - RNA, 19 nt, Homo sapiens
  misc_RNA (1)...(19): siRNA sense strand
gcugugacuucugcaauga

SEQ ID NO: 1489264 - RNA, 19 nt, Homo sapiens
  misc_RNA (1)...(19): siRNA sense strand
gaagucucccggugacaaa

SEQ ID NO: 1489265 - RNA, 19 nt, Homo sapiens
  misc_RNA (1)...(19): siRNA sense strand
gaccugagcugugacuucu

SEQ ID NO: 1489266 - RNA, 19 nt, Homo sapiens
  misc_RNA (1)...(19): siRNA sense strand
ggaguucgugcuucugaaa

SEQ ID NO: 1489267 - RNA, 19 nt, Homo sapiens
  misc_RNA (1)...(19): siRNA sense strand
uggagcaucuugugggauu

SEQ ID NO: 1489268 - RNA, 19 nt, Homo sapiens
  misc_RNA (1)...(19): siRNA sense strand
gaaaggcuggcugaaauag

SEQ ID NO: 1489269 - RNA, 19 nt, Homo sapiens
  misc_RNA (1)...(19): siRNA sense strand
ggaagucucccggugacaa

SEQ ID NO: 1489270 - RNA, 19 nt, Homo sapiens
  misc_RNA (1)...(19): siRNA sense strand
cauaccuccugaaauauca

SEQ ID NO: 1489271 - RNA, 19 nt, Homo sapiens
  misc_RNA (1)...(19): siRNA sense strand
ggaccugagcugugacuuc

SEQ ID NO: 1489272 - RNA, 19 nt, Homo sapiens
  misc_RNA (1)...(19): siRNA sense strand
cugaaguucugacuacuag

SEQ ID NO: 1489273 - RNA, 19 nt, Homo sapiens
  misc_RNA (1)...(19): siRNA sense strand
gaaauagacaugccauacc

SEQ ID NO: 1489274 - RNA, 19 nt, Homo sapiens
  misc_RNA (1)...(19): siRNA sense strand
gcauggauccugccgugau

SEQ ID NO: 1489275 - RNA, 19 nt, Homo sapiens
  misc_RNA (1)...(19): siRNA sense strand
aaauagacaugccauaccu

SEQ ID NO: 1489276 - RNA, 19 nt, Homo sapiens
  misc_RNA (1)...(19): siRNA sense strand
ggacaccccuggagcaucu

SEQ ID NO: 1489277 - RNA, 19 nt, Homo sapiens
  misc_RNA (1)...(19): siRNA sense strand
gagcugugacuucugcaau

SEQ ID NO: 1489278 - RNA, 19 nt, Homo sapiens
  misc_RNA (1)...(19): siRNA sense strand
ugaaauagacaugccauac

SEQ ID NO: 1489279 - RNA, 19 nt, Homo sapiens
  misc_RNA (1)...(19): siRNA sense strand
ugacuacuagaaucaaaga

SEQ ID NO: 1489280 - RNA, 19 nt, Homo sapiens
  misc_RNA (1)...(19): siRNA sense strand
gaagacgucacggccugaa

SEQ ID NO: 1489281 - RNA, 19 nt, Homo sapiens
  misc_RNA (1)...(19): siRNA sense strand
cgagccaaguaccucaaga

SEQ ID NO: 1489282 - RNA, 19 nt, Homo sapiens
  misc_RNA (1)...(19): siRNA sense strand
ucugacuacuagaaucaaa

SEQ ID NO: 1489283 - RNA, 19 nt, Homo sapiens
  misc_RNA (1)...(19): siRNA sense strand
gcaaaccauuggccaaaag

SEQ ID NO: 1489284 - RNA, 19 nt, Homo sapiens
  misc_RNA (1)...(19): siRNA sense strand
ugauggacuugucugaaag

SEQ ID NO: 1489285 - RNA, 19 nt, Homo sapiens
  misc_RNA (1)...(19): siRNA sense strand
ucugaaaggcuggcugaaa

SEQ ID NO: 1489286 - RNA, 19 nt, Homo sapiens
  misc_RNA (1)...(19): siRNA sense strand
ucaagagacauggcuucua

SEQ ID NO: 1489287 - RNA, 19 nt, Homo sapiens
  misc_RNA (1)...(19): siRNA sense strand
ucucagguuucccagacaa

SEQ ID NO: 1489288 - RNA, 19 nt, Homo sapiens
  misc_RNA (1)...(19): siRNA sense strand
ccauaccuccugaaauauc

SEQ ID NO: 1489289 - RNA, 19 nt, Homo sapiens
  misc_RNA (1)...(19): siRNA sense strand
cuucugcaaugauguccuu

SEQ ID NO: 1489290 - RNA, 19 nt, Homo sapiens
  misc_RNA (1)...(19): siRNA sense strand
ugugacuucugcaaugaug

SEQ ID NO: 1489291 - RNA, 19 nt, Homo sapiens
  misc_RNA (1)...(19): siRNA sense strand
ggagcaucuugugggauug

SEQ ID NO: 1489292 - RNA, 19 nt, Homo sapiens
  misc_RNA (1)...(19): siRNA sense strand
gcucucaagcucccacauc

SEQ ID NO: 1489293 - RNA, 19 nt, Homo sapiens
  misc_RNA (1)...(19): siRNA sense strand
gguggacucugugccuaca

SEQ ID NO: 1489294 - RNA, 19 nt, Homo sapiens
  misc_RNA (1)...(19): siRNA sense strand
gucacggccugaacuacug

SEQ ID NO: 1489295 - RNA, 19 nt, Homo sapiens
  misc_RNA (1)...(19): siRNA sense strand
gagccaaguaccucaagag

SEQ ID NO: 1489296 - RNA, 19 nt, Homo sapiens
  misc_RNA (1)...(19): siRNA sense strand
gacgucacggccugaacua

SEQ ID NO: 1489297 - RNA, 19 nt, Homo sapiens
  misc_RNA (1)...(19): siRNA sense strand
gaacuacccuguauaucaa

SEQ ID NO: 1489298 - RNA, 19 nt, Homo sapiens
  misc_RNA (1)...(19): siRNA sense strand
gaagauugcuaacaucaca

SEQ ID NO: 1489299 - RNA, 19 nt, Homo sapiens
  misc_RNA (1)...(19): siRNA sense strand
caaguggaauacaaggaua

SEQ ID NO: 1489300 - RNA, 19 nt, Homo sapiens
  misc_RNA (1)...(19): siRNA sense strand
ggacagugcacaacuucua

SEQ ID NO: 1489301 - RNA, 19 nt, Homo sapiens
  misc_RNA (1)...(19): siRNA sense strand
caucauaacccugcuguuu

SEQ ID NO: 1489302 - RNA, 19 nt, Homo sapiens
  misc_RNA (1)...(19): siRNA sense strand
cgacaguucuuccaucuac

SEQ ID NO: 1489303 - RNA, 19 nt, Homo sapiens
  misc_RNA (1)...(19): siRNA sense strand
ugaagucccucaucuccuu

SEQ ID NO: 1489304 - RNA, 19 nt, Homo sapiens
  misc_RNA (1)...(19): siRNA sense strand
ugaacuacccuguauauca

SEQ ID NO: 1489305 - RNA, 19 nt, Homo sapiens
  misc_RNA (1)...(19): siRNA sense strand
ggucucaauuaugcuguua

SEQ ID NO: 1489306 - RNA, 19 nt, Homo sapiens
  misc_RNA (1)...(19): siRNA sense strand
gaggaggcauacucagaga

SEQ ID NO: 1489307 - RNA, 19 nt, Homo sapiens
  misc_RNA (1)...(19): siRNA sense strand
cccuguauaucaagaauuu

SEQ ID NO: 1489308 - RNA, 19 nt, Homo sapiens
  misc_RNA (1)...(19): siRNA sense strand
gcucugaagucccucaucu

SEQ ID NO: 1489309 - RNA, 19 nt, Homo sapiens
  misc_RNA (1)...(19): siRNA sense strand
gggaguggcugcgauaugg

SEQ ID NO: 1489310 - RNA, 19 nt, Homo sapiens
  misc_RNA (1)...(19): siRNA sense strand
ggugaacuacccuguauau

SEQ ID NO: 1489311 - RNA, 19 nt, Homo sapiens
  misc_RNA (1)...(19): siRNA sense strand
ccucaucuccuuccucauu

SEQ ID NO: 1489312 - RNA, 19 nt, Homo sapiens
  misc_RNA (1)...(19): siRNA sense strand
ucuccuuccucauucuuua

SEQ ID NO: 1489313 - RNA, 19 nt, Homo sapiens
  misc_RNA (1)...(19): siRNA sense strand
gcacaacuucuacuacucu

SEQ ID NO: 1489314 - RNA, 19 nt, Homo sapiens
  misc_RNA (1)...(19): siRNA sense strand
gcucuguccugaucuccuu

SEQ ID NO: 1489315 - RNA, 19 nt, Homo sapiens
  misc_RNA (1)...(19): siRNA sense strand
ggaggcauacucagagaau

SEQ ID NO: 1489316 - RNA, 19 nt, Homo sapiens
  misc_RNA (1)...(19): siRNA sense strand
ggaacaugaccuacaagug

SEQ ID NO: 1489317 - RNA, 19 nt, Homo sapiens
  misc_RNA (1)...(19): siRNA sense strand
gaauacaaggauagaaaca

SEQ ID NO: 1489318 - RNA, 19 nt, Homo sapiens
  misc_RNA (1)...(19): siRNA sense strand
gugcacaacuucuacuacu

SEQ ID NO: 1489319 - RNA, 19 nt, Homo sapiens
  misc_RNA (1)...(19): siRNA sense strand
gugugaagauugcuaacau

SEQ ID NO: 1489320 - RNA, 19 nt, Homo sapiens
  misc_RNA (1)...(19): siRNA sense strand
ucaguguccuguucugugu

SEQ ID NO: 1489321 - RNA, 19 nt, Homo sapiens
  misc_RNA (1)...(19): siRNA sense strand
uggaauacaaggauagaaa

SEQ ID NO: 1489322 - RNA, 19 nt, Homo sapiens
  misc_RNA (1)...(19): siRNA sense strand
cuggucaucuggucaauuc

SEQ ID NO: 1489323 - RNA, 19 nt, Homo sapiens
  misc_RNA (1)...(19): siRNA sense strand
gcagucuaccugugcauau

SEQ ID NO: 1489324 - RNA, 19 nt, Homo sapiens
  misc_RNA (1)...(19): siRNA sense strand
ggaauacaaggauagaaac

SEQ ID NO: 1489325 - RNA, 19 nt, Homo sapiens
  misc_RNA (1)...(19): siRNA sense strand
guugggcucuguccugauc

SEQ ID NO: 1489326 - RNA, 19 nt, Homo sapiens
  misc_RNA (1)...(19): siRNA sense strand
uugcugcccuuggauauga

SEQ ID NO: 1489327 - RNA, 19 nt, Homo sapiens
  misc_RNA (1)...(19): siRNA sense strand
ugacggccuucuucguguu

SEQ ID NO: 1489328 - RNA, 19 nt, Homo sapiens
  misc_RNA (1)...(19): siRNA sense strand
gugaagauugcuaacauca

SEQ ID NO: 1489329 - RNA, 19 nt, Homo sapiens
  misc_RNA (1)...(19): siRNA sense strand
cugggaacaugaccuacaa

SEQ ID NO: 1489330 - RNA, 19 nt, Homo sapiens
  misc_RNA (1)...(19): siRNA sense strand
gccgacaguucuuccaucu

SEQ ID NO: 1489331 - RNA, 19 nt, Homo sapiens
  misc_RNA (1)...(19): siRNA sense strand
gaggcauacucagagaaug

SEQ ID NO: 1489332 - RNA, 19 nt, Homo sapiens
  misc_RNA (1)...(19): siRNA sense strand
cccagaaggucgaguacuc

SEQ ID NO: 1489333 - RNA, 19 nt, Homo sapiens
  misc_RNA (1)...(19): siRNA sense strand
uuucuggucucaauuaugc

SEQ ID NO: 1489334 - RNA, 19 nt, Homo sapiens
  misc_RNA (1)...(19): siRNA sense strand
ccuguucugugugaagauu

SEQ ID NO: 1489335 - RNA, 19 nt, Homo sapiens
  misc_RNA (1)...(19): siRNA sense strand
caaggauagaaacauacua

SEQ ID NO: 1489336 - RNA, 19 nt, Homo sapiens
  misc_RNA (1)...(19): siRNA sense strand
aaacuggucaucuggucaa

SEQ ID NO: 1489337 - RNA, 19 nt, Homo sapiens
  misc_RNA (1)...(19): siRNA sense strand
uacuggccauggcaaauug

SEQ ID NO: 1489338 - RNA, 19 nt, Homo sapiens
  misc_RNA (1)...(19): siRNA sense strand
caaaauuuaucuccaugca

SEQ ID NO: 1489339 - RNA, 19 nt, Homo sapiens
  misc_RNA (1)...(19): siRNA sense strand
uuuaugcucuguccuuucu

SEQ ID NO: 1489340 - RNA, 19 nt, Homo sapiens
  misc_RNA (1)...(19): siRNA sense strand
gggaacaugaccuacaagu

SEQ ID NO: 1489341 - RNA, 19 nt, Homo sapiens
  misc_RNA (1)...(19): siRNA sense strand
uuacuggccauggcaaauu

SEQ ID NO: 1489342 - RNA, 19 nt, Homo sapiens
  misc_RNA (1)...(19): siRNA sense strand
ugugaagauugcuaacauc

SEQ ID NO: 1489343 - RNA, 19 nt, Homo sapiens
  misc_RNA (1)...(19): siRNA sense strand
uaugcucuguccuuucugu

SEQ ID NO: 1489344 - RNA, 19 nt, Homo sapiens
  misc_RNA (1)...(19): siRNA sense strand
acaaguggaauacaaggau

SEQ ID NO: 1489345 - RNA, 19 nt, Homo sapiens
  misc_RNA (1)...(19): siRNA sense strand
ucuuuaugcucuguccuuu

SEQ ID NO: 1489346 - RNA, 19 nt, Homo sapiens
  misc_RNA (1)...(19): siRNA sense strand
gaaaggaacugaaagagau

SEQ ID NO: 1489347 - RNA, 19 nt, Homo sapiens
  misc_RNA (1)...(19): siRNA sense strand
gcagaaacgugauuauaga

SEQ ID NO: 1489348 - RNA, 19 nt, Homo sapiens
  misc_RNA (1)...(19): siRNA sense strand
ccaaggagcuagaagauau

SEQ ID NO: 1489349 - RNA, 19 nt, Homo sapiens
  misc_RNA (1)...(19): siRNA sense strand
gcagaaagaugaggaagga

SEQ ID NO: 1489350 - RNA, 19 nt, Homo sapiens
  misc_RNA (1)...(19): siRNA sense strand
gaaaggauccaguaaguca

SEQ ID NO: 1489351 - RNA, 19 nt, Homo sapiens
  misc_RNA (1)...(19): siRNA sense strand
aaauggagcuugcaggaaa

SEQ ID NO: 1489352 - RNA, 19 nt, Homo sapiens
  misc_RNA (1)...(19): siRNA sense strand
gcaacaagaugggaaagga

SEQ ID NO: 1489353 - RNA, 19 nt, Homo sapiens
  misc_RNA (1)...(19): siRNA sense strand
ggagggagauguaacugau

SEQ ID NO: 1489354 - RNA, 19 nt, Homo sapiens
  misc_RNA (1)...(19): siRNA sense strand
ggaaaggaacugaaagaga

SEQ ID NO: 1489355 - RNA, 19 nt, Homo sapiens
  misc_RNA (1)...(19): siRNA sense strand
cagaugagcagaaagauga

SEQ ID NO: 1489356 - RNA, 19 nt, Homo sapiens
  misc_RNA (1)...(19): siRNA sense strand
cgaauguccuugaagaguu

SEQ ID NO: 1489357 - RNA, 19 nt, Homo sapiens
  misc_RNA (1)...(19): siRNA sense strand
uauugcagcugacauuaaa

SEQ ID NO: 1489358 - RNA, 19 nt, Homo sapiens
  misc_RNA (1)...(19): siRNA sense strand
ggaaggagauggagaaaag

SEQ ID NO: 1489359 - RNA, 19 nt, Homo sapiens
  misc_RNA (1)...(19): siRNA sense strand
gaauguccuugaagaguuc

SEQ ID NO: 1489360 - RNA, 19 nt, Homo sapiens
  misc_RNA (1)...(19): siRNA sense strand
gacaaaggagggagaugua

SEQ ID NO: 1489361 - RNA, 19 nt, Homo sapiens
  misc_RNA (1)...(19): siRNA sense strand
caaaagagguggcaacaag

SEQ ID NO: 1489362 - RNA, 19 nt, Homo sapiens
  misc_RNA (1)...(19): siRNA sense strand
gcaggaaaggauccaguaa

SEQ ID NO: 1489363 - RNA, 19 nt, Homo sapiens
  misc_RNA (1)...(19): siRNA sense strand
gauauugcagcugacauua

SEQ ID NO: 1489364 - RNA, 19 nt, Homo sapiens
  misc_RNA (1)...(19): siRNA sense strand
ucacagaugagcagaaaga

SEQ ID NO: 1489365 - RNA, 19 nt, Homo sapiens
  misc_RNA (1)...(19): siRNA sense strand
gaaauggagcuugcaggaa

SEQ ID NO: 1489366 - RNA, 19 nt, Homo sapiens
  misc_RNA (1)...(19): siRNA sense strand
gaugggaaaggaacugaaa

SEQ ID NO: 1489367 - RNA, 19 nt, Homo sapiens
  misc_RNA (1)...(19): siRNA sense strand
gagaacaacacaacuaaaa

SEQ ID NO: 1489368 - RNA, 19 nt, Homo sapiens
  misc_RNA (1)...(19): siRNA sense strand
ggcagaaacgugauuauag

SEQ ID NO: 1489369 - RNA, 19 nt, Homo sapiens
  misc_RNA (1)...(19): siRNA sense strand
gaggaaagaaaaccuguua

SEQ ID NO: 1489370 - RNA, 19 nt, Homo sapiens
  misc_RNA (1)...(19): siRNA sense strand
gaaagaugaggaaggagau

SEQ ID NO: 1489371 - RNA, 19 nt, Homo sapiens
  misc_RNA (1)...(19): siRNA sense strand
ucucugaaguugccgaaug

SEQ ID NO: 1489372 - RNA, 19 nt, Homo sapiens
  misc_RNA (1)...(19): siRNA sense strand
aggaaaggauccaguaagu

SEQ ID NO: 1489373 - RNA, 19 nt, Homo sapiens
  misc_RNA (1)...(19): siRNA sense strand
caacaagaugggaaaggaa

SEQ ID NO: 1489374 - RNA, 19 nt, Homo sapiens
  misc_RNA (1)...(19): siRNA sense strand
gcagcgaaauaaagaacag

SEQ ID NO: 1489375 - RNA, 19 nt, Homo sapiens
  misc_RNA (1)...(19): siRNA sense strand
gaaguugccgaauguccuu

SEQ ID NO: 1489376 - RNA, 19 nt, Homo sapiens
  misc_RNA (1)...(19): siRNA sense strand
agggagauguaacugauga

SEQ ID NO: 1489377 - RNA, 19 nt, Homo sapiens
  misc_RNA (1)...(19): siRNA sense strand
ccaguuggagguucaaguu

SEQ ID NO: 1489378 - RNA, 19 nt, Homo sapiens
  misc_RNA (1)...(19): siRNA sense strand
guuggagguucaaguuaug

SEQ ID NO: 1489379 - RNA, 19 nt, Homo sapiens
  misc_RNA (1)...(19): siRNA sense strand
agauguaacugaugagcau

SEQ ID NO: 1489380 - RNA, 19 nt, Homo sapiens
  misc_RNA (1)...(19): siRNA sense strand
gaagauauugcagcugaca

SEQ ID NO: 1489381 - RNA, 19 nt, Homo sapiens
  misc_RNA (1)...(19): siRNA sense strand
gaaaagauugcaaaagcuu

SEQ ID NO: 1489382 - RNA, 19 nt, Homo sapiens
  misc_RNA (1)...(19): siRNA sense strand
ugaggaaggagauggagaa

SEQ ID NO: 1489383 - RNA, 19 nt, Homo sapiens
  misc_RNA (1)...(19): siRNA sense strand
cagaaacgugauuauagaa

SEQ ID NO: 1489384 - RNA, 19 nt, Homo sapiens
  misc_RNA (1)...(19): siRNA sense strand
ggagcuagaagauauugca

SEQ ID NO: 1489385 - RNA, 19 nt, Homo sapiens
  misc_RNA (1)...(19): siRNA sense strand
ugccgaauguccuugaaga

SEQ ID NO: 1489386 - RNA, 19 nt, Homo sapiens
  misc_RNA (1)...(19): siRNA sense strand
aggcagaaacgugauuaua

SEQ ID NO: 1489387 - RNA, 19 nt, Homo sapiens
  misc_RNA (1)...(19): siRNA sense strand
caaggagcuagaagauauu

SEQ ID NO: 1489388 - RNA, 19 nt, Homo sapiens
  misc_RNA (1)...(19): siRNA sense strand
aaaggcagaaacgugauua

SEQ ID NO: 1489389 - RNA, 19 nt, Homo sapiens
  misc_RNA (1)...(19): siRNA sense strand
ggaaaggauccaguaaguc

SEQ ID NO: 1489390 - RNA, 19 nt, Homo sapiens
  misc_RNA (1)...(19): siRNA sense strand
ugagaacaacacaacuaaa

SEQ ID NO: 1489391 - RNA, 19 nt, Homo sapiens
  misc_RNA (1)...(19): siRNA sense strand
caguuggagguucaaguua

SEQ ID NO: 1489392 - RNA, 19 nt, Homo sapiens
  misc_RNA (1)...(19): siRNA sense strand
aguuggagguucaaguuau

SEQ ID NO: 1489393 - RNA, 19 nt, Homo sapiens
  misc_RNA (1)...(19): siRNA sense strand
ggaaagaaaaccuguuaca

SEQ ID NO: 1489394 - RNA, 19 nt, Homo sapiens
  misc_RNA (1)...(19): siRNA sense strand
gcuugcagcgaaauaaaga

SEQ ID NO: 1489395 - RNA, 19 nt, Homo sapiens
  misc_RNA (1)...(19): siRNA sense strand
acaaaggagggagauguaa

SEQ ID NO: 1489396 - RNA, 19 nt, Homo sapiens
  misc_RNA (1)...(19): siRNA sense strand
gcgaaauaaagaacagaau

SEQ ID NO: 1489397 - RNA, 19 nt, Homo sapiens
  misc_RNA (1)...(19): siRNA sense strand
gaggaaggagauggagaaa

SEQ ID NO: 1489398 - RNA, 19 nt, Homo sapiens
  misc_RNA (1)...(19): siRNA sense strand
agauauugcagcugacauu

SEQ ID NO: 1489399 - RNA, 19 nt, Homo sapiens
  misc_RNA (1)...(19): siRNA sense strand
gagaaaaggaagaacaaau

SEQ ID NO: 1489400 - RNA, 19 nt, Homo sapiens
  misc_RNA (1)...(19): siRNA sense strand
uugagaacaacacaacuaa

SEQ ID NO: 1489401 - RNA, 19 nt, Homo sapiens
  misc_RNA (1)...(19): siRNA sense strand
aaagcuugcagcgaaauaa

SEQ ID NO: 1489402 - RNA, 19 nt, Homo sapiens
  misc_RNA (1)...(19): siRNA sense strand
agacaaaggagggagaugu

SEQ ID NO: 1489403 - RNA, 19 nt, Homo sapiens
  misc_RNA (1)...(19): siRNA sense strand
aaagagguggcaacaagau

SEQ ID NO: 1489404 - RNA, 19 nt, Homo sapiens
  misc_RNA (1)...(19): siRNA sense strand
uuugagaacaacacaacua

SEQ ID NO: 1489405 - RNA, 19 nt, Homo sapiens
  misc_RNA (1)...(19): siRNA sense strand
aaaggaacugaaagagauu

SEQ ID NO: 1489406 - RNA, 19 nt, Homo sapiens
  misc_RNA (1)...(19): siRNA sense strand
caaaggagggagauguaac

SEQ ID NO: 1489407 - RNA, 19 nt, Homo sapiens
  misc_RNA (1)...(19): siRNA sense strand
ugggaaaggaacugaaaga

SEQ ID NO: 1489408 - RNA, 19 nt, Homo sapiens
  misc_RNA (1)...(19): siRNA sense strand
caggaaaggauccaguaag

SEQ ID NO: 1489409 - RNA, 19 nt, Homo sapiens
  misc_RNA (1)...(19): siRNA sense strand
ggagcuugcaggaaaggau

SEQ ID NO: 1489410 - RNA, 19 nt, Homo sapiens
  misc_RNA (1)...(19): siRNA sense strand
ggaaccagcuuaaagaauc

SEQ ID NO: 1489411 - RNA, 19 nt, Homo sapiens
  misc_RNA (1)...(19): siRNA sense strand
gcaagcuugugcugucaua

SEQ ID NO: 1489412 - RNA, 19 nt, Homo sapiens
  misc_RNA (1)...(19): siRNA sense strand
ggacuuugcucugacaaca

SEQ ID NO: 1489413 - RNA, 19 nt, Homo sapiens
  misc_RNA (1)...(19): siRNA sense strand
ccacaacagucgaguccaa

SEQ ID NO: 1489414 - RNA, 19 nt, Homo sapiens
  misc_RNA (1)...(19): siRNA sense strand
gggcucaguuucccuguug

SEQ ID NO: 1489415 - RNA, 19 nt, Homo sapiens
  misc_RNA (1)...(19): siRNA sense strand
gaaccagcuuaaagaaucu

SEQ ID NO: 1489416 - RNA, 19 nt, Homo sapiens
  misc_RNA (1)...(19): siRNA sense strand
cucaaacucuccaggaauu

SEQ ID NO: 1489417 - RNA, 19 nt, Homo sapiens
  misc_RNA (1)...(19): siRNA sense strand
ucaggaaccagcuuaaaga

SEQ ID NO: 1489418 - RNA, 19 nt, Homo sapiens
  misc_RNA (1)...(19): siRNA sense strand
gaaucuuucuugcuuucuc

SEQ ID NO: 1489419 - RNA, 19 nt, Homo sapiens
  misc_RNA (1)...(19): siRNA sense strand
uggcuggacuuugcucuga

SEQ ID NO: 1489420 - RNA, 19 nt, Homo sapiens
  misc_RNA (1)...(19): siRNA sense strand
gaucacagccccauuucuu

SEQ ID NO: 1489421 - RNA, 19 nt, Homo sapiens
  misc_RNA (1)...(19): siRNA sense strand
caacagucgaguccaaauc

SEQ ID NO: 1489422 - RNA, 19 nt, Homo sapiens
  misc_RNA (1)...(19): siRNA sense strand
caggaaccagcuuaaagaa

SEQ ID NO: 1489423 - RNA, 19 nt, Homo sapiens
  misc_RNA (1)...(19): siRNA sense strand
gcuuggcuccgagguauuu

SEQ ID NO: 1489424 - RNA, 19 nt, Homo sapiens
  misc_RNA (1)...(19): siRNA sense strand
uggcuuggcuccgagguau

SEQ ID NO: 1489425 - RNA, 19 nt, Homo sapiens
  misc_RNA (1)...(19): siRNA sense strand
gcuggacuuugcucugaca

SEQ ID NO: 1489426 - RNA, 19 nt, Homo sapiens
  misc_RNA (1)...(19): siRNA sense strand
gggccaguaucagcuguuc

SEQ ID NO: 1489427 - RNA, 19 nt, Homo sapiens
  misc_RNA (1)...(19): siRNA sense strand
gugcaagcuugugcuguca

SEQ ID NO: 1489428 - RNA, 19 nt, Homo sapiens
  misc_RNA (1)...(19): siRNA sense strand
acagucgaguccaaaucaa

SEQ ID NO: 1489429 - RNA, 19 nt, Homo sapiens
  misc_RNA (1)...(19): siRNA sense strand
gucaggaaccagcuuaaag

SEQ ID NO: 1489430 - RNA, 19 nt, Homo sapiens
  misc_RNA (1)...(19): siRNA sense strand
aaucuuucuugcuuucuca

SEQ ID NO: 1489431 - RNA, 19 nt, Homo sapiens
  misc_RNA (1)...(19): siRNA sense strand
gaagagaacugcacagcaa

SEQ ID NO: 1489432 - RNA, 19 nt, Homo sapiens
  misc_RNA (1)...(19): siRNA sense strand
gaggaaagcugugaaaguu

SEQ ID NO: 1489433 - RNA, 19 nt, Homo sapiens
  misc_RNA (1)...(19): siRNA sense strand
agaaccaacuuguguauua

SEQ ID NO: 1489434 - RNA, 19 nt, Homo sapiens
  misc_RNA (1)...(19): siRNA sense strand
ggaacaacuucaccaauga

SEQ ID NO: 1489435 - RNA, 19 nt, Homo sapiens
  misc_RNA (1)...(19): siRNA sense strand
ccagggcacugaagaagua

SEQ ID NO: 1489436 - RNA, 19 nt, Homo sapiens
  misc_RNA (1)...(19): siRNA sense strand
gggaacaacuucaccaaug

SEQ ID NO: 1489437 - RNA, 19 nt, Homo sapiens
  misc_RNA (1)...(19): siRNA sense strand
caacauaccaggcaacuuc

SEQ ID NO: 1489438 - RNA, 19 nt, Homo sapiens
  misc_RNA (1)...(19): siRNA sense strand
ggaaagcugugaaaguucu

SEQ ID NO: 1489439 - RNA, 19 nt, Homo sapiens
  misc_RNA (1)...(19): siRNA sense strand
agacaacagugaugaggaa

SEQ ID NO: 1489440 - RNA, 19 nt, Homo sapiens
  misc_RNA (1)...(19): siRNA sense strand
cgacaagagugaugagaag

SEQ ID NO: 1489441 - RNA, 19 nt, Homo sapiens
  misc_RNA (1)...(19): siRNA sense strand
gcaagaacggccucuguau

SEQ ID NO: 1489442 - RNA, 19 nt, Homo sapiens
  misc_RNA (1)...(19): siRNA sense strand
caagaacggccucuguauu

SEQ ID NO: 1489443 - RNA, 19 nt, Homo sapiens
  misc_RNA (1)...(19): siRNA sense strand
cggcauccauugcaucauu

SEQ ID NO: 1489444 - RNA, 19 nt, Homo sapiens
  misc_RNA (1)...(19): siRNA sense strand
gcagaaugcgucggaagua

SEQ ID NO: 1489445 - RNA, 19 nt, Homo sapiens
  misc_RNA (1)...(19): siRNA sense strand
gaaccaacuuguguauuac

SEQ ID NO: 1489446 - RNA, 19 nt, Homo sapiens
  misc_RNA (1)...(19): siRNA sense strand
ucaauaauggcauccagua

SEQ ID NO: 1489447 - RNA, 19 nt, Homo sapiens
  misc_RNA (1)...(19): siRNA sense strand
ucaccuacaacgucaauaa

SEQ ID NO: 1489448 - RNA, 19 nt, Homo sapiens
  misc_RNA (1)...(19): siRNA sense strand
aagaacggccucuguauug

SEQ ID NO: 1489449 - RNA, 19 nt, Homo sapiens
  misc_RNA (1)...(19): siRNA sense strand
gcagugggcagguguuugu

SEQ ID NO: 1489450 - RNA, 19 nt, Homo sapiens
  misc_RNA (1)...(19): siRNA sense strand
gaugaggaaagcugugaaa

SEQ ID NO: 1489451 - RNA, 19 nt, Homo sapiens
  misc_RNA (1)...(19): siRNA sense strand
gggcacugaagaaguauaa

SEQ ID NO: 1489452 - RNA, 19 nt, Homo sapiens
  misc_RNA (1)...(19): siRNA sense strand
ucagagaaccaacuugugu

SEQ ID NO: 1489453 - RNA, 19 nt, Homo sapiens
  misc_RNA (1)...(19): siRNA sense strand
ccagaggccugcgugguau

SEQ ID NO: 1489454 - RNA, 19 nt, Homo sapiens
  misc_RNA (1)...(19): siRNA sense strand
auaauggcauccaguaugu

SEQ ID NO: 1489455 - RNA, 19 nt, Homo sapiens
  misc_RNA (1)...(19): siRNA sense strand
caacagugaugaggaaagc

SEQ ID NO: 1489456 - RNA, 19 nt, Homo sapiens
  misc_RNA (1)...(19): siRNA sense strand
ccuacaacgucaauaaugg

SEQ ID NO: 1489457 - RNA, 19 nt, Homo sapiens
  misc_RNA (1)...(19): siRNA sense strand
agaacggccucuguauuga

SEQ ID NO: 1489458 - RNA, 19 nt, Homo sapiens
  misc_RNA (1)...(19): siRNA sense strand
caucaccuaugccaucauc

SEQ ID NO: 1489459 - RNA, 19 nt, Homo sapiens
  misc_RNA (1)...(19): siRNA sense strand
gggcagguguuugugacuu

SEQ ID NO: 1489460 - RNA, 19 nt, Homo sapiens
  misc_RNA (1)...(19): siRNA sense strand
cagagaaccaacuugugua

SEQ ID NO: 1489461 - RNA, 19 nt, Homo sapiens
  misc_RNA (1)...(19): siRNA sense strand
gaacaacuucaccaaugag

SEQ ID NO: 1489462 - RNA, 19 nt, Homo sapiens
  misc_RNA (1)...(19): siRNA sense strand
ccaaggcuaagucgaaaug

SEQ ID NO: 1489463 - RNA, 19 nt, Homo sapiens
  misc_RNA (1)...(19): siRNA sense strand
cagaaugcgucggaaguag

SEQ ID NO: 1489464 - RNA, 19 nt, Homo sapiens
  misc_RNA (1)...(19): siRNA sense strand
caccaaugagugcaacaua

SEQ ID NO: 1489465 - RNA, 19 nt, Homo sapiens
  misc_RNA (1)...(19): siRNA sense strand
gcugugaaaguucucaaga

SEQ ID NO: 1489466 - RNA, 19 nt, Homo sapiens
  misc_RNA (1)...(19): siRNA sense strand
aauaauggcauccaguaug

SEQ ID NO: 1489467 - RNA, 19 nt, Homo sapiens
  misc_RNA (1)...(19): siRNA sense strand
gcagguguuugugacuuca

SEQ ID NO: 1489468 - RNA, 19 nt, Homo sapiens
  misc_RNA (1)...(19): siRNA sense strand
ggcauccauugcaucauug

SEQ ID NO: 1489469 - RNA, 19 nt, Homo sapiens
  misc_RNA (1)...(19): siRNA sense strand
caauaauggcauccaguau

SEQ ID NO: 1489470 - RNA, 19 nt, Homo sapiens
  misc_RNA (1)...(19): siRNA sense strand
gagaaccaacuuguguauu

SEQ ID NO: 1489471 - RNA, 19 nt, Homo sapiens
  misc_RNA (1)...(19): siRNA sense strand
ugaggaaagcugugaaagu

SEQ ID NO: 1489472 - RNA, 19 nt, Homo sapiens
  misc_RNA (1)...(19): siRNA sense strand
gcgauggacagaauaacug

SEQ ID NO: 1489473 - RNA, 19 nt, Homo sapiens
  misc_RNA (1)...(19): siRNA sense strand
cacggaaucucugaaccaa

SEQ ID NO: 1489474 - RNA, 19 nt, Homo sapiens
  misc_RNA (1)...(19): siRNA sense strand
gcaacuucaugugcagcaa

SEQ ID NO: 1489475 - RNA, 19 nt, Homo sapiens
  misc_RNA (1)...(19): siRNA sense strand
gaagcggaacaaccucaug

SEQ ID NO: 1489476 - RNA, 19 nt, Homo sapiens
  misc_RNA (1)...(19): siRNA sense strand
uggcagcgaugaagagaac

SEQ ID NO: 1489477 - RNA, 19 nt, Homo sapiens
  misc_RNA (1)...(19): siRNA sense strand
ggcagguguuugugacuuc

SEQ ID NO: 1489478 - RNA, 19 nt, Homo sapiens
  misc_RNA (1)...(19): siRNA sense strand
cgaaauguggcccaaccuu

SEQ ID NO: 1489479 - RNA, 19 nt, Homo sapiens
  misc_RNA (1)...(19): siRNA sense strand
caucggcagcuccgucauu

SEQ ID NO: 1489480 - RNA, 19 nt, Homo sapiens
  misc_RNA (1)...(19): siRNA sense strand
ugcaagaacggccucugua

SEQ ID NO: 1489481 - RNA, 19 nt, Homo sapiens
  misc_RNA (1)...(19): siRNA sense strand
ccaccgcccuacucuucug

SEQ ID NO: 1489482 - RNA, 19 nt, Homo sapiens
  misc_RNA (1)...(19): siRNA sense strand
aagcggaacaaccucauga

SEQ ID NO: 1489483 - RNA, 19 nt, Homo sapiens
  misc_RNA (1)...(19): siRNA sense strand
agagaaccaacuuguguau

SEQ ID NO: 1489484 - RNA, 19 nt, Homo sapiens
  misc_RNA (1)...(19): siRNA sense strand
gaacggccucuguauugac

SEQ ID NO: 1489485 - RNA, 19 nt, Homo sapiens
  misc_RNA (1)...(19): siRNA sense strand
aaggcuaagucgaaaugug

SEQ ID NO: 1489486 - RNA, 19 nt, Homo sapiens
  misc_RNA (1)...(19): siRNA sense strand
caacuucaugugcagcaau

SEQ ID NO: 1489487 - RNA, 19 nt, Homo sapiens
  misc_RNA (1)...(19): siRNA sense strand
guuugugacuucagagaac

SEQ ID NO: 1489488 - RNA, 19 nt, Homo sapiens
  misc_RNA (1)...(19): siRNA sense strand
caauggguuugaggacugu

SEQ ID NO: 1489489 - RNA, 19 nt, Homo sapiens
  misc_RNA (1)...(19): siRNA sense strand
ccugacugcuucgacaaga

SEQ ID NO: 1489490 - RNA, 19 nt, Homo sapiens
  misc_RNA (1)...(19): siRNA sense strand
gauggcagcgaugaagaga

SEQ ID NO: 1489491 - RNA, 19 nt, Homo sapiens
  misc_RNA (1)...(19): siRNA sense strand
gcacgaagguccacauaaa

SEQ ID NO: 1489492 - RNA, 19 nt, Homo sapiens
  misc_RNA (1)...(19): siRNA sense strand
aaacaaaccugucuucaug

SEQ ID NO: 1489493 - RNA, 19 nt, Homo sapiens
  misc_RNA (1)...(19): siRNA sense strand
gccaauuucuccaacuuua

SEQ ID NO: 1489494 - RNA, 19 nt, Homo sapiens
  misc_RNA (1)...(19): siRNA sense strand
gggcagugaucaaccauuu

SEQ ID NO: 1489495 - RNA, 19 nt, Homo sapiens
  misc_RNA (1)...(19): siRNA sense strand
uauaauaucugggcaguga

SEQ ID NO: 1489496 - RNA, 19 nt, Homo sapiens
  misc_RNA (1)...(19): siRNA sense strand
uaaauuccauugagucguu

SEQ ID NO: 1489497 - RNA, 19 nt, Homo sapiens
  misc_RNA (1)...(19): siRNA sense strand
gcucuggguauuauuauua

SEQ ID NO: 1489498 - RNA, 19 nt, Homo sapiens
  misc_RNA (1)...(19): siRNA sense strand
gcuauuagauucagcuauc

SEQ ID NO: 1489499 - RNA, 19 nt, Homo sapiens
  misc_RNA (1)...(19): siRNA sense strand
ucauagcacugguaaauuc

SEQ ID NO: 1489500 - RNA, 19 nt, Homo sapiens
  misc_RNA (1)...(19): siRNA sense strand
gaaggaaacaugacuugga

SEQ ID NO: 1489501 - RNA, 19 nt, Homo sapiens
  misc_RNA (1)...(19): siRNA sense strand
cugcaaagcuauuagauuc

SEQ ID NO: 1489502 - RNA, 19 nt, Homo sapiens
  misc_RNA (1)...(19): siRNA sense strand
gaaacaagaagcuaaagca

SEQ ID NO: 1489503 - RNA, 19 nt, Homo sapiens
  misc_RNA (1)...(19): siRNA sense strand
guuaaucuguucuuugugu

SEQ ID NO: 1489504 - RNA, 19 nt, Homo sapiens
  misc_RNA (1)...(19): siRNA sense strand
ggaaacaugacuuggaaga

SEQ ID NO: 1489505 - RNA, 19 nt, Homo sapiens
  misc_RNA (1)...(19): siRNA sense strand
aaacaugacuuggaagauc

SEQ ID NO: 1489506 - RNA, 19 nt, Homo sapiens
  misc_RNA (1)...(19): siRNA sense strand
gaagagugcaauguacuuu

SEQ ID NO: 1489507 - RNA, 19 nt, Homo sapiens
  misc_RNA (1)...(19): siRNA sense strand
caugguagcaaacuuagua

SEQ ID NO: 1489508 - RNA, 19 nt, Homo sapiens
  misc_RNA (1)...(19): siRNA sense strand
gugguuacauuuguuauug

SEQ ID NO: 1489509 - RNA, 19 nt, Homo sapiens
  misc_RNA (1)...(19): siRNA sense strand
uuaguacccuucacucuga

SEQ ID NO: 1489510 - RNA, 19 nt, Homo sapiens
  misc_RNA (1)...(19): siRNA sense strand
gaauuugaaggaaacauga

SEQ ID NO: 1489511 - RNA, 19 nt, Homo sapiens
  misc_RNA (1)...(19): siRNA sense strand
ugacuuggaagaucaaauu

SEQ ID NO: 1489512 - RNA, 19 nt, Homo sapiens
  misc_RNA (1)...(19): siRNA sense strand
cuacuacccucagcauauu

SEQ ID NO: 1489513 - RNA, 19 nt, Homo sapiens
  misc_RNA (1)...(19): siRNA sense strand
gaucuccuuccucuuguua

SEQ ID NO: 1489514 - RNA, 19 nt, Homo sapiens
  misc_RNA (1)...(19): siRNA sense strand
aaggaaacaugacuuggaa

SEQ ID NO: 1489515 - RNA, 19 nt, Homo sapiens
  misc_RNA (1)...(19): siRNA sense strand
gcuacuacccucagcauau

SEQ ID NO: 1489516 - RNA, 19 nt, Homo sapiens
  misc_RNA (1)...(19): siRNA sense strand
gguagugguuacauuuguu

SEQ ID NO: 1489517 - RNA, 19 nt, Homo sapiens
  misc_RNA (1)...(19): siRNA sense strand
gcagcuccgugguaaagga

SEQ ID NO: 1489518 - RNA, 19 nt, Homo sapiens
  misc_RNA (1)...(19): siRNA sense strand
guagugguuacauuuguua

SEQ ID NO: 1489519 - RNA, 19 nt, Homo sapiens
  misc_RNA (1)...(19): siRNA sense strand
gcagugaucaaccauuuca

SEQ ID NO: 1489520 - RNA, 19 nt, Homo sapiens
  misc_RNA (1)...(19): siRNA sense strand
gcaaagcuauuagauucag

SEQ ID NO: 1489521 - RNA, 19 nt, Homo sapiens
  misc_RNA (1)...(19): siRNA sense strand
ugauaucaguuuggaguuu

SEQ ID NO: 1489522 - RNA, 19 nt, Homo sapiens
  misc_RNA (1)...(19): siRNA sense strand
aaacaugaaugagauugug

SEQ ID NO: 1489523 - RNA, 19 nt, Homo sapiens
  misc_RNA (1)...(19): siRNA sense strand
acaaaccugucuucauguu

SEQ ID NO: 1489524 - RNA, 19 nt, Homo sapiens
  misc_RNA (1)...(19): siRNA sense strand
gugauaaacaugaaugaga

SEQ ID NO: 1489525 - RNA, 19 nt, Homo sapiens
  misc_RNA (1)...(19): siRNA sense strand
gcacugguaaauuccauug

SEQ ID NO: 1489526 - RNA, 19 nt, Homo sapiens
  misc_RNA (1)...(19): siRNA sense strand
guuaugugccauuuacuuu

SEQ ID NO: 1489527 - RNA, 19 nt, Homo sapiens
  misc_RNA (1)...(19): siRNA sense strand
ccauaaugauaucaguuug

SEQ ID NO: 1489528 - RNA, 19 nt, Homo sapiens
  misc_RNA (1)...(19): siRNA sense strand
gaauccagcuuuuaauagu

SEQ ID NO: 1489529 - RNA, 19 nt, Homo sapiens
  misc_RNA (1)...(19): siRNA sense strand
aaaccugucuucauguucu

SEQ ID NO: 1489530 - RNA, 19 nt, Homo sapiens
  misc_RNA (1)...(19): siRNA sense strand
uaaccaugguagcaaacuu

SEQ ID NO: 1489531 - RNA, 19 nt, Homo sapiens
  misc_RNA (1)...(19): siRNA sense strand
guguaaacaucucaagaag

SEQ ID NO: 1489532 - RNA, 19 nt, Homo sapiens
  misc_RNA (1)...(19): siRNA sense strand
gguuugcucuggguauuau

SEQ ID NO: 1489533 - RNA, 19 nt, Homo sapiens
  misc_RNA (1)...(19): siRNA sense strand
gguuacauuuguuauugga

SEQ ID NO: 1489534 - RNA, 19 nt, Homo sapiens
  misc_RNA (1)...(19): siRNA sense strand
gaucuccuuugcugaccaa

SEQ ID NO: 1489535 - RNA, 19 nt, Homo sapiens
  misc_RNA (1)...(19): siRNA sense strand
cauaaaagcuuugcaaacu

SEQ ID NO: 1489536 - RNA, 19 nt, Homo sapiens
  misc_RNA (1)...(19): siRNA sense strand
agaugcagcuccgugguaa

SEQ ID NO: 1489537 - RNA, 19 nt, Homo sapiens
  misc_RNA (1)...(19): siRNA sense strand
agaggagaguuaagagugu

SEQ ID NO: 1489538 - RNA, 19 nt, Homo sapiens
  misc_RNA (1)...(19): siRNA sense strand
cuguuaaucuguucuuugu

SEQ ID NO: 1489539 - RNA, 19 nt, Homo sapiens
  misc_RNA (1)...(19): siRNA sense strand
gaaacaugacuuggaagau

SEQ ID NO: 1489540 - RNA, 19 nt, Homo sapiens
  misc_RNA (1)...(19): siRNA sense strand
caaauaugacuguaaccau

SEQ ID NO: 1489541 - RNA, 19 nt, Homo sapiens
  misc_RNA (1)...(19): siRNA sense strand
agauucagcuauccuucaa

SEQ ID NO: 1489542 - RNA, 19 nt, Homo sapiens
  misc_RNA (1)...(19): siRNA sense strand
uacuuucuguccauaauga

SEQ ID NO: 1489543 - RNA, 19 nt, Homo sapiens
  misc_RNA (1)...(19): siRNA sense strand
aaccaugguagcaaacuua

SEQ ID NO: 1489544 - RNA, 19 nt, Homo sapiens
  misc_RNA (1)...(19): siRNA sense strand
gcuguuaaucuguucuuug

SEQ ID NO: 1489545 - RNA, 19 nt, Homo sapiens
  misc_RNA (1)...(19): siRNA sense strand
uguguaaacaucucaagaa

SEQ ID NO: 1489546 - RNA, 19 nt, Homo sapiens
  misc_RNA (1)...(19): siRNA sense strand
gauaucaguuuggaguuuu

SEQ ID NO: 1489547 - RNA, 19 nt, Homo sapiens
  misc_RNA (1)...(19): siRNA sense strand
uaaaagcuuugcaaacugu

SEQ ID NO: 1489548 - RNA, 19 nt, Homo sapiens
  misc_RNA (1)...(19): siRNA sense strand
cagcacgaagguccacaua

SEQ ID NO: 1489549 - RNA, 19 nt, Homo sapiens
  misc_RNA (1)...(19): siRNA sense strand
cuucauagcacugguaaau

SEQ ID NO: 1489550 - RNA, 19 nt, Homo sapiens
  misc_RNA (1)...(19): siRNA sense strand
cacuuaaagaggagaguua

SEQ ID NO: 1489551 - RNA, 19 nt, Homo sapiens
  misc_RNA (1)...(19): siRNA sense strand
ugugaucuccuuccucuug

SEQ ID NO: 1489552 - RNA, 19 nt, Homo sapiens
  misc_RNA (1)...(19): siRNA sense strand
aacaugacuuggaagauca

SEQ ID NO: 1489553 - RNA, 19 nt, Homo sapiens
  misc_RNA (1)...(19): siRNA sense strand
gaguuaagagugucauucu

SEQ ID NO: 1489554 - RNA, 19 nt, Homo sapiens
  misc_RNA (1)...(19): siRNA sense strand
ccauuuacuuucuguccau

SEQ ID NO: 1489555 - RNA, 19 nt, Homo sapiens
  misc_RNA (1)...(19): siRNA sense strand
ccaauuucuccaacuuuau

SEQ ID NO: 1489556 - RNA, 19 nt, Homo sapiens
  misc_RNA (1)...(19): siRNA sense strand
ggaaacaagaagcuaaagc

SEQ ID NO: 1489557 - RNA, 19 nt, Homo sapiens
  misc_RNA (1)...(19): siRNA sense strand
uaugugccauuuacuuucu

SEQ ID NO: 1489558 - RNA, 19 nt, Homo sapiens
  misc_RNA (1)...(19): siRNA sense strand
uaaagaggagaguuaagag

SEQ ID NO: 1489559 - RNA, 19 nt, Homo sapiens
  misc_RNA (1)...(19): siRNA sense strand
cauuuacuuucuguccaua

SEQ ID NO: 1489560 - RNA, 19 nt, Homo sapiens
  misc_RNA (1)...(19): siRNA sense strand
uuaaacugguauucaacug

SEQ ID NO: 1489561 - RNA, 19 nt, Homo sapiens
  misc_RNA (1)...(19): siRNA sense strand
ugcaaacugugaucuccuu

SEQ ID NO: 1489562 - RNA, 19 nt, Homo sapiens
  misc_RNA (1)...(19): siRNA sense strand
ucugguagugguuacauuu

SEQ ID NO: 1489563 - RNA, 19 nt, Homo sapiens
  misc_RNA (1)...(19): siRNA sense strand
gcaaacuuaguacccuuca

SEQ ID NO: 1489564 - RNA, 19 nt, Homo sapiens
  misc_RNA (1)...(19): siRNA sense strand
ugaagagugcaauguacuu

SEQ ID NO: 1489565 - RNA, 19 nt, Homo sapiens
  misc_RNA (1)...(19): siRNA sense strand
uaaacugguauucaacugu

SEQ ID NO: 1489566 - RNA, 19 nt, Homo sapiens
  misc_RNA (1)...(19): siRNA sense strand
gagaguuaagagugucauu

SEQ ID NO: 1489567 - RNA, 19 nt, Homo sapiens
  misc_RNA (1)...(19): siRNA sense strand
ggaaaacaaaccugucuuc

SEQ ID NO: 1489568 - RNA, 19 nt, Homo sapiens
  misc_RNA (1)...(19): siRNA sense strand
cuuguuaugugccauuuac

SEQ ID NO: 1489569 - RNA, 19 nt, Homo sapiens
  misc_RNA (1)...(19): siRNA sense strand
ucauucuggugauguuguu

SEQ ID NO: 1489570 - RNA, 19 nt, Homo sapiens
  misc_RNA (1)...(19): siRNA sense strand
acucugacccuacuaucuu

SEQ ID NO: 1489571 - RNA, 19 nt, Homo sapiens
  misc_RNA (1)...(19): siRNA sense strand
gaaaacaaaccugucuuca

SEQ ID NO: 1489572 - RNA, 19 nt, Homo sapiens
  misc_RNA (1)...(19): siRNA sense strand
ucuccuuccucuuguuaug

SEQ ID NO: 1489573 - RNA, 19 nt, Homo sapiens
  misc_RNA (1)...(19): siRNA sense strand
aagaugcagcuccguggua

SEQ ID NO: 1489574 - RNA, 19 nt, Homo sapiens
  misc_RNA (1)...(19): siRNA sense strand
agaauuugaaggaaacaug

SEQ ID NO: 1489575 - RNA, 19 nt, Homo sapiens
  misc_RNA (1)...(19): siRNA sense strand
auucagcuauccuucaauc

SEQ ID NO: 1489576 - RNA, 19 nt, Homo sapiens
  misc_RNA (1)...(19): siRNA sense strand
gugaucuccuuccucuugu

SEQ ID NO: 1489577 - RNA, 19 nt, Homo sapiens
  misc_RNA (1)...(19): siRNA sense strand
uguaaacaucucaagaaga

SEQ ID NO: 1489578 - RNA, 19 nt, Homo sapiens
  misc_RNA (1)...(19): siRNA sense strand
cuguaaccaugguagcaaa

SEQ ID NO: 1489579 - RNA, 19 nt, Homo sapiens
  misc_RNA (1)...(19): siRNA sense strand
uuuauuugcucaagauugc

SEQ ID NO: 1489580 - RNA, 19 nt, Homo sapiens
  misc_RNA (1)...(19): siRNA sense strand
acccauucauccugauuug

SEQ ID NO: 1489581 - RNA, 19 nt, Homo sapiens
  misc_RNA (1)...(19): siRNA sense strand
guucugcaaagcuauuaga

SEQ ID NO: 1489582 - RNA, 19 nt, Homo sapiens
  misc_RNA (1)...(19): siRNA sense strand
aaacuuaguacccuucacu

SEQ ID NO: 1489583 - RNA, 19 nt, Homo sapiens
  misc_RNA (1)...(19): siRNA sense strand
ugguagugguuacauuugu

SEQ ID NO: 1489584 - RNA, 19 nt, Homo sapiens
  misc_RNA (1)...(19): siRNA sense strand
guuggggccuuugcuauuu

SEQ ID NO: 1489585 - RNA, 19 nt, Homo sapiens
  misc_RNA (1)...(19): siRNA sense strand
gagugucauucuggugaug

SEQ ID NO: 1489586 - RNA, 19 nt, Homo sapiens
  misc_RNA (1)...(19): siRNA sense strand
caaaggcccagcugaguuu

SEQ ID NO: 1489587 - RNA, 19 nt, Homo sapiens
  misc_RNA (1)...(19): siRNA sense strand
gcaaaggcccagcugaguu

SEQ ID NO: 1489588 - RNA, 19 nt, Homo sapiens
  misc_RNA (1)...(19): siRNA sense strand
caacucaucuccucuucag

SEQ ID NO: 1489589 - RNA, 19 nt, Homo sapiens
  misc_RNA (1)...(19): siRNA sense strand
caagaggacuuuggcaacu

SEQ ID NO: 1489590 - RNA, 19 nt, Homo sapiens
  misc_RNA (1)...(19): siRNA sense strand
ggcaauggcagaaguggau

SEQ ID NO: 1489591 - RNA, 19 nt, Homo sapiens
  misc_RNA (1)...(19): siRNA sense strand
ccucaaggcccacccaaag

SEQ ID NO: 1489592 - RNA, 19 nt, Homo sapiens
  misc_RNA (1)...(19): siRNA sense strand
ggcugccuccaccauauua

SEQ ID NO: 1489593 - RNA, 19 nt, Homo sapiens
  misc_RNA (1)...(19): siRNA sense strand
cagcagggcaguggcaaug

SEQ ID NO: 1489594 - RNA, 19 nt, Homo sapiens
  misc_RNA (1)...(19): siRNA sense strand
agaggacuuuggcaacugu

SEQ ID NO: 1489595 - RNA, 19 nt, Homo sapiens
  misc_RNA (1)...(19): siRNA sense strand
ugggagcccuggagcaaag

SEQ ID NO: 1489596 - RNA, 19 nt, Homo sapiens
  misc_RNA (1)...(19): siRNA sense strand
ccauauuagaguuugguuu

SEQ ID NO: 1489597 - RNA, 19 nt, Homo sapiens
  misc_RNA (1)...(19): siRNA sense strand
ccuccaccauauuagaguu

SEQ ID NO: 1489598 - RNA, 19 nt, Homo sapiens
  misc_RNA (1)...(19): siRNA sense strand
gaacuucaaugccaaauau

SEQ ID NO: 1489599 - RNA, 19 nt, Homo sapiens
  misc_RNA (1)...(19): siRNA sense strand
ggacgagaaugggaagauu

SEQ ID NO: 1489600 - RNA, 19 nt, Homo sapiens
  misc_RNA (1)...(19): siRNA sense strand
ggacauaucaccucauugg

SEQ ID NO: 1489601 - RNA, 19 nt, Homo sapiens
  misc_RNA (1)...(19): siRNA sense strand
agaacuaccagaugaaaua

SEQ ID NO: 1489602 - RNA, 19 nt, Homo sapiens
  misc_RNA (1)...(19): siRNA sense strand
ccaacacccucaacuuuca

SEQ ID NO: 1489603 - RNA, 19 nt, Homo sapiens
  misc_RNA (1)...(19): siRNA sense strand
gaagaggacccagaugaug

SEQ ID NO: 1489604 - RNA, 19 nt, Homo sapiens
  misc_RNA (1)...(19): siRNA sense strand
gaaauacuacuucuaccau

SEQ ID NO: 1489605 - RNA, 19 nt, Homo sapiens
  misc_RNA (1)...(19): siRNA sense strand
gaugaaauacuacuucuac

SEQ ID NO: 1489606 - RNA, 19 nt, Homo sapiens
  misc_RNA (1)...(19): siRNA sense strand
ccacagagagcacagaugu

SEQ ID NO: 1489607 - RNA, 19 nt, Homo sapiens
  misc_RNA (1)...(19): siRNA sense strand
cagaggaccuaaugaacau

SEQ ID NO: 1489608 - RNA, 19 nt, Homo sapiens
  misc_RNA (1)...(19): siRNA sense strand
ggaagaggacccagaugau

SEQ ID NO: 1489609 - RNA, 19 nt, Homo sapiens
  misc_RNA (1)...(19): siRNA sense strand
gaacaagguggagagcaaa

SEQ ID NO: 1489610 - RNA, 19 nt, Homo sapiens
  misc_RNA (1)...(19): siRNA sense strand
agaacaagguggagagcaa

SEQ ID NO: 1489611 - RNA, 19 nt, Homo sapiens
  misc_RNA (1)...(19): siRNA sense strand
ggacgccuaugccaugaag

SEQ ID NO: 1489612 - RNA, 19 nt, Homo sapiens
  misc_RNA (1)...(19): siRNA sense strand
cccgagaacuaccagauga

SEQ ID NO: 1489613 - RNA, 19 nt, Homo sapiens
  misc_RNA (1)...(19): siRNA sense strand
acuaccagaugaaauacua

SEQ ID NO: 1489614 - RNA, 19 nt, Homo sapiens
  misc_RNA (1)...(19): siRNA sense strand
gugaaguggagcccaaaua

SEQ ID NO: 1489615 - RNA, 19 nt, Homo sapiens
  misc_RNA (1)...(19): siRNA sense strand
ggagagcaaaggcaauuca

SEQ ID NO: 1489616 - RNA, 19 nt, Homo sapiens
  misc_RNA (1)...(19): siRNA sense strand
ccagaggaccuaaugaaca

SEQ ID NO: 1489617 - RNA, 19 nt, Homo sapiens
  misc_RNA (1)...(19): siRNA sense strand
gaggacgccuaugccauga

SEQ ID NO: 1489618 - RNA, 19 nt, Homo sapiens
  misc_RNA (1)...(19): siRNA sense strand
gagccaugauagagaacuu

SEQ ID NO: 1489619 - RNA, 19 nt, Homo sapiens
  misc_RNA (1)...(19): siRNA sense strand
ggccagaggaccuaaugaa

SEQ ID NO: 1489620 - RNA, 19 nt, Homo sapiens
  misc_RNA (1)...(19): siRNA sense strand
aaguggagcccaaauacua

SEQ ID NO: 1489621 - RNA, 19 nt, Homo sapiens
  misc_RNA (1)...(19): siRNA sense strand
cagaugaaauacuacuucu

SEQ ID NO: 1489622 - RNA, 19 nt, Homo sapiens
  misc_RNA (1)...(19): siRNA sense strand
uggaagaggacccagauga

SEQ ID NO: 1489623 - RNA, 19 nt, Homo sapiens
  misc_RNA (1)...(19): siRNA sense strand
gcccaaauacuaugcagau

SEQ ID NO: 1489624 - RNA, 19 nt, Homo sapiens
  misc_RNA (1)...(19): siRNA sense strand
ccagaugaaauacuacuuc

SEQ ID NO: 1489625 - RNA, 19 nt, Homo sapiens
  misc_RNA (1)...(19): siRNA sense strand
cgagaacuaccagaugaaa

SEQ ID NO: 1489626 - RNA, 19 nt, Homo sapiens
  misc_RNA (1)...(19): siRNA sense strand
caugauagagaacuucaau

SEQ ID NO: 1489627 - RNA, 19 nt, Homo sapiens
  misc_RNA (1)...(19): siRNA sense strand
gacgagaaugggaagauug

SEQ ID NO: 1489628 - RNA, 19 nt, Homo sapiens
  misc_RNA (1)...(19): siRNA sense strand
gaaguggagcccaaauacu

SEQ ID NO: 1489629 - RNA, 19 nt, Homo sapiens
  misc_RNA (1)...(19): siRNA sense strand
gagaacuaccagaugaaau

SEQ ID NO: 1489630 - RNA, 19 nt, Homo sapiens
  misc_RNA (1)...(19): siRNA sense strand
gaacuaccagaugaaauac

SEQ ID NO: 1489631 - RNA, 19 nt, Homo sapiens
  misc_RNA (1)...(19): siRNA sense strand
acagagagcacagauguca

SEQ ID NO: 1489632 - RNA, 19 nt, Homo sapiens
  misc_RNA (1)...(19): siRNA sense strand
cugcaugucaggaagagua

SEQ ID NO: 1489633 - RNA, 19 nt, Homo sapiens
  misc_RNA (1)...(19): siRNA sense strand
acccucaacuuucagauca

SEQ ID NO: 1489634 - RNA, 19 nt, Homo sapiens
  misc_RNA (1)...(19): siRNA sense strand
accuggagcugaaagagaa

SEQ ID NO: 1489635 - RNA, 19 nt, Homo sapiens
  misc_RNA (1)...(19): siRNA sense strand
ugaaguggagcccaaauac

SEQ ID NO: 1489636 - RNA, 19 nt, Homo sapiens
  misc_RNA (1)...(19): siRNA sense strand
auggacauaucaccucauu

SEQ ID NO: 1489637 - RNA, 19 nt, Homo sapiens
  misc_RNA (1)...(19): siRNA sense strand
guggagagcaaaggcaauu

SEQ ID NO: 1489638 - RNA, 19 nt, Homo sapiens
  misc_RNA (1)...(19): siRNA sense strand
uuccaacacccucaacuuu

SEQ ID NO: 1489639 - RNA, 19 nt, Homo sapiens
  misc_RNA (1)...(19): siRNA sense strand
ugauagagaacuucaaugc

SEQ ID NO: 1489640 - RNA, 19 nt, Homo sapiens
  misc_RNA (1)...(19): siRNA sense strand
gaggccagaggaccuaaug

SEQ ID NO: 1489641 - RNA, 19 nt, Homo sapiens
  misc_RNA (1)...(19): siRNA sense strand
agaacuucaaugccaaaua

SEQ ID NO: 1489642 - RNA, 19 nt, Homo sapiens
  misc_RNA (1)...(19): siRNA sense strand
gguauguccuggccaaaau

SEQ ID NO: 1489643 - RNA, 19 nt, Homo sapiens
  misc_RNA (1)...(19): siRNA sense strand
ugaaauacuacuucuacca

SEQ ID NO: 1489644 - RNA, 19 nt, Homo sapiens
  misc_RNA (1)...(19): siRNA sense strand
ucaacuuucagaucaguga

SEQ ID NO: 1489645 - RNA, 19 nt, Homo sapiens
  misc_RNA (1)...(19): siRNA sense strand
ccagcucucuuacauugcu

SEQ ID NO: 1489646 - RNA, 19 nt, Homo sapiens
  misc_RNA (1)...(19): siRNA sense strand
aagaggacccagaugaugu

SEQ ID NO: 1489647 - RNA, 19 nt, Homo sapiens
  misc_RNA (1)...(19): siRNA sense strand
ccccagcucucuuacauug

SEQ ID NO: 1489648 - RNA, 19 nt, Homo sapiens
  misc_RNA (1)...(19): siRNA sense strand
aagcgggaccucacucaga

SEQ ID NO: 1489649 - RNA, 19 nt, Homo sapiens
  misc_RNA (1)...(19): siRNA sense strand
ugggugccaucgagaacaa

SEQ ID NO: 1489650 - RNA, 19 nt, Homo sapiens
  misc_RNA (1)...(19): siRNA sense strand
gaagaaggaugaggacaua

SEQ ID NO: 1489651 - RNA, 19 nt, Homo sapiens
  misc_RNA (1)...(19): siRNA sense strand
gaaagaagcuguaucuacu

SEQ ID NO: 1489652 - RNA, 19 nt, Homo sapiens
  misc_RNA (1)...(19): siRNA sense strand
caacaagacugugaaauug

SEQ ID NO: 1489653 - RNA, 19 nt, Homo sapiens
  misc_RNA (1)...(19): siRNA sense strand
ucaaguagcucaagaugaa

SEQ ID NO: 1489654 - RNA, 19 nt, Homo sapiens
  misc_RNA (1)...(19): siRNA sense strand
ggacauagcucgccuuuug

SEQ ID NO: 1489655 - RNA, 19 nt, Homo sapiens
  misc_RNA (1)...(19): siRNA sense strand
acaaagaccuugaacaaca

SEQ ID NO: 1489656 - RNA, 19 nt, Homo sapiens
  misc_RNA (1)...(19): siRNA sense strand
ggaaugaagccaagaguga

SEQ ID NO: 1489657 - RNA, 19 nt, Homo sapiens
  misc_RNA (1)...(19): siRNA sense strand
ggaaugguaugaugcugaa

SEQ ID NO: 1489658 - RNA, 19 nt, Homo sapiens
  misc_RNA (1)...(19): siRNA sense strand
gcagagagacgacgcauuc

SEQ ID NO: 1489659 - RNA, 19 nt, Homo sapiens
  misc_RNA (1)...(19): siRNA sense strand
gaacaacaagacugugaaa

SEQ ID NO: 1489660 - RNA, 19 nt, Homo sapiens
  misc_RNA (1)...(19): siRNA sense strand
aggagaagcuggcuauuga

SEQ ID NO: 1489661 - RNA, 19 nt, Homo sapiens
  misc_RNA (1)...(19): siRNA sense strand
caaagaccuugaacaacaa

SEQ ID NO: 1489662 - RNA, 19 nt, Homo sapiens
  misc_RNA (1)...(19): siRNA sense strand
gaaccucaccauucuaaga

SEQ ID NO: 1489663 - RNA, 19 nt, Homo sapiens
  misc_RNA (1)...(19): siRNA sense strand
cuacaaagaccuugaacaa

SEQ ID NO: 1489664 - RNA, 19 nt, Homo sapiens
  misc_RNA (1)...(19): siRNA sense strand
gaaaucgcucgacuucuaa

SEQ ID NO: 1489665 - RNA, 19 nt, Homo sapiens
  misc_RNA (1)...(19): siRNA sense strand
ggaguuacaggaagagaaa

SEQ ID NO: 1489666 - RNA, 19 nt, Homo sapiens
  misc_RNA (1)...(19): siRNA sense strand
aacaagagauugagcauca

SEQ ID NO: 1489667 - RNA, 19 nt, Homo sapiens
  misc_RNA (1)...(19): siRNA sense strand
acaacaagacugugaaauu

SEQ ID NO: 1489668 - RNA, 19 nt, Homo sapiens
  misc_RNA (1)...(19): siRNA sense strand
caugacagauggugaagau

SEQ ID NO: 1489669 - RNA, 19 nt, Homo sapiens
  misc_RNA (1)...(19): siRNA sense strand
gugcuuaugcagauaguua

SEQ ID NO: 1489670 - RNA, 19 nt, Homo sapiens
  misc_RNA (1)...(19): siRNA sense strand
ccacacggcauuucucaaa

SEQ ID NO: 1489671 - RNA, 19 nt, Homo sapiens
  misc_RNA (1)...(19): siRNA sense strand
gaugaaagaagcuguaucu

SEQ ID NO: 1489672 - RNA, 19 nt, Homo sapiens
  misc_RNA (1)...(19): siRNA sense strand
ccaaggagcgggagaaauc

SEQ ID NO: 1489673 - RNA, 19 nt, Homo sapiens
  misc_RNA (1)...(19): siRNA sense strand
ccagaaaacugcaagaaga

SEQ ID NO: 1489674 - RNA, 19 nt, Homo sapiens
  misc_RNA (1)...(19): siRNA sense strand
ccacagggaucaggaaugg

SEQ ID NO: 1489675 - RNA, 19 nt, Homo sapiens
  misc_RNA (1)...(19): siRNA sense strand
cagcaaauuccaagucaaa

SEQ ID NO: 1489676 - RNA, 19 nt, Homo sapiens
  misc_RNA (1)...(19): siRNA sense strand
ccaagaggaagaucugaaa

SEQ ID NO: 1489677 - RNA, 19 nt, Homo sapiens
  misc_RNA (1)...(19): siRNA sense strand
ggaaguaugccgagauuuu

SEQ ID NO: 1489678 - RNA, 19 nt, Homo sapiens
  misc_RNA (1)...(19): siRNA sense strand
gaagcuguaucuacuccau

SEQ ID NO: 1489679 - RNA, 19 nt, Homo sapiens
  misc_RNA (1)...(19): siRNA sense strand
uuaugaagauggaggaaug

SEQ ID NO: 1489680 - RNA, 19 nt, Homo sapiens
  misc_RNA (1)...(19): siRNA sense strand
ugaaagaagcuguaucuac

SEQ ID NO: 1489681 - RNA, 19 nt, Homo sapiens
  misc_RNA (1)...(19): siRNA sense strand
gcagcaaauuccaagucaa

SEQ ID NO: 1489682 - RNA, 19 nt, Homo sapiens
  misc_RNA (1)...(19): siRNA sense strand
gcaagaagaagaacuuuug

SEQ ID NO: 1489683 - RNA, 19 nt, Homo sapiens
  misc_RNA (1)...(19): siRNA sense strand
aaggaaguaugccgagauu

SEQ ID NO: 1489684 - RNA, 19 nt, Homo sapiens
  misc_RNA (1)...(19): siRNA sense strand
uuacaaaccagcagaguuc

SEQ ID NO: 1489685 - RNA, 19 nt, Homo sapiens
  misc_RNA (1)...(19): siRNA sense strand
ugaugaaccucaccauucu

SEQ ID NO: 1489686 - RNA, 19 nt, Homo sapiens
  misc_RNA (1)...(19): siRNA sense strand
caagcugccuggagucaag

SEQ ID NO: 1489687 - RNA, 19 nt, Homo sapiens
  misc_RNA (1)...(19): siRNA sense strand
caagagauugagcaucauu

SEQ ID NO: 1489688 - RNA, 19 nt, Homo sapiens
  misc_RNA (1)...(19): siRNA sense strand
gacgacgcauucaggagaa

SEQ ID NO: 1489689 - RNA, 19 nt, Homo sapiens
  misc_RNA (1)...(19): siRNA sense strand
ccaccuaucaugacagaug

SEQ ID NO: 1489690 - RNA, 19 nt, Homo sapiens
  misc_RNA (1)...(19): siRNA sense strand
acagggaucaggaauggua

SEQ ID NO: 1489691 - RNA, 19 nt, Homo sapiens
  misc_RNA (1)...(19): siRNA sense strand
gaggacauagcucgccuuu

SEQ ID NO: 1489692 - RNA, 19 nt, Homo sapiens
  misc_RNA (1)...(19): siRNA sense strand
cgggagaaaucaucuuugg

SEQ ID NO: 1489693 - RNA, 19 nt, Homo sapiens
  misc_RNA (1)...(19): siRNA sense strand
augcugaaauugccagaaa

SEQ ID NO: 1489694 - RNA, 19 nt, Homo sapiens
  misc_RNA (1)...(19): siRNA sense strand
cagcuaaagcagcaaauuc

SEQ ID NO: 1489695 - RNA, 19 nt, Homo sapiens
  misc_RNA (1)...(19): siRNA sense strand
gcauucaggagaagaagga

SEQ ID NO: 1489696 - RNA, 19 nt, Homo sapiens
  misc_RNA (1)...(19): siRNA sense strand
caccaccuaucaugacaga

SEQ ID NO: 1489697 - RNA, 19 nt, Homo sapiens
  misc_RNA (1)...(19): siRNA sense strand
gaaugaagccaagagugau

SEQ ID NO: 1489698 - RNA, 19 nt, Homo sapiens
  misc_RNA (1)...(19): siRNA sense strand
ggauuacacucauuuuaca

SEQ ID NO: 1489699 - RNA, 19 nt, Homo sapiens
  misc_RNA (1)...(19): siRNA sense strand
gcucaaguagcucaagaug

SEQ ID NO: 1489700 - RNA, 19 nt, Homo sapiens
  misc_RNA (1)...(19): siRNA sense strand
caggagaagcuggcuauug

SEQ ID NO: 1489701 - RNA, 19 nt, Homo sapiens
  misc_RNA (1)...(19): siRNA sense strand
gagcaucauuuggcaucga

SEQ ID NO: 1489702 - RNA, 19 nt, Homo sapiens
  misc_RNA (1)...(19): siRNA sense strand
gaugcggauuacacucauu

SEQ ID NO: 1489703 - RNA, 19 nt, Homo sapiens
  misc_RNA (1)...(19): siRNA sense strand
agccaagagugaugaaaga

SEQ ID NO: 1489704 - RNA, 19 nt, Homo sapiens
  misc_RNA (1)...(19): siRNA sense strand
ccaccaccaccuaucauga

SEQ ID NO: 1489705 - RNA, 19 nt, Homo sapiens
  misc_RNA (1)...(19): siRNA sense strand
uccagaagcgcuacaaaga

SEQ ID NO: 1489706 - RNA, 19 nt, Homo sapiens
  misc_RNA (1)...(19): siRNA sense strand
ucuaauggcugaagaaaag

SEQ ID NO: 1489707 - RNA, 19 nt, Homo sapiens
  misc_RNA (1)...(19): siRNA sense strand
uggcuaagcagcuccaaga

SEQ ID NO: 1489708 - RNA, 19 nt, Homo sapiens
  misc_RNA (1)...(19): siRNA sense strand
cucaggaaauucaggagaa

SEQ ID NO: 1489709 - RNA, 19 nt, Homo sapiens
  misc_RNA (1)...(19): siRNA sense strand
gguaugaugcugaaauugc

SEQ ID NO: 1489710 - RNA, 19 nt, Homo sapiens
  misc_RNA (1)...(19): siRNA sense strand
uaucaugacagauggugaa

SEQ ID NO: 1489711 - RNA, 19 nt, Homo sapiens
  misc_RNA (1)...(19): siRNA sense strand
gaagccaagagugaugaaa

SEQ ID NO: 1489712 - RNA, 19 nt, Homo sapiens
  misc_RNA (1)...(19): siRNA sense strand
gaugaaccucaccauucua

SEQ ID NO: 1489713 - RNA, 19 nt, Homo sapiens
  misc_RNA (1)...(19): siRNA sense strand
ggaacaagagauugagcau

SEQ ID NO: 1489714 - RNA, 19 nt, Homo sapiens
  misc_RNA (1)...(19): siRNA sense strand
aaaaggaguuacaggaaga

SEQ ID NO: 1489715 - RNA, 19 nt, Homo sapiens
  misc_RNA (1)...(19): siRNA sense strand
caaggaaguaugccgagau

SEQ ID NO: 1489716 - RNA, 19 nt, Homo sapiens
  misc_RNA (1)...(19): siRNA sense strand
aaacagcuaaagcagcaaa

SEQ ID NO: 1489717 - RNA, 19 nt, Homo sapiens
  misc_RNA (1)...(19): siRNA sense strand
ugaagaaaucgcucgacuu

SEQ ID NO: 1489718 - RNA, 19 nt, Homo sapiens
  misc_RNA (1)...(19): siRNA sense strand
ccgcucaaguagcucaaga

SEQ ID NO: 1489719 - RNA, 19 nt, Homo sapiens
  misc_RNA (1)...(19): siRNA sense strand
agaaaucaucuuuggacaa

SEQ ID NO: 1489720 - RNA, 19 nt, Homo sapiens
  misc_RNA (1)...(19): siRNA sense strand
gaagcgcuacaaagaccuu

SEQ ID NO: 1489721 - RNA, 19 nt, Homo sapiens
  misc_RNA (1)...(19): siRNA sense strand
gagauugagcaucauuugg

SEQ ID NO: 1489722 - RNA, 19 nt, Homo sapiens
  misc_RNA (1)...(19): siRNA sense strand
gaaguaugccgagauuuug

SEQ ID NO: 1489723 - RNA, 19 nt, Homo sapiens
  misc_RNA (1)...(19): siRNA sense strand
agagauugagcaucauuug

SEQ ID NO: 1489724 - RNA, 19 nt, Homo sapiens
  misc_RNA (1)...(19): siRNA sense strand
gcgcuacaaagaccuugaa

SEQ ID NO: 1489725 - RNA, 19 nt, Homo sapiens
  misc_RNA (1)...(19): siRNA sense strand
gggaucaggaaugguauga

SEQ ID NO: 1489726 - RNA, 19 nt, Homo sapiens
  misc_RNA (1)...(19): siRNA sense strand
cuaaagcagcaaauuccaa

SEQ ID NO: 1489727 - RNA, 19 nt, Homo sapiens
  misc_RNA (1)...(19): siRNA sense strand
gaaaacugcaagaagaaga

SEQ ID NO: 1489728 - RNA, 19 nt, Homo sapiens
  misc_RNA (1)...(19): siRNA sense strand
augguaugaugcugaaauu

SEQ ID NO: 1489729 - RNA, 19 nt, Homo sapiens
  misc_RNA (1)...(19): siRNA sense strand
acaagacugugaaauugcu

SEQ ID NO: 1489730 - RNA, 19 nt, Homo sapiens
  misc_RNA (1)...(19): siRNA sense strand
gcggauuacacucauuuua

SEQ ID NO: 1489731 - RNA, 19 nt, Homo sapiens
  misc_RNA (1)...(19): siRNA sense strand
gaauggcccacagggauca

SEQ ID NO: 1489732 - RNA, 19 nt, Homo sapiens
  misc_RNA (1)...(19): siRNA sense strand
gaaggaugaggacauagcu

SEQ ID NO: 1489733 - RNA, 19 nt, Homo sapiens
  misc_RNA (1)...(19): siRNA sense strand
caaauuccaagucaaaaga

SEQ ID NO: 1489734 - RNA, 19 nt, Homo sapiens
  misc_RNA (1)...(19): siRNA sense strand
gggagaaaucaucuuugga

SEQ ID NO: 1489735 - RNA, 19 nt, Homo sapiens
  misc_RNA (1)...(19): siRNA sense strand
ggaggaaugaagccaagag

SEQ ID NO: 1489736 - RNA, 19 nt, Homo sapiens
  misc_RNA (1)...(19): siRNA sense strand
gugaaauugcucaggaaau

SEQ ID NO: 1489737 - RNA, 19 nt, Homo sapiens
  misc_RNA (1)...(19): siRNA sense strand
cuacccagguggacaugag

SEQ ID NO: 1489738 - RNA, 19 nt, Homo sapiens
  misc_RNA (1)...(19): siRNA sense strand
ccaagagugaugaaagaag

SEQ ID NO: 1489739 - RNA, 19 nt, Homo sapiens
  misc_RNA (1)...(19): siRNA sense strand
ugaacaacaagacugugaa

SEQ ID NO: 1489740 - RNA, 19 nt, Homo sapiens
  misc_RNA (1)...(19): siRNA sense strand
ucaggaaauucaggagaag

SEQ ID NO: 1489741 - RNA, 19 nt, Homo sapiens
  misc_RNA (1)...(19): siRNA sense strand
agaagaaggaugaggacau

SEQ ID NO: 1489742 - RNA, 19 nt, Homo sapiens
  misc_RNA (1)...(19): siRNA sense strand
gcuccagaagcgcuacaaa

SEQ ID NO: 1489743 - RNA, 19 nt, Homo sapiens
  misc_RNA (1)...(19): siRNA sense strand
gcuacaaagaccuugaaca

SEQ ID NO: 1489744 - RNA, 19 nt, Homo sapiens
  misc_RNA (1)...(19): siRNA sense strand
gaccacacccuggcucaca

SEQ ID NO: 1489745 - RNA, 19 nt, Homo sapiens
  misc_RNA (1)...(19): siRNA sense strand
gccaagagugaugaaagaa

SEQ ID NO: 1489746 - RNA, 19 nt, Homo sapiens
  misc_RNA (1)...(19): siRNA sense strand
gaggaaugaagccaagagu

SEQ ID NO: 1489747 - RNA, 19 nt, Homo sapiens
  misc_RNA (1)...(19): siRNA sense strand
caagaggaagaucugaaag

SEQ ID NO: 1489748 - RNA, 19 nt, Homo sapiens
  misc_RNA (1)...(19): siRNA sense strand
gaucaaggcucaagaggau

SEQ ID NO: 1489749 - RNA, 19 nt, Homo sapiens
  misc_RNA (1)...(19): siRNA sense strand
gaaauucacgugccacauu

SEQ ID NO: 1489750 - RNA, 19 nt, Homo sapiens
  misc_RNA (1)...(19): siRNA sense strand
caaaggcgaugcaggagaa

SEQ ID NO: 1489751 - RNA, 19 nt, Homo sapiens
  misc_RNA (1)...(19): siRNA sense strand
gagguucaauggcuuguuu

SEQ ID NO: 1489752 - RNA, 19 nt, Homo sapiens
  misc_RNA (1)...(19): siRNA sense strand
ggaauguucaggugucuuu

SEQ ID NO: 1489753 - RNA, 19 nt, Homo sapiens
  misc_RNA (1)...(19): siRNA sense strand
gagcaaguuuccuucuuca

SEQ ID NO: 1489754 - RNA, 19 nt, Homo sapiens
  misc_RNA (1)...(19): siRNA sense strand
gcaaguuuccuucuucaga

SEQ ID NO: 1489755 - RNA, 19 nt, Homo sapiens
  misc_RNA (1)...(19): siRNA sense strand
ggaauaagaggcuggaaag

SEQ ID NO: 1489756 - RNA, 19 nt, Homo sapiens
  misc_RNA (1)...(19): siRNA sense strand
gaaaaucggugagacucua

SEQ ID NO: 1489757 - RNA, 19 nt, Homo sapiens
  misc_RNA (1)...(19): siRNA sense strand
caaguuuccuucuucagau

SEQ ID NO: 1489758 - RNA, 19 nt, Homo sapiens
  misc_RNA (1)...(19): siRNA sense strand
gaggagagagguucaaugg

SEQ ID NO: 1489759 - RNA, 19 nt, Homo sapiens
  misc_RNA (1)...(19): siRNA sense strand
gcacagggaacauaaacuc

SEQ ID NO: 1489760 - RNA, 19 nt, Homo sapiens
  misc_RNA (1)...(19): siRNA sense strand
gaacgaggagcagauggaa

SEQ ID NO: 1489761 - RNA, 19 nt, Homo sapiens
  misc_RNA (1)...(19): siRNA sense strand
gggaauaagaggcuggaaa

SEQ ID NO: 1489762 - RNA, 19 nt, Homo sapiens
  misc_RNA (1)...(19): siRNA sense strand
ugagcaaguuuccuucuuc

SEQ ID NO: 1489763 - RNA, 19 nt, Homo sapiens
  misc_RNA (1)...(19): siRNA sense strand
aaauucacgugccacauug

SEQ ID NO: 1489764 - RNA, 19 nt, Homo sapiens
  misc_RNA (1)...(19): siRNA sense strand
gcauuguccugcagcugaa

SEQ ID NO: 1489765 - RNA, 19 nt, Homo sapiens
  misc_RNA (1)...(19): siRNA sense strand
gagcgaagggugacaaagg

SEQ ID NO: 1489766 - RNA, 19 nt, Homo sapiens
  misc_RNA (1)...(19): siRNA sense strand
uggaaaaguugaagcaaaa

SEQ ID NO: 1489767 - RNA, 19 nt, Homo sapiens
  misc_RNA (1)...(19): siRNA sense strand
gacgaugacacaacuuuca

SEQ ID NO: 1489768 - RNA, 19 nt, Homo sapiens
  misc_RNA (1)...(19): siRNA sense strand
ggagaacgaggagcagaug

SEQ ID NO: 1489769 - RNA, 19 nt, Homo sapiens
  misc_RNA (1)...(19): siRNA sense strand
cagggaacauaaacucaca

SEQ ID NO: 1489770 - RNA, 19 nt, Homo sapiens
  misc_RNA (1)...(19): siRNA sense strand
gggcaacauugggccuuug

SEQ ID NO: 1489771 - RNA, 19 nt, Homo sapiens
  misc_RNA (1)...(19): siRNA sense strand
ggacgaugacacaacuuuc

SEQ ID NO: 1489772 - RNA, 19 nt, Homo sapiens
  misc_RNA (1)...(19): siRNA sense strand
ggaggagagagguucaaug

SEQ ID NO: 1489773 - RNA, 19 nt, Homo sapiens
  misc_RNA (1)...(19): siRNA sense strand
aauaagaggcuggaaagga

SEQ ID NO: 1489774 - RNA, 19 nt, Homo sapiens
  misc_RNA (1)...(19): siRNA sense strand
ugaggacgaugacacaacu

SEQ ID NO: 1489775 - RNA, 19 nt, Homo sapiens
  misc_RNA (1)...(19): siRNA sense strand
ucaccuaccacaucacugu

SEQ ID NO: 1489776 - RNA, 19 nt, Homo sapiens
  misc_RNA (1)...(19): siRNA sense strand
ccaugggcccuauuggaaa

SEQ ID NO: 1489777 - RNA, 19 nt, Homo sapiens
  misc_RNA (1)...(19): siRNA sense strand
ccacauugcuggggucuau

SEQ ID NO: 1489778 - RNA, 19 nt, Homo sapiens
  misc_RNA (1)...(19): siRNA sense strand
ggcuucugcuugccauuga

SEQ ID NO: 1489779 - RNA, 19 nt, Homo sapiens
  misc_RNA (1)...(19): siRNA sense strand
gaaaucugcacagggaaca

SEQ ID NO: 1489780 - RNA, 19 nt, Homo sapiens
  misc_RNA (1)...(19): siRNA sense strand
ucaagaggauccccaggaa

SEQ ID NO: 1489781 - RNA, 19 nt, Homo sapiens
  misc_RNA (1)...(19): siRNA sense strand
uuacuucaccuaccacauc

SEQ ID NO: 1489782 - RNA, 19 nt, Homo sapiens
  misc_RNA (1)...(19): siRNA sense strand
ggagaucgaggagagaaag

SEQ ID NO: 1489783 - RNA, 19 nt, Homo sapiens
  misc_RNA (1)...(19): siRNA sense strand
caugggcccuauuggaaag

SEQ ID NO: 1489784 - RNA, 19 nt, Homo sapiens
  misc_RNA (1)...(19): siRNA sense strand
cccaugggcccuauuggaa

SEQ ID NO: 1489785 - RNA, 19 nt, Homo sapiens
  misc_RNA (1)...(19): siRNA sense strand
gaucugguggcuucugcuu

SEQ ID NO: 1489786 - RNA, 19 nt, Homo sapiens
  misc_RNA (1)...(19): siRNA sense strand
cacaauggucugccuggaa

SEQ ID NO: 1489787 - RNA, 19 nt, Homo sapiens
  misc_RNA (1)...(19): siRNA sense strand
ucuauuacuucaccuacca

SEQ ID NO: 1489788 - RNA, 19 nt, Homo sapiens
  misc_RNA (1)...(19): siRNA sense strand
cugagcaaguuuccuucuu

SEQ ID NO: 1489789 - RNA, 19 nt, Homo sapiens
  misc_RNA (1)...(19): siRNA sense strand
aaucugcacagggaacaua

SEQ ID NO: 1489790 - RNA, 19 nt, Homo sapiens
  misc_RNA (1)...(19): siRNA sense strand
augcuuacaugagcucuga

SEQ ID NO: 1489791 - RNA, 19 nt, Homo sapiens
  misc_RNA (1)...(19): siRNA sense strand
gcaguaugcuguauaguaa

SEQ ID NO: 1489792 - RNA, 19 nt, Homo sapiens
  misc_RNA (1)...(19): siRNA sense strand
gaagaguccuuauguugca

SEQ ID NO: 1489793 - RNA, 19 nt, Homo sapiens
  misc_RNA (1)...(19): siRNA sense strand
acuguaaucuugcugcuua

SEQ ID NO: 1489794 - RNA, 19 nt, Homo sapiens
  misc_RNA (1)...(19): siRNA sense strand
gaacggaagaguccuuaug

SEQ ID NO: 1489795 - RNA, 19 nt, Homo sapiens
  misc_RNA (1)...(19): siRNA sense strand
ucuauugacuguaaucuug

SEQ ID NO: 1489796 - RNA, 19 nt, Homo sapiens
  misc_RNA (1)...(19): siRNA sense strand
auauguaccugugcuuaua

SEQ ID NO: 1489797 - RNA, 19 nt, Homo sapiens
  misc_RNA (1)...(19): siRNA sense strand
uaaucuugcugcuuauaug

SEQ ID NO: 1489798 - RNA, 19 nt, Homo sapiens
  misc_RNA (1)...(19): siRNA sense strand
aaacuggauuguuggguau

SEQ ID NO: 1489799 - RNA, 19 nt, Homo sapiens
  misc_RNA (1)...(19): siRNA sense strand
cggaagaguccuuauguug

SEQ ID NO: 1489800 - RNA, 19 nt, Homo sapiens
  misc_RNA (1)...(19): siRNA sense strand
guccuuauguugcaguaug

SEQ ID NO: 1489801 - RNA, 19 nt, Homo sapiens
  misc_RNA (1)...(19): siRNA sense strand
guaaucuugcugcuuauau

SEQ ID NO: 1489802 - RNA, 19 nt, Homo sapiens
  misc_RNA (1)...(19): siRNA sense strand
gugcuuauauucgauccuu

SEQ ID NO: 1489803 - RNA, 19 nt, Homo sapiens
  misc_RNA (1)...(19): siRNA sense strand
ugcaguaugcuguauagua

SEQ ID NO: 1489804 - RNA, 19 nt, Homo sapiens
  misc_RNA (1)...(19): siRNA sense strand
gaagugugccagaauuggu

SEQ ID NO: 1489805 - RNA, 19 nt, Homo sapiens
  misc_RNA (1)...(19): siRNA sense strand
uaccugugcuuauauucga

SEQ ID NO: 1489806 - RNA, 19 nt, Homo sapiens
  misc_RNA (1)...(19): siRNA sense strand
aguaugcuguauaguaaug

SEQ ID NO: 1489807 - RNA, 19 nt, Homo sapiens
  misc_RNA (1)...(19): siRNA sense strand
guugcaguaugcuguauag

SEQ ID NO: 1489808 - RNA, 19 nt, Homo sapiens
  misc_RNA (1)...(19): siRNA sense strand
uuggaagugugccagaauu

SEQ ID NO: 1489809 - RNA, 19 nt, Homo sapiens
  misc_RNA (1)...(19): siRNA sense strand
acggaagaguccuuauguu

SEQ ID NO: 1489810 - RNA, 19 nt, Homo sapiens
  misc_RNA (1)...(19): siRNA sense strand
cuucagcauccucuucaua

SEQ ID NO: 1489811 - RNA, 19 nt, Homo sapiens
  misc_RNA (1)...(19): siRNA sense strand
gcauccucuucauacagua

SEQ ID NO: 1489812 - RNA, 19 nt, Homo sapiens
  misc_RNA (1)...(19): siRNA sense strand
ggaagugugccagaauugg

SEQ ID NO: 1489813 - RNA, 19 nt, Homo sapiens
  misc_RNA (1)...(19): siRNA sense strand
gaguccuuauguugcagua

SEQ ID NO: 1489814 - RNA, 19 nt, Homo sapiens
  misc_RNA (1)...(19): siRNA sense strand
gugaacggaagaguccuua

SEQ ID NO: 1489815 - RNA, 19 nt, Homo sapiens
  misc_RNA (1)...(19): siRNA sense strand
uauauguaccugugcuuau

SEQ ID NO: 1489816 - RNA, 19 nt, Homo sapiens
  misc_RNA (1)...(19): siRNA sense strand
ucagcauccucuucauaca

SEQ ID NO: 1489817 - RNA, 19 nt, Homo sapiens
  misc_RNA (1)...(19): siRNA sense strand
uggauuguuggguauauuu

SEQ ID NO: 1489818 - RNA, 19 nt, Homo sapiens
  misc_RNA (1)...(19): siRNA sense strand
uuauauguaccugugcuua

SEQ ID NO: 1489819 - RNA, 19 nt, Homo sapiens
  misc_RNA (1)...(19): siRNA sense strand
gaagagcgcucgucuguuu

SEQ ID NO: 1489820 - RNA, 19 nt, Homo sapiens
  misc_RNA (1)...(19): siRNA sense strand
ggaagcagcucacacauuu

SEQ ID NO: 1489821 - RNA, 19 nt, Homo sapiens
  misc_RNA (1)...(19): siRNA sense strand
gaacaagccuuaagagaau

SEQ ID NO: 1489822 - RNA, 19 nt, Homo sapiens
  misc_RNA (1)...(19): siRNA sense strand
caagauagaucgagaccua

SEQ ID NO: 1489823 - RNA, 19 nt, Homo sapiens
  misc_RNA (1)...(19): siRNA sense strand
ucacagagauggaugcuaa

SEQ ID NO: 1489824 - RNA, 19 nt, Homo sapiens
  misc_RNA (1)...(19): siRNA sense strand
gagcagaaguucauggauu

SEQ ID NO: 1489825 - RNA, 19 nt, Homo sapiens
  misc_RNA (1)...(19): siRNA sense strand
gagaauauuucguugaaga

SEQ ID NO: 1489826 - RNA, 19 nt, Homo sapiens
  misc_RNA (1)...(19): siRNA sense strand
guauaaggcuggucuguau

SEQ ID NO: 1489827 - RNA, 19 nt, Homo sapiens
  misc_RNA (1)...(19): siRNA sense strand
gucauaagcuggagucuga

SEQ ID NO: 1489828 - RNA, 19 nt, Homo sapiens
  misc_RNA (1)...(19): siRNA sense strand
gaacguagagggagcagaa

SEQ ID NO: 1489829 - RNA, 19 nt, Homo sapiens
  misc_RNA (1)...(19): siRNA sense strand
gcagagugcccuacaacua

SEQ ID NO: 1489830 - RNA, 19 nt, Homo sapiens
  misc_RNA (1)...(19): siRNA sense strand
gaacucaacucuguauuuu

SEQ ID NO: 1489831 - RNA, 19 nt, Homo sapiens
  misc_RNA (1)...(19): siRNA sense strand
gaaccgaauuauuggauca

SEQ ID NO: 1489832 - RNA, 19 nt, Homo sapiens
  misc_RNA (1)...(19): siRNA sense strand
agcagaacauugagaauua

SEQ ID NO: 1489833 - RNA, 19 nt, Homo sapiens
  misc_RNA (1)...(19): siRNA sense strand
acacugaaccgaauuauug

SEQ ID NO: 1489834 - RNA, 19 nt, Homo sapiens
  misc_RNA (1)...(19): siRNA sense strand
gaacaucacauucgucuac

SEQ ID NO: 1489835 - RNA, 19 nt, Homo sapiens
  misc_RNA (1)...(19): siRNA sense strand
acucaaaucugguuaugaa

SEQ ID NO: 1489836 - RNA, 19 nt, Homo sapiens
  misc_RNA (1)...(19): siRNA sense strand
cgaacaagccuuaagagaa

SEQ ID NO: 1489837 - RNA, 19 nt, Homo sapiens
  misc_RNA (1)...(19): siRNA sense strand
cagagaggauuuaacaaug

SEQ ID NO: 1489838 - RNA, 19 nt, Homo sapiens
  misc_RNA (1)...(19): siRNA sense strand
gggccuacaucaagcuuaa

SEQ ID NO: 1489839 - RNA, 19 nt, Homo sapiens
  misc_RNA (1)...(19): siRNA sense strand
uuaugaggcugaugacuuu

SEQ ID NO: 1489840 - RNA, 19 nt, Homo sapiens
  misc_RNA (1)...(19): siRNA sense strand
gcacucaaaucugguuaug

SEQ ID NO: 1489841 - RNA, 19 nt, Homo sapiens
  misc_RNA (1)...(19): siRNA sense strand
guucauggauucucaaugg

SEQ ID NO: 1489842 - RNA, 19 nt, Homo sapiens
  misc_RNA (1)...(19): siRNA sense strand
guaugaagcuauugcagau

SEQ ID NO: 1489843 - RNA, 19 nt, Homo sapiens
  misc_RNA (1)...(19): siRNA sense strand
uagacaauguggauuacua

SEQ ID NO: 1489844 - RNA, 19 nt, Homo sapiens
  misc_RNA (1)...(19): siRNA sense strand
gccaaagccuaucuucuau

SEQ ID NO: 1489845 - RNA, 19 nt, Homo sapiens
  misc_RNA (1)...(19): siRNA sense strand
ggcgacagcugguguugaa

SEQ ID NO: 1489846 - RNA, 19 nt, Homo sapiens
  misc_RNA (1)...(19): siRNA sense strand
gcuggagucugagcugaua

SEQ ID NO: 1489847 - RNA, 19 nt, Homo sapiens
  misc_RNA (1)...(19): siRNA sense strand
ggacccacuuuauagagaa

SEQ ID NO: 1489848 - RNA, 19 nt, Homo sapiens
  misc_RNA (1)...(19): siRNA sense strand
cgaauuauuggaucagaua

SEQ ID NO: 1489849 - RNA, 19 nt, Homo sapiens
  misc_RNA (1)...(19): siRNA sense strand
augcaggaguuaaacauua

SEQ ID NO: 1489850 - RNA, 19 nt, Homo sapiens
  misc_RNA (1)...(19): siRNA sense strand
gaauaucaacccuaaagau

SEQ ID NO: 1489851 - RNA, 19 nt, Homo sapiens
  misc_RNA (1)...(19): siRNA sense strand
gaaggucgagucccacuga

SEQ ID NO: 1489852 - RNA, 19 nt, Homo sapiens
  misc_RNA (1)...(19): siRNA sense strand
gcauuucgaacaagccuua

SEQ ID NO: 1489853 - RNA, 19 nt, Homo sapiens
  misc_RNA (1)...(19): siRNA sense strand
gcacuaugauuaccuacag

SEQ ID NO: 1489854 - RNA, 19 nt, Homo sapiens
  misc_RNA (1)...(19): siRNA sense strand
gacugugacugccucuaua

SEQ ID NO: 1489855 - RNA, 19 nt, Homo sapiens
  misc_RNA (1)...(19): siRNA sense strand
cgaaaaggcucgaaggauu

SEQ ID NO: 1489856 - RNA, 19 nt, Homo sapiens
  misc_RNA (1)...(19): siRNA sense strand
uaucaggcauuucgaacaa

SEQ ID NO: 1489857 - RNA, 19 nt, Homo sapiens
  misc_RNA (1)...(19): siRNA sense strand
uagaagaaaugaccucagu

SEQ ID NO: 1489858 - RNA, 19 nt, Homo sapiens
  misc_RNA (1)...(19): siRNA sense strand
ggugauggauacagaggaa

SEQ ID NO: 1489859 - RNA, 19 nt, Homo sapiens
  misc_RNA (1)...(19): siRNA sense strand
ccucagagauuugaagaau

SEQ ID NO: 1489860 - RNA, 19 nt, Homo sapiens
  misc_RNA (1)...(19): siRNA sense strand
gaaggaggagaauucauau

SEQ ID NO: 1489861 - RNA, 19 nt, Homo sapiens
  misc_RNA (1)...(19): siRNA sense strand
gaauacaggcugaugaagu

SEQ ID NO: 1489862 - RNA, 19 nt, Homo sapiens
  misc_RNA (1)...(19): siRNA sense strand
gcgcugagcugccccuuuu

SEQ ID NO: 1489863 - RNA, 19 nt, Homo sapiens
  misc_RNA (1)...(19): siRNA sense strand
ccagagaggauuuaacaau

SEQ ID NO: 1489864 - RNA, 19 nt, Homo sapiens
  misc_RNA (1)...(19): siRNA sense strand
cccuaaagaugagcuauaa

SEQ ID NO: 1489865 - RNA, 19 nt, Homo sapiens
  misc_RNA (1)...(19): siRNA sense strand
uuacacauuucgagacuau

SEQ ID NO: 1489866 - RNA, 19 nt, Homo sapiens
  misc_RNA (1)...(19): siRNA sense strand
ugaacucaacucuguauuu

SEQ ID NO: 1489867 - RNA, 19 nt, Homo sapiens
  misc_RNA (1)...(19): siRNA sense strand
ggaagcaugaacugaauau

SEQ ID NO: 1489868 - RNA, 19 nt, Homo sapiens
  misc_RNA (1)...(19): siRNA sense strand
agccacacauggagaguua

SEQ ID NO: 1489869 - RNA, 19 nt, Homo sapiens
  misc_RNA (1)...(19): siRNA sense strand
caaaucugguuaugaaggu

SEQ ID NO: 1489870 - RNA, 19 nt, Homo sapiens
  misc_RNA (1)...(19): siRNA sense strand
caaagccuaucuucuaugc

SEQ ID NO: 1489871 - RNA, 19 nt, Homo sapiens
  misc_RNA (1)...(19): siRNA sense strand
cagcugguguugaagcauu

SEQ ID NO: 1489872 - RNA, 19 nt, Homo sapiens
  misc_RNA (1)...(19): siRNA sense strand
aauacaggcugaugaagug

SEQ ID NO: 1489873 - RNA, 19 nt, Homo sapiens
  misc_RNA (1)...(19): siRNA sense strand
gaaugaugacuuugaagga

SEQ ID NO: 1489874 - RNA, 19 nt, Homo sapiens
  misc_RNA (1)...(19): siRNA sense strand
agagaggauuuaacaaugu

SEQ ID NO: 1489875 - RNA, 19 nt, Homo sapiens
  misc_RNA (1)...(19): siRNA sense strand
ugccaaagccuaucuucua

SEQ ID NO: 1489876 - RNA, 19 nt, Homo sapiens
  misc_RNA (1)...(19): siRNA sense strand
gaguuacaaugcaggaguu

SEQ ID NO: 1489877 - RNA, 19 nt, Homo sapiens
  misc_RNA (1)...(19): siRNA sense strand
cagcagaacauugagaauu

SEQ ID NO: 1489878 - RNA, 19 nt, Homo sapiens
  misc_RNA (1)...(19): siRNA sense strand
gagagucugcuggaugaua

SEQ ID NO: 1489879 - RNA, 19 nt, Homo sapiens
  misc_RNA (1)...(19): siRNA sense strand
caauguggauuacuaugag

SEQ ID NO: 1489880 - RNA, 19 nt, Homo sapiens
  misc_RNA (1)...(19): siRNA sense strand
gcgaauacaggcugaugaa

SEQ ID NO: 1489881 - RNA, 19 nt, Homo sapiens
  misc_RNA (1)...(19): siRNA sense strand
gcagaacauugagaauuac

SEQ ID NO: 1489882 - RNA, 19 nt, Homo sapiens
  misc_RNA (1)...(19): siRNA sense strand
gaucgagaccuaagagaag

SEQ ID NO: 1489883 - RNA, 19 nt, Homo sapiens
  misc_RNA (1)...(19): siRNA sense strand
gguauaaggcuggucugua

SEQ ID NO: 1489884 - RNA, 19 nt, Homo sapiens
  misc_RNA (1)...(19): siRNA sense strand
uuacaaugcaggaguuaaa

SEQ ID NO: 1489885 - RNA, 19 nt, Homo sapiens
  misc_RNA (1)...(19): siRNA sense strand
cauccaugcugacaacugu

SEQ ID NO: 1489886 - RNA, 19 nt, Homo sapiens
  misc_RNA (1)...(19): siRNA sense strand
ggccagagaggauuuaaca

SEQ ID NO: 1489887 - RNA, 19 nt, Homo sapiens
  misc_RNA (1)...(19): siRNA sense strand
ggucgagucccacugaaga

SEQ ID NO: 1489888 - RNA, 19 nt, Homo sapiens
  misc_RNA (1)...(19): siRNA sense strand
gauaaaaucagcugcagaa

SEQ ID NO: 1489889 - RNA, 19 nt, Homo sapiens
  misc_RNA (1)...(19): siRNA sense strand
gcucuccuauauaugaaug

SEQ ID NO: 1489890 - RNA, 19 nt, Homo sapiens
  misc_RNA (1)...(19): siRNA sense strand
acauggaaaugcagcagaa

SEQ ID NO: 1489891 - RNA, 19 nt, Homo sapiens
  misc_RNA (1)...(19): siRNA sense strand
gugguccucuacucuauga

SEQ ID NO: 1489892 - RNA, 19 nt, Homo sapiens
  misc_RNA (1)...(19): siRNA sense strand
ccaguggaaucaugcuugu

SEQ ID NO: 1489893 - RNA, 19 nt, Homo sapiens
  misc_RNA (1)...(19): siRNA sense strand
agcaugaacugaauaucaa

SEQ ID NO: 1489894 - RNA, 19 nt, Homo sapiens
  misc_RNA (1)...(19): siRNA sense strand
agacuauagugcucuccua

SEQ ID NO: 1489895 - RNA, 19 nt, Homo sapiens
  misc_RNA (1)...(19): siRNA sense strand
gcgcucgucuguuuuauga

SEQ ID NO: 1489896 - RNA, 19 nt, Homo sapiens
  misc_RNA (1)...(19): siRNA sense strand
gaaggugguccucuacucu

SEQ ID NO: 1489897 - RNA, 19 nt, Homo sapiens
  misc_RNA (1)...(19): siRNA sense strand
uaucaacccuaaagaugag

SEQ ID NO: 1489898 - RNA, 19 nt, Homo sapiens
  misc_RNA (1)...(19): siRNA sense strand
ccugaaagcacucaaaucu

SEQ ID NO: 1489899 - RNA, 19 nt, Homo sapiens
  misc_RNA (1)...(19): siRNA sense strand
ucuaugagaacaucacauu

SEQ ID NO: 1489900 - RNA, 19 nt, Homo sapiens
  misc_RNA (1)...(19): siRNA sense strand
uauugcagaucacuacaug

SEQ ID NO: 1489901 - RNA, 19 nt, Homo sapiens
  misc_RNA (1)...(19): siRNA sense strand
aagcaugaacugaauauca

SEQ ID NO: 1489902 - RNA, 19 nt, Homo sapiens
  misc_RNA (1)...(19): siRNA sense strand
agagauggaugcuaagacu

SEQ ID NO: 1489903 - RNA, 19 nt, Homo sapiens
  misc_RNA (1)...(19): siRNA sense strand
gaaaaggcucgaaggauug

SEQ ID NO: 1489904 - RNA, 19 nt, Homo sapiens
  misc_RNA (1)...(19): siRNA sense strand
gcaguugguagacagagaa

SEQ ID NO: 1489905 - RNA, 19 nt, Homo sapiens
  misc_RNA (1)...(19): siRNA sense strand
ggagugugccaaagccuau

SEQ ID NO: 1489906 - RNA, 19 nt, Homo sapiens
  misc_RNA (1)...(19): siRNA sense strand
acaauguggauuacuauga

SEQ ID NO: 1489907 - RNA, 19 nt, Homo sapiens
  misc_RNA (1)...(19): siRNA sense strand
gggaagcaugaacugaaua

SEQ ID NO: 1489908 - RNA, 19 nt, Homo sapiens
  misc_RNA (1)...(19): siRNA sense strand
augcugaacucaacucugu

SEQ ID NO: 1489909 - RNA, 19 nt, Homo sapiens
  misc_RNA (1)...(19): siRNA sense strand
cucagagauuugaagaaua

SEQ ID NO: 1489910 - RNA, 19 nt, Homo sapiens
  misc_RNA (1)...(19): siRNA sense strand
aauaucaacccuaaagaug

SEQ ID NO: 1489911 - RNA, 19 nt, Homo sapiens
  misc_RNA (1)...(19): siRNA sense strand
gcaagggaagcaugaacug

SEQ ID NO: 1489912 - RNA, 19 nt, Homo sapiens
  misc_RNA (1)...(19): siRNA sense strand
uugcaauucuggaucaaga

SEQ ID NO: 1489913 - RNA, 19 nt, Homo sapiens
  misc_RNA (1)...(19): siRNA sense strand
ucacauucgucuacaacuc

SEQ ID NO: 1489914 - RNA, 19 nt, Homo sapiens
  misc_RNA (1)...(19): siRNA sense strand
cauacacugaaccgaauua

SEQ ID NO: 1489915 - RNA, 19 nt, Homo sapiens
  misc_RNA (1)...(19): siRNA sense strand
aaaaucagcugcagaaggu

SEQ ID NO: 1489916 - RNA, 19 nt, Homo sapiens
  misc_RNA (1)...(19): siRNA sense strand
acaugcaggugcuuguuug

SEQ ID NO: 1489917 - RNA, 19 nt, Homo sapiens
  misc_RNA (1)...(19): siRNA sense strand
augagagucugcuggauga

SEQ ID NO: 1489918 - RNA, 19 nt, Homo sapiens
  misc_RNA (1)...(19): siRNA sense strand
cugaugaagugauugcaau

SEQ ID NO: 1489919 - RNA, 19 nt, Homo sapiens
  misc_RNA (1)...(19): siRNA sense strand
gaaaggaggccuagcaugu

SEQ ID NO: 1489920 - RNA, 19 nt, Homo sapiens
  misc_RNA (1)...(19): siRNA sense strand
gagagucaauucacaaugu

SEQ ID NO: 1489921 - RNA, 19 nt, Homo sapiens
  misc_RNA (1)...(19): siRNA sense strand
ugacucaauugcugauaua

SEQ ID NO: 1489922 - RNA, 19 nt, Homo sapiens
  misc_RNA (1)...(19): siRNA sense strand
gcacuggucuugguguuug

SEQ ID NO: 1489923 - RNA, 19 nt, Homo sapiens
  misc_RNA (1)...(19): siRNA sense strand
ggaggcauauacacagauu

SEQ ID NO: 1489924 - RNA, 19 nt, Homo sapiens
  misc_RNA (1)...(19): siRNA sense strand
ggucgcagcuaaacacgaa

SEQ ID NO: 1489925 - RNA, 19 nt, Homo sapiens
  misc_RNA (1)...(19): siRNA sense strand
gauaaaguauucucucacu

SEQ ID NO: 1489926 - RNA, 19 nt, Homo sapiens
  misc_RNA (1)...(19): siRNA sense strand
cagcagauacuaacagaaa

SEQ ID NO: 1489927 - RNA, 19 nt, Homo sapiens
  misc_RNA (1)...(19): siRNA sense strand
aaacuaaaguccagcagau

SEQ ID NO: 1489928 - RNA, 19 nt, Homo sapiens
  misc_RNA (1)...(19): siRNA sense strand
gaaauuccaagcucauuca

SEQ ID NO: 1489929 - RNA, 19 nt, Homo sapiens
  misc_RNA (1)...(19): siRNA sense strand
ugauauagguaaagaaugg

SEQ ID NO: 1489930 - RNA, 19 nt, Homo sapiens
  misc_RNA (1)...(19): siRNA sense strand
guaccaccguuauaaguuc

SEQ ID NO: 1489931 - RNA, 19 nt, Homo sapiens
  misc_RNA (1)...(19): siRNA sense strand
ugaauuggcagaccgcaua

SEQ ID NO: 1489932 - RNA, 19 nt, Homo sapiens
  misc_RNA (1)...(19): siRNA sense strand
auuccaagcucauucagua

SEQ ID NO: 1489933 - RNA, 19 nt, Homo sapiens
  misc_RNA (1)...(19): siRNA sense strand
ucacuugucacuugaauug

SEQ ID NO: 1489934 - RNA, 19 nt, Homo sapiens
  misc_RNA (1)...(19): siRNA sense strand
uguuugcccuuuauuauga

SEQ ID NO: 1489935 - RNA, 19 nt, Homo sapiens
  misc_RNA (1)...(19): siRNA sense strand
ccaagcucauucaguagaa

SEQ ID NO: 1489936 - RNA, 19 nt, Homo sapiens
  misc_RNA (1)...(19): siRNA sense strand
gaagaaauuccaagcucau

SEQ ID NO: 1489937 - RNA, 19 nt, Homo sapiens
  misc_RNA (1)...(19): siRNA sense strand
gguguuugcccuuuauuau

SEQ ID NO: 1489938 - RNA, 19 nt, Homo sapiens
  misc_RNA (1)...(19): siRNA sense strand
gcugauauagguaaagaau

SEQ ID NO: 1489939 - RNA, 19 nt, Homo sapiens
  misc_RNA (1)...(19): siRNA sense strand
guuagcagucaaagaauuu

SEQ ID NO: 1489940 - RNA, 19 nt, Homo sapiens
  misc_RNA (1)...(19): siRNA sense strand
aguauucucucacuuguca

SEQ ID NO: 1489941 - RNA, 19 nt, Homo sapiens
  misc_RNA (1)...(19): siRNA sense strand
ggccuagcauguucgagaa

SEQ ID NO: 1489942 - RNA, 19 nt, Homo sapiens
  misc_RNA (1)...(19): siRNA sense strand
gcagaccgcauacuguuag

SEQ ID NO: 1489943 - RNA, 19 nt, Homo sapiens
  misc_RNA (1)...(19): siRNA sense strand
gauacuaacagaaagucuu

SEQ ID NO: 1489944 - RNA, 19 nt, Homo sapiens
  misc_RNA (1)...(19): siRNA sense strand
aaagacuggccaagcaaua

SEQ ID NO: 1489945 - RNA, 19 nt, Homo sapiens
  misc_RNA (1)...(19): siRNA sense strand
caauucacaauguucagua

SEQ ID NO: 1489946 - RNA, 19 nt, Homo sapiens
  misc_RNA (1)...(19): siRNA sense strand
uaagagaaagacugagaga

SEQ ID NO: 1489947 - RNA, 19 nt, Homo sapiens
  misc_RNA (1)...(19): siRNA sense strand
agagaaagacugagagagu

SEQ ID NO: 1489948 - RNA, 19 nt, Homo sapiens
  misc_RNA (1)...(19): siRNA sense strand
gguaccaccguuauaaguu

SEQ ID NO: 1489949 - RNA, 19 nt, Homo sapiens
  misc_RNA (1)...(19): siRNA sense strand
uguuagcagucaaagaauu

SEQ ID NO: 1489950 - RNA, 19 nt, Homo sapiens
  misc_RNA (1)...(19): siRNA sense strand
gcagauacuaacagaaagu

SEQ ID NO: 1489951 - RNA, 19 nt, Homo sapiens
  misc_RNA (1)...(19): siRNA sense strand
caagcucauucaguagaaa

SEQ ID NO: 1489952 - RNA, 19 nt, Homo sapiens
  misc_RNA (1)...(19): siRNA sense strand
gagagagucaauucacaau

SEQ ID NO: 1489953 - RNA, 19 nt, Homo sapiens
  misc_RNA (1)...(19): siRNA sense strand
caauugcugauauagguaa

SEQ ID NO: 1489954 - RNA, 19 nt, Homo sapiens
  misc_RNA (1)...(19): siRNA sense strand
ggcagaccgcauacuguua

SEQ ID NO: 1489955 - RNA, 19 nt, Homo sapiens
  misc_RNA (1)...(19): siRNA sense strand
agagucaauucacaauguu

SEQ ID NO: 1489956 - RNA, 19 nt, Homo sapiens
  misc_RNA (1)...(19): siRNA sense strand
aaagaaaggaggccuagca

SEQ ID NO: 1489957 - RNA, 19 nt, Homo sapiens
  misc_RNA (1)...(19): siRNA sense strand
ggugacgccuaggaaagaa

SEQ ID NO: 1489958 - RNA, 19 nt, Homo sapiens
  misc_RNA (1)...(19): siRNA sense strand
uaaaguccagcagauacua

SEQ ID NO: 1489959 - RNA, 19 nt, Homo sapiens
  misc_RNA (1)...(19): siRNA sense strand
aaggaggccuagcauguuc

SEQ ID NO: 1489960 - RNA, 19 nt, Homo sapiens
  misc_RNA (1)...(19): siRNA sense strand
uggagccauugaagaaauu

SEQ ID NO: 1489961 - RNA, 19 nt, Homo sapiens
  misc_RNA (1)...(19): siRNA sense strand
ugagagagucaauucacaa

SEQ ID NO: 1489962 - RNA, 19 nt, Homo sapiens
  misc_RNA (1)...(19): siRNA sense strand
ucaaaagacuggccaagca

SEQ ID NO: 1489963 - RNA, 19 nt, Homo sapiens
  misc_RNA (1)...(19): siRNA sense strand
cucauucaguagaaacuaa

SEQ ID NO: 1489964 - RNA, 19 nt, Homo sapiens
  misc_RNA (1)...(19): siRNA sense strand
cucaauugcugauauaggu

SEQ ID NO: 1489965 - RNA, 19 nt, Homo sapiens
  misc_RNA (1)...(19): siRNA sense strand
cgagaaggaggcauauaca

SEQ ID NO: 1489966 - RNA, 19 nt, Homo sapiens
  misc_RNA (1)...(19): siRNA sense strand
aaaggaggccuagcauguu

SEQ ID NO: 1489967 - RNA, 19 nt, Homo sapiens
  misc_RNA (1)...(19): siRNA sense strand
agaaggaggcauauacaca

SEQ ID NO: 1489968 - RNA, 19 nt, Homo sapiens
  misc_RNA (1)...(19): siRNA sense strand
aaggaggcauauacacaga

SEQ ID NO: 1489969 - RNA, 19 nt, Homo sapiens
  misc_RNA (1)...(19): siRNA sense strand
ucucucacuugucacuuga

SEQ ID NO: 1489970 - RNA, 19 nt, Homo sapiens
  misc_RNA (1)...(19): siRNA sense strand
agacuggccaagcaauaaa

SEQ ID NO: 1489971 - RNA, 19 nt, Homo sapiens
  misc_RNA (1)...(19): siRNA sense strand
gcucauucaguagaaacua

SEQ ID NO: 1489972 - RNA, 19 nt, Homo sapiens
  misc_RNA (1)...(19): siRNA sense strand
cuacguggcacuggucuug

SEQ ID NO: 1489973 - RNA, 19 nt, Homo sapiens
  misc_RNA (1)...(19): siRNA sense strand
uccagcagauacuaacaga

SEQ ID NO: 1489974 - RNA, 19 nt, Homo sapiens
  misc_RNA (1)...(19): siRNA sense strand
aaaguccagcagauacuaa

SEQ ID NO: 1489975 - RNA, 19 nt, Homo sapiens
  misc_RNA (1)...(19): siRNA sense strand
ucaauugcugauauaggua

SEQ ID NO: 1489976 - RNA, 19 nt, Homo sapiens
  misc_RNA (1)...(19): siRNA sense strand
aagacuggccaagcaauaa

SEQ ID NO: 1489977 - RNA, 19 nt, Homo sapiens
  misc_RNA (1)...(19): siRNA sense strand
uggcagaccgcauacuguu

SEQ ID NO: 1489978 - RNA, 19 nt, Homo sapiens
  misc_RNA (1)...(19): siRNA sense strand
uugcugauauagguaaaga

SEQ ID NO: 1489979 - RNA, 19 nt, Homo sapiens
  misc_RNA (1)...(19): siRNA sense strand
uucacaauguucaguaugu

SEQ ID NO: 1489980 - RNA, 19 nt, Homo sapiens
  misc_RNA (1)...(19): siRNA sense strand
ccaccguuauaaguucauu

SEQ ID NO: 1489981 - RNA, 19 nt, Homo sapiens
  misc_RNA (1)...(19): siRNA sense strand
cugagagagucaauucaca

SEQ ID NO: 1489982 - RNA, 19 nt, Homo sapiens
  misc_RNA (1)...(19): siRNA sense strand
ggguaccaccguuauaagu

SEQ ID NO: 1489983 - RNA, 19 nt, Homo sapiens
  misc_RNA (1)...(19): siRNA sense strand
guguuugcccuuuauuaug

SEQ ID NO: 1489984 - RNA, 19 nt, Homo sapiens
  misc_RNA (1)...(19): siRNA sense strand
ucuugguguuugcccuuua

SEQ ID NO: 1489985 - RNA, 19 nt, Homo sapiens
  misc_RNA (1)...(19): siRNA sense strand
gaugacucaauugcugaua

SEQ ID NO: 1489986 - RNA, 19 nt, Homo sapiens
  misc_RNA (1)...(19): siRNA sense strand
gcuaaacacgaagcagaau

SEQ ID NO: 1489987 - RNA, 19 nt, Homo sapiens
  misc_RNA (1)...(19): siRNA sense strand
ggacuucaggcucccaguu

SEQ ID NO: 1489988 - RNA, 19 nt, Homo sapiens
  misc_RNA (1)...(19): siRNA sense strand
gaauuggaagguccugaga

SEQ ID NO: 1489989 - RNA, 19 nt, Homo sapiens
  misc_RNA (1)...(19): siRNA sense strand
gggcaggcuuucagucucu

SEQ ID NO: 1489990 - RNA, 19 nt, Homo sapiens
  misc_RNA (1)...(19): siRNA sense strand
uaccugguguccuccauga

SEQ ID NO: 1489991 - RNA, 19 nt, Homo sapiens
  misc_RNA (1)...(19): siRNA sense strand
acagacaacagaauuggaa

SEQ ID NO: 1489992 - RNA, 19 nt, Homo sapiens
  misc_RNA (1)...(19): siRNA sense strand
gcuacagacaacagaauug

SEQ ID NO: 1489993 - RNA, 19 nt, Homo sapiens
  misc_RNA (1)...(19): siRNA sense strand
uggaagguccugagagcua

SEQ ID NO: 1489994 - RNA, 19 nt, Homo sapiens
  misc_RNA (1)...(19): siRNA sense strand
caaggacacacagcaaguu

SEQ ID NO: 1489995 - RNA, 19 nt, Homo sapiens
  misc_RNA (1)...(19): siRNA sense strand
aaggacacacagcaaguua

SEQ ID NO: 1489996 - RNA, 19 nt, Homo sapiens
  misc_RNA (1)...(19): siRNA sense strand
uggacucucucucccagaa

SEQ ID NO: 1489997 - RNA, 19 nt, Homo sapiens
  misc_RNA (1)...(19): siRNA sense strand
gguacagagccacauguug

SEQ ID NO: 1489998 - RNA, 19 nt, Homo sapiens
  misc_RNA (1)...(19): siRNA sense strand
gugacacucccuugccuuu

SEQ ID NO: 1489999 - RNA, 19 nt, Homo sapiens
  misc_RNA (1)...(19): siRNA sense strand
gcgccaugcuccagguaca

SEQ ID NO: 1490000 - RNA, 19 nt, Homo sapiens
  misc_RNA (1)...(19): siRNA sense strand
gagggcaggcuuucagucu

SEQ ID NO: 1490001 - RNA, 19 nt, Homo sapiens
  misc_RNA (1)...(19): siRNA sense strand
gacuucaggcucccaguug

SEQ ID NO: 1490002 - RNA, 19 nt, Homo sapiens
  misc_RNA (1)...(19): siRNA sense strand
ccaaggacacacagcaagu

SEQ ID NO: 1490003 - RNA, 19 nt, Homo sapiens
  misc_RNA (1)...(19): siRNA sense strand
gacucucucucccagaauc

SEQ ID NO: 1490004 - RNA, 19 nt, Homo sapiens
  misc_RNA (1)...(19): siRNA sense strand
cuuaagcccaggagugauu

SEQ ID NO: 1490005 - RNA, 19 nt, Homo sapiens
  misc_RNA (1)...(19): siRNA sense strand
caucuucaguuuucauaug

SEQ ID NO: 1490006 - RNA, 19 nt, Homo sapiens
  misc_RNA (1)...(19): siRNA sense strand
guccugagagcuaccagaa

SEQ ID NO: 1490007 - RNA, 19 nt, Homo sapiens
  misc_RNA (1)...(19): siRNA sense strand
gacacucccuugccuuucc

SEQ ID NO: 1490008 - RNA, 19 nt, Homo sapiens
  misc_RNA (1)...(19): siRNA sense strand
gagaaacuguggagcuuua

SEQ ID NO: 1490009 - RNA, 19 nt, Homo sapiens
  misc_RNA (1)...(19): siRNA sense strand
gacaagggauguucucaaa

SEQ ID NO: 1490010 - RNA, 19 nt, Homo sapiens
  misc_RNA (1)...(19): siRNA sense strand
uaagguggaugaugacuuu

SEQ ID NO: 1490011 - RNA, 19 nt, Homo sapiens
  misc_RNA (1)...(19): siRNA sense strand
gaaagugcaucacagacaa

SEQ ID NO: 1490012 - RNA, 19 nt, Homo sapiens
  misc_RNA (1)...(19): siRNA sense strand
ggaagcagaucaaagaaag

SEQ ID NO: 1490013 - RNA, 19 nt, Homo sapiens
  misc_RNA (1)...(19): siRNA sense strand
gguguaagguggaugauga

SEQ ID NO: 1490014 - RNA, 19 nt, Homo sapiens
  misc_RNA (1)...(19): siRNA sense strand
gggcagacauuaacauuca

SEQ ID NO: 1490015 - RNA, 19 nt, Homo sapiens
  misc_RNA (1)...(19): siRNA sense strand
ccagagcuccgacuuauuu

SEQ ID NO: 1490016 - RNA, 19 nt, Homo sapiens
  misc_RNA (1)...(19): siRNA sense strand
ccacauuggugccucauga

SEQ ID NO: 1490017 - RNA, 19 nt, Homo sapiens
  misc_RNA (1)...(19): siRNA sense strand
caagcugugugcauuagua

SEQ ID NO: 1490018 - RNA, 19 nt, Homo sapiens
  misc_RNA (1)...(19): siRNA sense strand
gccagaagcucauagaaca

SEQ ID NO: 1490019 - RNA, 19 nt, Homo sapiens
  misc_RNA (1)...(19): siRNA sense strand
uuggaugacucaauucuua

SEQ ID NO: 1490020 - RNA, 19 nt, Homo sapiens
  misc_RNA (1)...(19): siRNA sense strand
caacguugauuaccaguuc

SEQ ID NO: 1490021 - RNA, 19 nt, Homo sapiens
  misc_RNA (1)...(19): siRNA sense strand
ucaguuggaugacucaauu

SEQ ID NO: 1490022 - RNA, 19 nt, Homo sapiens
  misc_RNA (1)...(19): siRNA sense strand
gauggaaaguguuaguguu

SEQ ID NO: 1490023 - RNA, 19 nt, Homo sapiens
  misc_RNA (1)...(19): siRNA sense strand
gaaccaccaguaauaauga

SEQ ID NO: 1490024 - RNA, 19 nt, Homo sapiens
  misc_RNA (1)...(19): siRNA sense strand
gaucaagcugugugcauua

SEQ ID NO: 1490025 - RNA, 19 nt, Homo sapiens
  misc_RNA (1)...(19): siRNA sense strand
ggacagcuuaccagaagua

SEQ ID NO: 1490026 - RNA, 19 nt, Homo sapiens
  misc_RNA (1)...(19): siRNA sense strand
ggaaaguguuaguguuuua

SEQ ID NO: 1490027 - RNA, 19 nt, Homo sapiens
  misc_RNA (1)...(19): siRNA sense strand
ggaucaagcugugugcauu

SEQ ID NO: 1490028 - RNA, 19 nt, Homo sapiens
  misc_RNA (1)...(19): siRNA sense strand
gauaggucauuccacauug

SEQ ID NO: 1490029 - RNA, 19 nt, Homo sapiens
  misc_RNA (1)...(19): siRNA sense strand
uuggaaagcuccuggauga

SEQ ID NO: 1490030 - RNA, 19 nt, Homo sapiens
  misc_RNA (1)...(19): siRNA sense strand
cuaggaaccaccaguaaua

SEQ ID NO: 1490031 - RNA, 19 nt, Homo sapiens
  misc_RNA (1)...(19): siRNA sense strand
gaucaaagaaagugcauca

SEQ ID NO: 1490032 - RNA, 19 nt, Homo sapiens
  misc_RNA (1)...(19): siRNA sense strand
gagaagagaaugagaaacu

SEQ ID NO: 1490033 - RNA, 19 nt, Homo sapiens
  misc_RNA (1)...(19): siRNA sense strand
ggaaccaccaguaauaaug

SEQ ID NO: 1490034 - RNA, 19 nt, Homo sapiens
  misc_RNA (1)...(19): siRNA sense strand
gacauuaacauucagaguu

SEQ ID NO: 1490035 - RNA, 19 nt, Homo sapiens
  misc_RNA (1)...(19): siRNA sense strand
caacacugcagaggacuua

SEQ ID NO: 1490036 - RNA, 19 nt, Homo sapiens
  misc_RNA (1)...(19): siRNA sense strand
gaacaggagaccauuaaac

SEQ ID NO: 1490037 - RNA, 19 nt, Homo sapiens
  misc_RNA (1)...(19): siRNA sense strand
acauuaacauucagaguug

SEQ ID NO: 1490038 - RNA, 19 nt, Homo sapiens
  misc_RNA (1)...(19): siRNA sense strand
gauagaagaacuaauagag

SEQ ID NO: 1490039 - RNA, 19 nt, Homo sapiens
  misc_RNA (1)...(19): siRNA sense strand
guacagauagaagaacuaa

SEQ ID NO: 1490040 - RNA, 19 nt, Homo sapiens
  misc_RNA (1)...(19): siRNA sense strand
ggauguauauguagguucu

SEQ ID NO: 1490041 - RNA, 19 nt, Homo sapiens
  misc_RNA (1)...(19): siRNA sense strand
ggagaccauuaaaccacua

SEQ ID NO: 1490042 - RNA, 19 nt, Homo sapiens
  misc_RNA (1)...(19): siRNA sense strand
agacagaagagacagcaua

SEQ ID NO: 1490043 - RNA, 19 nt, Homo sapiens
  misc_RNA (1)...(19): siRNA sense strand
gguccacugucacguuuga

SEQ ID NO: 1490044 - RNA, 19 nt, Homo sapiens
  misc_RNA (1)...(19): siRNA sense strand
gaagagaaugagaaacugu

SEQ ID NO: 1490045 - RNA, 19 nt, Homo sapiens
  misc_RNA (1)...(19): siRNA sense strand
gcacauagaccccaacguu

SEQ ID NO: 1490046 - RNA, 19 nt, Homo sapiens
  misc_RNA (1)...(19): siRNA sense strand
gggagaagagaaugagaaa

SEQ ID NO: 1490047 - RNA, 19 nt, Homo sapiens
  misc_RNA (1)...(19): siRNA sense strand
cagaagagacagcauagga

SEQ ID NO: 1490048 - RNA, 19 nt, Homo sapiens
  misc_RNA (1)...(19): siRNA sense strand
ccauuaaaccacuagauga

SEQ ID NO: 1490049 - RNA, 19 nt, Homo sapiens
  misc_RNA (1)...(19): siRNA sense strand
aagcuucgaguaacuauaa

SEQ ID NO: 1490050 - RNA, 19 nt, Homo sapiens
  misc_RNA (1)...(19): siRNA sense strand
gaggauguauauguagguu

SEQ ID NO: 1490051 - RNA, 19 nt, Homo sapiens
  misc_RNA (1)...(19): siRNA sense strand
gaaaugacaaaucaguuac

SEQ ID NO: 1490052 - RNA, 19 nt, Homo sapiens
  misc_RNA (1)...(19): siRNA sense strand
ugaugugccuuguuuaucu

SEQ ID NO: 1490053 - RNA, 19 nt, Homo sapiens
  misc_RNA (1)...(19): siRNA sense strand
gagcagucgaagaaauaua

SEQ ID NO: 1490054 - RNA, 19 nt, Homo sapiens
  misc_RNA (1)...(19): siRNA sense strand
aaagaaagugcaucacaga

SEQ ID NO: 1490055 - RNA, 19 nt, Homo sapiens
  misc_RNA (1)...(19): siRNA sense strand
ucgaagaaauauagcacuu

SEQ ID NO: 1490056 - RNA, 19 nt, Homo sapiens
  misc_RNA (1)...(19): siRNA sense strand
gcuccaguuucguaaaugu

SEQ ID NO: 1490057 - RNA, 19 nt, Homo sapiens
  misc_RNA (1)...(19): siRNA sense strand
ugguugaugugccuuguuu

SEQ ID NO: 1490058 - RNA, 19 nt, Homo sapiens
  misc_RNA (1)...(19): siRNA sense strand
guauauguagguucugaaa

SEQ ID NO: 1490059 - RNA, 19 nt, Homo sapiens
  misc_RNA (1)...(19): siRNA sense strand
ucaaagaaagugcaucaca

SEQ ID NO: 1490060 - RNA, 19 nt, Homo sapiens
  misc_RNA (1)...(19): siRNA sense strand
gugguucucuuuacuuugg

SEQ ID NO: 1490061 - RNA, 19 nt, Homo sapiens
  misc_RNA (1)...(19): siRNA sense strand
uuguuuaucugcucaguug

SEQ ID NO: 1490062 - RNA, 19 nt, Homo sapiens
  misc_RNA (1)...(19): siRNA sense strand
ggauggaaaguguuagugu

SEQ ID NO: 1490063 - RNA, 19 nt, Homo sapiens
  misc_RNA (1)...(19): siRNA sense strand
gguggaugaugacuuuaca

SEQ ID NO: 1490064 - RNA, 19 nt, Homo sapiens
  misc_RNA (1)...(19): siRNA sense strand
uaguacaaauggugcaguu

SEQ ID NO: 1490065 - RNA, 19 nt, Homo sapiens
  misc_RNA (1)...(19): siRNA sense strand
gcauggaacaguagcaucu

SEQ ID NO: 1490066 - RNA, 19 nt, Homo sapiens
  misc_RNA (1)...(19): siRNA sense strand
cuccagagcuccgacuuau

SEQ ID NO: 1490067 - RNA, 19 nt, Homo sapiens
  misc_RNA (1)...(19): siRNA sense strand
cugagcagucgaagaaaua

SEQ ID NO: 1490068 - RNA, 19 nt, Homo sapiens
  misc_RNA (1)...(19): siRNA sense strand
agucugagcagucgaagaa

SEQ ID NO: 1490069 - RNA, 19 nt, Homo sapiens
  misc_RNA (1)...(19): siRNA sense strand
gauuacaggcuccaguuuc

SEQ ID NO: 1490070 - RNA, 19 nt, Homo sapiens
  misc_RNA (1)...(19): siRNA sense strand
gaaaccuggaggcaucauu

SEQ ID NO: 1490071 - RNA, 19 nt, Homo sapiens
  misc_RNA (1)...(19): siRNA sense strand
gaugugccuuguuuaucug

SEQ ID NO: 1490072 - RNA, 19 nt, Homo sapiens
  misc_RNA (1)...(19): siRNA sense strand
guacaaauggugcaguuuu

SEQ ID NO: 1490073 - RNA, 19 nt, Homo sapiens
  misc_RNA (1)...(19): siRNA sense strand
gaugguguaagguggauga

SEQ ID NO: 1490074 - RNA, 19 nt, Homo sapiens
  misc_RNA (1)...(19): siRNA sense strand
uaucugcucaguuggauga

SEQ ID NO: 1490075 - RNA, 19 nt, Homo sapiens
  misc_RNA (1)...(19): siRNA sense strand
gauuaccaguucagagucu

SEQ ID NO: 1490076 - RNA, 19 nt, Homo sapiens
  misc_RNA (1)...(19): siRNA sense strand
uaggaaccaccaguaauaa

SEQ ID NO: 1490077 - RNA, 19 nt, Homo sapiens
  misc_RNA (1)...(19): siRNA sense strand
uaccuuuacugguugaugu

SEQ ID NO: 1490078 - RNA, 19 nt, Homo sapiens
  misc_RNA (1)...(19): siRNA sense strand
gcagacauuaacauucaga

SEQ ID NO: 1490079 - RNA, 19 nt, Homo sapiens
  misc_RNA (1)...(19): siRNA sense strand
guugaugugccuuguuuau

SEQ ID NO: 1490080 - RNA, 19 nt, Homo sapiens
  misc_RNA (1)...(19): siRNA sense strand
uuggacagcuuaccagaag

SEQ ID NO: 1490081 - RNA, 19 nt, Homo sapiens
  misc_RNA (1)...(19): siRNA sense strand
cuugaucagucuugugguu

SEQ ID NO: 1490082 - RNA, 19 nt, Homo sapiens
  misc_RNA (1)...(19): siRNA sense strand
acacuucaagcuucgagua

SEQ ID NO: 1490083 - RNA, 19 nt, Homo sapiens
  misc_RNA (1)...(19): siRNA sense strand
cauaggagugugugcagaa

SEQ ID NO: 1490084 - RNA, 19 nt, Homo sapiens
  misc_RNA (1)...(19): siRNA sense strand
gacagaagagacagcauag

SEQ ID NO: 1490085 - RNA, 19 nt, Homo sapiens
  misc_RNA (1)...(19): siRNA sense strand
ucugagcagucgaagaaau

SEQ ID NO: 1490086 - RNA, 19 nt, Homo sapiens
  misc_RNA (1)...(19): siRNA sense strand
uguagguucugaaacugaa

SEQ ID NO: 1490087 - RNA, 19 nt, Homo sapiens
  misc_RNA (1)...(19): siRNA sense strand
aaaccuggaggcaucauug

SEQ ID NO: 1490088 - RNA, 19 nt, Homo sapiens
  misc_RNA (1)...(19): siRNA sense strand
cauagugaaagaccacauu

SEQ ID NO: 1490089 - RNA, 19 nt, Homo sapiens
  misc_RNA (1)...(19): siRNA sense strand
gaagaacuaauagagaaac

SEQ ID NO: 1490090 - RNA, 19 nt, Homo sapiens
  misc_RNA (1)...(19): siRNA sense strand
uuacuuuggaugcucauuu

SEQ ID NO: 1490091 - RNA, 19 nt, Homo sapiens
  misc_RNA (1)...(19): siRNA sense strand
ggaaaagaaaugacaaauc

SEQ ID NO: 1490092 - RNA, 19 nt, Homo sapiens
  misc_RNA (1)...(19): siRNA sense strand
caucggguguucucuacuc

SEQ ID NO: 1490093 - RNA, 19 nt, Homo sapiens
  misc_RNA (1)...(19): siRNA sense strand
auauguagguucugaaacu

SEQ ID NO: 1490094 - RNA, 19 nt, Homo sapiens
  misc_RNA (1)...(19): siRNA sense strand
agaagagaaugagaaacug

SEQ ID NO: 1490095 - RNA, 19 nt, Homo sapiens
  misc_RNA (1)...(19): siRNA sense strand
uggguccacugucacguuu

SEQ ID NO: 1490096 - RNA, 19 nt, Homo sapiens
  misc_RNA (1)...(19): siRNA sense strand
gcugugugcauuaguacaa

SEQ ID NO: 1490097 - RNA, 19 nt, Homo sapiens
  misc_RNA (1)...(19): siRNA sense strand
cggaagcagaucaaagaaa

SEQ ID NO: 1490098 - RNA, 19 nt, Homo sapiens
  misc_RNA (1)...(19): siRNA sense strand
uugaacaggagaccauuaa

SEQ ID NO: 1490099 - RNA, 19 nt, Homo sapiens
  misc_RNA (1)...(19): siRNA sense strand
agauaggucauuccacauu

SEQ ID NO: 1490100 - RNA, 19 nt, Homo sapiens
  misc_RNA (1)...(19): siRNA sense strand
gcccaccaguacagauaga

SEQ ID NO: 1490101 - RNA, 19 nt, Homo sapiens
  misc_RNA (1)...(19): siRNA sense strand
ucauaguauugcacauaga

SEQ ID NO: 1490102 - RNA, 19 nt, Homo sapiens
  misc_RNA (1)...(19): siRNA sense strand
gagcuccgacuuauuucug

SEQ ID NO: 1490103 - RNA, 19 nt, Homo sapiens
  misc_RNA (1)...(19): siRNA sense strand
cgcggaagcagaucaaaga

SEQ ID NO: 1490104 - RNA, 19 nt, Homo sapiens
  misc_RNA (1)...(19): siRNA sense strand
agaaagugcaucacagaca

SEQ ID NO: 1490105 - RNA, 19 nt, Homo sapiens
  misc_RNA (1)...(19): siRNA sense strand
gagcgauuggugacccuuu

SEQ ID NO: 1490106 - RNA, 19 nt, Homo sapiens
  misc_RNA (1)...(19): siRNA sense strand
ggacagccagacagaagag

SEQ ID NO: 1490107 - RNA, 19 nt, Homo sapiens
  misc_RNA (1)...(19): siRNA sense strand
ucacagacaagggauguuc

SEQ ID NO: 1490108 - RNA, 19 nt, Homo sapiens
  misc_RNA (1)...(19): siRNA sense strand
gagaagucggcgcucauua

SEQ ID NO: 1490109 - RNA, 19 nt, Homo sapiens
  misc_RNA (1)...(19): siRNA sense strand
agaagucggcgcucauuaa

SEQ ID NO: 1490110 - RNA, 19 nt, Homo sapiens
  misc_RNA (1)...(19): siRNA sense strand
ucauuaagcagcuguuuga

SEQ ID NO: 1490111 - RNA, 19 nt, Homo sapiens
  misc_RNA (1)...(19): siRNA sense strand
ggagaagucggcgcucauu

SEQ ID NO: 1490112 - RNA, 19 nt, Homo sapiens
  misc_RNA (1)...(19): siRNA sense strand
gaagucggcgcucauuaag

SEQ ID NO: 1490113 - RNA, 19 nt, Homo sapiens
  misc_RNA (1)...(19): siRNA sense strand
cccaggaggugaccgagaa

SEQ ID NO: 1490114 - RNA, 19 nt, Homo sapiens
  misc_RNA (1)...(19): siRNA sense strand
gagaagagugagcgcauca

SEQ ID NO: 1490115 - RNA, 19 nt, Homo sapiens
  misc_RNA (1)...(19): siRNA sense strand
gcggcuaccugaccuucga

SEQ ID NO: 1490116 - RNA, 19 nt, Homo sapiens
  misc_RNA (1)...(19): siRNA sense strand
agucggcgcucauuaagca

SEQ ID NO: 1490117 - RNA, 19 nt, Homo sapiens
  misc_RNA (1)...(19): siRNA sense strand
ggauuccaccuucaucuag

SEQ ID NO: 1490118 - RNA, 19 nt, Homo sapiens
  misc_RNA (1)...(19): siRNA sense strand
gcagcagaccauccucaug

SEQ ID NO: 1490119 - RNA, 19 nt, Homo sapiens
  misc_RNA (1)...(19): siRNA sense strand
cugcaggguuuggagauga

SEQ ID NO: 1490120 - RNA, 19 nt, Homo sapiens
  misc_RNA (1)...(19): siRNA sense strand
agaccauccucaugcugaa

SEQ ID NO: 1490121 - RNA, 19 nt, Homo sapiens
  misc_RNA (1)...(19): siRNA sense strand
ggaggugaccgagaagagu

SEQ ID NO: 1490122 - RNA, 19 nt, Homo sapiens
  misc_RNA (1)...(19): siRNA sense strand
gcugcaggguuuggagaug

SEQ ID NO: 1490123 - RNA, 19 nt, Homo sapiens
  misc_RNA (1)...(19): siRNA sense strand
gcucauuaagcagcuguuu

SEQ ID NO: 1490124 - RNA, 19 nt, Homo sapiens
  misc_RNA (1)...(19): siRNA sense strand
cagagccagcgccgacuuu

SEQ ID NO: 1490125 - RNA, 19 nt, Homo sapiens
  misc_RNA (1)...(19): siRNA sense strand
gaagagcuaucaaggagua

SEQ ID NO: 1490126 - RNA, 19 nt, Homo sapiens
  misc_RNA (1)...(19): siRNA sense strand
gaaacagcacaaacuauuu

SEQ ID NO: 1490127 - RNA, 19 nt, Homo sapiens
  misc_RNA (1)...(19): siRNA sense strand
cagcguacccgauaccuua

SEQ ID NO: 1490128 - RNA, 19 nt, Homo sapiens
  misc_RNA (1)...(19): siRNA sense strand
gcacucagguguuuguuac

SEQ ID NO: 1490129 - RNA, 19 nt, Homo sapiens
  misc_RNA (1)...(19): siRNA sense strand
ggaccugucuugugguuca

SEQ ID NO: 1490130 - RNA, 19 nt, Homo sapiens
  misc_RNA (1)...(19): siRNA sense strand
gggccaaaccggaaauuaa

SEQ ID NO: 1490131 - RNA, 19 nt, Homo sapiens
  misc_RNA (1)...(19): siRNA sense strand
ugaaaucucucuugcugau

SEQ ID NO: 1490132 - RNA, 19 nt, Homo sapiens
  misc_RNA (1)...(19): siRNA sense strand
cccgauaccuuaccaaaug

SEQ ID NO: 1490133 - RNA, 19 nt, Homo sapiens
  misc_RNA (1)...(19): siRNA sense strand
agaaacagcacaaacuauu

SEQ ID NO: 1490134 - RNA, 19 nt, Homo sapiens
  misc_RNA (1)...(19): siRNA sense strand
caaauggaccugucuugug

SEQ ID NO: 1490135 - RNA, 19 nt, Homo sapiens
  misc_RNA (1)...(19): siRNA sense strand
gagaaacagcacaaacuau

SEQ ID NO: 1490136 - RNA, 19 nt, Homo sapiens
  misc_RNA (1)...(19): siRNA sense strand
gagagaaacagcacaaacu

SEQ ID NO: 1490137 - RNA, 19 nt, Homo sapiens
  misc_RNA (1)...(19): siRNA sense strand
cacaaacuauuucguccaa

SEQ ID NO: 1490138 - RNA, 19 nt, Homo sapiens
  misc_RNA (1)...(19): siRNA sense strand
ggccaaaccggaaauuaau

SEQ ID NO: 1490139 - RNA, 19 nt, Homo sapiens
  misc_RNA (1)...(19): siRNA sense strand
agagaaacagcacaaacua

SEQ ID NO: 1490140 - RNA, 19 nt, Homo sapiens
  misc_RNA (1)...(19): siRNA sense strand
caccaagccuggcaacaca

SEQ ID NO: 1490141 - RNA, 19 nt, Homo sapiens
  misc_RNA (1)...(19): siRNA sense strand
gcaacaaacggagauguca

SEQ ID NO: 1490142 - RNA, 19 nt, Homo sapiens
  misc_RNA (1)...(19): siRNA sense strand
aaacagcacaaacuauuuc

SEQ ID NO: 1490143 - RNA, 19 nt, Homo sapiens
  misc_RNA (1)...(19): siRNA sense strand
uaucaaggaguaccaauca

SEQ ID NO: 1490144 - RNA, 19 nt, Homo sapiens
  misc_RNA (1)...(19): siRNA sense strand
uggcaggagucacacaugu

SEQ ID NO: 1490145 - RNA, 19 nt, Homo sapiens
  misc_RNA (1)...(19): siRNA sense strand
caggcuugcugucaaaaua

SEQ ID NO: 1490146 - RNA, 19 nt, Homo sapiens
  misc_RNA (1)...(19): siRNA sense strand
ccgcauccgugaaaucucu

SEQ ID NO: 1490147 - RNA, 19 nt, Homo sapiens
  misc_RNA (1)...(19): siRNA sense strand
ccaaauggaccugucuugu

SEQ ID NO: 1490148 - RNA, 19 nt, Homo sapiens
  misc_RNA (1)...(19): siRNA sense strand
uccaagaccucccaagaac

SEQ ID NO: 1490149 - RNA, 19 nt, Homo sapiens
  misc_RNA (1)...(19): siRNA sense strand
ggcacucagguguuuguua

SEQ ID NO: 1490150 - RNA, 19 nt, Homo sapiens
  misc_RNA (1)...(19): siRNA sense strand
cugaugcuggcaccuauua

SEQ ID NO: 1490151 - RNA, 19 nt, Homo sapiens
  misc_RNA (1)...(19): siRNA sense strand
gguaacuuucccagaguaa

SEQ ID NO: 1490152 - RNA, 19 nt, Homo sapiens
  misc_RNA (1)...(19): siRNA sense strand
caaacggagaugucacaga

SEQ ID NO: 1490153 - RNA, 19 nt, Homo sapiens
  misc_RNA (1)...(19): siRNA sense strand
aaccggaaauuaaucuaca

SEQ ID NO: 1490154 - RNA, 19 nt, Homo sapiens
  misc_RNA (1)...(19): siRNA sense strand
caaaccggaaauuaaucua

SEQ ID NO: 1490155 - RNA, 19 nt, Homo sapiens
  misc_RNA (1)...(19): siRNA sense strand
caagaccucccaagaacag

SEQ ID NO: 1490156 - RNA, 19 nt, Homo sapiens
  misc_RNA (1)...(19): siRNA sense strand
ccaaaccggaaauuaaucu

SEQ ID NO: 1490157 - RNA, 19 nt, Homo sapiens
  misc_RNA (1)...(19): siRNA sense strand
ugcuguaucugcugcuuga

SEQ ID NO: 1490158 - RNA, 19 nt, Homo sapiens
  misc_RNA (1)...(19): siRNA sense strand
aauccaagaccucccaaga

SEQ ID NO: 1490159 - RNA, 19 nt, Homo sapiens
  misc_RNA (1)...(19): siRNA sense strand
guaacuuucccagaguaaa

SEQ ID NO: 1490160 - RNA, 19 nt, Homo sapiens
  misc_RNA (1)...(19): siRNA sense strand
ccuauuacugcgugaaguu

SEQ ID NO: 1490161 - RNA, 19 nt, Homo sapiens
  misc_RNA (1)...(19): siRNA sense strand
gcagcguacccgauaccuu

SEQ ID NO: 1490162 - RNA, 19 nt, Homo sapiens
  misc_RNA (1)...(19): siRNA sense strand
agguaacuuucccagagua

SEQ ID NO: 1490163 - RNA, 19 nt, Homo sapiens
  misc_RNA (1)...(19): siRNA sense strand
ugaacuggcaggagucaca

SEQ ID NO: 1490164 - RNA, 19 nt, Homo sapiens
  misc_RNA (1)...(19): siRNA sense strand
gcaaggagcagaaugauaa

SEQ ID NO: 1490165 - RNA, 19 nt, Homo sapiens
  misc_RNA (1)...(19): siRNA sense strand
gaacaacgcaaauuucuga

SEQ ID NO: 1490166 - RNA, 19 nt, Homo sapiens
  misc_RNA (1)...(19): siRNA sense strand
gagaaaaccuucaacauga

SEQ ID NO: 1490167 - RNA, 19 nt, Homo sapiens
  misc_RNA (1)...(19): siRNA sense strand
gaacuuuauuucgccauuu

SEQ ID NO: 1490168 - RNA, 19 nt, Homo sapiens
  misc_RNA (1)...(19): siRNA sense strand
cccaauaucuguuugagaa

SEQ ID NO: 1490169 - RNA, 19 nt, Homo sapiens
  misc_RNA (1)...(19): siRNA sense strand
gugaugcucuuccuauuug

SEQ ID NO: 1490170 - RNA, 19 nt, Homo sapiens
  misc_RNA (1)...(19): siRNA sense strand
ccauuuacccaguauaaua

SEQ ID NO: 1490171 - RNA, 19 nt, Homo sapiens
  misc_RNA (1)...(19): siRNA sense strand
gaagacccaauaucuguuu

SEQ ID NO: 1490172 - RNA, 19 nt, Homo sapiens
  misc_RNA (1)...(19): siRNA sense strand
ggacugaauuuucuggaua

SEQ ID NO: 1490173 - RNA, 19 nt, Homo sapiens
  misc_RNA (1)...(19): siRNA sense strand
cauaggcaguguagagaaa

SEQ ID NO: 1490174 - RNA, 19 nt, Homo sapiens
  misc_RNA (1)...(19): siRNA sense strand
gaaagugccaagucaaauc

SEQ ID NO: 1490175 - RNA, 19 nt, Homo sapiens
  misc_RNA (1)...(19): siRNA sense strand
gcaauggcaccaacgacua

SEQ ID NO: 1490176 - RNA, 19 nt, Homo sapiens
  misc_RNA (1)...(19): siRNA sense strand
caagggcgaugaccugauc

SEQ ID NO: 1490177 - RNA, 19 nt, Homo sapiens
  misc_RNA (1)...(19): siRNA sense strand
guacagcuaugccaaagac

SEQ ID NO: 1490178 - RNA, 19 nt, Homo sapiens
  misc_RNA (1)...(19): siRNA sense strand
agagaucaaugaggaaauu

SEQ ID NO: 1490179 - RNA, 19 nt, Homo sapiens
  misc_RNA (1)...(19): siRNA sense strand
caagguagacuucgacauc

SEQ ID NO: 1490180 - RNA, 19 nt, Homo sapiens
  misc_RNA (1)...(19): siRNA sense strand
guauugagggacugaauuu

SEQ ID NO: 1490181 - RNA, 19 nt, Homo sapiens
  misc_RNA (1)...(19): siRNA sense strand
gcugcuagcuuuggugaug

SEQ ID NO: 1490182 - RNA, 19 nt, Homo sapiens
  misc_RNA (1)...(19): siRNA sense strand
gggaaagcccgaagcagaa

SEQ ID NO: 1490183 - RNA, 19 nt, Homo sapiens
  misc_RNA (1)...(19): siRNA sense strand
ucaggaacaacgcaaauuu

SEQ ID NO: 1490184 - RNA, 19 nt, Homo sapiens
  misc_RNA (1)...(19): siRNA sense strand
ggugaugcucuuccuauuu

SEQ ID NO: 1490185 - RNA, 19 nt, Homo sapiens
  misc_RNA (1)...(19): siRNA sense strand
gccagaauccgaaucagaa

SEQ ID NO: 1490186 - RNA, 19 nt, Homo sapiens
  misc_RNA (1)...(19): siRNA sense strand
ggaaagcaucccugcaugu

SEQ ID NO: 1490187 - RNA, 19 nt, Homo sapiens
  misc_RNA (1)...(19): siRNA sense strand
gcgaaagcgucaggaacaa

SEQ ID NO: 1490188 - RNA, 19 nt, Homo sapiens
  misc_RNA (1)...(19): siRNA sense strand
ggaaagugccaagucaaau

SEQ ID NO: 1490189 - RNA, 19 nt, Homo sapiens
  misc_RNA (1)...(19): siRNA sense strand
caaauccgaaugccaauca

SEQ ID NO: 1490190 - RNA, 19 nt, Homo sapiens
  misc_RNA (1)...(19): siRNA sense strand
caacaugaacuuuauuucg

SEQ ID NO: 1490191 - RNA, 19 nt, Homo sapiens
  misc_RNA (1)...(19): siRNA sense strand
agucaaaucugaagcacau

SEQ ID NO: 1490192 - RNA, 19 nt, Homo sapiens
  misc_RNA (1)...(19): siRNA sense strand
ccuacaaucuagccaacaa

SEQ ID NO: 1490193 - RNA, 19 nt, Homo sapiens
  misc_RNA (1)...(19): siRNA sense strand
ugaagcacauggcguucuu

SEQ ID NO: 1490194 - RNA, 19 nt, Homo sapiens
  misc_RNA (1)...(19): siRNA sense strand
gaucaaugaggaaauucaa

SEQ ID NO: 1490195 - RNA, 19 nt, Homo sapiens
  misc_RNA (1)...(19): siRNA sense strand
gaaagcaucccugcauguc

SEQ ID NO: 1490196 - RNA, 19 nt, Homo sapiens
  misc_RNA (1)...(19): siRNA sense strand
ggaagacccaauaucuguu

SEQ ID NO: 1490197 - RNA, 19 nt, Homo sapiens
  misc_RNA (1)...(19): siRNA sense strand
gcuacaaccucucugucau

SEQ ID NO: 1490198 - RNA, 19 nt, Homo sapiens
  misc_RNA (1)...(19): siRNA sense strand
cgaaucagaaucagaguca

SEQ ID NO: 1490199 - RNA, 19 nt, Homo sapiens
  misc_RNA (1)...(19): siRNA sense strand
ggcaaggagcagaaugaua

SEQ ID NO: 1490200 - RNA, 19 nt, Homo sapiens
  misc_RNA (1)...(19): siRNA sense strand
ugaacuuuauuucgccauu

SEQ ID NO: 1490201 - RNA, 19 nt, Homo sapiens
  misc_RNA (1)...(19): siRNA sense strand
guagagaucaaugaggaaa

SEQ ID NO: 1490202 - RNA, 19 nt, Homo sapiens
  misc_RNA (1)...(19): siRNA sense strand
cggaagacccaauaucugu

SEQ ID NO: 1490203 - RNA, 19 nt, Homo sapiens
  misc_RNA (1)...(19): siRNA sense strand
ccgcgugggucagaagaaa

SEQ ID NO: 1490204 - RNA, 19 nt, Homo sapiens
  misc_RNA (1)...(19): siRNA sense strand
auauggaguuguacagcua

SEQ ID NO: 1490205 - RNA, 19 nt, Homo sapiens
  misc_RNA (1)...(19): siRNA sense strand
caaagaguuuauggacugu

SEQ ID NO: 1490206 - RNA, 19 nt, Homo sapiens
  misc_RNA (1)...(19): siRNA sense strand
cgggaaaccuggcucuucu

SEQ ID NO: 1490207 - RNA, 19 nt, Homo sapiens
  misc_RNA (1)...(19): siRNA sense strand
gaaauucaaaagcguauug

SEQ ID NO: 1490208 - RNA, 19 nt, Homo sapiens
  misc_RNA (1)...(19): siRNA sense strand
ucuggaaagugccaaguca

SEQ ID NO: 1490209 - RNA, 19 nt, Homo sapiens
  misc_RNA (1)...(19): siRNA sense strand
aaugauaacaccagcaaug

SEQ ID NO: 1490210 - RNA, 19 nt, Homo sapiens
  misc_RNA (1)...(19): siRNA sense strand
ggcgaaagcgucaggaaca

SEQ ID NO: 1490211 - RNA, 19 nt, Homo sapiens
  misc_RNA (1)...(19): siRNA sense strand
gacugucccuacaaucuag

SEQ ID NO: 1490212 - RNA, 19 nt, Homo sapiens
  misc_RNA (1)...(19): siRNA sense strand
ggaacaacgcaaauuucug

SEQ ID NO: 1490213 - RNA, 19 nt, Homo sapiens
  misc_RNA (1)...(19): siRNA sense strand
cugcaugucugcgauggaa

SEQ ID NO: 1490214 - RNA, 19 nt, Homo sapiens
  misc_RNA (1)...(19): siRNA sense strand
caggcaaggagcagaauga

SEQ ID NO: 1490215 - RNA, 19 nt, Homo sapiens
  misc_RNA (1)...(19): siRNA sense strand
uggaaagugccaagucaaa

SEQ ID NO: 1490216 - RNA, 19 nt, Homo sapiens
  misc_RNA (1)...(19): siRNA sense strand
ggucagaagaaaugcacuu

SEQ ID NO: 1490217 - RNA, 19 nt, Homo sapiens
  misc_RNA (1)...(19): siRNA sense strand
caggaacaacgcaaauuuc

SEQ ID NO: 1490218 - RNA, 19 nt, Homo sapiens
  misc_RNA (1)...(19): siRNA sense strand
gcggaagacccaauaucug

SEQ ID NO: 1490219 - RNA, 19 nt, Homo sapiens
  misc_RNA (1)...(19): siRNA sense strand
cgccauuuacccaguauaa

SEQ ID NO: 1490220 - RNA, 19 nt, Homo sapiens
  misc_RNA (1)...(19): siRNA sense strand
ugagaaaaccuucaacaug

SEQ ID NO: 1490221 - RNA, 19 nt, Homo sapiens
  misc_RNA (1)...(19): siRNA sense strand
uggcaccaacgacuacaua

SEQ ID NO: 1490222 - RNA, 19 nt, Homo sapiens
  misc_RNA (1)...(19): siRNA sense strand
cuacaaccucucugucaug

SEQ ID NO: 1490223 - RNA, 19 nt, Homo sapiens
  misc_RNA (1)...(19): siRNA sense strand
agaaugauaacaccagcaa

SEQ ID NO: 1490224 - RNA, 19 nt, Homo sapiens
  misc_RNA (1)...(19): siRNA sense strand
agaauccgaaucagaauca

SEQ ID NO: 1490225 - RNA, 19 nt, Homo sapiens
  misc_RNA (1)...(19): siRNA sense strand
uagcuuuggugaugcucuu

SEQ ID NO: 1490226 - RNA, 19 nt, Homo sapiens
  misc_RNA (1)...(19): siRNA sense strand
gcgggaaaccuggcucuuc

SEQ ID NO: 1490227 - RNA, 19 nt, Homo sapiens
  misc_RNA (1)...(19): siRNA sense strand
aagguagacuucgacauca

SEQ ID NO: 1490228 - RNA, 19 nt, Homo sapiens
  misc_RNA (1)...(19): siRNA sense strand
ccaauaucuguuugagaaa

SEQ ID NO: 1490229 - RNA, 19 nt, Homo sapiens
  misc_RNA (1)...(19): siRNA sense strand
ccagugucccgguacuuga

SEQ ID NO: 1490230 - RNA, 19 nt, Homo sapiens
  misc_RNA (1)...(19): siRNA sense strand
gcaccaacgacuacauagg

SEQ ID NO: 1490231 - RNA, 19 nt, Homo sapiens
  misc_RNA (1)...(19): siRNA sense strand
gacccaauaucuguuugag

SEQ ID NO: 1490232 - RNA, 19 nt, Homo sapiens
  misc_RNA (1)...(19): siRNA sense strand
ccaagucaaaucugaagca

SEQ ID NO: 1490233 - RNA, 19 nt, Homo sapiens
  misc_RNA (1)...(19): siRNA sense strand
uggugaugcucuuccuauu

SEQ ID NO: 1490234 - RNA, 19 nt, Homo sapiens
  misc_RNA (1)...(19): siRNA sense strand
ccgugaucguccuccaaua

SEQ ID NO: 1490235 - RNA, 19 nt, Homo sapiens
  misc_RNA (1)...(19): siRNA sense strand
ugaauuuucuggauaugga

SEQ ID NO: 1490236 - RNA, 19 nt, Homo sapiens
  misc_RNA (1)...(19): siRNA sense strand
gcgugggucagaagaaaug

SEQ ID NO: 1490237 - RNA, 19 nt, Homo sapiens
  misc_RNA (1)...(19): siRNA sense strand
cguauugagggacugaauu

SEQ ID NO: 1490238 - RNA, 19 nt, Homo sapiens
  misc_RNA (1)...(19): siRNA sense strand
guguagagaaauggcguua

SEQ ID NO: 1490239 - RNA, 19 nt, Homo sapiens
  misc_RNA (1)...(19): siRNA sense strand
uaggcaguguagagaaaug

SEQ ID NO: 1490240 - RNA, 19 nt, Homo sapiens
  misc_RNA (1)...(19): siRNA sense strand
aaucagaaucagagucaga

SEQ ID NO: 1490241 - RNA, 19 nt, Homo sapiens
  misc_RNA (1)...(19): siRNA sense strand
gcaaggagcagaaugauaa

SEQ ID NO: 1490242 - RNA, 19 nt, Homo sapiens
  misc_RNA (1)...(19): siRNA sense strand
gaacaacgcaaauuucuga

SEQ ID NO: 1490243 - RNA, 19 nt, Homo sapiens
  misc_RNA (1)...(19): siRNA sense strand
gagaaaaccuucaacauga

SEQ ID NO: 1490244 - RNA, 19 nt, Homo sapiens
  misc_RNA (1)...(19): siRNA sense strand
gaacuuuauuucgccauuu

SEQ ID NO: 1490245 - RNA, 19 nt, Homo sapiens
  misc_RNA (1)...(19): siRNA sense strand
cccaauaucuguuugagaa

SEQ ID NO: 1490246 - RNA, 19 nt, Homo sapiens
  misc_RNA (1)...(19): siRNA sense strand
gugaugcucuuccuauuug

SEQ ID NO: 1490247 - RNA, 19 nt, Homo sapiens
  misc_RNA (1)...(19): siRNA sense strand
ccauuuacccaguauaaua

SEQ ID NO: 1490248 - RNA, 19 nt, Homo sapiens
  misc_RNA (1)...(19): siRNA sense strand
gaagacccaauaucuguuu

SEQ ID NO: 1490249 - RNA, 19 nt, Homo sapiens
  misc_RNA (1)...(19): siRNA sense strand
ggacugaauuuucuggaua

SEQ ID NO: 1490250 - RNA, 19 nt, Homo sapiens
  misc_RNA (1)...(19): siRNA sense strand
cauaggcaguguagagaaa

SEQ ID NO: 1490251 - RNA, 19 nt, Homo sapiens
  misc_RNA (1)...(19): siRNA sense strand
gaaagugccaagucaaauc

SEQ ID NO: 1490252 - RNA, 19 nt, Homo sapiens
  misc_RNA (1)...(19): siRNA sense strand
gcaauggcaccaacgacua

SEQ ID NO: 1490253 - RNA, 19 nt, Homo sapiens
  misc_RNA (1)...(19): siRNA sense strand
caagggcgaugaccugauc

SEQ ID NO: 1490254 - RNA, 19 nt, Homo sapiens
  misc_RNA (1)...(19): siRNA sense strand
guacagcuaugccaaagac

SEQ ID NO: 1490255 - RNA, 19 nt, Homo sapiens
  misc_RNA (1)...(19): siRNA sense strand
agagaucaaugaggaaauu

SEQ ID NO: 1490256 - RNA, 19 nt, Homo sapiens
  misc_RNA (1)...(19): siRNA sense strand
caagguagacuucgacauc

SEQ ID NO: 1490257 - RNA, 19 nt, Homo sapiens
  misc_RNA (1)...(19): siRNA sense strand
guauugagggacugaauuu

SEQ ID NO: 1490258 - RNA, 19 nt, Homo sapiens
  misc_RNA (1)...(19): siRNA sense strand
gcugcuagcuuuggugaug

SEQ ID NO: 1490259 - RNA, 19 nt, Homo sapiens
  misc_RNA (1)...(19): siRNA sense strand
gggaaagcccgaagcagaa

SEQ ID NO: 1490260 - RNA, 19 nt, Homo sapiens
  misc_RNA (1)...(19): siRNA sense strand
ucaggaacaacgcaaauuu

SEQ ID NO: 1490261 - RNA, 19 nt, Homo sapiens
  misc_RNA (1)...(19): siRNA sense strand
ggugaugcucuuccuauuu

SEQ ID NO: 1490262 - RNA, 19 nt, Homo sapiens
  misc_RNA (1)...(19): siRNA sense strand
gccagaauccgaaucagaa

SEQ ID NO: 1490263 - RNA, 19 nt, Homo sapiens
  misc_RNA (1)...(19): siRNA sense strand
ggaaagcaucccugcaugu

SEQ ID NO: 1490264 - RNA, 19 nt, Homo sapiens
  misc_RNA (1)...(19): siRNA sense strand
gcgaaagcgucaggaacaa

SEQ ID NO: 1490265 - RNA, 19 nt, Homo sapiens
  misc_RNA (1)...(19): siRNA sense strand
ggaaagugccaagucaaau

SEQ ID NO: 1490266 - RNA, 19 nt, Homo sapiens
  misc_RNA (1)...(19): siRNA sense strand
caaauccgaaugccaauca

SEQ ID NO: 1490267 - RNA, 19 nt, Homo sapiens
  misc_RNA (1)...(19): siRNA sense strand
caacaugaacuuuauuucg

SEQ ID NO: 1490268 - RNA, 19 nt, Homo sapiens
  misc_RNA (1)...(19): siRNA sense strand
agucaaaucugaagcacau

SEQ ID NO: 1490269 - RNA, 19 nt, Homo sapiens
  misc_RNA (1)...(19): siRNA sense strand
ccuacaaucuagccaacaa

SEQ ID NO: 1490270 - RNA, 19 nt, Homo sapiens
  misc_RNA (1)...(19): siRNA sense strand
ugaagcacauggcguucuu

SEQ ID NO: 1490271 - RNA, 19 nt, Homo sapiens
  misc_RNA (1)...(19): siRNA sense strand
gaucaaugaggaaauucaa

SEQ ID NO: 1490272 - RNA, 19 nt, Homo sapiens
  misc_RNA (1)...(19): siRNA sense strand
gaaagcaucccugcauguc

SEQ ID NO: 1490273 - RNA, 19 nt, Homo sapiens
  misc_RNA (1)...(19): siRNA sense strand
ggaagacccaauaucuguu

SEQ ID NO: 1490274 - RNA, 19 nt, Homo sapiens
  misc_RNA (1)...(19): siRNA sense strand
gcuacaaccucucugucau

SEQ ID NO: 1490275 - RNA, 19 nt, Homo sapiens
  misc_RNA (1)...(19): siRNA sense strand
cgaaucagaaucagaguca

SEQ ID NO: 1490276 - RNA, 19 nt, Homo sapiens
  misc_RNA (1)...(19): siRNA sense strand
ggcaaggagcagaaugaua

SEQ ID NO: 1490277 - RNA, 19 nt, Homo sapiens
  misc_RNA (1)...(19): siRNA sense strand
ugaacuuuauuucgccauu

SEQ ID NO: 1490278 - RNA, 19 nt, Homo sapiens
  misc_RNA (1)...(19): siRNA sense strand
guagagaucaaugaggaaa

SEQ ID NO: 1490279 - RNA, 19 nt, Homo sapiens
  misc_RNA (1)...(19): siRNA sense strand
cggaagacccaauaucugu

SEQ ID NO: 1490280 - RNA, 19 nt, Homo sapiens
  misc_RNA (1)...(19): siRNA sense strand
ccgcgugggucagaagaaa

SEQ ID NO: 1490281 - RNA, 19 nt, Homo sapiens
  misc_RNA (1)...(19): siRNA sense strand
auauggaguuguacagcua

SEQ ID NO: 1490282 - RNA, 19 nt, Homo sapiens
  misc_RNA (1)...(19): siRNA sense strand
ucgggaacauggaugagaa

SEQ ID NO: 1490283 - RNA, 19 nt, Homo sapiens
  misc_RNA (1)...(19): siRNA sense strand
caaagaguuuauggacugu

SEQ ID NO: 1490284 - RNA, 19 nt, Homo sapiens
  misc_RNA (1)...(19): siRNA sense strand
cgggaaaccuggcucuucu

SEQ ID NO: 1490285 - RNA, 19 nt, Homo sapiens
  misc_RNA (1)...(19): siRNA sense strand
gaaauucaaaagcguauug

SEQ ID NO: 1490286 - RNA, 19 nt, Homo sapiens
  misc_RNA (1)...(19): siRNA sense strand
ucuggaaagugccaaguca

SEQ ID NO: 1490287 - RNA, 19 nt, Homo sapiens
  misc_RNA (1)...(19): siRNA sense strand
aaugauaacaccagcaaug

SEQ ID NO: 1490288 - RNA, 19 nt, Homo sapiens
  misc_RNA (1)...(19): siRNA sense strand
ggcgaaagcgucaggaaca

SEQ ID NO: 1490289 - RNA, 19 nt, Homo sapiens
  misc_RNA (1)...(19): siRNA sense strand
ggaacauggaugagaaauc

SEQ ID NO: 1490290 - RNA, 19 nt, Homo sapiens
  misc_RNA (1)...(19): siRNA sense strand
gacugucccuacaaucuag

SEQ ID NO: 1490291 - RNA, 19 nt, Homo sapiens
  misc_RNA (1)...(19): siRNA sense strand
ggaacaacgcaaauuucug

SEQ ID NO: 1490292 - RNA, 19 nt, Homo sapiens
  misc_RNA (1)...(19): siRNA sense strand
cugcaugucugcgauggaa

SEQ ID NO: 1490293 - RNA, 19 nt, Homo sapiens
  misc_RNA (1)...(19): siRNA sense strand
caggcaaggagcagaauga

SEQ ID NO: 1490294 - RNA, 19 nt, Homo sapiens
  misc_RNA (1)...(19): siRNA sense strand
uggaaagugccaagucaaa

SEQ ID NO: 1490295 - RNA, 19 nt, Homo sapiens
  misc_RNA (1)...(19): siRNA sense strand
ggucagaagaaaugcacuu

SEQ ID NO: 1490296 - RNA, 19 nt, Homo sapiens
  misc_RNA (1)...(19): siRNA sense strand
caggaacaacgcaaauuuc

SEQ ID NO: 1490297 - RNA, 19 nt, Homo sapiens
  misc_RNA (1)...(19): siRNA sense strand
gcggaagacccaauaucug

SEQ ID NO: 1490298 - RNA, 19 nt, Homo sapiens
  misc_RNA (1)...(19): siRNA sense strand
cgccauuuacccaguauaa

SEQ ID NO: 1490299 - RNA, 19 nt, Homo sapiens
  misc_RNA (1)...(19): siRNA sense strand
ugagaaaaccuucaacaug

SEQ ID NO: 1490300 - RNA, 19 nt, Homo sapiens
  misc_RNA (1)...(19): siRNA sense strand
uggcaccaacgacuacaua

SEQ ID NO: 1490301 - RNA, 19 nt, Homo sapiens
  misc_RNA (1)...(19): siRNA sense strand
cuacaaccucucugucaug

SEQ ID NO: 1490302 - RNA, 19 nt, Homo sapiens
  misc_RNA (1)...(19): siRNA sense strand
agaaugauaacaccagcaa

SEQ ID NO: 1490303 - RNA, 19 nt, Homo sapiens
  misc_RNA (1)...(19): siRNA sense strand
agaauccgaaucagaauca

SEQ ID NO: 1490304 - RNA, 19 nt, Homo sapiens
  misc_RNA (1)...(19): siRNA sense strand
uagcuuuggugaugcucuu

SEQ ID NO: 1490305 - RNA, 19 nt, Homo sapiens
  misc_RNA (1)...(19): siRNA sense strand
gcgggaaaccuggcucuuc

SEQ ID NO: 1490306 - RNA, 19 nt, Homo sapiens
  misc_RNA (1)...(19): siRNA sense strand
ccaauaucuguuugagaaa

SEQ ID NO: 1490307 - RNA, 19 nt, Homo sapiens
  misc_RNA (1)...(19): siRNA sense strand
aagguagacuucgacauca

SEQ ID NO: 1490308 - RNA, 19 nt, Homo sapiens
  misc_RNA (1)...(19): siRNA sense strand
ccagugucccgguacuuga

SEQ ID NO: 1490309 - RNA, 19 nt, Homo sapiens
  misc_RNA (1)...(19): siRNA sense strand
gcaccaacgacuacauagg

SEQ ID NO: 1490310 - RNA, 19 nt, Homo sapiens
  misc_RNA (1)...(19): siRNA sense strand
uggugaugcucuuccuauu

SEQ ID NO: 1490311 - RNA, 19 nt, Homo sapiens
  misc_RNA (1)...(19): siRNA sense strand
gacccaauaucuguuugag

SEQ ID NO: 1490312 - RNA, 19 nt, Homo sapiens
  misc_RNA (1)...(19): siRNA sense strand
ccaagucaaaucugaagca

SEQ ID NO: 1490313 - RNA, 19 nt, Homo sapiens
  misc_RNA (1)...(19): siRNA sense strand
ccgugaucguccuccaaua

SEQ ID NO: 1490314 - RNA, 19 nt, Homo sapiens
  misc_RNA (1)...(19): siRNA sense strand
gcgugggucagaagaaaug

SEQ ID NO: 1490315 - RNA, 19 nt, Homo sapiens
  misc_RNA (1)...(19): siRNA sense strand
ugaauuuucuggauaugga

SEQ ID NO: 1490316 - RNA, 19 nt, Homo sapiens
  misc_RNA (1)...(19): siRNA sense strand
cguauugagggacugaauu

SEQ ID NO: 1490317 - RNA, 19 nt, Homo sapiens
  misc_RNA (1)...(19): siRNA sense strand
guguagagaaauggcguua

SEQ ID NO: 1490318 - RNA, 19 nt, Homo sapiens
  misc_RNA (1)...(19): siRNA sense strand
uaggcaguguagagaaaug

SEQ ID NO: 1490319 - RNA, 19 nt, Homo sapiens
  misc_RNA (1)...(19): siRNA sense strand
aaucagaaucagagucaga

SEQ ID NO: 1490320 - RNA, 19 nt, Homo sapiens
  misc_RNA (1)...(19): siRNA sense strand
gaagagauuuggaaugauu

SEQ ID NO: 1490321 - RNA, 19 nt, Homo sapiens
  misc_RNA (1)...(19): siRNA sense strand
gaagacauaucaagugaaa

SEQ ID NO: 1490322 - RNA, 19 nt, Homo sapiens
  misc_RNA (1)...(19): siRNA sense strand
cagaggagaugacuauuaa

SEQ ID NO: 1490323 - RNA, 19 nt, Homo sapiens
  misc_RNA (1)...(19): siRNA sense strand
gaucagcauuggaagauaa

SEQ ID NO: 1490324 - RNA, 19 nt, Homo sapiens
  misc_RNA (1)...(19): siRNA sense strand
ggaaagaucagcauuggaa

SEQ ID NO: 1490325 - RNA, 19 nt, Homo sapiens
  misc_RNA (1)...(19): siRNA sense strand
gcagaggagaugacuauua

SEQ ID NO: 1490326 - RNA, 19 nt, Homo sapiens
  misc_RNA (1)...(19): siRNA sense strand
gugaagagauuuggaauga

SEQ ID NO: 1490327 - RNA, 19 nt, Homo sapiens
  misc_RNA (1)...(19): siRNA sense strand
gggaagacauaucaaguga

SEQ ID NO: 1490328 - RNA, 19 nt, Homo sapiens
  misc_RNA (1)...(19): siRNA sense strand
ggaauaaagugugcuggaa

SEQ ID NO: 1490329 - RNA, 19 nt, Homo sapiens
  misc_RNA (1)...(19): siRNA sense strand
gaaaagguguuguucauga

SEQ ID NO: 1490330 - RNA, 19 nt, Homo sapiens
  misc_RNA (1)...(19): siRNA sense strand
gaaagaagaagaagagcaa

SEQ ID NO: 1490331 - RNA, 19 nt, Homo sapiens
  misc_RNA (1)...(19): siRNA sense strand
agaaagagaugaagaugau

SEQ ID NO: 1490332 - RNA, 19 nt, Homo sapiens
  misc_RNA (1)...(19): siRNA sense strand
uaugugaccuguauccuaa

SEQ ID NO: 1490333 - RNA, 19 nt, Homo sapiens
  misc_RNA (1)...(19): siRNA sense strand
ccaauaaggcuuccaagaa

SEQ ID NO: 1490334 - RNA, 19 nt, Homo sapiens
  misc_RNA (1)...(19): siRNA sense strand
ggagaaguauaugcaauug

SEQ ID NO: 1490335 - RNA, 19 nt, Homo sapiens
  misc_RNA (1)...(19): siRNA sense strand
ggaggaaggagaaguauau

SEQ ID NO: 1490336 - RNA, 19 nt, Homo sapiens
  misc_RNA (1)...(19): siRNA sense strand
aaaccaauccguaaucuaa

SEQ ID NO: 1490337 - RNA, 19 nt, Homo sapiens
  misc_RNA (1)...(19): siRNA sense strand
ucccaaauaugauacguua

SEQ ID NO: 1490338 - RNA, 19 nt, Homo sapiens
  misc_RNA (1)...(19): siRNA sense strand
caacaguauuacaguauga

SEQ ID NO: 1490339 - RNA, 19 nt, Homo sapiens
  misc_RNA (1)...(19): siRNA sense strand
cauauaagugguaggauua

SEQ ID NO: 1490340 - RNA, 19 nt, Homo sapiens
  misc_RNA (1)...(19): siRNA sense strand
gaucauauacagcgcaauu

SEQ ID NO: 1490341 - RNA, 19 nt, Homo sapiens
  misc_RNA (1)...(19): siRNA sense strand
gaagauaaagaaagagaug

SEQ ID NO: 1490342 - RNA, 19 nt, Homo sapiens
  misc_RNA (1)...(19): siRNA sense strand
acacaacaguauuacagua

SEQ ID NO: 1490343 - RNA, 19 nt, Homo sapiens
  misc_RNA (1)...(19): siRNA sense strand
caagacaguuggaaagauc

SEQ ID NO: 1490344 - RNA, 19 nt, Homo sapiens
  misc_RNA (1)...(19): siRNA sense strand
caauaaggcuuccaagaac

SEQ ID NO: 1490345 - RNA, 19 nt, Homo sapiens
  misc_RNA (1)...(19): siRNA sense strand
gcaauugaaaccuuuggua

SEQ ID NO: 1490346 - RNA, 19 nt, Homo sapiens
  misc_RNA (1)...(19): siRNA sense strand
ugaaauagaugggaagaca

SEQ ID NO: 1490347 - RNA, 19 nt, Homo sapiens
  misc_RNA (1)...(19): siRNA sense strand
gaagcacaucgacaaguua

SEQ ID NO: 1490348 - RNA, 19 nt, Homo sapiens
  misc_RNA (1)...(19): siRNA sense strand
ggaugacaaugauagaaau

SEQ ID NO: 1490349 - RNA, 19 nt, Homo sapiens
  misc_RNA (1)...(19): siRNA sense strand
gcaagacaguuggaaagau

SEQ ID NO: 1490350 - RNA, 19 nt, Homo sapiens
  misc_RNA (1)...(19): siRNA sense strand
ggaguccuaugaaguugaa

SEQ ID NO: 1490351 - RNA, 19 nt, Homo sapiens
  misc_RNA (1)...(19): siRNA sense strand
aauaaagugugcuggaauu

SEQ ID NO: 1490352 - RNA, 19 nt, Homo sapiens
  misc_RNA (1)...(19): siRNA sense strand
gcacaucgacaaguuagaa

SEQ ID NO: 1490353 - RNA, 19 nt, Homo sapiens
  misc_RNA (1)...(19): siRNA sense strand
ugaagaaucugugugacuu

SEQ ID NO: 1490354 - RNA, 19 nt, Homo sapiens
  misc_RNA (1)...(19): siRNA sense strand
gaucaagccugggaugaca

SEQ ID NO: 1490355 - RNA, 19 nt, Homo sapiens
  misc_RNA (1)...(19): siRNA sense strand
agaagcacaucgacaaguu

SEQ ID NO: 1490356 - RNA, 19 nt, Homo sapiens
  misc_RNA (1)...(19): siRNA sense strand
acauauaagugguaggauu

SEQ ID NO: 1490357 - RNA, 19 nt, Homo sapiens
  misc_RNA (1)...(19): siRNA sense strand
ugaaguagcaagacaguug

SEQ ID NO: 1490358 - RNA, 19 nt, Homo sapiens
  misc_RNA (1)...(19): siRNA sense strand
ggagauggagcaacuggaa

SEQ ID NO: 1490359 - RNA, 19 nt, Homo sapiens
  misc_RNA (1)...(19): siRNA sense strand
ugaggaagcagccaagaaa

SEQ ID NO: 1490360 - RNA, 19 nt, Homo sapiens
  misc_RNA (1)...(19): siRNA sense strand
ggaaggagaaguauaugca

SEQ ID NO: 1490361 - RNA, 19 nt, Homo sapiens
  misc_RNA (1)...(19): siRNA sense strand
gaaaccaauccguaaucua

SEQ ID NO: 1490362 - RNA, 19 nt, Homo sapiens
  misc_RNA (1)...(19): siRNA sense strand
aaauagaugggaagacaua

SEQ ID NO: 1490363 - RNA, 19 nt, Homo sapiens
  misc_RNA (1)...(19): siRNA sense strand
ucgagaagcugcagaagca

SEQ ID NO: 1490364 - RNA, 19 nt, Homo sapiens
  misc_RNA (1)...(19): siRNA sense strand
ucaggcaagugaagagauu

SEQ ID NO: 1490365 - RNA, 19 nt, Homo sapiens
  misc_RNA (1)...(19): siRNA sense strand
gagaugaagaugaugaaga

SEQ ID NO: 1490366 - RNA, 19 nt, Homo sapiens
  misc_RNA (1)...(19): siRNA sense strand
agaugaagaugaugaagau

SEQ ID NO: 1490367 - RNA, 19 nt, Homo sapiens
  misc_RNA (1)...(19): siRNA sense strand
gaagagaggaccaaaaguu

SEQ ID NO: 1490368 - RNA, 19 nt, Homo sapiens
  misc_RNA (1)...(19): siRNA sense strand
caacuggaaagaagaagaa

SEQ ID NO: 1490369 - RNA, 19 nt, Homo sapiens
  misc_RNA (1)...(19): siRNA sense strand
aaacagacccucccucagu

SEQ ID NO: 1490370 - RNA, 19 nt, Homo sapiens
  misc_RNA (1)...(19): siRNA sense strand
cagcagaggagaugacuau

SEQ ID NO: 1490371 - RNA, 19 nt, Homo sapiens
  misc_RNA (1)...(19): siRNA sense strand
gaauaaagugugcuggaau

SEQ ID NO: 1490372 - RNA, 19 nt, Homo sapiens
  misc_RNA (1)...(19): siRNA sense strand
gcuacuaacacuggaauaa

SEQ ID NO: 1490373 - RNA, 19 nt, Homo sapiens
  misc_RNA (1)...(19): siRNA sense strand
gggaugacaaugauagaaa

SEQ ID NO: 1490374 - RNA, 19 nt, Homo sapiens
  misc_RNA (1)...(19): siRNA sense strand
uccaauaugugaccuguau

SEQ ID NO: 1490375 - RNA, 19 nt, Homo sapiens
  misc_RNA (1)...(19): siRNA sense strand
gaagacuguucacgcaagu

SEQ ID NO: 1490376 - RNA, 19 nt, Homo sapiens
  misc_RNA (1)...(19): siRNA sense strand
auugaaaccuuugguagua

SEQ ID NO: 1490377 - RNA, 19 nt, Homo sapiens
  misc_RNA (1)...(19): siRNA sense strand
ugaagaugaugaagaugga

SEQ ID NO: 1490378 - RNA, 19 nt, Homo sapiens
  misc_RNA (1)...(19): siRNA sense strand
aaagugugcuggaauugau

SEQ ID NO: 1490379 - RNA, 19 nt, Homo sapiens
  misc_RNA (1)...(19): siRNA sense strand
gaccaaaaguucaaacaga

SEQ ID NO: 1490380 - RNA, 19 nt, Homo sapiens
  misc_RNA (1)...(19): siRNA sense strand
caagugaagagauuuggaa

SEQ ID NO: 1490381 - RNA, 19 nt, Homo sapiens
  misc_RNA (1)...(19): siRNA sense strand
agauccauauccaccauua

SEQ ID NO: 1490382 - RNA, 19 nt, Homo sapiens
  misc_RNA (1)...(19): siRNA sense strand
cauaucaagugaaaccaau

SEQ ID NO: 1490383 - RNA, 19 nt, Homo sapiens
  misc_RNA (1)...(19): siRNA sense strand
gaaggagaaguauaugcaa

SEQ ID NO: 1490384 - RNA, 19 nt, Homo sapiens
  misc_RNA (1)...(19): siRNA sense strand
gacuuuggaacacauauaa

SEQ ID NO: 1490385 - RNA, 19 nt, Homo sapiens
  misc_RNA (1)...(19): siRNA sense strand
uagaauacaugcuggaaaa

SEQ ID NO: 1490386 - RNA, 19 nt, Homo sapiens
  misc_RNA (1)...(19): siRNA sense strand
gagcaacuggaaagaagaa

SEQ ID NO: 1490387 - RNA, 19 nt, Homo sapiens
  misc_RNA (1)...(19): siRNA sense strand
gaaaagaaagcauuagauc

SEQ ID NO: 1490388 - RNA, 19 nt, Homo sapiens
  misc_RNA (1)...(19): siRNA sense strand
agacuguucacgcaaguua

SEQ ID NO: 1490389 - RNA, 19 nt, Homo sapiens
  misc_RNA (1)...(19): siRNA sense strand
gaagaaucugugugacuug

SEQ ID NO: 1490390 - RNA, 19 nt, Homo sapiens
  misc_RNA (1)...(19): siRNA sense strand
gaagaaggagcugccucua

SEQ ID NO: 1490391 - RNA, 19 nt, Homo sapiens
  misc_RNA (1)...(19): siRNA sense strand
ggaacacauauaaguggua

SEQ ID NO: 1490392 - RNA, 19 nt, Homo sapiens
  misc_RNA (1)...(19): siRNA sense strand
aaagagaugaagaugauga

SEQ ID NO: 1490393 - RNA, 19 nt, Homo sapiens
  misc_RNA (1)...(19): siRNA sense strand
cauauacagcgcaauuuga

SEQ ID NO: 1490394 - RNA, 19 nt, Homo sapiens
  misc_RNA (1)...(19): siRNA sense strand
gaaguuauggaguccuaug

SEQ ID NO: 1490395 - RNA, 19 nt, Homo sapiens
  misc_RNA (1)...(19): siRNA sense strand
cauuagaucaggcaaguga

SEQ ID NO: 1490396 - RNA, 19 nt, Homo sapiens
  misc_RNA (1)...(19): siRNA sense strand
gcgaauacccacccacaca

SEQ ID NO: 1490397 - RNA, 19 nt, Homo sapiens
  misc_RNA (1)...(19): siRNA sense strand
ugauggcucugaagaaucu

SEQ ID NO: 1490398 - RNA, 19 nt, Homo sapiens
  misc_RNA (1)...(19): siRNA sense strand
aagaaguuauggaguccua

SEQ ID NO: 1490399 - RNA, 19 nt, Homo sapiens
  misc_RNA (1)...(19): siRNA sense strand
ugacaaugauagaaaucug

SEQ ID NO: 1490400 - RNA, 19 nt, Homo sapiens
  misc_RNA (1)...(19): siRNA sense strand
guauccuaaugguguauuu

SEQ ID NO: 1490401 - RNA, 19 nt, Homo sapiens
  misc_RNA (1)...(19): siRNA sense strand
gagccucaguggaugaagu

SEQ ID NO: 1490402 - RNA, 19 nt, Homo sapiens
  misc_RNA (1)...(19): siRNA sense strand
uaagugguaggauuauuga

SEQ ID NO: 1490403 - RNA, 19 nt, Homo sapiens
  misc_RNA (1)...(19): siRNA sense strand
aaagaaagcauuagaucag

SEQ ID NO: 1490404 - RNA, 19 nt, Homo sapiens
  misc_RNA (1)...(19): siRNA sense strand
gaacuacaagugaagaaaa

SEQ ID NO: 1490405 - RNA, 19 nt, Homo sapiens
  misc_RNA (1)...(19): siRNA sense strand
agaaaucugugaaaaguug

SEQ ID NO: 1490406 - RNA, 19 nt, Homo sapiens
  misc_RNA (1)...(19): siRNA sense strand
cuggaucgcuugggagaaa

SEQ ID NO: 1490407 - RNA, 19 nt, Homo sapiens
  misc_RNA (1)...(19): siRNA sense strand
uaaagugugcuggaauuga

SEQ ID NO: 1490408 - RNA, 19 nt, Homo sapiens
  misc_RNA (1)...(19): siRNA sense strand
cuacuaacacuggaauaaa

SEQ ID NO: 1490409 - RNA, 19 nt, Homo sapiens
  misc_RNA (1)...(19): siRNA sense strand
gcaacuggaaagaagaaga

SEQ ID NO: 1490410 - RNA, 19 nt, Homo sapiens
  misc_RNA (1)...(19): siRNA sense strand
guagauccauauccaccau

SEQ ID NO: 1490411 - RNA, 19 nt, Homo sapiens
  misc_RNA (1)...(19): siRNA sense strand
gagaaguauaugcaauuga

SEQ ID NO: 1490412 - RNA, 19 nt, Homo sapiens
  misc_RNA (1)...(19): siRNA sense strand
ccuacuggauguucucuca

SEQ ID NO: 1490413 - RNA, 19 nt, Homo sapiens
  misc_RNA (1)...(19): siRNA sense strand
guagcaagacaguuggaaa

SEQ ID NO: 1490414 - RNA, 19 nt, Homo sapiens
  misc_RNA (1)...(19): siRNA sense strand
guucgucugugugauguug

SEQ ID NO: 1490415 - RNA, 19 nt, Homo sapiens
  misc_RNA (1)...(19): siRNA sense strand
cgauggagauggagcaacu

SEQ ID NO: 1490416 - RNA, 19 nt, Homo sapiens
  misc_RNA (1)...(19): siRNA sense strand
gccaauaaggcuuccaaga

SEQ ID NO: 1490417 - RNA, 19 nt, Homo sapiens
  misc_RNA (1)...(19): siRNA sense strand
uauggaguccuaugaaguu

SEQ ID NO: 1490418 - RNA, 19 nt, Homo sapiens
  misc_RNA (1)...(19): siRNA sense strand
guuauggaguccuaugaag

SEQ ID NO: 1490419 - RNA, 19 nt, Homo sapiens
  misc_RNA (1)...(19): siRNA sense strand
gaggccauccaagaaguua

SEQ ID NO: 1490420 - RNA, 19 nt, Homo sapiens
  misc_RNA (1)...(19): siRNA sense strand
caacacagccguccaggaa

SEQ ID NO: 1490421 - RNA, 19 nt, Homo sapiens
  misc_RNA (1)...(19): siRNA sense strand
ggugaucucugaugaacau

SEQ ID NO: 1490422 - RNA, 19 nt, Homo sapiens
  misc_RNA (1)...(19): siRNA sense strand
gggaggugaucucugauga

SEQ ID NO: 1490423 - RNA, 19 nt, Homo sapiens
  misc_RNA (1)...(19): siRNA sense strand
gggcauggaugagauggaa

SEQ ID NO: 1490424 - RNA, 19 nt, Homo sapiens
  misc_RNA (1)...(19): siRNA sense strand
guacccuucugcucaguaa

SEQ ID NO: 1490425 - RNA, 19 nt, Homo sapiens
  misc_RNA (1)...(19): siRNA sense strand
gaugagaccuuuugcauag

SEQ ID NO: 1490426 - RNA, 19 nt, Homo sapiens
  misc_RNA (1)...(19): siRNA sense strand
ugauggacguugucagaaa

SEQ ID NO: 1490427 - RNA, 19 nt, Homo sapiens
  misc_RNA (1)...(19): siRNA sense strand
cgagggagaaggaguauga

SEQ ID NO: 1490428 - RNA, 19 nt, Homo sapiens
  misc_RNA (1)...(19): siRNA sense strand
gcagauguuugaugcuaag

SEQ ID NO: 1490429 - RNA, 19 nt, Homo sapiens
  misc_RNA (1)...(19): siRNA sense strand
ugaacgacuuggugucuga

SEQ ID NO: 1490430 - RNA, 19 nt, Homo sapiens
  misc_RNA (1)...(19): siRNA sense strand
uaagaacagcagcuacuuu

SEQ ID NO: 1490431 - RNA, 19 nt, Homo sapiens
  misc_RNA (1)...(19): siRNA sense strand
ucugggaggugaucucuga

SEQ ID NO: 1490432 - RNA, 19 nt, Homo sapiens
  misc_RNA (1)...(19): siRNA sense strand
ucagagcaguuuacagcaa

SEQ ID NO: 1490433 - RNA, 19 nt, Homo sapiens
  misc_RNA (1)...(19): siRNA sense strand
gcauggaugagauggaauu

SEQ ID NO: 1490434 - RNA, 19 nt, Homo sapiens
  misc_RNA (1)...(19): siRNA sense strand
gauggacguugucagaaag

SEQ ID NO: 1490435 - RNA, 19 nt, Homo sapiens
  misc_RNA (1)...(19): siRNA sense strand
gaggugaucucugaugaac

SEQ ID NO: 1490436 - RNA, 19 nt, Homo sapiens
  misc_RNA (1)...(19): siRNA sense strand
gaagcuggccgugaacaug

SEQ ID NO: 1490437 - RNA, 19 nt, Homo sapiens
  misc_RNA (1)...(19): siRNA sense strand
cgacuuggugucugaauau

SEQ ID NO: 1490438 - RNA, 19 nt, Homo sapiens
  misc_RNA (1)...(19): siRNA sense strand
gcgcugugcucguggaucu

SEQ ID NO: 1490439 - RNA, 19 nt, Homo sapiens
  misc_RNA (1)...(19): siRNA sense strand
guaagauccgggaggagua

SEQ ID NO: 1490440 - RNA, 19 nt, Homo sapiens
  misc_RNA (1)...(19): siRNA sense strand
uaacgaagcgcuauaugac

SEQ ID NO: 1490441 - RNA, 19 nt, Homo sapiens
  misc_RNA (1)...(19): siRNA sense strand
gauaagaacagcagcuacu

SEQ ID NO: 1490442 - RNA, 19 nt, Homo sapiens
  misc_RNA (1)...(19): siRNA sense strand
gauguuugaugcuaagaac

SEQ ID NO: 1490443 - RNA, 19 nt, Homo sapiens
  misc_RNA (1)...(19): siRNA sense strand
ucacccagcagauguuuga

SEQ ID NO: 1490444 - RNA, 19 nt, Homo sapiens
  misc_RNA (1)...(19): siRNA sense strand
cuacaacgccacccucuca

SEQ ID NO: 1490445 - RNA, 19 nt, Homo sapiens
  misc_RNA (1)...(19): siRNA sense strand
ucacugaggccgagagcaa

SEQ ID NO: 1490446 - RNA, 19 nt, Homo sapiens
  misc_RNA (1)...(19): siRNA sense strand
gcgagggcauggaugagau

SEQ ID NO: 1490447 - RNA, 19 nt, Homo sapiens
  misc_RNA (1)...(19): siRNA sense strand
aagaacagcagcuacuuug

SEQ ID NO: 1490448 - RNA, 19 nt, Homo sapiens
  misc_RNA (1)...(19): siRNA sense strand
ggaggugaucucugaugaa

SEQ ID NO: 1490449 - RNA, 19 nt, Homo sapiens
  misc_RNA (1)...(19): siRNA sense strand
gauaacgaagcgcuauaug

SEQ ID NO: 1490450 - RNA, 19 nt, Homo sapiens
  misc_RNA (1)...(19): siRNA sense strand
gagcucacccagcagaugu

SEQ ID NO: 1490451 - RNA, 19 nt, Homo sapiens
  misc_RNA (1)...(19): siRNA sense strand
auaacgaagcgcuauauga

SEQ ID NO: 1490452 - RNA, 19 nt, Homo sapiens
  misc_RNA (1)...(19): siRNA sense strand
ggccagacaacuucauuuc

SEQ ID NO: 1490453 - RNA, 19 nt, Homo sapiens
  misc_RNA (1)...(19): siRNA sense strand
acgacuuggugucugaaua

SEQ ID NO: 1490454 - RNA, 19 nt, Homo sapiens
  misc_RNA (1)...(19): siRNA sense strand
agagcaacaugaacgacuu

SEQ ID NO: 1490455 - RNA, 19 nt, Homo sapiens
  misc_RNA (1)...(19): siRNA sense strand
gagcaacaugaacgacuug

SEQ ID NO: 1490456 - RNA, 19 nt, Homo sapiens
  misc_RNA (1)...(19): siRNA sense strand
acgaagcgcuauaugacau

SEQ ID NO: 1490457 - RNA, 19 nt, Homo sapiens
  misc_RNA (1)...(19): siRNA sense strand
ugcggaagcuggccgugaa

SEQ ID NO: 1490458 - RNA, 19 nt, Homo sapiens
  misc_RNA (1)...(19): siRNA sense strand
uagauaacgaagcgcuaua

SEQ ID NO: 1490459 - RNA, 19 nt, Homo sapiens
  misc_RNA (1)...(19): siRNA sense strand
acacagccguccaggaacu

SEQ ID NO: 1490460 - RNA, 19 nt, Homo sapiens
  misc_RNA (1)...(19): siRNA sense strand
ggccgagggagaaggagua

SEQ ID NO: 1490461 - RNA, 19 nt, Homo sapiens
  misc_RNA (1)...(19): siRNA sense strand
caacauucaagauaagaac

SEQ ID NO: 1490462 - RNA, 19 nt, Homo sapiens
  misc_RNA (1)...(19): siRNA sense strand
gaacgacuuggugucugaa

SEQ ID NO: 1490463 - RNA, 19 nt, Homo sapiens
  misc_RNA (1)...(19): siRNA sense strand
ggaagcuggccgugaacau

SEQ ID NO: 1490464 - RNA, 19 nt, Homo sapiens
  misc_RNA (1)...(19): siRNA sense strand
uggaugagauggaauucac

SEQ ID NO: 1490465 - RNA, 19 nt, Homo sapiens
  misc_RNA (1)...(19): siRNA sense strand
gcgggucucagagcaguuu

SEQ ID NO: 1490466 - RNA, 19 nt, Homo sapiens
  misc_RNA (1)...(19): siRNA sense strand
gcucacccagcagauguuu

SEQ ID NO: 1490467 - RNA, 19 nt, Homo sapiens
  misc_RNA (1)...(19): siRNA sense strand
aagauaagaacagcagcua

SEQ ID NO: 1490468 - RNA, 19 nt, Homo sapiens
  misc_RNA (1)...(19): siRNA sense strand
agucagugauggacguugu

SEQ ID NO: 1490469 - RNA, 19 nt, Homo sapiens
  misc_RNA (1)...(19): siRNA sense strand
ucgaggagauccacaaauu

SEQ ID NO: 1490470 - RNA, 19 nt, Homo sapiens
  misc_RNA (1)...(19): siRNA sense strand
gauguucccucuacagaug

SEQ ID NO: 1490471 - RNA, 19 nt, Homo sapiens
  misc_RNA (1)...(19): siRNA sense strand
gacaaugcaugcccucguu

SEQ ID NO: 1490472 - RNA, 19 nt, Homo sapiens
  misc_RNA (1)...(19): siRNA sense strand
acaccugcaugaacacuuu

SEQ ID NO: 1490473 - RNA, 19 nt, Homo sapiens
  misc_RNA (1)...(19): siRNA sense strand
gaaccuacaccugcaugaa

SEQ ID NO: 1490474 - RNA, 19 nt, Homo sapiens
  misc_RNA (1)...(19): siRNA sense strand
gaggagauccacaaauucu

SEQ ID NO: 1490475 - RNA, 19 nt, Homo sapiens
  misc_RNA (1)...(19): siRNA sense strand
ccacagugcugcccuucca

SEQ ID NO: 1490476 - RNA, 19 nt, Homo sapiens
  misc_RNA (1)...(19): siRNA sense strand
gaugaugcccuccucaagu

SEQ ID NO: 1490477 - RNA, 19 nt, Homo sapiens
  misc_RNA (1)...(19): siRNA sense strand
ugaucuaucugguggugaa

SEQ ID NO: 1490478 - RNA, 19 nt, Homo sapiens
  misc_RNA (1)...(19): siRNA sense strand
gggcaugagagucagguuu

SEQ ID NO: 1490479 - RNA, 19 nt, Homo sapiens
  misc_RNA (1)...(19): siRNA sense strand
uaauggacagugaugauga

SEQ ID NO: 1490480 - RNA, 19 nt, Homo sapiens
  misc_RNA (1)...(19): siRNA sense strand
gggagaaggugggugacau

SEQ ID NO: 1490481 - RNA, 19 nt, Homo sapiens
  misc_RNA (1)...(19): siRNA sense strand
ggacugagaaaugccugaa

SEQ ID NO: 1490482 - RNA, 19 nt, Homo sapiens
  misc_RNA (1)...(19): siRNA sense strand
ggagaaggugggugacauc

SEQ ID NO: 1490483 - RNA, 19 nt, Homo sapiens
  misc_RNA (1)...(19): siRNA sense strand
ccucaagucccaacacauc

SEQ ID NO: 1490484 - RNA, 19 nt, Homo sapiens
  misc_RNA (1)...(19): siRNA sense strand
cgacuacugcacauccaaa

SEQ ID NO: 1490485 - RNA, 19 nt, Homo sapiens
  misc_RNA (1)...(19): siRNA sense strand
gcaaccgggaggaggugua

SEQ ID NO: 1490486 - RNA, 19 nt, Homo sapiens
  misc_RNA (1)...(19): siRNA sense strand
ggaaccuacaccugcauga

SEQ ID NO: 1490487 - RNA, 19 nt, Homo sapiens
  misc_RNA (1)...(19): siRNA sense strand
gggagaacguccucaucac

SEQ ID NO: 1490488 - RNA, 19 nt, Homo sapiens
  misc_RNA (1)...(19): siRNA sense strand
cgaggagauccacaaauuc

SEQ ID NO: 1490489 - RNA, 19 nt, Homo sapiens
  misc_RNA (1)...(19): siRNA sense strand
ggcaugagagucagguuuc

SEQ ID NO: 1490490 - RNA, 19 nt, Homo sapiens
  misc_RNA (1)...(19): siRNA sense strand
cgggagaacguccucauca

SEQ ID NO: 1490491 - RNA, 19 nt, Homo sapiens
  misc_RNA (1)...(19): siRNA sense strand
acaaugcaugcccucguua

SEQ ID NO: 1490492 - RNA, 19 nt, Homo sapiens
  misc_RNA (1)...(19): siRNA sense strand
gagaaggugggugacauca

SEQ ID NO: 1490493 - RNA, 19 nt, Homo sapiens
  misc_RNA (1)...(19): siRNA sense strand
ugcaugcccucguuaucuu

SEQ ID NO: 1490494 - RNA, 19 nt, Homo sapiens
  misc_RNA (1)...(19): siRNA sense strand
gauguuccagggcaugaga

SEQ ID NO: 1490495 - RNA, 19 nt, Homo sapiens
  misc_RNA (1)...(19): siRNA sense strand
ugcuggagcugcagaaugg

SEQ ID NO: 1490496 - RNA, 19 nt, Homo sapiens
  misc_RNA (1)...(19): siRNA sense strand
caaugcaugcccucguuau

SEQ ID NO: 1490497 - RNA, 19 nt, Homo sapiens
  misc_RNA (1)...(19): siRNA sense strand
gugauguucccucuacaga

SEQ ID NO: 1490498 - RNA, 19 nt, Homo sapiens
  misc_RNA (1)...(19): siRNA sense strand
gcugcagaauggccacauc

SEQ ID NO: 1490499 - RNA, 19 nt, Homo sapiens
  misc_RNA (1)...(19): siRNA sense strand
gagauguuccagggcauga

SEQ ID NO: 1490500 - RNA, 19 nt, Homo sapiens
  misc_RNA (1)...(19): siRNA sense strand
aauggacagugaugaugau

SEQ ID NO: 1490501 - RNA, 19 nt, Homo sapiens
  misc_RNA (1)...(19): siRNA sense strand
aggcugcacucgaggagau

SEQ ID NO: 1490502 - RNA, 19 nt, Homo sapiens
  misc_RNA (1)...(19): siRNA sense strand
caagaaacauaccucaaua

SEQ ID NO: 1490503 - RNA, 19 nt, Homo sapiens
  misc_RNA (1)...(19): siRNA sense strand
gauguuaucagacucauua

SEQ ID NO: 1490504 - RNA, 19 nt, Homo sapiens
  misc_RNA (1)...(19): siRNA sense strand
gggagaagauaaucaagaa

SEQ ID NO: 1490505 - RNA, 19 nt, Homo sapiens
  misc_RNA (1)...(19): siRNA sense strand
gggaacaccagaauauuua

SEQ ID NO: 1490506 - RNA, 19 nt, Homo sapiens
  misc_RNA (1)...(19): siRNA sense strand
cagaaauccugaacuauga

SEQ ID NO: 1490507 - RNA, 19 nt, Homo sapiens
  misc_RNA (1)...(19): siRNA sense strand
gaggauagcagcaugguuu

SEQ ID NO: 1490508 - RNA, 19 nt, Homo sapiens
  misc_RNA (1)...(19): siRNA sense strand
gcauauauguuguuaacuc

SEQ ID NO: 1490509 - RNA, 19 nt, Homo sapiens
  misc_RNA (1)...(19): siRNA sense strand
ugaguuggcugaaaugguu

SEQ ID NO: 1490510 - RNA, 19 nt, Homo sapiens
  misc_RNA (1)...(19): siRNA sense strand
gaauaacauuguacaccuu

SEQ ID NO: 1490511 - RNA, 19 nt, Homo sapiens
  misc_RNA (1)...(19): siRNA sense strand
acaaauacuugaaggaguu

SEQ ID NO: 1490512 - RNA, 19 nt, Homo sapiens
  misc_RNA (1)...(19): siRNA sense strand
uaaauuugcugugguuaga

SEQ ID NO: 1490513 - RNA, 19 nt, Homo sapiens
  misc_RNA (1)...(19): siRNA sense strand
guuguuaacucacacauca

SEQ ID NO: 1490514 - RNA, 19 nt, Homo sapiens
  misc_RNA (1)...(19): siRNA sense strand
gauuuaaagccacagaaua

SEQ ID NO: 1490515 - RNA, 19 nt, Homo sapiens
  misc_RNA (1)...(19): siRNA sense strand
gagaagacaaagagaauau

SEQ ID NO: 1490516 - RNA, 19 nt, Homo sapiens
  misc_RNA (1)...(19): siRNA sense strand
ccacagaauauauuacuga

SEQ ID NO: 1490517 - RNA, 19 nt, Homo sapiens
  misc_RNA (1)...(19): siRNA sense strand
ccagaaauccugaacuaug

SEQ ID NO: 1490518 - RNA, 19 nt, Homo sapiens
  misc_RNA (1)...(19): siRNA sense strand
aauggaaccuguggugaua

SEQ ID NO: 1490519 - RNA, 19 nt, Homo sapiens
  misc_RNA (1)...(19): siRNA sense strand
gaaggaguuuauuaucuac

SEQ ID NO: 1490520 - RNA, 19 nt, Homo sapiens
  misc_RNA (1)...(19): siRNA sense strand
gagauuugauugccgaagu

SEQ ID NO: 1490521 - RNA, 19 nt, Homo sapiens
  misc_RNA (1)...(19): siRNA sense strand
cauuguacaccuugauuua

SEQ ID NO: 1490522 - RNA, 19 nt, Homo sapiens
  misc_RNA (1)...(19): siRNA sense strand
cgagauugcugugcuugaa

SEQ ID NO: 1490523 - RNA, 19 nt, Homo sapiens
  misc_RNA (1)...(19): siRNA sense strand
ucuaaauccuccuguaaug

SEQ ID NO: 1490524 - RNA, 19 nt, Homo sapiens
  misc_RNA (1)...(19): siRNA sense strand
agauaugccuuucucauuc

SEQ ID NO: 1490525 - RNA, 19 nt, Homo sapiens
  misc_RNA (1)...(19): siRNA sense strand
ccaagaauaugcugcaaaa

SEQ ID NO: 1490526 - RNA, 19 nt, Homo sapiens
  misc_RNA (1)...(19): siRNA sense strand
agacaagacuucuaaaucc

SEQ ID NO: 1490527 - RNA, 19 nt, Homo sapiens
  misc_RNA (1)...(19): siRNA sense strand
gaagaagaggacaggauug

SEQ ID NO: 1490528 - RNA, 19 nt, Homo sapiens
  misc_RNA (1)...(19): siRNA sense strand
cuccagaaauccugaacua

SEQ ID NO: 1490529 - RNA, 19 nt, Homo sapiens
  misc_RNA (1)...(19): siRNA sense strand
gccacagacuuuauucaga

SEQ ID NO: 1490530 - RNA, 19 nt, Homo sapiens
  misc_RNA (1)...(19): siRNA sense strand
gcuagggagagguaaauuu

SEQ ID NO: 1490531 - RNA, 19 nt, Homo sapiens
  misc_RNA (1)...(19): siRNA sense strand
ucaagaaacauaccucaau

SEQ ID NO: 1490532 - RNA, 19 nt, Homo sapiens
  misc_RNA (1)...(19): siRNA sense strand
gcaacagauauguggaaua

SEQ ID NO: 1490533 - RNA, 19 nt, Homo sapiens
  misc_RNA (1)...(19): siRNA sense strand
gaauauuuagcuccagaaa

SEQ ID NO: 1490534 - RNA, 19 nt, Homo sapiens
  misc_RNA (1)...(19): siRNA sense strand
uuucacagcuggccacaga

SEQ ID NO: 1490535 - RNA, 19 nt, Homo sapiens
  misc_RNA (1)...(19): siRNA sense strand
gaacuaugaucccauuacc

SEQ ID NO: 1490536 - RNA, 19 nt, Homo sapiens
  misc_RNA (1)...(19): siRNA sense strand
aacuacaacuccucaaauu

SEQ ID NO: 1490537 - RNA, 19 nt, Homo sapiens
  misc_RNA (1)...(19): siRNA sense strand
gaacuuguuucagauuugc

SEQ ID NO: 1490538 - RNA, 19 nt, Homo sapiens
  misc_RNA (1)...(19): siRNA sense strand
gauaugccuuucucauucu

SEQ ID NO: 1490539 - RNA, 19 nt, Homo sapiens
  misc_RNA (1)...(19): siRNA sense strand
caugggaacaccagaauau

SEQ ID NO: 1490540 - RNA, 19 nt, Homo sapiens
  misc_RNA (1)...(19): siRNA sense strand
gaaccuguggugauagaga

SEQ ID NO: 1490541 - RNA, 19 nt, Homo sapiens
  misc_RNA (1)...(19): siRNA sense strand
uaacuacaacuccucaaau

SEQ ID NO: 1490542 - RNA, 19 nt, Homo sapiens
  misc_RNA (1)...(19): siRNA sense strand
gagaagauaaucaagaaac

SEQ ID NO: 1490543 - RNA, 19 nt, Homo sapiens
  misc_RNA (1)...(19): siRNA sense strand
gugguuagacaauguauau

SEQ ID NO: 1490544 - RNA, 19 nt, Homo sapiens
  misc_RNA (1)...(19): siRNA sense strand
caaaagauuucguuucgau

SEQ ID NO: 1490545 - RNA, 19 nt, Homo sapiens
  misc_RNA (1)...(19): siRNA sense strand
cagcagagauaugccuuuc

SEQ ID NO: 1490546 - RNA, 19 nt, Homo sapiens
  misc_RNA (1)...(19): siRNA sense strand
acucacacaucaccauuug

SEQ ID NO: 1490547 - RNA, 19 nt, Homo sapiens
  misc_RNA (1)...(19): siRNA sense strand
gagaagaagaggacaggau

SEQ ID NO: 1490548 - RNA, 19 nt, Homo sapiens
  misc_RNA (1)...(19): siRNA sense strand
guagauuauucggaagaaa

SEQ ID NO: 1490549 - RNA, 19 nt, Homo sapiens
  misc_RNA (1)...(19): siRNA sense strand
ccugaacuaugaucccauu

SEQ ID NO: 1490550 - RNA, 19 nt, Homo sapiens
  misc_RNA (1)...(19): siRNA sense strand
gggcaugcgugugaacuuc

SEQ ID NO: 1490551 - RNA, 19 nt, Homo sapiens
  misc_RNA (1)...(19): siRNA sense strand
aaauagggcaugcguguga

SEQ ID NO: 1490552 - RNA, 19 nt, Homo sapiens
  misc_RNA (1)...(19): siRNA sense strand
ggagaagauaaucaagaaa

SEQ ID NO: 1490553 - RNA, 19 nt, Homo sapiens
  misc_RNA (1)...(19): siRNA sense strand
aaagauuucguuucgauga

SEQ ID NO: 1490554 - RNA, 19 nt, Homo sapiens
  misc_RNA (1)...(19): siRNA sense strand
gguuagacaauguauauca

SEQ ID NO: 1490555 - RNA, 19 nt, Homo sapiens
  misc_RNA (1)...(19): siRNA sense strand
agauuugauugccgaagua

SEQ ID NO: 1490556 - RNA, 19 nt, Homo sapiens
  misc_RNA (1)...(19): siRNA sense strand
uaaauccuccuguaaugga

SEQ ID NO: 1490557 - RNA, 19 nt, Homo sapiens
  misc_RNA (1)...(19): siRNA sense strand
agaagaagaggacaggauu

SEQ ID NO: 1490558 - RNA, 19 nt, Homo sapiens
  misc_RNA (1)...(19): siRNA sense strand
ugggaacaccagaauauuu

SEQ ID NO: 1490559 - RNA, 19 nt, Homo sapiens
  misc_RNA (1)...(19): siRNA sense strand
cuagggagagguaaauuug

SEQ ID NO: 1490560 - RNA, 19 nt, Homo sapiens
  misc_RNA (1)...(19): siRNA sense strand
uaccugaguuggcugaaau

SEQ ID NO: 1490561 - RNA, 19 nt, Homo sapiens
  misc_RNA (1)...(19): siRNA sense strand
agauugcugugcuugaauu

SEQ ID NO: 1490562 - RNA, 19 nt, Homo sapiens
  misc_RNA (1)...(19): siRNA sense strand
guaagguccucugaagaca

SEQ ID NO: 1490563 - RNA, 19 nt, Homo sapiens
  misc_RNA (1)...(19): siRNA sense strand
uuugauugccgaaguauuu

SEQ ID NO: 1490564 - RNA, 19 nt, Homo sapiens
  misc_RNA (1)...(19): siRNA sense strand
cuacagcagugggacuuug

SEQ ID NO: 1490565 - RNA, 19 nt, Homo sapiens
  misc_RNA (1)...(19): siRNA sense strand
caugaggucuaugaaaaua

SEQ ID NO: 1490566 - RNA, 19 nt, Homo sapiens
  misc_RNA (1)...(19): siRNA sense strand
aaagagcuagggagaggua

SEQ ID NO: 1490567 - RNA, 19 nt, Homo sapiens
  misc_RNA (1)...(19): siRNA sense strand
aaacucaggaucauucugu

SEQ ID NO: 1490568 - RNA, 19 nt, Homo sapiens
  misc_RNA (1)...(19): siRNA sense strand
ggaguuuauuaucuacauc

SEQ ID NO: 1490569 - RNA, 19 nt, Homo sapiens
  misc_RNA (1)...(19): siRNA sense strand
cagcaugguuuccaaaaga

SEQ ID NO: 1490570 - RNA, 19 nt, Homo sapiens
  misc_RNA (1)...(19): siRNA sense strand
uagagaagacaaagagaau

SEQ ID NO: 1490571 - RNA, 19 nt, Homo sapiens
  misc_RNA (1)...(19): siRNA sense strand
uaacucacacaucaccauu

SEQ ID NO: 1490572 - RNA, 19 nt, Homo sapiens
  misc_RNA (1)...(19): siRNA sense strand
gauugucgggcagaaauuu

SEQ ID NO: 1490573 - RNA, 19 nt, Homo sapiens
  misc_RNA (1)...(19): siRNA sense strand
gacaagacuucuaaauccu

SEQ ID NO: 1490574 - RNA, 19 nt, Homo sapiens
  misc_RNA (1)...(19): siRNA sense strand
guaaauuugcugugguuag

SEQ ID NO: 1490575 - RNA, 19 nt, Homo sapiens
  misc_RNA (1)...(19): siRNA sense strand
cgugugaacuucgggaaau

SEQ ID NO: 1490576 - RNA, 19 nt, Homo sapiens
  misc_RNA (1)...(19): siRNA sense strand
cuccucaaauuccaauaaa

SEQ ID NO: 1490577 - RNA, 19 nt, Homo sapiens
  misc_RNA (1)...(19): siRNA sense strand
ucuguaagguccucugaag

SEQ ID NO: 1490578 - RNA, 19 nt, Homo sapiens
  misc_RNA (1)...(19): siRNA sense strand
ucgaggaggagauuugauu

SEQ ID NO: 1490579 - RNA, 19 nt, Homo sapiens
  misc_RNA (1)...(19): siRNA sense strand
gauagagaagacaaagaga

SEQ ID NO: 1490580 - RNA, 19 nt, Homo sapiens
  misc_RNA (1)...(19): siRNA sense strand
aagacaagacuucuaaauc

SEQ ID NO: 1490581 - RNA, 19 nt, Homo sapiens
  misc_RNA (1)...(19): siRNA sense strand
cuacaucagaauaacauug

SEQ ID NO: 1490582 - RNA, 19 nt, Homo sapiens
  misc_RNA (1)...(19): siRNA sense strand
cuaacuacaacuccucaaa

SEQ ID NO: 1490583 - RNA, 19 nt, Homo sapiens
  misc_RNA (1)...(19): siRNA sense strand
gagcuagggagagguaaau

SEQ ID NO: 1490584 - RNA, 19 nt, Homo sapiens
  misc_RNA (1)...(19): siRNA sense strand
cagcaacagauauguggaa

SEQ ID NO: 1490585 - RNA, 19 nt, Homo sapiens
  misc_RNA (1)...(19): siRNA sense strand
gaaauccugaacuaugauc

SEQ ID NO: 1490586 - RNA, 19 nt, Homo sapiens
  misc_RNA (1)...(19): siRNA sense strand
guuaucagacucauuaaac

SEQ ID NO: 1490587 - RNA, 19 nt, Homo sapiens
  misc_RNA (1)...(19): siRNA sense strand
acuuacaucuaaagagcua

SEQ ID NO: 1490588 - RNA, 19 nt, Homo sapiens
  misc_RNA (1)...(19): siRNA sense strand
gaagacaaagagaauaucc

SEQ ID NO: 1490589 - RNA, 19 nt, Homo sapiens
  misc_RNA (1)...(19): siRNA sense strand
uggaaccuguggugauaga

SEQ ID NO: 1490590 - RNA, 19 nt, Homo sapiens
  misc_RNA (1)...(19): siRNA sense strand
cuucuaaauccuccuguaa

SEQ ID NO: 1490591 - RNA, 19 nt, Homo sapiens
  misc_RNA (1)...(19): siRNA sense strand
aaucuacuggccaagaaua

SEQ ID NO: 1490592 - RNA, 19 nt, Homo sapiens
  misc_RNA (1)...(19): siRNA sense strand
gaccaacagcagagauaug

SEQ ID NO: 1490593 - RNA, 19 nt, Homo sapiens
  misc_RNA (1)...(19): siRNA sense strand
cagcuggccacagacuuua

SEQ ID NO: 1490594 - RNA, 19 nt, Homo sapiens
  misc_RNA (1)...(19): siRNA sense strand
gccaagaauaugcugcaaa

SEQ ID NO: 1490595 - RNA, 19 nt, Homo sapiens
  misc_RNA (1)...(19): siRNA sense strand
agagaagacaaagagaaua

SEQ ID NO: 1490596 - RNA, 19 nt, Homo sapiens
  misc_RNA (1)...(19): siRNA sense strand
gugcuugaauuggcaaagu

SEQ ID NO: 1490597 - RNA, 19 nt, Homo sapiens
  misc_RNA (1)...(19): siRNA sense strand
uaauggaaccuguggugau

SEQ ID NO: 1490598 - RNA, 19 nt, Homo sapiens
  misc_RNA (1)...(19): siRNA sense strand
acacgagauugcugugcuu

SEQ ID NO: 1490599 - RNA, 19 nt, Homo sapiens
  misc_RNA (1)...(19): siRNA sense strand
cgaggaggagauuugauug

SEQ ID NO: 1490600 - RNA, 19 nt, Homo sapiens
  misc_RNA (1)...(19): siRNA sense strand
aagaccaacagcagagaua

SEQ ID NO: 1490601 - RNA, 19 nt, Homo sapiens
  misc_RNA (1)...(19): siRNA sense strand
ugauagagaagacaaagag

SEQ ID NO: 1490602 - RNA, 19 nt, Homo sapiens
  misc_RNA (1)...(19): siRNA sense strand
gagcauacuuguacaaaua

SEQ ID NO: 1490603 - RNA, 19 nt, Homo sapiens
  misc_RNA (1)...(19): siRNA sense strand
cuacuggaguuacuuauua

SEQ ID NO: 1490604 - RNA, 19 nt, Homo sapiens
  misc_RNA (1)...(19): siRNA sense strand
ggacccagaugauguggua

SEQ ID NO: 1490605 - RNA, 19 nt, Homo sapiens
  misc_RNA (1)...(19): siRNA sense strand
caaggaaacuuacaaacug

SEQ ID NO: 1490606 - RNA, 19 nt, Homo sapiens
  misc_RNA (1)...(19): siRNA sense strand
gaaacuuacagccuauuua

SEQ ID NO: 1490607 - RNA, 19 nt, Homo sapiens
  misc_RNA (1)...(19): siRNA sense strand
caacgcagagaaacuauua

SEQ ID NO: 1490608 - RNA, 19 nt, Homo sapiens
  misc_RNA (1)...(19): siRNA sense strand
guucaugacuuuaacaaga

SEQ ID NO: 1490609 - RNA, 19 nt, Homo sapiens
  misc_RNA (1)...(19): siRNA sense strand
caucaaggcuggaaccuau

SEQ ID NO: 1490610 - RNA, 19 nt, Homo sapiens
  misc_RNA (1)...(19): siRNA sense strand
ggaauaaaguacaucaaag

SEQ ID NO: 1490611 - RNA, 19 nt, Homo sapiens
  misc_RNA (1)...(19): siRNA sense strand
aaacaaauuugccguggaa

SEQ ID NO: 1490612 - RNA, 19 nt, Homo sapiens
  misc_RNA (1)...(19): siRNA sense strand
guacuacuguggaauaaag

SEQ ID NO: 1490613 - RNA, 19 nt, Homo sapiens
  misc_RNA (1)...(19): siRNA sense strand
caccuggguuucuuuauuu

SEQ ID NO: 1490614 - RNA, 19 nt, Homo sapiens
  misc_RNA (1)...(19): siRNA sense strand
ucaccuggguuucuuuauu

SEQ ID NO: 1490615 - RNA, 19 nt, Homo sapiens
  misc_RNA (1)...(19): siRNA sense strand
caagaaacuuacagccuau

SEQ ID NO: 1490616 - RNA, 19 nt, Homo sapiens
  misc_RNA (1)...(19): siRNA sense strand
gcagagaaacuauuaaagg

SEQ ID NO: 1490617 - RNA, 19 nt, Homo sapiens
  misc_RNA (1)...(19): siRNA sense strand
gcacaugguuauuacugau

SEQ ID NO: 1490618 - RNA, 19 nt, Homo sapiens
  misc_RNA (1)...(19): siRNA sense strand
gcaaggacccagaugaugu

SEQ ID NO: 1490619 - RNA, 19 nt, Homo sapiens
  misc_RNA (1)...(19): siRNA sense strand
cagagaaacuauuaaaggu

SEQ ID NO: 1490620 - RNA, 19 nt, Homo sapiens
  misc_RNA (1)...(19): siRNA sense strand
cguggaaacuuuaauuugu

SEQ ID NO: 1490621 - RNA, 19 nt, Homo sapiens
  misc_RNA (1)...(19): siRNA sense strand
ggagcauacuuguacaaau

SEQ ID NO: 1490622 - RNA, 19 nt, Homo sapiens
  misc_RNA (1)...(19): siRNA sense strand
gaucaccuggguuucuuua

SEQ ID NO: 1490623 - RNA, 19 nt, Homo sapiens
  misc_RNA (1)...(19): siRNA sense strand
gcuugcagguguuauucua

SEQ ID NO: 1490624 - RNA, 19 nt, Homo sapiens
  misc_RNA (1)...(19): siRNA sense strand
aguccuaucugauucauga

SEQ ID NO: 1490625 - RNA, 19 nt, Homo sapiens
  misc_RNA (1)...(19): siRNA sense strand
caaagaagagccugguguu

SEQ ID NO: 1490626 - RNA, 19 nt, Homo sapiens
  misc_RNA (1)...(19): siRNA sense strand
ugaagaagaagaaguugaa

SEQ ID NO: 1490627 - RNA, 19 nt, Homo sapiens
  misc_RNA (1)...(19): siRNA sense strand
cagaugacguguacuacug

SEQ ID NO: 1490628 - RNA, 19 nt, Homo sapiens
  misc_RNA (1)...(19): siRNA sense strand
cuggauaagugcuauguga

SEQ ID NO: 1490629 - RNA, 19 nt, Homo sapiens
  misc_RNA (1)...(19): siRNA sense strand
gguuauuacugaucgcauu

SEQ ID NO: 1490630 - RNA, 19 nt, Homo sapiens
  misc_RNA (1)...(19): siRNA sense strand
gguaccaguuggccaaaga

SEQ ID NO: 1490631 - RNA, 19 nt, Homo sapiens
  misc_RNA (1)...(19): siRNA sense strand
gcuuuggacuagcauuuau

SEQ ID NO: 1490632 - RNA, 19 nt, Homo sapiens
  misc_RNA (1)...(19): siRNA sense strand
ugacaaggaaacuuacaaa

SEQ ID NO: 1490633 - RNA, 19 nt, Homo sapiens
  misc_RNA (1)...(19): siRNA sense strand
gucaugacaaggaaacuua

SEQ ID NO: 1490634 - RNA, 19 nt, Homo sapiens
  misc_RNA (1)...(19): siRNA sense strand
gcuaugugaucccucugaa

SEQ ID NO: 1490635 - RNA, 19 nt, Homo sapiens
  misc_RNA (1)...(19): siRNA sense strand
cagccuauuuagaucuuaa

SEQ ID NO: 1490636 - RNA, 19 nt, Homo sapiens
  misc_RNA (1)...(19): siRNA sense strand
gaugaugugguaccaguug

SEQ ID NO: 1490637 - RNA, 19 nt, Homo sapiens
  misc_RNA (1)...(19): siRNA sense strand
agaaggaggccaagaagga

SEQ ID NO: 1490638 - RNA, 19 nt, Homo sapiens
  misc_RNA (1)...(19): siRNA sense strand
gaaaccuacuggaguuacu

SEQ ID NO: 1490639 - RNA, 19 nt, Homo sapiens
  misc_RNA (1)...(19): siRNA sense strand
aaacuuacagccuauuuag

SEQ ID NO: 1490640 - RNA, 19 nt, Homo sapiens
  misc_RNA (1)...(19): siRNA sense strand
gugaagccagcaauuguuu

SEQ ID NO: 1490641 - RNA, 19 nt, Homo sapiens
  misc_RNA (1)...(19): siRNA sense strand
ggaggagcauacuuguaca

SEQ ID NO: 1490642 - RNA, 19 nt, Homo sapiens
  misc_RNA (1)...(19): siRNA sense strand
gagcacaugguuauuacug

SEQ ID NO: 1490643 - RNA, 19 nt, Homo sapiens
  misc_RNA (1)...(19): siRNA sense strand
ccucugaacacuuccauug

SEQ ID NO: 1490644 - RNA, 19 nt, Homo sapiens
  misc_RNA (1)...(19): siRNA sense strand
ggauaagugcuaugugauc

SEQ ID NO: 1490645 - RNA, 19 nt, Homo sapiens
  misc_RNA (1)...(19): siRNA sense strand
ucaaccagaugacguguac

SEQ ID NO: 1490646 - RNA, 19 nt, Homo sapiens
  misc_RNA (1)...(19): siRNA sense strand
ucccagaguuugcagauag

SEQ ID NO: 1490647 - RNA, 19 nt, Homo sapiens
  misc_RNA (1)...(19): siRNA sense strand
uuaaagguauucagaaacg

SEQ ID NO: 1490648 - RNA, 19 nt, Homo sapiens
  misc_RNA (1)...(19): siRNA sense strand
gugcaugugcuuuggacua

SEQ ID NO: 1490649 - RNA, 19 nt, Homo sapiens
  misc_RNA (1)...(19): siRNA sense strand
gcaacgcagagaaacuauu

SEQ ID NO: 1490650 - RNA, 19 nt, Homo sapiens
  misc_RNA (1)...(19): siRNA sense strand
uaaccuggauaagugcuau

SEQ ID NO: 1490651 - RNA, 19 nt, Homo sapiens
  misc_RNA (1)...(19): siRNA sense strand
ucaaggcuggaaccuauuu

SEQ ID NO: 1490652 - RNA, 19 nt, Homo sapiens
  misc_RNA (1)...(19): siRNA sense strand
aauuugccguggaaacuuu

SEQ ID NO: 1490653 - RNA, 19 nt, Homo sapiens
  misc_RNA (1)...(19): siRNA sense strand
gcaauucggcauuuugaaa

SEQ ID NO: 1490654 - RNA, 19 nt, Homo sapiens
  misc_RNA (1)...(19): siRNA sense strand
agaagagccugguguuggu

SEQ ID NO: 1490655 - RNA, 19 nt, Homo sapiens
  misc_RNA (1)...(19): siRNA sense strand
gacguguacuacuguggaa

SEQ ID NO: 1490656 - RNA, 19 nt, Homo sapiens
  misc_RNA (1)...(19): siRNA sense strand
aaacgugaagccagcaauu

SEQ ID NO: 1490657 - RNA, 19 nt, Homo sapiens
  misc_RNA (1)...(19): siRNA sense strand
gaagaagaagaaguugaau

SEQ ID NO: 1490658 - RNA, 19 nt, Homo sapiens
  misc_RNA (1)...(19): siRNA sense strand
guguacuacuguggaauaa

SEQ ID NO: 1490659 - RNA, 19 nt, Homo sapiens
  misc_RNA (1)...(19): siRNA sense strand
gccguggaaacuuuaauuu

SEQ ID NO: 1490660 - RNA, 19 nt, Homo sapiens
  misc_RNA (1)...(19): siRNA sense strand
cguguacuacuguggaaua

SEQ ID NO: 1490661 - RNA, 19 nt, Homo sapiens
  misc_RNA (1)...(19): siRNA sense strand
ccuauuugccucaguccua

SEQ ID NO: 1490662 - RNA, 19 nt, Homo sapiens
  misc_RNA (1)...(19): siRNA sense strand
cagaaaccuacuggaguua

SEQ ID NO: 1490663 - RNA, 19 nt, Homo sapiens
  misc_RNA (1)...(19): siRNA sense strand
acaaggaaacuuacaaacu

SEQ ID NO: 1490664 - RNA, 19 nt, Homo sapiens
  misc_RNA (1)...(19): siRNA sense strand
ucuaggaggagcauacuug

SEQ ID NO: 1490665 - RNA, 19 nt, Homo sapiens
  misc_RNA (1)...(19): siRNA sense strand
caaauuugccguggaaacu

SEQ ID NO: 1490666 - RNA, 19 nt, Homo sapiens
  misc_RNA (1)...(19): siRNA sense strand
acgcagagaaacuauuaaa

SEQ ID NO: 1490667 - RNA, 19 nt, Homo sapiens
  misc_RNA (1)...(19): siRNA sense strand
caaggacccagaugaugug

SEQ ID NO: 1490668 - RNA, 19 nt, Homo sapiens
  misc_RNA (1)...(19): siRNA sense strand
uagugauccugccaacauu

SEQ ID NO: 1490669 - RNA, 19 nt, Homo sapiens
  misc_RNA (1)...(19): siRNA sense strand
ccagacaauugaagaaaau

SEQ ID NO: 1490670 - RNA, 19 nt, Homo sapiens
  misc_RNA (1)...(19): siRNA sense strand
ggacugcaaggacccagau

SEQ ID NO: 1490671 - RNA, 19 nt, Homo sapiens
  misc_RNA (1)...(19): siRNA sense strand
gaaacgugaagccagcaau

SEQ ID NO: 1490672 - RNA, 19 nt, Homo sapiens
  misc_RNA (1)...(19): siRNA sense strand
ggaaacuuacaaacugcaa

SEQ ID NO: 1490673 - RNA, 19 nt, Homo sapiens
  misc_RNA (1)...(19): siRNA sense strand
acauugaucaccuggguuu

SEQ ID NO: 1490674 - RNA, 19 nt, Homo sapiens
  misc_RNA (1)...(19): siRNA sense strand
uaugugaucccucugaaca

SEQ ID NO: 1490675 - RNA, 19 nt, Homo sapiens
  misc_RNA (1)...(19): siRNA sense strand
agaaacuuacagccuauuu

SEQ ID NO: 1490676 - RNA, 19 nt, Homo sapiens
  misc_RNA (1)...(19): siRNA sense strand
aaugagcccucugcagaug

SEQ ID NO: 1490677 - RNA, 19 nt, Homo sapiens
  misc_RNA (1)...(19): siRNA sense strand
gaggagcauacuuguacaa

SEQ ID NO: 1490678 - RNA, 19 nt, Homo sapiens
  misc_RNA (1)...(19): siRNA sense strand
gcugcucucuaccagacaa

SEQ ID NO: 1490679 - RNA, 19 nt, Homo sapiens
  misc_RNA (1)...(19): siRNA sense strand
gcucucuaccagacaauug

SEQ ID NO: 1490680 - RNA, 19 nt, Homo sapiens
  misc_RNA (1)...(19): siRNA sense strand
ccaguuggccaaagaagag

SEQ ID NO: 1490681 - RNA, 19 nt, Homo sapiens
  misc_RNA (1)...(19): siRNA sense strand
gcgaggaggcgcucaucau

SEQ ID NO: 1490682 - RNA, 19 nt, Homo sapiens
  misc_RNA (1)...(19): siRNA sense strand
aaccagaugacguguacua

SEQ ID NO: 1490683 - RNA, 19 nt, Homo sapiens
  misc_RNA (1)...(19): siRNA sense strand
gucccagaguuugcagaua

SEQ ID NO: 1490684 - RNA, 19 nt, Homo sapiens
  misc_RNA (1)...(19): siRNA sense strand
uauuacugaucgcauugaa

SEQ ID NO: 1490685 - RNA, 19 nt, Homo sapiens
  misc_RNA (1)...(19): siRNA sense strand
aaagaagagccugguguug

SEQ ID NO: 1490686 - RNA, 19 nt, Homo sapiens
  misc_RNA (1)...(19): siRNA sense strand
cgaggaggcgcucaucauc

SEQ ID NO: 1490687 - RNA, 19 nt, Homo sapiens
  misc_RNA (1)...(19): siRNA sense strand
cuauuugccucaguccuau

SEQ ID NO: 1490688 - RNA, 19 nt, Homo sapiens
  misc_RNA (1)...(19): siRNA sense strand
gaagccagcaauuguuucg

SEQ ID NO: 1490689 - RNA, 19 nt, Homo sapiens
  misc_RNA (1)...(19): siRNA sense strand
uaggaggagcauacuugua

SEQ ID NO: 1490690 - RNA, 19 nt, Homo sapiens
  misc_RNA (1)...(19): siRNA sense strand
ccguggaaacuuuaauuug

SEQ ID NO: 1490691 - RNA, 19 nt, Homo sapiens
  misc_RNA (1)...(19): siRNA sense strand
ugaucccucugaacacuuc

SEQ ID NO: 1490692 - RNA, 19 nt, Homo sapiens
  misc_RNA (1)...(19): siRNA sense strand
ccagaaggaggccaagaag

SEQ ID NO: 1490693 - RNA, 19 nt, Homo sapiens
  misc_RNA (1)...(19): siRNA sense strand
cuaccagacaauugaagaa

SEQ ID NO: 1490694 - RNA, 19 nt, Homo sapiens
  misc_RNA (1)...(19): siRNA sense strand
uuuaucgacugugucauga

SEQ ID NO: 1490695 - RNA, 19 nt, Homo sapiens
  misc_RNA (1)...(19): siRNA sense strand
ccuacuggaguuacuuauu

SEQ ID NO: 1490696 - RNA, 19 nt, Homo sapiens
  misc_RNA (1)...(19): siRNA sense strand
acuuacagccuauuuagau

SEQ ID NO: 1490697 - RNA, 19 nt, Homo sapiens
  misc_RNA (1)...(19): siRNA sense strand
guaccaguuggccaaagaa

SEQ ID NO: 1490698 - RNA, 19 nt, Homo sapiens
  misc_RNA (1)...(19): siRNA sense strand
uaccagacaauugaagaaa

SEQ ID NO: 1490699 - RNA, 19 nt, Homo sapiens
  misc_RNA (1)...(19): siRNA sense strand
accuggguuucuuuauuua

SEQ ID NO: 1490700 - RNA, 19 nt, Homo sapiens
  misc_RNA (1)...(19): siRNA sense strand
cgugaagccagcaauuguu

SEQ ID NO: 1490701 - RNA, 19 nt, Homo sapiens
  misc_RNA (1)...(19): siRNA sense strand
gacaaggaaacuuacaaac

SEQ ID NO: 1490702 - RNA, 19 nt, Homo sapiens
  misc_RNA (1)...(19): siRNA sense strand
gagcaaagccuuauuuaaa

SEQ ID NO: 1490703 - RNA, 19 nt, Homo sapiens
  misc_RNA (1)...(19): siRNA sense strand
ggaauucaaccuugucuaa

SEQ ID NO: 1490704 - RNA, 19 nt, Homo sapiens
  misc_RNA (1)...(19): siRNA sense strand
cauguacucucaucuaauu

SEQ ID NO: 1490705 - RNA, 19 nt, Homo sapiens
  misc_RNA (1)...(19): siRNA sense strand
gagagugucaccuccauua

SEQ ID NO: 1490706 - RNA, 19 nt, Homo sapiens
  misc_RNA (1)...(19): siRNA sense strand
caacgagaaucgcauggaa

SEQ ID NO: 1490707 - RNA, 19 nt, Homo sapiens
  misc_RNA (1)...(19): siRNA sense strand
gagagcaaagccuuauuua

SEQ ID NO: 1490708 - RNA, 19 nt, Homo sapiens
  misc_RNA (1)...(19): siRNA sense strand
ggaagagagcaaagccuua

SEQ ID NO: 1490709 - RNA, 19 nt, Homo sapiens
  misc_RNA (1)...(19): siRNA sense strand
gcugggaacuggugaaagu

SEQ ID NO: 1490710 - RNA, 19 nt, Homo sapiens
  misc_RNA (1)...(19): siRNA sense strand
gaagagagcaaagccuuau

SEQ ID NO: 1490711 - RNA, 19 nt, Homo sapiens
  misc_RNA (1)...(19): siRNA sense strand
ucaagcagaugagaauuau

SEQ ID NO: 1490712 - RNA, 19 nt, Homo sapiens
  misc_RNA (1)...(19): siRNA sense strand
ccaccggcaucauugagua

SEQ ID NO: 1490713 - RNA, 19 nt, Homo sapiens
  misc_RNA (1)...(19): siRNA sense strand
ccagagacuuuauccugaa

SEQ ID NO: 1490714 - RNA, 19 nt, Homo sapiens
  misc_RNA (1)...(19): siRNA sense strand
ucaagcagcucuggcaaga

SEQ ID NO: 1490715 - RNA, 19 nt, Homo sapiens
  misc_RNA (1)...(19): siRNA sense strand
agugucaccuccauuauuu

SEQ ID NO: 1490716 - RNA, 19 nt, Homo sapiens
  misc_RNA (1)...(19): siRNA sense strand
uaaggaaaaugcccagaua

SEQ ID NO: 1490717 - RNA, 19 nt, Homo sapiens
  misc_RNA (1)...(19): siRNA sense strand
agacacaauucuacagcua

SEQ ID NO: 1490718 - RNA, 19 nt, Homo sapiens
  misc_RNA (1)...(19): siRNA sense strand
cuacagauacagacaauau

SEQ ID NO: 1490719 - RNA, 19 nt, Homo sapiens
  misc_RNA (1)...(19): siRNA sense strand
caucuacucucacuucaca

SEQ ID NO: 1490720 - RNA, 19 nt, Homo sapiens
  misc_RNA (1)...(19): siRNA sense strand
ccaaauauuaccugacuga

SEQ ID NO: 1490721 - RNA, 19 nt, Homo sapiens
  misc_RNA (1)...(19): siRNA sense strand
gaaaaugcccagauaauca

SEQ ID NO: 1490722 - RNA, 19 nt, Homo sapiens
  misc_RNA (1)...(19): siRNA sense strand
gaaagacggaaguggauuc

SEQ ID NO: 1490723 - RNA, 19 nt, Homo sapiens
  misc_RNA (1)...(19): siRNA sense strand
acacaauucuacagcuaaa

SEQ ID NO: 1490724 - RNA, 19 nt, Homo sapiens
  misc_RNA (1)...(19): siRNA sense strand
gauggacacgcuaaggaua

SEQ ID NO: 1490725 - RNA, 19 nt, Homo sapiens
  misc_RNA (1)...(19): siRNA sense strand
aauauucgcuuuguguuug

SEQ ID NO: 1490726 - RNA, 19 nt, Homo sapiens
  misc_RNA (1)...(19): siRNA sense strand
gacuuuauccugaagcuuu

SEQ ID NO: 1490727 - RNA, 19 nt, Homo sapiens
  misc_RNA (1)...(19): siRNA sense strand
gagaaucgcauggaagaga

SEQ ID NO: 1490728 - RNA, 19 nt, Homo sapiens
  misc_RNA (1)...(19): siRNA sense strand
gauaaucagagaaguggaa

SEQ ID NO: 1490729 - RNA, 19 nt, Homo sapiens
  misc_RNA (1)...(19): siRNA sense strand
aauauuaccugacugacau

SEQ ID NO: 1490730 - RNA, 19 nt, Homo sapiens
  misc_RNA (1)...(19): siRNA sense strand
uggauucacugcuuugaga

SEQ ID NO: 1490731 - RNA, 19 nt, Homo sapiens
  misc_RNA (1)...(19): siRNA sense strand
caucauugaguauccauuu

SEQ ID NO: 1490732 - RNA, 19 nt, Homo sapiens
  misc_RNA (1)...(19): siRNA sense strand
caauauucgcuuuguguuu

SEQ ID NO: 1490733 - RNA, 19 nt, Homo sapiens
  misc_RNA (1)...(19): siRNA sense strand
guaugugugugaacagaau

SEQ ID NO: 1490734 - RNA, 19 nt, Homo sapiens
  misc_RNA (1)...(19): siRNA sense strand
agaaagucaucuacucuca

SEQ ID NO: 1490735 - RNA, 19 nt, Homo sapiens
  misc_RNA (1)...(19): siRNA sense strand
acaaagagaaagucaucua

SEQ ID NO: 1490736 - RNA, 19 nt, Homo sapiens
  misc_RNA (1)...(19): siRNA sense strand
gucggacucugccaaauau

SEQ ID NO: 1490737 - RNA, 19 nt, Homo sapiens
  misc_RNA (1)...(19): siRNA sense strand
gagugucaccuccauuauu

SEQ ID NO: 1490738 - RNA, 19 nt, Homo sapiens
  misc_RNA (1)...(19): siRNA sense strand
aagcagcucuggcaagauc

SEQ ID NO: 1490739 - RNA, 19 nt, Homo sapiens
  misc_RNA (1)...(19): siRNA sense strand
gcaccuuuaucaagcagau

SEQ ID NO: 1490740 - RNA, 19 nt, Homo sapiens
  misc_RNA (1)...(19): siRNA sense strand
cggacucugccaaauauua

SEQ ID NO: 1490741 - RNA, 19 nt, Homo sapiens
  misc_RNA (1)...(19): siRNA sense strand
cagcuaaaccuaagggaau

SEQ ID NO: 1490742 - RNA, 19 nt, Homo sapiens
  misc_RNA (1)...(19): siRNA sense strand
ggagaucgagcgacagcuu

SEQ ID NO: 1490743 - RNA, 19 nt, Homo sapiens
  misc_RNA (1)...(19): siRNA sense strand
agagagcaaagccuuauuu

SEQ ID NO: 1490744 - RNA, 19 nt, Homo sapiens
  misc_RNA (1)...(19): siRNA sense strand
acucucaucuaauuagcua

SEQ ID NO: 1490745 - RNA, 19 nt, Homo sapiens
  misc_RNA (1)...(19): siRNA sense strand
ggaaagacggaaguggauu

SEQ ID NO: 1490746 - RNA, 19 nt, Homo sapiens
  misc_RNA (1)...(19): siRNA sense strand
agagcaaagccuuauuuaa

SEQ ID NO: 1490747 - RNA, 19 nt, Homo sapiens
  misc_RNA (1)...(19): siRNA sense strand
uuacagcgacgaagacaga

SEQ ID NO: 1490748 - RNA, 19 nt, Homo sapiens
  misc_RNA (1)...(19): siRNA sense strand
gacacaauucuacagcuaa

SEQ ID NO: 1490749 - RNA, 19 nt, Homo sapiens
  misc_RNA (1)...(19): siRNA sense strand
uccugaagcuuuaccaaga

SEQ ID NO: 1490750 - RNA, 19 nt, Homo sapiens
  misc_RNA (1)...(19): siRNA sense strand
ugucggacucugccaaaua

SEQ ID NO: 1490751 - RNA, 19 nt, Homo sapiens
  misc_RNA (1)...(19): siRNA sense strand
aagagaaagucaucuacuc

SEQ ID NO: 1490752 - RNA, 19 nt, Homo sapiens
  misc_RNA (1)...(19): siRNA sense strand
uacagacaauauucgcuuu

SEQ ID NO: 1490753 - RNA, 19 nt, Homo sapiens
  misc_RNA (1)...(19): siRNA sense strand
aaucauguacucucaucua

SEQ ID NO: 1490754 - RNA, 19 nt, Homo sapiens
  misc_RNA (1)...(19): siRNA sense strand
aauuagcuauuucccagaa

SEQ ID NO: 1490755 - RNA, 19 nt, Homo sapiens
  misc_RNA (1)...(19): siRNA sense strand
cauauucaccgccaugcaa

SEQ ID NO: 1490756 - RNA, 19 nt, Homo sapiens
  misc_RNA (1)...(19): siRNA sense strand
ucaaagacacaauucuaca

SEQ ID NO: 1490757 - RNA, 19 nt, Homo sapiens
  misc_RNA (1)...(19): siRNA sense strand
caaagagaaagucaucuac

SEQ ID NO: 1490758 - RNA, 19 nt, Homo sapiens
  misc_RNA (1)...(19): siRNA sense strand
acuuuauccugaagcuuua

SEQ ID NO: 1490759 - RNA, 19 nt, Homo sapiens
  misc_RNA (1)...(19): siRNA sense strand
ggacucugccaaauauuac

SEQ ID NO: 1490760 - RNA, 19 nt, Homo sapiens
  misc_RNA (1)...(19): siRNA sense strand
gcgauggacacgcuaagga

SEQ ID NO: 1490761 - RNA, 19 nt, Homo sapiens
  misc_RNA (1)...(19): siRNA sense strand
acagauacagacaauauuc

SEQ ID NO: 1490762 - RNA, 19 nt, Homo sapiens
  misc_RNA (1)...(19): siRNA sense strand
ucacaugugcuacagauac

SEQ ID NO: 1490763 - RNA, 19 nt, Homo sapiens
  misc_RNA (1)...(19): siRNA sense strand
aaagucaucuacucucacu

SEQ ID NO: 1490764 - RNA, 19 nt, Homo sapiens
  misc_RNA (1)...(19): siRNA sense strand
ccagauaaucagagaagug

SEQ ID NO: 1490765 - RNA, 19 nt, Homo sapiens
  misc_RNA (1)...(19): siRNA sense strand
gcccaccaccggcaucauu

SEQ ID NO: 1490766 - RNA, 19 nt, Homo sapiens
  misc_RNA (1)...(19): siRNA sense strand
agaauacacaggaccgaaa

SEQ ID NO: 1490767 - RNA, 19 nt, Homo sapiens
  misc_RNA (1)...(19): siRNA sense strand
ugguugcucugagugaaua

SEQ ID NO: 1490768 - RNA, 19 nt, Homo sapiens
  misc_RNA (1)...(19): siRNA sense strand
ucauugaguauccauuuga

SEQ ID NO: 1490769 - RNA, 19 nt, Homo sapiens
  misc_RNA (1)...(19): siRNA sense strand
uuaaaaccaucaucaccua

SEQ ID NO: 1490770 - RNA, 19 nt, Homo sapiens
  misc_RNA (1)...(19): siRNA sense strand
gcaaagccuuauuuaaaac

SEQ ID NO: 1490771 - RNA, 19 nt, Homo sapiens
  misc_RNA (1)...(19): siRNA sense strand
cacaugugcuacagauaca

SEQ ID NO: 1490772 - RNA, 19 nt, Homo sapiens
  misc_RNA (1)...(19): siRNA sense strand
cuucacaugugcuacagau

SEQ ID NO: 1490773 - RNA, 19 nt, Homo sapiens
  misc_RNA (1)...(19): siRNA sense strand
ccugaagcuuuaccaagau

SEQ ID NO: 1490774 - RNA, 19 nt, Homo sapiens
  misc_RNA (1)...(19): siRNA sense strand
ccgcaucgccacaccauca

SEQ ID NO: 1490775 - RNA, 19 nt, Homo sapiens
  misc_RNA (1)...(19): siRNA sense strand
gaaagggguucacgaagcu

SEQ ID NO: 1490776 - RNA, 19 nt, Homo sapiens
  misc_RNA (1)...(19): siRNA sense strand
ggaaaaugcccagauaauc

SEQ ID NO: 1490777 - RNA, 19 nt, Homo sapiens
  misc_RNA (1)...(19): siRNA sense strand
caaagacacaauucuacag

SEQ ID NO: 1490778 - RNA, 19 nt, Homo sapiens
  misc_RNA (1)...(19): siRNA sense strand
gagcugccagagacuuuau

SEQ ID NO: 1490779 - RNA, 19 nt, Homo sapiens
  misc_RNA (1)...(19): siRNA sense strand
aucauguacucucaucuaa

SEQ ID NO: 1490780 - RNA, 19 nt, Homo sapiens
  misc_RNA (1)...(19): siRNA sense strand
caguaugugugugaacaga

SEQ ID NO: 1490781 - RNA, 19 nt, Homo sapiens
  misc_RNA (1)...(19): siRNA sense strand
ugccaaauauuaccugacu

SEQ ID NO: 1490782 - RNA, 19 nt, Homo sapiens
  misc_RNA (1)...(19): siRNA sense strand
gcagguggaggccaucaag

SEQ ID NO: 1490783 - RNA, 19 nt, Homo sapiens
  misc_RNA (1)...(19): siRNA sense strand
ugaguauccauuugacuug

SEQ ID NO: 1490784 - RNA, 19 nt, Homo sapiens
  misc_RNA (1)...(19): siRNA sense strand
cagagcugccagagacuuu

SEQ ID NO: 1490785 - RNA, 19 nt, Homo sapiens
  misc_RNA (1)...(19): siRNA sense strand
gaauacacaggaccgaaac

SEQ ID NO: 1490786 - RNA, 19 nt, Homo sapiens
  misc_RNA (1)...(19): siRNA sense strand
ggaccgaaacaggauguca

SEQ ID NO: 1490787 - RNA, 19 nt, Homo sapiens
  misc_RNA (1)...(19): siRNA sense strand
ugugugaacagaauaagga

SEQ ID NO: 1490788 - RNA, 19 nt, Homo sapiens
  misc_RNA (1)...(19): siRNA sense strand
gguucacgaagcugguuua

SEQ ID NO: 1490789 - RNA, 19 nt, Homo sapiens
  misc_RNA (1)...(19): siRNA sense strand
aucaagcagaugagaauua

SEQ ID NO: 1490790 - RNA, 19 nt, Homo sapiens
  misc_RNA (1)...(19): siRNA sense strand
gagacuuuauccugaagcu

SEQ ID NO: 1490791 - RNA, 19 nt, Homo sapiens
  misc_RNA (1)...(19): siRNA sense strand
uacaguaugugugugaaca

SEQ ID NO: 1490792 - RNA, 19 nt, Homo sapiens
  misc_RNA (1)...(19): siRNA sense strand
ggccaacgaucggaaagac

SEQ ID NO: 1490793 - RNA, 19 nt, Homo sapiens
  misc_RNA (1)...(19): siRNA sense strand
gcccagauaaucagagaag

SEQ ID NO: 1490794 - RNA, 19 nt, Homo sapiens
  misc_RNA (1)...(19): siRNA sense strand
gagaaguggaaguggacaa

SEQ ID NO: 1490795 - RNA, 19 nt, Homo sapiens
  misc_RNA (1)...(19): siRNA sense strand
gaauccugacaaagagaaa

SEQ ID NO: 1490796 - RNA, 19 nt, Homo sapiens
  misc_RNA (1)...(19): siRNA sense strand
aaauauuaccugacugaca

SEQ ID NO: 1490797 - RNA, 19 nt, Homo sapiens
  misc_RNA (1)...(19): siRNA sense strand
gcagaugagaauuauccau

SEQ ID NO: 1490798 - RNA, 19 nt, Homo sapiens
  misc_RNA (1)...(19): siRNA sense strand
aaucagagaaguggaagug

SEQ ID NO: 1490799 - RNA, 19 nt, Homo sapiens
  misc_RNA (1)...(19): siRNA sense strand
gggaauucaaccuugucua

SEQ ID NO: 1490800 - RNA, 19 nt, Homo sapiens
  misc_RNA (1)...(19): siRNA sense strand
gaacagaauaaggaaaaug

SEQ ID NO: 1490801 - RNA, 19 nt, Homo sapiens
  misc_RNA (1)...(19): siRNA sense strand
gugccuacccaacaagaug

SEQ ID NO: 1490802 - RNA, 19 nt, Homo sapiens
  misc_RNA (1)...(19): siRNA sense strand
ggagaggguugacaaagua

SEQ ID NO: 1490803 - RNA, 19 nt, Homo sapiens
  misc_RNA (1)...(19): siRNA sense strand
gcauugaccucauucagaa

SEQ ID NO: 1490804 - RNA, 19 nt, Homo sapiens
  misc_RNA (1)...(19): siRNA sense strand
gcagugaugauguuuauaa

SEQ ID NO: 1490805 - RNA, 19 nt, Homo sapiens
  misc_RNA (1)...(19): siRNA sense strand
ugaaacauaugcugaaaga

SEQ ID NO: 1490806 - RNA, 19 nt, Homo sapiens
  misc_RNA (1)...(19): siRNA sense strand
gaaggagcacugaaacaua

SEQ ID NO: 1490807 - RNA, 19 nt, Homo sapiens
  misc_RNA (1)...(19): siRNA sense strand
gaagguaucuccacaucag

SEQ ID NO: 1490808 - RNA, 19 nt, Homo sapiens
  misc_RNA (1)...(19): siRNA sense strand
ggagaagucccgagaauuc

SEQ ID NO: 1490809 - RNA, 19 nt, Homo sapiens
  misc_RNA (1)...(19): siRNA sense strand
gagaauucauuggaaguuu

SEQ ID NO: 1490810 - RNA, 19 nt, Homo sapiens
  misc_RNA (1)...(19): siRNA sense strand
gaggagaagucccgagaau

SEQ ID NO: 1490811 - RNA, 19 nt, Homo sapiens
  misc_RNA (1)...(19): siRNA sense strand
gaacgagaaugagcgcuau

SEQ ID NO: 1490812 - RNA, 19 nt, Homo sapiens
  misc_RNA (1)...(19): siRNA sense strand
gaagaagccagcagaggaa

SEQ ID NO: 1490813 - RNA, 19 nt, Homo sapiens
  misc_RNA (1)...(19): siRNA sense strand
gaauugugcgggauuauga

SEQ ID NO: 1490814 - RNA, 19 nt, Homo sapiens
  misc_RNA (1)...(19): siRNA sense strand
agaagaaagugaaagaugu

SEQ ID NO: 1490815 - RNA, 19 nt, Homo sapiens
  misc_RNA (1)...(19): siRNA sense strand
gcaaaggagcucaauguca

SEQ ID NO: 1490816 - RNA, 19 nt, Homo sapiens
  misc_RNA (1)...(19): siRNA sense strand
cgaagaaccuuuucccuaa

SEQ ID NO: 1490817 - RNA, 19 nt, Homo sapiens
  misc_RNA (1)...(19): siRNA sense strand
caaggaggcaggcauguuu

SEQ ID NO: 1490818 - RNA, 19 nt, Homo sapiens
  misc_RNA (1)...(19): siRNA sense strand
ccuaauacguaccucauug

SEQ ID NO: 1490819 - RNA, 19 nt, Homo sapiens
  misc_RNA (1)...(19): siRNA sense strand
gugaugauguuuauaagca

SEQ ID NO: 1490820 - RNA, 19 nt, Homo sapiens
  misc_RNA (1)...(19): siRNA sense strand
aaggagcacugaaacauau

SEQ ID NO: 1490821 - RNA, 19 nt, Homo sapiens
  misc_RNA (1)...(19): siRNA sense strand
gaagaaagugaaagaugug

SEQ ID NO: 1490822 - RNA, 19 nt, Homo sapiens
  misc_RNA (1)...(19): siRNA sense strand
ugaaagauguggaggaaaa

SEQ ID NO: 1490823 - RNA, 19 nt, Homo sapiens
  misc_RNA (1)...(19): siRNA sense strand
uggaugagguggugaggaa

SEQ ID NO: 1490824 - RNA, 19 nt, Homo sapiens
  misc_RNA (1)...(19): siRNA sense strand
ggaaggagcacugaaacau

SEQ ID NO: 1490825 - RNA, 19 nt, Homo sapiens
  misc_RNA (1)...(19): siRNA sense strand
cagcaaaggagcucaaugu

SEQ ID NO: 1490826 - RNA, 19 nt, Homo sapiens
  misc_RNA (1)...(19): siRNA sense strand
cugaugaaauugaaguuga

SEQ ID NO: 1490827 - RNA, 19 nt, Homo sapiens
  misc_RNA (1)...(19): siRNA sense strand
gacaucaucacccgaauug

SEQ ID NO: 1490828 - RNA, 19 nt, Homo sapiens
  misc_RNA (1)...(19): siRNA sense strand
cagaagguaucuccacauc

SEQ ID NO: 1490829 - RNA, 19 nt, Homo sapiens
  misc_RNA (1)...(19): siRNA sense strand
uuaugccgauggaauauuu

SEQ ID NO: 1490830 - RNA, 19 nt, Homo sapiens
  misc_RNA (1)...(19): siRNA sense strand
gaggaaaagucaaaagaau

SEQ ID NO: 1490831 - RNA, 19 nt, Homo sapiens
  misc_RNA (1)...(19): siRNA sense strand
caggguaacuauggaagaa

SEQ ID NO: 1490832 - RNA, 19 nt, Homo sapiens
  misc_RNA (1)...(19): siRNA sense strand
cgauggaauauuugacuua

SEQ ID NO: 1490833 - RNA, 19 nt, Homo sapiens
  misc_RNA (1)...(19): siRNA sense strand
uggcagugaugauguuuau

SEQ ID NO: 1490834 - RNA, 19 nt, Homo sapiens
  misc_RNA (1)...(19): siRNA sense strand
gagaguuuaugccgaugga

SEQ ID NO: 1490835 - RNA, 19 nt, Homo sapiens
  misc_RNA (1)...(19): siRNA sense strand
ccgaacaccggauugauuu

SEQ ID NO: 1490836 - RNA, 19 nt, Homo sapiens
  misc_RNA (1)...(19): siRNA sense strand
gcucacacacaacuucaaa

SEQ ID NO: 1490837 - RNA, 19 nt, Homo sapiens
  misc_RNA (1)...(19): siRNA sense strand
gaagucccgagaauucauu

SEQ ID NO: 1490838 - RNA, 19 nt, Homo sapiens
  misc_RNA (1)...(19): siRNA sense strand
gcaggcauguuugcuccaa

SEQ ID NO: 1490839 - RNA, 19 nt, Homo sapiens
  misc_RNA (1)...(19): siRNA sense strand
gcaggagaggguugacaaa

SEQ ID NO: 1490840 - RNA, 19 nt, Homo sapiens
  misc_RNA (1)...(19): siRNA sense strand
acacagaggacagaaggua

SEQ ID NO: 1490841 - RNA, 19 nt, Homo sapiens
  misc_RNA (1)...(19): siRNA sense strand
gcgggauuaugauguguau

SEQ ID NO: 1490842 - RNA, 19 nt, Homo sapiens
  misc_RNA (1)...(19): siRNA sense strand
caucaucacccgaauugug

SEQ ID NO: 1490843 - RNA, 19 nt, Homo sapiens
  misc_RNA (1)...(19): siRNA sense strand
gccgaacaccggauugauu

SEQ ID NO: 1490844 - RNA, 19 nt, Homo sapiens
  misc_RNA (1)...(19): siRNA sense strand
cgagaagaaauaccacuug

SEQ ID NO: 1490845 - RNA, 19 nt, Homo sapiens
  misc_RNA (1)...(19): siRNA sense strand
gauauuccuuauucaucug

SEQ ID NO: 1490846 - RNA, 19 nt, Homo sapiens
  misc_RNA (1)...(19): siRNA sense strand
ucagugaggaugaagaaga

SEQ ID NO: 1490847 - RNA, 19 nt, Homo sapiens
  misc_RNA (1)...(19): siRNA sense strand
ugagcgaccugugagaguu

SEQ ID NO: 1490848 - RNA, 19 nt, Homo sapiens
  misc_RNA (1)...(19): siRNA sense strand
gaagaaccuuuucccuaau

SEQ ID NO: 1490849 - RNA, 19 nt, Homo sapiens
  misc_RNA (1)...(19): siRNA sense strand
gagcgaccugugagaguuu

SEQ ID NO: 1490850 - RNA, 19 nt, Homo sapiens
  misc_RNA (1)...(19): siRNA sense strand
cccaugaugauauuccuua

SEQ ID NO: 1490851 - RNA, 19 nt, Homo sapiens
  misc_RNA (1)...(19): siRNA sense strand
agugaaagauguggaggaa

SEQ ID NO: 1490852 - RNA, 19 nt, Homo sapiens
  misc_RNA (1)...(19): siRNA sense strand
gcacugccgcuacguggau

SEQ ID NO: 1490853 - RNA, 19 nt, Homo sapiens
  misc_RNA (1)...(19): siRNA sense strand
gagaagucccgagaauuca

SEQ ID NO: 1490854 - RNA, 19 nt, Homo sapiens
  misc_RNA (1)...(19): siRNA sense strand
aagaagaaagugaaagaug

SEQ ID NO: 1490855 - RNA, 19 nt, Homo sapiens
  misc_RNA (1)...(19): siRNA sense strand
uguagcccaugaugauauu

SEQ ID NO: 1490856 - RNA, 19 nt, Homo sapiens
  misc_RNA (1)...(19): siRNA sense strand
caaaguaaagaagaaagug

SEQ ID NO: 1490857 - RNA, 19 nt, Homo sapiens
  misc_RNA (1)...(19): siRNA sense strand
gagaggguugacaaaguaa

SEQ ID NO: 1490858 - RNA, 19 nt, Homo sapiens
  misc_RNA (1)...(19): siRNA sense strand
uuuauaagcacaucaagga

SEQ ID NO: 1490859 - RNA, 19 nt, Homo sapiens
  misc_RNA (1)...(19): siRNA sense strand
gaugagguggugaggaaug

SEQ ID NO: 1490860 - RNA, 19 nt, Homo sapiens
  misc_RNA (1)...(19): siRNA sense strand
ugauaucagugaggaugaa

SEQ ID NO: 1490861 - RNA, 19 nt, Homo sapiens
  misc_RNA (1)...(19): siRNA sense strand
ggaggagaagucccgagaa

SEQ ID NO: 1490862 - RNA, 19 nt, Homo sapiens
  misc_RNA (1)...(19): siRNA sense strand
ccaugaugauauuccuuau

SEQ ID NO: 1490863 - RNA, 19 nt, Homo sapiens
  misc_RNA (1)...(19): siRNA sense strand
ugaggaugaagaagacuaa

SEQ ID NO: 1490864 - RNA, 19 nt, Homo sapiens
  misc_RNA (1)...(19): siRNA sense strand
uaucagugaggaugaagaa

SEQ ID NO: 1490865 - RNA, 19 nt, Homo sapiens
  misc_RNA (1)...(19): siRNA sense strand
aggagaggguugacaaagu

SEQ ID NO: 1490866 - RNA, 19 nt, Homo sapiens
  misc_RNA (1)...(19): siRNA sense strand
ggaggaaaagucaaaagaa

SEQ ID NO: 1490867 - RNA, 19 nt, Homo sapiens
  misc_RNA (1)...(19): siRNA sense strand
cagccuaugauaucaguga

SEQ ID NO: 1490868 - RNA, 19 nt, Homo sapiens
  misc_RNA (1)...(19): siRNA sense strand
gcgcugugcagugggcuua

SEQ ID NO: 1490869 - RNA, 19 nt, Homo sapiens
  misc_RNA (1)...(19): siRNA sense strand
aagaauuuguucagaaggu

SEQ ID NO: 1490870 - RNA, 19 nt, Homo sapiens
  misc_RNA (1)...(19): siRNA sense strand
gggauuaugauguguaugc

SEQ ID NO: 1490871 - RNA, 19 nt, Homo sapiens
  misc_RNA (1)...(19): siRNA sense strand
ccgauggaauauuugacuu

SEQ ID NO: 1490872 - RNA, 19 nt, Homo sapiens
  misc_RNA (1)...(19): siRNA sense strand
gcugcagccuaugauauca

SEQ ID NO: 1490873 - RNA, 19 nt, Homo sapiens
  misc_RNA (1)...(19): siRNA sense strand
acugaaacauaugcugaaa

SEQ ID NO: 1490874 - RNA, 19 nt, Homo sapiens
  misc_RNA (1)...(19): siRNA sense strand
guaccucauugugggaguu

SEQ ID NO: 1490875 - RNA, 19 nt, Homo sapiens
  misc_RNA (1)...(19): siRNA sense strand
gaguuuaugccgauggaau

SEQ ID NO: 1490876 - RNA, 19 nt, Homo sapiens
  misc_RNA (1)...(19): siRNA sense strand
ucagcuuuaucaacgagaa

SEQ ID NO: 1490877 - RNA, 19 nt, Homo sapiens
  misc_RNA (1)...(19): siRNA sense strand
gaugagcucacacacaacu

SEQ ID NO: 1490878 - RNA, 19 nt, Homo sapiens
  misc_RNA (1)...(19): siRNA sense strand
cgagaauucauuggaaguu

SEQ ID NO: 1490879 - RNA, 19 nt, Homo sapiens
  misc_RNA (1)...(19): siRNA sense strand
ucccgagaauucauuggaa

SEQ ID NO: 1490880 - RNA, 19 nt, Homo sapiens
  misc_RNA (1)...(19): siRNA sense strand
guaaagaagaaagugaaag

SEQ ID NO: 1490881 - RNA, 19 nt, Homo sapiens
  misc_RNA (1)...(19): siRNA sense strand
guugacaaaguaaagaaga

SEQ ID NO: 1490882 - RNA, 19 nt, Homo sapiens
  misc_RNA (1)...(19): siRNA sense strand
aagaaccuuuucccuaaua

SEQ ID NO: 1490883 - RNA, 19 nt, Homo sapiens
  misc_RNA (1)...(19): siRNA sense strand
gagcucacacacaacuuca

SEQ ID NO: 1490884 - RNA, 19 nt, Homo sapiens
  misc_RNA (1)...(19): siRNA sense strand
gaacaccggauugauuuug

SEQ ID NO: 1490885 - RNA, 19 nt, Homo sapiens
  misc_RNA (1)...(19): siRNA sense strand
cagugaugauguuuauaag

SEQ ID NO: 1490886 - RNA, 19 nt, Homo sapiens
  misc_RNA (1)...(19): siRNA sense strand
gugggaguuugcagugaug

SEQ ID NO: 1490887 - RNA, 19 nt, Homo sapiens
  misc_RNA (1)...(19): siRNA sense strand
cgaauugugcgggauuaug

SEQ ID NO: 1490888 - RNA, 19 nt, Homo sapiens
  misc_RNA (1)...(19): siRNA sense strand
agacaucaucacccgaauu

SEQ ID NO: 1490889 - RNA, 19 nt, Homo sapiens
  misc_RNA (1)...(19): siRNA sense strand
ucacacacaacuucaaagg

SEQ ID NO: 1490890 - RNA, 19 nt, Homo sapiens
  misc_RNA (1)...(19): siRNA sense strand
ucaaggaggcaggcauguu

SEQ ID NO: 1490891 - RNA, 19 nt, Homo sapiens
  misc_RNA (1)...(19): siRNA sense strand
gugaggaugaagaagacua

SEQ ID NO: 1490892 - RNA, 19 nt, Homo sapiens
  misc_RNA (1)...(19): siRNA sense strand
ucaacgagaagaaauacca

SEQ ID NO: 1490893 - RNA, 19 nt, Homo sapiens
  misc_RNA (1)...(19): siRNA sense strand
ggacgcugacacccgaguu

SEQ ID NO: 1490894 - RNA, 19 nt, Homo sapiens
  misc_RNA (1)...(19): siRNA sense strand
cagugaggaugaagaagac

SEQ ID NO: 1490895 - RNA, 19 nt, Homo sapiens
  misc_RNA (1)...(19): siRNA sense strand
caacggggcaacagaagaa

SEQ ID NO: 1490896 - RNA, 19 nt, Homo sapiens
  misc_RNA (1)...(19): siRNA sense strand
guucagaagguggaggaaa

SEQ ID NO: 1490897 - RNA, 19 nt, Homo sapiens
  misc_RNA (1)...(19): siRNA sense strand
gacaaaguaaagaagaaag

SEQ ID NO: 1490898 - RNA, 19 nt, Homo sapiens
  misc_RNA (1)...(19): siRNA sense strand
ggguugacaaaguaaagaa

SEQ ID NO: 1490899 - RNA, 19 nt, Homo sapiens
  misc_RNA (1)...(19): siRNA sense strand
gaggguugacaaaguaaag

SEQ ID NO: 1490900 - RNA, 19 nt, Homo sapiens
  misc_RNA (1)...(19): siRNA sense strand
caacaaagcuucauuagca

SEQ ID NO: 1490901 - RNA, 19 nt, Homo sapiens
  misc_RNA (1)...(19): siRNA sense strand
gaucagagauucagaugug

SEQ ID NO: 1490902 - RNA, 19 nt, Homo sapiens
  misc_RNA (1)...(19): siRNA sense strand
ggacacaugcucaaauuaa

SEQ ID NO: 1490903 - RNA, 19 nt, Homo sapiens
  misc_RNA (1)...(19): siRNA sense strand
acagaacucuucaggaaua

SEQ ID NO: 1490904 - RNA, 19 nt, Homo sapiens
  misc_RNA (1)...(19): siRNA sense strand
guacagacuuaauguuuga

SEQ ID NO: 1490905 - RNA, 19 nt, Homo sapiens
  misc_RNA (1)...(19): siRNA sense strand
uuacagaacucuucaggaa

SEQ ID NO: 1490906 - RNA, 19 nt, Homo sapiens
  misc_RNA (1)...(19): siRNA sense strand
caaauuaaagggagacaua

SEQ ID NO: 1490907 - RNA, 19 nt, Homo sapiens
  misc_RNA (1)...(19): siRNA sense strand
gcauugaccuggcaucuca

SEQ ID NO: 1490908 - RNA, 19 nt, Homo sapiens
  misc_RNA (1)...(19): siRNA sense strand
ugaaggagaugaugagaau

SEQ ID NO: 1490909 - RNA, 19 nt, Homo sapiens
  misc_RNA (1)...(19): siRNA sense strand
cugaaggacucuauugaua

SEQ ID NO: 1490910 - RNA, 19 nt, Homo sapiens
  misc_RNA (1)...(19): siRNA sense strand
cuacucaccugauaaagaa

SEQ ID NO: 1490911 - RNA, 19 nt, Homo sapiens
  misc_RNA (1)...(19): siRNA sense strand
ggaacacacuggcuuaugg

SEQ ID NO: 1490912 - RNA, 19 nt, Homo sapiens
  misc_RNA (1)...(19): siRNA sense strand
gacacaugcucaaauuaaa

SEQ ID NO: 1490913 - RNA, 19 nt, Homo sapiens
  misc_RNA (1)...(19): siRNA sense strand
agacauagauucaaaugca

SEQ ID NO: 1490914 - RNA, 19 nt, Homo sapiens
  misc_RNA (1)...(19): siRNA sense strand
ggagacacauauacgaaau

SEQ ID NO: 1490915 - RNA, 19 nt, Homo sapiens
  misc_RNA (1)...(19): siRNA sense strand
gcaaauuucuuggaacaca

SEQ ID NO: 1490916 - RNA, 19 nt, Homo sapiens
  misc_RNA (1)...(19): siRNA sense strand
ucucauggguuuauaguug

SEQ ID NO: 1490917 - RNA, 19 nt, Homo sapiens
  misc_RNA (1)...(19): siRNA sense strand
gaugaaguauauuccagaa

SEQ ID NO: 1490918 - RNA, 19 nt, Homo sapiens
  misc_RNA (1)...(19): siRNA sense strand
uauaguugcugcuguagaa

SEQ ID NO: 1490919 - RNA, 19 nt, Homo sapiens
  misc_RNA (1)...(19): siRNA sense strand
gaaagccagugaagaaugc

SEQ ID NO: 1490920 - RNA, 19 nt, Homo sapiens
  misc_RNA (1)...(19): siRNA sense strand
ggucuuagcaaauuucuug

SEQ ID NO: 1490921 - RNA, 19 nt, Homo sapiens
  misc_RNA (1)...(19): siRNA sense strand
ggaccaacauuaacacaac

SEQ ID NO: 1490922 - RNA, 19 nt, Homo sapiens
  misc_RNA (1)...(19): siRNA sense strand
cuucaggaauagagaaaua

SEQ ID NO: 1490923 - RNA, 19 nt, Homo sapiens
  misc_RNA (1)...(19): siRNA sense strand
uaaauccuguugcccauau

SEQ ID NO: 1490924 - RNA, 19 nt, Homo sapiens
  misc_RNA (1)...(19): siRNA sense strand
uuagaacccugaaacaaga

SEQ ID NO: 1490925 - RNA, 19 nt, Homo sapiens
  misc_RNA (1)...(19): siRNA sense strand
gauggcugcugcaagcuuu

SEQ ID NO: 1490926 - RNA, 19 nt, Homo sapiens
  misc_RNA (1)...(19): siRNA sense strand
caucugcaacuuacuauuu

SEQ ID NO: 1490927 - RNA, 19 nt, Homo sapiens
  misc_RNA (1)...(19): siRNA sense strand
caacugaaggacucuauug

SEQ ID NO: 1490928 - RNA, 19 nt, Homo sapiens
  misc_RNA (1)...(19): siRNA sense strand
guuuauaguugcugcugua

SEQ ID NO: 1490929 - RNA, 19 nt, Homo sapiens
  misc_RNA (1)...(19): siRNA sense strand
uagcaacaaagcuucauua

SEQ ID NO: 1490930 - RNA, 19 nt, Homo sapiens
  misc_RNA (1)...(19): siRNA sense strand
gaucuuagcaacaaagcuu

SEQ ID NO: 1490931 - RNA, 19 nt, Homo sapiens
  misc_RNA (1)...(19): siRNA sense strand
caaaauaauuggacacaug

SEQ ID NO: 1490932 - RNA, 19 nt, Homo sapiens
  misc_RNA (1)...(19): siRNA sense strand
ggaaagccagugaagaaug

SEQ ID NO: 1490933 - RNA, 19 nt, Homo sapiens
  misc_RNA (1)...(19): siRNA sense strand
agacacauauacgaaauga

SEQ ID NO: 1490934 - RNA, 19 nt, Homo sapiens
  misc_RNA (1)...(19): siRNA sense strand
ugacauugaucauggaaag

SEQ ID NO: 1490935 - RNA, 19 nt, Homo sapiens
  misc_RNA (1)...(19): siRNA sense strand
gcaaagagcaaaagaaugu

SEQ ID NO: 1490936 - RNA, 19 nt, Homo sapiens
  misc_RNA (1)...(19): siRNA sense strand
uagcaaauuucuuggaaca

SEQ ID NO: 1490937 - RNA, 19 nt, Homo sapiens
  misc_RNA (1)...(19): siRNA sense strand
gaucauggaaagccaguga

SEQ ID NO: 1490938 - RNA, 19 nt, Homo sapiens
  misc_RNA (1)...(19): siRNA sense strand
caacuuacuauuucaagga

SEQ ID NO: 1490939 - RNA, 19 nt, Homo sapiens
  misc_RNA (1)...(19): siRNA sense strand
gaagaucagagauucagau

SEQ ID NO: 1490940 - RNA, 19 nt, Homo sapiens
  misc_RNA (1)...(19): siRNA sense strand
gaggagacacauauacgaa

SEQ ID NO: 1490941 - RNA, 19 nt, Homo sapiens
  misc_RNA (1)...(19): siRNA sense strand
ggagacauagauucaaaug

SEQ ID NO: 1490942 - RNA, 19 nt, Homo sapiens
  misc_RNA (1)...(19): siRNA sense strand
gcaccuucuugcguuuaua

SEQ ID NO: 1490943 - RNA, 19 nt, Homo sapiens
  misc_RNA (1)...(19): siRNA sense strand
gcuacucaccugauaaaga

SEQ ID NO: 1490944 - RNA, 19 nt, Homo sapiens
  misc_RNA (1)...(19): siRNA sense strand
aaaugcuacucaccugaua

SEQ ID NO: 1490945 - RNA, 19 nt, Homo sapiens
  misc_RNA (1)...(19): siRNA sense strand
ccuggcaucucauggguuu

SEQ ID NO: 1490946 - RNA, 19 nt, Homo sapiens
  misc_RNA (1)...(19): siRNA sense strand
gcauucaggacacuuuauu

SEQ ID NO: 1490947 - RNA, 19 nt, Homo sapiens
  misc_RNA (1)...(19): siRNA sense strand
caagaggaggagacacaua

SEQ ID NO: 1490948 - RNA, 19 nt, Homo sapiens
  misc_RNA (1)...(19): siRNA sense strand
aaaugcagcuauugaucuu

SEQ ID NO: 1490949 - RNA, 19 nt, Homo sapiens
  misc_RNA (1)...(19): siRNA sense strand
caacgguuauucagacucu

SEQ ID NO: 1490950 - RNA, 19 nt, Homo sapiens
  misc_RNA (1)...(19): siRNA sense strand
cuauugaucuuagcaacaa

SEQ ID NO: 1490951 - RNA, 19 nt, Homo sapiens
  misc_RNA (1)...(19): siRNA sense strand
guucaguccaccagaauuu

SEQ ID NO: 1490952 - RNA, 19 nt, Homo sapiens
  misc_RNA (1)...(19): siRNA sense strand
ugacaacuccugcaaacug

SEQ ID NO: 1490953 - RNA, 19 nt, Homo sapiens
  misc_RNA (1)...(19): siRNA sense strand
uauacgaaaugagcaggua

SEQ ID NO: 1490954 - RNA, 19 nt, Homo sapiens
  misc_RNA (1)...(19): siRNA sense strand
uguacagacuuaauguuug

SEQ ID NO: 1490955 - RNA, 19 nt, Homo sapiens
  misc_RNA (1)...(19): siRNA sense strand
uauauuauccaucccaaga

SEQ ID NO: 1490956 - RNA, 19 nt, Homo sapiens
  misc_RNA (1)...(19): siRNA sense strand
ggaggagacacauauacga

SEQ ID NO: 1490957 - RNA, 19 nt, Homo sapiens
  misc_RNA (1)...(19): siRNA sense strand
gggcauucaggacacuuua

SEQ ID NO: 1490958 - RNA, 19 nt, Homo sapiens
  misc_RNA (1)...(19): siRNA sense strand
caaaugcagcuauugaucu

SEQ ID NO: 1490959 - RNA, 19 nt, Homo sapiens
  misc_RNA (1)...(19): siRNA sense strand
agauucagaugugguauug

SEQ ID NO: 1490960 - RNA, 19 nt, Homo sapiens
  misc_RNA (1)...(19): siRNA sense strand
gugaagaaugcauuagauu

SEQ ID NO: 1490961 - RNA, 19 nt, Homo sapiens
  misc_RNA (1)...(19): siRNA sense strand
gaaacaagaggaggagaca

SEQ ID NO: 1490962 - RNA, 19 nt, Homo sapiens
  misc_RNA (1)...(19): siRNA sense strand
uggcugugguuuauccuuu

SEQ ID NO: 1490963 - RNA, 19 nt, Homo sapiens
  misc_RNA (1)...(19): siRNA sense strand
agggagacauagauucaaa

SEQ ID NO: 1490964 - RNA, 19 nt, Homo sapiens
  misc_RNA (1)...(19): siRNA sense strand
uuggacacaugcucaaauu

SEQ ID NO: 1490965 - RNA, 19 nt, Homo sapiens
  misc_RNA (1)...(19): siRNA sense strand
cagcaugggucaacaaaau

SEQ ID NO: 1490966 - RNA, 19 nt, Homo sapiens
  misc_RNA (1)...(19): siRNA sense strand
gagauucagaugugguauu

SEQ ID NO: 1490967 - RNA, 19 nt, Homo sapiens
  misc_RNA (1)...(19): siRNA sense strand
cuuagcaaauuucuuggaa

SEQ ID NO: 1490968 - RNA, 19 nt, Homo sapiens
  misc_RNA (1)...(19): siRNA sense strand
aaagggagacauagauuca

SEQ ID NO: 1490969 - RNA, 19 nt, Homo sapiens
  misc_RNA (1)...(19): siRNA sense strand
uccacugggugaugaagua

SEQ ID NO: 1490970 - RNA, 19 nt, Homo sapiens
  misc_RNA (1)...(19): siRNA sense strand
ggagcaacgguuauucaga

SEQ ID NO: 1490971 - RNA, 19 nt, Homo sapiens
  misc_RNA (1)...(19): siRNA sense strand
gacacuuuauucugcuauu

SEQ ID NO: 1490972 - RNA, 19 nt, Homo sapiens
  misc_RNA (1)...(19): siRNA sense strand
agucuuggcucuaccuuag

SEQ ID NO: 1490973 - RNA, 19 nt, Homo sapiens
  misc_RNA (1)...(19): siRNA sense strand
uaaagggagacauagauuc

SEQ ID NO: 1490974 - RNA, 19 nt, Homo sapiens
  misc_RNA (1)...(19): siRNA sense strand
gcaguaauuggacauucuu

SEQ ID NO: 1490975 - RNA, 19 nt, Homo sapiens
  misc_RNA (1)...(19): siRNA sense strand
gaacaacugaaggacucua

SEQ ID NO: 1490976 - RNA, 19 nt, Homo sapiens
  misc_RNA (1)...(19): siRNA sense strand
gagcagguacggcaaagag

SEQ ID NO: 1490977 - RNA, 19 nt, Homo sapiens
  misc_RNA (1)...(19): siRNA sense strand
caaaauacaaguacugaug

SEQ ID NO: 1490978 - RNA, 19 nt, Homo sapiens
  misc_RNA (1)...(19): siRNA sense strand
agauucaaaugcagcuauu

SEQ ID NO: 1490979 - RNA, 19 nt, Homo sapiens
  misc_RNA (1)...(19): siRNA sense strand
uuaaagggagacauagauu

SEQ ID NO: 1490980 - RNA, 19 nt, Homo sapiens
  misc_RNA (1)...(19): siRNA sense strand
gccagugaagaaugcauua

SEQ ID NO: 1490981 - RNA, 19 nt, Homo sapiens
  misc_RNA (1)...(19): siRNA sense strand
cagacuuaauguuugauca

SEQ ID NO: 1490982 - RNA, 19 nt, Homo sapiens
  misc_RNA (1)...(19): siRNA sense strand
ugacuggcaauacauaaau

SEQ ID NO: 1490983 - RNA, 19 nt, Homo sapiens
  misc_RNA (1)...(19): siRNA sense strand
gcaacuggcaaaauaauug

SEQ ID NO: 1490984 - RNA, 19 nt, Homo sapiens
  misc_RNA (1)...(19): siRNA sense strand
uagugaagaucagagauuc

SEQ ID NO: 1490985 - RNA, 19 nt, Homo sapiens
  misc_RNA (1)...(19): siRNA sense strand
caauacauaaauccuguug

SEQ ID NO: 1490986 - RNA, 19 nt, Homo sapiens
  misc_RNA (1)...(19): siRNA sense strand
ggaucccaaauaaagaaua

SEQ ID NO: 1490987 - RNA, 19 nt, Homo sapiens
  misc_RNA (1)...(19): siRNA sense strand
caaagcuucauuagcauuc

SEQ ID NO: 1490988 - RNA, 19 nt, Homo sapiens
  misc_RNA (1)...(19): siRNA sense strand
gcaacaaagcuucauuagc

SEQ ID NO: 1490989 - RNA, 19 nt, Homo sapiens
  misc_RNA (1)...(19): siRNA sense strand
cagagauucagauguggua

SEQ ID NO: 1490990 - RNA, 19 nt, Homo sapiens
  misc_RNA (1)...(19): siRNA sense strand
guagaacacagagauagau

SEQ ID NO: 1490991 - RNA, 19 nt, Homo sapiens
  misc_RNA (1)...(19): siRNA sense strand
caaugacaacuccugcaaa

SEQ ID NO: 1490992 - RNA, 19 nt, Homo sapiens
  misc_RNA (1)...(19): siRNA sense strand
uggcuuaugggcaacauuu

SEQ ID NO: 1490993 - RNA, 19 nt, Homo sapiens
  misc_RNA (1)...(19): siRNA sense strand
cacaaccaaucaacacauc

SEQ ID NO: 1490994 - RNA, 19 nt, Homo sapiens
  misc_RNA (1)...(19): siRNA sense strand
caacauuaacacaaccaau

SEQ ID NO: 1490995 - RNA, 19 nt, Homo sapiens
  misc_RNA (1)...(19): siRNA sense strand
agugaagaaugcauuagau

SEQ ID NO: 1490996 - RNA, 19 nt, Homo sapiens
  misc_RNA (1)...(19): siRNA sense strand
aagaggaggagacacauau

SEQ ID NO: 1490997 - RNA, 19 nt, Homo sapiens
  misc_RNA (1)...(19): siRNA sense strand
acacuuuauucugcuauug

SEQ ID NO: 1490998 - RNA, 19 nt, Homo sapiens
  misc_RNA (1)...(19): siRNA sense strand
aaugacaacuccugcaaac

SEQ ID NO: 1490999 - RNA, 19 nt, Homo sapiens
  misc_RNA (1)...(19): siRNA sense strand
gagguuacucuuugguuca

SEQ ID NO: 1491000 - RNA, 19 nt, Homo sapiens
  misc_RNA (1)...(19): siRNA sense strand
gcagauccaugucccaaua

SEQ ID NO: 1491001 - RNA, 19 nt, Homo sapiens
  misc_RNA (1)...(19): siRNA sense strand
ggacaucgccuuucucuau

SEQ ID NO: 1491002 - RNA, 19 nt, Homo sapiens
  misc_RNA (1)...(19): siRNA sense strand
gaugaguucuucccugugu

SEQ ID NO: 1491003 - RNA, 19 nt, Homo sapiens
  misc_RNA (1)...(19): siRNA sense strand
gagcguguguggagugaug

SEQ ID NO: 1491004 - RNA, 19 nt, Homo sapiens
  misc_RNA (1)...(19): siRNA sense strand
gaacuggaguaucuuugag

SEQ ID NO: 1491005 - RNA, 19 nt, Homo sapiens
  misc_RNA (1)...(19): siRNA sense strand
caaacaagacgaccuccuu

SEQ ID NO: 1491006 - RNA, 19 nt, Homo sapiens
  misc_RNA (1)...(19): siRNA sense strand
caaguacuccacagccuuu

SEQ ID NO: 1491007 - RNA, 19 nt, Homo sapiens
  misc_RNA (1)...(19): siRNA sense strand
gacaucgccuuucucuaug

SEQ ID NO: 1491008 - RNA, 19 nt, Homo sapiens
  misc_RNA (1)...(19): siRNA sense strand
ggagugaugaccacaagga

SEQ ID NO: 1491009 - RNA, 19 nt, Homo sapiens
  misc_RNA (1)...(19): siRNA sense strand
aaacaagacgaccuccuuu

SEQ ID NO: 1491010 - RNA, 19 nt, Homo sapiens
  misc_RNA (1)...(19): siRNA sense strand
gagaagaggcaccgagaag

SEQ ID NO: 1491011 - RNA, 19 nt, Homo sapiens
  misc_RNA (1)...(19): siRNA sense strand
gcuccaacgucugcuuuga

SEQ ID NO: 1491012 - RNA, 19 nt, Homo sapiens
  misc_RNA (1)...(19): siRNA sense strand
gagcguggacaucgccuuu

SEQ ID NO: 1491013 - RNA, 19 nt, Homo sapiens
  misc_RNA (1)...(19): siRNA sense strand
ggaaagcucaagccaugug

SEQ ID NO: 1491014 - RNA, 19 nt, Homo sapiens
  misc_RNA (1)...(19): siRNA sense strand
ggacuucgacugcaauacu

SEQ ID NO: 1491015 - RNA, 19 nt, Homo sapiens
  misc_RNA (1)...(19): siRNA sense strand
cagucauccuccucucuua

SEQ ID NO: 1491016 - RNA, 19 nt, Homo sapiens
  misc_RNA (1)...(19): siRNA sense strand
ccaauauaguggacugcuu

SEQ ID NO: 1491017 - RNA, 19 nt, Homo sapiens
  misc_RNA (1)...(19): siRNA sense strand
ggagaagaggcaccgagaa

SEQ ID NO: 1491018 - RNA, 19 nt, Homo sapiens
  misc_RNA (1)...(19): siRNA sense strand
uaccaccucuuccugcaaa

SEQ ID NO: 1491019 - RNA, 19 nt, Homo sapiens
  misc_RNA (1)...(19): siRNA sense strand
acaaggacuucgacugcaa

SEQ ID NO: 1491020 - RNA, 19 nt, Homo sapiens
  misc_RNA (1)...(19): siRNA sense strand
agauccaugucccaauaua

SEQ ID NO: 1491021 - RNA, 19 nt, Homo sapiens
  misc_RNA (1)...(19): siRNA sense strand
ugaguggggucaacaagua

SEQ ID NO: 1491022 - RNA, 19 nt, Homo sapiens
  misc_RNA (1)...(19): siRNA sense strand
ucaucuaccuggugagcaa

SEQ ID NO: 1491023 - RNA, 19 nt, Homo sapiens
  misc_RNA (1)...(19): siRNA sense strand
cgggugaccucaucuuucu

SEQ ID NO: 1491024 - RNA, 19 nt, Homo sapiens
  misc_RNA (1)...(19): siRNA sense strand
gggcucugguggacauaug

SEQ ID NO: 1491025 - RNA, 19 nt, Homo sapiens
  misc_RNA (1)...(19): siRNA sense strand
ucuauguguuccacucauu

SEQ ID NO: 1491026 - RNA, 19 nt, Homo sapiens
  misc_RNA (1)...(19): siRNA sense strand
ccgagaccaugugaagaaa

SEQ ID NO: 1491027 - RNA, 19 nt, Homo sapiens
  misc_RNA (1)...(19): siRNA sense strand
uccaacgucugcuuugaug

SEQ ID NO: 1491028 - RNA, 19 nt, Homo sapiens
  misc_RNA (1)...(19): siRNA sense strand
ggugggcucugguggacau

SEQ ID NO: 1491029 - RNA, 19 nt, Homo sapiens
  misc_RNA (1)...(19): siRNA sense strand
cgucugcuuugaugaguuc

SEQ ID NO: 1491030 - RNA, 19 nt, Homo sapiens
  misc_RNA (1)...(19): siRNA sense strand
gugaugaccacaaggacuu

SEQ ID NO: 1491031 - RNA, 19 nt, Homo sapiens
  misc_RNA (1)...(19): siRNA sense strand
caacgucugcuuugaugag

SEQ ID NO: 1491032 - RNA, 19 nt, Homo sapiens
  misc_RNA (1)...(19): siRNA sense strand
gcguggacaucgccuuucu

SEQ ID NO: 1491033 - RNA, 19 nt, Homo sapiens
  misc_RNA (1)...(19): siRNA sense strand
auaguggacugcuucaucu

SEQ ID NO: 1491034 - RNA, 19 nt, Homo sapiens
  misc_RNA (1)...(19): siRNA sense strand
gauccaugucccaauauag

SEQ ID NO: 1491035 - RNA, 19 nt, Homo sapiens
  misc_RNA (1)...(19): siRNA sense strand
ggucaagugccacgcagau

SEQ ID NO: 1491036 - RNA, 19 nt, Homo sapiens
  misc_RNA (1)...(19): siRNA sense strand
uauaguggacugcuucauc

SEQ ID NO: 1491037 - RNA, 19 nt, Homo sapiens
  misc_RNA (1)...(19): siRNA sense strand
cccgagaccaugugaagaa

SEQ ID NO: 1491038 - RNA, 19 nt, Homo sapiens
  misc_RNA (1)...(19): siRNA sense strand
ccucagagaagaacauuuu

SEQ ID NO: 1491039 - RNA, 19 nt, Homo sapiens
  misc_RNA (1)...(19): siRNA sense strand
ucugggcccugcagcuuau

SEQ ID NO: 1491040 - RNA, 19 nt, Homo sapiens
  misc_RNA (1)...(19): siRNA sense strand
uccaagcccucagagaaga

SEQ ID NO: 1491041 - RNA, 19 nt, Homo sapiens
  misc_RNA (1)...(19): siRNA sense strand
ccacagcugccaucugcau

SEQ ID NO: 1491042 - RNA, 19 nt, Homo sapiens
  misc_RNA (1)...(19): siRNA sense strand
accgggagguucaggagaa

SEQ ID NO: 1491043 - RNA, 19 nt, Homo sapiens
  misc_RNA (1)...(19): siRNA sense strand
caucgccuuucucuaugug

SEQ ID NO: 1491044 - RNA, 19 nt, Homo sapiens
  misc_RNA (1)...(19): siRNA sense strand
gacuucgacugcaauacuc

SEQ ID NO: 1491045 - RNA, 19 nt, Homo sapiens
  misc_RNA (1)...(19): siRNA sense strand
gagaaucaauguuuacuac

SEQ ID NO: 1491046 - RNA, 19 nt, Homo sapiens
  misc_RNA (1)...(19): siRNA sense strand
ugaagccacugguaacaaa

SEQ ID NO: 1491047 - RNA, 19 nt, Homo sapiens
  misc_RNA (1)...(19): siRNA sense strand
uggagagaaucaauguuua

SEQ ID NO: 1491048 - RNA, 19 nt, Homo sapiens
  misc_RNA (1)...(19): siRNA sense strand
gcaagauccgggaagagua

SEQ ID NO: 1491049 - RNA, 19 nt, Homo sapiens
  misc_RNA (1)...(19): siRNA sense strand
acaaugaagccacugguaa

SEQ ID NO: 1491050 - RNA, 19 nt, Homo sapiens
  misc_RNA (1)...(19): siRNA sense strand
gcaguucacggccauguuc

SEQ ID NO: 1491051 - RNA, 19 nt, Homo sapiens
  misc_RNA (1)...(19): siRNA sense strand
ggagagaaucaauguuuac

SEQ ID NO: 1491052 - RNA, 19 nt, Homo sapiens
  misc_RNA (1)...(19): siRNA sense strand
cuggagagaaucaauguuu

SEQ ID NO: 1491053 - RNA, 19 nt, Homo sapiens
  misc_RNA (1)...(19): siRNA sense strand
gagccaggcacgauggauu

SEQ ID NO: 1491054 - RNA, 19 nt, Homo sapiens
  misc_RNA (1)...(19): siRNA sense strand
ccacugguaacaaauaugu

SEQ ID NO: 1491055 - RNA, 19 nt, Homo sapiens
  misc_RNA (1)...(19): siRNA sense strand
gaacaccuucagcgucaug

SEQ ID NO: 1491056 - RNA, 19 nt, Homo sapiens
  misc_RNA (1)...(19): siRNA sense strand
caagaacagcagcuacuuc

SEQ ID NO: 1491057 - RNA, 19 nt, Homo sapiens
  misc_RNA (1)...(19): siRNA sense strand
ccaagggccacuacacaga

SEQ ID NO: 1491058 - RNA, 19 nt, Homo sapiens
  misc_RNA (1)...(19): siRNA sense strand
gcgagggcauggacgagau

SEQ ID NO: 1491059 - RNA, 19 nt, Homo sapiens
  misc_RNA (1)...(19): siRNA sense strand
gagcucacccagcagaugu

SEQ ID NO: 1491060 - RNA, 19 nt, Homo sapiens
  misc_RNA (1)...(19): siRNA sense strand
ccauggagacagugauuug

SEQ ID NO: 1491061 - RNA, 19 nt, Homo sapiens
  misc_RNA (1)...(19): siRNA sense strand
guacccagaccgcaucaug

SEQ ID NO: 1491062 - RNA, 19 nt, Homo sapiens
  misc_RNA (1)...(19): siRNA sense strand
ucagcaagauccgggaaga

SEQ ID NO: 1491063 - RNA, 19 nt, Homo sapiens
  misc_RNA (1)...(19): siRNA sense strand
gcauggacgagauggaguu

SEQ ID NO: 1491064 - RNA, 19 nt, Homo sapiens
  misc_RNA (1)...(19): siRNA sense strand
ggagguggacgagcagaug

SEQ ID NO: 1491065 - RNA, 19 nt, Homo sapiens
  misc_RNA (1)...(19): siRNA sense strand
gcgcaucuccgagcaguuc

SEQ ID NO: 1491066 - RNA, 19 nt, Homo sapiens
  misc_RNA (1)...(19): siRNA sense strand
ucaacgugcagaacaagaa

SEQ ID NO: 1491067 - RNA, 19 nt, Homo sapiens
  misc_RNA (1)...(19): siRNA sense strand
gcacgauggauucgguuag

SEQ ID NO: 1491068 - RNA, 19 nt, Homo sapiens
  misc_RNA (1)...(19): siRNA sense strand
ccagaccgcaucaugaaca

SEQ ID NO: 1491069 - RNA, 19 nt, Homo sapiens
  misc_RNA (1)...(19): siRNA sense strand
aagccacugguaacaaaua

SEQ ID NO: 1491070 - RNA, 19 nt, Homo sapiens
  misc_RNA (1)...(19): siRNA sense strand
cagaguggagccgggaaua

SEQ ID NO: 1491071 - RNA, 19 nt, Homo sapiens
  misc_RNA (1)...(19): siRNA sense strand
uacaaugaagccacuggua

SEQ ID NO: 1491072 - RNA, 19 nt, Homo sapiens
  misc_RNA (1)...(19): siRNA sense strand
ucaccgaggccgagagcaa

SEQ ID NO: 1491073 - RNA, 19 nt, Homo sapiens
  misc_RNA (1)...(19): siRNA sense strand
caagauccgggaagaguac

SEQ ID NO: 1491074 - RNA, 19 nt, Homo sapiens
  misc_RNA (1)...(19): siRNA sense strand
gaagccacugguaacaaau

SEQ ID NO: 1491075 - RNA, 19 nt, Homo sapiens
  misc_RNA (1)...(19): siRNA sense strand
caaugaagccacugguaac

SEQ ID NO: 1491076 - RNA, 19 nt, Homo sapiens
  misc_RNA (1)...(19): siRNA sense strand
gcaagcuggcggugaacau

SEQ ID NO: 1491077 - RNA, 19 nt, Homo sapiens
  misc_RNA (1)...(19): siRNA sense strand
ggcacgauggauucgguua

SEQ ID NO: 1491078 - RNA, 19 nt, Homo sapiens
  misc_RNA (1)...(19): siRNA sense strand
gcagcuggagagaaucaau

SEQ ID NO: 1491079 - RNA, 19 nt, Homo sapiens
  misc_RNA (1)...(19): siRNA sense strand
ucgacucgguccuggaugu

SEQ ID NO: 1491080 - RNA, 19 nt, Homo sapiens
  misc_RNA (1)...(19): siRNA sense strand
gaacugaacuucggacaaa

SEQ ID NO: 1491081 - RNA, 19 nt, Homo sapiens
  misc_RNA (1)...(19): siRNA sense strand
gaagagaagcuuuaaagug

SEQ ID NO: 1491082 - RNA, 19 nt, Homo sapiens
  misc_RNA (1)...(19): siRNA sense strand
gguauucucuuccugauug

SEQ ID NO: 1491083 - RNA, 19 nt, Homo sapiens
  misc_RNA (1)...(19): siRNA sense strand
gaacuucggacaaauuauu

SEQ ID NO: 1491084 - RNA, 19 nt, Homo sapiens
  misc_RNA (1)...(19): siRNA sense strand
gaagaaaccauaucaacug

SEQ ID NO: 1491085 - RNA, 19 nt, Homo sapiens
  misc_RNA (1)...(19): siRNA sense strand
gcuguagucuauuauauga

SEQ ID NO: 1491086 - RNA, 19 nt, Homo sapiens
  misc_RNA (1)...(19): siRNA sense strand
gagcuguagucuauuauau

SEQ ID NO: 1491087 - RNA, 19 nt, Homo sapiens
  misc_RNA (1)...(19): siRNA sense strand
ugagagaguucuuugauuc

SEQ ID NO: 1491088 - RNA, 19 nt, Homo sapiens
  misc_RNA (1)...(19): siRNA sense strand
guuaacaacuuugaacuga

SEQ ID NO: 1491089 - RNA, 19 nt, Homo sapiens
  misc_RNA (1)...(19): siRNA sense strand
gagaagagaagcuuuaaag

SEQ ID NO: 1491090 - RNA, 19 nt, Homo sapiens
  misc_RNA (1)...(19): siRNA sense strand
uaacgaagccaucaugaga

SEQ ID NO: 1491091 - RNA, 19 nt, Homo sapiens
  misc_RNA (1)...(19): siRNA sense strand
ucaagugccuggaagagaa

SEQ ID NO: 1491092 - RNA, 19 nt, Homo sapiens
  misc_RNA (1)...(19): siRNA sense strand
ggaugggacugcccucuau

SEQ ID NO: 1491093 - RNA, 19 nt, Homo sapiens
  misc_RNA (1)...(19): siRNA sense strand
gaagaaagugcagaacauu

SEQ ID NO: 1491094 - RNA, 19 nt, Homo sapiens
  misc_RNA (1)...(19): siRNA sense strand
gcuugugggugcugugaua

SEQ ID NO: 1491095 - RNA, 19 nt, Homo sapiens
  misc_RNA (1)...(19): siRNA sense strand
gacaugaacugaagaacag

SEQ ID NO: 1491096 - RNA, 19 nt, Homo sapiens
  misc_RNA (1)...(19): siRNA sense strand
guaacucagugauugaaga

SEQ ID NO: 1491097 - RNA, 19 nt, Homo sapiens
  misc_RNA (1)...(19): siRNA sense strand
gcacagagaaggcaaaauu

SEQ ID NO: 1491098 - RNA, 19 nt, Homo sapiens
  misc_RNA (1)...(19): siRNA sense strand
gaacugaagaacagagaug

SEQ ID NO: 1491099 - RNA, 19 nt, Homo sapiens
  misc_RNA (1)...(19): siRNA sense strand
uuacaaaggaggauguuaa

SEQ ID NO: 1491100 - RNA, 19 nt, Homo sapiens
  misc_RNA (1)...(19): siRNA sense strand
gaagagaaugaaaugaaga

SEQ ID NO: 1491101 - RNA, 19 nt, Homo sapiens
  misc_RNA (1)...(19): siRNA sense strand
ggaagauuguggagaugga

SEQ ID NO: 1491102 - RNA, 19 nt, Homo sapiens
  misc_RNA (1)...(19): siRNA sense strand
gaaauggguaacucaguga

SEQ ID NO: 1491103 - RNA, 19 nt, Homo sapiens
  misc_RNA (1)...(19): siRNA sense strand
gaaaugaagaaaccauauc

SEQ ID NO: 1491104 - RNA, 19 nt, Homo sapiens
  misc_RNA (1)...(19): siRNA sense strand
gauuuacccuccgaccaua

SEQ ID NO: 1491105 - RNA, 19 nt, Homo sapiens
  misc_RNA (1)...(19): siRNA sense strand
ggacaaugaaacugagaaa

SEQ ID NO: 1491106 - RNA, 19 nt, Homo sapiens
  misc_RNA (1)...(19): siRNA sense strand
gggaagggcacaaaggaaa

SEQ ID NO: 1491107 - RNA, 19 nt, Homo sapiens
  misc_RNA (1)...(19): siRNA sense strand
aaugcgagcuguagucuau

SEQ ID NO: 1491108 - RNA, 19 nt, Homo sapiens
  misc_RNA (1)...(19): siRNA sense strand
gaacuucugaugaggaugu

SEQ ID NO: 1491109 - RNA, 19 nt, Homo sapiens
  misc_RNA (1)...(19): siRNA sense strand
agaaacccaucgacaguga

SEQ ID NO: 1491110 - RNA, 19 nt, Homo sapiens
  misc_RNA (1)...(19): siRNA sense strand
agaagaaagugcagaacau

SEQ ID NO: 1491111 - RNA, 19 nt, Homo sapiens
  misc_RNA (1)...(19): siRNA sense strand
aagaaaccauaucaacuga

SEQ ID NO: 1491112 - RNA, 19 nt, Homo sapiens
  misc_RNA (1)...(19): siRNA sense strand
ugaagagaaugaaaugaag

SEQ ID NO: 1491113 - RNA, 19 nt, Homo sapiens
  misc_RNA (1)...(19): siRNA sense strand
uaacaacuuugaacugaac

SEQ ID NO: 1491114 - RNA, 19 nt, Homo sapiens
  misc_RNA (1)...(19): siRNA sense strand
cuaguugucuucuccaugu

SEQ ID NO: 1491115 - RNA, 19 nt, Homo sapiens
  misc_RNA (1)...(19): siRNA sense strand
cuuaucaucuccagucuug

SEQ ID NO: 1491116 - RNA, 19 nt, Homo sapiens
  misc_RNA (1)...(19): siRNA sense strand
cauaaucauugucaucauc

SEQ ID NO: 1491117 - RNA, 19 nt, Homo sapiens
  misc_RNA (1)...(19): siRNA sense strand
uaugagaagagaagcuuua

SEQ ID NO: 1491118 - RNA, 19 nt, Homo sapiens
  misc_RNA (1)...(19): siRNA sense strand
aagaaagugcagaacauua

SEQ ID NO: 1491119 - RNA, 19 nt, Homo sapiens
  misc_RNA (1)...(19): siRNA sense strand
gacugucauuguuggcuua

SEQ ID NO: 1491120 - RNA, 19 nt, Homo sapiens
  misc_RNA (1)...(19): siRNA sense strand
gaagacaugggugugauug

SEQ ID NO: 1491121 - RNA, 19 nt, Homo sapiens
  misc_RNA (1)...(19): siRNA sense strand
uagcaguaauaauguggua

SEQ ID NO: 1491122 - RNA, 19 nt, Homo sapiens
  misc_RNA (1)...(19): siRNA sense strand
ugcgagcuguagucuauua

SEQ ID NO: 1491123 - RNA, 19 nt, Homo sapiens
  misc_RNA (1)...(19): siRNA sense strand
gcaguaauaaugugguaug

SEQ ID NO: 1491124 - RNA, 19 nt, Homo sapiens
  misc_RNA (1)...(19): siRNA sense strand
ggucuuaccacuuaucauc

SEQ ID NO: 1491125 - RNA, 19 nt, Homo sapiens
  misc_RNA (1)...(19): siRNA sense strand
acagugaaaccaagaugua

SEQ ID NO: 1491126 - RNA, 19 nt, Homo sapiens
  misc_RNA (1)...(19): siRNA sense strand
ggaagacaugggugugauu

SEQ ID NO: 1491127 - RNA, 19 nt, Homo sapiens
  misc_RNA (1)...(19): siRNA sense strand
ccaagaagaaagugcagaa

SEQ ID NO: 1491128 - RNA, 19 nt, Homo sapiens
  misc_RNA (1)...(19): siRNA sense strand
gggaacuucugaugaggau

SEQ ID NO: 1491129 - RNA, 19 nt, Homo sapiens
  misc_RNA (1)...(19): siRNA sense strand
gauugaagagaaugaaaug

SEQ ID NO: 1491130 - RNA, 19 nt, Homo sapiens
  misc_RNA (1)...(19): siRNA sense strand
cgacaugaacugaagaaca

SEQ ID NO: 1491131 - RNA, 19 nt, Homo sapiens
  misc_RNA (1)...(19): siRNA sense strand
gcauaaucauugucaucau

SEQ ID NO: 1491132 - RNA, 19 nt, Homo sapiens
  misc_RNA (1)...(19): siRNA sense strand
gaccauacagaaugagcua

SEQ ID NO: 1491133 - RNA, 19 nt, Homo sapiens
  misc_RNA (1)...(19): siRNA sense strand
gucaguaaacgcacacuuu

SEQ ID NO: 1491134 - RNA, 19 nt, Homo sapiens
  misc_RNA (1)...(19): siRNA sense strand
ucauugugcugacaucugu

SEQ ID NO: 1491135 - RNA, 19 nt, Homo sapiens
  misc_RNA (1)...(19): siRNA sense strand
agccacagcugccaguauu

SEQ ID NO: 1491136 - RNA, 19 nt, Homo sapiens
  misc_RNA (1)...(19): siRNA sense strand
gaaagugcagaacauuaca

SEQ ID NO: 1491137 - RNA, 19 nt, Homo sapiens
  misc_RNA (1)...(19): siRNA sense strand
cugagagaguucuuugauu

SEQ ID NO: 1491138 - RNA, 19 nt, Homo sapiens
  misc_RNA (1)...(19): siRNA sense strand
ugcagaacauuacaaagga

SEQ ID NO: 1491139 - RNA, 19 nt, Homo sapiens
  misc_RNA (1)...(19): siRNA sense strand
cgacaucacgcucaucauc

SEQ ID NO: 1491140 - RNA, 19 nt, Homo sapiens
  misc_RNA (1)...(19): siRNA sense strand
aggaggauguuaaaaguua

SEQ ID NO: 1491141 - RNA, 19 nt, Homo sapiens
  misc_RNA (1)...(19): siRNA sense strand
gaacaauggcguggacaag

SEQ ID NO: 1491142 - RNA, 19 nt, Homo sapiens
  misc_RNA (1)...(19): siRNA sense strand
ccugauugcugggaagauu

SEQ ID NO: 1491143 - RNA, 19 nt, Homo sapiens
  misc_RNA (1)...(19): siRNA sense strand
ugauaaacaaugugucuga

SEQ ID NO: 1491144 - RNA, 19 nt, Homo sapiens
  misc_RNA (1)...(19): siRNA sense strand
gugcugugauaaacaaugu

SEQ ID NO: 1491145 - RNA, 19 nt, Homo sapiens
  misc_RNA (1)...(19): siRNA sense strand
acucagugauugaagagaa

SEQ ID NO: 1491146 - RNA, 19 nt, Homo sapiens
  misc_RNA (1)...(19): siRNA sense strand
ugaugaggauguuacagau

SEQ ID NO: 1491147 - RNA, 19 nt, Homo sapiens
  misc_RNA (1)...(19): siRNA sense strand
agaaugaaaugaagaaacc

SEQ ID NO: 1491148 - RNA, 19 nt, Homo sapiens
  misc_RNA (1)...(19): siRNA sense strand
acaagcgcgucaccagauu

SEQ ID NO: 1491149 - RNA, 19 nt, Homo sapiens
  misc_RNA (1)...(19): siRNA sense strand
gacaagcgcgucaccagau

SEQ ID NO: 1491150 - RNA, 19 nt, Homo sapiens
  misc_RNA (1)...(19): siRNA sense strand
gugcagaacauuacaaagg

SEQ ID NO: 1491151 - RNA, 19 nt, Homo sapiens
  misc_RNA (1)...(19): siRNA sense strand
ggauuuacccuccgaccau

SEQ ID NO: 1491152 - RNA, 19 nt, Homo sapiens
  misc_RNA (1)...(19): siRNA sense strand
cauguucccuccaaaucug

SEQ ID NO: 1491153 - RNA, 19 nt, Homo sapiens
  misc_RNA (1)...(19): siRNA sense strand
gucaaguacuucuccuuuc

SEQ ID NO: 1491154 - RNA, 19 nt, Homo sapiens
  misc_RNA (1)...(19): siRNA sense strand
uacaaaggaggauguuaaa

SEQ ID NO: 1491155 - RNA, 19 nt, Homo sapiens
  misc_RNA (1)...(19): siRNA sense strand
agucaccgcugucauugug

SEQ ID NO: 1491156 - RNA, 19 nt, Homo sapiens
  misc_RNA (1)...(19): siRNA sense strand
gagaaugaaaugaagaaac

SEQ ID NO: 1491157 - RNA, 19 nt, Homo sapiens
  misc_RNA (1)...(19): siRNA sense strand
cugaacuucggacaaauua

SEQ ID NO: 1491158 - RNA, 19 nt, Homo sapiens
  misc_RNA (1)...(19): siRNA sense strand
guaggagccaccauuaaca

SEQ ID NO: 1491159 - RNA, 19 nt, Homo sapiens
  misc_RNA (1)...(19): siRNA sense strand
cgagcuguagucuauuaua

SEQ ID NO: 1491160 - RNA, 19 nt, Homo sapiens
  misc_RNA (1)...(19): siRNA sense strand
uggagacucuuacccgaau

SEQ ID NO: 1491161 - RNA, 19 nt, Homo sapiens
  misc_RNA (1)...(19): siRNA sense strand
auuguuggcuuacucauuc

SEQ ID NO: 1491162 - RNA, 19 nt, Homo sapiens
  misc_RNA (1)...(19): siRNA sense strand
uaaaagcaauggagaagag

SEQ ID NO: 1491163 - RNA, 19 nt, Homo sapiens
  misc_RNA (1)...(19): siRNA sense strand
ugagaaacccaucgacagu

SEQ ID NO: 1491164 - RNA, 19 nt, Homo sapiens
  misc_RNA (1)...(19): siRNA sense strand
gcacaggacaaugaaacug

SEQ ID NO: 1491165 - RNA, 19 nt, Homo sapiens
  misc_RNA (1)...(19): siRNA sense strand
ugaagaaaccauaucaacu

SEQ ID NO: 1491166 - RNA, 19 nt, Homo sapiens
  misc_RNA (1)...(19): siRNA sense strand
gugcuucgguuuugugauu

SEQ ID NO: 1491167 - RNA, 19 nt, Homo sapiens
  misc_RNA (1)...(19): siRNA sense strand
gaacauuacaaaggaggau

SEQ ID NO: 1491168 - RNA, 19 nt, Homo sapiens
  misc_RNA (1)...(19): siRNA sense strand
ccugggagcugggauugug

SEQ ID NO: 1491169 - RNA, 19 nt, Homo sapiens
  misc_RNA (1)...(19): siRNA sense strand
gacgacaucacgcucauca

SEQ ID NO: 1491170 - RNA, 19 nt, Homo sapiens
  misc_RNA (1)...(19): siRNA sense strand
gaagauuguggagauggaa

SEQ ID NO: 1491171 - RNA, 19 nt, Homo sapiens
  misc_RNA (1)...(19): siRNA sense strand
guucuuugauucucuuaac

SEQ ID NO: 1491172 - RNA, 19 nt, Homo sapiens
  misc_RNA (1)...(19): siRNA sense strand
gaaugcgagcuguagucua

SEQ ID NO: 1491173 - RNA, 19 nt, Homo sapiens
  misc_RNA (1)...(19): siRNA sense strand
cacaggacaaugaaacuga

SEQ ID NO: 1491174 - RNA, 19 nt, Homo sapiens
  misc_RNA (1)...(19): siRNA sense strand
gaugaggauguuacagaug

SEQ ID NO: 1491175 - RNA, 19 nt, Homo sapiens
  misc_RNA (1)...(19): siRNA sense strand
cugggaagauuguggagau

SEQ ID NO: 1491176 - RNA, 19 nt, Homo sapiens
  misc_RNA (1)...(19): siRNA sense strand
uuggaaacaugaaggaaca

SEQ ID NO: 1491177 - RNA, 19 nt, Homo sapiens
  misc_RNA (1)...(19): siRNA sense strand
gaugggaaugcgagcugua

SEQ ID NO: 1491178 - RNA, 19 nt, Homo sapiens
  misc_RNA (1)...(19): siRNA sense strand
caucuccagucuugucaca

SEQ ID NO: 1491179 - RNA, 19 nt, Homo sapiens
  misc_RNA (1)...(19): siRNA sense strand
uuucauugcucaaguuaac

SEQ ID NO: 1491180 - RNA, 19 nt, Homo sapiens
  misc_RNA (1)...(19): siRNA sense strand
ggcgagagcaggaauguuu

SEQ ID NO: 1491181 - RNA, 19 nt, Homo sapiens
  misc_RNA (1)...(19): siRNA sense strand
gaggaucgcccguggcaaa

SEQ ID NO: 1491182 - RNA, 19 nt, Homo sapiens
  misc_RNA (1)...(19): siRNA sense strand
gggcugaaguccagaucuu

SEQ ID NO: 1491183 - RNA, 19 nt, Homo sapiens
  misc_RNA (1)...(19): siRNA sense strand
ucacagaccuggccaaccu

SEQ ID NO: 1491184 - RNA, 19 nt, Homo sapiens
  misc_RNA (1)...(19): siRNA sense strand
agacggcacuccacuacau

SEQ ID NO: 1491185 - RNA, 19 nt, Homo sapiens
  misc_RNA (1)...(19): siRNA sense strand
gguggcaaguggccuuaug

SEQ ID NO: 1491186 - RNA, 19 nt, Homo sapiens
  misc_RNA (1)...(19): siRNA sense strand
ugaggaaggugcuggaacu

SEQ ID NO: 1491187 - RNA, 19 nt, Homo sapiens
  misc_RNA (1)...(19): siRNA sense strand
gcugaaguccagaucuuug

SEQ ID NO: 1491188 - RNA, 19 nt, Homo sapiens
  misc_RNA (1)...(19): siRNA sense strand
gaaggaaguggucgaagcu

SEQ ID NO: 1491189 - RNA, 19 nt, Homo sapiens
  misc_RNA (1)...(19): siRNA sense strand
aagcucacguggaccagaa

SEQ ID NO: 1491190 - RNA, 19 nt, Homo sapiens
  misc_RNA (1)...(19): siRNA sense strand
gcgagacggcacuccacua

SEQ ID NO: 1491191 - RNA, 19 nt, Homo sapiens
  misc_RNA (1)...(19): siRNA sense strand
gaaggcgagagcaggaaug

SEQ ID NO: 1491192 - RNA, 19 nt, Homo sapiens
  misc_RNA (1)...(19): siRNA sense strand
ucagugcagccaaccauga

SEQ ID NO: 1491193 - RNA, 19 nt, Homo sapiens
  misc_RNA (1)...(19): siRNA sense strand
ucggagccauggugaggaa

SEQ ID NO: 1491194 - RNA, 19 nt, Homo sapiens
  misc_RNA (1)...(19): siRNA sense strand
ugcuggaacucacuggaaa

SEQ ID NO: 1491195 - RNA, 19 nt, Homo sapiens
  misc_RNA (1)...(19): siRNA sense strand
caucuuuccaggaggcuuu

SEQ ID NO: 1491196 - RNA, 19 nt, Homo sapiens
  misc_RNA (1)...(19): siRNA sense strand
gugcuggaacucacuggaa

SEQ ID NO: 1491197 - RNA, 19 nt, Homo sapiens
  misc_RNA (1)...(19): siRNA sense strand
ggcgagagcaggaauguuu

SEQ ID NO: 1491198 - RNA, 19 nt, Homo sapiens
  misc_RNA (1)...(19): siRNA sense strand
gaggaucgcccguggcaaa

SEQ ID NO: 1491199 - RNA, 19 nt, Homo sapiens
  misc_RNA (1)...(19): siRNA sense strand
gggcugaaguccagaucuu

SEQ ID NO: 1491200 - RNA, 19 nt, Homo sapiens
  misc_RNA (1)...(19): siRNA sense strand
ucacagaccuggccaaccu

SEQ ID NO: 1491201 - RNA, 19 nt, Homo sapiens
  misc_RNA (1)...(19): siRNA sense strand
agacggcacuccacuacau

SEQ ID NO: 1491202 - RNA, 19 nt, Homo sapiens
  misc_RNA (1)...(19): siRNA sense strand
gguggcaaguggccuuaug

SEQ ID NO: 1491203 - RNA, 19 nt, Homo sapiens
  misc_RNA (1)...(19): siRNA sense strand
ugaggaaggugcuggaacu

SEQ ID NO: 1491204 - RNA, 19 nt, Homo sapiens
  misc_RNA (1)...(19): siRNA sense strand
gcugaaguccagaucuuug

SEQ ID NO: 1491205 - RNA, 19 nt, Homo sapiens
  misc_RNA (1)...(19): siRNA sense strand
gaaggaaguggucgaagcu

SEQ ID NO: 1491206 - RNA, 19 nt, Homo sapiens
  misc_RNA (1)...(19): siRNA sense strand
aagcucacguggaccagaa

SEQ ID NO: 1491207 - RNA, 19 nt, Homo sapiens
  misc_RNA (1)...(19): siRNA sense strand
gcgagacggcacuccacua

SEQ ID NO: 1491208 - RNA, 19 nt, Homo sapiens
  misc_RNA (1)...(19): siRNA sense strand
gaaggcgagagcaggaaug

SEQ ID NO: 1491209 - RNA, 19 nt, Homo sapiens
  misc_RNA (1)...(19): siRNA sense strand
ucagugcagccaaccauga

SEQ ID NO: 1491210 - RNA, 19 nt, Homo sapiens
  misc_RNA (1)...(19): siRNA sense strand
ucggagccauggugaggaa

SEQ ID NO: 1491211 - RNA, 19 nt, Homo sapiens
  misc_RNA (1)...(19): siRNA sense strand
ugcuggaacucacuggaaa

SEQ ID NO: 1491212 - RNA, 19 nt, Homo sapiens
  misc_RNA (1)...(19): siRNA sense strand
caucuuuccaggaggcuuu

SEQ ID NO: 1491213 - RNA, 19 nt, Homo sapiens
  misc_RNA (1)...(19): siRNA sense strand
gugcuggaacucacuggaa

SEQ ID NO: 1491214 - RNA, 19 nt, Homo sapiens
  misc_RNA (1)...(19): siRNA sense strand
gaagaucuuuggcgaguuc

SEQ ID NO: 1491215 - RNA, 19 nt, Homo sapiens
  misc_RNA (1)...(19): siRNA sense strand
gcagaagccuaugagguuu

SEQ ID NO: 1491216 - RNA, 19 nt, Homo sapiens
  misc_RNA (1)...(19): siRNA sense strand
ggauuccuuuccaaacuua

SEQ ID NO: 1491217 - RNA, 19 nt, Homo sapiens
  misc_RNA (1)...(19): siRNA sense strand
ccgaggagcuguucaggaa

SEQ ID NO: 1491218 - RNA, 19 nt, Homo sapiens
  misc_RNA (1)...(19): siRNA sense strand
gugaugaggugaagaggaa

SEQ ID NO: 1491219 - RNA, 19 nt, Homo sapiens
  misc_RNA (1)...(19): siRNA sense strand
gaaaugccagccagaaaga

SEQ ID NO: 1491220 - RNA, 19 nt, Homo sapiens
  misc_RNA (1)...(19): siRNA sense strand
gaggagcuguucaggaaga

SEQ ID NO: 1491221 - RNA, 19 nt, Homo sapiens
  misc_RNA (1)...(19): siRNA sense strand
agaaagagaucaagaaagc

SEQ ID NO: 1491222 - RNA, 19 nt, Homo sapiens
  misc_RNA (1)...(19): siRNA sense strand
caagaaagccuauuaucag

SEQ ID NO: 1491223 - RNA, 19 nt, Homo sapiens
  misc_RNA (1)...(19): siRNA sense strand
gaaaauguuuaccucauga

SEQ ID NO: 1491224 - RNA, 19 nt, Homo sapiens
  misc_RNA (1)...(19): siRNA sense strand
ucaagaaagccuauuauca

SEQ ID NO: 1491225 - RNA, 19 nt, Homo sapiens
  misc_RNA (1)...(19): siRNA sense strand
ggccaaagaagauuauuau

SEQ ID NO: 1491226 - RNA, 19 nt, Homo sapiens
  misc_RNA (1)...(19): siRNA sense strand
guucucauccucuucauuu

SEQ ID NO: 1491227 - RNA, 19 nt, Homo sapiens
  misc_RNA (1)...(19): siRNA sense strand
gaucaagaaagccuauuau

SEQ ID NO: 1491228 - RNA, 19 nt, Homo sapiens
  misc_RNA (1)...(19): siRNA sense strand
ccagaaagagaucaagaaa

SEQ ID NO: 1491229 - RNA, 19 nt, Homo sapiens
  misc_RNA (1)...(19): siRNA sense strand
ggcagaagccuaugagguu

SEQ ID NO: 1491230 - RNA, 19 nt, Homo sapiens
  misc_RNA (1)...(19): siRNA sense strand
cgucuucccugaccucuug

SEQ ID NO: 1491231 - RNA, 19 nt, Homo sapiens
  misc_RNA (1)...(19): siRNA sense strand
ggacucagacagaccagaa

SEQ ID NO: 1491232 - RNA, 19 nt, Homo sapiens
  misc_RNA (1)...(19): siRNA sense strand
cuacauccacaucaagaua

SEQ ID NO: 1491233 - RNA, 19 nt, Homo sapiens
  misc_RNA (1)...(19): siRNA sense strand
cgaccucuuuauuucuaua

SEQ ID NO: 1491234 - RNA, 19 nt, Homo sapiens
  misc_RNA (1)...(19): siRNA sense strand
gggauuccuuuccaaacuu

SEQ ID NO: 1491235 - RNA, 19 nt, Homo sapiens
  misc_RNA (1)...(19): siRNA sense strand
ggagggauuccuuuccaaa

SEQ ID NO: 1491236 - RNA, 19 nt, Homo sapiens
  misc_RNA (1)...(19): siRNA sense strand
cccgagcgcugcugacauu

SEQ ID NO: 1491237 - RNA, 19 nt, Homo sapiens
  misc_RNA (1)...(19): siRNA sense strand
gugaugcguuccacgugua

SEQ ID NO: 1491238 - RNA, 19 nt, Homo sapiens
  misc_RNA (1)...(19): siRNA sense strand
guaucacccugacacaaau

SEQ ID NO: 1491239 - RNA, 19 nt, Homo sapiens
  misc_RNA (1)...(19): siRNA sense strand
ccaaagccaaggagaaguu

SEQ ID NO: 1491240 - RNA, 19 nt, Homo sapiens
  misc_RNA (1)...(19): siRNA sense strand
ggugucagccucacaggaa

SEQ ID NO: 1491241 - RNA, 19 nt, Homo sapiens
  misc_RNA (1)...(19): siRNA sense strand
ccacuccgaccucuuuauu

SEQ ID NO: 1491242 - RNA, 19 nt, Homo sapiens
  misc_RNA (1)...(19): siRNA sense strand
uugaucagccucaggaaua

SEQ ID NO: 1491243 - RNA, 19 nt, Homo sapiens
  misc_RNA (1)...(19): siRNA sense strand
aggaauacuucauggaguu

SEQ ID NO: 1491244 - RNA, 19 nt, Homo sapiens
  misc_RNA (1)...(19): siRNA sense strand
caagauacgaguuccaaag

SEQ ID NO: 1491245 - RNA, 19 nt, Homo sapiens
  misc_RNA (1)...(19): siRNA sense strand
ccuaugagguuuugaguga

SEQ ID NO: 1491246 - RNA, 19 nt, Homo sapiens
  misc_RNA (1)...(19): siRNA sense strand
acuccgaccucuuuauuuc

SEQ ID NO: 1491247 - RNA, 19 nt, Homo sapiens
  misc_RNA (1)...(19): siRNA sense strand
cauccacuccgaccucuuu

SEQ ID NO: 1491248 - RNA, 19 nt, Homo sapiens
  misc_RNA (1)...(19): siRNA sense strand
gcugguugcuggugguugu

SEQ ID NO: 1491249 - RNA, 19 nt, Homo sapiens
  misc_RNA (1)...(19): siRNA sense strand
ggaagaucuuuggcgaguu

SEQ ID NO: 1491250 - RNA, 19 nt, Homo sapiens
  misc_RNA (1)...(19): siRNA sense strand
gagcgcugcugacauugag

SEQ ID NO: 1491251 - RNA, 19 nt, Homo sapiens
  misc_RNA (1)...(19): siRNA sense strand
gccagaaagagaucaagaa

SEQ ID NO: 1491252 - RNA, 19 nt, Homo sapiens
  misc_RNA (1)...(19): siRNA sense strand
cuacggagaccacuacauc

SEQ ID NO: 1491253 - RNA, 19 nt, Homo sapiens
  misc_RNA (1)...(19): siRNA sense strand
agaucaagaaagccuauua

SEQ ID NO: 1491254 - RNA, 19 nt, Homo sapiens
  misc_RNA (1)...(19): siRNA sense strand
ccucuucauuuggagauuu

SEQ ID NO: 1491255 - RNA, 19 nt, Homo sapiens
  misc_RNA (1)...(19): siRNA sense strand
ucagacagaccagaagauu

SEQ ID NO: 1491256 - RNA, 19 nt, Homo sapiens
  misc_RNA (1)...(19): siRNA sense strand
cgaaaugccagccagaaag

SEQ ID NO: 1491257 - RNA, 19 nt, Homo sapiens
  misc_RNA (1)...(19): siRNA sense strand
uauuaggagugccucgaaa

SEQ ID NO: 1491258 - RNA, 19 nt, Homo sapiens
  misc_RNA (1)...(19): siRNA sense strand
gaaguaucacccugacaca

SEQ ID NO: 1491259 - RNA, 19 nt, Homo sapiens
  misc_RNA (1)...(19): siRNA sense strand
uggccaaagaagauuauua

SEQ ID NO: 1491260 - RNA, 19 nt, Homo sapiens
  misc_RNA (1)...(19): siRNA sense strand
gaggaugccugugggaaaa

SEQ ID NO: 1491261 - RNA, 19 nt, Homo sapiens
  misc_RNA (1)...(19): siRNA sense strand
ugacacaaauaaggaugau

SEQ ID NO: 1491262 - RNA, 19 nt, Homo sapiens
  misc_RNA (1)...(19): siRNA sense strand
uccgaccucuuuauuucua

SEQ ID NO: 1491263 - RNA, 19 nt, Homo sapiens
  misc_RNA (1)...(19): siRNA sense strand
ccacaucaagauacgaguu

SEQ ID NO: 1491264 - RNA, 19 nt, Homo sapiens
  misc_RNA (1)...(19): siRNA sense strand
ggaauacuucauggaguug

SEQ ID NO: 1491265 - RNA, 19 nt, Homo sapiens
  misc_RNA (1)...(19): siRNA sense strand
gcagaaaagcccuguguuc

SEQ ID NO: 1491266 - RNA, 19 nt, Homo sapiens
  misc_RNA (1)...(19): siRNA sense strand
ggacaagccaagcagaaaa

SEQ ID NO: 1491267 - RNA, 19 nt, Homo sapiens
  misc_RNA (1)...(19): siRNA sense strand
gaagaggaagcaguacgau

SEQ ID NO: 1491268 - RNA, 19 nt, Homo sapiens
  misc_RNA (1)...(19): siRNA sense strand
auggauagcuccgcaggaa

SEQ ID NO: 1491269 - RNA, 19 nt, Homo sapiens
  misc_RNA (1)...(19): siRNA sense strand
aagauacgaguuccaaaga

SEQ ID NO: 1491270 - RNA, 19 nt, Homo sapiens
  misc_RNA (1)...(19): siRNA sense strand
ugaggaugccugugggaaa

SEQ ID NO: 1491271 - RNA, 19 nt, Homo sapiens
  misc_RNA (1)...(19): siRNA sense strand
gagcaggacaagccaagca

SEQ ID NO: 1491272 - RNA, 19 nt, Homo sapiens
  misc_RNA (1)...(19): siRNA sense strand
aguaucacccugacacaaa

SEQ ID NO: 1491273 - RNA, 19 nt, Homo sapiens
  misc_RNA (1)...(19): siRNA sense strand
gggaggacgaggagggauu

SEQ ID NO: 1491274 - RNA, 19 nt, Homo sapiens
  misc_RNA (1)...(19): siRNA sense strand
ggcgaguucucauccucuu

SEQ ID NO: 1491275 - RNA, 19 nt, Homo sapiens
  misc_RNA (1)...(19): siRNA sense strand
agacagaccagaagauucg

SEQ ID NO: 1491276 - RNA, 19 nt, Homo sapiens
  misc_RNA (1)...(19): siRNA sense strand
ucgaaaugccagccagaaa

SEQ ID NO: 1491277 - RNA, 19 nt, Homo sapiens
  misc_RNA (1)...(19): siRNA sense strand
caggacaagccaagcagaa

SEQ ID NO: 1491278 - RNA, 19 nt, Homo sapiens
  misc_RNA (1)...(19): siRNA sense strand
gagauuuccagaccguguu

SEQ ID NO: 1491279 - RNA, 19 nt, Homo sapiens
  misc_RNA (1)...(19): siRNA sense strand
ugaagaggaagcaguacga

SEQ ID NO: 1491280 - RNA, 19 nt, Homo sapiens
  misc_RNA (1)...(19): siRNA sense strand
gcggcuccaucaucauauc

SEQ ID NO: 1491281 - RNA, 19 nt, Homo sapiens
  misc_RNA (1)...(19): siRNA sense strand
gaucuuuggcgaguucuca

SEQ ID NO: 1491282 - RNA, 19 nt, Homo sapiens
  misc_RNA (1)...(19): siRNA sense strand
cgaguucucauccucuuca

SEQ ID NO: 1491283 - RNA, 19 nt, Homo sapiens
  misc_RNA (1)...(19): siRNA sense strand
gaauacuucauggaguuga

SEQ ID NO: 1491284 - RNA, 19 nt, Homo sapiens
  misc_RNA (1)...(19): siRNA sense strand
cagaaagagaucaagaaag

SEQ ID NO: 1491285 - RNA, 19 nt, Homo sapiens
  misc_RNA (1)...(19): siRNA sense strand
ggaggacgaggagggauuc

SEQ ID NO: 1491286 - RNA, 19 nt, Homo sapiens
  misc_RNA (1)...(19): siRNA sense strand
ccagcuggcagaagccuau

SEQ ID NO: 1491287 - RNA, 19 nt, Homo sapiens
  misc_RNA (1)...(19): siRNA sense strand
gagcuguucaggaagaucu

SEQ ID NO: 1491288 - RNA, 19 nt, Homo sapiens
  misc_RNA (1)...(19): siRNA sense strand
uccagaccguguuugauca

SEQ ID NO: 1491289 - RNA, 19 nt, Homo sapiens
  misc_RNA (1)...(19): siRNA sense strand
cgagcgcugcugacauuga

SEQ ID NO: 1491290 - RNA, 19 nt, Homo sapiens
  misc_RNA (1)...(19): siRNA sense strand
uaucacccugacacaaaua

SEQ ID NO: 1491291 - RNA, 19 nt, Homo sapiens
  misc_RNA (1)...(19): siRNA sense strand
ggaggaaacugcacaggaa

SEQ ID NO: 1491292 - RNA, 19 nt, Homo sapiens
  misc_RNA (1)...(19): siRNA sense strand
gagcagcccuucuggauau

SEQ ID NO: 1491293 - RNA, 19 nt, Homo sapiens
  misc_RNA (1)...(19): siRNA sense strand
ggacggaagcugcauguga

SEQ ID NO: 1491294 - RNA, 19 nt, Homo sapiens
  misc_RNA (1)...(19): siRNA sense strand
gcauccaccuaaucaauga

SEQ ID NO: 1491295 - RNA, 19 nt, Homo sapiens
  misc_RNA (1)...(19): siRNA sense strand
gcagcaagcucauucucau

SEQ ID NO: 1491296 - RNA, 19 nt, Homo sapiens
  misc_RNA (1)...(19): siRNA sense strand
caucuucucugcugccaaa

SEQ ID NO: 1491297 - RNA, 19 nt, Homo sapiens
  misc_RNA (1)...(19): siRNA sense strand
gcaagcucauucucauuug

SEQ ID NO: 1491298 - RNA, 19 nt, Homo sapiens
  misc_RNA (1)...(19): siRNA sense strand
gccaaagacugcagcauca

SEQ ID NO: 1491299 - RNA, 19 nt, Homo sapiens
  misc_RNA (1)...(19): siRNA sense strand
caaagaggcucggaauucu

SEQ ID NO: 1491300 - RNA, 19 nt, Homo sapiens
  misc_RNA (1)...(19): siRNA sense strand
gacggaagcugcaugugau

SEQ ID NO: 1491301 - RNA, 19 nt, Homo sapiens
  misc_RNA (1)...(19): siRNA sense strand
aaagacugcagcaucauua

SEQ ID NO: 1491302 - RNA, 19 nt, Homo sapiens
  misc_RNA (1)...(19): siRNA sense strand
ggagcagcccuucuggaua

SEQ ID NO: 1491303 - RNA, 19 nt, Homo sapiens
  misc_RNA (1)...(19): siRNA sense strand
ucaaagaggcucggaauuc

SEQ ID NO: 1491304 - RNA, 19 nt, Homo sapiens
  misc_RNA (1)...(19): siRNA sense strand
caagaugaaugaggagauc

SEQ ID NO: 1491305 - RNA, 19 nt, Homo sapiens
  misc_RNA (1)...(19): siRNA sense strand
gaaggaggaugugcuugag

SEQ ID NO: 1491306 - RNA, 19 nt, Homo sapiens
  misc_RNA (1)...(19): siRNA sense strand
caaagacugcagcaucauu

SEQ ID NO: 1491307 - RNA, 19 nt, Homo sapiens
  misc_RNA (1)...(19): siRNA sense strand
ggaauucugucugcaucau

SEQ ID NO: 1491308 - RNA, 19 nt, Homo sapiens
  misc_RNA (1)...(19): siRNA sense strand
ugaaggaggaugugcuuga

SEQ ID NO: 1491309 - RNA, 19 nt, Homo sapiens
  misc_RNA (1)...(19): siRNA sense strand
ggacuguacguguguggaa

SEQ ID NO: 1491310 - RNA, 19 nt, Homo sapiens
  misc_RNA (1)...(19): siRNA sense strand
ggccgaugguggagaauca

SEQ ID NO: 1491311 - RNA, 19 nt, Homo sapiens
  misc_RNA (1)...(19): siRNA sense strand
caccagcucucuaucacau

SEQ ID NO: 1491312 - RNA, 19 nt, Homo sapiens
  misc_RNA (1)...(19): siRNA sense strand
agucccagcuugucuucua

SEQ ID NO: 1491313 - RNA, 19 nt, Homo sapiens
  misc_RNA (1)...(19): siRNA sense strand
gaggaaacugcacaggaaa

SEQ ID NO: 1491314 - RNA, 19 nt, Homo sapiens
  misc_RNA (1)...(19): siRNA sense strand
ccagcucucuaucacaugu

SEQ ID NO: 1491315 - RNA, 19 nt, Homo sapiens
  misc_RNA (1)...(19): siRNA sense strand
gaugguggagaaucaaaga

SEQ ID NO: 1491316 - RNA, 19 nt, Homo sapiens
  misc_RNA (1)...(19): siRNA sense strand
gcacuuguacaccuucaca

SEQ ID NO: 1491317 - RNA, 19 nt, Homo sapiens
  misc_RNA (1)...(19): siRNA sense strand
uguggaauguggcagagaa

SEQ ID NO: 1491318 - RNA, 19 nt, Homo sapiens
  misc_RNA (1)...(19): siRNA sense strand
gcaagaugaaugaggagau

SEQ ID NO: 1491319 - RNA, 19 nt, Homo sapiens
  misc_RNA (1)...(19): siRNA sense strand
ugcagaaguugguggcaaa

SEQ ID NO: 1491320 - RNA, 19 nt, Homo sapiens
  misc_RNA (1)...(19): siRNA sense strand
aggaggagcuggaggaaac

SEQ ID NO: 1491321 - RNA, 19 nt, Homo sapiens
  misc_RNA (1)...(19): siRNA sense strand
gggcaccagcucucuauca

SEQ ID NO: 1491322 - RNA, 19 nt, Homo sapiens
  misc_RNA (1)...(19): siRNA sense strand
uaucaacagccucaaguuc

SEQ ID NO: 1491323 - RNA, 19 nt, Homo sapiens
  misc_RNA (1)...(19): siRNA sense strand
ggcugaggcccgugcauuu

SEQ ID NO: 1491324 - RNA, 19 nt, Homo sapiens
  misc_RNA (1)...(19): siRNA sense strand
caagcucauucucauuugg

SEQ ID NO: 1491325 - RNA, 19 nt, Homo sapiens
  misc_RNA (1)...(19): siRNA sense strand
ucaacagccucaaguucuc

SEQ ID NO: 1491326 - RNA, 19 nt, Homo sapiens
  misc_RNA (1)...(19): siRNA sense strand
gcugaggcccgugcauuug

SEQ ID NO: 1491327 - RNA, 19 nt, Homo sapiens
  misc_RNA (1)...(19): siRNA sense strand
ugacucagccaucuucucu

SEQ ID NO: 1491328 - RNA, 19 nt, Homo sapiens
  misc_RNA (1)...(19): siRNA sense strand
gaagggugccgagggaaag

SEQ ID NO: 1491329 - RNA, 19 nt, Homo sapiens
  misc_RNA (1)...(19): siRNA sense strand
gaccgcagcaagcucauuc

SEQ ID NO: 1491330 - RNA, 19 nt, Homo sapiens
  misc_RNA (1)...(19): siRNA sense strand
agcuugaccuucucuguga

SEQ ID NO: 1491331 - RNA, 19 nt, Homo sapiens
  misc_RNA (1)...(19): siRNA sense strand
aaucaaagaggcucggaau

SEQ ID NO: 1491332 - RNA, 19 nt, Homo sapiens
  misc_RNA (1)...(19): siRNA sense strand
caaggguggcggcaagaug

SEQ ID NO: 1491333 - RNA, 19 nt, Homo sapiens
  misc_RNA (1)...(19): siRNA sense strand
gcagcuugaccuucucugu

SEQ ID NO: 1491334 - RNA, 19 nt, Homo sapiens
  misc_RNA (1)...(19): siRNA sense strand
ccgugaagguguggaaugu

SEQ ID NO: 1491335 - RNA, 19 nt, Homo sapiens
  misc_RNA (1)...(19): siRNA sense strand
caccagcucuacagcacau

SEQ ID NO: 1491336 - RNA, 19 nt, Homo sapiens
  misc_RNA (1)...(19): siRNA sense strand
agcaagcucauucucauuu

SEQ ID NO: 1491337 - RNA, 19 nt, Homo sapiens
  misc_RNA (1)...(19): siRNA sense strand
cagcaagcucauucucauu

SEQ ID NO: 1491338 - RNA, 19 nt, Homo sapiens
  misc_RNA (1)...(19): siRNA sense strand
gacugcagcaucauuaagu

SEQ ID NO: 1491339 - RNA, 19 nt, Homo sapiens
  misc_RNA (1)...(19): siRNA sense strand
cgacugcauccaccuaauc

SEQ ID NO: 1491340 - RNA, 19 nt, Homo sapiens
  misc_RNA (1)...(19): siRNA sense strand
gccagcacuuguacaccuu

SEQ ID NO: 1491341 - RNA, 19 nt, Homo sapiens
  misc_RNA (1)...(19): siRNA sense strand
ggaggaggagcuggaggaa

SEQ ID NO: 1491342 - RNA, 19 nt, Homo sapiens
  misc_RNA (1)...(19): siRNA sense strand
gaggaggagcuggaggaaa

SEQ ID NO: 1491343 - RNA, 19 nt, Homo sapiens
  misc_RNA (1)...(19): siRNA sense strand
ucaaugaggagcacauggu

SEQ ID NO: 1491344 - RNA, 19 nt, Homo sapiens
  misc_RNA (1)...(19): siRNA sense strand
cuacagcacaucccacgau

SEQ ID NO: 1491345 - RNA, 19 nt, Homo sapiens
  misc_RNA (1)...(19): siRNA sense strand
gcaccagcucucuaucaca

SEQ ID NO: 1491346 - RNA, 19 nt, Homo sapiens
  misc_RNA (1)...(19): siRNA sense strand
ggaauguggcagagaacuc

SEQ ID NO: 1491347 - RNA, 19 nt, Homo sapiens
  misc_RNA (1)...(19): siRNA sense strand
ucagcugacauucgcguuu

SEQ ID NO: 1491348 - RNA, 19 nt, Homo sapiens
  misc_RNA (1)...(19): siRNA sense strand
gaugggacuguacgugugu

SEQ ID NO: 1491349 - RNA, 19 nt, Homo sapiens
  misc_RNA (1)...(19): siRNA sense strand
agaaguugguggcaaaaga

SEQ ID NO: 1491350 - RNA, 19 nt, Homo sapiens
  misc_RNA (1)...(19): siRNA sense strand
aaggguggcggcaagauga

SEQ ID NO: 1491351 - RNA, 19 nt, Homo sapiens
  misc_RNA (1)...(19): siRNA sense strand
gcuccugugugcggcuuug

SEQ ID NO: 1491352 - RNA, 19 nt, Homo sapiens
  misc_RNA (1)...(19): siRNA sense strand
cagcccuccucaacacaga

SEQ ID NO: 1491353 - RNA, 19 nt, Homo sapiens
  misc_RNA (1)...(19): siRNA sense strand
gacugcauccaccuaauca

SEQ ID NO: 1491354 - RNA, 19 nt, Homo sapiens
  misc_RNA (1)...(19): siRNA sense strand
ggagucccagcuugucuuc

SEQ ID NO: 1491355 - RNA, 19 nt, Homo sapiens
  misc_RNA (1)...(19): siRNA sense strand
gcagcuccgucagcaagag

SEQ ID NO: 1491356 - RNA, 19 nt, Homo sapiens
  misc_RNA (1)...(19): siRNA sense strand
agaacacccugccgaccaa

SEQ ID NO: 1491357 - RNA, 19 nt, Homo sapiens
  misc_RNA (1)...(19): siRNA sense strand
gcggagugaaauuuccuaa

SEQ ID NO: 1491358 - RNA, 19 nt, Homo sapiens
  misc_RNA (1)...(19): siRNA sense strand
gaacacccugccgaccaaa

SEQ ID NO: 1491359 - RNA, 19 nt, Homo sapiens
  misc_RNA (1)...(19): siRNA sense strand
gaagauggacugcggauga

SEQ ID NO: 1491360 - RNA, 19 nt, Homo sapiens
  misc_RNA (1)...(19): siRNA sense strand
ccacguagguacuguguga

SEQ ID NO: 1491361 - RNA, 19 nt, Homo sapiens
  misc_RNA (1)...(19): siRNA sense strand
cggaagaccuuauggauuc

SEQ ID NO: 1491362 - RNA, 19 nt, Homo sapiens
  misc_RNA (1)...(19): siRNA sense strand
uuaagaagguuauggaaga

SEQ ID NO: 1491363 - RNA, 19 nt, Homo sapiens
  misc_RNA (1)...(19): siRNA sense strand
ggaagacagugcagagcaa

SEQ ID NO: 1491364 - RNA, 19 nt, Homo sapiens
  misc_RNA (1)...(19): siRNA sense strand
gcucuuggcucuggugguu

SEQ ID NO: 1491365 - RNA, 19 nt, Homo sapiens
  misc_RNA (1)...(19): siRNA sense strand
uguuacagccuuucgauua

SEQ ID NO: 1491366 - RNA, 19 nt, Homo sapiens
  misc_RNA (1)...(19): siRNA sense strand
guuacagccuuucgauuau

SEQ ID NO: 1491367 - RNA, 19 nt, Homo sapiens
  misc_RNA (1)...(19): siRNA sense strand
guaauuauugggaagauug

SEQ ID NO: 1491368 - RNA, 19 nt, Homo sapiens
  misc_RNA (1)...(19): siRNA sense strand
uaagaagguuauggaagaa

SEQ ID NO: 1491369 - RNA, 19 nt, Homo sapiens
  misc_RNA (1)...(19): siRNA sense strand
aaagacagaaacaccaaua

SEQ ID NO: 1491370 - RNA, 19 nt, Homo sapiens
  misc_RNA (1)...(19): siRNA sense strand
gcaggggccucaauuaaug

SEQ ID NO: 1491371 - RNA, 19 nt, Homo sapiens
  misc_RNA (1)...(19): siRNA sense strand
ggacugcggaugaggaaga

SEQ ID NO: 1491372 - RNA, 19 nt, Homo sapiens
  misc_RNA (1)...(19): siRNA sense strand
acaagcaguucaaggaaga

SEQ ID NO: 1491373 - RNA, 19 nt, Homo sapiens
  misc_RNA (1)...(19): siRNA sense strand
gacagaaacaccaauagug

SEQ ID NO: 1491374 - RNA, 19 nt, Homo sapiens
  misc_RNA (1)...(19): siRNA sense strand
cuaagucucugaguucuuc

SEQ ID NO: 1491375 - RNA, 19 nt, Homo sapiens
  misc_RNA (1)...(19): siRNA sense strand
uugggaagauugccuugua

SEQ ID NO: 1491376 - RNA, 19 nt, Homo sapiens
  misc_RNA (1)...(19): siRNA sense strand
gggaggagaacaagcaguu

SEQ ID NO: 1491377 - RNA, 19 nt, Homo sapiens
  misc_RNA (1)...(19): siRNA sense strand
ggaagaccuuauggauuca

SEQ ID NO: 1491378 - RNA, 19 nt, Homo sapiens
  misc_RNA (1)...(19): siRNA sense strand
gcagcacgagcucaaauuc

SEQ ID NO: 1491379 - RNA, 19 nt, Homo sapiens
  misc_RNA (1)...(19): siRNA sense strand
cuuuaucguugguguaauu

SEQ ID NO: 1491380 - RNA, 19 nt, Homo sapiens
  misc_RNA (1)...(19): siRNA sense strand
agaagguuauggaagaaug

SEQ ID NO: 1491381 - RNA, 19 nt, Homo sapiens
  misc_RNA (1)...(19): siRNA sense strand
acaccgaaguuaagaaggu

SEQ ID NO: 1491382 - RNA, 19 nt, Homo sapiens
  misc_RNA (1)...(19): siRNA sense strand
gcaguucaaggaagaagau

SEQ ID NO: 1491383 - RNA, 19 nt, Homo sapiens
  misc_RNA (1)...(19): siRNA sense strand
ucucugaguucuucuuugg

SEQ ID NO: 1491384 - RNA, 19 nt, Homo sapiens
  misc_RNA (1)...(19): siRNA sense strand
ggaugacaccgaaguuaag

SEQ ID NO: 1491385 - RNA, 19 nt, Homo sapiens
  misc_RNA (1)...(19): siRNA sense strand
caacagcggaaucaucgau

SEQ ID NO: 1491386 - RNA, 19 nt, Homo sapiens
  misc_RNA (1)...(19): siRNA sense strand
aaugauaaaccacaugaug

SEQ ID NO: 1491387 - RNA, 19 nt, Homo sapiens
  misc_RNA (1)...(19): siRNA sense strand
ucgauuaugaucccaauga

SEQ ID NO: 1491388 - RNA, 19 nt, Homo sapiens
  misc_RNA (1)...(19): siRNA sense strand
gggccucaauuaauguauc

SEQ ID NO: 1491389 - RNA, 19 nt, Homo sapiens
  misc_RNA (1)...(19): siRNA sense strand
gaagguuauggaagaaugu

SEQ ID NO: 1491390 - RNA, 19 nt, Homo sapiens
  misc_RNA (1)...(19): siRNA sense strand
gaaguuaagaagguuaugg

SEQ ID NO: 1491391 - RNA, 19 nt, Homo sapiens
  misc_RNA (1)...(19): siRNA sense strand
uggaugacaccgaaguuaa

SEQ ID NO: 1491392 - RNA, 19 nt, Homo sapiens
  misc_RNA (1)...(19): siRNA sense strand
agaaugauaaaccacauga

SEQ ID NO: 1491393 - RNA, 19 nt, Homo sapiens
  misc_RNA (1)...(19): siRNA sense strand
ugaauugccagcagagaau

SEQ ID NO: 1491394 - RNA, 19 nt, Homo sapiens
  misc_RNA (1)...(19): siRNA sense strand
gaugacaccgaaguuaaga

SEQ ID NO: 1491395 - RNA, 19 nt, Homo sapiens
  misc_RNA (1)...(19): siRNA sense strand
uacagccuuucgauuauga

SEQ ID NO: 1491396 - RNA, 19 nt, Homo sapiens
  misc_RNA (1)...(19): siRNA sense strand
cgaaauguguguuuuaagg

SEQ ID NO: 1491397 - RNA, 19 nt, Homo sapiens
  misc_RNA (1)...(19): siRNA sense strand
ucaaagacagaaacaccaa

SEQ ID NO: 1491398 - RNA, 19 nt, Homo sapiens
  misc_RNA (1)...(19): siRNA sense strand
caacugcaucaaagacaga

SEQ ID NO: 1491399 - RNA, 19 nt, Homo sapiens
  misc_RNA (1)...(19): siRNA sense strand
ccggaagaccuuauggauu

SEQ ID NO: 1491400 - RNA, 19 nt, Homo sapiens
  misc_RNA (1)...(19): siRNA sense strand
gauuaugaucccaaugaga

SEQ ID NO: 1491401 - RNA, 19 nt, Homo sapiens
  misc_RNA (1)...(19): siRNA sense strand
gauguuacagccuuucgau

SEQ ID NO: 1491402 - RNA, 19 nt, Homo sapiens
  misc_RNA (1)...(19): siRNA sense strand
uuacagccuuucgauuaug

SEQ ID NO: 1491403 - RNA, 19 nt, Homo sapiens
  misc_RNA (1)...(19): siRNA sense strand
guucaaggaagaagaugga

SEQ ID NO: 1491404 - RNA, 19 nt, Homo sapiens
  misc_RNA (1)...(19): siRNA sense strand
caccaauagugucuaaguc

SEQ ID NO: 1491405 - RNA, 19 nt, Homo sapiens
  misc_RNA (1)...(19): siRNA sense strand
gagaaugauaaaccacaug

SEQ ID NO: 1491406 - RNA, 19 nt, Homo sapiens
  misc_RNA (1)...(19): siRNA sense strand
agacagaaacaccaauagu

SEQ ID NO: 1491407 - RNA, 19 nt, Homo sapiens
  misc_RNA (1)...(19): siRNA sense strand
ugaguucuucuuuggauga

SEQ ID NO: 1491408 - RNA, 19 nt, Homo sapiens
  misc_RNA (1)...(19): siRNA sense strand
gugucuaagucucugaguu

SEQ ID NO: 1491409 - RNA, 19 nt, Homo sapiens
  misc_RNA (1)...(19): siRNA sense strand
auuaugaucccaaugagaa

SEQ ID NO: 1491410 - RNA, 19 nt, Homo sapiens
  misc_RNA (1)...(19): siRNA sense strand
gcaacccgacagaccgaaa

SEQ ID NO: 1491411 - RNA, 19 nt, Homo sapiens
  misc_RNA (1)...(19): siRNA sense strand
ucugaguucuucuuuggau

SEQ ID NO: 1491412 - RNA, 19 nt, Homo sapiens
  misc_RNA (1)...(19): siRNA sense strand
ugacacuucagauauggaa

SEQ ID NO: 1491413 - RNA, 19 nt, Homo sapiens
  misc_RNA (1)...(19): siRNA sense strand
gaggucccuucaccgaugu

SEQ ID NO: 1491414 - RNA, 19 nt, Homo sapiens
  misc_RNA (1)...(19): siRNA sense strand
caccgaaguuaagaagguu

SEQ ID NO: 1491415 - RNA, 19 nt, Homo sapiens
  misc_RNA (1)...(19): siRNA sense strand
ugucuaagucucugaguuc

SEQ ID NO: 1491416 - RNA, 19 nt, Homo sapiens
  misc_RNA (1)...(19): siRNA sense strand
ggccucaauuaauguaucu

SEQ ID NO: 1491417 - RNA, 19 nt, Homo sapiens
  misc_RNA (1)...(19): siRNA sense strand
gaccgaaauguguguuuua

SEQ ID NO: 1491418 - RNA, 19 nt, Homo sapiens
  misc_RNA (1)...(19): siRNA sense strand
gccagcagagaaugauaaa

SEQ ID NO: 1491419 - RNA, 19 nt, Homo sapiens
  misc_RNA (1)...(19): siRNA sense strand
aacacaaguuuaugguuca

SEQ ID NO: 1491420 - RNA, 19 nt, Homo sapiens
  misc_RNA (1)...(19): siRNA sense strand
uauccacaacugcaucaaa

SEQ ID NO: 1491421 - RNA, 19 nt, Homo sapiens
  misc_RNA (1)...(19): siRNA sense strand
uagauguguguuugaauug

SEQ ID NO: 1491422 - RNA, 19 nt, Homo sapiens
  misc_RNA (1)...(19): siRNA sense strand
caaagacagaaacaccaau

SEQ ID NO: 1491423 - RNA, 19 nt, Homo sapiens
  misc_RNA (1)...(19): siRNA sense strand
agagaaugauaaaccacau

SEQ ID NO: 1491424 - RNA, 19 nt, Homo sapiens
  misc_RNA (1)...(19): siRNA sense strand
gaugcaggggccucaauua

SEQ ID NO: 1491425 - RNA, 19 nt, Homo sapiens
  misc_RNA (1)...(19): siRNA sense strand
cagcagagaaugauaaacc

SEQ ID NO: 1491426 - RNA, 19 nt, Homo sapiens
  misc_RNA (1)...(19): siRNA sense strand
cgauuaugaucccaaugag

SEQ ID NO: 1491427 - RNA, 19 nt, Homo sapiens
  misc_RNA (1)...(19): siRNA sense strand
guuauggaagaauguaaga

SEQ ID NO: 1491428 - RNA, 19 nt, Homo sapiens
  misc_RNA (1)...(19): siRNA sense strand
ugacaccgaaguuaagaag

SEQ ID NO: 1491429 - RNA, 19 nt, Homo sapiens
  misc_RNA (1)...(19): siRNA sense strand
acuuagauguguguuugaa

SEQ ID NO: 1491430 - RNA, 19 nt, Homo sapiens
  misc_RNA (1)...(19): siRNA sense strand
caacccgacagaccgaaau

SEQ ID NO: 1491431 - RNA, 19 nt, Homo sapiens
  misc_RNA (1)...(19): siRNA sense strand
gaauugccagcagagaaug

SEQ ID NO: 1491432 - RNA, 19 nt, Homo sapiens
  misc_RNA (1)...(19): siRNA sense strand
gaaagaaugccgaagaguu

SEQ ID NO: 1491433 - RNA, 19 nt, Homo sapiens
  misc_RNA (1)...(19): siRNA sense strand
ucaaugugcuggugaauag

SEQ ID NO: 1491434 - RNA, 19 nt, Homo sapiens
  misc_RNA (1)...(19): siRNA sense strand
gugaauagaccgaauauca

SEQ ID NO: 1491435 - RNA, 19 nt, Homo sapiens
  misc_RNA (1)...(19): siRNA sense strand
gacgagaacggacagauuu

SEQ ID NO: 1491436 - RNA, 19 nt, Homo sapiens
  misc_RNA (1)...(19): siRNA sense strand
ggacgagaacggacagauu

SEQ ID NO: 1491437 - RNA, 19 nt, Homo sapiens
  misc_RNA (1)...(19): siRNA sense strand
guucaagccucccaugauc

SEQ ID NO: 1491438 - RNA, 19 nt, Homo sapiens
  misc_RNA (1)...(19): siRNA sense strand
ucagaaagaaugccgaaga

SEQ ID NO: 1491439 - RNA, 19 nt, Homo sapiens
  misc_RNA (1)...(19): siRNA sense strand
cagaaagaaugccgaagag

SEQ ID NO: 1491440 - RNA, 19 nt, Homo sapiens
  misc_RNA (1)...(19): siRNA sense strand
aaagaaugccgaagaguuc

SEQ ID NO: 1491441 - RNA, 19 nt, Homo sapiens
  misc_RNA (1)...(19): siRNA sense strand
ccggagcuguucagaaaga

SEQ ID NO: 1491442 - RNA, 19 nt, Homo sapiens
  misc_RNA (1)...(19): siRNA sense strand
auccggagcuguucagaaa

SEQ ID NO: 1491443 - RNA, 19 nt, Homo sapiens
  misc_RNA (1)...(19): siRNA sense strand
guggcacgcucuccuccua

SEQ ID NO: 1491444 - RNA, 19 nt, Homo sapiens
  misc_RNA (1)...(19): siRNA sense strand
ucgcugaccugcugacaca

SEQ ID NO: 1491445 - RNA, 19 nt, Homo sapiens
  misc_RNA (1)...(19): siRNA sense strand
gaaccuguccagcgaugau

SEQ ID NO: 1491446 - RNA, 19 nt, Homo sapiens
  misc_RNA (1)...(19): siRNA sense strand
caaauucacaaccaagauc

SEQ ID NO: 1491447 - RNA, 19 nt, Homo sapiens
  misc_RNA (1)...(19): siRNA sense strand
guccagcgaugaugccaau

SEQ ID NO: 1491448 - RNA, 19 nt, Homo sapiens
  misc_RNA (1)...(19): siRNA sense strand
gagcuguucagaaagaaug

SEQ ID NO: 1491449 - RNA, 19 nt, Homo sapiens
  misc_RNA (1)...(19): siRNA sense strand
cagauuugccugcccauca

SEQ ID NO: 1491450 - RNA, 19 nt, Homo sapiens
  misc_RNA (1)...(19): siRNA sense strand
cagcgaugaugccaauguc

SEQ ID NO: 1491451 - RNA, 19 nt, Homo sapiens
  misc_RNA (1)...(19): siRNA sense strand
ugaucaaauucacaaccaa

SEQ ID NO: 1491452 - RNA, 19 nt, Homo sapiens
  misc_RNA (1)...(19): siRNA sense strand
gcuggugaauagaccgaau

SEQ ID NO: 1491453 - RNA, 19 nt, Homo sapiens
  misc_RNA (1)...(19): siRNA sense strand
ucaagccucccaugaucaa

SEQ ID NO: 1491454 - RNA, 19 nt, Homo sapiens
  misc_RNA (1)...(19): siRNA sense strand
agaguucacccuccgauuc

SEQ ID NO: 1491455 - RNA, 19 nt, Homo sapiens
  misc_RNA (1)...(19): siRNA sense strand
ugaauagaccgaauaucag

SEQ ID NO: 1491456 - RNA, 19 nt, Homo sapiens
  misc_RNA (1)...(19): siRNA sense strand
gagcuggaggaucuucaga

SEQ ID NO: 1491457 - RNA, 19 nt, Homo sapiens
  misc_RNA (1)...(19): siRNA sense strand
ucaaauucacaaccaagau

SEQ ID NO: 1491458 - RNA, 19 nt, Homo sapiens
  misc_RNA (1)...(19): siRNA sense strand
agccucccaugaucaaauu

SEQ ID NO: 1491459 - RNA, 19 nt, Homo sapiens
  misc_RNA (1)...(19): siRNA sense strand
ccagcgaugaugccaaugu

SEQ ID NO: 1491460 - RNA, 19 nt, Homo sapiens
  misc_RNA (1)...(19): siRNA sense strand
gaaagaaugccgaagaguu

SEQ ID NO: 1491461 - RNA, 19 nt, Homo sapiens
  misc_RNA (1)...(19): siRNA sense strand
ucaaugugcuggugaauag

SEQ ID NO: 1491462 - RNA, 19 nt, Homo sapiens
  misc_RNA (1)...(19): siRNA sense strand
gugaauagaccgaauauca

SEQ ID NO: 1491463 - RNA, 19 nt, Homo sapiens
  misc_RNA (1)...(19): siRNA sense strand
gacgagaacggacagauuu

SEQ ID NO: 1491464 - RNA, 19 nt, Homo sapiens
  misc_RNA (1)...(19): siRNA sense strand
ggacgagaacggacagauu

SEQ ID NO: 1491465 - RNA, 19 nt, Homo sapiens
  misc_RNA (1)...(19): siRNA sense strand
ucagaaagaaugccgaaga

SEQ ID NO: 1491466 - RNA, 19 nt, Homo sapiens
  misc_RNA (1)...(19): siRNA sense strand
cagaaagaaugccgaagag

SEQ ID NO: 1491467 - RNA, 19 nt, Homo sapiens
  misc_RNA (1)...(19): siRNA sense strand
aaagaaugccgaagaguuc

SEQ ID NO: 1491468 - RNA, 19 nt, Homo sapiens
  misc_RNA (1)...(19): siRNA sense strand
ccggagcuguucagaaaga

SEQ ID NO: 1491469 - RNA, 19 nt, Homo sapiens
  misc_RNA (1)...(19): siRNA sense strand
auccggagcuguucagaaa

SEQ ID NO: 1491470 - RNA, 19 nt, Homo sapiens
  misc_RNA (1)...(19): siRNA sense strand
ucgcugaccugcugacaca

SEQ ID NO: 1491471 - RNA, 19 nt, Homo sapiens
  misc_RNA (1)...(19): siRNA sense strand
caaauucacaaccaagauc

SEQ ID NO: 1491472 - RNA, 19 nt, Homo sapiens
  misc_RNA (1)...(19): siRNA sense strand
gagcuguucagaaagaaug

SEQ ID NO: 1491473 - RNA, 19 nt, Homo sapiens
  misc_RNA (1)...(19): siRNA sense strand
cagauuugccugcccauca

SEQ ID NO: 1491474 - RNA, 19 nt, Homo sapiens
  misc_RNA (1)...(19): siRNA sense strand
gcuggugaauagaccgaau

SEQ ID NO: 1491475 - RNA, 19 nt, Homo sapiens
  misc_RNA (1)...(19): siRNA sense strand
agaguucacccuccgauuc

SEQ ID NO: 1491476 - RNA, 19 nt, Homo sapiens
  misc_RNA (1)...(19): siRNA sense strand
ugaauagaccgaauaucag

SEQ ID NO: 1491477 - RNA, 19 nt, Homo sapiens
  misc_RNA (1)...(19): siRNA sense strand
ucaaauucacaaccaagau

SEQ ID NO: 1491478 - RNA, 19 nt, Homo sapiens
  misc_RNA (1)...(19): siRNA sense strand
guaaagagcugguggauau

SEQ ID NO: 1491479 - RNA, 19 nt, Homo sapiens
  misc_RNA (1)...(19): siRNA sense strand
gaaggaaccugugaaauuu

SEQ ID NO: 1491480 - RNA, 19 nt, Homo sapiens
  misc_RNA (1)...(19): siRNA sense strand
gaagggagcuggugccauu

SEQ ID NO: 1491481 - RNA, 19 nt, Homo sapiens
  misc_RNA (1)...(19): siRNA sense strand
ggaaggaaccugugaaauu

SEQ ID NO: 1491482 - RNA, 19 nt, Homo sapiens
  misc_RNA (1)...(19): siRNA sense strand
gaagaaagccugcguaaag

SEQ ID NO: 1491483 - RNA, 19 nt, Homo sapiens
  misc_RNA (1)...(19): siRNA sense strand
ccgagcagcuuuagucuua

SEQ ID NO: 1491484 - RNA, 19 nt, Homo sapiens
  misc_RNA (1)...(19): siRNA sense strand
ggaccaagaucucauuaug

SEQ ID NO: 1491485 - RNA, 19 nt, Homo sapiens
  misc_RNA (1)...(19): siRNA sense strand
agagaaaggugaaauguau

SEQ ID NO: 1491486 - RNA, 19 nt, Homo sapiens
  misc_RNA (1)...(19): siRNA sense strand
gagggaggcucaugcugua

SEQ ID NO: 1491487 - RNA, 19 nt, Homo sapiens
  misc_RNA (1)...(19): siRNA sense strand
gaucaaacaacccauauga

SEQ ID NO: 1491488 - RNA, 19 nt, Homo sapiens
  misc_RNA (1)...(19): siRNA sense strand
caaacaacccauaugauuu

SEQ ID NO: 1491489 - RNA, 19 nt, Homo sapiens
  misc_RNA (1)...(19): siRNA sense strand
gcgcuaggcuuucucauag

SEQ ID NO: 1491490 - RNA, 19 nt, Homo sapiens
  misc_RNA (1)...(19): siRNA sense strand
gaaguacucuuuucaguug

SEQ ID NO: 1491491 - RNA, 19 nt, Homo sapiens
  misc_RNA (1)...(19): siRNA sense strand
gaagaaaagcucagauaua

SEQ ID NO: 1491492 - RNA, 19 nt, Homo sapiens
  misc_RNA (1)...(19): siRNA sense strand
ucaaacaacccauaugauu

SEQ ID NO: 1491493 - RNA, 19 nt, Homo sapiens
  misc_RNA (1)...(19): siRNA sense strand
ggugaaauguauagauguu

SEQ ID NO: 1491494 - RNA, 19 nt, Homo sapiens
  misc_RNA (1)...(19): siRNA sense strand
ggugugggcucugauauug

SEQ ID NO: 1491495 - RNA, 19 nt, Homo sapiens
  misc_RNA (1)...(19): siRNA sense strand
gcaaugaugucagcaaagg

SEQ ID NO: 1491496 - RNA, 19 nt, Homo sapiens
  misc_RNA (1)...(19): siRNA sense strand
cagagaagcaggaagauga

SEQ ID NO: 1491497 - RNA, 19 nt, Homo sapiens
  misc_RNA (1)...(19): siRNA sense strand
gguuguggcuggacccuuu

SEQ ID NO: 1491498 - RNA, 19 nt, Homo sapiens
  misc_RNA (1)...(19): siRNA sense strand
agacacaaagguacauuua

SEQ ID NO: 1491499 - RNA, 19 nt, Homo sapiens
  misc_RNA (1)...(19): siRNA sense strand
uaacacggcccuucaacuu

SEQ ID NO: 1491500 - RNA, 19 nt, Homo sapiens
  misc_RNA (1)...(19): siRNA sense strand
gaaccgucgugaugccauu

SEQ ID NO: 1491501 - RNA, 19 nt, Homo sapiens
  misc_RNA (1)...(19): siRNA sense strand
gagaaaggugaaauguaua

SEQ ID NO: 1491502 - RNA, 19 nt, Homo sapiens
  misc_RNA (1)...(19): siRNA sense strand
acacggcccuucaacuuug

SEQ ID NO: 1491503 - RNA, 19 nt, Homo sapiens
  misc_RNA (1)...(19): siRNA sense strand
gaugguguguucuuauauc

SEQ ID NO: 1491504 - RNA, 19 nt, Homo sapiens
  misc_RNA (1)...(19): siRNA sense strand
uagauguuguucaggcuua

SEQ ID NO: 1491505 - RNA, 19 nt, Homo sapiens
  misc_RNA (1)...(19): siRNA sense strand
ucgaaugccugcuuucuuc

SEQ ID NO: 1491506 - RNA, 19 nt, Homo sapiens
  misc_RNA (1)...(19): siRNA sense strand
ucaaggacgugaacccaau

SEQ ID NO: 1491507 - RNA, 19 nt, Homo sapiens
  misc_RNA (1)...(19): siRNA sense strand
gcuggacccuuuaaugauc

SEQ ID NO: 1491508 - RNA, 19 nt, Homo sapiens
  misc_RNA (1)...(19): siRNA sense strand
gagccucaguucaacaugu

SEQ ID NO: 1491509 - RNA, 19 nt, Homo sapiens
  misc_RNA (1)...(19): siRNA sense strand
aagaaagccugcguaaaga

SEQ ID NO: 1491510 - RNA, 19 nt, Homo sapiens
  misc_RNA (1)...(19): siRNA sense strand
ggaagaaagccugcguaaa

SEQ ID NO: 1491511 - RNA, 19 nt, Homo sapiens
  misc_RNA (1)...(19): siRNA sense strand
gaaccauugcuucugcuuu

SEQ ID NO: 1491512 - RNA, 19 nt, Homo sapiens
  misc_RNA (1)...(19): siRNA sense strand
ccauuggacuggcuuuguu

SEQ ID NO: 1491513 - RNA, 19 nt, Homo sapiens
  misc_RNA (1)...(19): siRNA sense strand
gccggugacugaaccauug

SEQ ID NO: 1491514 - RNA, 19 nt, Homo sapiens
  misc_RNA (1)...(19): siRNA sense strand
gacacaaagguacauuuaa

SEQ ID NO: 1491515 - RNA, 19 nt, Homo sapiens
  misc_RNA (1)...(19): siRNA sense strand
cagagaaaggugaaaugua

SEQ ID NO: 1491516 - RNA, 19 nt, Homo sapiens
  misc_RNA (1)...(19): siRNA sense strand
gcccaggaguuguuucugu

SEQ ID NO: 1491517 - RNA, 19 nt, Homo sapiens
  misc_RNA (1)...(19): siRNA sense strand
aaggugaaauguauagaug

SEQ ID NO: 1491518 - RNA, 19 nt, Homo sapiens
  misc_RNA (1)...(19): siRNA sense strand
ugaugaugguguguucuua

SEQ ID NO: 1491519 - RNA, 19 nt, Homo sapiens
  misc_RNA (1)...(19): siRNA sense strand
guagugaguuguguaugug

SEQ ID NO: 1491520 - RNA, 19 nt, Homo sapiens
  misc_RNA (1)...(19): siRNA sense strand
gacgugaacccaaugauca

SEQ ID NO: 1491521 - RNA, 19 nt, Homo sapiens
  misc_RNA (1)...(19): siRNA sense strand
cuacaaggaaugcccaauu

SEQ ID NO: 1491522 - RNA, 19 nt, Homo sapiens
  misc_RNA (1)...(19): siRNA sense strand
caacccauaugauuuacag

SEQ ID NO: 1491523 - RNA, 19 nt, Homo sapiens
  misc_RNA (1)...(19): siRNA sense strand
ggacgugaacccaaugauc

SEQ ID NO: 1491524 - RNA, 19 nt, Homo sapiens
  misc_RNA (1)...(19): siRNA sense strand
gcccuggguuugccuguga

SEQ ID NO: 1491525 - RNA, 19 nt, Homo sapiens
  misc_RNA (1)...(19): siRNA sense strand
ucagauauagcaaugagaa

SEQ ID NO: 1491526 - RNA, 19 nt, Homo sapiens
  misc_RNA (1)...(19): siRNA sense strand
ugugggaguugaucaaaug

SEQ ID NO: 1491527 - RNA, 19 nt, Homo sapiens
  misc_RNA (1)...(19): siRNA sense strand
aaacaugucaguccucugu

SEQ ID NO: 1491528 - RNA, 19 nt, Homo sapiens
  misc_RNA (1)...(19): siRNA sense strand
gcauucaguuguuccucuu

SEQ ID NO: 1491529 - RNA, 19 nt, Homo sapiens
  misc_RNA (1)...(19): siRNA sense strand
ugauauuggugguagcauu

SEQ ID NO: 1491530 - RNA, 19 nt, Homo sapiens
  misc_RNA (1)...(19): siRNA sense strand
gaugaagccacccuggaaa

SEQ ID NO: 1491531 - RNA, 19 nt, Homo sapiens
  misc_RNA (1)...(19): siRNA sense strand
ccugugaaauuuguagauu

SEQ ID NO: 1491532 - RNA, 19 nt, Homo sapiens
  misc_RNA (1)...(19): siRNA sense strand
gggacugaaugccaaagga

SEQ ID NO: 1491533 - RNA, 19 nt, Homo sapiens
  misc_RNA (1)...(19): siRNA sense strand
guucuuauaucccucacau

SEQ ID NO: 1491534 - RNA, 19 nt, Homo sapiens
  misc_RNA (1)...(19): siRNA sense strand
aggcuuauaucaacagaau

SEQ ID NO: 1491535 - RNA, 19 nt, Homo sapiens
  misc_RNA (1)...(19): siRNA sense strand
ucgcaaugaugucagcaaa

SEQ ID NO: 1491536 - RNA, 19 nt, Homo sapiens
  misc_RNA (1)...(19): siRNA sense strand
gguuaaaacuagacacaaa

SEQ ID NO: 1491537 - RNA, 19 nt, Homo sapiens
  misc_RNA (1)...(19): siRNA sense strand
gguccuaugugccgcuaug

SEQ ID NO: 1491538 - RNA, 19 nt, Homo sapiens
  misc_RNA (1)...(19): siRNA sense strand
uguagugaguuguguaugu

SEQ ID NO: 1491539 - RNA, 19 nt, Homo sapiens
  misc_RNA (1)...(19): siRNA sense strand
gcuuauaucaacagaauca

SEQ ID NO: 1491540 - RNA, 19 nt, Homo sapiens
  misc_RNA (1)...(19): siRNA sense strand
aagaaaagcucagauauag

SEQ ID NO: 1491541 - RNA, 19 nt, Homo sapiens
  misc_RNA (1)...(19): siRNA sense strand
augaugguguguucuuaua

SEQ ID NO: 1491542 - RNA, 19 nt, Homo sapiens
  misc_RNA (1)...(19): siRNA sense strand
ggcgcuaggcuuucucaua

SEQ ID NO: 1491543 - RNA, 19 nt, Homo sapiens
  misc_RNA (1)...(19): siRNA sense strand
caauucuucuggacucaug

SEQ ID NO: 1491544 - RNA, 19 nt, Homo sapiens
  misc_RNA (1)...(19): siRNA sense strand
gcaaugagaaauaccaaaa

SEQ ID NO: 1491545 - RNA, 19 nt, Homo sapiens
  misc_RNA (1)...(19): siRNA sense strand
aagcucagauauagcaaug

SEQ ID NO: 1491546 - RNA, 19 nt, Homo sapiens
  misc_RNA (1)...(19): siRNA sense strand
gaaaagcucagauauagca

SEQ ID NO: 1491547 - RNA, 19 nt, Homo sapiens
  misc_RNA (1)...(19): siRNA sense strand
ccuugaaacuauucuagga

SEQ ID NO: 1491548 - RNA, 19 nt, Homo sapiens
  misc_RNA (1)...(19): siRNA sense strand
gauauuggugguagcauuc

SEQ ID NO: 1491549 - RNA, 19 nt, Homo sapiens
  misc_RNA (1)...(19): siRNA sense strand
ggucuguccaggaaaguuu

SEQ ID NO: 1491550 - RNA, 19 nt, Homo sapiens
  misc_RNA (1)...(19): siRNA sense strand
uggcuggacccuuuaauga

SEQ ID NO: 1491551 - RNA, 19 nt, Homo sapiens
  misc_RNA (1)...(19): siRNA sense strand
aagcugauccgacagagaa

SEQ ID NO: 1491552 - RNA, 19 nt, Homo sapiens
  misc_RNA (1)...(19): siRNA sense strand
gaugaugguguguucuuau

SEQ ID NO: 1491553 - RNA, 19 nt, Homo sapiens
  misc_RNA (1)...(19): siRNA sense strand
gcagagaagcaggaagaug

SEQ ID NO: 1491554 - RNA, 19 nt, Homo sapiens
  misc_RNA (1)...(19): siRNA sense strand
aaccauugcuucugcuuuc

SEQ ID NO: 1491555 - RNA, 19 nt, Homo sapiens
  misc_RNA (1)...(19): siRNA sense strand
caacauguuaaacugaaga

SEQ ID NO: 1491556 - RNA, 19 nt, Homo sapiens
  misc_RNA (1)...(19): siRNA sense strand
ucuaggagccucaguucaa

SEQ ID NO: 1491557 - RNA, 19 nt, Homo sapiens
  misc_RNA (1)...(19): siRNA sense strand
ggaggcucaugcuguagau

SEQ ID NO: 1491558 - RNA, 19 nt, Homo sapiens
  misc_RNA (1)...(19): siRNA sense strand
gccugggucugucagugua

SEQ ID NO: 1491559 - RNA, 19 nt, Homo sapiens
  misc_RNA (1)...(19): siRNA sense strand
gaaccugugaaauuuguag

SEQ ID NO: 1491560 - RNA, 19 nt, Homo sapiens
  misc_RNA (1)...(19): siRNA sense strand
caaguacagguuugaggaa

SEQ ID NO: 1491561 - RNA, 19 nt, Homo sapiens
  misc_RNA (1)...(19): siRNA sense strand
ggaagaaaagcucagauau

SEQ ID NO: 1491562 - RNA, 19 nt, Homo sapiens
  misc_RNA (1)...(19): siRNA sense strand
caaaguggaccaagaucuc

SEQ ID NO: 1491563 - RNA, 19 nt, Homo sapiens
  misc_RNA (1)...(19): siRNA sense strand
uuuacuggauggaacauga

SEQ ID NO: 1491564 - RNA, 19 nt, Homo sapiens
  misc_RNA (1)...(19): siRNA sense strand
ccugcuuucuucaauggua

SEQ ID NO: 1491565 - RNA, 19 nt, Homo sapiens
  misc_RNA (1)...(19): siRNA sense strand
gagcagcuuuagucuuagg

SEQ ID NO: 1491566 - RNA, 19 nt, Homo sapiens
  misc_RNA (1)...(19): siRNA sense strand
gaaaggugaaauguauaga

SEQ ID NO: 1491567 - RNA, 19 nt, Homo sapiens
  misc_RNA (1)...(19): siRNA sense strand
gaagccacccuggaaaaua

SEQ ID NO: 1491568 - RNA, 19 nt, Homo sapiens
  misc_RNA (1)...(19): siRNA sense strand
gacagagaaaggugaaaug

SEQ ID NO: 1491569 - RNA, 19 nt, Homo sapiens
  misc_RNA (1)...(19): siRNA sense strand
caggugugguucccaacaa

SEQ ID NO: 1491570 - RNA, 19 nt, Homo sapiens
  misc_RNA (1)...(19): siRNA sense strand
guucaacauguuaaacuga

SEQ ID NO: 1491571 - RNA, 19 nt, Homo sapiens
  misc_RNA (1)...(19): siRNA sense strand
uuaaggcaguggaagaaag

SEQ ID NO: 1491572 - RNA, 19 nt, Homo sapiens
  misc_RNA (1)...(19): siRNA sense strand
gaugggaaggaaccuguga

SEQ ID NO: 1491573 - RNA, 19 nt, Homo sapiens
  misc_RNA (1)...(19): siRNA sense strand
gcauaaccaacuguaguga

SEQ ID NO: 1491574 - RNA, 19 nt, Homo sapiens
  misc_RNA (1)...(19): siRNA sense strand
uggaagaaagccugcguaa

SEQ ID NO: 1491575 - RNA, 19 nt, Homo sapiens
  misc_RNA (1)...(19): siRNA sense strand
guacaccaucccuuccauu

SEQ ID NO: 1491576 - RNA, 19 nt, Homo sapiens
  misc_RNA (1)...(19): siRNA sense strand
ccaguaacaagaucuaugg

SEQ ID NO: 1491577 - RNA, 19 nt, Homo sapiens
  misc_RNA (1)...(19): siRNA sense strand
guaugaauccaguaacaag

SEQ ID NO: 1491578 - RNA, 19 nt, Homo sapiens
  misc_RNA (1)...(19): siRNA sense strand
gcauugaacuccauacuug

SEQ ID NO: 1491579 - RNA, 19 nt, Homo sapiens
  misc_RNA (1)...(19): siRNA sense strand
ggaaauugcugcugagcuu

SEQ ID NO: 1491580 - RNA, 19 nt, Homo sapiens
  misc_RNA (1)...(19): siRNA sense strand
gaaggacauugcaguguuu

SEQ ID NO: 1491581 - RNA, 19 nt, Homo sapiens
  misc_RNA (1)...(19): siRNA sense strand
gaaagaggcucccgagacu

SEQ ID NO: 1491582 - RNA, 19 nt, Homo sapiens
  misc_RNA (1)...(19): siRNA sense strand
gauaagaucuccagcuucu

SEQ ID NO: 1491583 - RNA, 19 nt, Homo sapiens
  misc_RNA (1)...(19): siRNA sense strand
ucaaguggcuuuacagguu

SEQ ID NO: 1491584 - RNA, 19 nt, Homo sapiens
  misc_RNA (1)...(19): siRNA sense strand
gaacucugcuucagguguu

SEQ ID NO: 1491585 - RNA, 19 nt, Homo sapiens
  misc_RNA (1)...(19): siRNA sense strand
ccacuuugauggcuuauga

SEQ ID NO: 1491586 - RNA, 19 nt, Homo sapiens
  misc_RNA (1)...(19): siRNA sense strand
ugaagucccugaaaccuuu

SEQ ID NO: 1491587 - RNA, 19 nt, Homo sapiens
  misc_RNA (1)...(19): siRNA sense strand
gaccugagcuccuccuuuc

SEQ ID NO: 1491588 - RNA, 19 nt, Homo sapiens
  misc_RNA (1)...(19): siRNA sense strand
gaaccuaaagggacaauau

SEQ ID NO: 1491589 - RNA, 19 nt, Homo sapiens
  misc_RNA (1)...(19): siRNA sense strand
gaucugauggugcacaaua

SEQ ID NO: 1491590 - RNA, 19 nt, Homo sapiens
  misc_RNA (1)...(19): siRNA sense strand
gugauuggcuaccugagua

SEQ ID NO: 1491591 - RNA, 19 nt, Homo sapiens
  misc_RNA (1)...(19): siRNA sense strand
cggaagcucugggauauuu

SEQ ID NO: 1491592 - RNA, 19 nt, Homo sapiens
  misc_RNA (1)...(19): siRNA sense strand
ggaggaggauggaaaggau

SEQ ID NO: 1491593 - RNA, 19 nt, Homo sapiens
  misc_RNA (1)...(19): siRNA sense strand
gcugagcccugucuuggaa

SEQ ID NO: 1491594 - RNA, 19 nt, Homo sapiens
  misc_RNA (1)...(19): siRNA sense strand
caaguggcuuuacagguuu

SEQ ID NO: 1491595 - RNA, 19 nt, Homo sapiens
  misc_RNA (1)...(19): siRNA sense strand
gggcugcucugcgcucuaa

SEQ ID NO: 1491596 - RNA, 19 nt, Homo sapiens
  misc_RNA (1)...(19): siRNA sense strand
ugaaggacauugcaguguu

SEQ ID NO: 1491597 - RNA, 19 nt, Homo sapiens
  misc_RNA (1)...(19): siRNA sense strand
ggaagaacgagaucugaug

SEQ ID NO: 1491598 - RNA, 19 nt, Homo sapiens
  misc_RNA (1)...(19): siRNA sense strand
ugaaggaaguagagacuca

SEQ ID NO: 1491599 - RNA, 19 nt, Homo sapiens
  misc_RNA (1)...(19): siRNA sense strand
ccauguggcucgaaaugug

SEQ ID NO: 1491600 - RNA, 19 nt, Homo sapiens
  misc_RNA (1)...(19): siRNA sense strand
gaauguaagccagcugauu

SEQ ID NO: 1491601 - RNA, 19 nt, Homo sapiens
  misc_RNA (1)...(19): siRNA sense strand
gaaauguggccuugacuac

SEQ ID NO: 1491602 - RNA, 19 nt, Homo sapiens
  misc_RNA (1)...(19): siRNA sense strand
guucccagcugguggcaaa

SEQ ID NO: 1491603 - RNA, 19 nt, Homo sapiens
  misc_RNA (1)...(19): siRNA sense strand
cagcuucugucuucaagug

SEQ ID NO: 1491604 - RNA, 19 nt, Homo sapiens
  misc_RNA (1)...(19): siRNA sense strand
accaggagcugauaagaga

SEQ ID NO: 1491605 - RNA, 19 nt, Homo sapiens
  misc_RNA (1)...(19): siRNA sense strand
cuuaugagguguacuaugg

SEQ ID NO: 1491606 - RNA, 19 nt, Homo sapiens
  misc_RNA (1)...(19): siRNA sense strand
ccgcugaggugugugauga

SEQ ID NO: 1491607 - RNA, 19 nt, Homo sapiens
  misc_RNA (1)...(19): siRNA sense strand
ggccuugacuaccuuccua

SEQ ID NO: 1491608 - RNA, 19 nt, Homo sapiens
  misc_RNA (1)...(19): siRNA sense strand
aauguaagccagcugauuu

SEQ ID NO: 1491609 - RNA, 19 nt, Homo sapiens
  misc_RNA (1)...(19): siRNA sense strand
gcugaggugugugaugauu

SEQ ID NO: 1491610 - RNA, 19 nt, Homo sapiens
  misc_RNA (1)...(19): siRNA sense strand
gcagaaccaggagcugaua

SEQ ID NO: 1491611 - RNA, 19 nt, Homo sapiens
  misc_RNA (1)...(19): siRNA sense strand
gaaccaggagcugauaaga

SEQ ID NO: 1491612 - RNA, 19 nt, Homo sapiens
  misc_RNA (1)...(19): siRNA sense strand
ggaccugagcuccuccuuu

SEQ ID NO: 1491613 - RNA, 19 nt, Homo sapiens
  misc_RNA (1)...(19): siRNA sense strand
ugcaggaacuguugggauu

SEQ ID NO: 1491614 - RNA, 19 nt, Homo sapiens
  misc_RNA (1)...(19): siRNA sense strand
gagaucugauggugcacaa

SEQ ID NO: 1491615 - RNA, 19 nt, Homo sapiens
  misc_RNA (1)...(19): siRNA sense strand
cugauaagaucuccagcuu

SEQ ID NO: 1491616 - RNA, 19 nt, Homo sapiens
  misc_RNA (1)...(19): siRNA sense strand
cgaaauguggccuugacua

SEQ ID NO: 1491617 - RNA, 19 nt, Homo sapiens
  misc_RNA (1)...(19): siRNA sense strand
ggacauugcaguguuuauc

SEQ ID NO: 1491618 - RNA, 19 nt, Homo sapiens
  misc_RNA (1)...(19): siRNA sense strand
ucucugcaaugcugugauu

SEQ ID NO: 1491619 - RNA, 19 nt, Homo sapiens
  misc_RNA (1)...(19): siRNA sense strand
uaagaucuccagcuucugu

SEQ ID NO: 1491620 - RNA, 19 nt, Homo sapiens
  misc_RNA (1)...(19): siRNA sense strand
agacucaggcccuagcuuu

SEQ ID NO: 1491621 - RNA, 19 nt, Homo sapiens
  misc_RNA (1)...(19): siRNA sense strand
cuccauacuugaagacuga

SEQ ID NO: 1491622 - RNA, 19 nt, Homo sapiens
  misc_RNA (1)...(19): siRNA sense strand
gauggugcacaauauaaug

SEQ ID NO: 1491623 - RNA, 19 nt, Homo sapiens
  misc_RNA (1)...(19): siRNA sense strand
ugaacuccauacuugaaga

SEQ ID NO: 1491624 - RNA, 19 nt, Homo sapiens
  misc_RNA (1)...(19): siRNA sense strand
gagguguacuauggacuga

SEQ ID NO: 1491625 - RNA, 19 nt, Homo sapiens
  misc_RNA (1)...(19): siRNA sense strand
gcccggaagcucugggaua

SEQ ID NO: 1491626 - RNA, 19 nt, Homo sapiens
  misc_RNA (1)...(19): siRNA sense strand
uaagccagcugauuuugaa

SEQ ID NO: 1491627 - RNA, 19 nt, Homo sapiens
  misc_RNA (1)...(19): siRNA sense strand
gacauugcaguguuuauca

SEQ ID NO: 1491628 - RNA, 19 nt, Homo sapiens
  misc_RNA (1)...(19): siRNA sense strand
gcucuaacuugcgcacugu

SEQ ID NO: 1491629 - RNA, 19 nt, Homo sapiens
  misc_RNA (1)...(19): siRNA sense strand
gcgcucaucucugcaaugc

SEQ ID NO: 1491630 - RNA, 19 nt, Homo sapiens
  misc_RNA (1)...(19): siRNA sense strand
cccggaagcucugggauau

SEQ ID NO: 1491631 - RNA, 19 nt, Homo sapiens
  misc_RNA (1)...(19): siRNA sense strand
gcgagaggcuugggaacag

SEQ ID NO: 1491632 - RNA, 19 nt, Homo sapiens
  misc_RNA (1)...(19): siRNA sense strand
ggagcugagcccugucuug

SEQ ID NO: 1491633 - RNA, 19 nt, Homo sapiens
  misc_RNA (1)...(19): siRNA sense strand
caggaacuguugggauuca

SEQ ID NO: 1491634 - RNA, 19 nt, Homo sapiens
  misc_RNA (1)...(19): siRNA sense strand
gguccuacagcucuuguug

SEQ ID NO: 1491635 - RNA, 19 nt, Homo sapiens
  misc_RNA (1)...(19): siRNA sense strand
gagcuccuccuuucugaag

SEQ ID NO: 1491636 - RNA, 19 nt, Homo sapiens
  misc_RNA (1)...(19): siRNA sense strand
ggaggaggaggauggaaag

SEQ ID NO: 1491637 - RNA, 19 nt, Homo sapiens
  misc_RNA (1)...(19): siRNA sense strand
ugaggugugugaugauuuu

SEQ ID NO: 1491638 - RNA, 19 nt, Homo sapiens
  misc_RNA (1)...(19): siRNA sense strand
ugcuacagcucccucgauu

SEQ ID NO: 1491639 - RNA, 19 nt, Homo sapiens
  misc_RNA (1)...(19): siRNA sense strand
gcugauaagagacccuuuc

SEQ ID NO: 1491640 - RNA, 19 nt, Homo sapiens
  misc_RNA (1)...(19): siRNA sense strand
ccaagguccuacagcucuu

SEQ ID NO: 1491641 - RNA, 19 nt, Homo sapiens
  misc_RNA (1)...(19): siRNA sense strand
ugucuuggaagcuguauug

SEQ ID NO: 1491642 - RNA, 19 nt, Homo sapiens
  misc_RNA (1)...(19): siRNA sense strand
gggaagaacgagaucugau

SEQ ID NO: 1491643 - RNA, 19 nt, Homo sapiens
  misc_RNA (1)...(19): siRNA sense strand
gugagaugcugcaggaacu

SEQ ID NO: 1491644 - RNA, 19 nt, Homo sapiens
  misc_RNA (1)...(19): siRNA sense strand
ugacaguccuugggucucu

SEQ ID NO: 1491645 - RNA, 19 nt, Homo sapiens
  misc_RNA (1)...(19): siRNA sense strand
ucugauggugcacaauaua

SEQ ID NO: 1491646 - RNA, 19 nt, Homo sapiens
  misc_RNA (1)...(19): siRNA sense strand
ggcauugaacuccauacuu

SEQ ID NO: 1491647 - RNA, 19 nt, Homo sapiens
  misc_RNA (1)...(19): siRNA sense strand
uggcuuaugagguguacua

SEQ ID NO: 1491648 - RNA, 19 nt, Homo sapiens
  misc_RNA (1)...(19): siRNA sense strand
gcacaucccauugccaacu

SEQ ID NO: 1491649 - RNA, 19 nt, Homo sapiens
  misc_RNA (1)...(19): siRNA sense strand
cacaucccauugccaacuu

SEQ ID NO: 1491650 - RNA, 19 nt, Homo sapiens
  misc_RNA (1)...(19): siRNA sense strand
uccuacagcucuuguugga

SEQ ID NO: 1491651 - RNA, 19 nt, Homo sapiens
  misc_RNA (1)...(19): siRNA sense strand
cugauggugcacaauauaa

SEQ ID NO: 1491652 - RNA, 19 nt, Homo sapiens
  misc_RNA (1)...(19): siRNA sense strand
cuaccaagccaagguccua

SEQ ID NO: 1491653 - RNA, 19 nt, Homo sapiens
  misc_RNA (1)...(19): siRNA sense strand
ccuaaagggacaauaugug

SEQ ID NO: 1491654 - RNA, 19 nt, Homo sapiens
  misc_RNA (1)...(19): siRNA sense strand
cuacagcucccucgauugc

SEQ ID NO: 1491655 - RNA, 19 nt, Homo sapiens
  misc_RNA (1)...(19): siRNA sense strand
gacaguccuugggucucua

SEQ ID NO: 1491656 - RNA, 19 nt, Homo sapiens
  misc_RNA (1)...(19): siRNA sense strand
gguguuaggagggacuauu

SEQ ID NO: 1491657 - RNA, 19 nt, Homo sapiens
  misc_RNA (1)...(19): siRNA sense strand
cagaaccaggagcugauaa

SEQ ID NO: 1491658 - RNA, 19 nt, Homo sapiens
  misc_RNA (1)...(19): siRNA sense strand
ggugcacaauauaaugaag

SEQ ID NO: 1491659 - RNA, 19 nt, Homo sapiens
  misc_RNA (1)...(19): siRNA sense strand
cuccacuccuggucuugua

SEQ ID NO: 1491660 - RNA, 19 nt, Homo sapiens
  misc_RNA (1)...(19): siRNA sense strand
cugagcuccuccuuucuga

SEQ ID NO: 1491661 - RNA, 19 nt, Homo sapiens
  misc_RNA (1)...(19): siRNA sense strand
ugcacaauauaaugaagga

SEQ ID NO: 1491662 - RNA, 19 nt, Homo sapiens
  misc_RNA (1)...(19): siRNA sense strand
gcaggaacuguugggauuc

SEQ ID NO: 1491663 - RNA, 19 nt, Homo sapiens
  misc_RNA (1)...(19): siRNA sense strand
caccauguggcucgaaaug

SEQ ID NO: 1491664 - RNA, 19 nt, Homo sapiens
  misc_RNA (1)...(19): siRNA sense strand
gaugcugcaggaacuguug

SEQ ID NO: 1491665 - RNA, 19 nt, Homo sapiens
  misc_RNA (1)...(19): siRNA sense strand
ggaagagcaucaagaagua

SEQ ID NO: 1491666 - RNA, 19 nt, Homo sapiens
  misc_RNA (1)...(19): siRNA sense strand
caauacaccucuccaaguu

SEQ ID NO: 1491667 - RNA, 19 nt, Homo sapiens
  misc_RNA (1)...(19): siRNA sense strand
caacggacaucucaaaaua

SEQ ID NO: 1491668 - RNA, 19 nt, Homo sapiens
  misc_RNA (1)...(19): siRNA sense strand
uauauuggcuucauugaug

SEQ ID NO: 1491669 - RNA, 19 nt, Homo sapiens
  misc_RNA (1)...(19): siRNA sense strand
ggaggaagagcaucaagaa

SEQ ID NO: 1491670 - RNA, 19 nt, Homo sapiens
  misc_RNA (1)...(19): siRNA sense strand
cuauaggccucuccgcuua

SEQ ID NO: 1491671 - RNA, 19 nt, Homo sapiens
  misc_RNA (1)...(19): siRNA sense strand
cacccaggcucacccaaua

SEQ ID NO: 1491672 - RNA, 19 nt, Homo sapiens
  misc_RNA (1)...(19): siRNA sense strand
gaauaagcaccgaagcuau

SEQ ID NO: 1491673 - RNA, 19 nt, Homo sapiens
  misc_RNA (1)...(19): siRNA sense strand
gaacggcagcugaaacaca

SEQ ID NO: 1491674 - RNA, 19 nt, Homo sapiens
  misc_RNA (1)...(19): siRNA sense strand
uagggugcauccuuuguuu

SEQ ID NO: 1491675 - RNA, 19 nt, Homo sapiens
  misc_RNA (1)...(19): siRNA sense strand
aaacacaacggacaucuca

SEQ ID NO: 1491676 - RNA, 19 nt, Homo sapiens
  misc_RNA (1)...(19): siRNA sense strand
ugaauaagcaccgaagcua

SEQ ID NO: 1491677 - RNA, 19 nt, Homo sapiens
  misc_RNA (1)...(19): siRNA sense strand
acacaacggacaucucaaa

SEQ ID NO: 1491678 - RNA, 19 nt, Homo sapiens
  misc_RNA (1)...(19): siRNA sense strand
ccaaguucauguccugugu

SEQ ID NO: 1491679 - RNA, 19 nt, Homo sapiens
  misc_RNA (1)...(19): siRNA sense strand
guucauguccugugucuca

SEQ ID NO: 1491680 - RNA, 19 nt, Homo sapiens
  misc_RNA (1)...(19): siRNA sense strand
ggcuggcucucgcucuaua

SEQ ID NO: 1491681 - RNA, 19 nt, Homo sapiens
  misc_RNA (1)...(19): siRNA sense strand
ccauggaguccucucuaua

SEQ ID NO: 1491682 - RNA, 19 nt, Homo sapiens
  misc_RNA (1)...(19): siRNA sense strand
ccaauacaccucuccaagu

SEQ ID NO: 1491683 - RNA, 19 nt, Homo sapiens
  misc_RNA (1)...(19): siRNA sense strand
auacaccucuccaaguuca

SEQ ID NO: 1491684 - RNA, 19 nt, Homo sapiens
  misc_RNA (1)...(19): siRNA sense strand
ggcucucgcucuauauuuc

SEQ ID NO: 1491685 - RNA, 19 nt, Homo sapiens
  misc_RNA (1)...(19): siRNA sense strand
cauggaguccucucuauag

SEQ ID NO: 1491686 - RNA, 19 nt, Homo sapiens
  misc_RNA (1)...(19): siRNA sense strand
guggcuggcucucgcucua

SEQ ID NO: 1491687 - RNA, 19 nt, Homo sapiens
  misc_RNA (1)...(19): siRNA sense strand
gcuuauauuggcuucauug

SEQ ID NO: 1491688 - RNA, 19 nt, Homo sapiens
  misc_RNA (1)...(19): siRNA sense strand
gcauggaggaagagcauca

SEQ ID NO: 1491689 - RNA, 19 nt, Homo sapiens
  misc_RNA (1)...(19): siRNA sense strand
aauaagcaccgaagcuaug

SEQ ID NO: 1491690 - RNA, 19 nt, Homo sapiens
  misc_RNA (1)...(19): siRNA sense strand
gaaacacaacggacaucuc

SEQ ID NO: 1491691 - RNA, 19 nt, Homo sapiens
  misc_RNA (1)...(19): siRNA sense strand
aacggcagcugaaacacaa

SEQ ID NO: 1491692 - RNA, 19 nt, Homo sapiens
  misc_RNA (1)...(19): siRNA sense strand
ggagaagcaggcggaguga

SEQ ID NO: 1491693 - RNA, 19 nt, Homo sapiens
  misc_RNA (1)...(19): siRNA sense strand
cccauggaguccucucuau

SEQ ID NO: 1491694 - RNA, 19 nt, Homo sapiens
  misc_RNA (1)...(19): siRNA sense strand
aggaagagcaucaagaagu

SEQ ID NO: 1491695 - RNA, 19 nt, Homo sapiens
  misc_RNA (1)...(19): siRNA sense strand
acccagugcuguuuucuua

SEQ ID NO: 1491696 - RNA, 19 nt, Homo sapiens
  misc_RNA (1)...(19): siRNA sense strand
auaggccucuccgcuuaua

SEQ ID NO: 1491697 - RNA, 19 nt, Homo sapiens
  misc_RNA (1)...(19): siRNA sense strand
ggcugcaucuggcgcuuug

SEQ ID NO: 1491698 - RNA, 19 nt, Homo sapiens
  misc_RNA (1)...(19): siRNA sense strand
cuacuucaucuucgacuug

SEQ ID NO: 1491699 - RNA, 19 nt, Homo sapiens
  misc_RNA (1)...(19): siRNA sense strand
gcuacuucaucuucgacuu

SEQ ID NO: 1491700 - RNA, 19 nt, Homo sapiens
  misc_RNA (1)...(19): siRNA sense strand
gugaggaacggcagcugaa

SEQ ID NO: 1491701 - RNA, 19 nt, Homo sapiens
  misc_RNA (1)...(19): siRNA sense strand
gaggaagagcaucaagaag

SEQ ID NO: 1491702 - RNA, 19 nt, Homo sapiens
  misc_RNA (1)...(19): siRNA sense strand
gaagagcaucaagaaguac

SEQ ID NO: 1491703 - RNA, 19 nt, Homo sapiens
  misc_RNA (1)...(19): siRNA sense strand
gcaccaagguccacauaaa

SEQ ID NO: 1491704 - RNA, 19 nt, Homo sapiens
  misc_RNA (1)...(19): siRNA sense strand
gcucugggcauuauuauua

SEQ ID NO: 1491705 - RNA, 19 nt, Homo sapiens
  misc_RNA (1)...(19): siRNA sense strand
ucauagcacugguaaauuu

SEQ ID NO: 1491706 - RNA, 19 nt, Homo sapiens
  misc_RNA (1)...(19): siRNA sense strand
gcauguggcuugcugcuaa

SEQ ID NO: 1491707 - RNA, 19 nt, Homo sapiens
  misc_RNA (1)...(19): siRNA sense strand
gcuaaucuguucucuguau

SEQ ID NO: 1491708 - RNA, 19 nt, Homo sapiens
  misc_RNA (1)...(19): siRNA sense strand
uauaaugccuggguuguaa

SEQ ID NO: 1491709 - RNA, 19 nt, Homo sapiens
  misc_RNA (1)...(19): siRNA sense strand
gaaauugaggaauacagua

SEQ ID NO: 1491710 - RNA, 19 nt, Homo sapiens
  misc_RNA (1)...(19): siRNA sense strand
ggaaacauauaucuugcau

SEQ ID NO: 1491711 - RNA, 19 nt, Homo sapiens
  misc_RNA (1)...(19): siRNA sense strand
ggaauacaguacaucuuuc

SEQ ID NO: 1491712 - RNA, 19 nt, Homo sapiens
  misc_RNA (1)...(19): siRNA sense strand
gaauaugaaggaaacauga

SEQ ID NO: 1491713 - RNA, 19 nt, Homo sapiens
  misc_RNA (1)...(19): siRNA sense strand
guauaaacaucucaagaag

SEQ ID NO: 1491714 - RNA, 19 nt, Homo sapiens
  misc_RNA (1)...(19): siRNA sense strand
aaacaugacugggaagaug

SEQ ID NO: 1491715 - RNA, 19 nt, Homo sapiens
  misc_RNA (1)...(19): siRNA sense strand
aaacacaccuuucuuuuga

SEQ ID NO: 1491716 - RNA, 19 nt, Homo sapiens
  misc_RNA (1)...(19): siRNA sense strand
gcagaagaauaugaaggaa

SEQ ID NO: 1491717 - RNA, 19 nt, Homo sapiens
  misc_RNA (1)...(19): siRNA sense strand
aaacauggaugagaguaug

SEQ ID NO: 1491718 - RNA, 19 nt, Homo sapiens
  misc_RNA (1)...(19): siRNA sense strand
cuaggaggcugcggaauga

SEQ ID NO: 1491719 - RNA, 19 nt, Homo sapiens
  misc_RNA (1)...(19): siRNA sense strand
gaucuccuuccucuuguua

SEQ ID NO: 1491720 - RNA, 19 nt, Homo sapiens
  misc_RNA (1)...(19): siRNA sense strand
acauauaucuugcauucga

SEQ ID NO: 1491721 - RNA, 19 nt, Homo sapiens
  misc_RNA (1)...(19): siRNA sense strand
uagcaaggcuguuggaaac

SEQ ID NO: 1491722 - RNA, 19 nt, Homo sapiens
  misc_RNA (1)...(19): siRNA sense strand
cuccucagcugaccaaauu

SEQ ID NO: 1491723 - RNA, 19 nt, Homo sapiens
  misc_RNA (1)...(19): siRNA sense strand
ugacugggaagaugaaauu

SEQ ID NO: 1491724 - RNA, 19 nt, Homo sapiens
  misc_RNA (1)...(19): siRNA sense strand
gaauacaguacaucuuuca

SEQ ID NO: 1491725 - RNA, 19 nt, Homo sapiens
  misc_RNA (1)...(19): siRNA sense strand
gcacugguaaauuucauug

SEQ ID NO: 1491726 - RNA, 19 nt, Homo sapiens
  misc_RNA (1)...(19): siRNA sense strand
ggagaaccaagaagcuaaa

SEQ ID NO: 1491727 - RNA, 19 nt, Homo sapiens
  misc_RNA (1)...(19): siRNA sense strand
agaagaauaugaaggaaac

SEQ ID NO: 1491728 - RNA, 19 nt, Homo sapiens
  misc_RNA (1)...(19): siRNA sense strand
gagaguaugugggcagaag

SEQ ID NO: 1491729 - RNA, 19 nt, Homo sapiens
  misc_RNA (1)...(19): siRNA sense strand
cauuuaaagaggagaguua

SEQ ID NO: 1491730 - RNA, 19 nt, Homo sapiens
  misc_RNA (1)...(19): siRNA sense strand
guuggaaacauauaucuug

SEQ ID NO: 1491731 - RNA, 19 nt, Homo sapiens
  misc_RNA (1)...(19): siRNA sense strand
gaagaugcagcuccaugga

SEQ ID NO: 1491732 - RNA, 19 nt, Homo sapiens
  misc_RNA (1)...(19): siRNA sense strand
gcaaacauggaugagagua

SEQ ID NO: 1491733 - RNA, 19 nt, Homo sapiens
  misc_RNA (1)...(19): siRNA sense strand
cuaaucuguucucuguaua

SEQ ID NO: 1491734 - RNA, 19 nt, Homo sapiens
  misc_RNA (1)...(19): siRNA sense strand
guaugugggcagaagaaua

SEQ ID NO: 1491735 - RNA, 19 nt, Homo sapiens
  misc_RNA (1)...(19): siRNA sense strand
gacuguaacuacccuaugg

SEQ ID NO: 1491736 - RNA, 19 nt, Homo sapiens
  misc_RNA (1)...(19): siRNA sense strand
gagugucauucuggugaua

SEQ ID NO: 1491737 - RNA, 19 nt, Homo sapiens
  misc_RNA (1)...(19): siRNA sense strand
uaacuacccuauggagcuu

SEQ ID NO: 1491738 - RNA, 19 nt, Homo sapiens
  misc_RNA (1)...(19): siRNA sense strand
uaugugggcagaagaauau

SEQ ID NO: 1491739 - RNA, 19 nt, Homo sapiens
  misc_RNA (1)...(19): siRNA sense strand
augcuaaucuguucucugu

SEQ ID NO: 1491740 - RNA, 19 nt, Homo sapiens
  misc_RNA (1)...(19): siRNA sense strand
aggaauacaguacaucuuu

SEQ ID NO: 1491741 - RNA, 19 nt, Homo sapiens
  misc_RNA (1)...(19): siRNA sense strand
ggaaacaugacugggaaga

SEQ ID NO: 1491742 - RNA, 19 nt, Homo sapiens
  misc_RNA (1)...(19): siRNA sense strand
ggcagaagaauaugaagga

SEQ ID NO: 1491743 - RNA, 19 nt, Homo sapiens
  misc_RNA (1)...(19): siRNA sense strand
cagaagaauaugaaggaaa

SEQ ID NO: 1491744 - RNA, 19 nt, Homo sapiens
  misc_RNA (1)...(19): siRNA sense strand
ggaagaugaaauugaggaa

SEQ ID NO: 1491745 - RNA, 19 nt, Homo sapiens
  misc_RNA (1)...(19): siRNA sense strand
gaagaugaaauugaggaau

SEQ ID NO: 1491746 - RNA, 19 nt, Homo sapiens
  misc_RNA (1)...(19): siRNA sense strand
acucauucauccuaauuug

SEQ ID NO: 1491747 - RNA, 19 nt, Homo sapiens
  misc_RNA (1)...(19): siRNA sense strand
cgacucauucauccuaauu

SEQ ID NO: 1491748 - RNA, 19 nt, Homo sapiens
  misc_RNA (1)...(19): siRNA sense strand
ugcaaacucugaucuccuu

SEQ ID NO: 1491749 - RNA, 19 nt, Homo sapiens
  misc_RNA (1)...(19): siRNA sense strand
cauaaaagcuuugcaaacu

SEQ ID NO: 1491750 - RNA, 19 nt, Homo sapiens
  misc_RNA (1)...(19): siRNA sense strand
ccugauaucuuuucugaug

SEQ ID NO: 1491751 - RNA, 19 nt, Homo sapiens
  misc_RNA (1)...(19): siRNA sense strand
ggagugucauucuggugau

SEQ ID NO: 1491752 - RNA, 19 nt, Homo sapiens
  misc_RNA (1)...(19): siRNA sense strand
gaaccaagaagcuaaaaca

SEQ ID NO: 1491753 - RNA, 19 nt, Homo sapiens
  misc_RNA (1)...(19): siRNA sense strand
cgcaagaucucagcaccaa

SEQ ID NO: 1491754 - RNA, 19 nt, Homo sapiens
  misc_RNA (1)...(19): siRNA sense strand
gguuugcucugggcauuau

SEQ ID NO: 1491755 - RNA, 19 nt, Homo sapiens
  misc_RNA (1)...(19): siRNA sense strand
caaacauggaugagaguau

SEQ ID NO: 1491756 - RNA, 19 nt, Homo sapiens
  misc_RNA (1)...(19): siRNA sense strand
gaaacaugacugggaagau

SEQ ID NO: 1491757 - RNA, 19 nt, Homo sapiens
  misc_RNA (1)...(19): siRNA sense strand
gaguaugugggcagaagaa

SEQ ID NO: 1491758 - RNA, 19 nt, Homo sapiens
  misc_RNA (1)...(19): siRNA sense strand
cuucauagcacugguaaau

SEQ ID NO: 1491759 - RNA, 19 nt, Homo sapiens
  misc_RNA (1)...(19): siRNA sense strand
cagcaccaagguccacaua

SEQ ID NO: 1491760 - RNA, 19 nt, Homo sapiens
  misc_RNA (1)...(19): siRNA sense strand
gguauuuaacuguguugaa

SEQ ID NO: 1491761 - RNA, 19 nt, Homo sapiens
  misc_RNA (1)...(19): siRNA sense strand
uuaaagaggagaguuagga

SEQ ID NO: 1491762 - RNA, 19 nt, Homo sapiens
  misc_RNA (1)...(19): siRNA sense strand
ucugaucuccuuccucuug

SEQ ID NO: 1491763 - RNA, 19 nt, Homo sapiens
  misc_RNA (1)...(19): siRNA sense strand
gaggaauacaguacaucuu

SEQ ID NO: 1491764 - RNA, 19 nt, Homo sapiens
  misc_RNA (1)...(19): siRNA sense strand
uaaccaaccauuucagcau

SEQ ID NO: 1491765 - RNA, 19 nt, Homo sapiens
  misc_RNA (1)...(19): siRNA sense strand
uugacugggugaagagaaa

SEQ ID NO: 1491766 - RNA, 19 nt, Homo sapiens
  misc_RNA (1)...(19): siRNA sense strand
gcugcggaaugacccaguu

SEQ ID NO: 1491767 - RNA, 19 nt, Homo sapiens
  misc_RNA (1)...(19): siRNA sense strand
ccuaggaggcugcggaaug

SEQ ID NO: 1491768 - RNA, 19 nt, Homo sapiens
  misc_RNA (1)...(19): siRNA sense strand
ucggaaacuuugccaaugg

SEQ ID NO: 1491769 - RNA, 19 nt, Homo sapiens
  misc_RNA (1)...(19): siRNA sense strand
cuaaaacacaccuuucuuu

SEQ ID NO: 1491770 - RNA, 19 nt, Homo sapiens
  misc_RNA (1)...(19): siRNA sense strand
caauuucuccaaccuucuu

SEQ ID NO: 1491771 - RNA, 19 nt, Homo sapiens
  misc_RNA (1)...(19): siRNA sense strand
gaagcuaaaacacaccuuu

SEQ ID NO: 1491772 - RNA, 19 nt, Homo sapiens
  misc_RNA (1)...(19): siRNA sense strand
ucauucauccuaauuugga

SEQ ID NO: 1491773 - RNA, 19 nt, Homo sapiens
  misc_RNA (1)...(19): siRNA sense strand
cucugucccugauaucuuu

SEQ ID NO: 1491774 - RNA, 19 nt, Homo sapiens
  misc_RNA (1)...(19): siRNA sense strand
ugaaauugaggaauacagu

SEQ ID NO: 1491775 - RNA, 19 nt, Homo sapiens
  misc_RNA (1)...(19): siRNA sense strand
guuggggacuuugauauuu

SEQ ID NO: 1491776 - RNA, 19 nt, Homo sapiens
  misc_RNA (1)...(19): siRNA sense strand
gaucuccucagcugaccaa

SEQ ID NO: 1491777 - RNA, 19 nt, Homo sapiens
  misc_RNA (1)...(19): siRNA sense strand
uggagaaccaagaagcuaa

SEQ ID NO: 1491778 - RNA, 19 nt, Homo sapiens
  misc_RNA (1)...(19): siRNA sense strand
gucaucuucuuguggcaaa

SEQ ID NO: 1491779 - RNA, 19 nt, Homo sapiens
  misc_RNA (1)...(19): siRNA sense strand
cugggaagaugaaauugag

SEQ ID NO: 1491780 - RNA, 19 nt, Homo sapiens
  misc_RNA (1)...(19): siRNA sense strand
uuagcaaggcuguuggaaa

SEQ ID NO: 1491781 - RNA, 19 nt, Homo sapiens
  misc_RNA (1)...(19): siRNA sense strand
uucauacccuuuacucugu

SEQ ID NO: 1491782 - RNA, 19 nt, Homo sapiens
  misc_RNA (1)...(19): siRNA sense strand
cauauuugacuguaacuac

SEQ ID NO: 1491783 - RNA, 19 nt, Homo sapiens
  misc_RNA (1)...(19): siRNA sense strand
gacccaguugucaugguua

SEQ ID NO: 1491784 - RNA, 19 nt, Homo sapiens
  misc_RNA (1)...(19): siRNA sense strand
uaaaagcuuugcaaacucu

SEQ ID NO: 1491785 - RNA, 19 nt, Homo sapiens
  misc_RNA (1)...(19): siRNA sense strand
ucuccuuccucuuguuaug

SEQ ID NO: 1491786 - RNA, 19 nt, Homo sapiens
  misc_RNA (1)...(19): siRNA sense strand
gcuaaccucagcauauuuu

SEQ ID NO: 1491787 - RNA, 19 nt, Homo sapiens
  misc_RNA (1)...(19): siRNA sense strand
gacucauucauccuaauuu

SEQ ID NO: 1491788 - RNA, 19 nt, Homo sapiens
  misc_RNA (1)...(19): siRNA sense strand
ccuaaucguuucgguuugg

SEQ ID NO: 1491789 - RNA, 19 nt, Homo sapiens
  misc_RNA (1)...(19): siRNA sense strand
gagaguuaggagugucauu

SEQ ID NO: 1491790 - RNA, 19 nt, Homo sapiens
  misc_RNA (1)...(19): siRNA sense strand
cucugggcauuauuauuaa

SEQ ID NO: 1491791 - RNA, 19 nt, Homo sapiens
  misc_RNA (1)...(19): siRNA sense strand
agaauaugaaggaaacaug

SEQ ID NO: 1491792 - RNA, 19 nt, Homo sapiens
  misc_RNA (1)...(19): siRNA sense strand
ggagcuucauacccuuuac

SEQ ID NO: 1491793 - RNA, 19 nt, Homo sapiens
  misc_RNA (1)...(19): siRNA sense strand
uuuauuugcucaagauugc

SEQ ID NO: 1491794 - RNA, 19 nt, Homo sapiens
  misc_RNA (1)...(19): siRNA sense strand
ccugaggacuucuguuuaa

SEQ ID NO: 1491795 - RNA, 19 nt, Homo sapiens
  misc_RNA (1)...(19): siRNA sense strand
gaccaccgcucaaggauca

SEQ ID NO: 1491796 - RNA, 19 nt, Homo sapiens
  misc_RNA (1)...(19): siRNA sense strand
gacaaagucucugaaacug

SEQ ID NO: 1491797 - RNA, 19 nt, Homo sapiens
  misc_RNA (1)...(19): siRNA sense strand
cauggaaccuagcuacuuc

SEQ ID NO: 1491798 - RNA, 19 nt, Homo sapiens
  misc_RNA (1)...(19): siRNA sense strand
gggaggagcccacaaacug

SEQ ID NO: 1491799 - RNA, 19 nt, Homo sapiens
  misc_RNA (1)...(19): siRNA sense strand
ggaggagguuggugacagu

SEQ ID NO: 1491800 - RNA, 19 nt, Homo sapiens
  misc_RNA (1)...(19): siRNA sense strand
agacagagcagcaccugaa

SEQ ID NO: 1491801 - RNA, 19 nt, Homo sapiens
  misc_RNA (1)...(19): siRNA sense strand
gaaggucgacuaaaacaaa

SEQ ID NO: 1491802 - RNA, 19 nt, Homo sapiens
  misc_RNA (1)...(19): siRNA sense strand
ggauauggaggcuucagaa

SEQ ID NO: 1491803 - RNA, 19 nt, Homo sapiens
  misc_RNA (1)...(19): siRNA sense strand
gaggacuucuguuuaaagg

SEQ ID NO: 1491804 - RNA, 19 nt, Homo sapiens
  misc_RNA (1)...(19): siRNA sense strand
gcaagccggacaaggauau

SEQ ID NO: 1491805 - RNA, 19 nt, Homo sapiens
  misc_RNA (1)...(19): siRNA sense strand
gcaggagcuucugaacaug

SEQ ID NO: 1491806 - RNA, 19 nt, Homo sapiens
  misc_RNA (1)...(19): siRNA sense strand
gggcgcaguuucgcucuug

SEQ ID NO: 1491807 - RNA, 19 nt, Homo sapiens
  misc_RNA (1)...(19): siRNA sense strand
uccacgagcugcugcaaga

SEQ ID NO: 1491808 - RNA, 19 nt, Homo sapiens
  misc_RNA (1)...(19): siRNA sense strand
uauggaggcuucagaacca

SEQ ID NO: 1491809 - RNA, 19 nt, Homo sapiens
  misc_RNA (1)...(19): siRNA sense strand
cagagcagcaccugaacaa

SEQ ID NO: 1491810 - RNA, 19 nt, Homo sapiens
  misc_RNA (1)...(19): siRNA sense strand
agcaggagcuucugaacau

SEQ ID NO: 1491811 - RNA, 19 nt, Homo sapiens
  misc_RNA (1)...(19): siRNA sense strand
cacgagcugcugcaagaua

SEQ ID NO: 1491812 - RNA, 19 nt, Homo sapiens
  misc_RNA (1)...(19): siRNA sense strand
gcaccugaacaaccugaug

SEQ ID NO: 1491813 - RNA, 19 nt, Homo sapiens
  misc_RNA (1)...(19): siRNA sense strand
caggagcuucugaacauga

SEQ ID NO: 1491814 - RNA, 19 nt, Homo sapiens
  misc_RNA (1)...(19): siRNA sense strand
gcacagagacauggaaccu

SEQ ID NO: 1491815 - RNA, 19 nt, Homo sapiens
  misc_RNA (1)...(19): siRNA sense strand
cugaggacuucuguuuaaa

SEQ ID NO: 1491816 - RNA, 19 nt, Homo sapiens
  misc_RNA (1)...(19): siRNA sense strand
ugcuggagguggagacaaa

SEQ ID NO: 1491817 - RNA, 19 nt, Homo sapiens
  misc_RNA (1)...(19): siRNA sense strand
cagcaggagcuucugaaca

SEQ ID NO: 1491818 - RNA, 19 nt, Homo sapiens
  misc_RNA (1)...(19): siRNA sense strand
auagcaagccggacaagga

SEQ ID NO: 1491819 - RNA, 19 nt, Homo sapiens
  misc_RNA (1)...(19): siRNA sense strand
ggagcacagagacauggaa

SEQ ID NO: 1491820 - RNA, 19 nt, Homo sapiens
  misc_RNA (1)...(19): siRNA sense strand
cucugaaacuggaacauuc

SEQ ID NO: 1491821 - RNA, 19 nt, Homo sapiens
  misc_RNA (1)...(19): siRNA sense strand
ggaggacgaggaggagguu

SEQ ID NO: 1491822 - RNA, 19 nt, Homo sapiens
  misc_RNA (1)...(19): siRNA sense strand
ccacaaacuggagcacaga

SEQ ID NO: 1491823 - RNA, 19 nt, Homo sapiens
  misc_RNA (1)...(19): siRNA sense strand
ucucugaaacuggaacauu

SEQ ID NO: 1491824 - RNA, 19 nt, Homo sapiens
  misc_RNA (1)...(19): siRNA sense strand
gggagaagcugaaauugga

SEQ ID NO: 1491825 - RNA, 19 nt, Homo sapiens
  misc_RNA (1)...(19): siRNA sense strand
agaaagaguugaagggaaa

SEQ ID NO: 1491826 - RNA, 19 nt, Homo sapiens
  misc_RNA (1)...(19): siRNA sense strand
uaaccuggcugacuuggaa

SEQ ID NO: 1491827 - RNA, 19 nt, Homo sapiens
  misc_RNA (1)...(19): siRNA sense strand
gaagaagaaacuugaaaga

SEQ ID NO: 1491828 - RNA, 19 nt, Homo sapiens
  misc_RNA (1)...(19): siRNA sense strand
ucaaacagcugcuuaacca

SEQ ID NO: 1491829 - RNA, 19 nt, Homo sapiens
  misc_RNA (1)...(19): siRNA sense strand
gaaauuggaagaagagaag

SEQ ID NO: 1491830 - RNA, 19 nt, Homo sapiens
  misc_RNA (1)...(19): siRNA sense strand
guugguaaguggagaaaga

SEQ ID NO: 1491831 - RNA, 19 nt, Homo sapiens
  misc_RNA (1)...(19): siRNA sense strand
gagaagaagaagaaacuug

SEQ ID NO: 1491832 - RNA, 19 nt, Homo sapiens
  misc_RNA (1)...(19): siRNA sense strand
gggaaaguguugggauuug

SEQ ID NO: 1491833 - RNA, 19 nt, Homo sapiens
  misc_RNA (1)...(19): siRNA sense strand
gaacgcacaggauaaggaa

SEQ ID NO: 1491834 - RNA, 19 nt, Homo sapiens
  misc_RNA (1)...(19): siRNA sense strand
gcacugggccugucugaag

SEQ ID NO: 1491835 - RNA, 19 nt, Homo sapiens
  misc_RNA (1)...(19): siRNA sense strand
gaagaagaagaaacuugaa

SEQ ID NO: 1491836 - RNA, 19 nt, Homo sapiens
  misc_RNA (1)...(19): siRNA sense strand
gaagaagagaagaagaaga

SEQ ID NO: 1491837 - RNA, 19 nt, Homo sapiens
  misc_RNA (1)...(19): siRNA sense strand
aagaagagaagaagaagaa

SEQ ID NO: 1491838 - RNA, 19 nt, Homo sapiens
  misc_RNA (1)...(19): siRNA sense strand
cuacaaagccaugaagcua

SEQ ID NO: 1491839 - RNA, 19 nt, Homo sapiens
  misc_RNA (1)...(19): siRNA sense strand
uggauaaccuggcugacuu

SEQ ID NO: 1491840 - RNA, 19 nt, Homo sapiens
  misc_RNA (1)...(19): siRNA sense strand
agaagaagaagaaacuuga

SEQ ID NO: 1491841 - RNA, 19 nt, Homo sapiens
  misc_RNA (1)...(19): siRNA sense strand
ggaaaguguugggauuugg

SEQ ID NO: 1491842 - RNA, 19 nt, Homo sapiens
  misc_RNA (1)...(19): siRNA sense strand
aggaguaccugauugacaa

SEQ ID NO: 1491843 - RNA, 19 nt, Homo sapiens
  misc_RNA (1)...(19): siRNA sense strand
guaaguggagaaagaguug

SEQ ID NO: 1491844 - RNA, 19 nt, Homo sapiens
  misc_RNA (1)...(19): siRNA sense strand
gauuuaacaguaccagauu

SEQ ID NO: 1491845 - RNA, 19 nt, Homo sapiens
  misc_RNA (1)...(19): siRNA sense strand
gaaaguguugggauuugga

SEQ ID NO: 1491846 - RNA, 19 nt, Homo sapiens
  misc_RNA (1)...(19): siRNA sense strand
gaagagaagaagaagaaac

SEQ ID NO: 1491847 - RNA, 19 nt, Homo sapiens
  misc_RNA (1)...(19): siRNA sense strand
aagggaaaguguugggauu

SEQ ID NO: 1491848 - RNA, 19 nt, Homo sapiens
  misc_RNA (1)...(19): siRNA sense strand
caucagcauucagcaguug

SEQ ID NO: 1491849 - RNA, 19 nt, Homo sapiens
  misc_RNA (1)...(19): siRNA sense strand
gccuggagauguuccugaa

SEQ ID NO: 1491850 - RNA, 19 nt, Homo sapiens
  misc_RNA (1)...(19): siRNA sense strand
ugaagcuacugcugcucua

SEQ ID NO: 1491851 - RNA, 19 nt, Homo sapiens
  misc_RNA (1)...(19): siRNA sense strand
uggaagaagagaagaagaa

SEQ ID NO: 1491852 - RNA, 19 nt, Homo sapiens
  misc_RNA (1)...(19): siRNA sense strand
gguaaguggagaaagaguu

SEQ ID NO: 1491853 - RNA, 19 nt, Homo sapiens
  misc_RNA (1)...(19): siRNA sense strand
gaagcugaaauuggaagaa

SEQ ID NO: 1491854 - RNA, 19 nt, Homo sapiens
  misc_RNA (1)...(19): siRNA sense strand
ggaagaagagaagaagaag

SEQ ID NO: 1491855 - RNA, 19 nt, Homo sapiens
  misc_RNA (1)...(19): siRNA sense strand
guugggauuuggacaugga

SEQ ID NO: 1491856 - RNA, 19 nt, Homo sapiens
  misc_RNA (1)...(19): siRNA sense strand
ggauaaccuggcugacuug

SEQ ID NO: 1491857 - RNA, 19 nt, Homo sapiens
  misc_RNA (1)...(19): siRNA sense strand
ggagaagcugaaauuggaa

SEQ ID NO: 1491858 - RNA, 19 nt, Homo sapiens
  misc_RNA (1)...(19): siRNA sense strand
gcauucagcaguugguaag

SEQ ID NO: 1491859 - RNA, 19 nt, Homo sapiens
  misc_RNA (1)...(19): siRNA sense strand
acaaagccaugaagcuacu

SEQ ID NO: 1491860 - RNA, 19 nt, Homo sapiens
  misc_RNA (1)...(19): siRNA sense strand
ugaaauuggaagaagagaa

SEQ ID NO: 1491861 - RNA, 19 nt, Homo sapiens
  misc_RNA (1)...(19): siRNA sense strand
gcaguugguaaguggagaa

SEQ ID NO: 1491862 - RNA, 19 nt, Homo sapiens
  misc_RNA (1)...(19): siRNA sense strand
cugcugagaaccaggagua

SEQ ID NO: 1491863 - RNA, 19 nt, Homo sapiens
  misc_RNA (1)...(19): siRNA sense strand
ggaaaacuugguucaaaga

SEQ ID NO: 1491864 - RNA, 19 nt, Homo sapiens
  misc_RNA (1)...(19): siRNA sense strand
aagcugaaauuggaagaag

SEQ ID NO: 1491865 - RNA, 19 nt, Homo sapiens
  misc_RNA (1)...(19): siRNA sense strand
gcagcuacaaagccaugaa

SEQ ID NO: 1491866 - RNA, 19 nt, Homo sapiens
  misc_RNA (1)...(19): siRNA sense strand
gacaucuggucauccucaa

SEQ ID NO: 1491867 - RNA, 19 nt, Homo sapiens
  misc_RNA (1)...(19): siRNA sense strand
aguaccugauugacaagua

SEQ ID NO: 1491868 - RNA, 19 nt, Homo sapiens
  misc_RNA (1)...(19): siRNA sense strand
ucaucagcauucagcaguu

SEQ ID NO: 1491869 - RNA, 19 nt, Homo sapiens
  misc_RNA (1)...(19): siRNA sense strand
gaagcuacugcugcucuau

SEQ ID NO: 1491870 - RNA, 19 nt, Homo sapiens
  misc_RNA (1)...(19): siRNA sense strand
agaagaagaaacuugaaag

SEQ ID NO: 1491871 - RNA, 19 nt, Homo sapiens
  misc_RNA (1)...(19): siRNA sense strand
ugaacgcacaggauaagga

SEQ ID NO: 1491872 - RNA, 19 nt, Homo sapiens
  misc_RNA (1)...(19): siRNA sense strand
gggauuuggacauggaguu

SEQ ID NO: 1491873 - RNA, 19 nt, Homo sapiens
  misc_RNA (1)...(19): siRNA sense strand
gaguugaagggaaaguguu

SEQ ID NO: 1491874 - RNA, 19 nt, Homo sapiens
  misc_RNA (1)...(19): siRNA sense strand
cggaggacaucuggucauc

SEQ ID NO: 1491875 - RNA, 19 nt, Homo sapiens
  misc_RNA (1)...(19): siRNA sense strand
aagagaagaagaagaaacu

SEQ ID NO: 1491876 - RNA, 19 nt, Homo sapiens
  misc_RNA (1)...(19): siRNA sense strand
cccgggagaagcugaaauu

SEQ ID NO: 1491877 - RNA, 19 nt, Homo sapiens
  misc_RNA (1)...(19): siRNA sense strand
gcugaaauuggaagaagag

SEQ ID NO: 1491878 - RNA, 19 nt, Homo sapiens
  misc_RNA (1)...(19): siRNA sense strand
gaugaaagcugcauggaaa

SEQ ID NO: 1491879 - RNA, 19 nt, Homo sapiens
  misc_RNA (1)...(19): siRNA sense strand
caacagaugucagauauau

SEQ ID NO: 1491880 - RNA, 19 nt, Homo sapiens
  misc_RNA (1)...(19): siRNA sense strand
uaacagagcaugugaauug

SEQ ID NO: 1491881 - RNA, 19 nt, Homo sapiens
  misc_RNA (1)...(19): siRNA sense strand
ggaccuaauuacuuuguua

SEQ ID NO: 1491882 - RNA, 19 nt, Homo sapiens
  misc_RNA (1)...(19): siRNA sense strand
gagcuuagagucaaaguua

SEQ ID NO: 1491883 - RNA, 19 nt, Homo sapiens
  misc_RNA (1)...(19): siRNA sense strand
gaaggaauuugacauugaa

SEQ ID NO: 1491884 - RNA, 19 nt, Homo sapiens
  misc_RNA (1)...(19): siRNA sense strand
ggaaguaaacagugaauuu

SEQ ID NO: 1491885 - RNA, 19 nt, Homo sapiens
  misc_RNA (1)...(19): siRNA sense strand
gcucggaccuaauuacuuu

SEQ ID NO: 1491886 - RNA, 19 nt, Homo sapiens
  misc_RNA (1)...(19): siRNA sense strand
gcaguuggauuguggauga

SEQ ID NO: 1491887 - RNA, 19 nt, Homo sapiens
  misc_RNA (1)...(19): siRNA sense strand
gaagauaacauaccggauu

SEQ ID NO: 1491888 - RNA, 19 nt, Homo sapiens
  misc_RNA (1)...(19): siRNA sense strand
ucaagaugcuggauuauga

SEQ ID NO: 1491889 - RNA, 19 nt, Homo sapiens
  misc_RNA (1)...(19): siRNA sense strand
ggagaagucugcaccaugu

SEQ ID NO: 1491890 - RNA, 19 nt, Homo sapiens
  misc_RNA (1)...(19): siRNA sense strand
ugauaacgcuccagucuuu

SEQ ID NO: 1491891 - RNA, 19 nt, Homo sapiens
  misc_RNA (1)...(19): siRNA sense strand
gcugagaucugcuuaaaca

SEQ ID NO: 1491892 - RNA, 19 nt, Homo sapiens
  misc_RNA (1)...(19): siRNA sense strand
gaagaaccaucugcauuga

SEQ ID NO: 1491893 - RNA, 19 nt, Homo sapiens
  misc_RNA (1)...(19): siRNA sense strand
gcaccuaacauucagcuua

SEQ ID NO: 1491894 - RNA, 19 nt, Homo sapiens
  misc_RNA (1)...(19): siRNA sense strand
gaugucagaucaacaaaug

SEQ ID NO: 1491895 - RNA, 19 nt, Homo sapiens
  misc_RNA (1)...(19): siRNA sense strand
ggauggagcugcagaugga

SEQ ID NO: 1491896 - RNA, 19 nt, Homo sapiens
  misc_RNA (1)...(19): siRNA sense strand
gaacaagcaccuaacauuc

SEQ ID NO: 1491897 - RNA, 19 nt, Homo sapiens
  misc_RNA (1)...(19): siRNA sense strand
guauugagguuccugauau

SEQ ID NO: 1491898 - RNA, 19 nt, Homo sapiens
  misc_RNA (1)...(19): siRNA sense strand
acacagaaauugaaccauu

SEQ ID NO: 1491899 - RNA, 19 nt, Homo sapiens
  misc_RNA (1)...(19): siRNA sense strand
gcacccauguucauucuga

SEQ ID NO: 1491900 - RNA, 19 nt, Homo sapiens
  misc_RNA (1)...(19): siRNA sense strand
cugguuggcucaauauuua

SEQ ID NO: 1491901 - RNA, 19 nt, Homo sapiens
  misc_RNA (1)...(19): siRNA sense strand
gaugggaauugguucgaua

SEQ ID NO: 1491902 - RNA, 19 nt, Homo sapiens
  misc_RNA (1)...(19): siRNA sense strand
gaaaugaugggaauugguu

SEQ ID NO: 1491903 - RNA, 19 nt, Homo sapiens
  misc_RNA (1)...(19): siRNA sense strand
cagcagagauccuggcuau

SEQ ID NO: 1491904 - RNA, 19 nt, Homo sapiens
  misc_RNA (1)...(19): siRNA sense strand
gugaugagcggcaauauuu

SEQ ID NO: 1491905 - RNA, 19 nt, Homo sapiens
  misc_RNA (1)...(19): siRNA sense strand
gaaguugaauuccaagaag

SEQ ID NO: 1491906 - RNA, 19 nt, Homo sapiens
  misc_RNA (1)...(19): siRNA sense strand
ugaaggaauuugacauuga

SEQ ID NO: 1491907 - RNA, 19 nt, Homo sapiens
  misc_RNA (1)...(19): siRNA sense strand
gugcaacccacuacaauua

SEQ ID NO: 1491908 - RNA, 19 nt, Homo sapiens
  misc_RNA (1)...(19): siRNA sense strand
gaacugauacgauuacaag

SEQ ID NO: 1491909 - RNA, 19 nt, Homo sapiens
  misc_RNA (1)...(19): siRNA sense strand
gagagaaggaccugcauuu

SEQ ID NO: 1491910 - RNA, 19 nt, Homo sapiens
  misc_RNA (1)...(19): siRNA sense strand
gaaucgaaccagaagauaa

SEQ ID NO: 1491911 - RNA, 19 nt, Homo sapiens
  misc_RNA (1)...(19): siRNA sense strand
gcaacccacuacaauuauu

SEQ ID NO: 1491912 - RNA, 19 nt, Homo sapiens
  misc_RNA (1)...(19): siRNA sense strand
cacaaauggugcaguuaua

SEQ ID NO: 1491913 - RNA, 19 nt, Homo sapiens
  misc_RNA (1)...(19): siRNA sense strand
gaacuggugagauacaauu

SEQ ID NO: 1491914 - RNA, 19 nt, Homo sapiens
  misc_RNA (1)...(19): siRNA sense strand
gcacauauacagccauaga

SEQ ID NO: 1491915 - RNA, 19 nt, Homo sapiens
  misc_RNA (1)...(19): siRNA sense strand
gagugugacuguagaauca

SEQ ID NO: 1491916 - RNA, 19 nt, Homo sapiens
  misc_RNA (1)...(19): siRNA sense strand
gaaauucaagugaugcaaa

SEQ ID NO: 1491917 - RNA, 19 nt, Homo sapiens
  misc_RNA (1)...(19): siRNA sense strand
uucaagaacuggugagaua

SEQ ID NO: 1491918 - RNA, 19 nt, Homo sapiens
  misc_RNA (1)...(19): siRNA sense strand
agaccaagcuggaguuuca

SEQ ID NO: 1491919 - RNA, 19 nt, Homo sapiens
  misc_RNA (1)...(19): siRNA sense strand
gaaaauggcacuacaaaau

SEQ ID NO: 1491920 - RNA, 19 nt, Homo sapiens
  misc_RNA (1)...(19): siRNA sense strand
acagggaugugucaaauau

SEQ ID NO: 1491921 - RNA, 19 nt, Homo sapiens
  misc_RNA (1)...(19): siRNA sense strand
gagaaggaccugcauuuca

SEQ ID NO: 1491922 - RNA, 19 nt, Homo sapiens
  misc_RNA (1)...(19): siRNA sense strand
gcaguuauaugccugugau

SEQ ID NO: 1491923 - RNA, 19 nt, Homo sapiens
  misc_RNA (1)...(19): siRNA sense strand
gcagagauccuggcuauag

SEQ ID NO: 1491924 - RNA, 19 nt, Homo sapiens
  misc_RNA (1)...(19): siRNA sense strand
ggacagagagcaacacagu

SEQ ID NO: 1491925 - RNA, 19 nt, Homo sapiens
  misc_RNA (1)...(19): siRNA sense strand
gaugucagauauaucauag

SEQ ID NO: 1491926 - RNA, 19 nt, Homo sapiens
  misc_RNA (1)...(19): siRNA sense strand
gaugcuggauuaugaacaa

SEQ ID NO: 1491927 - RNA, 19 nt, Homo sapiens
  misc_RNA (1)...(19): siRNA sense strand
gaaauuaacaucacuucag

SEQ ID NO: 1491928 - RNA, 19 nt, Homo sapiens
  misc_RNA (1)...(19): siRNA sense strand
gcaccugucuaugauauuc

SEQ ID NO: 1491929 - RNA, 19 nt, Homo sapiens
  misc_RNA (1)...(19): siRNA sense strand
gaaggacagcuauaacaga

SEQ ID NO: 1491930 - RNA, 19 nt, Homo sapiens
  misc_RNA (1)...(19): siRNA sense strand
guuagcagauuacaacaau

SEQ ID NO: 1491931 - RNA, 19 nt, Homo sapiens
  misc_RNA (1)...(19): siRNA sense strand
aagauaacauaccggauuu

SEQ ID NO: 1491932 - RNA, 19 nt, Homo sapiens
  misc_RNA (1)...(19): siRNA sense strand
gggauauuauugugacuga

SEQ ID NO: 1491933 - RNA, 19 nt, Homo sapiens
  misc_RNA (1)...(19): siRNA sense strand
ggaccugcauuucauccaa

SEQ ID NO: 1491934 - RNA, 19 nt, Homo sapiens
  misc_RNA (1)...(19): siRNA sense strand
gaaaggccucuugagcuua

SEQ ID NO: 1491935 - RNA, 19 nt, Homo sapiens
  misc_RNA (1)...(19): siRNA sense strand
agaaaggccucuugagcuu

SEQ ID NO: 1491936 - RNA, 19 nt, Homo sapiens
  misc_RNA (1)...(19): siRNA sense strand
gaugaagaaggcacugaua

SEQ ID NO: 1491937 - RNA, 19 nt, Homo sapiens
  misc_RNA (1)...(19): siRNA sense strand
gauuguggaugacuuagau

SEQ ID NO: 1491938 - RNA, 19 nt, Homo sapiens
  misc_RNA (1)...(19): siRNA sense strand
ugaacaagcaccuaacauu

SEQ ID NO: 1491939 - RNA, 19 nt, Homo sapiens
  misc_RNA (1)...(19): siRNA sense strand
guaacacgauacaguaaca

SEQ ID NO: 1491940 - RNA, 19 nt, Homo sapiens
  misc_RNA (1)...(19): siRNA sense strand
caucaguccuuaucucugu

SEQ ID NO: 1491941 - RNA, 19 nt, Homo sapiens
  misc_RNA (1)...(19): siRNA sense strand
gauccuggcuauagaugau

SEQ ID NO: 1491942 - RNA, 19 nt, Homo sapiens
  misc_RNA (1)...(19): siRNA sense strand
guggaugacuuagaugaaa

SEQ ID NO: 1491943 - RNA, 19 nt, Homo sapiens
  misc_RNA (1)...(19): siRNA sense strand
gcaauaguagcacgacuga

SEQ ID NO: 1491944 - RNA, 19 nt, Homo sapiens
  misc_RNA (1)...(19): siRNA sense strand
ucaagggaauauuugugua

SEQ ID NO: 1491945 - RNA, 19 nt, Homo sapiens
  misc_RNA (1)...(19): siRNA sense strand
guacugaccucccuuugcu

SEQ ID NO: 1491946 - RNA, 19 nt, Homo sapiens
  misc_RNA (1)...(19): siRNA sense strand
aaacagauccacaaaccaa

SEQ ID NO: 1491947 - RNA, 19 nt, Homo sapiens
  misc_RNA (1)...(19): siRNA sense strand
caagugaugcaaaugauga

SEQ ID NO: 1491948 - RNA, 19 nt, Homo sapiens
  misc_RNA (1)...(19): siRNA sense strand
guccuuaucucuguuaaug

SEQ ID NO: 1491949 - RNA, 19 nt, Homo sapiens
  misc_RNA (1)...(19): siRNA sense strand
cgaaccagaagauaacaua

SEQ ID NO: 1491950 - RNA, 19 nt, Homo sapiens
  misc_RNA (1)...(19): siRNA sense strand
uuguguaccugcugaguua

SEQ ID NO: 1491951 - RNA, 19 nt, Homo sapiens
  misc_RNA (1)...(19): siRNA sense strand
caaacagucagaagacaaa

SEQ ID NO: 1491952 - RNA, 19 nt, Homo sapiens
  misc_RNA (1)...(19): siRNA sense strand
cggcaauccuuacggcuaa

SEQ ID NO: 1491953 - RNA, 19 nt, Homo sapiens
  misc_RNA (1)...(19): siRNA sense strand
ucuuaugggucuccguuua

SEQ ID NO: 1491954 - RNA, 19 nt, Homo sapiens
  misc_RNA (1)...(19): siRNA sense strand
uuaauucucucuggaaaug

SEQ ID NO: 1491955 - RNA, 19 nt, Homo sapiens
  misc_RNA (1)...(19): siRNA sense strand
agaaggaccugcauuucau

SEQ ID NO: 1491956 - RNA, 19 nt, Homo sapiens
  misc_RNA (1)...(19): siRNA sense strand
gaugcagucuuggagaauu

SEQ ID NO: 1491957 - RNA, 19 nt, Homo sapiens
  misc_RNA (1)...(19): siRNA sense strand
gugaaggaauuugacauug

SEQ ID NO: 1491958 - RNA, 19 nt, Homo sapiens
  misc_RNA (1)...(19): siRNA sense strand
cauauacagccauagauuu

SEQ ID NO: 1491959 - RNA, 19 nt, Homo sapiens
  misc_RNA (1)...(19): siRNA sense strand
ggauugaucgaccaccaua

SEQ ID NO: 1491960 - RNA, 19 nt, Homo sapiens
  misc_RNA (1)...(19): siRNA sense strand
uaauggcaccugucuauga

SEQ ID NO: 1491961 - RNA, 19 nt, Homo sapiens
  misc_RNA (1)...(19): siRNA sense strand
ccuuaucucuguuaaugaa

SEQ ID NO: 1491962 - RNA, 19 nt, Homo sapiens
  misc_RNA (1)...(19): siRNA sense strand
agagaaauaacuccacuuu

SEQ ID NO: 1491963 - RNA, 19 nt, Homo sapiens
  misc_RNA (1)...(19): siRNA sense strand
gccagaaauucaagugaug

SEQ ID NO: 1491964 - RNA, 19 nt, Homo sapiens
  misc_RNA (1)...(19): siRNA sense strand
ggccagaaauucaagugau

SEQ ID NO: 1491965 - RNA, 19 nt, Homo sapiens
  misc_RNA (1)...(19): siRNA sense strand
gcaaacagucagaagacaa

SEQ ID NO: 1491966 - RNA, 19 nt, Homo sapiens
  misc_RNA (1)...(19): siRNA sense strand
uguaguaaccgaagcagua

SEQ ID NO: 1491967 - RNA, 19 nt, Homo sapiens
  misc_RNA (1)...(19): siRNA sense strand
acaggaaccauauguauug

SEQ ID NO: 1491968 - RNA, 19 nt, Homo sapiens
  misc_RNA (1)...(19): siRNA sense strand
gcaacagaugucagauaua

SEQ ID NO: 1491969 - RNA, 19 nt, Homo sapiens
  misc_RNA (1)...(19): siRNA sense strand
ugcaacagaugucagauau

SEQ ID NO: 1491970 - RNA, 19 nt, Homo sapiens
  misc_RNA (1)...(19): siRNA sense strand
gaagaaggcacugauaacu

SEQ ID NO: 1491971 - RNA, 19 nt, Homo sapiens
  misc_RNA (1)...(19): siRNA sense strand
gggugaagauuuagaaagg

SEQ ID NO: 1491972 - RNA, 19 nt, Homo sapiens
  misc_RNA (1)...(19): siRNA sense strand
ccuacaagaucgucucuca

SEQ ID NO: 1491973 - RNA, 19 nt, Homo sapiens
  misc_RNA (1)...(19): siRNA sense strand
uguaaucuaugcugagaga

SEQ ID NO: 1491974 - RNA, 19 nt, Homo sapiens
  misc_RNA (1)...(19): siRNA sense strand
ggugaaggaauuugacauu

SEQ ID NO: 1491975 - RNA, 19 nt, Homo sapiens
  misc_RNA (1)...(19): siRNA sense strand
gcuggaguuucaaauguug

SEQ ID NO: 1491976 - RNA, 19 nt, Homo sapiens
  misc_RNA (1)...(19): siRNA sense strand
caugugggaugucagauca

SEQ ID NO: 1491977 - RNA, 19 nt, Homo sapiens
  misc_RNA (1)...(19): siRNA sense strand
agaagaaccaucugcauug

SEQ ID NO: 1491978 - RNA, 19 nt, Homo sapiens
  misc_RNA (1)...(19): siRNA sense strand
ggacagcaguuuacacaag

SEQ ID NO: 1491979 - RNA, 19 nt, Homo sapiens
  misc_RNA (1)...(19): siRNA sense strand
cagaugaguuccuggauga

SEQ ID NO: 1491980 - RNA, 19 nt, Homo sapiens
  misc_RNA (1)...(19): siRNA sense strand
acaguaugcugcugaguuu

SEQ ID NO: 1491981 - RNA, 19 nt, Homo sapiens
  misc_RNA (1)...(19): siRNA sense strand
uaagaagacucgccgaaag

SEQ ID NO: 1491982 - RNA, 19 nt, Homo sapiens
  misc_RNA (1)...(19): siRNA sense strand
gcaagagccggaaggagaa

SEQ ID NO: 1491983 - RNA, 19 nt, Homo sapiens
  misc_RNA (1)...(19): siRNA sense strand
ggacggaagcaaacuaaag

SEQ ID NO: 1491984 - RNA, 19 nt, Homo sapiens
  misc_RNA (1)...(19): siRNA sense strand
gagaacccguggaugaagu

SEQ ID NO: 1491985 - RNA, 19 nt, Homo sapiens
  misc_RNA (1)...(19): siRNA sense strand
gacggaagcaaacuaaaga

SEQ ID NO: 1491986 - RNA, 19 nt, Homo sapiens
  misc_RNA (1)...(19): siRNA sense strand
gccucaaccuggaacagua

SEQ ID NO: 1491987 - RNA, 19 nt, Homo sapiens
  misc_RNA (1)...(19): siRNA sense strand
gagagcaggaggccaagaa

SEQ ID NO: 1491988 - RNA, 19 nt, Homo sapiens
  misc_RNA (1)...(19): siRNA sense strand
gcagcuggacggaagcaaa

SEQ ID NO: 1491989 - RNA, 19 nt, Homo sapiens
  misc_RNA (1)...(19): siRNA sense strand
ggcaggaggccaaauguuc

SEQ ID NO: 1491990 - RNA, 19 nt, Homo sapiens
  misc_RNA (1)...(19): siRNA sense strand
gagcaggaggccaagaaga

SEQ ID NO: 1491991 - RNA, 19 nt, Homo sapiens
  misc_RNA (1)...(19): siRNA sense strand
gaagacucgccgaaaguuc

SEQ ID NO: 1491992 - RNA, 19 nt, Homo sapiens
  misc_RNA (1)...(19): siRNA sense strand
gcaggaggccaaauguucu

SEQ ID NO: 1491993 - RNA, 19 nt, Homo sapiens
  misc_RNA (1)...(19): siRNA sense strand
gcgcucgccuuugcacuca

SEQ ID NO: 1491994 - RNA, 19 nt, Homo sapiens
  misc_RNA (1)...(19): siRNA sense strand
ggaaggagaaaggcagcaa

SEQ ID NO: 1491995 - RNA, 19 nt, Homo sapiens
  misc_RNA (1)...(19): siRNA sense strand
gggcucagcaacucucaug

SEQ ID NO: 1491996 - RNA, 19 nt, Homo sapiens
  misc_RNA (1)...(19): siRNA sense strand
gcagagccucaaccuggaa

SEQ ID NO: 1491997 - RNA, 19 nt, Homo sapiens
  misc_RNA (1)...(19): siRNA sense strand
uccgagaacccguggauga

SEQ ID NO: 1491998 - RNA, 19 nt, Homo sapiens
  misc_RNA (1)...(19): siRNA sense strand
ugucucagucuucagauga

SEQ ID NO: 1491999 - RNA, 19 nt, Homo sapiens
  misc_RNA (1)...(19): siRNA sense strand
gcuggacggaagcaaacua

SEQ ID NO: 1492000 - RNA, 19 nt, Homo sapiens
  misc_RNA (1)...(19): siRNA sense strand
auaagaagacucgccgaaa

SEQ ID NO: 1492001 - RNA, 19 nt, Homo sapiens
  misc_RNA (1)...(19): siRNA sense strand
gaacccguggaugaaguuu

SEQ ID NO: 1492002 - RNA, 19 nt, Homo sapiens
  misc_RNA (1)...(19): siRNA sense strand
ccgagaacccguggaugaa

SEQ ID NO: 1492003 - RNA, 19 nt, Homo sapiens
  misc_RNA (1)...(19): siRNA sense strand
cuucggcuccacccagaua

SEQ ID NO: 1492004 - RNA, 19 nt, Homo sapiens
  misc_RNA (1)...(19): siRNA sense strand
aaacaaaccugucuucaug

SEQ ID NO: 1492005 - RNA, 19 nt, Homo sapiens
  misc_RNA (1)...(19): siRNA sense strand
guaccaagguccacauaaa

SEQ ID NO: 1492006 - RNA, 19 nt, Homo sapiens
  misc_RNA (1)...(19): siRNA sense strand
uauaauaucugggcaguaa

SEQ ID NO: 1492007 - RNA, 19 nt, Homo sapiens
  misc_RNA (1)...(19): siRNA sense strand
gcaauguaccuuucagaua

SEQ ID NO: 1492008 - RNA, 19 nt, Homo sapiens
  misc_RNA (1)...(19): siRNA sense strand
gccaauuucuccaaccuua

SEQ ID NO: 1492009 - RNA, 19 nt, Homo sapiens
  misc_RNA (1)...(19): siRNA sense strand
caauguaccuuucagauac

SEQ ID NO: 1492010 - RNA, 19 nt, Homo sapiens
  misc_RNA (1)...(19): siRNA sense strand
gcucuggguguuauuauua

SEQ ID NO: 1492011 - RNA, 19 nt, Homo sapiens
  misc_RNA (1)...(19): siRNA sense strand
gaaggaaacaugacuugga

SEQ ID NO: 1492012 - RNA, 19 nt, Homo sapiens
  misc_RNA (1)...(19): siRNA sense strand
gaauaugaaggaaacauga

SEQ ID NO: 1492013 - RNA, 19 nt, Homo sapiens
  misc_RNA (1)...(19): siRNA sense strand
gcuauuggauucagcuguu

SEQ ID NO: 1492014 - RNA, 19 nt, Homo sapiens
  misc_RNA (1)...(19): siRNA sense strand
gaaacaagaagcuaaagca

SEQ ID NO: 1492015 - RNA, 19 nt, Homo sapiens
  misc_RNA (1)...(19): siRNA sense strand
ggaaacaugacuuggaaga

SEQ ID NO: 1492016 - RNA, 19 nt, Homo sapiens
  misc_RNA (1)...(19): siRNA sense strand
gcagacuuaucuuucaguu

SEQ ID NO: 1492017 - RNA, 19 nt, Homo sapiens
  misc_RNA (1)...(19): siRNA sense strand
aaacaugacuuggaagauc

SEQ ID NO: 1492018 - RNA, 19 nt, Homo sapiens
  misc_RNA (1)...(19): siRNA sense strand
gaauuaagaacuacugcuu

SEQ ID NO: 1492019 - RNA, 19 nt, Homo sapiens
  misc_RNA (1)...(19): siRNA sense strand
gcaacuggccugcuacuag

SEQ ID NO: 1492020 - RNA, 19 nt, Homo sapiens
  misc_RNA (1)...(19): siRNA sense strand
gcaaacuuaguacccuuua

SEQ ID NO: 1492021 - RNA, 19 nt, Homo sapiens
  misc_RNA (1)...(19): siRNA sense strand
gugguuacauuuguuauug

SEQ ID NO: 1492022 - RNA, 19 nt, Homo sapiens
  misc_RNA (1)...(19): siRNA sense strand
gcaguaaccggccauuuca

SEQ ID NO: 1492023 - RNA, 19 nt, Homo sapiens
  misc_RNA (1)...(19): siRNA sense strand
ucauagcguugguaaauuc

SEQ ID NO: 1492024 - RNA, 19 nt, Homo sapiens
  misc_RNA (1)...(19): siRNA sense strand
ugacuuggaagaucaaauu

SEQ ID NO: 1492025 - RNA, 19 nt, Homo sapiens
  misc_RNA (1)...(19): siRNA sense strand
cuacuagccucagcauauu

SEQ ID NO: 1492026 - RNA, 19 nt, Homo sapiens
  misc_RNA (1)...(19): siRNA sense strand
uaaccaugcuagcaaacuu

SEQ ID NO: 1492027 - RNA, 19 nt, Homo sapiens
  misc_RNA (1)...(19): siRNA sense strand
aaggaaacaugacuuggaa

SEQ ID NO: 1492028 - RNA, 19 nt, Homo sapiens
  misc_RNA (1)...(19): siRNA sense strand
ggauucagcuguucuucag

SEQ ID NO: 1492029 - RNA, 19 nt, Homo sapiens
  misc_RNA (1)...(19): siRNA sense strand
guagugguuacauuuguua

SEQ ID NO: 1492030 - RNA, 19 nt, Homo sapiens
  misc_RNA (1)...(19): siRNA sense strand
gcagcuccauggcaaagga

SEQ ID NO: 1492031 - RNA, 19 nt, Homo sapiens
  misc_RNA (1)...(19): siRNA sense strand
cuguaacccugauaucuuu

SEQ ID NO: 1492032 - RNA, 19 nt, Homo sapiens
  misc_RNA (1)...(19): siRNA sense strand
acaaaccugucuucauguu

SEQ ID NO: 1492033 - RNA, 19 nt, Homo sapiens
  misc_RNA (1)...(19): siRNA sense strand
caugcuagcaaacuuagua

SEQ ID NO: 1492034 - RNA, 19 nt, Homo sapiens
  misc_RNA (1)...(19): siRNA sense strand
caauuucuccaaccuuauu

SEQ ID NO: 1492035 - RNA, 19 nt, Homo sapiens
  misc_RNA (1)...(19): siRNA sense strand
ccauuuacuuugugucugu

SEQ ID NO: 1492036 - RNA, 19 nt, Homo sapiens
  misc_RNA (1)...(19): siRNA sense strand
guuagucuguucucugugu

SEQ ID NO: 1492037 - RNA, 19 nt, Homo sapiens
  misc_RNA (1)...(19): siRNA sense strand
aaaccugucuucauguucu

SEQ ID NO: 1492038 - RNA, 19 nt, Homo sapiens
  misc_RNA (1)...(19): siRNA sense strand
ggcaguaaccggccauuuc

SEQ ID NO: 1492039 - RNA, 19 nt, Homo sapiens
  misc_RNA (1)...(19): siRNA sense strand
guguaaacaucucaagaag

SEQ ID NO: 1492040 - RNA, 19 nt, Homo sapiens
  misc_RNA (1)...(19): siRNA sense strand
gguuacauuuguuauugga

SEQ ID NO: 1492041 - RNA, 19 nt, Homo sapiens
  misc_RNA (1)...(19): siRNA sense strand
gaucuccuuugcugaccaa

SEQ ID NO: 1492042 - RNA, 19 nt, Homo sapiens
  misc_RNA (1)...(19): siRNA sense strand
ucuaguagugguuacauuu

SEQ ID NO: 1492043 - RNA, 19 nt, Homo sapiens
  misc_RNA (1)...(19): siRNA sense strand
agaggagaguuaagagugu

SEQ ID NO: 1492044 - RNA, 19 nt, Homo sapiens
  misc_RNA (1)...(19): siRNA sense strand
gaaacaugacuuggaagau

SEQ ID NO: 1492045 - RNA, 19 nt, Homo sapiens
  misc_RNA (1)...(19): siRNA sense strand
gugguaaacaugaaucaga

SEQ ID NO: 1492046 - RNA, 19 nt, Homo sapiens
  misc_RNA (1)...(19): siRNA sense strand
ccgagugggugaagagaca

SEQ ID NO: 1492047 - RNA, 19 nt, Homo sapiens
  misc_RNA (1)...(19): siRNA sense strand
cuucauagcguugguaaau

SEQ ID NO: 1492048 - RNA, 19 nt, Homo sapiens
  misc_RNA (1)...(19): siRNA sense strand
gaagcuaaagcagacuuau

SEQ ID NO: 1492049 - RNA, 19 nt, Homo sapiens
  misc_RNA (1)...(19): siRNA sense strand
uguguaaacaucucaagaa

SEQ ID NO: 1492050 - RNA, 19 nt, Homo sapiens
  misc_RNA (1)...(19): siRNA sense strand
uaguagugguuacauuugu

SEQ ID NO: 1492051 - RNA, 19 nt, Homo sapiens
  misc_RNA (1)...(19): siRNA sense strand
ugguaaacaugaaucagau

SEQ ID NO: 1492052 - RNA, 19 nt, Homo sapiens
  misc_RNA (1)...(19): siRNA sense strand
gacaaaagaauaugaagga

SEQ ID NO: 1492053 - RNA, 19 nt, Homo sapiens
  misc_RNA (1)...(19): siRNA sense strand
aacaugacuuggaagauca

SEQ ID NO: 1492054 - RNA, 19 nt, Homo sapiens
  misc_RNA (1)...(19): siRNA sense strand
gguuugcucuggguguuau

SEQ ID NO: 1492055 - RNA, 19 nt, Homo sapiens
  misc_RNA (1)...(19): siRNA sense strand
gaguuaagagugucauucu

SEQ ID NO: 1492056 - RNA, 19 nt, Homo sapiens
  misc_RNA (1)...(19): siRNA sense strand
caaacuuaguacccuuuac

SEQ ID NO: 1492057 - RNA, 19 nt, Homo sapiens
  misc_RNA (1)...(19): siRNA sense strand
ggaaacaagaagcuaaagc

SEQ ID NO: 1492058 - RNA, 19 nt, Homo sapiens
  misc_RNA (1)...(19): siRNA sense strand
uaaagaggagaguuaagag

SEQ ID NO: 1492059 - RNA, 19 nt, Homo sapiens
  misc_RNA (1)...(19): siRNA sense strand
ugcaaacugugaucuccuu

SEQ ID NO: 1492060 - RNA, 19 nt, Homo sapiens
  misc_RNA (1)...(19): siRNA sense strand
ggcgugcaauguaccuuuc

SEQ ID NO: 1492061 - RNA, 19 nt, Homo sapiens
  misc_RNA (1)...(19): siRNA sense strand
uaaccggccauuucagcaa

SEQ ID NO: 1492062 - RNA, 19 nt, Homo sapiens
  misc_RNA (1)...(19): siRNA sense strand
ggaaaacaaaccugucuuc

SEQ ID NO: 1492063 - RNA, 19 nt, Homo sapiens
  misc_RNA (1)...(19): siRNA sense strand
aaccaugcuagcaaacuua

SEQ ID NO: 1492064 - RNA, 19 nt, Homo sapiens
  misc_RNA (1)...(19): siRNA sense strand
gagaguuaagagugucauu

SEQ ID NO: 1492065 - RNA, 19 nt, Homo sapiens
  misc_RNA (1)...(19): siRNA sense strand
gggcaguaaccggccauuu

SEQ ID NO: 1492066 - RNA, 19 nt, Homo sapiens
  misc_RNA (1)...(19): siRNA sense strand
agaagcuaaagcagacuua

SEQ ID NO: 1492067 - RNA, 19 nt, Homo sapiens
  misc_RNA (1)...(19): siRNA sense strand
aguagugguuacauuuguu

SEQ ID NO: 1492068 - RNA, 19 nt, Homo sapiens
  misc_RNA (1)...(19): siRNA sense strand
cuaguagugguuacauuug

SEQ ID NO: 1492069 - RNA, 19 nt, Homo sapiens
  misc_RNA (1)...(19): siRNA sense strand
gcuaaagcagacuuaucuu

SEQ ID NO: 1492070 - RNA, 19 nt, Homo sapiens
  misc_RNA (1)...(19): siRNA sense strand
gaaaacaaaccugucuuca

SEQ ID NO: 1492071 - RNA, 19 nt, Homo sapiens
  misc_RNA (1)...(19): siRNA sense strand
cagauacgacuguaaccau

SEQ ID NO: 1492072 - RNA, 19 nt, Homo sapiens
  misc_RNA (1)...(19): siRNA sense strand
agaauaugaaggaaacaug

SEQ ID NO: 1492073 - RNA, 19 nt, Homo sapiens
  misc_RNA (1)...(19): siRNA sense strand
cauguucugccaagcuauu

SEQ ID NO: 1492074 - RNA, 19 nt, Homo sapiens
  misc_RNA (1)...(19): siRNA sense strand
uguaaacaucucaagaaga

SEQ ID NO: 1492075 - RNA, 19 nt, Homo sapiens
  misc_RNA (1)...(19): siRNA sense strand
cuguaaccaugcuagcaaa

SEQ ID NO: 1492076 - RNA, 19 nt, Homo sapiens
  misc_RNA (1)...(19): siRNA sense strand
cucuggguguuauuauuaa

SEQ ID NO: 1492077 - RNA, 19 nt, Homo sapiens
  misc_RNA (1)...(19): siRNA sense strand
uuuauuugcucaagauugc

SEQ ID NO: 1492078 - RNA, 19 nt, Homo sapiens
  misc_RNA (1)...(19): siRNA sense strand
cuguuagucuguucucugu

SEQ ID NO: 1492079 - RNA, 19 nt, Homo sapiens
  misc_RNA (1)...(19): siRNA sense strand
guuggggccuuugcuauuu

SEQ ID NO: 1492080 - RNA, 19 nt, Homo sapiens
  misc_RNA (1)...(19): siRNA sense strand
gaugcuaccugacaccuau

SEQ ID NO: 1492081 - RNA, 19 nt, Homo sapiens
  misc_RNA (1)...(19): siRNA sense strand
ccauuuggcugaagucaug

SEQ ID NO: 1492082 - RNA, 19 nt, Homo sapiens
  misc_RNA (1)...(19): siRNA sense strand
gaaugcaggacgagccuua

SEQ ID NO: 1492083 - RNA, 19 nt, Homo sapiens
  misc_RNA (1)...(19): siRNA sense strand
ugugugagcugcuggaaga

SEQ ID NO: 1492084 - RNA, 19 nt, Homo sapiens
  misc_RNA (1)...(19): siRNA sense strand
gaaugcgucacagauguua

SEQ ID NO: 1492085 - RNA, 19 nt, Homo sapiens
  misc_RNA (1)...(19): siRNA sense strand
gaugaaugcgucacagaug

SEQ ID NO: 1492086 - RNA, 19 nt, Homo sapiens
  misc_RNA (1)...(19): siRNA sense strand
cuagugcucuggaccaugu

SEQ ID NO: 1492087 - RNA, 19 nt, Homo sapiens
  misc_RNA (1)...(19): siRNA sense strand
cagaguuccugcagagcuu

SEQ ID NO: 1492088 - RNA, 19 nt, Homo sapiens
  misc_RNA (1)...(19): siRNA sense strand
ggaugaaugcgucacagau

SEQ ID NO: 1492089 - RNA, 19 nt, Homo sapiens
  misc_RNA (1)...(19): siRNA sense strand
ucgggaccgugccuucuuu

SEQ ID NO: 1492090 - RNA, 19 nt, Homo sapiens
  misc_RNA (1)...(19): siRNA sense strand
ggaccgugccuucuuugca

SEQ ID NO: 1492091 - RNA, 19 nt, Homo sapiens
  misc_RNA (1)...(19): siRNA sense strand
gagcugcagccacacuuca

SEQ ID NO: 1492092 - RNA, 19 nt, Homo sapiens
  misc_RNA (1)...(19): siRNA sense strand
cuaccugacaccuauauca

SEQ ID NO: 1492093 - RNA, 19 nt, Homo sapiens
  misc_RNA (1)...(19): siRNA sense strand
ggcccuggauggcauugug

SEQ ID NO: 1492094 - RNA, 19 nt, Homo sapiens
  misc_RNA (1)...(19): siRNA sense strand
gaguguuggugcgcgacua

SEQ ID NO: 1492095 - RNA, 19 nt, Homo sapiens
  misc_RNA (1)...(19): siRNA sense strand
uggcagcccuccucgacau

SEQ ID NO: 1492096 - RNA, 19 nt, Homo sapiens
  misc_RNA (1)...(19): siRNA sense strand
ccaucgcccuggucaacug

SEQ ID NO: 1492097 - RNA, 19 nt, Homo sapiens
  misc_RNA (1)...(19): siRNA sense strand
ugaaugcgucacagauguu

SEQ ID NO: 1492098 - RNA, 19 nt, Homo sapiens
  misc_RNA (1)...(19): siRNA sense strand
augaaugcgucacagaugu

SEQ ID NO: 1492099 - RNA, 19 nt, Homo sapiens
  misc_RNA (1)...(19): siRNA sense strand
gcagccacacuucaacaag

SEQ ID NO: 1492100 - RNA, 19 nt, Homo sapiens
  misc_RNA (1)...(19): siRNA sense strand
ggaggaugaaugcgucaca

SEQ ID NO: 1492101 - RNA, 19 nt, Homo sapiens
  misc_RNA (1)...(19): siRNA sense strand
ccgcaucagccaggaguuu

SEQ ID NO: 1492102 - RNA, 19 nt, Homo sapiens
  misc_RNA (1)...(19): siRNA sense strand
gaaaguagaugaagaaggu

SEQ ID NO: 1492103 - RNA, 19 nt, Homo sapiens
  misc_RNA (1)...(19): siRNA sense strand
ggaaacacuuggugaaaga

SEQ ID NO: 1492104 - RNA, 19 nt, Homo sapiens
  misc_RNA (1)...(19): siRNA sense strand
caacaacagugacggaaug

SEQ ID NO: 1492105 - RNA, 19 nt, Homo sapiens
  misc_RNA (1)...(19): siRNA sense strand
ugagacaaauccauuagaa

SEQ ID NO: 1492106 - RNA, 19 nt, Homo sapiens
  misc_RNA (1)...(19): siRNA sense strand
gacaauacauuagaggaaa

SEQ ID NO: 1492107 - RNA, 19 nt, Homo sapiens
  misc_RNA (1)...(19): siRNA sense strand
gagguuggacaauacauua

SEQ ID NO: 1492108 - RNA, 19 nt, Homo sapiens
  misc_RNA (1)...(19): siRNA sense strand
gaaauucauucgauguucu

SEQ ID NO: 1492109 - RNA, 19 nt, Homo sapiens
  misc_RNA (1)...(19): siRNA sense strand
gcugugcaauggugaaauu

SEQ ID NO: 1492110 - RNA, 19 nt, Homo sapiens
  misc_RNA (1)...(19): siRNA sense strand
caaccaaguucaugagaca

SEQ ID NO: 1492111 - RNA, 19 nt, Homo sapiens
  misc_RNA (1)...(19): siRNA sense strand
guaacugugggaacuauua

SEQ ID NO: 1492112 - RNA, 19 nt, Homo sapiens
  misc_RNA (1)...(19): siRNA sense strand
ggacaauacauuagaggaa

SEQ ID NO: 1492113 - RNA, 19 nt, Homo sapiens
  misc_RNA (1)...(19): siRNA sense strand
gaagaaauucauucgaugu

SEQ ID NO: 1492114 - RNA, 19 nt, Homo sapiens
  misc_RNA (1)...(19): siRNA sense strand
gacaagaugauacuucaaa

SEQ ID NO: 1492115 - RNA, 19 nt, Homo sapiens
  misc_RNA (1)...(19): siRNA sense strand
acaaauugcuaucugucua

SEQ ID NO: 1492116 - RNA, 19 nt, Homo sapiens
  misc_RNA (1)...(19): siRNA sense strand
uacauuaccugcuauaucu

SEQ ID NO: 1492117 - RNA, 19 nt, Homo sapiens
  misc_RNA (1)...(19): siRNA sense strand
gugcaauggugaaauuaug

SEQ ID NO: 1492118 - RNA, 19 nt, Homo sapiens
  misc_RNA (1)...(19): siRNA sense strand
agaagugacccacaaauug

SEQ ID NO: 1492119 - RNA, 19 nt, Homo sapiens
  misc_RNA (1)...(19): siRNA sense strand
caagaauugauuucgguua

SEQ ID NO: 1492120 - RNA, 19 nt, Homo sapiens
  misc_RNA (1)...(19): siRNA sense strand
uguaagacuuguauuguuc

SEQ ID NO: 1492121 - RNA, 19 nt, Homo sapiens
  misc_RNA (1)...(19): siRNA sense strand
gacaagauggcgacuaaga

SEQ ID NO: 1492122 - RNA, 19 nt, Homo sapiens
  misc_RNA (1)...(19): siRNA sense strand
ugaagaaggugaugaaaau

SEQ ID NO: 1492123 - RNA, 19 nt, Homo sapiens
  misc_RNA (1)...(19): siRNA sense strand
gaaaauggacaagaugaua

SEQ ID NO: 1492124 - RNA, 19 nt, Homo sapiens
  misc_RNA (1)...(19): siRNA sense strand
gagacaaauccauuagaaa

SEQ ID NO: 1492125 - RNA, 19 nt, Homo sapiens
  misc_RNA (1)...(19): siRNA sense strand
cagaagugacccacaaauu

SEQ ID NO: 1492126 - RNA, 19 nt, Homo sapiens
  misc_RNA (1)...(19): siRNA sense strand
gaagugacccacaaauugc

SEQ ID NO: 1492127 - RNA, 19 nt, Homo sapiens
  misc_RNA (1)...(19): siRNA sense strand
uguaaaggguaucugauca

SEQ ID NO: 1492128 - RNA, 19 nt, Homo sapiens
  misc_RNA (1)...(19): siRNA sense strand
ugacaaaccgaaaguagau

SEQ ID NO: 1492129 - RNA, 19 nt, Homo sapiens
  misc_RNA (1)...(19): siRNA sense strand
caguaucgaccaagaauug

SEQ ID NO: 1492130 - RNA, 19 nt, Homo sapiens
  misc_RNA (1)...(19): siRNA sense strand
uccaaguucuuaugaguug

SEQ ID NO: 1492131 - RNA, 19 nt, Homo sapiens
  misc_RNA (1)...(19): siRNA sense strand
gugacggaaugccuccaua

SEQ ID NO: 1492132 - RNA, 19 nt, Homo sapiens
  misc_RNA (1)...(19): siRNA sense strand
augacaagauggcgacuaa

SEQ ID NO: 1492133 - RNA, 19 nt, Homo sapiens
  misc_RNA (1)...(19): siRNA sense strand
guaaaggguaucugaucaa

SEQ ID NO: 1492134 - RNA, 19 nt, Homo sapiens
  misc_RNA (1)...(19): siRNA sense strand
gcaagucugcucucaggau

SEQ ID NO: 1492135 - RNA, 19 nt, Homo sapiens
  misc_RNA (1)...(19): siRNA sense strand
uaacugugggaacuauuaa

SEQ ID NO: 1492136 - RNA, 19 nt, Homo sapiens
  misc_RNA (1)...(19): siRNA sense strand
uaaaggguaucugaucaag

SEQ ID NO: 1492137 - RNA, 19 nt, Homo sapiens
  misc_RNA (1)...(19): siRNA sense strand
uggacaagaugauacuuca

SEQ ID NO: 1492138 - RNA, 19 nt, Homo sapiens
  misc_RNA (1)...(19): siRNA sense strand
ucaugagacaaauccauua

SEQ ID NO: 1492139 - RNA, 19 nt, Homo sapiens
  misc_RNA (1)...(19): siRNA sense strand
aagaauugauuucgguuag

SEQ ID NO: 1492140 - RNA, 19 nt, Homo sapiens
  misc_RNA (1)...(19): siRNA sense strand
acaauguaguaaaggguuu

SEQ ID NO: 1492141 - RNA, 19 nt, Homo sapiens
  misc_RNA (1)...(19): siRNA sense strand
cuguaagacuuguauuguu

SEQ ID NO: 1492142 - RNA, 19 nt, Homo sapiens
  misc_RNA (1)...(19): siRNA sense strand
aaaggaaacacuuggugaa

SEQ ID NO: 1492143 - RNA, 19 nt, Homo sapiens
  misc_RNA (1)...(19): siRNA sense strand
gcacuuugaagauagcaau

SEQ ID NO: 1492144 - RNA, 19 nt, Homo sapiens
  misc_RNA (1)...(19): siRNA sense strand
gagcgugaaucugaauuuu

SEQ ID NO: 1492145 - RNA, 19 nt, Homo sapiens
  misc_RNA (1)...(19): siRNA sense strand
ucaagaaaauggacaagau

SEQ ID NO: 1492146 - RNA, 19 nt, Homo sapiens
  misc_RNA (1)...(19): siRNA sense strand
agaaauucauucgauguuc

SEQ ID NO: 1492147 - RNA, 19 nt, Homo sapiens
  misc_RNA (1)...(19): siRNA sense strand
gaugaagaaggugaugaaa

SEQ ID NO: 1492148 - RNA, 19 nt, Homo sapiens
  misc_RNA (1)...(19): siRNA sense strand
gcaaucaggggacaaugua

SEQ ID NO: 1492149 - RNA, 19 nt, Homo sapiens
  misc_RNA (1)...(19): siRNA sense strand
ccaaguucaugagacaaau

SEQ ID NO: 1492150 - RNA, 19 nt, Homo sapiens
  misc_RNA (1)...(19): siRNA sense strand
gcaguaucgaccaagaauu

SEQ ID NO: 1492151 - RNA, 19 nt, Homo sapiens
  misc_RNA (1)...(19): siRNA sense strand
aacacuuggugaaagauuu

SEQ ID NO: 1492152 - RNA, 19 nt, Homo sapiens
  misc_RNA (1)...(19): siRNA sense strand
ugucuagauuguuuacgaa

SEQ ID NO: 1492153 - RNA, 19 nt, Homo sapiens
  misc_RNA (1)...(19): siRNA sense strand
ggacaagaugauacuucaa

SEQ ID NO: 1492154 - RNA, 19 nt, Homo sapiens
  misc_RNA (1)...(19): siRNA sense strand
gaacuugagcgugaaucug

SEQ ID NO: 1492155 - RNA, 19 nt, Homo sapiens
  misc_RNA (1)...(19): siRNA sense strand
gaaucugaauuuuggaaga

SEQ ID NO: 1492156 - RNA, 19 nt, Homo sapiens
  misc_RNA (1)...(19): siRNA sense strand
cuauaucuguaaaggguau

SEQ ID NO: 1492157 - RNA, 19 nt, Homo sapiens
  misc_RNA (1)...(19): siRNA sense strand
gcugacaaaccgaaaguag

SEQ ID NO: 1492158 - RNA, 19 nt, Homo sapiens
  misc_RNA (1)...(19): siRNA sense strand
aaccgaaaguagaugaaga

SEQ ID NO: 1492159 - RNA, 19 nt, Homo sapiens
  misc_RNA (1)...(19): siRNA sense strand
caggauggcccuuuguauc

SEQ ID NO: 1492160 - RNA, 19 nt, Homo sapiens
  misc_RNA (1)...(19): siRNA sense strand
caaauugcuaucugucuag

SEQ ID NO: 1492161 - RNA, 19 nt, Homo sapiens
  misc_RNA (1)...(19): siRNA sense strand
uaccugcuauaucuguaaa

SEQ ID NO: 1492162 - RNA, 19 nt, Homo sapiens
  misc_RNA (1)...(19): siRNA sense strand
uaucugaucaagccaacaa

SEQ ID NO: 1492163 - RNA, 19 nt, Homo sapiens
  misc_RNA (1)...(19): siRNA sense strand
uuacauuaccugcuauauc

SEQ ID NO: 1492164 - RNA, 19 nt, Homo sapiens
  misc_RNA (1)...(19): siRNA sense strand
guucuuaugaguuggaugu

SEQ ID NO: 1492165 - RNA, 19 nt, Homo sapiens
  misc_RNA (1)...(19): siRNA sense strand
ggacuacgagaacaagaac

SEQ ID NO: 1492166 - RNA, 19 nt, Homo sapiens
  misc_RNA (1)...(19): siRNA sense strand
uaucgaccaagaauugauu

SEQ ID NO: 1492167 - RNA, 19 nt, Homo sapiens
  misc_RNA (1)...(19): siRNA sense strand
cuauggaauucaucuacau

SEQ ID NO: 1492168 - RNA, 19 nt, Homo sapiens
  misc_RNA (1)...(19): siRNA sense strand
guauuguucagcacuuuga

SEQ ID NO: 1492169 - RNA, 19 nt, Homo sapiens
  misc_RNA (1)...(19): siRNA sense strand
acaaaccgaaaguagauga

SEQ ID NO: 1492170 - RNA, 19 nt, Homo sapiens
  misc_RNA (1)...(19): siRNA sense strand
aaacacuuggugaaagauu

SEQ ID NO: 1492171 - RNA, 19 nt, Homo sapiens
  misc_RNA (1)...(19): siRNA sense strand
guaagacuuguauuguuca

SEQ ID NO: 1492172 - RNA, 19 nt, Homo sapiens
  misc_RNA (1)...(19): siRNA sense strand
ugagcgugaaucugaauuu

SEQ ID NO: 1492173 - RNA, 19 nt, Homo sapiens
  misc_RNA (1)...(19): siRNA sense strand
auguugagguuggacaaua

SEQ ID NO: 1492174 - RNA, 19 nt, Homo sapiens
  misc_RNA (1)...(19): siRNA sense strand
gauggcccuuuguaucagu

SEQ ID NO: 1492175 - RNA, 19 nt, Homo sapiens
  misc_RNA (1)...(19): siRNA sense strand
cccaagguguggcaaccaa

SEQ ID NO: 1492176 - RNA, 19 nt, Homo sapiens
  misc_RNA (1)...(19): siRNA sense strand
guguaacugugggaacuau

SEQ ID NO: 1492177 - RNA, 19 nt, Homo sapiens
  misc_RNA (1)...(19): siRNA sense strand
auccuuacauuaccugcua

SEQ ID NO: 1492178 - RNA, 19 nt, Homo sapiens
  misc_RNA (1)...(19): siRNA sense strand
aaggaaacacuuggugaaa

SEQ ID NO: 1492179 - RNA, 19 nt, Homo sapiens
  misc_RNA (1)...(19): siRNA sense strand
gcccuuuguaucagucaua

SEQ ID NO: 1492180 - RNA, 19 nt, Homo sapiens
  misc_RNA (1)...(19): siRNA sense strand
ggauggcccuuuguaucag

SEQ ID NO: 1492181 - RNA, 19 nt, Homo sapiens
  misc_RNA (1)...(19): siRNA sense strand
aggaaacacuuggugaaag

SEQ ID NO: 1492182 - RNA, 19 nt, Homo sapiens
  misc_RNA (1)...(19): siRNA sense strand
cuuccaaguucuuaugagu

SEQ ID NO: 1492183 - RNA, 19 nt, Homo sapiens
  misc_RNA (1)...(19): siRNA sense strand
gguuggacaauacauuaga

SEQ ID NO: 1492184 - RNA, 19 nt, Homo sapiens
  misc_RNA (1)...(19): siRNA sense strand
ugagguuggacaauacauu

SEQ ID NO: 1492185 - RNA, 19 nt, Homo sapiens
  misc_RNA (1)...(19): siRNA sense strand
aggauggcccuuuguauca

SEQ ID NO: 1492186 - RNA, 19 nt, Homo sapiens
  misc_RNA (1)...(19): siRNA sense strand
ucaggauggcccuuuguau

SEQ ID NO: 1492187 - RNA, 19 nt, Homo sapiens
  misc_RNA (1)...(19): siRNA sense strand
acuaagaggcgaaaacuuu

SEQ ID NO: 1492188 - RNA, 19 nt, Homo sapiens
  misc_RNA (1)...(19): siRNA sense strand
gacggaaugccuccauaca

SEQ ID NO: 1492189 - RNA, 19 nt, Homo sapiens
  misc_RNA (1)...(19): siRNA sense strand
aaauugcuaucugucuaga

SEQ ID NO: 1492190 - RNA, 19 nt, Homo sapiens
  misc_RNA (1)...(19): siRNA sense strand
agaugaagaaggugaugaa

SEQ ID NO: 1492191 - RNA, 19 nt, Homo sapiens
  misc_RNA (1)...(19): siRNA sense strand
caaaccgaaaguagaugaa

SEQ ID NO: 1492192 - RNA, 19 nt, Homo sapiens
  misc_RNA (1)...(19): siRNA sense strand
uagaaauguugagguugga

SEQ ID NO: 1492193 - RNA, 19 nt, Homo sapiens
  misc_RNA (1)...(19): siRNA sense strand
gcucucaggauggcccuuu

SEQ ID NO: 1492194 - RNA, 19 nt, Homo sapiens
  misc_RNA (1)...(19): siRNA sense strand
gaaacacuuggugaaagau

SEQ ID NO: 1492195 - RNA, 19 nt, Homo sapiens
  misc_RNA (1)...(19): siRNA sense strand
guuggacaauacauuagag

SEQ ID NO: 1492196 - RNA, 19 nt, Homo sapiens
  misc_RNA (1)...(19): siRNA sense strand
cugcucagcuucgcaaguc

SEQ ID NO: 1492197 - RNA, 19 nt, Homo sapiens
  misc_RNA (1)...(19): siRNA sense strand
caugagacaaauccauuag

SEQ ID NO: 1492198 - RNA, 19 nt, Homo sapiens
  misc_RNA (1)...(19): siRNA sense strand
agaaagagcugaagaaagc

SEQ ID NO: 1492199 - RNA, 19 nt, Homo sapiens
  misc_RNA (1)...(19): siRNA sense strand
cgaaggguaucacagauga

SEQ ID NO: 1492200 - RNA, 19 nt, Homo sapiens
  misc_RNA (1)...(19): siRNA sense strand
ggaacgacauccaccacaa

SEQ ID NO: 1492201 - RNA, 19 nt, Homo sapiens
  misc_RNA (1)...(19): siRNA sense strand
ggaggcaccugcaagaaca

SEQ ID NO: 1492202 - RNA, 19 nt, Homo sapiens
  misc_RNA (1)...(19): siRNA sense strand
gcaccauugucauccagua

SEQ ID NO: 1492203 - RNA, 19 nt, Homo sapiens
  misc_RNA (1)...(19): siRNA sense strand
cgagacuucugacaucuau

SEQ ID NO: 1492204 - RNA, 19 nt, Homo sapiens
  misc_RNA (1)...(19): siRNA sense strand
gagcgaaggguaucacaga

SEQ ID NO: 1492205 - RNA, 19 nt, Homo sapiens
  misc_RNA (1)...(19): siRNA sense strand
ggcggaugcuggucucuaa

SEQ ID NO: 1492206 - RNA, 19 nt, Homo sapiens
  misc_RNA (1)...(19): siRNA sense strand
ucaaggggcugcuaaaaga

SEQ ID NO: 1492207 - RNA, 19 nt, Homo sapiens
  misc_RNA (1)...(19): siRNA sense strand
gcagagaaagagcugaaga

SEQ ID NO: 1492208 - RNA, 19 nt, Homo sapiens
  misc_RNA (1)...(19): siRNA sense strand
cgaaugucaucaccuggaa

SEQ ID NO: 1492209 - RNA, 19 nt, Homo sapiens
  misc_RNA (1)...(19): siRNA sense strand
gagaaguacggcaccauug

SEQ ID NO: 1492210 - RNA, 19 nt, Homo sapiens
  misc_RNA (1)...(19): siRNA sense strand
gcaagaacaaagugacugu

SEQ ID NO: 1492211 - RNA, 19 nt, Homo sapiens
  misc_RNA (1)...(19): siRNA sense strand
gauccagaaugccaagaca

SEQ ID NO: 1492212 - RNA, 19 nt, Homo sapiens
  misc_RNA (1)...(19): siRNA sense strand
gagaaagagcugaagaaag

SEQ ID NO: 1492213 - RNA, 19 nt, Homo sapiens
  misc_RNA (1)...(19): siRNA sense strand
ccucauagauggcgagacu

SEQ ID NO: 1492214 - RNA, 19 nt, Homo sapiens
  misc_RNA (1)...(19): siRNA sense strand
gaagugccggcauucauuc

SEQ ID NO: 1492215 - RNA, 19 nt, Homo sapiens
  misc_RNA (1)...(19): siRNA sense strand
acaaggugcugacccuguu

SEQ ID NO: 1492216 - RNA, 19 nt, Homo sapiens
  misc_RNA (1)...(19): siRNA sense strand
ccgugugucuauccucaua

SEQ ID NO: 1492217 - RNA, 19 nt, Homo sapiens
  misc_RNA (1)...(19): siRNA sense strand
gaacgacauccaccacaag

SEQ ID NO: 1492218 - RNA, 19 nt, Homo sapiens
  misc_RNA (1)...(19): siRNA sense strand
ggaugcuggucucuaagga

SEQ ID NO: 1492219 - RNA, 19 nt, Homo sapiens
  misc_RNA (1)...(19): siRNA sense strand
cagagaaagagcugaagaa

SEQ ID NO: 1492220 - RNA, 19 nt, Homo sapiens
  misc_RNA (1)...(19): siRNA sense strand
uaaaagaggcagagaaaga

SEQ ID NO: 1492221 - RNA, 19 nt, Homo sapiens
  misc_RNA (1)...(19): siRNA sense strand
gagaagugccggcauucau

SEQ ID NO: 1492222 - RNA, 19 nt, Homo sapiens
  misc_RNA (1)...(19): siRNA sense strand
agagaaagagcugaagaaa

SEQ ID NO: 1492223 - RNA, 19 nt, Homo sapiens
  misc_RNA (1)...(19): siRNA sense strand
ggguaucacagaugacuga

SEQ ID NO: 1492224 - RNA, 19 nt, Homo sapiens
  misc_RNA (1)...(19): siRNA sense strand
cgucucaccuucacuaucg

SEQ ID NO: 1492225 - RNA, 19 nt, Homo sapiens
  misc_RNA (1)...(19): siRNA sense strand
gaaguacggcaccauuguc

SEQ ID NO: 1492226 - RNA, 19 nt, Homo sapiens
  misc_RNA (1)...(19): siRNA sense strand
gcuaaaagaggcagagaaa

SEQ ID NO: 1492227 - RNA, 19 nt, Homo sapiens
  misc_RNA (1)...(19): siRNA sense strand
ccacagggagaccgaaugu

SEQ ID NO: 1492228 - RNA, 19 nt, Homo sapiens
  misc_RNA (1)...(19): siRNA sense strand
agaagugccggcauucauu

SEQ ID NO: 1492229 - RNA, 19 nt, Homo sapiens
  misc_RNA (1)...(19): siRNA sense strand
uggcgagacuucugacauc

SEQ ID NO: 1492230 - RNA, 19 nt, Homo sapiens
  misc_RNA (1)...(19): siRNA sense strand
gggacuuccugagcaaaga

SEQ ID NO: 1492231 - RNA, 19 nt, Homo sapiens
  misc_RNA (1)...(19): siRNA sense strand
guacggcaccauugucauc

SEQ ID NO: 1492232 - RNA, 19 nt, Homo sapiens
  misc_RNA (1)...(19): siRNA sense strand
acagggagaccgaauguca

SEQ ID NO: 1492233 - RNA, 19 nt, Homo sapiens
  misc_RNA (1)...(19): siRNA sense strand
caucuauguucuccagcuu

SEQ ID NO: 1492234 - RNA, 19 nt, Homo sapiens
  misc_RNA (1)...(19): siRNA sense strand
gcgaaggguaucacagaug

SEQ ID NO: 1492235 - RNA, 19 nt, Homo sapiens
  misc_RNA (1)...(19): siRNA sense strand
cagcgucucaccuucacua

SEQ ID NO: 1492236 - RNA, 19 nt, Homo sapiens
  misc_RNA (1)...(19): siRNA sense strand
ugagaaguacggcaccauu

SEQ ID NO: 1492237 - RNA, 19 nt, Homo sapiens
  misc_RNA (1)...(19): siRNA sense strand
gaggagcaccgugugucua

SEQ ID NO: 1492238 - RNA, 19 nt, Homo sapiens
  misc_RNA (1)...(19): siRNA sense strand
ggagaagugccggcauuca

SEQ ID NO: 1492239 - RNA, 19 nt, Homo sapiens
  misc_RNA (1)...(19): siRNA sense strand
gcaccugcaagaacaaagu

SEQ ID NO: 1492240 - RNA, 19 nt, Homo sapiens
  misc_RNA (1)...(19): siRNA sense strand
gcgagacuucugacaucua

SEQ ID NO: 1492241 - RNA, 19 nt, Homo sapiens
  misc_RNA (1)...(19): siRNA sense strand
uuggagaagugccggcauu

SEQ ID NO: 1492242 - RNA, 19 nt, Homo sapiens
  misc_RNA (1)...(19): siRNA sense strand
ucuauguucuccagcuuuc

SEQ ID NO: 1492243 - RNA, 19 nt, Homo sapiens
  misc_RNA (1)...(19): siRNA sense strand
acaaagugacuguguccaa

SEQ ID NO: 1492244 - RNA, 19 nt, Homo sapiens
  misc_RNA (1)...(19): siRNA sense strand
gaccagcgucucaccuuca

SEQ ID NO: 1492245 - RNA, 19 nt, Homo sapiens
  misc_RNA (1)...(19): siRNA sense strand
cuacugcccagcuaugaga

SEQ ID NO: 1492246 - RNA, 19 nt, Homo sapiens
  misc_RNA (1)...(19): siRNA sense strand
gcccagcuaugagaaguac

SEQ ID NO: 1492247 - RNA, 19 nt, Homo sapiens
  misc_RNA (1)...(19): siRNA sense strand
ggaggagcaccgugugucu

SEQ ID NO: 1492248 - RNA, 19 nt, Homo sapiens
  misc_RNA (1)...(19): siRNA sense strand
ucauagauggcgagacuuc

SEQ ID NO: 1492249 - RNA, 19 nt, Homo sapiens
  misc_RNA (1)...(19): siRNA sense strand
agaaguacggcaccauugu

SEQ ID NO: 1492250 - RNA, 19 nt, Homo sapiens
  misc_RNA (1)...(19): siRNA sense strand
gggagcacccugagaugca

SEQ ID NO: 1492251 - RNA, 19 nt, Homo sapiens
  misc_RNA (1)...(19): siRNA sense strand
gagagcaccugccccaucu

SEQ ID NO: 1492252 - RNA, 19 nt, Homo sapiens
  misc_RNA (1)...(19): siRNA sense strand
gcaaccagccccagaaugg

SEQ ID NO: 1492253 - RNA, 19 nt, Homo sapiens
  misc_RNA (1)...(19): siRNA sense strand
gaaaggauaucauggauuc

SEQ ID NO: 1492254 - RNA, 19 nt, Homo sapiens
  misc_RNA (1)...(19): siRNA sense strand
gcagaguugugguucauua

SEQ ID NO: 1492255 - RNA, 19 nt, Homo sapiens
  misc_RNA (1)...(19): siRNA sense strand
gacauuggcucuuaagaug

SEQ ID NO: 1492256 - RNA, 19 nt, Homo sapiens
  misc_RNA (1)...(19): siRNA sense strand
caaggaacauuucacagaa

SEQ ID NO: 1492257 - RNA, 19 nt, Homo sapiens
  misc_RNA (1)...(19): siRNA sense strand
gcacaugcagucuacauuu

SEQ ID NO: 1492258 - RNA, 19 nt, Homo sapiens
  misc_RNA (1)...(19): siRNA sense strand
gaaaggugaaggagacaua

SEQ ID NO: 1492259 - RNA, 19 nt, Homo sapiens
  misc_RNA (1)...(19): siRNA sense strand
ugaaacaaaucauggaaga

SEQ ID NO: 1492260 - RNA, 19 nt, Homo sapiens
  misc_RNA (1)...(19): siRNA sense strand
gaacuucgacauggugaua

SEQ ID NO: 1492261 - RNA, 19 nt, Homo sapiens
  misc_RNA (1)...(19): siRNA sense strand
ggaccggguuucucagauu

SEQ ID NO: 1492262 - RNA, 19 nt, Homo sapiens
  misc_RNA (1)...(19): siRNA sense strand
cauaucaaguuaucaguug

SEQ ID NO: 1492263 - RNA, 19 nt, Homo sapiens
  misc_RNA (1)...(19): siRNA sense strand
cauaaugucaccaugcuua

SEQ ID NO: 1492264 - RNA, 19 nt, Homo sapiens
  misc_RNA (1)...(19): siRNA sense strand
ucaaggagaugaacaaugc

SEQ ID NO: 1492265 - RNA, 19 nt, Homo sapiens
  misc_RNA (1)...(19): siRNA sense strand
uaucauggauuccuuaaag

SEQ ID NO: 1492266 - RNA, 19 nt, Homo sapiens
  misc_RNA (1)...(19): siRNA sense strand
caagaucacggucauaaug

SEQ ID NO: 1492267 - RNA, 19 nt, Homo sapiens
  misc_RNA (1)...(19): siRNA sense strand
guuggaggcuugauggaaa

SEQ ID NO: 1492268 - RNA, 19 nt, Homo sapiens
  misc_RNA (1)...(19): siRNA sense strand
gugaacaccugucagaauc

SEQ ID NO: 1492269 - RNA, 19 nt, Homo sapiens
  misc_RNA (1)...(19): siRNA sense strand
ggaagccauuaucuacuga

SEQ ID NO: 1492270 - RNA, 19 nt, Homo sapiens
  misc_RNA (1)...(19): siRNA sense strand
ccaccuggcugcaaaugug

SEQ ID NO: 1492271 - RNA, 19 nt, Homo sapiens
  misc_RNA (1)...(19): siRNA sense strand
cuacuguccuuuccugauu

SEQ ID NO: 1492272 - RNA, 19 nt, Homo sapiens
  misc_RNA (1)...(19): siRNA sense strand
caacagcacaugcagucua

SEQ ID NO: 1492273 - RNA, 19 nt, Homo sapiens
  misc_RNA (1)...(19): siRNA sense strand
ggagaugaacaaugccuuu

SEQ ID NO: 1492274 - RNA, 19 nt, Homo sapiens
  misc_RNA (1)...(19): siRNA sense strand
gcucuuaagaugaaacaaa

SEQ ID NO: 1492275 - RNA, 19 nt, Homo sapiens
  misc_RNA (1)...(19): siRNA sense strand
ccucaagcccuaugucuuu

SEQ ID NO: 1492276 - RNA, 19 nt, Homo sapiens
  misc_RNA (1)...(19): siRNA sense strand
aaacaugguccgaguagaa

SEQ ID NO: 1492277 - RNA, 19 nt, Homo sapiens
  misc_RNA (1)...(19): siRNA sense strand
ggauaucauggauuccuua

SEQ ID NO: 1492278 - RNA, 19 nt, Homo sapiens
  misc_RNA (1)...(19): siRNA sense strand
ucaaggaacauuucacaga

SEQ ID NO: 1492279 - RNA, 19 nt, Homo sapiens
  misc_RNA (1)...(19): siRNA sense strand
ugucuuauguuccaguauu

SEQ ID NO: 1492280 - RNA, 19 nt, Homo sapiens
  misc_RNA (1)...(19): siRNA sense strand
ugaagaucaucaaagagaa

SEQ ID NO: 1492281 - RNA, 19 nt, Homo sapiens
  misc_RNA (1)...(19): siRNA sense strand
gaagacaagagauacaagu

SEQ ID NO: 1492282 - RNA, 19 nt, Homo sapiens
  misc_RNA (1)...(19): siRNA sense strand
gaagaucaucaaagagaau

SEQ ID NO: 1492283 - RNA, 19 nt, Homo sapiens
  misc_RNA (1)...(19): siRNA sense strand
ggacuggcuuccucagagu

SEQ ID NO: 1492284 - RNA, 19 nt, Homo sapiens
  misc_RNA (1)...(19): siRNA sense strand
ccacuucauucggcucuuu

SEQ ID NO: 1492285 - RNA, 19 nt, Homo sapiens
  misc_RNA (1)...(19): siRNA sense strand
uagaaaggauaucauggau

SEQ ID NO: 1492286 - RNA, 19 nt, Homo sapiens
  misc_RNA (1)...(19): siRNA sense strand
cauuggcucuuaagaugaa

SEQ ID NO: 1492287 - RNA, 19 nt, Homo sapiens
  misc_RNA (1)...(19): siRNA sense strand
ccaagcauccgucuguuug

SEQ ID NO: 1492288 - RNA, 19 nt, Homo sapiens
  misc_RNA (1)...(19): siRNA sense strand
cacaugcagucuacauuug

SEQ ID NO: 1492289 - RNA, 19 nt, Homo sapiens
  misc_RNA (1)...(19): siRNA sense strand
gaaugagaacuucgacaug

SEQ ID NO: 1492290 - RNA, 19 nt, Homo sapiens
  misc_RNA (1)...(19): siRNA sense strand
ucaccaugcuuaaccacaa

SEQ ID NO: 1492291 - RNA, 19 nt, Homo sapiens
  misc_RNA (1)...(19): siRNA sense strand
ugacaacaccaucaaggaa

SEQ ID NO: 1492292 - RNA, 19 nt, Homo sapiens
  misc_RNA (1)...(19): siRNA sense strand
gcucaaggcagagacauug

SEQ ID NO: 1492293 - RNA, 19 nt, Homo sapiens
  misc_RNA (1)...(19): siRNA sense strand
ugucucaucuucuacugaa

SEQ ID NO: 1492294 - RNA, 19 nt, Homo sapiens
  misc_RNA (1)...(19): siRNA sense strand
gcgagugcuucuucuagug

SEQ ID NO: 1492295 - RNA, 19 nt, Homo sapiens
  misc_RNA (1)...(19): siRNA sense strand
guucauuaacucugacuuu

SEQ ID NO: 1492296 - RNA, 19 nt, Homo sapiens
  misc_RNA (1)...(19): siRNA sense strand
gauaucauggauuccuuaa

SEQ ID NO: 1492297 - RNA, 19 nt, Homo sapiens
  misc_RNA (1)...(19): siRNA sense strand
gaccggguuucucagauuc

SEQ ID NO: 1492298 - RNA, 19 nt, Homo sapiens
  misc_RNA (1)...(19): siRNA sense strand
aaacaaaucauggaagaca

SEQ ID NO: 1492299 - RNA, 19 nt, Homo sapiens
  misc_RNA (1)...(19): siRNA sense strand
ggaagugucaguguucuca

SEQ ID NO: 1492300 - RNA, 19 nt, Homo sapiens
  misc_RNA (1)...(19): siRNA sense strand
guuccuugcugacugauca

SEQ ID NO: 1492301 - RNA, 19 nt, Homo sapiens
  misc_RNA (1)...(19): siRNA sense strand
ugacugaucacauggacuu

SEQ ID NO: 1492302 - RNA, 19 nt, Homo sapiens
  misc_RNA (1)...(19): siRNA sense strand
gccaaaauccugacaauau

SEQ ID NO: 1492303 - RNA, 19 nt, Homo sapiens
  misc_RNA (1)...(19): siRNA sense strand
gaugaacaaugccuuugcu

SEQ ID NO: 1492304 - RNA, 19 nt, Homo sapiens
  misc_RNA (1)...(19): siRNA sense strand
uaacucugacuuugccuuu

SEQ ID NO: 1492305 - RNA, 19 nt, Homo sapiens
  misc_RNA (1)...(19): siRNA sense strand
uagaauacuuggcguugca

SEQ ID NO: 1492306 - RNA, 19 nt, Homo sapiens
  misc_RNA (1)...(19): siRNA sense strand
gcagcgagugcuucuucua

SEQ ID NO: 1492307 - RNA, 19 nt, Homo sapiens
  misc_RNA (1)...(19): siRNA sense strand
ucauggaagacaagagaua

SEQ ID NO: 1492308 - RNA, 19 nt, Homo sapiens
  misc_RNA (1)...(19): siRNA sense strand
acucugacuuugccuuuga

SEQ ID NO: 1492309 - RNA, 19 nt, Homo sapiens
  misc_RNA (1)...(19): siRNA sense strand
gguggaagccauuaucuac

SEQ ID NO: 1492310 - RNA, 19 nt, Homo sapiens
  misc_RNA (1)...(19): siRNA sense strand
uggaagccauuaucuacug

SEQ ID NO: 1492311 - RNA, 19 nt, Homo sapiens
  misc_RNA (1)...(19): siRNA sense strand
ugguguuucuauucaguua

SEQ ID NO: 1492312 - RNA, 19 nt, Homo sapiens
  misc_RNA (1)...(19): siRNA sense strand
uaaagaaugagaacuucga

SEQ ID NO: 1492313 - RNA, 19 nt, Homo sapiens
  misc_RNA (1)...(19): siRNA sense strand
cugaagaucaucaaagaga

SEQ ID NO: 1492314 - RNA, 19 nt, Homo sapiens
  misc_RNA (1)...(19): siRNA sense strand
caccaugcuuaaccacaaa

SEQ ID NO: 1492315 - RNA, 19 nt, Homo sapiens
  misc_RNA (1)...(19): siRNA sense strand
gcaccugaagaucaucaaa

SEQ ID NO: 1492316 - RNA, 19 nt, Homo sapiens
  misc_RNA (1)...(19): siRNA sense strand
gggcagcgagugcuucuuc

SEQ ID NO: 1492317 - RNA, 19 nt, Homo sapiens
  misc_RNA (1)...(19): siRNA sense strand
gauauggaagugucagugu

SEQ ID NO: 1492318 - RNA, 19 nt, Homo sapiens
  misc_RNA (1)...(19): siRNA sense strand
caucaaggaacauuucaca

SEQ ID NO: 1492319 - RNA, 19 nt, Homo sapiens
  misc_RNA (1)...(19): siRNA sense strand
gggacucuauggcuuugug

SEQ ID NO: 1492320 - RNA, 19 nt, Homo sapiens
  misc_RNA (1)...(19): siRNA sense strand
gagaugaacaaugccuuug

SEQ ID NO: 1492321 - RNA, 19 nt, Homo sapiens
  misc_RNA (1)...(19): siRNA sense strand
uuaaaccaguaccacaaga

SEQ ID NO: 1492322 - RNA, 19 nt, Homo sapiens
  misc_RNA (1)...(19): siRNA sense strand
ugaaagcagaguugugguu

SEQ ID NO: 1492323 - RNA, 19 nt, Homo sapiens
  misc_RNA (1)...(19): siRNA sense strand
gaucacggucauaauguca

SEQ ID NO: 1492324 - RNA, 19 nt, Homo sapiens
  misc_RNA (1)...(19): siRNA sense strand
caaugccuuugcucaccua

SEQ ID NO: 1492325 - RNA, 19 nt, Homo sapiens
  misc_RNA (1)...(19): siRNA sense strand
ccaaaauccugacaauauc

SEQ ID NO: 1492326 - RNA, 19 nt, Homo sapiens
  misc_RNA (1)...(19): siRNA sense strand
agacauuggcucuuaagau

SEQ ID NO: 1492327 - RNA, 19 nt, Homo sapiens
  misc_RNA (1)...(19): siRNA sense strand
gggcagaauagcauaaugg

SEQ ID NO: 1492328 - RNA, 19 nt, Homo sapiens
  misc_RNA (1)...(19): siRNA sense strand
cuuaaagaaugagaacuuc

SEQ ID NO: 1492329 - RNA, 19 nt, Homo sapiens
  misc_RNA (1)...(19): siRNA sense strand
cgacauggugauaguugaa

SEQ ID NO: 1492330 - RNA, 19 nt, Homo sapiens
  misc_RNA (1)...(19): siRNA sense strand
accugaagaucaucaaaga

SEQ ID NO: 1492331 - RNA, 19 nt, Homo sapiens
  misc_RNA (1)...(19): siRNA sense strand
aaucauggaagacaagaga

SEQ ID NO: 1492332 - RNA, 19 nt, Homo sapiens
  misc_RNA (1)...(19): siRNA sense strand
gucagaauccggaaaucuu

SEQ ID NO: 1492333 - RNA, 19 nt, Homo sapiens
  misc_RNA (1)...(19): siRNA sense strand
ugacuuugccuuugauuuu

SEQ ID NO: 1492334 - RNA, 19 nt, Homo sapiens
  misc_RNA (1)...(19): siRNA sense strand
ucauggauuccuuaaagaa

SEQ ID NO: 1492335 - RNA, 19 nt, Homo sapiens
  misc_RNA (1)...(19): siRNA sense strand
gcuugcaccugaagaucau

SEQ ID NO: 1492336 - RNA, 19 nt, Homo sapiens
  misc_RNA (1)...(19): siRNA sense strand
aaagcagaguugugguuca

SEQ ID NO: 1492337 - RNA, 19 nt, Homo sapiens
  misc_RNA (1)...(19): siRNA sense strand
acaacaccaucaaggaaca

SEQ ID NO: 1492338 - RNA, 19 nt, Homo sapiens
  misc_RNA (1)...(19): siRNA sense strand
ccuuaaagaaugagaacuu

SEQ ID NO: 1492339 - RNA, 19 nt, Homo sapiens
  misc_RNA (1)...(19): siRNA sense strand
ggaagacaagagauacaag

SEQ ID NO: 1492340 - RNA, 19 nt, Homo sapiens
  misc_RNA (1)...(19): siRNA sense strand
gaaaacaugguccgaguag

SEQ ID NO: 1492341 - RNA, 19 nt, Homo sapiens
  misc_RNA (1)...(19): siRNA sense strand
aagugucaguguucucauu

SEQ ID NO: 1492342 - RNA, 19 nt, Homo sapiens
  misc_RNA (1)...(19): siRNA sense strand
agacuuggagaacuucauu

SEQ ID NO: 1492343 - RNA, 19 nt, Homo sapiens
  misc_RNA (1)...(19): siRNA sense strand
agaaggcucuaggccaguu

SEQ ID NO: 1492344 - RNA, 19 nt, Homo sapiens
  misc_RNA (1)...(19): siRNA sense strand
ccauuuguggccauucuuu

SEQ ID NO: 1492345 - RNA, 19 nt, Homo sapiens
  misc_RNA (1)...(19): siRNA sense strand
auagaaaggauaucaugga

SEQ ID NO: 1492346 - RNA, 19 nt, Homo sapiens
  misc_RNA (1)...(19): siRNA sense strand
uucauuaacucugacuuug

SEQ ID NO: 1492347 - RNA, 19 nt, Homo sapiens
  misc_RNA (1)...(19): siRNA sense strand
cagaguugugguucauuaa

SEQ ID NO: 1492348 - RNA, 19 nt, Homo sapiens
  misc_RNA (1)...(19): siRNA sense strand
ccaauccccuugucuuaug

SEQ ID NO: 1492349 - RNA, 19 nt, Homo sapiens
  misc_RNA (1)...(19): siRNA sense strand
ggaggcaacagcacaugca

SEQ ID NO: 1492350 - RNA, 19 nt, Homo sapiens
  misc_RNA (1)...(19): siRNA sense strand
guagguggaagccauuauc

SEQ ID NO: 1492351 - RNA, 19 nt, Homo sapiens
  misc_RNA (1)...(19): siRNA sense strand
uauuaaaccaguaccacaa

SEQ ID NO: 1492352 - RNA, 19 nt, Homo sapiens
  misc_RNA (1)...(19): siRNA sense strand
ugugguucauuaacucuga

SEQ ID NO: 1492353 - RNA, 19 nt, Homo sapiens
  misc_RNA (1)...(19): siRNA sense strand
acaccaagcugauggagua

SEQ ID NO: 1492354 - RNA, 19 nt, Homo sapiens
  misc_RNA (1)...(19): siRNA sense strand
gagcagggauggaggaaca

SEQ ID NO: 1492355 - RNA, 19 nt, Homo sapiens
  misc_RNA (1)...(19): siRNA sense strand
gaauaaaccagaagaaacu

SEQ ID NO: 1492356 - RNA, 19 nt, Homo sapiens
  misc_RNA (1)...(19): siRNA sense strand
ggacagaaucgcccugguu

SEQ ID NO: 1492357 - RNA, 19 nt, Homo sapiens
  misc_RNA (1)...(19): siRNA sense strand
gcggaucaaugucuuuaug

SEQ ID NO: 1492358 - RNA, 19 nt, Homo sapiens
  misc_RNA (1)...(19): siRNA sense strand
cuggauggcugguuuaaga

SEQ ID NO: 1492359 - RNA, 19 nt, Homo sapiens
  misc_RNA (1)...(19): siRNA sense strand
ccaagcugauggaguacua

SEQ ID NO: 1492360 - RNA, 19 nt, Homo sapiens
  misc_RNA (1)...(19): siRNA sense strand
ggagccaccugugugauga

SEQ ID NO: 1492361 - RNA, 19 nt, Homo sapiens
  misc_RNA (1)...(19): siRNA sense strand
ggaauaaaccagaagaaac

SEQ ID NO: 1492362 - RNA, 19 nt, Homo sapiens
  misc_RNA (1)...(19): siRNA sense strand
cgagaauacuggaauaaac

SEQ ID NO: 1492363 - RNA, 19 nt, Homo sapiens
  misc_RNA (1)...(19): siRNA sense strand
gaccaaagacgacgugauc

SEQ ID NO: 1492364 - RNA, 19 nt, Homo sapiens
  misc_RNA (1)...(19): siRNA sense strand
ggaaccagaugggcaagau

SEQ ID NO: 1492365 - RNA, 19 nt, Homo sapiens
  misc_RNA (1)...(19): siRNA sense strand
ucaaagagugggccagaaa

SEQ ID NO: 1492366 - RNA, 19 nt, Homo sapiens
  misc_RNA (1)...(19): siRNA sense strand
acacguacagggagcuuua

SEQ ID NO: 1492367 - RNA, 19 nt, Homo sapiens
  misc_RNA (1)...(19): siRNA sense strand
gcgcugcucuguccucucu

SEQ ID NO: 1492368 - RNA, 19 nt, Homo sapiens
  misc_RNA (1)...(19): siRNA sense strand
cggcccagcuggaguaugu

SEQ ID NO: 1492369 - RNA, 19 nt, Homo sapiens
  misc_RNA (1)...(19): siRNA sense strand
gggcaagauugacaagaag

SEQ ID NO: 1492370 - RNA, 19 nt, Homo sapiens
  misc_RNA (1)...(19): siRNA sense strand
ugggcaagauugacaagaa

SEQ ID NO: 1492371 - RNA, 19 nt, Homo sapiens
  misc_RNA (1)...(19): siRNA sense strand
gcgugcaguuugugaagaa

SEQ ID NO: 1492372 - RNA, 19 nt, Homo sapiens
  misc_RNA (1)...(19): siRNA sense strand
guucagcccucagcagguu

SEQ ID NO: 1492373 - RNA, 19 nt, Homo sapiens
  misc_RNA (1)...(19): siRNA sense strand
gaaacuaagagugcauuca

SEQ ID NO: 1492374 - RNA, 19 nt, Homo sapiens
  misc_RNA (1)...(19): siRNA sense strand
gguauggcaugaccgagau

SEQ ID NO: 1492375 - RNA, 19 nt, Homo sapiens
  misc_RNA (1)...(19): siRNA sense strand
ggaccucaguggacaucau

SEQ ID NO: 1492376 - RNA, 19 nt, Homo sapiens
  misc_RNA (1)...(19): siRNA sense strand
guucuuaaguucugaaacg

SEQ ID NO: 1492377 - RNA, 19 nt, Homo sapiens
  misc_RNA (1)...(19): siRNA sense strand
gaaccagaugggcaagauu

SEQ ID NO: 1492378 - RNA, 19 nt, Homo sapiens
  misc_RNA (1)...(19): siRNA sense strand
gaguacaggugcgcauugu

SEQ ID NO: 1492379 - RNA, 19 nt, Homo sapiens
  misc_RNA (1)...(19): siRNA sense strand
gauuggaguuccggauaug

SEQ ID NO: 1492380 - RNA, 19 nt, Homo sapiens
  misc_RNA (1)...(19): siRNA sense strand
gacaagaaggcgcucauca

SEQ ID NO: 1492381 - RNA, 19 nt, Homo sapiens
  misc_RNA (1)...(19): siRNA sense strand
ggaguacaggugcgcauug

SEQ ID NO: 1492382 - RNA, 19 nt, Homo sapiens
  misc_RNA (1)...(19): siRNA sense strand
ugauuggaguuccggauau

SEQ ID NO: 1492383 - RNA, 19 nt, Homo sapiens
  misc_RNA (1)...(19): siRNA sense strand
uuucgagaauacuggaaua

SEQ ID NO: 1492384 - RNA, 19 nt, Homo sapiens
  misc_RNA (1)...(19): siRNA sense strand
cacccuggauggcugguuu

SEQ ID NO: 1492385 - RNA, 19 nt, Homo sapiens
  misc_RNA (1)...(19): siRNA sense strand
gcacgcccaggauuucuug

SEQ ID NO: 1492386 - RNA, 19 nt, Homo sapiens
  misc_RNA (1)...(19): siRNA sense strand
gugauuggaguuccggaua

SEQ ID NO: 1492387 - RNA, 19 nt, Homo sapiens
  misc_RNA (1)...(19): siRNA sense strand
caauauacaccaagcugau

SEQ ID NO: 1492388 - RNA, 19 nt, Homo sapiens
  misc_RNA (1)...(19): siRNA sense strand
guacaggugcgcauugucu

SEQ ID NO: 1492389 - RNA, 19 nt, Homo sapiens
  misc_RNA (1)...(19): siRNA sense strand
caaagagugggccagaaau

SEQ ID NO: 1492390 - RNA, 19 nt, Homo sapiens
  misc_RNA (1)...(19): siRNA sense strand
caagugggcauggaccaaa

SEQ ID NO: 1492391 - RNA, 19 nt, Homo sapiens
  misc_RNA (1)...(19): siRNA sense strand
uggaauaaaccagaagaaa

SEQ ID NO: 1492392 - RNA, 19 nt, Homo sapiens
  misc_RNA (1)...(19): siRNA sense strand
gaagaaacuaagagugcau

SEQ ID NO: 1492393 - RNA, 19 nt, Homo sapiens
  misc_RNA (1)...(19): siRNA sense strand
guuuaaggauggccaguac

SEQ ID NO: 1492394 - RNA, 19 nt, Homo sapiens
  misc_RNA (1)...(19): siRNA sense strand
gagaaguggaagaacauca

SEQ ID NO: 1492395 - RNA, 19 nt, Homo sapiens
  misc_RNA (1)...(19): siRNA sense strand
ccacagggagcucaaagag

SEQ ID NO: 1492396 - RNA, 19 nt, Homo sapiens
  misc_RNA (1)...(19): siRNA sense strand
cgagaaggacacucacugu

SEQ ID NO: 1492397 - RNA, 19 nt, Homo sapiens
  misc_RNA (1)...(19): siRNA sense strand
cuggagaaguggaagaaca

SEQ ID NO: 1492398 - RNA, 19 nt, Homo sapiens
  misc_RNA (1)...(19): siRNA sense strand
ggucaacgcgcugcucugu

SEQ ID NO: 1492399 - RNA, 19 nt, Homo sapiens
  misc_RNA (1)...(19): siRNA sense strand
ucaguggacaucaucaaga

SEQ ID NO: 1492400 - RNA, 19 nt, Homo sapiens
  misc_RNA (1)...(19): siRNA sense strand
gcucacaccagccaucuac

SEQ ID NO: 1492401 - RNA, 19 nt, Homo sapiens
  misc_RNA (1)...(19): siRNA sense strand
aaagagugggccagaaaug

SEQ ID NO: 1492402 - RNA, 19 nt, Homo sapiens
  misc_RNA (1)...(19): siRNA sense strand
gggagccaccugugugaug

SEQ ID NO: 1492403 - RNA, 19 nt, Homo sapiens
  misc_RNA (1)...(19): siRNA sense strand
agauguggcugugauugga

SEQ ID NO: 1492404 - RNA, 19 nt, Homo sapiens
  misc_RNA (1)...(19): siRNA sense strand
ccgcggaucaaugucuuua

SEQ ID NO: 1492405 - RNA, 19 nt, Homo sapiens
  misc_RNA (1)...(19): siRNA sense strand
gcacuuccaccccucauga

SEQ ID NO: 1492406 - RNA, 19 nt, Homo sapiens
  misc_RNA (1)...(19): siRNA sense strand
guacagggagcuuuauucc

SEQ ID NO: 1492407 - RNA, 19 nt, Homo sapiens
  misc_RNA (1)...(19): siRNA sense strand
ggugcgcauugucucagaa

SEQ ID NO: 1492408 - RNA, 19 nt, Homo sapiens
  misc_RNA (1)...(19): siRNA sense strand
ucgagaauacuggaauaaa

SEQ ID NO: 1492409 - RNA, 19 nt, Homo sapiens
  misc_RNA (1)...(19): siRNA sense strand
gagaauacuggaauaaacc

SEQ ID NO: 1492410 - RNA, 19 nt, Homo sapiens
  misc_RNA (1)...(19): siRNA sense strand
ggaccaaagacgacgugau

SEQ ID NO: 1492411 - RNA, 19 nt, Homo sapiens
  misc_RNA (1)...(19): siRNA sense strand
ugagcccgguggucaggaa

SEQ ID NO: 1492412 - RNA, 19 nt, Homo sapiens
  misc_RNA (1)...(19): siRNA sense strand
gugugaugaugccugaguu

SEQ ID NO: 1492413 - RNA, 19 nt, Homo sapiens
  misc_RNA (1)...(19): siRNA sense strand
aaccagaugggcaagauug

SEQ ID NO: 1492414 - RNA, 19 nt, Homo sapiens
  misc_RNA (1)...(19): siRNA sense strand
caguggacaucaucaagac

SEQ ID NO: 1492415 - RNA, 19 nt, Homo sapiens
  misc_RNA (1)...(19): siRNA sense strand
gcagguuugggaagaguuc

SEQ ID NO: 1492416 - RNA, 19 nt, Homo sapiens
  misc_RNA (1)...(19): siRNA sense strand
gcagugccuacaauauaca

SEQ ID NO: 1492417 - RNA, 19 nt, Homo sapiens
  misc_RNA (1)...(19): siRNA sense strand
cagaugggcaagauugaca

SEQ ID NO: 1492418 - RNA, 19 nt, Homo sapiens
  misc_RNA (1)...(19): siRNA sense strand
aaaccagaagaaacuaaga

SEQ ID NO: 1492419 - RNA, 19 nt, Homo sapiens
  misc_RNA (1)...(19): siRNA sense strand
uaaaccagaagaaacuaag

SEQ ID NO: 1492420 - RNA, 19 nt, Homo sapiens
  misc_RNA (1)...(19): siRNA sense strand
gagaucggcauggcucugu

SEQ ID NO: 1492421 - RNA, 19 nt, Homo sapiens
  misc_RNA (1)...(19): siRNA sense strand
caagagagguggcagcaaa

SEQ ID NO: 1492422 - RNA, 19 nt, Homo sapiens
  misc_RNA (1)...(19): siRNA sense strand
gagccgaucuccucacaag

SEQ ID NO: 1492423 - RNA, 19 nt, Homo sapiens
  misc_RNA (1)...(19): siRNA sense strand
gcaauuaccgcucccacuu

SEQ ID NO: 1492424 - RNA, 19 nt, Homo sapiens
  misc_RNA (1)...(19): siRNA sense strand
ucacaagggagucaagaga

SEQ ID NO: 1492425 - RNA, 19 nt, Homo sapiens
  misc_RNA (1)...(19): siRNA sense strand
cgaccagccgcaaauuaaa

SEQ ID NO: 1492426 - RNA, 19 nt, Homo sapiens
  misc_RNA (1)...(19): siRNA sense strand
ucgaccagccgcaaauuaa

SEQ ID NO: 1492427 - RNA, 19 nt, Homo sapiens
  misc_RNA (1)...(19): siRNA sense strand
caauuaccgcucccacuug

SEQ ID NO: 1492428 - RNA, 19 nt, Homo sapiens
  misc_RNA (1)...(19): siRNA sense strand
gucgaccagccgcaaauua

SEQ ID NO: 1492429 - RNA, 19 nt, Homo sapiens
  misc_RNA (1)...(19): siRNA sense strand
gaugacgccaaucgcaauu

SEQ ID NO: 1492430 - RNA, 19 nt, Homo sapiens
  misc_RNA (1)...(19): siRNA sense strand
ggcaugaggaggagcaaga

SEQ ID NO: 1492431 - RNA, 19 nt, Homo sapiens
  misc_RNA (1)...(19): siRNA sense strand
gcaaaagaaaauaccguaa

SEQ ID NO: 1492432 - RNA, 19 nt, Homo sapiens
  misc_RNA (1)...(19): siRNA sense strand
ugacgccaaucgcaauuac

SEQ ID NO: 1492433 - RNA, 19 nt, Homo sapiens
  misc_RNA (1)...(19): siRNA sense strand
gaccagccgcaaauuaaag

SEQ ID NO: 1492434 - RNA, 19 nt, Homo sapiens
  misc_RNA (1)...(19): siRNA sense strand
uuaccgcucccacuuguga

SEQ ID NO: 1492435 - RNA, 19 nt, Homo sapiens
  misc_RNA (1)...(19): siRNA sense strand
aauuaccgcucccacuugu

SEQ ID NO: 1492436 - RNA, 19 nt, Homo sapiens
  misc_RNA (1)...(19): siRNA sense strand
aagagccgaucuccucaca

SEQ ID NO: 1492437 - RNA, 19 nt, Homo sapiens
  misc_RNA (1)...(19): siRNA sense strand
aaaagaaaauaccguaagg

SEQ ID NO: 1492438 - RNA, 19 nt, Homo sapiens
  misc_RNA (1)...(19): siRNA sense strand
gaaagaagauuccauuaug

SEQ ID NO: 1492439 - RNA, 19 nt, Homo sapiens
  misc_RNA (1)...(19): siRNA sense strand
aaacaaagaugaagcauug

SEQ ID NO: 1492440 - RNA, 19 nt, Homo sapiens
  misc_RNA (1)...(19): siRNA sense strand
gaaauggacugucucuuau

SEQ ID NO: 1492441 - RNA, 19 nt, Homo sapiens
  misc_RNA (1)...(19): siRNA sense strand
caacaacacugcauuauag

SEQ ID NO: 1492442 - RNA, 19 nt, Homo sapiens
  misc_RNA (1)...(19): siRNA sense strand
ggaaaugguuauucucuuu

SEQ ID NO: 1492443 - RNA, 19 nt, Homo sapiens
  misc_RNA (1)...(19): siRNA sense strand
gaauugaucuucagcaguu

SEQ ID NO: 1492444 - RNA, 19 nt, Homo sapiens
  misc_RNA (1)...(19): siRNA sense strand
ccagaaaucuacugccuua

SEQ ID NO: 1492445 - RNA, 19 nt, Homo sapiens
  misc_RNA (1)...(19): siRNA sense strand
gaaucaagcuucucauuuc

SEQ ID NO: 1492446 - RNA, 19 nt, Homo sapiens
  misc_RNA (1)...(19): siRNA sense strand
gauuauggcucaucagaaa

SEQ ID NO: 1492447 - RNA, 19 nt, Homo sapiens
  misc_RNA (1)...(19): siRNA sense strand
ggaggaaaguguacaaaug

SEQ ID NO: 1492448 - RNA, 19 nt, Homo sapiens
  misc_RNA (1)...(19): siRNA sense strand
ugauagagcuuccugauga

SEQ ID NO: 1492449 - RNA, 19 nt, Homo sapiens
  misc_RNA (1)...(19): siRNA sense strand
gaauaucuuugcccucuuu

SEQ ID NO: 1492450 - RNA, 19 nt, Homo sapiens
  misc_RNA (1)...(19): siRNA sense strand
gaaacuggcuuagagaaug

SEQ ID NO: 1492451 - RNA, 19 nt, Homo sapiens
  misc_RNA (1)...(19): siRNA sense strand
ugacagaaguaucucuaua

SEQ ID NO: 1492452 - RNA, 19 nt, Homo sapiens
  misc_RNA (1)...(19): siRNA sense strand
gcaaaucucugugcaauac

SEQ ID NO: 1492453 - RNA, 19 nt, Homo sapiens
  misc_RNA (1)...(19): siRNA sense strand
gaagcacaguggagcauuu

SEQ ID NO: 1492454 - RNA, 19 nt, Homo sapiens
  misc_RNA (1)...(19): siRNA sense strand
gcaacaacacugcauuaua

SEQ ID NO: 1492455 - RNA, 19 nt, Homo sapiens
  misc_RNA (1)...(19): siRNA sense strand
guaagauccuucaugaauu

SEQ ID NO: 1492456 - RNA, 19 nt, Homo sapiens
  misc_RNA (1)...(19): siRNA sense strand
gagaagauccagauauuug

SEQ ID NO: 1492457 - RNA, 19 nt, Homo sapiens
  misc_RNA (1)...(19): siRNA sense strand
agacacagauucuaacuug

SEQ ID NO: 1492458 - RNA, 19 nt, Homo sapiens
  misc_RNA (1)...(19): siRNA sense strand
gcaguaauaugugaccuaa

SEQ ID NO: 1492459 - RNA, 19 nt, Homo sapiens
  misc_RNA (1)...(19): siRNA sense strand
guauuacacucagagauua

SEQ ID NO: 1492460 - RNA, 19 nt, Homo sapiens
  misc_RNA (1)...(19): siRNA sense strand
gugaagcgauuaagagaaa

SEQ ID NO: 1492461 - RNA, 19 nt, Homo sapiens
  misc_RNA (1)...(19): siRNA sense strand
ucauaaggcuucaagauug

SEQ ID NO: 1492462 - RNA, 19 nt, Homo sapiens
  misc_RNA (1)...(19): siRNA sense strand
cagaugcaauugaagaaua

SEQ ID NO: 1492463 - RNA, 19 nt, Homo sapiens
  misc_RNA (1)...(19): siRNA sense strand
caacauguguacucuguau

SEQ ID NO: 1492464 - RNA, 19 nt, Homo sapiens
  misc_RNA (1)...(19): siRNA sense strand
agaaauggacugucucuua

SEQ ID NO: 1492465 - RNA, 19 nt, Homo sapiens
  misc_RNA (1)...(19): siRNA sense strand
uaagauccuucaugaauug

SEQ ID NO: 1492466 - RNA, 19 nt, Homo sapiens
  misc_RNA (1)...(19): siRNA sense strand
ucaguuaguucuuccuaua

SEQ ID NO: 1492467 - RNA, 19 nt, Homo sapiens
  misc_RNA (1)...(19): siRNA sense strand
uaaacaaaguggccacauu

SEQ ID NO: 1492468 - RNA, 19 nt, Homo sapiens
  misc_RNA (1)...(19): siRNA sense strand
caaauagcaucaaggaaau

SEQ ID NO: 1492469 - RNA, 19 nt, Homo sapiens
  misc_RNA (1)...(19): siRNA sense strand
ucaaauagcaucaaggaaa

SEQ ID NO: 1492470 - RNA, 19 nt, Homo sapiens
  misc_RNA (1)...(19): siRNA sense strand
cggaaucuauuaagaauga

SEQ ID NO: 1492471 - RNA, 19 nt, Homo sapiens
  misc_RNA (1)...(19): siRNA sense strand
uagcaaggcugaacauaug

SEQ ID NO: 1492472 - RNA, 19 nt, Homo sapiens
  misc_RNA (1)...(19): siRNA sense strand
ccaaauggcuuuucauauu

SEQ ID NO: 1492473 - RNA, 19 nt, Homo sapiens
  misc_RNA (1)...(19): siRNA sense strand
ggaagagcagguacuauaa

SEQ ID NO: 1492474 - RNA, 19 nt, Homo sapiens
  misc_RNA (1)...(19): siRNA sense strand
ggaugaauauggagaaaca

SEQ ID NO: 1492475 - RNA, 19 nt, Homo sapiens
  misc_RNA (1)...(19): siRNA sense strand
uauaagacaugcuaaagga

SEQ ID NO: 1492476 - RNA, 19 nt, Homo sapiens
  misc_RNA (1)...(19): siRNA sense strand
gaagaagaaguaacauuug

SEQ ID NO: 1492477 - RNA, 19 nt, Homo sapiens
  misc_RNA (1)...(19): siRNA sense strand
gcugagauguggcgaagaa

SEQ ID NO: 1492478 - RNA, 19 nt, Homo sapiens
  misc_RNA (1)...(19): siRNA sense strand
ggaagaguauaugcaguaa

SEQ ID NO: 1492479 - RNA, 19 nt, Homo sapiens
  misc_RNA (1)...(19): siRNA sense strand
ggacaaauugggaagagua

SEQ ID NO: 1492480 - RNA, 19 nt, Homo sapiens
  misc_RNA (1)...(19): siRNA sense strand
ggaaaucagcgcggaguua

SEQ ID NO: 1492481 - RNA, 19 nt, Homo sapiens
  misc_RNA (1)...(19): siRNA sense strand
auaaacaacugcagaaaga

SEQ ID NO: 1492482 - RNA, 19 nt, Homo sapiens
  misc_RNA (1)...(19): siRNA sense strand
guacuuauuuggagaagau

SEQ ID NO: 1492483 - RNA, 19 nt, Homo sapiens
  misc_RNA (1)...(19): siRNA sense strand
ggaauauccuuuacguugu

SEQ ID NO: 1492484 - RNA, 19 nt, Homo sapiens
  misc_RNA (1)...(19): siRNA sense strand
guucagauguuuacuguuc

SEQ ID NO: 1492485 - RNA, 19 nt, Homo sapiens
  misc_RNA (1)...(19): siRNA sense strand
agaaguaucucuauaacug

SEQ ID NO: 1492486 - RNA, 19 nt, Homo sapiens
  misc_RNA (1)...(19): siRNA sense strand
ggaagcaaaggaagauaua

SEQ ID NO: 1492487 - RNA, 19 nt, Homo sapiens
  misc_RNA (1)...(19): siRNA sense strand
gaaauuugcuuugcgucuu

SEQ ID NO: 1492488 - RNA, 19 nt, Homo sapiens
  misc_RNA (1)...(19): siRNA sense strand
ccagauauuugcuuagaga

SEQ ID NO: 1492489 - RNA, 19 nt, Homo sapiens
  misc_RNA (1)...(19): siRNA sense strand
gaaaugugaccaaagaaga

SEQ ID NO: 1492490 - RNA, 19 nt, Homo sapiens
  misc_RNA (1)...(19): siRNA sense strand
aauggacugucucuuauua

SEQ ID NO: 1492491 - RNA, 19 nt, Homo sapiens
  misc_RNA (1)...(19): siRNA sense strand
gaagagcagguacuauaaa

SEQ ID NO: 1492492 - RNA, 19 nt, Homo sapiens
  misc_RNA (1)...(19): siRNA sense strand
ccacugccauugacaaaga

SEQ ID NO: 1492493 - RNA, 19 nt, Homo sapiens
  misc_RNA (1)...(19): siRNA sense strand
gaucauggcucagaugucu

SEQ ID NO: 1492494 - RNA, 19 nt, Homo sapiens
  misc_RNA (1)...(19): siRNA sense strand
gcaaagugauuaaccuucu

SEQ ID NO: 1492495 - RNA, 19 nt, Homo sapiens
  misc_RNA (1)...(19): siRNA sense strand
gcagagaagaaauguauga

SEQ ID NO: 1492496 - RNA, 19 nt, Homo sapiens
  misc_RNA (1)...(19): siRNA sense strand
gacagaaguaucucuauaa

SEQ ID NO: 1492497 - RNA, 19 nt, Homo sapiens
  misc_RNA (1)...(19): siRNA sense strand
cuauagaucuguuucaugu

SEQ ID NO: 1492498 - RNA, 19 nt, Homo sapiens
  misc_RNA (1)...(19): siRNA sense strand
gaaagugccaccugaugaa

SEQ ID NO: 1492499 - RNA, 19 nt, Homo sapiens
  misc_RNA (1)...(19): siRNA sense strand
caaaggaauuccccaguua

SEQ ID NO: 1492500 - RNA, 19 nt, Homo sapiens
  misc_RNA (1)...(19): siRNA sense strand
ggcauuggguuuacuagaa

SEQ ID NO: 1492501 - RNA, 19 nt, Homo sapiens
  misc_RNA (1)...(19): siRNA sense strand
guacaaucguguggacaua

SEQ ID NO: 1492502 - RNA, 19 nt, Homo sapiens
  misc_RNA (1)...(19): siRNA sense strand
ggacaggaacaauaaauuc

SEQ ID NO: 1492503 - RNA, 19 nt, Homo sapiens
  misc_RNA (1)...(19): siRNA sense strand
gcagaaagaauauaucagu

SEQ ID NO: 1492504 - RNA, 19 nt, Homo sapiens
  misc_RNA (1)...(19): siRNA sense strand
gccagaauaucagguuaua

SEQ ID NO: 1492505 - RNA, 19 nt, Homo sapiens
  misc_RNA (1)...(19): siRNA sense strand
uaagaaaccagguguauca

SEQ ID NO: 1492506 - RNA, 19 nt, Homo sapiens
  misc_RNA (1)...(19): siRNA sense strand
aaacaaaguggccacauuu

SEQ ID NO: 1492507 - RNA, 19 nt, Homo sapiens
  misc_RNA (1)...(19): siRNA sense strand
ugagagaaaucauucacuu

SEQ ID NO: 1492508 - RNA, 19 nt, Homo sapiens
  misc_RNA (1)...(19): siRNA sense strand
acagaaagauuaagaaugc

SEQ ID NO: 1492509 - RNA, 19 nt, Homo sapiens
  misc_RNA (1)...(19): siRNA sense strand
gaucagcaaacccacaaua

SEQ ID NO: 1492510 - RNA, 19 nt, Homo sapiens
  misc_RNA (1)...(19): siRNA sense strand
gcuauacuauguucucaga

SEQ ID NO: 1492511 - RNA, 19 nt, Homo sapiens
  misc_RNA (1)...(19): siRNA sense strand
ccaagagacuaaucagaug

SEQ ID NO: 1492512 - RNA, 19 nt, Homo sapiens
  misc_RNA (1)...(19): siRNA sense strand
gcgaagaaauggacugucu

SEQ ID NO: 1492513 - RNA, 19 nt, Homo sapiens
  misc_RNA (1)...(19): siRNA sense strand
ggcguugagucuucgauua

SEQ ID NO: 1492514 - RNA, 19 nt, Homo sapiens
  misc_RNA (1)...(19): siRNA sense strand
gaucggaaucuauuaagaa

SEQ ID NO: 1492515 - RNA, 19 nt, Homo sapiens
  misc_RNA (1)...(19): siRNA sense strand
caaagaagaggucacaaug

SEQ ID NO: 1492516 - RNA, 19 nt, Homo sapiens
  misc_RNA (1)...(19): siRNA sense strand
gcagaggcccaguugcaua

SEQ ID NO: 1492517 - RNA, 19 nt, Homo sapiens
  misc_RNA (1)...(19): siRNA sense strand
caccaugccuucugucuau

SEQ ID NO: 1492518 - RNA, 19 nt, Homo sapiens
  misc_RNA (1)...(19): siRNA sense strand
gcaguugcacagaggauua

SEQ ID NO: 1492519 - RNA, 19 nt, Homo sapiens
  misc_RNA (1)...(19): siRNA sense strand
agaaaugccugggaaagaa

SEQ ID NO: 1492520 - RNA, 19 nt, Homo sapiens
  misc_RNA (1)...(19): siRNA sense strand
gcaaaggaagauauaaaga

SEQ ID NO: 1492521 - RNA, 19 nt, Homo sapiens
  misc_RNA (1)...(19): siRNA sense strand
ccaggacaguguucauaaa

SEQ ID NO: 1492522 - RNA, 19 nt, Homo sapiens
  misc_RNA (1)...(19): siRNA sense strand
gaacauuugcugccaggaa

SEQ ID NO: 1492523 - RNA, 19 nt, Homo sapiens
  misc_RNA (1)...(19): siRNA sense strand
caacugugauaucaugaug

SEQ ID NO: 1492524 - RNA, 19 nt, Homo sapiens
  misc_RNA (1)...(19): siRNA sense strand
gaaaucauucacuugcuuu

SEQ ID NO: 1492525 - RNA, 19 nt, Homo sapiens
  misc_RNA (1)...(19): siRNA sense strand
gcaagacaguaguacaauc

SEQ ID NO: 1492526 - RNA, 19 nt, Homo sapiens
  misc_RNA (1)...(19): siRNA sense strand
uaaagaaugucacaaagcu

SEQ ID NO: 1492527 - RNA, 19 nt, Homo sapiens
  misc_RNA (1)...(19): siRNA sense strand
ggacagaaagauuaagaau

SEQ ID NO: 1492528 - RNA, 19 nt, Homo sapiens
  misc_RNA (1)...(19): siRNA sense strand
gggaagaguauaugcagua

SEQ ID NO: 1492529 - RNA, 19 nt, Homo sapiens
  misc_RNA (1)...(19): siRNA sense strand
guuacaagaugcauacuuc

SEQ ID NO: 1492530 - RNA, 19 nt, Homo sapiens
  misc_RNA (1)...(19): siRNA sense strand
gaaccugacucggagaauc

SEQ ID NO: 1492531 - RNA, 19 nt, Homo sapiens
  misc_RNA (1)...(19): siRNA sense strand
gugcugacgugcauccuuu

SEQ ID NO: 1492532 - RNA, 19 nt, Homo sapiens
  misc_RNA (1)...(19): siRNA sense strand
ggaucggaaucuauuaaga

SEQ ID NO: 1492533 - RNA, 19 nt, Homo sapiens
  misc_RNA (1)...(19): siRNA sense strand
gaagggaugcuccaaaugg

SEQ ID NO: 1492534 - RNA, 19 nt, Homo sapiens
  misc_RNA (1)...(19): siRNA sense strand
uaaugaaacuggcuuagag

SEQ ID NO: 1492535 - RNA, 19 nt, Homo sapiens
  misc_RNA (1)...(19): siRNA sense strand
uaauggaucccaauaaguu

SEQ ID NO: 1492536 - RNA, 19 nt, Homo sapiens
  misc_RNA (1)...(19): siRNA sense strand
gauguuaagugcagagaag

SEQ ID NO: 1492537 - RNA, 19 nt, Homo sapiens
  misc_RNA (1)...(19): siRNA sense strand
ggaaacaaaguccuacaga

SEQ ID NO: 1492538 - RNA, 19 nt, Homo sapiens
  misc_RNA (1)...(19): siRNA sense strand
gggaaagccuucaguguua

SEQ ID NO: 1492539 - RNA, 19 nt, Homo sapiens
  misc_RNA (1)...(19): siRNA sense strand
ggaauugguucacagauuu

SEQ ID NO: 1492540 - RNA, 19 nt, Homo sapiens
  misc_RNA (1)...(19): siRNA sense strand
gaaaugguuugcaguguaa

SEQ ID NO: 1492541 - RNA, 19 nt, Homo sapiens
  misc_RNA (1)...(19): siRNA sense strand
gagaaacccuauaaaugua

SEQ ID NO: 1492542 - RNA, 19 nt, Homo sapiens
  misc_RNA (1)...(19): siRNA sense strand
ggaggaaacucaaggagaa

SEQ ID NO: 1492543 - RNA, 19 nt, Homo sapiens
  misc_RNA (1)...(19): siRNA sense strand
gggaaggccuuuauucgua

SEQ ID NO: 1492544 - RNA, 19 nt, Homo sapiens
  misc_RNA (1)...(19): siRNA sense strand
caacuuacuuuacaucuga

SEQ ID NO: 1492545 - RNA, 19 nt, Homo sapiens
  misc_RNA (1)...(19): siRNA sense strand
cgacuuacauuacaucaaa

SEQ ID NO: 1492546 - RNA, 19 nt, Homo sapiens
  misc_RNA (1)...(19): siRNA sense strand
gaacuuacucggcaucaua

SEQ ID NO: 1492547 - RNA, 19 nt, Homo sapiens
  misc_RNA (1)...(19): siRNA sense strand
caacaucacagaauucaua

SEQ ID NO: 1492548 - RNA, 19 nt, Homo sapiens
  misc_RNA (1)...(19): siRNA sense strand
aaagagcccuggauaguaa

SEQ ID NO: 1492549 - RNA, 19 nt, Homo sapiens
  misc_RNA (1)...(19): siRNA sense strand
ggagagacccuaugaaugu

SEQ ID NO: 1492550 - RNA, 19 nt, Homo sapiens
  misc_RNA (1)...(19): siRNA sense strand
agacaacagucauaccuua

SEQ ID NO: 1492551 - RNA, 19 nt, Homo sapiens
  misc_RNA (1)...(19): siRNA sense strand
caacuuacuuuacaucaga

SEQ ID NO: 1492552 - RNA, 19 nt, Homo sapiens
  misc_RNA (1)...(19): siRNA sense strand
gcuauaaucuuacucaaca

SEQ ID NO: 1492553 - RNA, 19 nt, Homo sapiens
  misc_RNA (1)...(19): siRNA sense strand
gcacucacuuucuauaaug

SEQ ID NO: 1492554 - RNA, 19 nt, Homo sapiens
  misc_RNA (1)...(19): siRNA sense strand
gaacaucagagaauacauu

SEQ ID NO: 1492555 - RNA, 19 nt, Homo sapiens
  misc_RNA (1)...(19): siRNA sense strand
gaaagagcccuggauagua

SEQ ID NO: 1492556 - RNA, 19 nt, Homo sapiens
  misc_RNA (1)...(19): siRNA sense strand
guacaaggaugugauguug

SEQ ID NO: 1492557 - RNA, 19 nt, Homo sapiens
  misc_RNA (1)...(19): siRNA sense strand
gaacuuacccgacaucaca

SEQ ID NO: 1492558 - RNA, 19 nt, Homo sapiens
  misc_RNA (1)...(19): siRNA sense strand
agagagaccuuaugaaugu

SEQ ID NO: 1492559 - RNA, 19 nt, Homo sapiens
  misc_RNA (1)...(19): siRNA sense strand
gagaaacccuaugaaugua

SEQ ID NO: 1492560 - RNA, 19 nt, Homo sapiens
  misc_RNA (1)...(19): siRNA sense strand
gagaaacccuaugaaugua

SEQ ID NO: 1492561 - RNA, 19 nt, Homo sapiens
  misc_RNA (1)...(19): siRNA sense strand
gagaaacccuaugaaugua

SEQ ID NO: 1492562 - RNA, 19 nt, Homo sapiens
  misc_RNA (1)...(19): siRNA sense strand
gcacucaucucacgcaaca

SEQ ID NO: 1492563 - RNA, 19 nt, Homo sapiens
  misc_RNA (1)...(19): siRNA sense strand
ggagagagaccuuaugaau

SEQ ID NO: 1492564 - RNA, 19 nt, Homo sapiens
  misc_RNA (1)...(19): siRNA sense strand
gaaguccuaugcauaaugu

SEQ ID NO: 1492565 - RNA, 19 nt, Homo sapiens
  misc_RNA (1)...(19): siRNA sense strand
cgacaucacagaauucaua

SEQ ID NO: 1492566 - RNA, 19 nt, Homo sapiens
  misc_RNA (1)...(19): siRNA sense strand
cgacaucacagaauucaua

SEQ ID NO: 1492567 - RNA, 19 nt, Homo sapiens
  misc_RNA (1)...(19): siRNA sense strand
gggaaggccuuuagucaug

SEQ ID NO: 1492568 - RNA, 19 nt, Homo sapiens
  misc_RNA (1)...(19): siRNA sense strand
gggaaugccuuucgucuuc

SEQ ID NO: 1492569 - RNA, 19 nt, Homo sapiens
  misc_RNA (1)...(19): siRNA sense strand
gagaaacccuacgaaugua

SEQ ID NO: 1492570 - RNA, 19 nt, Homo sapiens
  misc_RNA (1)...(19): siRNA sense strand
uaaagaaugugggaagauu

SEQ ID NO: 1492571 - RNA, 19 nt, Homo sapiens
  misc_RNA (1)...(19): siRNA sense strand
ucacagauuuggaauacaa

SEQ ID NO: 1492572 - RNA, 19 nt, Homo sapiens
  misc_RNA (1)...(19): siRNA sense strand
ugagaggccuuaugaaugu

SEQ ID NO: 1492573 - RNA, 19 nt, Homo sapiens
  misc_RNA (1)...(19): siRNA sense strand
ggaaagccuucaguguuaa

SEQ ID NO: 1492574 - RNA, 19 nt, Homo sapiens
  misc_RNA (1)...(19): siRNA sense strand
ccauagaccucucccaaga

SEQ ID NO: 1492575 - RNA, 19 nt, Homo sapiens
  misc_RNA (1)...(19): siRNA sense strand
agucgucgcuauaaucuua

SEQ ID NO: 1492576 - RNA, 19 nt, Homo sapiens
  misc_RNA (1)...(19): siRNA sense strand
gggaaggccuuuauuugug

SEQ ID NO: 1492577 - RNA, 19 nt, Homo sapiens
  misc_RNA (1)...(19): siRNA sense strand
ccaagaauuugcuuucaga

SEQ ID NO: 1492578 - RNA, 19 nt, Homo sapiens
  misc_RNA (1)...(19): siRNA sense strand
ucacagaauucauacaugu

SEQ ID NO: 1492579 - RNA, 19 nt, Homo sapiens
  misc_RNA (1)...(19): siRNA sense strand
cuggugagcuuccauauga

SEQ ID NO: 1492580 - RNA, 19 nt, Homo sapiens
  misc_RNA (1)...(19): siRNA sense strand
ugagaaacccuauaaaugu

SEQ ID NO: 1492581 - RNA, 19 nt, Homo sapiens
  misc_RNA (1)...(19): siRNA sense strand
ccuuauagcuguaaagaau

SEQ ID NO: 1492582 - RNA, 19 nt, Homo sapiens
  misc_RNA (1)...(19): siRNA sense strand
caacagucauaccuuauuc

SEQ ID NO: 1492583 - RNA, 19 nt, Homo sapiens
  misc_RNA (1)...(19): siRNA sense strand
gguaucaucuuacucaaca

SEQ ID NO: 1492584 - RNA, 19 nt, Homo sapiens
  misc_RNA (1)...(19): siRNA sense strand
ucaacuaacugaacaucaa

SEQ ID NO: 1492585 - RNA, 19 nt, Homo sapiens
  misc_RNA (1)...(19): siRNA sense strand
agaaaugguuugcagugua

SEQ ID NO: 1492586 - RNA, 19 nt, Homo sapiens
  misc_RNA (1)...(19): siRNA sense strand
gagagacccuaugaaugua

SEQ ID NO: 1492587 - RNA, 19 nt, Homo sapiens
  misc_RNA (1)...(19): siRNA sense strand
gucaaacccuauaaaugua

SEQ ID NO: 1492588 - RNA, 19 nt, Homo sapiens
  misc_RNA (1)...(19): siRNA sense strand
gagaaaccuuauagcugua

SEQ ID NO: 1492589 - RNA, 19 nt, Homo sapiens
  misc_RNA (1)...(19): siRNA sense strand
cagcaucacagaauucaua

SEQ ID NO: 1492590 - RNA, 19 nt, Homo sapiens
  misc_RNA (1)...(19): siRNA sense strand
ugagaaacccuaugaaugu

SEQ ID NO: 1492591 - RNA, 19 nt, Homo sapiens
  misc_RNA (1)...(19): siRNA sense strand
ugagaaacccuacauaugu

SEQ ID NO: 1492592 - RNA, 19 nt, Homo sapiens
  misc_RNA (1)...(19): siRNA sense strand
ccggugagauucccuauga

SEQ ID NO: 1492593 - RNA, 19 nt, Homo sapiens
  misc_RNA (1)...(19): siRNA sense strand
ugagaaacccuaugaaugu

SEQ ID NO: 1492594 - RNA, 19 nt, Homo sapiens
  misc_RNA (1)...(19): siRNA sense strand
ugagaaacccuaugaaugu

SEQ ID NO: 1492595 - RNA, 19 nt, Homo sapiens
  misc_RNA (1)...(19): siRNA sense strand
gaaacccuaugaauguaga

SEQ ID NO: 1492596 - RNA, 19 nt, Homo sapiens
  misc_RNA (1)...(19): siRNA sense strand
gcaguuaucgacuuacauu

SEQ ID NO: 1492597 - RNA, 19 nt, Homo sapiens
  misc_RNA (1)...(19): siRNA sense strand
caacacuacagaauucaua

SEQ ID NO: 1492598 - RNA, 19 nt, Homo sapiens
  misc_RNA (1)...(19): siRNA sense strand
gcuaucaucucacucaaca

SEQ ID NO: 1492599 - RNA, 19 nt, Homo sapiens
  misc_RNA (1)...(19): siRNA sense strand
acgaauaucucauccucua

SEQ ID NO: 1492600 - RNA, 19 nt, Homo sapiens
  misc_RNA (1)...(19): siRNA sense strand
guagugaucaacuuacuuu

SEQ ID NO: 1492601 - RNA, 19 nt, Homo sapiens
  misc_RNA (1)...(19): siRNA sense strand
ugagaaacccuacgaaugu

SEQ ID NO: 1492602 - RNA, 19 nt, Homo sapiens
  misc_RNA (1)...(19): siRNA sense strand
cuacgaauguaaagaaugu

SEQ ID NO: 1492603 - RNA, 19 nt, Homo sapiens
  misc_RNA (1)...(19): siRNA sense strand
gagagagaccuuaugaaug

SEQ ID NO: 1492604 - RNA, 19 nt, Homo sapiens
  misc_RNA (1)...(19): siRNA sense strand
gaacuuacucgacaucaca

SEQ ID NO: 1492605 - RNA, 19 nt, Homo sapiens
  misc_RNA (1)...(19): siRNA sense strand
gugagaaacccuauaaaug

SEQ ID NO: 1492606 - RNA, 19 nt, Homo sapiens
  misc_RNA (1)...(19): siRNA sense strand
gaacuuacucgacaucaca

SEQ ID NO: 1492607 - RNA, 19 nt, Homo sapiens
  misc_RNA (1)...(19): siRNA sense strand
agucauaccuuauucaaca

SEQ ID NO: 1492608 - RNA, 19 nt, Homo sapiens
  misc_RNA (1)...(19): siRNA sense strand
gaauguaaagaauguggua

SEQ ID NO: 1492609 - RNA, 19 nt, Homo sapiens
  misc_RNA (1)...(19): siRNA sense strand
ugucaaacccuauaaaugu

SEQ ID NO: 1492610 - RNA, 19 nt, Homo sapiens
  misc_RNA (1)...(19): siRNA sense strand
gugaucaacuuacuuuaca

SEQ ID NO: 1492611 - RNA, 19 nt, Homo sapiens
  misc_RNA (1)...(19): siRNA sense strand
gagcuuccauaugaaugua

SEQ ID NO: 1492612 - RNA, 19 nt, Homo sapiens
  misc_RNA (1)...(19): siRNA sense strand
agucggcacuaucaucuua

SEQ ID NO: 1492613 - RNA, 19 nt, Homo sapiens
  misc_RNA (1)...(19): siRNA sense strand
agccagaugugauuacuuu

SEQ ID NO: 1492614 - RNA, 19 nt, Homo sapiens
  misc_RNA (1)...(19): siRNA sense strand
ggugagaaacccuauaaau

SEQ ID NO: 1492615 - RNA, 19 nt, Homo sapiens
  misc_RNA (1)...(19): siRNA sense strand
gugagaagcccuacauaug

SEQ ID NO: 1492616 - RNA, 19 nt, Homo sapiens
  misc_RNA (1)...(19): siRNA sense strand
caacaucacagaggccaua

SEQ ID NO: 1492617 - RNA, 19 nt, Homo sapiens
  misc_RNA (1)...(19): siRNA sense strand
gcacuaucaucuuacucaa

SEQ ID NO: 1492618 - RNA, 19 nt, Homo sapiens
  misc_RNA (1)...(19): siRNA sense strand
gaaugugggaagacguuua

SEQ ID NO: 1492619 - RNA, 19 nt, Homo sapiens
  misc_RNA (1)...(19): siRNA sense strand
ccucugcacucacuuucua

SEQ ID NO: 1492620 - RNA, 19 nt, Homo sapiens
  misc_RNA (1)...(19): siRNA sense strand
ucacugggauauaccauuc

SEQ ID NO: 1492621 - RNA, 19 nt, Homo sapiens
  misc_RNA (1)...(19): siRNA sense strand
agucgucgguaucaucuua

SEQ ID NO: 1492622 - RNA, 19 nt, Homo sapiens
  misc_RNA (1)...(19): siRNA sense strand
agacuucauuaucaccuua

SEQ ID NO: 1492623 - RNA, 19 nt, Homo sapiens
  misc_RNA (1)...(19): siRNA sense strand
gcaguguaaacaugaauuu

SEQ ID NO: 1492624 - RNA, 19 nt, Homo sapiens
  misc_RNA (1)...(19): siRNA sense strand
acaaggaugugauguugga

SEQ ID NO: 1492625 - RNA, 19 nt, Homo sapiens
  misc_RNA (1)...(19): siRNA sense strand
ggugagaaacccuacauau

SEQ ID NO: 1492626 - RNA, 19 nt, Homo sapiens
  misc_RNA (1)...(19): siRNA sense strand
gaauguagagaauguggaa

SEQ ID NO: 1492627 - RNA, 19 nt, Homo sapiens
  misc_RNA (1)...(19): siRNA sense strand
uagaguacaucagacaauu

SEQ ID NO: 1492628 - RNA, 19 nt, Homo sapiens
  misc_RNA (1)...(19): siRNA sense strand
gaauguaaggaauguagaa

SEQ ID NO: 1492629 - RNA, 19 nt, Homo sapiens
  misc_RNA (1)...(19): siRNA sense strand
gggaugcguuagucaaaug

SEQ ID NO: 1492630 - RNA, 19 nt, Homo sapiens
  misc_RNA (1)...(19): siRNA sense strand
ggugagaggccuuaugaau

SEQ ID NO: 1492631 - RNA, 19 nt, Homo sapiens
  misc_RNA (1)...(19): siRNA sense strand
cuagagagaaaucauauga

SEQ ID NO: 1492632 - RNA, 19 nt, Homo sapiens
  misc_RNA (1)...(19): siRNA sense strand
uagaguacaucacacaauc

SEQ ID NO: 1492633 - RNA, 19 nt, Homo sapiens
  misc_RNA (1)...(19): siRNA sense strand
gaaacccuaugaauguaag

SEQ ID NO: 1492634 - RNA, 19 nt, Homo sapiens
  misc_RNA (1)...(19): siRNA sense strand
gaaacccuaugaauguaag

SEQ ID NO: 1492635 - RNA, 19 nt, Homo sapiens
  misc_RNA (1)...(19): siRNA sense strand
gcucgacaccguagaauuc

SEQ ID NO: 1492636 - RNA, 19 nt, Homo sapiens
  misc_RNA (1)...(19): siRNA sense strand
ggugagaagcccuacauau

SEQ ID NO: 1492637 - RNA, 19 nt, Homo sapiens
  misc_RNA (1)...(19): siRNA sense strand
ugagaagcccuacauaugu

SEQ ID NO: 1492638 - RNA, 19 nt, Homo sapiens
  misc_RNA (1)...(19): siRNA sense strand
ggacagacgucuucuauua

SEQ ID NO: 1492639 - RNA, 19 nt, Homo sapiens
  misc_RNA (1)...(19): siRNA sense strand
gaaguuacaucacagauuu

SEQ ID NO: 1492640 - RNA, 19 nt, Homo sapiens
  misc_RNA (1)...(19): siRNA sense strand
gaagaucaauuacuaggua

SEQ ID NO: 1492641 - RNA, 19 nt, Homo sapiens
  misc_RNA (1)...(19): siRNA sense strand
ggaaagagauugaauacca

SEQ ID NO: 1492642 - RNA, 19 nt, Homo sapiens
  misc_RNA (1)...(19): siRNA sense strand
gaaaugcccugauucuuca

SEQ ID NO: 1492643 - RNA, 19 nt, Homo sapiens
  misc_RNA (1)...(19): siRNA sense strand
ccaaagauauccucaacaa

SEQ ID NO: 1492644 - RNA, 19 nt, Homo sapiens
  misc_RNA (1)...(19): siRNA sense strand
gaagaaagcaugaauacug

SEQ ID NO: 1492645 - RNA, 19 nt, Homo sapiens
  misc_RNA (1)...(19): siRNA sense strand
uuacaggacugguauaauu

SEQ ID NO: 1492646 - RNA, 19 nt, Homo sapiens
  misc_RNA (1)...(19): siRNA sense strand
ggaacgaaaugcccugauu

SEQ ID NO: 1492647 - RNA, 19 nt, Homo sapiens
  misc_RNA (1)...(19): siRNA sense strand
ucaacaagcucccuaguga

SEQ ID NO: 1492648 - RNA, 19 nt, Homo sapiens
  misc_RNA (1)...(19): siRNA sense strand
ggacuacauugaauucauu

SEQ ID NO: 1492649 - RNA, 19 nt, Homo sapiens
  misc_RNA (1)...(19): siRNA sense strand
gaagaugaaagugcaauua

SEQ ID NO: 1492650 - RNA, 19 nt, Homo sapiens
  misc_RNA (1)...(19): siRNA sense strand
uaaaugaccacuucacaua

SEQ ID NO: 1492651 - RNA, 19 nt, Homo sapiens
  misc_RNA (1)...(19): siRNA sense strand
ggagagaccagaauuagaa

SEQ ID NO: 1492652 - RNA, 19 nt, Homo sapiens
  misc_RNA (1)...(19): siRNA sense strand
ggauaugaauuugagguua

SEQ ID NO: 1492653 - RNA, 19 nt, Homo sapiens
  misc_RNA (1)...(19): siRNA sense strand
gaggaguucuuguugagua

SEQ ID NO: 1492654 - RNA, 19 nt, Homo sapiens
  misc_RNA (1)...(19): siRNA sense strand
gaaaaucagcuuaguguua

SEQ ID NO: 1492655 - RNA, 19 nt, Homo sapiens
  misc_RNA (1)...(19): siRNA sense strand
caugauaacuccagaagga

SEQ ID NO: 1492656 - RNA, 19 nt, Homo sapiens
  misc_RNA (1)...(19): siRNA sense strand
gcuaucagauucagacuau

SEQ ID NO: 1492657 - RNA, 19 nt, Homo sapiens
  misc_RNA (1)...(19): siRNA sense strand
cgagaaaucuaugacagua

SEQ ID NO: 1492658 - RNA, 19 nt, Homo sapiens
  misc_RNA (1)...(19): siRNA sense strand
caagacaagugaacguaaa

SEQ ID NO: 1492659 - RNA, 19 nt, Homo sapiens
  misc_RNA (1)...(19): siRNA sense strand
ccacuucacauacaacuua

SEQ ID NO: 1492660 - RNA, 19 nt, Homo sapiens
  misc_RNA (1)...(19): siRNA sense strand
caacuuggcuacaggacaa

SEQ ID NO: 1492661 - RNA, 19 nt, Homo sapiens
  misc_RNA (1)...(19): siRNA sense strand
gaaccuaaaugaacuacag

SEQ ID NO: 1492662 - RNA, 19 nt, Homo sapiens
  misc_RNA (1)...(19): siRNA sense strand
cagaaggacuugaagauca

SEQ ID NO: 1492663 - RNA, 19 nt, Homo sapiens
  misc_RNA (1)...(19): siRNA sense strand
cuauguaacugacaaacua

SEQ ID NO: 1492664 - RNA, 19 nt, Homo sapiens
  misc_RNA (1)...(19): siRNA sense strand
gaaaagcgccuacgauauu

SEQ ID NO: 1492665 - RNA, 19 nt, Homo sapiens
  misc_RNA (1)...(19): siRNA sense strand
caaggaaagagauugaaua

SEQ ID NO: 1492666 - RNA, 19 nt, Homo sapiens
  misc_RNA (1)...(19): siRNA sense strand
aagcaugaauacuguguua

SEQ ID NO: 1492667 - RNA, 19 nt, Homo sapiens
  misc_RNA (1)...(19): siRNA sense strand
cuacagaauugccaucuug

SEQ ID NO: 1492668 - RNA, 19 nt, Homo sapiens
  misc_RNA (1)...(19): siRNA sense strand
ugagaaacccgcacuauau

SEQ ID NO: 1492669 - RNA, 19 nt, Homo sapiens
  misc_RNA (1)...(19): siRNA sense strand
ccaaggaucuucaacaaac

SEQ ID NO: 1492670 - RNA, 19 nt, Homo sapiens
  misc_RNA (1)...(19): siRNA sense strand
gauaagaaccuaaaugaac

SEQ ID NO: 1492671 - RNA, 19 nt, Homo sapiens
  misc_RNA (1)...(19): siRNA sense strand
guaaagagccacauaaugc

SEQ ID NO: 1492672 - RNA, 19 nt, Homo sapiens
  misc_RNA (1)...(19): siRNA sense strand
gaaauuugguccucuuggu

SEQ ID NO: 1492673 - RNA, 19 nt, Homo sapiens
  misc_RNA (1)...(19): siRNA sense strand
gauuaaagcagcaauugaa

SEQ ID NO: 1492674 - RNA, 19 nt, Homo sapiens
  misc_RNA (1)...(19): siRNA sense strand
uaaacaagguggcauugau

SEQ ID NO: 1492675 - RNA, 19 nt, Homo sapiens
  misc_RNA (1)...(19): siRNA sense strand
ucaacacccugagauauuu

SEQ ID NO: 1492676 - RNA, 19 nt, Homo sapiens
  misc_RNA (1)...(19): siRNA sense strand
gaaucugacuugcgcauca

SEQ ID NO: 1492677 - RNA, 19 nt, Homo sapiens
  misc_RNA (1)...(19): siRNA sense strand
uugcagaccuggcuaauau

SEQ ID NO: 1492678 - RNA, 19 nt, Homo sapiens
  misc_RNA (1)...(19): siRNA sense strand
agaaacagcugaaagacau

SEQ ID NO: 1492679 - RNA, 19 nt, Homo sapiens
  misc_RNA (1)...(19): siRNA sense strand
cuggagcuaugcagaauua

SEQ ID NO: 1492680 - RNA, 19 nt, Homo sapiens
  misc_RNA (1)...(19): siRNA sense strand
caagagagaaagaaauuug

SEQ ID NO: 1492681 - RNA, 19 nt, Homo sapiens
  misc_RNA (1)...(19): siRNA sense strand
gaacuggccugggagaagu

SEQ ID NO: 1492682 - RNA, 19 nt, Homo sapiens
  misc_RNA (1)...(19): siRNA sense strand
acaaagaguuacuuggauu

SEQ ID NO: 1492683 - RNA, 19 nt, Homo sapiens
  misc_RNA (1)...(19): siRNA sense strand
ggauucaaauugcaccauu

SEQ ID NO: 1492684 - RNA, 19 nt, Homo sapiens
  misc_RNA (1)...(19): siRNA sense strand
caaacuauguaacugacaa

SEQ ID NO: 1492685 - RNA, 19 nt, Homo sapiens
  misc_RNA (1)...(19): siRNA sense strand
ugaacaauaucccaaacuu

SEQ ID NO: 1492686 - RNA, 19 nt, Homo sapiens
  misc_RNA (1)...(19): siRNA sense strand
cgaaaugcccugauucuuc

SEQ ID NO: 1492687 - RNA, 19 nt, Homo sapiens
  misc_RNA (1)...(19): siRNA sense strand
gaacuugggugugccuaca

SEQ ID NO: 1492688 - RNA, 19 nt, Homo sapiens
  misc_RNA (1)...(19): siRNA sense strand
gcugaaagacauagagaaa

SEQ ID NO: 1492689 - RNA, 19 nt, Homo sapiens
  misc_RNA (1)...(19): siRNA sense strand
caaaggagagaccagaauu

SEQ ID NO: 1492690 - RNA, 19 nt, Homo sapiens
  misc_RNA (1)...(19): siRNA sense strand
gcguuggccuuuaaugauu

SEQ ID NO: 1492691 - RNA, 19 nt, Homo sapiens
  misc_RNA (1)...(19): siRNA sense strand
cagaagaugguguuuauau

SEQ ID NO: 1492692 - RNA, 19 nt, Homo sapiens
  misc_RNA (1)...(19): siRNA sense strand
uaaagcagcaauugaagaa

SEQ ID NO: 1492693 - RNA, 19 nt, Homo sapiens
  misc_RNA (1)...(19): siRNA sense strand
gacaaagaguuacuuggau

SEQ ID NO: 1492694 - RNA, 19 nt, Homo sapiens
  misc_RNA (1)...(19): siRNA sense strand
uguagagccuccaccauuu

SEQ ID NO: 1492695 - RNA, 19 nt, Homo sapiens
  misc_RNA (1)...(19): siRNA sense strand
gaaggacaagcuguuauuu

SEQ ID NO: 1492696 - RNA, 19 nt, Homo sapiens
  misc_RNA (1)...(19): siRNA sense strand
cagcaccaauggauaagaa

SEQ ID NO: 1492697 - RNA, 19 nt, Homo sapiens
  misc_RNA (1)...(19): siRNA sense strand
ggaaguuacaucacagauu

SEQ ID NO: 1492698 - RNA, 19 nt, Homo sapiens
  misc_RNA (1)...(19): siRNA sense strand
gaaagguuccagaaauaug

SEQ ID NO: 1492699 - RNA, 19 nt, Homo sapiens
  misc_RNA (1)...(19): siRNA sense strand
gaagagugacagacgauug

SEQ ID NO: 1492700 - RNA, 19 nt, Homo sapiens
  misc_RNA (1)...(19): siRNA sense strand
gaaucuccuucaaucauau

SEQ ID NO: 1492701 - RNA, 19 nt, Homo sapiens
  misc_RNA (1)...(19): siRNA sense strand
gacaagcuauccaucuuca

SEQ ID NO: 1492702 - RNA, 19 nt, Homo sapiens
  misc_RNA (1)...(19): siRNA sense strand
gaacgaaaugcccugauuc

SEQ ID NO: 1492703 - RNA, 19 nt, Homo sapiens
  misc_RNA (1)...(19): siRNA sense strand
gaacaauaucccaaacuuc

SEQ ID NO: 1492704 - RNA, 19 nt, Homo sapiens
  misc_RNA (1)...(19): siRNA sense strand
cuacggaaguauccuguga

SEQ ID NO: 1492705 - RNA, 19 nt, Homo sapiens
  misc_RNA (1)...(19): siRNA sense strand
ucagaggaguucuuguuga

SEQ ID NO: 1492706 - RNA, 19 nt, Homo sapiens
  misc_RNA (1)...(19): siRNA sense strand
gagaaacccgcacuauaug

SEQ ID NO: 1492707 - RNA, 19 nt, Homo sapiens
  misc_RNA (1)...(19): siRNA sense strand
gcuaggauaugaauuugag

SEQ ID NO: 1492708 - RNA, 19 nt, Homo sapiens
  misc_RNA (1)...(19): siRNA sense strand
gaaauaugggccaaacguu

SEQ ID NO: 1492709 - RNA, 19 nt, Homo sapiens
  misc_RNA (1)...(19): siRNA sense strand
agaguuacuuggauucaaa

SEQ ID NO: 1492710 - RNA, 19 nt, Homo sapiens
  misc_RNA (1)...(19): siRNA sense strand
ggaaaucugucgggcaagu

SEQ ID NO: 1492711 - RNA, 19 nt, Homo sapiens
  misc_RNA (1)...(19): siRNA sense strand
aaaggagagaccagaauua

SEQ ID NO: 1492712 - RNA, 19 nt, Homo sapiens
  misc_RNA (1)...(19): siRNA sense strand
gggacauucuacuaacuuu

SEQ ID NO: 1492713 - RNA, 19 nt, Homo sapiens
  misc_RNA (1)...(19): siRNA sense strand
gaaaauauaccaccccuau

SEQ ID NO: 1492714 - RNA, 19 nt, Homo sapiens
  misc_RNA (1)...(19): siRNA sense strand
cuagugauuucgacauuga

SEQ ID NO: 1492715 - RNA, 19 nt, Homo sapiens
  misc_RNA (1)...(19): siRNA sense strand
gacagacgucuucuauuaa

SEQ ID NO: 1492716 - RNA, 19 nt, Homo sapiens
  misc_RNA (1)...(19): siRNA sense strand
gaaguuacuguuuggaguu

SEQ ID NO: 1492717 - RNA, 19 nt, Homo sapiens
  misc_RNA (1)...(19): siRNA sense strand
caagcuauccaucuucaaa

SEQ ID NO: 1492718 - RNA, 19 nt, Homo sapiens
  misc_RNA (1)...(19): siRNA sense strand
ggauaagaaccuaaaugaa

SEQ ID NO: 1492719 - RNA, 19 nt, Homo sapiens
  misc_RNA (1)...(19): siRNA sense strand
uaauauaugccgaucacua

SEQ ID NO: 1492720 - RNA, 19 nt, Homo sapiens
  misc_RNA (1)...(19): siRNA sense strand
ccaaaaugauguccaauga

SEQ ID NO: 1492721 - RNA, 19 nt, Homo sapiens
  misc_RNA (1)...(19): siRNA sense strand
gauguccaaugaaauaaca

SEQ ID NO: 1492722 - RNA, 19 nt, Homo sapiens
  misc_RNA (1)...(19): siRNA sense strand
uccgguagcuuacuuguug

SEQ ID NO: 1492723 - RNA, 19 nt, Homo sapiens
  misc_RNA (1)...(19): siRNA sense strand
ugugauggauucugcauug

SEQ ID NO: 1492724 - RNA, 19 nt, Homo sapiens
  misc_RNA (1)...(19): siRNA sense strand
gaaauggcacuacggaagu

SEQ ID NO: 1492725 - RNA, 19 nt, Homo sapiens
  misc_RNA (1)...(19): siRNA sense strand
acaagaaacagcugaaaga

SEQ ID NO: 1492726 - RNA, 19 nt, Homo sapiens
  misc_RNA (1)...(19): siRNA sense strand
ugacaaagaguuacuugga

SEQ ID NO: 1492727 - RNA, 19 nt, Homo sapiens
  misc_RNA (1)...(19): siRNA sense strand
gccacauaaugcuaaauuu

SEQ ID NO: 1492728 - RNA, 19 nt, Homo sapiens
  misc_RNA (1)...(19): siRNA sense strand
gaugaaagugcaauuaaag

SEQ ID NO: 1492729 - RNA, 19 nt, Homo sapiens
  misc_RNA (1)...(19): siRNA sense strand
gaaagugcaauuaaagucu

SEQ ID NO: 1492730 - RNA, 19 nt, Homo sapiens
  misc_RNA (1)...(19): siRNA sense strand
cuauugauuugcuaggaua

SEQ ID NO: 1492731 - RNA, 19 nt, Homo sapiens
  misc_RNA (1)...(19): siRNA sense strand
guagcuuacuuguuggaaa

SEQ ID NO: 1492732 - RNA, 19 nt, Homo sapiens
  misc_RNA (1)...(19): siRNA sense strand
uaaccaugcuggcugacuu

SEQ ID NO: 1492733 - RNA, 19 nt, Homo sapiens
  misc_RNA (1)...(19): siRNA sense strand
gggaugccguggaaaggaa

SEQ ID NO: 1492734 - RNA, 19 nt, Homo sapiens
  misc_RNA (1)...(19): siRNA sense strand
gccgaucacuauuugagaa

SEQ ID NO: 1492735 - RNA, 19 nt, Homo sapiens
  misc_RNA (1)...(19): siRNA sense strand
ccucuugguuggaauauuc

SEQ ID NO: 1492736 - RNA, 19 nt, Homo sapiens
  misc_RNA (1)...(19): siRNA sense strand
cagacuauaugagaacauu

SEQ ID NO: 1492737 - RNA, 19 nt, Homo sapiens
  misc_RNA (1)...(19): siRNA sense strand
aagaaagcaugaauacugu

SEQ ID NO: 1492738 - RNA, 19 nt, Homo sapiens
  misc_RNA (1)...(19): siRNA sense strand
gaacuuggcuuuguuagaa

SEQ ID NO: 1492739 - RNA, 19 nt, Homo sapiens
  misc_RNA (1)...(19): siRNA sense strand
ggaagggacucaauuagaa

SEQ ID NO: 1492740 - RNA, 19 nt, Homo sapiens
  misc_RNA (1)...(19): siRNA sense strand
gagacuccauuaugaauua

SEQ ID NO: 1492741 - RNA, 19 nt, Homo sapiens
  misc_RNA (1)...(19): siRNA sense strand
ggaaauacuccucuagaua

SEQ ID NO: 1492742 - RNA, 19 nt, Homo sapiens
  misc_RNA (1)...(19): siRNA sense strand
gaaauacuccucuagauau

SEQ ID NO: 1492743 - RNA, 19 nt, Homo sapiens
  misc_RNA (1)...(19): siRNA sense strand
ugacauauauccacaagaa

SEQ ID NO: 1492744 - RNA, 19 nt, Homo sapiens
  misc_RNA (1)...(19): siRNA sense strand
uaucagagaugacagguuu

SEQ ID NO: 1492745 - RNA, 19 nt, Homo sapiens
  misc_RNA (1)...(19): siRNA sense strand
ugacaaauccuauaacuug

SEQ ID NO: 1492746 - RNA, 19 nt, Homo sapiens
  misc_RNA (1)...(19): siRNA sense strand
gaagagugguggcugaaug

SEQ ID NO: 1492747 - RNA, 19 nt, Homo sapiens
  misc_RNA (1)...(19): siRNA sense strand
gaacuacuggcagcuauua

SEQ ID NO: 1492748 - RNA, 19 nt, Homo sapiens
  misc_RNA (1)...(19): siRNA sense strand
ggauagcaguccacaugua

SEQ ID NO: 1492749 - RNA, 19 nt, Homo sapiens
  misc_RNA (1)...(19): siRNA sense strand
gcacgagaauaucugauug

SEQ ID NO: 1492750 - RNA, 19 nt, Homo sapiens
  misc_RNA (1)...(19): siRNA sense strand
uaaaucaacugaagaacga

SEQ ID NO: 1492751 - RNA, 19 nt, Homo sapiens
  misc_RNA (1)...(19): siRNA sense strand
guauaacucuuuggcauaa

SEQ ID NO: 1492752 - RNA, 19 nt, Homo sapiens
  misc_RNA (1)...(19): siRNA sense strand
gaacucuacucaucuuuag

SEQ ID NO: 1492753 - RNA, 19 nt, Homo sapiens
  misc_RNA (1)...(19): siRNA sense strand
acacaaugguuauggauuu

SEQ ID NO: 1492754 - RNA, 19 nt, Homo sapiens
  misc_RNA (1)...(19): siRNA sense strand
cacuucagcuggccuauua

SEQ ID NO: 1492755 - RNA, 19 nt, Homo sapiens
  misc_RNA (1)...(19): siRNA sense strand
caccagaaauugcuugaaa

SEQ ID NO: 1492756 - RNA, 19 nt, Homo sapiens
  misc_RNA (1)...(19): siRNA sense strand
gaacacuacuggccuccaa

SEQ ID NO: 1492757 - RNA, 19 nt, Homo sapiens
  misc_RNA (1)...(19): siRNA sense strand
guaguuuacugguauauuc

SEQ ID NO: 1492758 - RNA, 19 nt, Homo sapiens
  misc_RNA (1)...(19): siRNA sense strand
guuauuauguggaugagaa

SEQ ID NO: 1492759 - RNA, 19 nt, Homo sapiens
  misc_RNA (1)...(19): siRNA sense strand
aaaggaagggacucaauua

SEQ ID NO: 1492760 - RNA, 19 nt, Homo sapiens
  misc_RNA (1)...(19): siRNA sense strand
guauuuggcuguaauugug

SEQ ID NO: 1492761 - RNA, 19 nt, Homo sapiens
  misc_RNA (1)...(19): siRNA sense strand
gaggauagcaguccacaug

SEQ ID NO: 1492762 - RNA, 19 nt, Homo sapiens
  misc_RNA (1)...(19): siRNA sense strand
ugaaacagcuaugacaaga

SEQ ID NO: 1492763 - RNA, 19 nt, Homo sapiens
  misc_RNA (1)...(19): siRNA sense strand
gauugcggcuuaugccuuu

SEQ ID NO: 1492764 - RNA, 19 nt, Homo sapiens
  misc_RNA (1)...(19): siRNA sense strand
ccagagaacuuggcuuugu

SEQ ID NO: 1492765 - RNA, 19 nt, Homo sapiens
  misc_RNA (1)...(19): siRNA sense strand
gaggauuauucugagauua

SEQ ID NO: 1492766 - RNA, 19 nt, Homo sapiens
  misc_RNA (1)...(19): siRNA sense strand
gauagcaguccacauguaa

SEQ ID NO: 1492767 - RNA, 19 nt, Homo sapiens
  misc_RNA (1)...(19): siRNA sense strand
gacaaauccuauaacuuga

SEQ ID NO: 1492768 - RNA, 19 nt, Homo sapiens
  misc_RNA (1)...(19): siRNA sense strand
gcaggauccuucugucaau

SEQ ID NO: 1492769 - RNA, 19 nt, Homo sapiens
  misc_RNA (1)...(19): siRNA sense strand
gaggaaguauaacucuuug

SEQ ID NO: 1492770 - RNA, 19 nt, Homo sapiens
  misc_RNA (1)...(19): siRNA sense strand
aaacagcuaugacaagaca

SEQ ID NO: 1492771 - RNA, 19 nt, Homo sapiens
  misc_RNA (1)...(19): siRNA sense strand
gaccugggauugcagcauu

SEQ ID NO: 1492772 - RNA, 19 nt, Homo sapiens
  misc_RNA (1)...(19): siRNA sense strand
gaagaacgaacauuucagu

SEQ ID NO: 1492773 - RNA, 19 nt, Homo sapiens
  misc_RNA (1)...(19): siRNA sense strand
gauaugauacagcugauga

SEQ ID NO: 1492774 - RNA, 19 nt, Homo sapiens
  misc_RNA (1)...(19): siRNA sense strand
acuagagacuccauuauga

SEQ ID NO: 1492775 - RNA, 19 nt, Homo sapiens
  misc_RNA (1)...(19): siRNA sense strand
gaagggacucaauuagaaa

SEQ ID NO: 1492776 - RNA, 19 nt, Homo sapiens
  misc_RNA (1)...(19): siRNA sense strand
caaaggaagggacucaauu

SEQ ID NO: 1492777 - RNA, 19 nt, Homo sapiens
  misc_RNA (1)...(19): siRNA sense strand
cuacuggccuccaaaggaa

SEQ ID NO: 1492778 - RNA, 19 nt, Homo sapiens
  misc_RNA (1)...(19): siRNA sense strand
caaaagauguuacaagcuu

SEQ ID NO: 1492779 - RNA, 19 nt, Homo sapiens
  misc_RNA (1)...(19): siRNA sense strand
ggaggcaucugaucuacag

SEQ ID NO: 1492780 - RNA, 19 nt, Homo sapiens
  misc_RNA (1)...(19): siRNA sense strand
cacaagaagugccauagug

SEQ ID NO: 1492781 - RNA, 19 nt, Homo sapiens
  misc_RNA (1)...(19): siRNA sense strand
gaaagaggaaguauaacuc

SEQ ID NO: 1492782 - RNA, 19 nt, Homo sapiens
  misc_RNA (1)...(19): siRNA sense strand
gcuuaugccuuuacaucuu

SEQ ID NO: 1492783 - RNA, 19 nt, Homo sapiens
  misc_RNA (1)...(19): siRNA sense strand
ucagagaagguacgagaua

SEQ ID NO: 1492784 - RNA, 19 nt, Homo sapiens
  misc_RNA (1)...(19): siRNA sense strand
cgccagagcuucucagaca

SEQ ID NO: 1492785 - RNA, 19 nt, Homo sapiens
  misc_RNA (1)...(19): siRNA sense strand
cguauaccaucacaauuga

SEQ ID NO: 1492786 - RNA, 19 nt, Homo sapiens
  misc_RNA (1)...(19): siRNA sense strand
caagucugguuggcuauuu

SEQ ID NO: 1492787 - RNA, 19 nt, Homo sapiens
  misc_RNA (1)...(19): siRNA sense strand
ucaauuggcuaaaucaacu

SEQ ID NO: 1492788 - RNA, 19 nt, Homo sapiens
  misc_RNA (1)...(19): siRNA sense strand
uaucauggccguacagaga

SEQ ID NO: 1492789 - RNA, 19 nt, Homo sapiens
  misc_RNA (1)...(19): siRNA sense strand
cagagaacuuggcuuuguu

SEQ ID NO: 1492790 - RNA, 19 nt, Homo sapiens
  misc_RNA (1)...(19): siRNA sense strand
uggugaacaucaguuauua

SEQ ID NO: 1492791 - RNA, 19 nt, Homo sapiens
  misc_RNA (1)...(19): siRNA sense strand
ugauacagcugaugaacuc

SEQ ID NO: 1492792 - RNA, 19 nt, Homo sapiens
  misc_RNA (1)...(19): siRNA sense strand
aaaagugccuguucauaaa

SEQ ID NO: 1492793 - RNA, 19 nt, Homo sapiens
  misc_RNA (1)...(19): siRNA sense strand
gaaauccugucccgagacu

SEQ ID NO: 1492794 - RNA, 19 nt, Homo sapiens
  misc_RNA (1)...(19): siRNA sense strand
cagagaagguacgagauau

SEQ ID NO: 1492795 - RNA, 19 nt, Homo sapiens
  misc_RNA (1)...(19): siRNA sense strand
gaagauggaaggguucaga

SEQ ID NO: 1492796 - RNA, 19 nt, Homo sapiens
  misc_RNA (1)...(19): siRNA sense strand
ggugacaaauccuauaacu

SEQ ID NO: 1492797 - RNA, 19 nt, Homo sapiens
  misc_RNA (1)...(19): siRNA sense strand
ugaacucuacucaucuuua

SEQ ID NO: 1492798 - RNA, 19 nt, Homo sapiens
  misc_RNA (1)...(19): siRNA sense strand
ccaggauucucuuccauca

SEQ ID NO: 1492799 - RNA, 19 nt, Homo sapiens
  misc_RNA (1)...(19): siRNA sense strand
gauggaaggguucagagaa

SEQ ID NO: 1492800 - RNA, 19 nt, Homo sapiens
  misc_RNA (1)...(19): siRNA sense strand
gaagagcucauuuucauug

SEQ ID NO: 1492801 - RNA, 19 nt, Homo sapiens
  misc_RNA (1)...(19): siRNA sense strand
ugacaucaaccaagcuaaa

SEQ ID NO: 1492802 - RNA, 19 nt, Homo sapiens
  misc_RNA (1)...(19): siRNA sense strand
uuaggucucuuacucauag

SEQ ID NO: 1492803 - RNA, 19 nt, Homo sapiens
  misc_RNA (1)...(19): siRNA sense strand
ccagaaauugcuugaaaga

SEQ ID NO: 1492804 - RNA, 19 nt, Homo sapiens
  misc_RNA (1)...(19): siRNA sense strand
gggcuaaggcacgagaaua

SEQ ID NO: 1492805 - RNA, 19 nt, Homo sapiens
  misc_RNA (1)...(19): siRNA sense strand
gaauguugccuaucuggau

SEQ ID NO: 1492806 - RNA, 19 nt, Homo sapiens
  misc_RNA (1)...(19): siRNA sense strand
cuaucuggauguucguaua

SEQ ID NO: 1492807 - RNA, 19 nt, Homo sapiens
  misc_RNA (1)...(19): siRNA sense strand
gcuaaagcccaguaucuca

SEQ ID NO: 1492808 - RNA, 19 nt, Homo sapiens
  misc_RNA (1)...(19): siRNA sense strand
cagaagagcucauuuucau

SEQ ID NO: 1492809 - RNA, 19 nt, Homo sapiens
  misc_RNA (1)...(19): siRNA sense strand
uauauuccauggaggauag

SEQ ID NO: 1492810 - RNA, 19 nt, Homo sapiens
  misc_RNA (1)...(19): siRNA sense strand
caagaagugccauagugaa

SEQ ID NO: 1492811 - RNA, 19 nt, Homo sapiens
  misc_RNA (1)...(19): siRNA sense strand
ccuauaacuugauuuccuu

SEQ ID NO: 1492812 - RNA, 19 nt, Homo sapiens
  misc_RNA (1)...(19): siRNA sense strand
caaagugggauuggagaaa

SEQ ID NO: 1492813 - RNA, 19 nt, Homo sapiens
  misc_RNA (1)...(19): siRNA sense strand
caucaguuauuauguggau

SEQ ID NO: 1492814 - RNA, 19 nt, Homo sapiens
  misc_RNA (1)...(19): siRNA sense strand
gugaacaucaguuauuaug

SEQ ID NO: 1492815 - RNA, 19 nt, Homo sapiens
  misc_RNA (1)...(19): siRNA sense strand
uggcauaacuugaacuacu

SEQ ID NO: 1492816 - RNA, 19 nt, Homo sapiens
  misc_RNA (1)...(19): siRNA sense strand
gguacacaaugguuaugga

SEQ ID NO: 1492817 - RNA, 19 nt, Homo sapiens
  misc_RNA (1)...(19): siRNA sense strand
cuuaugccuuuacaucuuu

SEQ ID NO: 1492818 - RNA, 19 nt, Homo sapiens
  misc_RNA (1)...(19): siRNA sense strand
gaauaucugauuggucuug

SEQ ID NO: 1492819 - RNA, 19 nt, Homo sapiens
  misc_RNA (1)...(19): siRNA sense strand
uggaaauacuccucuagau

SEQ ID NO: 1492820 - RNA, 19 nt, Homo sapiens
  misc_RNA (1)...(19): siRNA sense strand
acuggcagcuauuaagaaa

SEQ ID NO: 1492821 - RNA, 19 nt, Homo sapiens
  misc_RNA (1)...(19): siRNA sense strand
ggcauaacuugaacuacug

SEQ ID NO: 1492822 - RNA, 19 nt, Homo sapiens
  misc_RNA (1)...(19): siRNA sense strand
gggauugcagcauuaacua

SEQ ID NO: 1492823 - RNA, 19 nt, Homo sapiens
  misc_RNA (1)...(19): siRNA sense strand
cggaggagguggaaauuuu

SEQ ID NO: 1492824 - RNA, 19 nt, Homo sapiens
  misc_RNA (1)...(19): siRNA sense strand
gaaggguucagagaaggua

SEQ ID NO: 1492825 - RNA, 19 nt, Homo sapiens
  misc_RNA (1)...(19): siRNA sense strand
uaacaccagaggauuauuc

SEQ ID NO: 1492826 - RNA, 19 nt, Homo sapiens
  misc_RNA (1)...(19): siRNA sense strand
aaauacuccucuagauaug

SEQ ID NO: 1492827 - RNA, 19 nt, Homo sapiens
  misc_RNA (1)...(19): siRNA sense strand
agugguaguucccauggua

SEQ ID NO: 1492828 - RNA, 19 nt, Homo sapiens
  misc_RNA (1)...(19): siRNA sense strand
uuauucagcuugcacuuca

SEQ ID NO: 1492829 - RNA, 19 nt, Homo sapiens
  misc_RNA (1)...(19): siRNA sense strand
agaggauuauucugagauu

SEQ ID NO: 1492830 - RNA, 19 nt, Homo sapiens
  misc_RNA (1)...(19): siRNA sense strand
uugaaucagugaaaccauu

SEQ ID NO: 1492831 - RNA, 19 nt, Homo sapiens
  misc_RNA (1)...(19): siRNA sense strand
gagaugacagguuuguugu

SEQ ID NO: 1492832 - RNA, 19 nt, Homo sapiens
  misc_RNA (1)...(19): siRNA sense strand
guaccaggauucucuucca

SEQ ID NO: 1492833 - RNA, 19 nt, Homo sapiens
  misc_RNA (1)...(19): siRNA sense strand
agagaagguacgagauaua

SEQ ID NO: 1492834 - RNA, 19 nt, Homo sapiens
  misc_RNA (1)...(19): siRNA sense strand
agagaacuuggcuuuguua

SEQ ID NO: 1492835 - RNA, 19 nt, Homo sapiens
  misc_RNA (1)...(19): siRNA sense strand
acaagaagugccauaguga

SEQ ID NO: 1492836 - RNA, 19 nt, Homo sapiens
  misc_RNA (1)...(19): siRNA sense strand
agagaugacagguuuguug

SEQ ID NO: 1492837 - RNA, 19 nt, Homo sapiens
  misc_RNA (1)...(19): siRNA sense strand
ggauuugaucgucaccuuu

SEQ ID NO: 1492838 - RNA, 19 nt, Homo sapiens
  misc_RNA (1)...(19): siRNA sense strand
ggaagaagcgguuggaguu

SEQ ID NO: 1492839 - RNA, 19 nt, Homo sapiens
  misc_RNA (1)...(19): siRNA sense strand
ggaagaggagggagacaga

SEQ ID NO: 1492840 - RNA, 19 nt, Homo sapiens
  misc_RNA (1)...(19): siRNA sense strand
gcacugaguauaccugcaa

SEQ ID NO: 1492841 - RNA, 19 nt, Homo sapiens
  misc_RNA (1)...(19): siRNA sense strand
ggagggagacagagaagug

SEQ ID NO: 1492842 - RNA, 19 nt, Homo sapiens
  misc_RNA (1)...(19): siRNA sense strand
gaagaagcgguuggaguug

SEQ ID NO: 1492843 - RNA, 19 nt, Homo sapiens
  misc_RNA (1)...(19): siRNA sense strand
cuacgugggaccugagaua

SEQ ID NO: 1492844 - RNA, 19 nt, Homo sapiens
  misc_RNA (1)...(19): siRNA sense strand
gguuggaguuggaugacaa

SEQ ID NO: 1492845 - RNA, 19 nt, Homo sapiens
  misc_RNA (1)...(19): siRNA sense strand
cagaaacgagcucgaagug

SEQ ID NO: 1492846 - RNA, 19 nt, Homo sapiens
  misc_RNA (1)...(19): siRNA sense strand
cuacaggcacugaguauac

SEQ ID NO: 1492847 - RNA, 19 nt, Homo sapiens
  misc_RNA (1)...(19): siRNA sense strand
ggucugguccugcgugauc

SEQ ID NO: 1492848 - RNA, 19 nt, Homo sapiens
  misc_RNA (1)...(19): siRNA sense strand
gcguggcgcucuucaccau

SEQ ID NO: 1492849 - RNA, 19 nt, Homo sapiens
  misc_RNA (1)...(19): siRNA sense strand
agaagcuggugcuggagaa

SEQ ID NO: 1492850 - RNA, 19 nt, Homo sapiens
  misc_RNA (1)...(19): siRNA sense strand
gguccugcgugaucucaag

SEQ ID NO: 1492851 - RNA, 19 nt, Homo sapiens
  misc_RNA (1)...(19): siRNA sense strand
ccaacccgaucccaucucu

SEQ ID NO: 1492852 - RNA, 19 nt, Homo sapiens
  misc_RNA (1)...(19): siRNA sense strand
ucagcucacgggccucaua

SEQ ID NO: 1492853 - RNA, 19 nt, Homo sapiens
  misc_RNA (1)...(19): siRNA sense strand
ccagaaacgagcucgaagu

SEQ ID NO: 1492854 - RNA, 19 nt, Homo sapiens
  misc_RNA (1)...(19): siRNA sense strand
agaagcgguuggaguugga

SEQ ID NO: 1492855 - RNA, 19 nt, Homo sapiens
  misc_RNA (1)...(19): siRNA sense strand
gggagacagagaagugguu

SEQ ID NO: 1492856 - RNA, 19 nt, Homo sapiens
  misc_RNA (1)...(19): siRNA sense strand
gcccuacaggcacugagua

SEQ ID NO: 1492857 - RNA, 19 nt, Homo sapiens
  misc_RNA (1)...(19): siRNA sense strand
ucgcugaccgugagaggaa

SEQ ID NO: 1492858 - RNA, 19 nt, Homo sapiens
  misc_RNA (1)...(19): siRNA sense strand
gaaauacccucacauguua

SEQ ID NO: 1492859 - RNA, 19 nt, Homo sapiens
  misc_RNA (1)...(19): siRNA sense strand
ucacagacccugagaaaua

SEQ ID NO: 1492860 - RNA, 19 nt, Homo sapiens
  misc_RNA (1)...(19): siRNA sense strand
agaaauacccucacauguu

SEQ ID NO: 1492861 - RNA, 19 nt, Homo sapiens
  misc_RNA (1)...(19): siRNA sense strand
cagaugaggucgacacaca

SEQ ID NO: 1492862 - RNA, 19 nt, Homo sapiens
  misc_RNA (1)...(19): siRNA sense strand
gaccugagcaucuguggaa

SEQ ID NO: 1492863 - RNA, 19 nt, Homo sapiens
  misc_RNA (1)...(19): siRNA sense strand
gagaaauacccucacaugu

SEQ ID NO: 1492864 - RNA, 19 nt, Homo sapiens
  misc_RNA (1)...(19): siRNA sense strand
ucguggaacuaaagaauga

SEQ ID NO: 1492865 - RNA, 19 nt, Homo sapiens
  misc_RNA (1)...(19): siRNA sense strand
ggaucaguaucucaacauc

SEQ ID NO: 1492866 - RNA, 19 nt, Homo sapiens
  misc_RNA (1)...(19): siRNA sense strand
gauguggucguggaacuaa

SEQ ID NO: 1492867 - RNA, 19 nt, Homo sapiens
  misc_RNA (1)...(19): siRNA sense strand
agaaugaccugagcaucug

SEQ ID NO: 1492868 - RNA, 19 nt, Homo sapiens
  misc_RNA (1)...(19): siRNA sense strand
ugucacagacccugagaaa

SEQ ID NO: 1492869 - RNA, 19 nt, Homo sapiens
  misc_RNA (1)...(19): siRNA sense strand
gaucaguaucucaacauca

SEQ ID NO: 1492870 - RNA, 19 nt, Homo sapiens
  misc_RNA (1)...(19): siRNA sense strand
ggucguggaacuaaagaau

SEQ ID NO: 1492871 - RNA, 19 nt, Homo sapiens
  misc_RNA (1)...(19): siRNA sense strand
cacagacccugagaaauac

SEQ ID NO: 1492872 - RNA, 19 nt, Homo sapiens
  misc_RNA (1)...(19): siRNA sense strand
uaaagaaugaccugagcau

SEQ ID NO: 1492873 - RNA, 19 nt, Homo sapiens
  misc_RNA (1)...(19): siRNA sense strand
guggaucaguaucucaaca

SEQ ID NO: 1492874 - RNA, 19 nt, Homo sapiens
  misc_RNA (1)...(19): siRNA sense strand
ggauguggucguggaacua

SEQ ID NO: 1492875 - RNA, 19 nt, Homo sapiens
  misc_RNA (1)...(19): siRNA sense strand
aucaguaucucaacaucaa

SEQ ID NO: 1492876 - RNA, 19 nt, Homo sapiens
  misc_RNA (1)...(19): siRNA sense strand
ugaggucgacacacaguug

SEQ ID NO: 1492877 - RNA, 19 nt, Homo sapiens
  misc_RNA (1)...(19): siRNA sense strand
aagaaugaccugagcaucu

SEQ ID NO: 1492878 - RNA, 19 nt, Homo sapiens
  misc_RNA (1)...(19): siRNA sense strand
ggucgacacacaguugcua

SEQ ID NO: 1492879 - RNA, 19 nt, Homo sapiens
  misc_RNA (1)...(19): siRNA sense strand
guaucucaacaucaaacua

SEQ ID NO: 1492880 - RNA, 19 nt, Homo sapiens
  misc_RNA (1)...(19): siRNA sense strand
gaugaggucgacacacagu

SEQ ID NO: 1492881 - RNA, 19 nt, Homo sapiens
  misc_RNA (1)...(19): siRNA sense strand
gcucagugguccgauacgu

SEQ ID NO: 1492882 - RNA, 19 nt, Homo sapiens
  misc_RNA (1)...(19): siRNA sense strand
gaaaggaaaucucauugua

SEQ ID NO: 1492883 - RNA, 19 nt, Homo sapiens
  misc_RNA (1)...(19): siRNA sense strand
gaacaacuguggacaauug

SEQ ID NO: 1492884 - RNA, 19 nt, Homo sapiens
  misc_RNA (1)...(19): siRNA sense strand
gaaaucaggucucauuaaa

SEQ ID NO: 1492885 - RNA, 19 nt, Homo sapiens
  misc_RNA (1)...(19): siRNA sense strand
gagcaaaggcuaugaaaua

SEQ ID NO: 1492886 - RNA, 19 nt, Homo sapiens
  misc_RNA (1)...(19): siRNA sense strand
ggaaagcguuugcguauau

SEQ ID NO: 1492887 - RNA, 19 nt, Homo sapiens
  misc_RNA (1)...(19): siRNA sense strand
gaacaucagcgaacucaua

SEQ ID NO: 1492888 - RNA, 19 nt, Homo sapiens
  misc_RNA (1)...(19): siRNA sense strand
gaaaguucaugcuuacuga

SEQ ID NO: 1492889 - RNA, 19 nt, Homo sapiens
  misc_RNA (1)...(19): siRNA sense strand
ggaaagccuucaucaagaa

SEQ ID NO: 1492890 - RNA, 19 nt, Homo sapiens
  misc_RNA (1)...(19): siRNA sense strand
ggagagaaacccuauauau

SEQ ID NO: 1492891 - RNA, 19 nt, Homo sapiens
  misc_RNA (1)...(19): siRNA sense strand
gggaaagccuucaucaaga

SEQ ID NO: 1492892 - RNA, 19 nt, Homo sapiens
  misc_RNA (1)...(19): siRNA sense strand
ggaaaaggcuucauucaga

SEQ ID NO: 1492893 - RNA, 19 nt, Homo sapiens
  misc_RNA (1)...(19): siRNA sense strand
gaaaucacggcucaacaua

SEQ ID NO: 1492894 - RNA, 19 nt, Homo sapiens
  misc_RNA (1)...(19): siRNA sense strand
caaaggcuaugaaauaaag

SEQ ID NO: 1492895 - RNA, 19 nt, Homo sapiens
  misc_RNA (1)...(19): siRNA sense strand
ggacagaaaccuugugaau

SEQ ID NO: 1492896 - RNA, 19 nt, Homo sapiens
  misc_RNA (1)...(19): siRNA sense strand
ugagaaaccuuauauaugc

SEQ ID NO: 1492897 - RNA, 19 nt, Homo sapiens
  misc_RNA (1)...(19): siRNA sense strand
gagagaaacccuauauaug

SEQ ID NO: 1492898 - RNA, 19 nt, Homo sapiens
  misc_RNA (1)...(19): siRNA sense strand
gaacaugaugcauuugaaa

SEQ ID NO: 1492899 - RNA, 19 nt, Homo sapiens
  misc_RNA (1)...(19): siRNA sense strand
gaaauaaagaacucuguug

SEQ ID NO: 1492900 - RNA, 19 nt, Homo sapiens
  misc_RNA (1)...(19): siRNA sense strand
gagaacaacuguggacaau

SEQ ID NO: 1492901 - RNA, 19 nt, Homo sapiens
  misc_RNA (1)...(19): siRNA sense strand
ucagacauauggaaaguug

SEQ ID NO: 1492902 - RNA, 19 nt, Homo sapiens
  misc_RNA (1)...(19): siRNA sense strand
ggugagaaaccuuauauau

SEQ ID NO: 1492903 - RNA, 19 nt, Homo sapiens
  misc_RNA (1)...(19): siRNA sense strand
uaaauucccugcaagucaa

SEQ ID NO: 1492904 - RNA, 19 nt, Homo sapiens
  misc_RNA (1)...(19): siRNA sense strand
gagaaacccuauauaugca

SEQ ID NO: 1492905 - RNA, 19 nt, Homo sapiens
  misc_RNA (1)...(19): siRNA sense strand
gaacagaaggaaaccaugu

SEQ ID NO: 1492906 - RNA, 19 nt, Homo sapiens
  misc_RNA (1)...(19): siRNA sense strand
gaacaaggagaacaacugu

SEQ ID NO: 1492907 - RNA, 19 nt, Homo sapiens
  misc_RNA (1)...(19): siRNA sense strand
ggagauaacagaggauuug

SEQ ID NO: 1492908 - RNA, 19 nt, Homo sapiens
  misc_RNA (1)...(19): siRNA sense strand
aaucaggucucauuaaaca

SEQ ID NO: 1492909 - RNA, 19 nt, Homo sapiens
  misc_RNA (1)...(19): siRNA sense strand
guacaccagcgaauucaua

SEQ ID NO: 1492910 - RNA, 19 nt, Homo sapiens
  misc_RNA (1)...(19): siRNA sense strand
gcuaacugaucaccaggua

SEQ ID NO: 1492911 - RNA, 19 nt, Homo sapiens
  misc_RNA (1)...(19): siRNA sense strand
gcaaaggcuaugaaauaaa

SEQ ID NO: 1492912 - RNA, 19 nt, Homo sapiens
  misc_RNA (1)...(19): siRNA sense strand
acagaaaccuugugaaugc

SEQ ID NO: 1492913 - RNA, 19 nt, Homo sapiens
  misc_RNA (1)...(19): siRNA sense strand
gggaaagcguuugcguaua

SEQ ID NO: 1492914 - RNA, 19 nt, Homo sapiens
  misc_RNA (1)...(19): siRNA sense strand
cggaugcacucuucaaguu

SEQ ID NO: 1492915 - RNA, 19 nt, Homo sapiens
  misc_RNA (1)...(19): siRNA sense strand
gaaaaggcuucauucagaa

SEQ ID NO: 1492916 - RNA, 19 nt, Homo sapiens
  misc_RNA (1)...(19): siRNA sense strand
uccagaaaguucaugcuua

SEQ ID NO: 1492917 - RNA, 19 nt, Homo sapiens
  misc_RNA (1)...(19): siRNA sense strand
ccauaacacuggaggaugu

SEQ ID NO: 1492918 - RNA, 19 nt, Homo sapiens
  misc_RNA (1)...(19): siRNA sense strand
ugccuuccgugaucaauua

SEQ ID NO: 1492919 - RNA, 19 nt, Homo sapiens
  misc_RNA (1)...(19): siRNA sense strand
ucagaaaucaggucucauu

SEQ ID NO: 1492920 - RNA, 19 nt, Homo sapiens
  misc_RNA (1)...(19): siRNA sense strand
caucaugugugcagugaau

SEQ ID NO: 1492921 - RNA, 19 nt, Homo sapiens
  misc_RNA (1)...(19): siRNA sense strand
ggauguggcuguggacuuc

SEQ ID NO: 1492922 - RNA, 19 nt, Homo sapiens
  misc_RNA (1)...(19): siRNA sense strand
ccagaaaguucaugcuuac

SEQ ID NO: 1492923 - RNA, 19 nt, Homo sapiens
  misc_RNA (1)...(19): siRNA sense strand
ggaaaauccuguucucaga

SEQ ID NO: 1492924 - RNA, 19 nt, Homo sapiens
  misc_RNA (1)...(19): siRNA sense strand
gugagaaaccuuauauaug

SEQ ID NO: 1492925 - RNA, 19 nt, Homo sapiens
  misc_RNA (1)...(19): siRNA sense strand
gaaaaggcuucauccagaa

SEQ ID NO: 1492926 - RNA, 19 nt, Homo sapiens
  misc_RNA (1)...(19): siRNA sense strand
gggaugugauguuggagaa

SEQ ID NO: 1492927 - RNA, 19 nt, Homo sapiens
  misc_RNA (1)...(19): siRNA sense strand
uauaugucgugucugguua

SEQ ID NO: 1492928 - RNA, 19 nt, Homo sapiens
  misc_RNA (1)...(19): siRNA sense strand
cauagcacaucagagauuu

SEQ ID NO: 1492929 - RNA, 19 nt, Homo sapiens
  misc_RNA (1)...(19): siRNA sense strand
caaaccggaugcacucuuc

SEQ ID NO: 1492930 - RNA, 19 nt, Homo sapiens
  misc_RNA (1)...(19): siRNA sense strand
cuacacaagugccuucugu

SEQ ID NO: 1492931 - RNA, 19 nt, Homo sapiens
  misc_RNA (1)...(19): siRNA sense strand
ccagaaaggaaaucucauu

SEQ ID NO: 1492932 - RNA, 19 nt, Homo sapiens
  misc_RNA (1)...(19): siRNA sense strand
guaccgggaugugauguug

SEQ ID NO: 1492933 - RNA, 19 nt, Homo sapiens
  misc_RNA (1)...(19): siRNA sense strand
gagagacccuauggcugua

SEQ ID NO: 1492934 - RNA, 19 nt, Homo sapiens
  misc_RNA (1)...(19): siRNA sense strand
agcaaaggcuaugaaauaa

SEQ ID NO: 1492935 - RNA, 19 nt, Homo sapiens
  misc_RNA (1)...(19): siRNA sense strand
cauaagagaauacacacaa

SEQ ID NO: 1492936 - RNA, 19 nt, Homo sapiens
  misc_RNA (1)...(19): siRNA sense strand
gaaagcguuugcguauaug

SEQ ID NO: 1492937 - RNA, 19 nt, Homo sapiens
  misc_RNA (1)...(19): siRNA sense strand
aaggaaaucucauuguaca

SEQ ID NO: 1492938 - RNA, 19 nt, Homo sapiens
  misc_RNA (1)...(19): siRNA sense strand
gcuaugaaauaaagaacuc

SEQ ID NO: 1492939 - RNA, 19 nt, Homo sapiens
  misc_RNA (1)...(19): siRNA sense strand
uauggaaaguugaucaugu

SEQ ID NO: 1492940 - RNA, 19 nt, Homo sapiens
  misc_RNA (1)...(19): siRNA sense strand
gcacuaagucccaauucau

SEQ ID NO: 1492941 - RNA, 19 nt, Homo sapiens
  misc_RNA (1)...(19): siRNA sense strand
ggagaacaacuguggacaa

SEQ ID NO: 1492942 - RNA, 19 nt, Homo sapiens
  misc_RNA (1)...(19): siRNA sense strand
agaaaucaggucucauuaa

SEQ ID NO: 1492943 - RNA, 19 nt, Homo sapiens
  misc_RNA (1)...(19): siRNA sense strand
gcacaucagagauuucaca

SEQ ID NO: 1492944 - RNA, 19 nt, Homo sapiens
  misc_RNA (1)...(19): siRNA sense strand
gaucaccagguaaugcaua

SEQ ID NO: 1492945 - RNA, 19 nt, Homo sapiens
  misc_RNA (1)...(19): siRNA sense strand
ggaacaaggagaacaacug

SEQ ID NO: 1492946 - RNA, 19 nt, Homo sapiens
  misc_RNA (1)...(19): siRNA sense strand
aggcacagcucauuacaca

SEQ ID NO: 1492947 - RNA, 19 nt, Homo sapiens
  misc_RNA (1)...(19): siRNA sense strand
gguuaagcauaagagaaua

SEQ ID NO: 1492948 - RNA, 19 nt, Homo sapiens
  misc_RNA (1)...(19): siRNA sense strand
cagaaaucaggucucauua

SEQ ID NO: 1492949 - RNA, 19 nt, Homo sapiens
  misc_RNA (1)...(19): siRNA sense strand
caacauacaucagaaaaca

SEQ ID NO: 1492950 - RNA, 19 nt, Homo sapiens
  misc_RNA (1)...(19): siRNA sense strand
aaucacggcucaacauaca

SEQ ID NO: 1492951 - RNA, 19 nt, Homo sapiens
  misc_RNA (1)...(19): siRNA sense strand
uaacugaucaccagguaau

SEQ ID NO: 1492952 - RNA, 19 nt, Homo sapiens
  misc_RNA (1)...(19): siRNA sense strand
ugaacaugaugcauuugaa

SEQ ID NO: 1492953 - RNA, 19 nt, Homo sapiens
  misc_RNA (1)...(19): siRNA sense strand
gagaaaccuuauauaugca

SEQ ID NO: 1492954 - RNA, 19 nt, Homo sapiens
  misc_RNA (1)...(19): siRNA sense strand
gaaagccuggugaacagaa

SEQ ID NO: 1492955 - RNA, 19 nt, Homo sapiens
  misc_RNA (1)...(19): siRNA sense strand
gacagaaaccuugugaaug

SEQ ID NO: 1492956 - RNA, 19 nt, Homo sapiens
  misc_RNA (1)...(19): siRNA sense strand
gugaaagccuggugaacag

SEQ ID NO: 1492957 - RNA, 19 nt, Homo sapiens
  misc_RNA (1)...(19): siRNA sense strand
acacaccagugaugucaug

SEQ ID NO: 1492958 - RNA, 19 nt, Homo sapiens
  misc_RNA (1)...(19): siRNA sense strand
agagaaacccuauauaugc

SEQ ID NO: 1492959 - RNA, 19 nt, Homo sapiens
  misc_RNA (1)...(19): siRNA sense strand
caaguuggaacaaggagaa

SEQ ID NO: 1492960 - RNA, 19 nt, Homo sapiens
  misc_RNA (1)...(19): siRNA sense strand
cgacuucauacugcaauua

SEQ ID NO: 1492961 - RNA, 19 nt, Homo sapiens
  misc_RNA (1)...(19): siRNA sense strand
gcucauuacacaccaguga

SEQ ID NO: 1492962 - RNA, 19 nt, Homo sapiens
  misc_RNA (1)...(19): siRNA sense strand
uggagccuguucagacaua

SEQ ID NO: 1492963 - RNA, 19 nt, Homo sapiens
  misc_RNA (1)...(19): siRNA sense strand
agagaggcacagcucauua

SEQ ID NO: 1492964 - RNA, 19 nt, Homo sapiens
  misc_RNA (1)...(19): siRNA sense strand
cagaaaggaaaucucauug

SEQ ID NO: 1492965 - RNA, 19 nt, Homo sapiens
  misc_RNA (1)...(19): siRNA sense strand
gaacgacuucauacugcaa

SEQ ID NO: 1492966 - RNA, 19 nt, Homo sapiens
  misc_RNA (1)...(19): siRNA sense strand
guucagacauauggaaagu

SEQ ID NO: 1492967 - RNA, 19 nt, Homo sapiens
  misc_RNA (1)...(19): siRNA sense strand
agucuuggcuaacugauca

SEQ ID NO: 1492968 - RNA, 19 nt, Homo sapiens
  misc_RNA (1)...(19): siRNA sense strand
guauaugucgugucugguu

SEQ ID NO: 1492969 - RNA, 19 nt, Homo sapiens
  misc_RNA (1)...(19): siRNA sense strand
ucucagaaaucaggucuca

SEQ ID NO: 1492970 - RNA, 19 nt, Homo sapiens
  misc_RNA (1)...(19): siRNA sense strand
gcucaacauacaucagaaa

SEQ ID NO: 1492971 - RNA, 19 nt, Homo sapiens
  misc_RNA (1)...(19): siRNA sense strand
caaaagucaguuucuguua

SEQ ID NO: 1492972 - RNA, 19 nt, Homo sapiens
  misc_RNA (1)...(19): siRNA sense strand
gauuugcacaggacagaaa

SEQ ID NO: 1492973 - RNA, 19 nt, Homo sapiens
  misc_RNA (1)...(19): siRNA sense strand
acacaagggagaaacaaga

SEQ ID NO: 1492974 - RNA, 19 nt, Homo sapiens
  misc_RNA (1)...(19): siRNA sense strand
aaacucaucagcacuaagu

SEQ ID NO: 1492975 - RNA, 19 nt, Homo sapiens
  misc_RNA (1)...(19): siRNA sense strand
gacuucauacugcaauuaa

SEQ ID NO: 1492976 - RNA, 19 nt, Homo sapiens
  misc_RNA (1)...(19): siRNA sense strand
auauuugacuuacguggaa

SEQ ID NO: 1492977 - RNA, 19 nt, Homo sapiens
  misc_RNA (1)...(19): siRNA sense strand
gacagccaguggucagaug

SEQ ID NO: 1492978 - RNA, 19 nt, Homo sapiens
  misc_RNA (1)...(19): siRNA sense strand
ucauagcacaucagagauu

SEQ ID NO: 1492979 - RNA, 19 nt, Homo sapiens
  misc_RNA (1)...(19): siRNA sense strand
cgugucugguuaagcauaa

SEQ ID NO: 1492980 - RNA, 19 nt, Homo sapiens
  misc_RNA (1)...(19): siRNA sense strand
ugucgugucugguuaagca

SEQ ID NO: 1492981 - RNA, 19 nt, Homo sapiens
  misc_RNA (1)...(19): siRNA sense strand
gguugugccuuccgugauc

SEQ ID NO: 1492982 - RNA, 19 nt, Homo sapiens
  misc_RNA (1)...(19): siRNA sense strand
gacaauaacugccauguga

SEQ ID NO: 1492983 - RNA, 19 nt, Homo sapiens
  misc_RNA (1)...(19): siRNA sense strand
ucaagaagaucaaggauga

SEQ ID NO: 1492984 - RNA, 19 nt, Homo sapiens
  misc_RNA (1)...(19): siRNA sense strand
gaaagaggaugaugacaag

SEQ ID NO: 1492985 - RNA, 19 nt, Homo sapiens
  misc_RNA (1)...(19): siRNA sense strand
aagaucaacuggacaaaua

SEQ ID NO: 1492986 - RNA, 19 nt, Homo sapiens
  misc_RNA (1)...(19): siRNA sense strand
gauacaauguuuggccuua

SEQ ID NO: 1492987 - RNA, 19 nt, Homo sapiens
  misc_RNA (1)...(19): siRNA sense strand
gaacggaggcuucaaucuu

SEQ ID NO: 1492988 - RNA, 19 nt, Homo sapiens
  misc_RNA (1)...(19): siRNA sense strand
ucacugggcugaccgcuuu

SEQ ID NO: 1492989 - RNA, 19 nt, Homo sapiens
  misc_RNA (1)...(19): siRNA sense strand
uaggagaacugucaaaugu

SEQ ID NO: 1492990 - RNA, 19 nt, Homo sapiens
  misc_RNA (1)...(19): siRNA sense strand
gaucgcagcucaagacuac

SEQ ID NO: 1492991 - RNA, 19 nt, Homo sapiens
  misc_RNA (1)...(19): siRNA sense strand
ggagugagcuacgaggaaa

SEQ ID NO: 1492992 - RNA, 19 nt, Homo sapiens
  misc_RNA (1)...(19): siRNA sense strand
ggaaagaggaugaugacaa

SEQ ID NO: 1492993 - RNA, 19 nt, Homo sapiens
  misc_RNA (1)...(19): siRNA sense strand
caucaggacuguaauagau

SEQ ID NO: 1492994 - RNA, 19 nt, Homo sapiens
  misc_RNA (1)...(19): siRNA sense strand
caaagcaucaggacuguaa

SEQ ID NO: 1492995 - RNA, 19 nt, Homo sapiens
  misc_RNA (1)...(19): siRNA sense strand
ggaaagacgacauucauca

SEQ ID NO: 1492996 - RNA, 19 nt, Homo sapiens
  misc_RNA (1)...(19): siRNA sense strand
gaagggagcugggaagacu

SEQ ID NO: 1492997 - RNA, 19 nt, Homo sapiens
  misc_RNA (1)...(19): siRNA sense strand
gaucagcaaugugagacua

SEQ ID NO: 1492998 - RNA, 19 nt, Homo sapiens
  misc_RNA (1)...(19): siRNA sense strand
acaaguccaucguaucuuu

SEQ ID NO: 1492999 - RNA, 19 nt, Homo sapiens
  misc_RNA (1)...(19): siRNA sense strand
uagcaaggcaccagaauuu

SEQ ID NO: 1493000 - RNA, 19 nt, Homo sapiens
  misc_RNA (1)...(19): siRNA sense strand
uuaccaagguuacagauga

SEQ ID NO: 1493001 - RNA, 19 nt, Homo sapiens
  misc_RNA (1)...(19): siRNA sense strand
gcaaggcaccagaauuuga

SEQ ID NO: 1493002 - RNA, 19 nt, Homo sapiens
  misc_RNA (1)...(19): siRNA sense strand
gaucuggaaccgagcaaua

SEQ ID NO: 1493003 - RNA, 19 nt, Homo sapiens
  misc_RNA (1)...(19): siRNA sense strand
gcacaaguccaucguaucu

SEQ ID NO: 1493004 - RNA, 19 nt, Homo sapiens
  misc_RNA (1)...(19): siRNA sense strand
cgacauucaucagugagua

SEQ ID NO: 1493005 - RNA, 19 nt, Homo sapiens
  misc_RNA (1)...(19): siRNA sense strand
aacggaggcuucaaucuuu

SEQ ID NO: 1493006 - RNA, 19 nt, Homo sapiens
  misc_RNA (1)...(19): siRNA sense strand
gaaccgcuuugauggagau

SEQ ID NO: 1493007 - RNA, 19 nt, Homo sapiens
  misc_RNA (1)...(19): siRNA sense strand
gcuucaaucuuucucguau

SEQ ID NO: 1493008 - RNA, 19 nt, Homo sapiens
  misc_RNA (1)...(19): siRNA sense strand
ccaggaagcagacaauguu

SEQ ID NO: 1493009 - RNA, 19 nt, Homo sapiens
  misc_RNA (1)...(19): siRNA sense strand
ggaagccgccaaguuguuu

SEQ ID NO: 1493010 - RNA, 19 nt, Homo sapiens
  misc_RNA (1)...(19): siRNA sense strand
gaagaucaacuggacaaau

SEQ ID NO: 1493011 - RNA, 19 nt, Homo sapiens
  misc_RNA (1)...(19): siRNA sense strand
ccaaguuguuugcacgaaa

SEQ ID NO: 1493012 - RNA, 19 nt, Homo sapiens
  misc_RNA (1)...(19): siRNA sense strand
caagaccacaggccacuuu

SEQ ID NO: 1493013 - RNA, 19 nt, Homo sapiens
  misc_RNA (1)...(19): siRNA sense strand
cuacgucuaugacauuugu

SEQ ID NO: 1493014 - RNA, 19 nt, Homo sapiens
  misc_RNA (1)...(19): siRNA sense strand
ucugggagcugccugauca

SEQ ID NO: 1493015 - RNA, 19 nt, Homo sapiens
  misc_RNA (1)...(19): siRNA sense strand
gugaguaugcccuggauuu

SEQ ID NO: 1493016 - RNA, 19 nt, Homo sapiens
  misc_RNA (1)...(19): siRNA sense strand
agacgacauucaucaguga

SEQ ID NO: 1493017 - RNA, 19 nt, Homo sapiens
  misc_RNA (1)...(19): siRNA sense strand
ccgcuuugauggagaugua

SEQ ID NO: 1493018 - RNA, 19 nt, Homo sapiens
  misc_RNA (1)...(19): siRNA sense strand
agaccucaaucguaucuug

SEQ ID NO: 1493019 - RNA, 19 nt, Homo sapiens
  misc_RNA (1)...(19): siRNA sense strand
gaaguuugcaacagacaau

SEQ ID NO: 1493020 - RNA, 19 nt, Homo sapiens
  misc_RNA (1)...(19): siRNA sense strand
ucccuuaccuggaacaguu

SEQ ID NO: 1493021 - RNA, 19 nt, Homo sapiens
  misc_RNA (1)...(19): siRNA sense strand
gcaguggaaagacgacauu

SEQ ID NO: 1493022 - RNA, 19 nt, Homo sapiens
  misc_RNA (1)...(19): siRNA sense strand
gccuguaacugcaacugaa

SEQ ID NO: 1493023 - RNA, 19 nt, Homo sapiens
  misc_RNA (1)...(19): siRNA sense strand
uuccagaccucaaucguau

SEQ ID NO: 1493024 - RNA, 19 nt, Homo sapiens
  misc_RNA (1)...(19): siRNA sense strand
caagaaccgcuuugaugga

SEQ ID NO: 1493025 - RNA, 19 nt, Homo sapiens
  misc_RNA (1)...(19): siRNA sense strand
gcuggcugauacaauguuu

SEQ ID NO: 1493026 - RNA, 19 nt, Homo sapiens
  misc_RNA (1)...(19): siRNA sense strand
gaaagacgacauucaucag

SEQ ID NO: 1493027 - RNA, 19 nt, Homo sapiens
  misc_RNA (1)...(19): siRNA sense strand
gaucaacuggacaaauaug

SEQ ID NO: 1493028 - RNA, 19 nt, Homo sapiens
  misc_RNA (1)...(19): siRNA sense strand
ugaagcuccuagaggcuaa

SEQ ID NO: 1493029 - RNA, 19 nt, Homo sapiens
  misc_RNA (1)...(19): siRNA sense strand
gaagaucaaggaugacacu

SEQ ID NO: 1493030 - RNA, 19 nt, Homo sapiens
  misc_RNA (1)...(19): siRNA sense strand
agaggaugaugacaaggaa

SEQ ID NO: 1493031 - RNA, 19 nt, Homo sapiens
  misc_RNA (1)...(19): siRNA sense strand
gcaucaggacuguaauaga

SEQ ID NO: 1493032 - RNA, 19 nt, Homo sapiens
  misc_RNA (1)...(19): siRNA sense strand
caacuggacaaauaugauc

SEQ ID NO: 1493033 - RNA, 19 nt, Homo sapiens
  misc_RNA (1)...(19): siRNA sense strand
uggcacaaguccaucguau

SEQ ID NO: 1493034 - RNA, 19 nt, Homo sapiens
  misc_RNA (1)...(19): siRNA sense strand
caaucuuucucguauucuu

SEQ ID NO: 1493035 - RNA, 19 nt, Homo sapiens
  misc_RNA (1)...(19): siRNA sense strand
gggaagccgccaaguuguu

SEQ ID NO: 1493036 - RNA, 19 nt, Homo sapiens
  misc_RNA (1)...(19): siRNA sense strand
aaagcccucuucuggcaaa

SEQ ID NO: 1493037 - RNA, 19 nt, Homo sapiens
  misc_RNA (1)...(19): siRNA sense strand
ccgaggaacgaccugcuua

SEQ ID NO: 1493038 - RNA, 19 nt, Homo sapiens
  misc_RNA (1)...(19): siRNA sense strand
ucgagaugcugagguggua

SEQ ID NO: 1493039 - RNA, 19 nt, Homo sapiens
  misc_RNA (1)...(19): siRNA sense strand
cuccaagcguucaaaguga

SEQ ID NO: 1493040 - RNA, 19 nt, Homo sapiens
  misc_RNA (1)...(19): siRNA sense strand
aagcaucaggacuguaaua

SEQ ID NO: 1493041 - RNA, 19 nt, Homo sapiens
  misc_RNA (1)...(19): siRNA sense strand
gcuucgagaucagcaaugu

SEQ ID NO: 1493042 - RNA, 19 nt, Homo sapiens
  misc_RNA (1)...(19): siRNA sense strand
gaggagguccggaggaucu

SEQ ID NO: 1493043 - RNA, 19 nt, Homo sapiens
  misc_RNA (1)...(19): siRNA sense strand
ggaggaggugcuaggagaa

SEQ ID NO: 1493044 - RNA, 19 nt, Homo sapiens
  misc_RNA (1)...(19): siRNA sense strand
uccaagaaccgcuuugaug

SEQ ID NO: 1493045 - RNA, 19 nt, Homo sapiens
  misc_RNA (1)...(19): siRNA sense strand
gcaaagcaucaggacugua

SEQ ID NO: 1493046 - RNA, 19 nt, Homo sapiens
  misc_RNA (1)...(19): siRNA sense strand
ggauuaccacugauuaguc

SEQ ID NO: 1493047 - RNA, 19 nt, Homo sapiens
  misc_RNA (1)...(19): siRNA sense strand
caauaacugccaugugaca

SEQ ID NO: 1493048 - RNA, 19 nt, Homo sapiens
  misc_RNA (1)...(19): siRNA sense strand
gguguuaccacuuccuuca

SEQ ID NO: 1493049 - RNA, 19 nt, Homo sapiens
  misc_RNA (1)...(19): siRNA sense strand
caaguuguuugcacgaaaa

SEQ ID NO: 1493050 - RNA, 19 nt, Homo sapiens
  misc_RNA (1)...(19): siRNA sense strand
cuguuuggauuaccacuga

SEQ ID NO: 1493051 - RNA, 19 nt, Homo sapiens
  misc_RNA (1)...(19): siRNA sense strand
ucccucaccuucuccauuc

SEQ ID NO: 1493052 - RNA, 19 nt, Homo sapiens
  misc_RNA (1)...(19): siRNA sense strand
aguaugcccuggauuugug

SEQ ID NO: 1493053 - RNA, 19 nt, Homo sapiens
  misc_RNA (1)...(19): siRNA sense strand
gcuaggagaacugucaaau

SEQ ID NO: 1493054 - RNA, 19 nt, Homo sapiens
  misc_RNA (1)...(19): siRNA sense strand
cuuacucccuuaccuggaa

SEQ ID NO: 1493055 - RNA, 19 nt, Homo sapiens
  misc_RNA (1)...(19): siRNA sense strand
cugggaagccgccaaguug

SEQ ID NO: 1493056 - RNA, 19 nt, Homo sapiens
  misc_RNA (1)...(19): siRNA sense strand
ccuccaagcguucaaagug

SEQ ID NO: 1493057 - RNA, 19 nt, Homo sapiens
  misc_RNA (1)...(19): siRNA sense strand
cugcagacagcguccauuu

SEQ ID NO: 1493058 - RNA, 19 nt, Homo sapiens
  misc_RNA (1)...(19): siRNA sense strand
gacaaccugcaguucauga

SEQ ID NO: 1493059 - RNA, 19 nt, Homo sapiens
  misc_RNA (1)...(19): siRNA sense strand
cgagaucagcaaugugaga

SEQ ID NO: 1493060 - RNA, 19 nt, Homo sapiens
  misc_RNA (1)...(19): siRNA sense strand
ccaacaggcaguggaaaga

SEQ ID NO: 1493061 - RNA, 19 nt, Homo sapiens
  misc_RNA (1)...(19): siRNA sense strand
ccuucagccucuucauuga

SEQ ID NO: 1493062 - RNA, 19 nt, Homo sapiens
  misc_RNA (1)...(19): siRNA sense strand
gggauggagugagcuacga

SEQ ID NO: 1493063 - RNA, 19 nt, Homo sapiens
  misc_RNA (1)...(19): siRNA sense strand
ggaaguuugcaacagacaa

SEQ ID NO: 1493064 - RNA, 19 nt, Homo sapiens
  misc_RNA (1)...(19): siRNA sense strand
caaccugcaguucaugaug

SEQ ID NO: 1493065 - RNA, 19 nt, Homo sapiens
  misc_RNA (1)...(19): siRNA sense strand
ucaggacuguaauagauac

SEQ ID NO: 1493066 - RNA, 19 nt, Homo sapiens
  misc_RNA (1)...(19): siRNA sense strand
gacuuuccauggacagcaa

SEQ ID NO: 1493067 - RNA, 19 nt, Homo sapiens
  misc_RNA (1)...(19): siRNA sense strand
ggaagaucaacuggacaaa

SEQ ID NO: 1493068 - RNA, 19 nt, Homo sapiens
  misc_RNA (1)...(19): siRNA sense strand
guggaaagacgacauucau

SEQ ID NO: 1493069 - RNA, 19 nt, Homo sapiens
  misc_RNA (1)...(19): siRNA sense strand
cuaggagaacugucaaaug

SEQ ID NO: 1493070 - RNA, 19 nt, Homo sapiens
  misc_RNA (1)...(19): siRNA sense strand
gcuacgaggaaaccacuau

SEQ ID NO: 1493071 - RNA, 19 nt, Homo sapiens
  misc_RNA (1)...(19): siRNA sense strand
gcgccuaccacaaucuguu

SEQ ID NO: 1493072 - RNA, 19 nt, Homo sapiens
  misc_RNA (1)...(19): siRNA sense strand
gucaugugaucaucgacaa

SEQ ID NO: 1493073 - RNA, 19 nt, Homo sapiens
  misc_RNA (1)...(19): siRNA sense strand
gccaaguuguuugcacgaa

SEQ ID NO: 1493074 - RNA, 19 nt, Homo sapiens
  misc_RNA (1)...(19): siRNA sense strand
augacacacucaagcguuu

SEQ ID NO: 1493075 - RNA, 19 nt, Homo sapiens
  misc_RNA (1)...(19): siRNA sense strand
ggaucgcagcucaagacua

SEQ ID NO: 1493076 - RNA, 19 nt, Homo sapiens
  misc_RNA (1)...(19): siRNA sense strand
gaguaugcccuggauuugu

SEQ ID NO: 1493077 - RNA, 19 nt, Homo sapiens
  misc_RNA (1)...(19): siRNA sense strand
gcguuucagugugcgauau

SEQ ID NO: 1493078 - RNA, 19 nt, Homo sapiens
  misc_RNA (1)...(19): siRNA sense strand
gccaggaagcagacaaugu

SEQ ID NO: 1493079 - RNA, 19 nt, Homo sapiens
  misc_RNA (1)...(19): siRNA sense strand
ucgacaaccugcaguucau

SEQ ID NO: 1493080 - RNA, 19 nt, Homo sapiens
  misc_RNA (1)...(19): siRNA sense strand
uucaaucuuucucguauuc

SEQ ID NO: 1493081 - RNA, 19 nt, Homo sapiens
  misc_RNA (1)...(19): siRNA sense strand
aacaugcagucuacgucua

SEQ ID NO: 1493082 - RNA, 19 nt, Homo sapiens
  misc_RNA (1)...(19): siRNA sense strand
ggagguggauaacguguuu

SEQ ID NO: 1493083 - RNA, 19 nt, Homo sapiens
  misc_RNA (1)...(19): siRNA sense strand
gagaaacucugcgagaaga

SEQ ID NO: 1493084 - RNA, 19 nt, Homo sapiens
  misc_RNA (1)...(19): siRNA sense strand
gcgagaagaucaucaacau

SEQ ID NO: 1493085 - RNA, 19 nt, Homo sapiens
  misc_RNA (1)...(19): siRNA sense strand
gagggcaccuacuccauug

SEQ ID NO: 1493086 - RNA, 19 nt, Homo sapiens
  misc_RNA (1)...(19): siRNA sense strand
gggagaaggugggugagaa

SEQ ID NO: 1493087 - RNA, 19 nt, Homo sapiens
  misc_RNA (1)...(19): siRNA sense strand
gcacaggcaaguuccacua

SEQ ID NO: 1493088 - RNA, 19 nt, Homo sapiens
  misc_RNA (1)...(19): siRNA sense strand
gcaaguuccacuacaagaa

SEQ ID NO: 1493089 - RNA, 19 nt, Homo sapiens
  misc_RNA (1)...(19): siRNA sense strand
gugagaaacucugcgagaa

SEQ ID NO: 1493090 - RNA, 19 nt, Homo sapiens
  misc_RNA (1)...(19): siRNA sense strand
gaaggugggugagaaacuc

SEQ ID NO: 1493091 - RNA, 19 nt, Homo sapiens
  misc_RNA (1)...(19): siRNA sense strand
ggagaaggugggugagaaa

SEQ ID NO: 1493092 - RNA, 19 nt, Homo sapiens
  misc_RNA (1)...(19): siRNA sense strand
gcagauguccuuggaguuc

SEQ ID NO: 1493093 - RNA, 19 nt, Homo sapiens
  misc_RNA (1)...(19): siRNA sense strand
gauguugacugugacuuca

SEQ ID NO: 1493094 - RNA, 19 nt, Homo sapiens
  misc_RNA (1)...(19): siRNA sense strand
gcgugucucuucugaggaa

SEQ ID NO: 1493095 - RNA, 19 nt, Homo sapiens
  misc_RNA (1)...(19): siRNA sense strand
gaaucggcaugaguacuug

SEQ ID NO: 1493096 - RNA, 19 nt, Homo sapiens
  misc_RNA (1)...(19): siRNA sense strand
cccaggauguugacuguga

SEQ ID NO: 1493097 - RNA, 19 nt, Homo sapiens
  misc_RNA (1)...(19): siRNA sense strand
ggucaaggugcauguggua

SEQ ID NO: 1493098 - RNA, 19 nt, Homo sapiens
  misc_RNA (1)...(19): siRNA sense strand
ugaugaaucggcaugagua

SEQ ID NO: 1493099 - RNA, 19 nt, Homo sapiens
  misc_RNA (1)...(19): siRNA sense strand
caggcaaguuccacuacaa

SEQ ID NO: 1493100 - RNA, 19 nt, Homo sapiens
  misc_RNA (1)...(19): siRNA sense strand
agacacccuugcccucuga

SEQ ID NO: 1493101 - RNA, 19 nt, Homo sapiens
  misc_RNA (1)...(19): siRNA sense strand
ugaaucggcaugaguacuu

SEQ ID NO: 1493102 - RNA, 19 nt, Homo sapiens
  misc_RNA (1)...(19): siRNA sense strand
ggauguugacugugacuuc

SEQ ID NO: 1493103 - RNA, 19 nt, Homo sapiens
  misc_RNA (1)...(19): siRNA sense strand
guggauaacguguuugaca

SEQ ID NO: 1493104 - RNA, 19 nt, Homo sapiens
  misc_RNA (1)...(19): siRNA sense strand
ucaucgacuucacuuaugu

SEQ ID NO: 1493105 - RNA, 19 nt, Homo sapiens
  misc_RNA (1)...(19): siRNA sense strand
caaguuccacuacaagaag

SEQ ID NO: 1493106 - RNA, 19 nt, Homo sapiens
  misc_RNA (1)...(19): siRNA sense strand
gugcagcccuaccuguaca

SEQ ID NO: 1493107 - RNA, 19 nt, Homo sapiens
  misc_RNA (1)...(19): siRNA sense strand
cacccaggauguugacugu

SEQ ID NO: 1493108 - RNA, 19 nt, Homo sapiens
  misc_RNA (1)...(19): siRNA sense strand
gaaacucugcgagaagauc

SEQ ID NO: 1493109 - RNA, 19 nt, Homo sapiens
  misc_RNA (1)...(19): siRNA sense strand
gagcaggagcggcagaucu

SEQ ID NO: 1493110 - RNA, 19 nt, Homo sapiens
  misc_RNA (1)...(19): siRNA sense strand
cacagucggagguggauaa

SEQ ID NO: 1493111 - RNA, 19 nt, Homo sapiens
  misc_RNA (1)...(19): siRNA sense strand
cuucaucgacuucacuuau

SEQ ID NO: 1493112 - RNA, 19 nt, Homo sapiens
  misc_RNA (1)...(19): siRNA sense strand
ugcgcaggcucaucaaaga

SEQ ID NO: 1493113 - RNA, 19 nt, Homo sapiens
  misc_RNA (1)...(19): siRNA sense strand
agucggagguggauaacgu

SEQ ID NO: 1493114 - RNA, 19 nt, Homo sapiens
  misc_RNA (1)...(19): siRNA sense strand
ggcaaguuccacuacaaga

SEQ ID NO: 1493115 - RNA, 19 nt, Homo sapiens
  misc_RNA (1)...(19): siRNA sense strand
agcccuaccuguacaagau

SEQ ID NO: 1493116 - RNA, 19 nt, Homo sapiens
  misc_RNA (1)...(19): siRNA sense strand
ggacggucaaggugcaugu

SEQ ID NO: 1493117 - RNA, 19 nt, Homo sapiens
  misc_RNA (1)...(19): siRNA sense strand
agauguccuuggaguucua

SEQ ID NO: 1493118 - RNA, 19 nt, Homo sapiens
  misc_RNA (1)...(19): siRNA sense strand
ugagaaacucugcgagaag

SEQ ID NO: 1493119 - RNA, 19 nt, Homo sapiens
  misc_RNA (1)...(19): siRNA sense strand
uguacaagaucuccuucca

SEQ ID NO: 1493120 - RNA, 19 nt, Homo sapiens
  misc_RNA (1)...(19): siRNA sense strand
acaagaaggagggcaccua

SEQ ID NO: 1493121 - RNA, 19 nt, Homo sapiens
  misc_RNA (1)...(19): siRNA sense strand
ccgcagcacaggcaaguuc

SEQ ID NO: 1493122 - RNA, 19 nt, Homo sapiens
  misc_RNA (1)...(19): siRNA sense strand
acaggcaaguuccacuaca

SEQ ID NO: 1493123 - RNA, 19 nt, Homo sapiens
  misc_RNA (1)...(19): siRNA sense strand
gcaaggaacugcucaaguc

SEQ ID NO: 1493124 - RNA, 19 nt, Homo sapiens
  misc_RNA (1)...(19): siRNA sense strand
ggaaagcgcugcauguucu

SEQ ID NO: 1493125 - RNA, 19 nt, Homo sapiens
  misc_RNA (1)...(19): siRNA sense strand
gcagagggcugacgaggau

SEQ ID NO: 1493126 - RNA, 19 nt, Homo sapiens
  misc_RNA (1)...(19): siRNA sense strand
ucaaggagcuggaggagau

SEQ ID NO: 1493127 - RNA, 19 nt, Homo sapiens
  misc_RNA (1)...(19): siRNA sense strand
aagagaagcugaagcaguu

SEQ ID NO: 1493128 - RNA, 19 nt, Homo sapiens
  misc_RNA (1)...(19): siRNA sense strand
acaaggaccugaagcagaa

SEQ ID NO: 1493129 - RNA, 19 nt, Homo sapiens
  misc_RNA (1)...(19): siRNA sense strand
gcaaugagcagcagaaguc

SEQ ID NO: 1493130 - RNA, 19 nt, Homo sapiens
  misc_RNA (1)...(19): siRNA sense strand
ggagaagaguggcaaaguc

SEQ ID NO: 1493131 - RNA, 19 nt, Homo sapiens
  misc_RNA (1)...(19): siRNA sense strand
cagcagaagucccucaaug

SEQ ID NO: 1493132 - RNA, 19 nt, Homo sapiens
  misc_RNA (1)...(19): siRNA sense strand
caauugagccuggagauaa

SEQ ID NO: 1493133 - RNA, 19 nt, Homo sapiens
  misc_RNA (1)...(19): siRNA sense strand
gauagcaacgggaacagua

SEQ ID NO: 1493134 - RNA, 19 nt, Homo sapiens
  misc_RNA (1)...(19): siRNA sense strand
gaagaacuaucgggcagau

SEQ ID NO: 1493135 - RNA, 19 nt, Homo sapiens
  misc_RNA (1)...(19): siRNA sense strand
ggaacaguaugcucuccaa

SEQ ID NO: 1493136 - RNA, 19 nt, Homo sapiens
  misc_RNA (1)...(19): siRNA sense strand
caaguacccucugaucaug

SEQ ID NO: 1493137 - RNA, 19 nt, Homo sapiens
  misc_RNA (1)...(19): siRNA sense strand
ugaagaaucugugcgaauc

SEQ ID NO: 1493138 - RNA, 19 nt, Homo sapiens
  misc_RNA (1)...(19): siRNA sense strand
acaguaugcucuccaauca

SEQ ID NO: 1493139 - RNA, 19 nt, Homo sapiens
  misc_RNA (1)...(19): siRNA sense strand
acaaguacauccuggacaa

SEQ ID NO: 1493140 - RNA, 19 nt, Homo sapiens
  misc_RNA (1)...(19): siRNA sense strand
ggacaaguacccucugauc

SEQ ID NO: 1493141 - RNA, 19 nt, Homo sapiens
  misc_RNA (1)...(19): siRNA sense strand
ugcccuaccucaacaagua

SEQ ID NO: 1493142 - RNA, 19 nt, Homo sapiens
  misc_RNA (1)...(19): siRNA sense strand
caccgugacuccucccuaa

SEQ ID NO: 1493143 - RNA, 19 nt, Homo sapiens
  misc_RNA (1)...(19): siRNA sense strand
ucaaggugcugucccacaa

SEQ ID NO: 1493144 - RNA, 19 nt, Homo sapiens
  misc_RNA (1)...(19): siRNA sense strand
gaagacgucccuacacaag

SEQ ID NO: 1493145 - RNA, 19 nt, Homo sapiens
  misc_RNA (1)...(19): siRNA sense strand
gaagcgagggcaccugaga

SEQ ID NO: 1493146 - RNA, 19 nt, Homo sapiens
  misc_RNA (1)...(19): siRNA sense strand
gagggcaccugagaaggaa

SEQ ID NO: 1493147 - RNA, 19 nt, Homo sapiens
  misc_RNA (1)...(19): siRNA sense strand
ggacagcugccauccagau

SEQ ID NO: 1493148 - RNA, 19 nt, Homo sapiens
  misc_RNA (1)...(19): siRNA sense strand
gaacacuuccgagaugaug

SEQ ID NO: 1493149 - RNA, 19 nt, Homo sapiens
  misc_RNA (1)...(19): siRNA sense strand
gcagaagucccucaauggu

SEQ ID NO: 1493150 - RNA, 19 nt, Homo sapiens
  misc_RNA (1)...(19): siRNA sense strand
ggaagacgucccuacacaa

SEQ ID NO: 1493151 - RNA, 19 nt, Homo sapiens
  misc_RNA (1)...(19): siRNA sense strand
accaggagcucauccaaga

SEQ ID NO: 1493152 - RNA, 19 nt, Homo sapiens
  misc_RNA (1)...(19): siRNA sense strand
agacgucccuacacaagga

SEQ ID NO: 1493153 - RNA, 19 nt, Homo sapiens
  misc_RNA (1)...(19): siRNA sense strand
gaacugcucaaguccaucu

SEQ ID NO: 1493154 - RNA, 19 nt, Homo sapiens
  misc_RNA (1)...(19): siRNA sense strand
gagaagaguggcaaagucu

SEQ ID NO: 1493155 - RNA, 19 nt, Homo sapiens
  misc_RNA (1)...(19): siRNA sense strand
ccaauugagccuggagaua

SEQ ID NO: 1493156 - RNA, 19 nt, Homo sapiens
  misc_RNA (1)...(19): siRNA sense strand
ggaagaggaggaagagaag

SEQ ID NO: 1493157 - RNA, 19 nt, Homo sapiens
  misc_RNA (1)...(19): siRNA sense strand
uccuggagcucuucaauuc

SEQ ID NO: 1493158 - RNA, 19 nt, Homo sapiens
  misc_RNA (1)...(19): siRNA sense strand
gcaggagcgcuacaucgaa

SEQ ID NO: 1493159 - RNA, 19 nt, Homo sapiens
  misc_RNA (1)...(19): siRNA sense strand
gcagauagcaacgggaaca

SEQ ID NO: 1493160 - RNA, 19 nt, Homo sapiens
  misc_RNA (1)...(19): siRNA sense strand
ggagugaagagugcaaaga

SEQ ID NO: 1493161 - RNA, 19 nt, Homo sapiens
  misc_RNA (1)...(19): siRNA sense strand
gacaaguacccucugauca

SEQ ID NO: 1493162 - RNA, 19 nt, Homo sapiens
  misc_RNA (1)...(19): siRNA sense strand
ggacgcugacggccaagaa

SEQ ID NO: 1493163 - RNA, 19 nt, Homo sapiens
  misc_RNA (1)...(19): siRNA sense strand
gugaagagugcaaagagaa

SEQ ID NO: 1493164 - RNA, 19 nt, Homo sapiens
  misc_RNA (1)...(19): siRNA sense strand
gaugaugacggcccugugu

SEQ ID NO: 1493165 - RNA, 19 nt, Homo sapiens
  misc_RNA (1)...(19): siRNA sense strand
gcugaugcauccaauugag

SEQ ID NO: 1493166 - RNA, 19 nt, Homo sapiens
  misc_RNA (1)...(19): siRNA sense strand
aggcugagauggagcugaa

SEQ ID NO: 1493167 - RNA, 19 nt, Homo sapiens
  misc_RNA (1)...(19): siRNA sense strand
uguggaggcugcccagaga

SEQ ID NO: 1493168 - RNA, 19 nt, Homo sapiens
  misc_RNA (1)...(19): siRNA sense strand
ggccagcaccaacgugaaa

SEQ ID NO: 1493169 - RNA, 19 nt, Homo sapiens
  misc_RNA (1)...(19): siRNA sense strand
ucuggugccucuucaacuu

SEQ ID NO: 1493170 - RNA, 19 nt, Homo sapiens
  misc_RNA (1)...(19): siRNA sense strand
ugaagagugcaaagagaaa

SEQ ID NO: 1493171 - RNA, 19 nt, Homo sapiens
  misc_RNA (1)...(19): siRNA sense strand
gaacaguaugcucuccaau

SEQ ID NO: 1493172 - RNA, 19 nt, Homo sapiens
  misc_RNA (1)...(19): siRNA sense strand
gagaagcugaagcaguuga

SEQ ID NO: 1493173 - RNA, 19 nt, Homo sapiens
  misc_RNA (1)...(19): siRNA sense strand
cgagggcaccugagaagga

SEQ ID NO: 1493174 - RNA, 19 nt, Homo sapiens
  misc_RNA (1)...(19): siRNA sense strand
ugacggccaagaagaacua

SEQ ID NO: 1493175 - RNA, 19 nt, Homo sapiens
  misc_RNA (1)...(19): siRNA sense strand
uggaagaggaggaagagaa

SEQ ID NO: 1493176 - RNA, 19 nt, Homo sapiens
  misc_RNA (1)...(19): siRNA sense strand
uccaagauguccugaagca

SEQ ID NO: 1493177 - RNA, 19 nt, Homo sapiens
  misc_RNA (1)...(19): siRNA sense strand
acaaguacccucugaucau

SEQ ID NO: 1493178 - RNA, 19 nt, Homo sapiens
  misc_RNA (1)...(19): siRNA sense strand
gguggaauaccugcugaaa

SEQ ID NO: 1493179 - RNA, 19 nt, Homo sapiens
  misc_RNA (1)...(19): siRNA sense strand
cggcugaugcauccaauug

SEQ ID NO: 1493180 - RNA, 19 nt, Homo sapiens
  misc_RNA (1)...(19): siRNA sense strand
caacgugaaacacuggaau

SEQ ID NO: 1493181 - RNA, 19 nt, Homo sapiens
  misc_RNA (1)...(19): siRNA sense strand
agugaagagugcaaagaga

SEQ ID NO: 1493182 - RNA, 19 nt, Homo sapiens
  misc_RNA (1)...(19): siRNA sense strand
ccagcugccucugcuacuu

SEQ ID NO: 1493183 - RNA, 19 nt, Homo sapiens
  misc_RNA (1)...(19): siRNA sense strand
uggaggaggugcggcagaa

SEQ ID NO: 1493184 - RNA, 19 nt, Homo sapiens
  misc_RNA (1)...(19): siRNA sense strand
cagcugccucugcuacuuu

SEQ ID NO: 1493185 - RNA, 19 nt, Homo sapiens
  misc_RNA (1)...(19): siRNA sense strand
gauacaugcccuaccucaa

SEQ ID NO: 1493186 - RNA, 19 nt, Homo sapiens
  misc_RNA (1)...(19): siRNA sense strand
gagugaagagugcaaagag

SEQ ID NO: 1493187 - RNA, 19 nt, Homo sapiens
  misc_RNA (1)...(19): siRNA sense strand
cagccacccgcacguauga

SEQ ID NO: 1493188 - RNA, 19 nt, Homo sapiens
  misc_RNA (1)...(19): siRNA sense strand
gacggaaagcgcugcaugu

SEQ ID NO: 1493189 - RNA, 19 nt, Homo sapiens
  misc_RNA (1)...(19): siRNA sense strand
aggaggcccugcaacuaga

SEQ ID NO: 1493190 - RNA, 19 nt, Homo sapiens
  misc_RNA (1)...(19): siRNA sense strand
guggcaaagucuccaaguc

SEQ ID NO: 1493191 - RNA, 19 nt, Homo sapiens
  misc_RNA (1)...(19): siRNA sense strand
ccaagucccagcucaaggu

SEQ ID NO: 1493192 - RNA, 19 nt, Homo sapiens
  misc_RNA (1)...(19): siRNA sense strand
uacaugcccuaccucaaca

SEQ ID NO: 1493193 - RNA, 19 nt, Homo sapiens
  misc_RNA (1)...(19): siRNA sense strand
ggcaguuccuggagcucuu

SEQ ID NO: 1493194 - RNA, 19 nt, Homo sapiens
  misc_RNA (1)...(19): siRNA sense strand
cggaaagcgcugcauguuc

SEQ ID NO: 1493195 - RNA, 19 nt, Homo sapiens
  misc_RNA (1)...(19): siRNA sense strand
gacagccacccgcacguau

SEQ ID NO: 1493196 - RNA, 19 nt, Homo sapiens
  misc_RNA (1)...(19): siRNA sense strand
agacagccacccgcacgua

SEQ ID NO: 1493197 - RNA, 19 nt, Homo sapiens
  misc_RNA (1)...(19): siRNA sense strand
gaagcugaagcaguugaug

SEQ ID NO: 1493198 - RNA, 19 nt, Homo sapiens
  misc_RNA (1)...(19): siRNA sense strand
gcaacuagaggugaaagcu

SEQ ID NO: 1493199 - RNA, 19 nt, Homo sapiens
  misc_RNA (1)...(19): siRNA sense strand
gaaaguaggugaagccaua

SEQ ID NO: 1493200 - RNA, 19 nt, Homo sapiens
  misc_RNA (1)...(19): siRNA sense strand
gaaacccgcuucuguugug

SEQ ID NO: 1493201 - RNA, 19 nt, Homo sapiens
  misc_RNA (1)...(19): siRNA sense strand
gggcugagcuucucucucu

SEQ ID NO: 1493202 - RNA, 19 nt, Homo sapiens
  misc_RNA (1)...(19): siRNA sense strand
ccauauggguugcagagaa

SEQ ID NO: 1493203 - RNA, 19 nt, Homo sapiens
  misc_RNA (1)...(19): siRNA sense strand
gaggaaacccgcuucuguu

SEQ ID NO: 1493204 - RNA, 19 nt, Homo sapiens
  misc_RNA (1)...(19): siRNA sense strand
gagcuucucucccuuucca

SEQ ID NO: 1493205 - RNA, 19 nt, Homo sapiens
  misc_RNA (1)...(19): siRNA sense strand
cauauggguugcagagaau

SEQ ID NO: 1493206 - RNA, 19 nt, Homo sapiens
  misc_RNA (1)...(19): siRNA sense strand
gagcuucucucucuuucac

SEQ ID NO: 1493207 - RNA, 19 nt, Homo sapiens
  misc_RNA (1)...(19): siRNA sense strand
gcugagcuucucucucuuu

SEQ ID NO: 1493208 - RNA, 19 nt, Homo sapiens
  misc_RNA (1)...(19): siRNA sense strand
ugaggaaacccgcuucugu

SEQ ID NO: 1493209 - RNA, 19 nt, Homo sapiens
  misc_RNA (1)...(19): siRNA sense strand
ggaaacccgcuucuguugu

SEQ ID NO: 1493210 - RNA, 19 nt, Homo sapiens
  misc_RNA (1)...(19): siRNA sense strand
ccuaugcucugggaaacuu

SEQ ID NO: 1493211 - RNA, 19 nt, Homo sapiens
  misc_RNA (1)...(19): siRNA sense strand
gcugagcuucucucccuuu

SEQ ID NO: 1493212 - RNA, 19 nt, Homo sapiens
  misc_RNA (1)...(19): siRNA sense strand
gcggacacccacacaggaa

SEQ ID NO: 1493213 - RNA, 19 nt, Homo sapiens
  misc_RNA (1)...(19): siRNA sense strand
ccgcuucuguugugcaagu

SEQ ID NO: 1493214 - RNA, 19 nt, Homo sapiens
  misc_RNA (1)...(19): siRNA sense strand
aggaaacccgcuucuguug

SEQ ID NO: 1493215 - RNA, 19 nt, Homo sapiens
  misc_RNA (1)...(19): siRNA sense strand
acuagucccugugcuuguu

SEQ ID NO: 1493216 - RNA, 19 nt, Homo sapiens
  misc_RNA (1)...(19): siRNA sense strand
cuaaaucagugaaguguua

SEQ ID NO: 1493217 - RNA, 19 nt, Homo sapiens
  misc_RNA (1)...(19): siRNA sense strand
cagguuaucuucauuguaa

SEQ ID NO: 1493218 - RNA, 19 nt, Homo sapiens
  misc_RNA (1)...(19): siRNA sense strand
aaacagauuugcaaaguug

SEQ ID NO: 1493219 - RNA, 19 nt, Homo sapiens
  misc_RNA (1)...(19): siRNA sense strand
ucagugaaguguuaccuua

SEQ ID NO: 1493220 - RNA, 19 nt, Homo sapiens
  misc_RNA (1)...(19): siRNA sense strand
ggaaaaggauuuacauuug

SEQ ID NO: 1493221 - RNA, 19 nt, Homo sapiens
  misc_RNA (1)...(19): siRNA sense strand
gcaauaugcuguccugcuu

SEQ ID NO: 1493222 - RNA, 19 nt, Homo sapiens
  misc_RNA (1)...(19): siRNA sense strand
gaucgaagcugguuguuuu

SEQ ID NO: 1493223 - RNA, 19 nt, Homo sapiens
  misc_RNA (1)...(19): siRNA sense strand
gcaaaguuguguuggauca

SEQ ID NO: 1493224 - RNA, 19 nt, Homo sapiens
  misc_RNA (1)...(19): siRNA sense strand
uaaagugucugaauuggau

SEQ ID NO: 1493225 - RNA, 19 nt, Homo sapiens
  misc_RNA (1)...(19): siRNA sense strand
caauguauguagccaaauu

SEQ ID NO: 1493226 - RNA, 19 nt, Homo sapiens
  misc_RNA (1)...(19): siRNA sense strand
ccaggaaugugggcucuua

SEQ ID NO: 1493227 - RNA, 19 nt, Homo sapiens
  misc_RNA (1)...(19): siRNA sense strand
ccgaaucccuucagaaaga

SEQ ID NO: 1493228 - RNA, 19 nt, Homo sapiens
  misc_RNA (1)...(19): siRNA sense strand
ccacagccuuugauaaaug

SEQ ID NO: 1493229 - RNA, 19 nt, Homo sapiens
  misc_RNA (1)...(19): siRNA sense strand
ggagaugccuggaauacag

SEQ ID NO: 1493230 - RNA, 19 nt, Homo sapiens
  misc_RNA (1)...(19): siRNA sense strand
ugacccagcugaaagcaaa

SEQ ID NO: 1493231 - RNA, 19 nt, Homo sapiens
  misc_RNA (1)...(19): siRNA sense strand
gaugugaucagugaaauuu

SEQ ID NO: 1493232 - RNA, 19 nt, Homo sapiens
  misc_RNA (1)...(19): siRNA sense strand
gaaugugggcucuuaguga

SEQ ID NO: 1493233 - RNA, 19 nt, Homo sapiens
  misc_RNA (1)...(19): siRNA sense strand
ucagaaagacaccaaauug

SEQ ID NO: 1493234 - RNA, 19 nt, Homo sapiens
  misc_RNA (1)...(19): siRNA sense strand
gaauuugccucuucuacag

SEQ ID NO: 1493235 - RNA, 19 nt, Homo sapiens
  misc_RNA (1)...(19): siRNA sense strand
uaagggagauacuaacauc

SEQ ID NO: 1493236 - RNA, 19 nt, Homo sapiens
  misc_RNA (1)...(19): siRNA sense strand
aguguuggcucuggaauua

SEQ ID NO: 1493237 - RNA, 19 nt, Homo sapiens
  misc_RNA (1)...(19): siRNA sense strand
ggcagacguuggaaucuuu

SEQ ID NO: 1493238 - RNA, 19 nt, Homo sapiens
  misc_RNA (1)...(19): siRNA sense strand
ggagaugcccagccugaaa

SEQ ID NO: 1493239 - RNA, 19 nt, Homo sapiens
  misc_RNA (1)...(19): siRNA sense strand
cuguuaaggucugcaauua

SEQ ID NO: 1493240 - RNA, 19 nt, Homo sapiens
  misc_RNA (1)...(19): siRNA sense strand
caucaugccuauggacauu

SEQ ID NO: 1493241 - RNA, 19 nt, Homo sapiens
  misc_RNA (1)...(19): siRNA sense strand
gauacuaacaucuccauca

SEQ ID NO: 1493242 - RNA, 19 nt, Homo sapiens
  misc_RNA (1)...(19): siRNA sense strand
caagaugugaucagugaaa

SEQ ID NO: 1493243 - RNA, 19 nt, Homo sapiens
  misc_RNA (1)...(19): siRNA sense strand
gaugcuccguguucaaaug

SEQ ID NO: 1493244 - RNA, 19 nt, Homo sapiens
  misc_RNA (1)...(19): siRNA sense strand
ggccgaaucccuucagaaa

SEQ ID NO: 1493245 - RNA, 19 nt, Homo sapiens
  misc_RNA (1)...(19): siRNA sense strand
ggaauuugccucuucuaca

SEQ ID NO: 1493246 - RNA, 19 nt, Homo sapiens
  misc_RNA (1)...(19): siRNA sense strand
guagccaaauugaagaaau

SEQ ID NO: 1493247 - RNA, 19 nt, Homo sapiens
  misc_RNA (1)...(19): siRNA sense strand
aauaugcuguccugcuuaa

SEQ ID NO: 1493248 - RNA, 19 nt, Homo sapiens
  misc_RNA (1)...(19): siRNA sense strand
uaugauagucugagauuga

SEQ ID NO: 1493249 - RNA, 19 nt, Homo sapiens
  misc_RNA (1)...(19): siRNA sense strand
ugaauaugauagucugaga

SEQ ID NO: 1493250 - RNA, 19 nt, Homo sapiens
  misc_RNA (1)...(19): siRNA sense strand
ccaacuauccuaaaucagu

SEQ ID NO: 1493251 - RNA, 19 nt, Homo sapiens
  misc_RNA (1)...(19): siRNA sense strand
aaaguuguguuggaucauu

SEQ ID NO: 1493252 - RNA, 19 nt, Homo sapiens
  misc_RNA (1)...(19): siRNA sense strand
ccuaaaugcugcuucucuu

SEQ ID NO: 1493253 - RNA, 19 nt, Homo sapiens
  misc_RNA (1)...(19): siRNA sense strand
ccaaauugaagaaaucaug

SEQ ID NO: 1493254 - RNA, 19 nt, Homo sapiens
  misc_RNA (1)...(19): siRNA sense strand
cugcuuaaccgauucaauu

SEQ ID NO: 1493255 - RNA, 19 nt, Homo sapiens
  misc_RNA (1)...(19): siRNA sense strand
ucuuagugauuccagauaa

SEQ ID NO: 1493256 - RNA, 19 nt, Homo sapiens
  misc_RNA (1)...(19): siRNA sense strand
gguaacaucaugccuaugg

SEQ ID NO: 1493257 - RNA, 19 nt, Homo sapiens
  misc_RNA (1)...(19): siRNA sense strand
ugaauuggauggcagaaaa

SEQ ID NO: 1493258 - RNA, 19 nt, Homo sapiens
  misc_RNA (1)...(19): siRNA sense strand
ggaauacaguaagggagau

SEQ ID NO: 1493259 - RNA, 19 nt, Homo sapiens
  misc_RNA (1)...(19): siRNA sense strand
cccaauguauguagccaaa

SEQ ID NO: 1493260 - RNA, 19 nt, Homo sapiens
  misc_RNA (1)...(19): siRNA sense strand
ucaugccuauggacauuaa

SEQ ID NO: 1493261 - RNA, 19 nt, Homo sapiens
  misc_RNA (1)...(19): siRNA sense strand
uuacccaacuauccuaaau

SEQ ID NO: 1493262 - RNA, 19 nt, Homo sapiens
  misc_RNA (1)...(19): siRNA sense strand
gaauacaguaagggagaua

SEQ ID NO: 1493263 - RNA, 19 nt, Homo sapiens
  misc_RNA (1)...(19): siRNA sense strand
caauaugcuguccugcuua

SEQ ID NO: 1493264 - RNA, 19 nt, Homo sapiens
  misc_RNA (1)...(19): siRNA sense strand
guauguagccaaauugaag

SEQ ID NO: 1493265 - RNA, 19 nt, Homo sapiens
  misc_RNA (1)...(19): siRNA sense strand
ucccacagccuuugauaaa

SEQ ID NO: 1493266 - RNA, 19 nt, Homo sapiens
  misc_RNA (1)...(19): siRNA sense strand
ggaaugugggcucuuagug

SEQ ID NO: 1493267 - RNA, 19 nt, Homo sapiens
  misc_RNA (1)...(19): siRNA sense strand
uagccaaauugaagaaauc

SEQ ID NO: 1493268 - RNA, 19 nt, Homo sapiens
  misc_RNA (1)...(19): siRNA sense strand
gagaugcccagccugaaau

SEQ ID NO: 1493269 - RNA, 19 nt, Homo sapiens
  misc_RNA (1)...(19): siRNA sense strand
gacauuaaaggaauagcaa

SEQ ID NO: 1493270 - RNA, 19 nt, Homo sapiens
  misc_RNA (1)...(19): siRNA sense strand
ggacauuaaaggaauagca

SEQ ID NO: 1493271 - RNA, 19 nt, Homo sapiens
  misc_RNA (1)...(19): siRNA sense strand
gcuguuaaggucugcaauu

SEQ ID NO: 1493272 - RNA, 19 nt, Homo sapiens
  misc_RNA (1)...(19): siRNA sense strand
caaaugaucgaagcugguu

SEQ ID NO: 1493273 - RNA, 19 nt, Homo sapiens
  misc_RNA (1)...(19): siRNA sense strand
uaagucaaaggaggaauuu

SEQ ID NO: 1493274 - RNA, 19 nt, Homo sapiens
  misc_RNA (1)...(19): siRNA sense strand
ucccacgacuucacauuug

SEQ ID NO: 1493275 - RNA, 19 nt, Homo sapiens
  misc_RNA (1)...(19): siRNA sense strand
cuauggacauuaaaggaau

SEQ ID NO: 1493276 - RNA, 19 nt, Homo sapiens
  misc_RNA (1)...(19): siRNA sense strand
ccaucaugcuggcaauaug

SEQ ID NO: 1493277 - RNA, 19 nt, Homo sapiens
  misc_RNA (1)...(19): siRNA sense strand
guaacaucaugccuaugga

SEQ ID NO: 1493278 - RNA, 19 nt, Homo sapiens
  misc_RNA (1)...(19): siRNA sense strand
ugcccagccugaaauguuu

SEQ ID NO: 1493279 - RNA, 19 nt, Homo sapiens
  misc_RNA (1)...(19): siRNA sense strand
cuuaaccgauucaauuauc

SEQ ID NO: 1493280 - RNA, 19 nt, Homo sapiens
  misc_RNA (1)...(19): siRNA sense strand
acccaacuauccuaaauca

SEQ ID NO: 1493281 - RNA, 19 nt, Homo sapiens
  misc_RNA (1)...(19): siRNA sense strand
auacuaacaucuccaucau

SEQ ID NO: 1493282 - RNA, 19 nt, Homo sapiens
  misc_RNA (1)...(19): siRNA sense strand
uaaggcagacguuggaauc

SEQ ID NO: 1493283 - RNA, 19 nt, Homo sapiens
  misc_RNA (1)...(19): siRNA sense strand
gaauaugauagucugagau

SEQ ID NO: 1493284 - RNA, 19 nt, Homo sapiens
  misc_RNA (1)...(19): siRNA sense strand
acucggagaugccuggaau

SEQ ID NO: 1493285 - RNA, 19 nt, Homo sapiens
  misc_RNA (1)...(19): siRNA sense strand
aaugugggcucuuagugau

SEQ ID NO: 1493286 - RNA, 19 nt, Homo sapiens
  misc_RNA (1)...(19): siRNA sense strand
aaacaguauuccaaagaac

SEQ ID NO: 1493287 - RNA, 19 nt, Homo sapiens
  misc_RNA (1)...(19): siRNA sense strand
ggacuugcucccacgacuu

SEQ ID NO: 1493288 - RNA, 19 nt, Homo sapiens
  misc_RNA (1)...(19): siRNA sense strand
gauuugcaaaguuguguug

SEQ ID NO: 1493289 - RNA, 19 nt, Homo sapiens
  misc_RNA (1)...(19): siRNA sense strand
ccuauggacauuaaaggaa

SEQ ID NO: 1493290 - RNA, 19 nt, Homo sapiens
  misc_RNA (1)...(19): siRNA sense strand
cuacaugcacgcuuuccaa

SEQ ID NO: 1493291 - RNA, 19 nt, Homo sapiens
  misc_RNA (1)...(19): siRNA sense strand
guaagggagauacuaacau

SEQ ID NO: 1493292 - RNA, 19 nt, Homo sapiens
  misc_RNA (1)...(19): siRNA sense strand
aaucauggagcacaggaaa

SEQ ID NO: 1493293 - RNA, 19 nt, Homo sapiens
  misc_RNA (1)...(19): siRNA sense strand
acgguaacaucaugccuau

SEQ ID NO: 1493294 - RNA, 19 nt, Homo sapiens
  misc_RNA (1)...(19): siRNA sense strand
caucccacagccuuugaua

SEQ ID NO: 1493295 - RNA, 19 nt, Homo sapiens
  misc_RNA (1)...(19): siRNA sense strand
ucucagaaggcauccugua

SEQ ID NO: 1493296 - RNA, 19 nt, Homo sapiens
  misc_RNA (1)...(19): siRNA sense strand
ugcuuaaccgauucaauua

SEQ ID NO: 1493297 - RNA, 19 nt, Homo sapiens
  misc_RNA (1)...(19): siRNA sense strand
gcuuaaccgauucaauuau

SEQ ID NO: 1493298 - RNA, 19 nt, Homo sapiens
  misc_RNA (1)...(19): siRNA sense strand
cacagccuuugauaaaugu

SEQ ID NO: 1493299 - RNA, 19 nt, Homo sapiens
  misc_RNA (1)...(19): siRNA sense strand
gaucuuuacccaacuaucc

SEQ ID NO: 1493300 - RNA, 19 nt, Homo sapiens
  misc_RNA (1)...(19): siRNA sense strand
aaguuguguuggaucauuu

SEQ ID NO: 1493301 - RNA, 19 nt, Homo sapiens
  misc_RNA (1)...(19): siRNA sense strand
aaaggaauagcaaggacuu

SEQ ID NO: 1493302 - RNA, 19 nt, Homo sapiens
  misc_RNA (1)...(19): siRNA sense strand
agccugaaauguuugacaa

SEQ ID NO: 1493303 - RNA, 19 nt, Homo sapiens
  misc_RNA (1)...(19): siRNA sense strand
uaaaugcugcuucucuucu

SEQ ID NO: 1493304 - RNA, 19 nt, Homo sapiens
  misc_RNA (1)...(19): siRNA sense strand
uauccuaaaucagugaagu

SEQ ID NO: 1493305 - RNA, 19 nt, Homo sapiens
  misc_RNA (1)...(19): siRNA sense strand
cuuacguccuggagggaua

SEQ ID NO: 1493306 - RNA, 19 nt, Homo sapiens
  misc_RNA (1)...(19): siRNA sense strand
ggauaagucaaaggaggaa

SEQ ID NO: 1493307 - RNA, 19 nt, Homo sapiens
  misc_RNA (1)...(19): siRNA sense strand
gcuccguguucaaaugauc

SEQ ID NO: 1493308 - RNA, 19 nt, Homo sapiens
  misc_RNA (1)...(19): siRNA sense strand
ccagguuaucuucauugua

SEQ ID NO: 1493309 - RNA, 19 nt, Homo sapiens
  misc_RNA (1)...(19): siRNA sense strand
gcuaucacacacucucuca

SEQ ID NO: 1493310 - RNA, 19 nt, Homo sapiens
  misc_RNA (1)...(19): siRNA sense strand
ugacaagguguuaguggau

SEQ ID NO: 1493311 - RNA, 19 nt, Homo sapiens
  misc_RNA (1)...(19): siRNA sense strand
ccgauucaauuauccuuuu

SEQ ID NO: 1493312 - RNA, 19 nt, Homo sapiens
  misc_RNA (1)...(19): siRNA sense strand
uguccagguuaucuucauu

SEQ ID NO: 1493313 - RNA, 19 nt, Homo sapiens
  misc_RNA (1)...(19): siRNA sense strand
gugaaguguuaccuuagca

SEQ ID NO: 1493314 - RNA, 19 nt, Homo sapiens
  misc_RNA (1)...(19): siRNA sense strand
gauuccagauaagggcaaa

SEQ ID NO: 1493315 - RNA, 19 nt, Homo sapiens
  misc_RNA (1)...(19): siRNA sense strand
aagaugugaucagugaaau

SEQ ID NO: 1493316 - RNA, 19 nt, Homo sapiens
  misc_RNA (1)...(19): siRNA sense strand
gcacgugccuucuguacug

SEQ ID NO: 1493317 - RNA, 19 nt, Homo sapiens
  misc_RNA (1)...(19): siRNA sense strand
ggcagagcaucuucuauuu

SEQ ID NO: 1493318 - RNA, 19 nt, Homo sapiens
  misc_RNA (1)...(19): siRNA sense strand
gccaagggcuggaucuuca

SEQ ID NO: 1493319 - RNA, 19 nt, Homo sapiens
  misc_RNA (1)...(19): siRNA sense strand
gagcgagccuucaccuaca

SEQ ID NO: 1493320 - RNA, 19 nt, Homo sapiens
  misc_RNA (1)...(19): siRNA sense strand
cagagcaucuucuauuucu

SEQ ID NO: 1493321 - RNA, 19 nt, Homo sapiens
  misc_RNA (1)...(19): siRNA sense strand
gcagagcaucuucuauuuc

SEQ ID NO: 1493322 - RNA, 19 nt, Homo sapiens
  misc_RNA (1)...(19): siRNA sense strand
uggcagagcaucuucuauu

SEQ ID NO: 1493323 - RNA, 19 nt, Homo sapiens
  misc_RNA (1)...(19): siRNA sense strand
gacuucggcuggaacaaga

SEQ ID NO: 1493324 - RNA, 19 nt, Homo sapiens
  misc_RNA (1)...(19): siRNA sense strand
gcggguuucucucugauca

SEQ ID NO: 1493325 - RNA, 19 nt, Homo sapiens
  misc_RNA (1)...(19): siRNA sense strand
uggcauuucuguuaacauc

SEQ ID NO: 1493326 - RNA, 19 nt, Homo sapiens
  misc_RNA (1)...(19): siRNA sense strand
gcauuucuguuaacaucca

SEQ ID NO: 1493327 - RNA, 19 nt, Homo sapiens
  misc_RNA (1)...(19): siRNA sense strand
ucaacgugguuccuugguu

SEQ ID NO: 1493328 - RNA, 19 nt, Homo sapiens
  misc_RNA (1)...(19): siRNA sense strand
ggccacaccuccagcuucu

SEQ ID NO: 1493329 - RNA, 19 nt, Homo sapiens
  misc_RNA (1)...(19): siRNA sense strand
gcucccugcuccuggaaug

SEQ ID NO: 1493330 - RNA, 19 nt, Homo sapiens
  misc_RNA (1)...(19): siRNA sense strand
ggacuucggcuggaacaag

SEQ ID NO: 1493331 - RNA, 19 nt, Homo sapiens
  misc_RNA (1)...(19): siRNA sense strand
cuaggcggcuacuugaugu

SEQ ID NO: 1493332 - RNA, 19 nt, Homo sapiens
  misc_RNA (1)...(19): siRNA sense strand
gcuggcagagcaucuucua

SEQ ID NO: 1493333 - RNA, 19 nt, Homo sapiens
  misc_RNA (1)...(19): siRNA sense strand
ccacaccuccagcuucugu

SEQ ID NO: 1493334 - RNA, 19 nt, Homo sapiens
  misc_RNA (1)...(19): siRNA sense strand
agaaggugcgggagaguga

SEQ ID NO: 1493335 - RNA, 19 nt, Homo sapiens
  misc_RNA (1)...(19): siRNA sense strand
gaaggucauccugcuguca

SEQ ID NO: 1493336 - RNA, 19 nt, Homo sapiens
  misc_RNA (1)...(19): siRNA sense strand
ggguuucucucugaucauc

SEQ ID NO: 1493337 - RNA, 19 nt, Homo sapiens
  misc_RNA (1)...(19): siRNA sense strand
ucuccuggcugcccaccuu

SEQ ID NO: 1493338 - RNA, 19 nt, Homo sapiens
  misc_RNA (1)...(19): siRNA sense strand
gcgauuccggccagucuau

SEQ ID NO: 1493339 - RNA, 19 nt, Homo sapiens
  misc_RNA (1)...(19): siRNA sense strand
ccaucggccuccagaccuu

SEQ ID NO: 1493340 - RNA, 19 nt, Homo sapiens
  misc_RNA (1)...(19): siRNA sense strand
gugagucuguggucuuugc

SEQ ID NO: 1493341 - RNA, 19 nt, Homo sapiens
  misc_RNA (1)...(19): siRNA sense strand
ugucuaggcggcuacuuga

SEQ ID NO: 1493342 - RNA, 19 nt, Homo sapiens
  misc_RNA (1)...(19): siRNA sense strand
gcaggugucgugggugugu

SEQ ID NO: 1493343 - RNA, 19 nt, Homo sapiens
  misc_RNA (1)...(19): siRNA sense strand
gcuccagcaugcccaucug

SEQ ID NO: 1493344 - RNA, 19 nt, Homo sapiens
  misc_RNA (1)...(19): siRNA sense strand
ugucgugggugugugucua

SEQ ID NO: 1493345 - RNA, 19 nt, Homo sapiens
  misc_RNA (1)...(19): siRNA sense strand
ggacgucuuugaugaauua

SEQ ID NO: 1493346 - RNA, 19 nt, Homo sapiens
  misc_RNA (1)...(19): siRNA sense strand
uggaacagcucacugaaua

SEQ ID NO: 1493347 - RNA, 19 nt, Homo sapiens
  misc_RNA (1)...(19): siRNA sense strand
gaaagugaacgcagugaaa

SEQ ID NO: 1493348 - RNA, 19 nt, Homo sapiens
  misc_RNA (1)...(19): siRNA sense strand
ugaaagaggccaucgugaa

SEQ ID NO: 1493349 - RNA, 19 nt, Homo sapiens
  misc_RNA (1)...(19): siRNA sense strand
cugaagauaucgugaacaa

SEQ ID NO: 1493350 - RNA, 19 nt, Homo sapiens
  misc_RNA (1)...(19): siRNA sense strand
ggaaggaccccaaauuuga

SEQ ID NO: 1493351 - RNA, 19 nt, Homo sapiens
  misc_RNA (1)...(19): siRNA sense strand
gcacuuaaaggaauucuac

SEQ ID NO: 1493352 - RNA, 19 nt, Homo sapiens
  misc_RNA (1)...(19): siRNA sense strand
gaaagaggccaucgugaac

SEQ ID NO: 1493353 - RNA, 19 nt, Homo sapiens
  misc_RNA (1)...(19): siRNA sense strand
gaacagcucacugaauaca

SEQ ID NO: 1493354 - RNA, 19 nt, Homo sapiens
  misc_RNA (1)...(19): siRNA sense strand
uaagcuggcuccggagaaa

SEQ ID NO: 1493355 - RNA, 19 nt, Homo sapiens
  misc_RNA (1)...(19): siRNA sense strand
cagagaaguugguggaaca

SEQ ID NO: 1493356 - RNA, 19 nt, Homo sapiens
  misc_RNA (1)...(19): siRNA sense strand
cagaaaugcugcacaacgu

SEQ ID NO: 1493357 - RNA, 19 nt, Homo sapiens
  misc_RNA (1)...(19): siRNA sense strand
uugaagaacugcagaaggu

SEQ ID NO: 1493358 - RNA, 19 nt, Homo sapiens
  misc_RNA (1)...(19): siRNA sense strand
ucuauggucuguucugcaa

SEQ ID NO: 1493359 - RNA, 19 nt, Homo sapiens
  misc_RNA (1)...(19): siRNA sense strand
ccacaagccagaagcacaa

SEQ ID NO: 1493360 - RNA, 19 nt, Homo sapiens
  misc_RNA (1)...(19): siRNA sense strand
aaggaggaaagaagaaaua

SEQ ID NO: 1493361 - RNA, 19 nt, Homo sapiens
  misc_RNA (1)...(19): siRNA sense strand
cugcucagcugcccuguca

SEQ ID NO: 1493362 - RNA, 19 nt, Homo sapiens
  misc_RNA (1)...(19): siRNA sense strand
guggagagcaucuucaaca

SEQ ID NO: 1493363 - RNA, 19 nt, Homo sapiens
  misc_RNA (1)...(19): siRNA sense strand
ugcagaagguguugaugga

SEQ ID NO: 1493364 - RNA, 19 nt, Homo sapiens
  misc_RNA (1)...(19): siRNA sense strand
ugaacuuugucaaccagaa

SEQ ID NO: 1493365 - RNA, 19 nt, Homo sapiens
  misc_RNA (1)...(19): siRNA sense strand
uggagagcaucuucaacaa

SEQ ID NO: 1493366 - RNA, 19 nt, Homo sapiens
  misc_RNA (1)...(19): siRNA sense strand
cauccuacaccaccuauuc

SEQ ID NO: 1493367 - RNA, 19 nt, Homo sapiens
  misc_RNA (1)...(19): siRNA sense strand
gcuucuuccugcacuuaaa

SEQ ID NO: 1493368 - RNA, 19 nt, Homo sapiens
  misc_RNA (1)...(19): siRNA sense strand
ggagagcaucuucaacaag

SEQ ID NO: 1493369 - RNA, 19 nt, Homo sapiens
  misc_RNA (1)...(19): siRNA sense strand
gaggaaagaagaaauaccu

SEQ ID NO: 1493370 - RNA, 19 nt, Homo sapiens
  misc_RNA (1)...(19): siRNA sense strand
ggugcucuauggucuguuc

SEQ ID NO: 1493371 - RNA, 19 nt, Homo sapiens
  misc_RNA (1)...(19): siRNA sense strand
cgcuggagcugcugaagga

SEQ ID NO: 1493372 - RNA, 19 nt, Homo sapiens
  misc_RNA (1)...(19): siRNA sense strand
aagaggccaucgugaacuu

SEQ ID NO: 1493373 - RNA, 19 nt, Homo sapiens
  misc_RNA (1)...(19): siRNA sense strand
gaacuuugucaaccagaag

SEQ ID NO: 1493374 - RNA, 19 nt, Homo sapiens
  misc_RNA (1)...(19): siRNA sense strand
cggaggaggagcucucaaa

SEQ ID NO: 1493375 - RNA, 19 nt, Homo sapiens
  misc_RNA (1)...(19): siRNA sense strand
agguggaggucaucacuau

SEQ ID NO: 1493376 - RNA, 19 nt, Homo sapiens
  misc_RNA (1)...(19): siRNA sense strand
ggacacccaguuugcagau

SEQ ID NO: 1493377 - RNA, 19 nt, Homo sapiens
  misc_RNA (1)...(19): siRNA sense strand
gaacugcagaagguguuga

SEQ ID NO: 1493378 - RNA, 19 nt, Homo sapiens
  misc_RNA (1)...(19): siRNA sense strand
aagauaucgugaacaagga

SEQ ID NO: 1493379 - RNA, 19 nt, Homo sapiens
  misc_RNA (1)...(19): siRNA sense strand
gaucaaugccacucuucuc

SEQ ID NO: 1493380 - RNA, 19 nt, Homo sapiens
  misc_RNA (1)...(19): siRNA sense strand
caaaaguggucugaaguca

SEQ ID NO: 1493381 - RNA, 19 nt, Homo sapiens
  misc_RNA (1)...(19): siRNA sense strand
gagcguggagagcaucuuc

SEQ ID NO: 1493382 - RNA, 19 nt, Homo sapiens
  misc_RNA (1)...(19): siRNA sense strand
gaaggaccccaaauuugaa

SEQ ID NO: 1493383 - RNA, 19 nt, Homo sapiens
  misc_RNA (1)...(19): siRNA sense strand
caucuuacucuugcugauu

SEQ ID NO: 1493384 - RNA, 19 nt, Homo sapiens
  misc_RNA (1)...(19): siRNA sense strand
gcucauccuacaccaccua

SEQ ID NO: 1493385 - RNA, 19 nt, Homo sapiens
  misc_RNA (1)...(19): siRNA sense strand
gcugauuggacaacuugaa

SEQ ID NO: 1493386 - RNA, 19 nt, Homo sapiens
  misc_RNA (1)...(19): siRNA sense strand
gagaaagugaacgcaguga

SEQ ID NO: 1493387 - RNA, 19 nt, Homo sapiens
  misc_RNA (1)...(19): siRNA sense strand
gaggccaucgugaacuuug

SEQ ID NO: 1493388 - RNA, 19 nt, Homo sapiens
  misc_RNA (1)...(19): siRNA sense strand
acaaggacgagccuccaaa

SEQ ID NO: 1493389 - RNA, 19 nt, Homo sapiens
  misc_RNA (1)...(19): siRNA sense strand
guucgacgggcucauccua

SEQ ID NO: 1493390 - RNA, 19 nt, Homo sapiens
  misc_RNA (1)...(19): siRNA sense strand
aaggacgucuuugaugaau

SEQ ID NO: 1493391 - RNA, 19 nt, Homo sapiens
  misc_RNA (1)...(19): siRNA sense strand
caaggacgagccuccaaag

SEQ ID NO: 1493392 - RNA, 19 nt, Homo sapiens
  misc_RNA (1)...(19): siRNA sense strand
gacaaggacgagccuccaa

SEQ ID NO: 1493393 - RNA, 19 nt, Homo sapiens
  misc_RNA (1)...(19): siRNA sense strand
aggacgagccuccaaagga

SEQ ID NO: 1493394 - RNA, 19 nt, Homo sapiens
  misc_RNA (1)...(19): siRNA sense strand
ucgacgggcucauccuaca

SEQ ID NO: 1493395 - RNA, 19 nt, Homo sapiens
  misc_RNA (1)...(19): siRNA sense strand
ugaacaaggaugccaagag

SEQ ID NO: 1493396 - RNA, 19 nt, Homo sapiens
  misc_RNA (1)...(19): siRNA sense strand
gcuggaagcagaggacauc

SEQ ID NO: 1493397 - RNA, 19 nt, Homo sapiens
  misc_RNA (1)...(19): siRNA sense strand
uaaaggaggugacuaaauu

SEQ ID NO: 1493398 - RNA, 19 nt, Homo sapiens
  misc_RNA (1)...(19): siRNA sense strand
gcacuggucugcauucuaa

SEQ ID NO: 1493399 - RNA, 19 nt, Homo sapiens
  misc_RNA (1)...(19): siRNA sense strand
gaaaguaccaacaagauuu

SEQ ID NO: 1493400 - RNA, 19 nt, Homo sapiens
  misc_RNA (1)...(19): siRNA sense strand
gaacuuugcugugacauga

SEQ ID NO: 1493401 - RNA, 19 nt, Homo sapiens
  misc_RNA (1)...(19): siRNA sense strand
gaacaggagcauugauaua

SEQ ID NO: 1493402 - RNA, 19 nt, Homo sapiens
  misc_RNA (1)...(19): siRNA sense strand
gcaauuaucaagcugaaua

SEQ ID NO: 1493403 - RNA, 19 nt, Homo sapiens
  misc_RNA (1)...(19): siRNA sense strand
caugaucgauguuguaauu

SEQ ID NO: 1493404 - RNA, 19 nt, Homo sapiens
  misc_RNA (1)...(19): siRNA sense strand
caaagaaucuauggcaauu

SEQ ID NO: 1493405 - RNA, 19 nt, Homo sapiens
  misc_RNA (1)...(19): siRNA sense strand
ccaacaagauuuauaagga

SEQ ID NO: 1493406 - RNA, 19 nt, Homo sapiens
  misc_RNA (1)...(19): siRNA sense strand
uaacaagacuucacauuac

SEQ ID NO: 1493407 - RNA, 19 nt, Homo sapiens
  misc_RNA (1)...(19): siRNA sense strand
ucuaaagccuacaaaguua

SEQ ID NO: 1493408 - RNA, 19 nt, Homo sapiens
  misc_RNA (1)...(19): siRNA sense strand
ugaaagcgcugacacacaa

SEQ ID NO: 1493409 - RNA, 19 nt, Homo sapiens
  misc_RNA (1)...(19): siRNA sense strand
uccaauagcuccuuuguga

SEQ ID NO: 1493410 - RNA, 19 nt, Homo sapiens
  misc_RNA (1)...(19): siRNA sense strand
caucuuagcuuuuaucuga

SEQ ID NO: 1493411 - RNA, 19 nt, Homo sapiens
  misc_RNA (1)...(19): siRNA sense strand
cauggaggcuuuaacaaga

SEQ ID NO: 1493412 - RNA, 19 nt, Homo sapiens
  misc_RNA (1)...(19): siRNA sense strand
ggaaaguaccaacaagauu

SEQ ID NO: 1493413 - RNA, 19 nt, Homo sapiens
  misc_RNA (1)...(19): siRNA sense strand
gaaguggaagugcuuauga

SEQ ID NO: 1493414 - RNA, 19 nt, Homo sapiens
  misc_RNA (1)...(19): siRNA sense strand
agaaggugguguuucauaa

SEQ ID NO: 1493415 - RNA, 19 nt, Homo sapiens
  misc_RNA (1)...(19): siRNA sense strand
uggaagugcuuaugacaaa

SEQ ID NO: 1493416 - RNA, 19 nt, Homo sapiens
  misc_RNA (1)...(19): siRNA sense strand
gggaacaggagcauugaua

SEQ ID NO: 1493417 - RNA, 19 nt, Homo sapiens
  misc_RNA (1)...(19): siRNA sense strand
gaaacucauuccacaacug

SEQ ID NO: 1493418 - RNA, 19 nt, Homo sapiens
  misc_RNA (1)...(19): siRNA sense strand
uuaguaagguggugcagaa

SEQ ID NO: 1493419 - RNA, 19 nt, Homo sapiens
  misc_RNA (1)...(19): siRNA sense strand
gauaugcaaucuuaugaac

SEQ ID NO: 1493420 - RNA, 19 nt, Homo sapiens
  misc_RNA (1)...(19): siRNA sense strand
gcauugauauacgucauug

SEQ ID NO: 1493421 - RNA, 19 nt, Homo sapiens
  misc_RNA (1)...(19): siRNA sense strand
caaaguugauggucugucu

SEQ ID NO: 1493422 - RNA, 19 nt, Homo sapiens
  misc_RNA (1)...(19): siRNA sense strand
ggaacaggagcauugauau

SEQ ID NO: 1493423 - RNA, 19 nt, Homo sapiens
  misc_RNA (1)...(19): siRNA sense strand
cuguggauaugcaaucuua

SEQ ID NO: 1493424 - RNA, 19 nt, Homo sapiens
  misc_RNA (1)...(19): siRNA sense strand
caauagcuccuuugugaau

SEQ ID NO: 1493425 - RNA, 19 nt, Homo sapiens
  misc_RNA (1)...(19): siRNA sense strand
gacuacaacuuccacuguu

SEQ ID NO: 1493426 - RNA, 19 nt, Homo sapiens
  misc_RNA (1)...(19): siRNA sense strand
gaaucuauggcaauuauca

SEQ ID NO: 1493427 - RNA, 19 nt, Homo sapiens
  misc_RNA (1)...(19): siRNA sense strand
cuuaugaacuuugcuguga

SEQ ID NO: 1493428 - RNA, 19 nt, Homo sapiens
  misc_RNA (1)...(19): siRNA sense strand
agacuucacauuacuguuu

SEQ ID NO: 1493429 - RNA, 19 nt, Homo sapiens
  misc_RNA (1)...(19): siRNA sense strand
cagaaggugguguuucaua

SEQ ID NO: 1493430 - RNA, 19 nt, Homo sapiens
  misc_RNA (1)...(19): siRNA sense strand
gaagugcuuaugacaaaga

SEQ ID NO: 1493431 - RNA, 19 nt, Homo sapiens
  misc_RNA (1)...(19): siRNA sense strand
gaucgauguuguaauugau

SEQ ID NO: 1493432 - RNA, 19 nt, Homo sapiens
  misc_RNA (1)...(19): siRNA sense strand
ugaucgauguuguaauuga

SEQ ID NO: 1493433 - RNA, 19 nt, Homo sapiens
  misc_RNA (1)...(19): siRNA sense strand
gaagauggaaguggaagug

SEQ ID NO: 1493434 - RNA, 19 nt, Homo sapiens
  misc_RNA (1)...(19): siRNA sense strand
aaaguuaacccagacauga

SEQ ID NO: 1493435 - RNA, 19 nt, Homo sapiens
  misc_RNA (1)...(19): siRNA sense strand
aggaugacauuuccaauag

SEQ ID NO: 1493436 - RNA, 19 nt, Homo sapiens
  misc_RNA (1)...(19): siRNA sense strand
guaagguggugcagaaacu

SEQ ID NO: 1493437 - RNA, 19 nt, Homo sapiens
  misc_RNA (1)...(19): siRNA sense strand
aaaucuacauugcaacaga

SEQ ID NO: 1493438 - RNA, 19 nt, Homo sapiens
  misc_RNA (1)...(19): siRNA sense strand
guauauauggguuaaagga

SEQ ID NO: 1493439 - RNA, 19 nt, Homo sapiens
  misc_RNA (1)...(19): siRNA sense strand
guaauugaugugucuugua

SEQ ID NO: 1493440 - RNA, 19 nt, Homo sapiens
  misc_RNA (1)...(19): siRNA sense strand
aaggaugacauuuccaaua

SEQ ID NO: 1493441 - RNA, 19 nt, Homo sapiens
  misc_RNA (1)...(19): siRNA sense strand
ggauaugcaaucuuaugaa

SEQ ID NO: 1493442 - RNA, 19 nt, Homo sapiens
  misc_RNA (1)...(19): siRNA sense strand
aaacacagagggacauuca

SEQ ID NO: 1493443 - RNA, 19 nt, Homo sapiens
  misc_RNA (1)...(19): siRNA sense strand
uugauggucugucugauga

SEQ ID NO: 1493444 - RNA, 19 nt, Homo sapiens
  misc_RNA (1)...(19): siRNA sense strand
gacccaaccuuugacuaug

SEQ ID NO: 1493445 - RNA, 19 nt, Homo sapiens
  misc_RNA (1)...(19): siRNA sense strand
acuagugccuccagucuga

SEQ ID NO: 1493446 - RNA, 19 nt, Homo sapiens
  misc_RNA (1)...(19): siRNA sense strand
gcaaguccuccauccagaa

SEQ ID NO: 1493447 - RNA, 19 nt, Homo sapiens
  misc_RNA (1)...(19): siRNA sense strand
gcagaaacucauuccacaa

SEQ ID NO: 1493448 - RNA, 19 nt, Homo sapiens
  misc_RNA (1)...(19): siRNA sense strand
gaugugucuuguauauaug

SEQ ID NO: 1493449 - RNA, 19 nt, Homo sapiens
  misc_RNA (1)...(19): siRNA sense strand
ggugguguuucauaagaug

SEQ ID NO: 1493450 - RNA, 19 nt, Homo sapiens
  misc_RNA (1)...(19): siRNA sense strand
uauauggguuaaaggaaga

SEQ ID NO: 1493451 - RNA, 19 nt, Homo sapiens
  misc_RNA (1)...(19): siRNA sense strand
ccgauucguuuccaaagga

SEQ ID NO: 1493452 - RNA, 19 nt, Homo sapiens
  misc_RNA (1)...(19): siRNA sense strand
gaugacauuuccaauagcu

SEQ ID NO: 1493453 - RNA, 19 nt, Homo sapiens
  misc_RNA (1)...(19): siRNA sense strand
gcagaugcugggcuagaaa

SEQ ID NO: 1493454 - RNA, 19 nt, Homo sapiens
  misc_RNA (1)...(19): siRNA sense strand
cagagggacauucaucaaa

SEQ ID NO: 1493455 - RNA, 19 nt, Homo sapiens
  misc_RNA (1)...(19): siRNA sense strand
gagcauugauauacgucau

SEQ ID NO: 1493456 - RNA, 19 nt, Homo sapiens
  misc_RNA (1)...(19): siRNA sense strand
aaggugguguuucauaaga

SEQ ID NO: 1493457 - RNA, 19 nt, Homo sapiens
  misc_RNA (1)...(19): siRNA sense strand
gcuuuuaucugacuaguau

SEQ ID NO: 1493458 - RNA, 19 nt, Homo sapiens
  misc_RNA (1)...(19): siRNA sense strand
agagggacauucaucaaag

SEQ ID NO: 1493459 - RNA, 19 nt, Homo sapiens
  misc_RNA (1)...(19): siRNA sense strand
uccagaaggugguguuuca

SEQ ID NO: 1493460 - RNA, 19 nt, Homo sapiens
  misc_RNA (1)...(19): siRNA sense strand
ugacccaaccuuugacuau

SEQ ID NO: 1493461 - RNA, 19 nt, Homo sapiens
  misc_RNA (1)...(19): siRNA sense strand
ggaaguggaagugcuuaug

SEQ ID NO: 1493462 - RNA, 19 nt, Homo sapiens
  misc_RNA (1)...(19): siRNA sense strand
cuacauggaggcuuuaaca

SEQ ID NO: 1493463 - RNA, 19 nt, Homo sapiens
  misc_RNA (1)...(19): siRNA sense strand
gaaggugguguuucauaag

SEQ ID NO: 1493464 - RNA, 19 nt, Homo sapiens
  misc_RNA (1)...(19): siRNA sense strand
uaguaucuaugaccauuca

SEQ ID NO: 1493465 - RNA, 19 nt, Homo sapiens
  misc_RNA (1)...(19): siRNA sense strand
caaaguuaacccagacaug

SEQ ID NO: 1493466 - RNA, 19 nt, Homo sapiens
  misc_RNA (1)...(19): siRNA sense strand
cuuugugaauuuccagaua

SEQ ID NO: 1493467 - RNA, 19 nt, Homo sapiens
  misc_RNA (1)...(19): siRNA sense strand
acuacaacuuccacuguuu

SEQ ID NO: 1493468 - RNA, 19 nt, Homo sapiens
  misc_RNA (1)...(19): siRNA sense strand
gagggacauucaucaaagg

SEQ ID NO: 1493469 - RNA, 19 nt, Homo sapiens
  misc_RNA (1)...(19): siRNA sense strand
aaaggaggugacuaaauuu

SEQ ID NO: 1493470 - RNA, 19 nt, Homo sapiens
  misc_RNA (1)...(19): siRNA sense strand
caacugccgaccuuggaaa

SEQ ID NO: 1493471 - RNA, 19 nt, Homo sapiens
  misc_RNA (1)...(19): siRNA sense strand
auagcuccuuugugaauuu

SEQ ID NO: 1493472 - RNA, 19 nt, Homo sapiens
  misc_RNA (1)...(19): siRNA sense strand
ucuaagggaagaaagcuuu

SEQ ID NO: 1493473 - RNA, 19 nt, Homo sapiens
  misc_RNA (1)...(19): siRNA sense strand
gacuucacauuacuguuuc

SEQ ID NO: 1493474 - RNA, 19 nt, Homo sapiens
  misc_RNA (1)...(19): siRNA sense strand
gaauaauacaacuguccuu

SEQ ID NO: 1493475 - RNA, 19 nt, Homo sapiens
  misc_RNA (1)...(19): siRNA sense strand
acaaagaaucuauggcaau

SEQ ID NO: 1493476 - RNA, 19 nt, Homo sapiens
  misc_RNA (1)...(19): siRNA sense strand
gauggucugucugaugauc

SEQ ID NO: 1493477 - RNA, 19 nt, Homo sapiens
  misc_RNA (1)...(19): siRNA sense strand
cuaaagccuacaaaguuaa

SEQ ID NO: 1493478 - RNA, 19 nt, Homo sapiens
  misc_RNA (1)...(19): siRNA sense strand
acccaaccuuugacuauga

SEQ ID NO: 1493479 - RNA, 19 nt, Homo sapiens
  misc_RNA (1)...(19): siRNA sense strand
ggaagugcuuaugacaaag

SEQ ID NO: 1493480 - RNA, 19 nt, Homo sapiens
  misc_RNA (1)...(19): siRNA sense strand
acuaguaucuaugaccauu

SEQ ID NO: 1493481 - RNA, 19 nt, Homo sapiens
  misc_RNA (1)...(19): siRNA sense strand
agacaugaauuuugagguu

SEQ ID NO: 1493482 - RNA, 19 nt, Homo sapiens
  misc_RNA (1)...(19): siRNA sense strand
uuaaaggaggugacuaaau

SEQ ID NO: 1493483 - RNA, 19 nt, Homo sapiens
  misc_RNA (1)...(19): siRNA sense strand
ggccaaugaugaccuugca

SEQ ID NO: 1493484 - RNA, 19 nt, Homo sapiens
  misc_RNA (1)...(19): siRNA sense strand
gauggaaguggaagugcuu

SEQ ID NO: 1493485 - RNA, 19 nt, Homo sapiens
  misc_RNA (1)...(19): siRNA sense strand
caagacuucacauuacugu

SEQ ID NO: 1493486 - RNA, 19 nt, Homo sapiens
  misc_RNA (1)...(19): siRNA sense strand
uaugaacuuugcugugaca

SEQ ID NO: 1493487 - RNA, 19 nt, Homo sapiens
  misc_RNA (1)...(19): siRNA sense strand
guggauaugcaaucuuaug

SEQ ID NO: 1493488 - RNA, 19 nt, Homo sapiens
  misc_RNA (1)...(19): siRNA sense strand
gaccuuggaaaaccuauua

SEQ ID NO: 1493489 - RNA, 19 nt, Homo sapiens
  misc_RNA (1)...(19): siRNA sense strand
gaaacacagagggacauuc

SEQ ID NO: 1493490 - RNA, 19 nt, Homo sapiens
  misc_RNA (1)...(19): siRNA sense strand
uggcaauuaucaagcugaa

SEQ ID NO: 1493491 - RNA, 19 nt, Homo sapiens
  misc_RNA (1)...(19): siRNA sense strand
guuaaaggaagauggaagu

SEQ ID NO: 1493492 - RNA, 19 nt, Homo sapiens
  misc_RNA (1)...(19): siRNA sense strand
aaaacuccaucuuagcuuu

SEQ ID NO: 1493493 - RNA, 19 nt, Homo sapiens
  misc_RNA (1)...(19): siRNA sense strand
uucuaaagccuacaaaguu

SEQ ID NO: 1493494 - RNA, 19 nt, Homo sapiens
  misc_RNA (1)...(19): siRNA sense strand
caagcugaauaauacaacu

SEQ ID NO: 1493495 - RNA, 19 nt, Homo sapiens
  misc_RNA (1)...(19): siRNA sense strand
acacagagggacauucauc

SEQ ID NO: 1493496 - RNA, 19 nt, Homo sapiens
  misc_RNA (1)...(19): siRNA sense strand
ccaauagcuccuuugugaa

SEQ ID NO: 1493497 - RNA, 19 nt, Homo sapiens
  misc_RNA (1)...(19): siRNA sense strand
gagagcagauggcagauuu

SEQ ID NO: 1493498 - RNA, 19 nt, Homo sapiens
  misc_RNA (1)...(19): siRNA sense strand
gcaaucgccuugauguuug

SEQ ID NO: 1493499 - RNA, 19 nt, Homo sapiens
  misc_RNA (1)...(19): siRNA sense strand
ucuaccagcuguuuaacua

SEQ ID NO: 1493500 - RNA, 19 nt, Homo sapiens
  misc_RNA (1)...(19): siRNA sense strand
gaacacagugggccgaaga

SEQ ID NO: 1493501 - RNA, 19 nt, Homo sapiens
  misc_RNA (1)...(19): siRNA sense strand
ugcgaaggcugcucaagua

SEQ ID NO: 1493502 - RNA, 19 nt, Homo sapiens
  misc_RNA (1)...(19): siRNA sense strand
cgacccggcuuccuucuau

SEQ ID NO: 1493503 - RNA, 19 nt, Homo sapiens
  misc_RNA (1)...(19): siRNA sense strand
ggcaaucgccuugauguuu

SEQ ID NO: 1493504 - RNA, 19 nt, Homo sapiens
  misc_RNA (1)...(19): siRNA sense strand
gcagauggcagauuugcau

SEQ ID NO: 1493505 - RNA, 19 nt, Homo sapiens
  misc_RNA (1)...(19): siRNA sense strand
gauggagcauuugaagaug

SEQ ID NO: 1493506 - RNA, 19 nt, Homo sapiens
  misc_RNA (1)...(19): siRNA sense strand
ugaaugaguggcaggauga

SEQ ID NO: 1493507 - RNA, 19 nt, Homo sapiens
  misc_RNA (1)...(19): siRNA sense strand
cuauggccauuccgaguuu

SEQ ID NO: 1493508 - RNA, 19 nt, Homo sapiens
  misc_RNA (1)...(19): siRNA sense strand
cucaguauguggacaaguu

SEQ ID NO: 1493509 - RNA, 19 nt, Homo sapiens
  misc_RNA (1)...(19): siRNA sense strand
ugauggagcauuugaagau

SEQ ID NO: 1493510 - RNA, 19 nt, Homo sapiens
  misc_RNA (1)...(19): siRNA sense strand
gaacuggcaaucgccuuga

SEQ ID NO: 1493511 - RNA, 19 nt, Homo sapiens
  misc_RNA (1)...(19): siRNA sense strand
ucagggagaaguugaagga

SEQ ID NO: 1493512 - RNA, 19 nt, Homo sapiens
  misc_RNA (1)...(19): siRNA sense strand
ccuuugugauggagcauuu

SEQ ID NO: 1493513 - RNA, 19 nt, Homo sapiens
  misc_RNA (1)...(19): siRNA sense strand
ggagagcagauggcagauu

SEQ ID NO: 1493514 - RNA, 19 nt, Homo sapiens
  misc_RNA (1)...(19): siRNA sense strand
gcccaguguucgucaaagu

SEQ ID NO: 1493515 - RNA, 19 nt, Homo sapiens
  misc_RNA (1)...(19): siRNA sense strand
accagaagcucagggagaa

SEQ ID NO: 1493516 - RNA, 19 nt, Homo sapiens
  misc_RNA (1)...(19): siRNA sense strand
gaaccacuggaaccacuuc

SEQ ID NO: 1493517 - RNA, 19 nt, Homo sapiens
  misc_RNA (1)...(19): siRNA sense strand
uggagcauuugaagaugaa

SEQ ID NO: 1493518 - RNA, 19 nt, Homo sapiens
  misc_RNA (1)...(19): siRNA sense strand
ggucccggcuacaggugaa

SEQ ID NO: 1493519 - RNA, 19 nt, Homo sapiens
  misc_RNA (1)...(19): siRNA sense strand
gaaggaggaggagaacaca

SEQ ID NO: 1493520 - RNA, 19 nt, Homo sapiens
  misc_RNA (1)...(19): siRNA sense strand
gagcauuugaagaugaaga

SEQ ID NO: 1493521 - RNA, 19 nt, Homo sapiens
  misc_RNA (1)...(19): siRNA sense strand
ugaccgagaggcacgagaa

SEQ ID NO: 1493522 - RNA, 19 nt, Homo sapiens
  misc_RNA (1)...(19): siRNA sense strand
ugaagagcuugagcaguca

SEQ ID NO: 1493523 - RNA, 19 nt, Homo sapiens
  misc_RNA (1)...(19): siRNA sense strand
gaagcucagggagaaguug

SEQ ID NO: 1493524 - RNA, 19 nt, Homo sapiens
  misc_RNA (1)...(19): siRNA sense strand
gcgcagcuggaccucauug

SEQ ID NO: 1493525 - RNA, 19 nt, Homo sapiens
  misc_RNA (1)...(19): siRNA sense strand
gaagugacauccuguuauu

SEQ ID NO: 1493526 - RNA, 19 nt, Homo sapiens
  misc_RNA (1)...(19): siRNA sense strand
gaaaguggauucugagguu

SEQ ID NO: 1493527 - RNA, 19 nt, Homo sapiens
  misc_RNA (1)...(19): siRNA sense strand
gaacagagggaauaugguu

SEQ ID NO: 1493528 - RNA, 19 nt, Homo sapiens
  misc_RNA (1)...(19): siRNA sense strand
cagcaucucuggcaaguga

SEQ ID NO: 1493529 - RNA, 19 nt, Homo sapiens
  misc_RNA (1)...(19): siRNA sense strand
ccucucagcuccugccuua

SEQ ID NO: 1493530 - RNA, 19 nt, Homo sapiens
  misc_RNA (1)...(19): siRNA sense strand
gaucaaaggccucugaaug

SEQ ID NO: 1493531 - RNA, 19 nt, Homo sapiens
  misc_RNA (1)...(19): siRNA sense strand
gaaggaggauucccagagu

SEQ ID NO: 1493532 - RNA, 19 nt, Homo sapiens
  misc_RNA (1)...(19): siRNA sense strand
gagaugagcccacccaaug

SEQ ID NO: 1493533 - RNA, 19 nt, Homo sapiens
  misc_RNA (1)...(19): siRNA sense strand
cagauaaugugccugcuuu

SEQ ID NO: 1493534 - RNA, 19 nt, Homo sapiens
  misc_RNA (1)...(19): siRNA sense strand
gcagcuggaugaauuccua

SEQ ID NO: 1493535 - RNA, 19 nt, Homo sapiens
  misc_RNA (1)...(19): siRNA sense strand
gaaggaccaucaucuugug

SEQ ID NO: 1493536 - RNA, 19 nt, Homo sapiens
  misc_RNA (1)...(19): siRNA sense strand
ggaauaugguugcacaauc

SEQ ID NO: 1493537 - RNA, 19 nt, Homo sapiens
  misc_RNA (1)...(19): siRNA sense strand
gaagggucuuucucaugua

SEQ ID NO: 1493538 - RNA, 19 nt, Homo sapiens
  misc_RNA (1)...(19): siRNA sense strand
cagcgguucuucacagaua

SEQ ID NO: 1493539 - RNA, 19 nt, Homo sapiens
  misc_RNA (1)...(19): siRNA sense strand
ugugaaaucuggcaacuau

SEQ ID NO: 1493540 - RNA, 19 nt, Homo sapiens
  misc_RNA (1)...(19): siRNA sense strand
ggagcugacuucaccuuug

SEQ ID NO: 1493541 - RNA, 19 nt, Homo sapiens
  misc_RNA (1)...(19): siRNA sense strand
ggaagugguacaccugaua

SEQ ID NO: 1493542 - RNA, 19 nt, Homo sapiens
  misc_RNA (1)...(19): siRNA sense strand
ugaagggucuuucucaugu

SEQ ID NO: 1493543 - RNA, 19 nt, Homo sapiens
  misc_RNA (1)...(19): siRNA sense strand
agaaggaacugaaggacuu

SEQ ID NO: 1493544 - RNA, 19 nt, Homo sapiens
  misc_RNA (1)...(19): siRNA sense strand
uggcaacuauacaguguua

SEQ ID NO: 1493545 - RNA, 19 nt, Homo sapiens
  misc_RNA (1)...(19): siRNA sense strand
ugaguuagcugcccagagu

SEQ ID NO: 1493546 - RNA, 19 nt, Homo sapiens
  misc_RNA (1)...(19): siRNA sense strand
cgacacacagucuacaaua

SEQ ID NO: 1493547 - RNA, 19 nt, Homo sapiens
  misc_RNA (1)...(19): siRNA sense strand
cagcagaaauggagcuaug

SEQ ID NO: 1493548 - RNA, 19 nt, Homo sapiens
  misc_RNA (1)...(19): siRNA sense strand
gcacgaggaauccagcuuu

SEQ ID NO: 1493549 - RNA, 19 nt, Homo sapiens
  misc_RNA (1)...(19): siRNA sense strand
guacaaaccacaggugauu

SEQ ID NO: 1493550 - RNA, 19 nt, Homo sapiens
  misc_RNA (1)...(19): siRNA sense strand
ggaaaucccucagcugaac

SEQ ID NO: 1493551 - RNA, 19 nt, Homo sapiens
  misc_RNA (1)...(19): siRNA sense strand
gacacacagucuacaauau

SEQ ID NO: 1493552 - RNA, 19 nt, Homo sapiens
  misc_RNA (1)...(19): siRNA sense strand
ggacaauccuugaaaugcu

SEQ ID NO: 1493553 - RNA, 19 nt, Homo sapiens
  misc_RNA (1)...(19): siRNA sense strand
caagugaacagagggaaua

SEQ ID NO: 1493554 - RNA, 19 nt, Homo sapiens
  misc_RNA (1)...(19): siRNA sense strand
gcacaauccagugacguua

SEQ ID NO: 1493555 - RNA, 19 nt, Homo sapiens
  misc_RNA (1)...(19): siRNA sense strand
gaauaugguugcacaaucc

SEQ ID NO: 1493556 - RNA, 19 nt, Homo sapiens
  misc_RNA (1)...(19): siRNA sense strand
ccagguggcugcagaugug

SEQ ID NO: 1493557 - RNA, 19 nt, Homo sapiens
  misc_RNA (1)...(19): siRNA sense strand
caaguuggauucucuacag

SEQ ID NO: 1493558 - RNA, 19 nt, Homo sapiens
  misc_RNA (1)...(19): siRNA sense strand
gagcugcccacgcuucuuu

SEQ ID NO: 1493559 - RNA, 19 nt, Homo sapiens
  misc_RNA (1)...(19): siRNA sense strand
caucuguccugcaggguuu

SEQ ID NO: 1493560 - RNA, 19 nt, Homo sapiens
  misc_RNA (1)...(19): siRNA sense strand
ggaguuguuugaagugaca

SEQ ID NO: 1493561 - RNA, 19 nt, Homo sapiens
  misc_RNA (1)...(19): siRNA sense strand
gagcugacuucaccuuugg

SEQ ID NO: 1493562 - RNA, 19 nt, Homo sapiens
  misc_RNA (1)...(19): siRNA sense strand
aaacugguguggccuagug

SEQ ID NO: 1493563 - RNA, 19 nt, Homo sapiens
  misc_RNA (1)...(19): siRNA sense strand
cagcugugcucacugguau

SEQ ID NO: 1493564 - RNA, 19 nt, Homo sapiens
  misc_RNA (1)...(19): siRNA sense strand
ggaaaaggauccccguaau

SEQ ID NO: 1493565 - RNA, 19 nt, Homo sapiens
  misc_RNA (1)...(19): siRNA sense strand
cccaagaugugaagccaaa

SEQ ID NO: 1493566 - RNA, 19 nt, Homo sapiens
  misc_RNA (1)...(19): siRNA sense strand
ccugagaguugcugguauu

SEQ ID NO: 1493567 - RNA, 19 nt, Homo sapiens
  misc_RNA (1)...(19): siRNA sense strand
gcagaaauggagcuaugaa

SEQ ID NO: 1493568 - RNA, 19 nt, Homo sapiens
  misc_RNA (1)...(19): siRNA sense strand
gaggaguuguuugaaguga

SEQ ID NO: 1493569 - RNA, 19 nt, Homo sapiens
  misc_RNA (1)...(19): siRNA sense strand
ccugagugacccagaauua

SEQ ID NO: 1493570 - RNA, 19 nt, Homo sapiens
  misc_RNA (1)...(19): siRNA sense strand
ggucaccuguacagacuga

SEQ ID NO: 1493571 - RNA, 19 nt, Homo sapiens
  misc_RNA (1)...(19): siRNA sense strand
gaaauggagcuaugaagac

SEQ ID NO: 1493572 - RNA, 19 nt, Homo sapiens
  misc_RNA (1)...(19): siRNA sense strand
uugaaaugcuccuggguuu

SEQ ID NO: 1493573 - RNA, 19 nt, Homo sapiens
  misc_RNA (1)...(19): siRNA sense strand
cuccuugacuccuuccuua

SEQ ID NO: 1493574 - RNA, 19 nt, Homo sapiens
  misc_RNA (1)...(19): siRNA sense strand
ccaccugagcccugaguua

SEQ ID NO: 1493575 - RNA, 19 nt, Homo sapiens
  misc_RNA (1)...(19): siRNA sense strand
uauacaguguuacaaguug

SEQ ID NO: 1493576 - RNA, 19 nt, Homo sapiens
  misc_RNA (1)...(19): siRNA sense strand
guuauuucccuaucgauuu

SEQ ID NO: 1493577 - RNA, 19 nt, Homo sapiens
  misc_RNA (1)...(19): siRNA sense strand
ucaugggccuccugaguga

SEQ ID NO: 1493578 - RNA, 19 nt, Homo sapiens
  misc_RNA (1)...(19): siRNA sense strand
gagaaggagcccucaguuc

SEQ ID NO: 1493579 - RNA, 19 nt, Homo sapiens
  misc_RNA (1)...(19): siRNA sense strand
acaauccagugacguuauu

SEQ ID NO: 1493580 - RNA, 19 nt, Homo sapiens
  misc_RNA (1)...(19): siRNA sense strand
gagaguugcugguauuucc

SEQ ID NO: 1493581 - RNA, 19 nt, Homo sapiens
  misc_RNA (1)...(19): siRNA sense strand
gaaggagcccucaguucug

SEQ ID NO: 1493582 - RNA, 19 nt, Homo sapiens
  misc_RNA (1)...(19): siRNA sense strand
gcgcugugcuggcuucuac

SEQ ID NO: 1493583 - RNA, 19 nt, Homo sapiens
  misc_RNA (1)...(19): siRNA sense strand
ggaugaauuccuacagcua

SEQ ID NO: 1493584 - RNA, 19 nt, Homo sapiens
  misc_RNA (1)...(19): siRNA sense strand
gcacuggaagcaucaggaa

SEQ ID NO: 1493585 - RNA, 19 nt, Homo sapiens
  misc_RNA (1)...(19): siRNA sense strand
ccagcaauguaccgccuuu

SEQ ID NO: 1493586 - RNA, 19 nt, Homo sapiens
  misc_RNA (1)...(19): siRNA sense strand
agucaggccuucacucuuc

SEQ ID NO: 1493587 - RNA, 19 nt, Homo sapiens
  misc_RNA (1)...(19): siRNA sense strand
gcccuuggguccucucuag

SEQ ID NO: 1493588 - RNA, 19 nt, Homo sapiens
  misc_RNA (1)...(19): siRNA sense strand
gcuaugaagacaaagauca

SEQ ID NO: 1493589 - RNA, 19 nt, Homo sapiens
  misc_RNA (1)...(19): siRNA sense strand
agaaauggagcuaugaaga

SEQ ID NO: 1493590 - RNA, 19 nt, Homo sapiens
  misc_RNA (1)...(19): siRNA sense strand
gcuccuggguuucuugaag

SEQ ID NO: 1493591 - RNA, 19 nt, Homo sapiens
  misc_RNA (1)...(19): siRNA sense strand
gcaacuauacaguguuaca

SEQ ID NO: 1493592 - RNA, 19 nt, Homo sapiens
  misc_RNA (1)...(19): siRNA sense strand
cacacagucuacaauauca

SEQ ID NO: 1493593 - RNA, 19 nt, Homo sapiens
  misc_RNA (1)...(19): siRNA sense strand
ucagacagauggcagaaaa

SEQ ID NO: 1493594 - RNA, 19 nt, Homo sapiens
  misc_RNA (1)...(19): siRNA sense strand
ccagagagaagaccucauc

SEQ ID NO: 1493595 - RNA, 19 nt, Homo sapiens
  misc_RNA (1)...(19): siRNA sense strand
ucucucugcucaugucuga

SEQ ID NO: 1493596 - RNA, 19 nt, Homo sapiens
  misc_RNA (1)...(19): siRNA sense strand
aaauggagcuaugaagaca

SEQ ID NO: 1493597 - RNA, 19 nt, Homo sapiens
  misc_RNA (1)...(19): siRNA sense strand
gagccuaggagcugacuuc

SEQ ID NO: 1493598 - RNA, 19 nt, Homo sapiens
  misc_RNA (1)...(19): siRNA sense strand
ggagaugagcccacccaau

SEQ ID NO: 1493599 - RNA, 19 nt, Homo sapiens
  misc_RNA (1)...(19): siRNA sense strand
gaauccagcuuuugucaca

SEQ ID NO: 1493600 - RNA, 19 nt, Homo sapiens
  misc_RNA (1)...(19): siRNA sense strand
gcugaaggaccaucaucuu

SEQ ID NO: 1493601 - RNA, 19 nt, Homo sapiens
  misc_RNA (1)...(19): siRNA sense strand
gcgcaaggaagcaguguca

SEQ ID NO: 1493602 - RNA, 19 nt, Homo sapiens
  misc_RNA (1)...(19): siRNA sense strand
gaagccaaacuacuugaag

SEQ ID NO: 1493603 - RNA, 19 nt, Homo sapiens
  misc_RNA (1)...(19): siRNA sense strand
ggagcuaugaagacaaaga

SEQ ID NO: 1493604 - RNA, 19 nt, Homo sapiens
  misc_RNA (1)...(19): siRNA sense strand
ugaaggaccaucaucuugu

SEQ ID NO: 1493605 - RNA, 19 nt, Homo sapiens
  misc_RNA (1)...(19): siRNA sense strand
ucuacaauaucaucaccaa

SEQ ID NO: 1493606 - RNA, 19 nt, Homo sapiens
  misc_RNA (1)...(19): siRNA sense strand
gagcagauuccagccauuc

SEQ ID NO: 1493607 - RNA, 19 nt, Homo sapiens
  misc_RNA (1)...(19): siRNA sense strand
gaaaucuggcaacuauaca

SEQ ID NO: 1493608 - RNA, 19 nt, Homo sapiens
  misc_RNA (1)...(19): siRNA sense strand
cuugucagcuguaucaaca

SEQ ID NO: 1493609 - RNA, 19 nt, Homo sapiens
  misc_RNA (1)...(19): siRNA sense strand
aaagaucaaaggccucuga

SEQ ID NO: 1493610 - RNA, 19 nt, Homo sapiens
  misc_RNA (1)...(19): siRNA sense strand
gggcuucuauccgcagaga

SEQ ID NO: 1493611 - RNA, 19 nt, Homo sapiens
  misc_RNA (1)...(19): siRNA sense strand
cugauacuguucuaugaga

SEQ ID NO: 1493612 - RNA, 19 nt, Homo sapiens
  misc_RNA (1)...(19): siRNA sense strand
ugaagugacauccuguuau

SEQ ID NO: 1493613 - RNA, 19 nt, Homo sapiens
  misc_RNA (1)...(19): siRNA sense strand
uggaggaguuguuugaagu

SEQ ID NO: 1493614 - RNA, 19 nt, Homo sapiens
  misc_RNA (1)...(19): siRNA sense strand
gggaagaagagcuaaagag

SEQ ID NO: 1493615 - RNA, 19 nt, Homo sapiens
  misc_RNA (1)...(19): siRNA sense strand
gccauggugucugucauug

SEQ ID NO: 1493616 - RNA, 19 nt, Homo sapiens
  misc_RNA (1)...(19): siRNA sense strand
aaauuugacuaacggagau

SEQ ID NO: 1493617 - RNA, 19 nt, Homo sapiens
  misc_RNA (1)...(19): siRNA sense strand
ggcagugggucaccuguac

SEQ ID NO: 1493618 - RNA, 19 nt, Homo sapiens
  misc_RNA (1)...(19): siRNA sense strand
caauguaccgccuuuacug

SEQ ID NO: 1493619 - RNA, 19 nt, Homo sapiens
  misc_RNA (1)...(19): siRNA sense strand
gaugugaaaucuggcaacu

SEQ ID NO: 1493620 - RNA, 19 nt, Homo sapiens
  misc_RNA (1)...(19): siRNA sense strand
gacagaaggaacugaagga

SEQ ID NO: 1493621 - RNA, 19 nt, Homo sapiens
  misc_RNA (1)...(19): siRNA sense strand
gaagugguacaccugauac

SEQ ID NO: 1493622 - RNA, 19 nt, Homo sapiens
  misc_RNA (1)...(19): siRNA sense strand
gauucgggccuuagccaaa

SEQ ID NO: 1493623 - RNA, 19 nt, Homo sapiens
  misc_RNA (1)...(19): siRNA sense strand
gcaagugaacagagggaau

SEQ ID NO: 1493624 - RNA, 19 nt, Homo sapiens
  misc_RNA (1)...(19): siRNA sense strand
gagcuaugaagacaaagau

SEQ ID NO: 1493625 - RNA, 19 nt, Homo sapiens
  misc_RNA (1)...(19): siRNA sense strand
ccaaauauguggaccugua

SEQ ID NO: 1493626 - RNA, 19 nt, Homo sapiens
  misc_RNA (1)...(19): siRNA sense strand
caacaacuuuacaggcuua

SEQ ID NO: 1493627 - RNA, 19 nt, Homo sapiens
  misc_RNA (1)...(19): siRNA sense strand
ucaaugaggugguccuaaa

SEQ ID NO: 1493628 - RNA, 19 nt, Homo sapiens
  misc_RNA (1)...(19): siRNA sense strand
gggaagaaauuacgaugga

SEQ ID NO: 1493629 - RNA, 19 nt, Homo sapiens
  misc_RNA (1)...(19): siRNA sense strand
gaagagacacuggaugaaa

SEQ ID NO: 1493630 - RNA, 19 nt, Homo sapiens
  misc_RNA (1)...(19): siRNA sense strand
gggacgggcugaugaguga

SEQ ID NO: 1493631 - RNA, 19 nt, Homo sapiens
  misc_RNA (1)...(19): siRNA sense strand
ugaaauagcccagaugaug

SEQ ID NO: 1493632 - RNA, 19 nt, Homo sapiens
  misc_RNA (1)...(19): siRNA sense strand
cagaaucuccaacaacuuu

SEQ ID NO: 1493633 - RNA, 19 nt, Homo sapiens
  misc_RNA (1)...(19): siRNA sense strand
gaugaaauagcccagauga

SEQ ID NO: 1493634 - RNA, 19 nt, Homo sapiens
  misc_RNA (1)...(19): siRNA sense strand
ggaagaaauuacgauggaa

SEQ ID NO: 1493635 - RNA, 19 nt, Homo sapiens
  misc_RNA (1)...(19): siRNA sense strand
caaggaggaacaacucuuu

SEQ ID NO: 1493636 - RNA, 19 nt, Homo sapiens
  misc_RNA (1)...(19): siRNA sense strand
aagagacacuggaugaaau

SEQ ID NO: 1493637 - RNA, 19 nt, Homo sapiens
  misc_RNA (1)...(19): siRNA sense strand
ggacuaucuuucuguuucu

SEQ ID NO: 1493638 - RNA, 19 nt, Homo sapiens
  misc_RNA (1)...(19): siRNA sense strand
aagaagagacacuggauga

SEQ ID NO: 1493639 - RNA, 19 nt, Homo sapiens
  misc_RNA (1)...(19): siRNA sense strand
uagcccagaugauggugua

SEQ ID NO: 1493640 - RNA, 19 nt, Homo sapiens
  misc_RNA (1)...(19): siRNA sense strand
uggacuaucuuucuguuuc

SEQ ID NO: 1493641 - RNA, 19 nt, Homo sapiens
  misc_RNA (1)...(19): siRNA sense strand
ucccagggcugcaagucua

SEQ ID NO: 1493642 - RNA, 19 nt, Homo sapiens
  misc_RNA (1)...(19): siRNA sense strand
ccagaggauuaacuacuuc

SEQ ID NO: 1493643 - RNA, 19 nt, Homo sapiens
  misc_RNA (1)...(19): siRNA sense strand
cccagaggauuaacuacuu

SEQ ID NO: 1493644 - RNA, 19 nt, Homo sapiens
  misc_RNA (1)...(19): siRNA sense strand
aaaccugauugacuacuuc

SEQ ID NO: 1493645 - RNA, 19 nt, Homo sapiens
  misc_RNA (1)...(19): siRNA sense strand
cauggacuaucuuucuguu

SEQ ID NO: 1493646 - RNA, 19 nt, Homo sapiens
  misc_RNA (1)...(19): siRNA sense strand
gauuaacuacuuccuguca

SEQ ID NO: 1493647 - RNA, 19 nt, Homo sapiens
  misc_RNA (1)...(19): siRNA sense strand
aaagacugcugcccuagag

SEQ ID NO: 1493648 - RNA, 19 nt, Homo sapiens
  misc_RNA (1)...(19): siRNA sense strand
caaagacugcugcccuaga

SEQ ID NO: 1493649 - RNA, 19 nt, Homo sapiens
  misc_RNA (1)...(19): siRNA sense strand
agagacacuggaugaaaua

SEQ ID NO: 1493650 - RNA, 19 nt, Homo sapiens
  misc_RNA (1)...(19): siRNA sense strand
uaaagaagagacacuggau

SEQ ID NO: 1493651 - RNA, 19 nt, Homo sapiens
  misc_RNA (1)...(19): siRNA sense strand
uuaacuacuuccugucaug

SEQ ID NO: 1493652 - RNA, 19 nt, Homo sapiens
  misc_RNA (1)...(19): siRNA sense strand
aggaaaaccugauugacua

SEQ ID NO: 1493653 - RNA, 19 nt, Homo sapiens
  misc_RNA (1)...(19): siRNA sense strand
gagcuccuguauaaagaag

SEQ ID NO: 1493654 - RNA, 19 nt, Homo sapiens
  misc_RNA (1)...(19): siRNA sense strand
guacaaggagcagcugaug

SEQ ID NO: 1493655 - RNA, 19 nt, Homo sapiens
  misc_RNA (1)...(19): siRNA sense strand
gcagaaucuccaacaacuu

SEQ ID NO: 1493656 - RNA, 19 nt, Homo sapiens
  misc_RNA (1)...(19): siRNA sense strand
cacggaugcugguggagaa

SEQ ID NO: 1493657 - RNA, 19 nt, Homo sapiens
  misc_RNA (1)...(19): siRNA sense strand
ucuauuucccagaggauua

SEQ ID NO: 1493658 - RNA, 19 nt, Homo sapiens
  misc_RNA (1)...(19): siRNA sense strand
gguccuugggccacacuua

SEQ ID NO: 1493659 - RNA, 19 nt, Homo sapiens
  misc_RNA (1)...(19): siRNA sense strand
caccagacccuguucaucu

SEQ ID NO: 1493660 - RNA, 19 nt, Homo sapiens
  misc_RNA (1)...(19): siRNA sense strand
caucgccacguuccacuuu

SEQ ID NO: 1493661 - RNA, 19 nt, Homo sapiens
  misc_RNA (1)...(19): siRNA sense strand
gcuggcgccuuccucuguu

SEQ ID NO: 1493662 - RNA, 19 nt, Homo sapiens
  misc_RNA (1)...(19): siRNA sense strand
gauggucccgggaagaaau

SEQ ID NO: 1493663 - RNA, 19 nt, Homo sapiens
  misc_RNA (1)...(19): siRNA sense strand
ugaggugguccuaaaguug

SEQ ID NO: 1493664 - RNA, 19 nt, Homo sapiens
  misc_RNA (1)...(19): siRNA sense strand
uaacuacuuccugucauga

SEQ ID NO: 1493665 - RNA, 19 nt, Homo sapiens
  misc_RNA (1)...(19): siRNA sense strand
ggagauuguggagaccaua

SEQ ID NO: 1493666 - RNA, 19 nt, Homo sapiens
  misc_RNA (1)...(19): siRNA sense strand
caacuuuacaggcuuagag

SEQ ID NO: 1493667 - RNA, 19 nt, Homo sapiens
  misc_RNA (1)...(19): siRNA sense strand
cccagaugaugguguaugu

SEQ ID NO: 1493668 - RNA, 19 nt, Homo sapiens
  misc_RNA (1)...(19): siRNA sense strand
ggagcuccuguauaaagaa

SEQ ID NO: 1493669 - RNA, 19 nt, Homo sapiens
  misc_RNA (1)...(19): siRNA sense strand
ugcagaaucuccaacaacu

SEQ ID NO: 1493670 - RNA, 19 nt, Homo sapiens
  misc_RNA (1)...(19): siRNA sense strand
ggaugaaauagcccagaug

SEQ ID NO: 1493671 - RNA, 19 nt, Homo sapiens
  misc_RNA (1)...(19): siRNA sense strand
gcuccuguauaaagaagag

SEQ ID NO: 1493672 - RNA, 19 nt, Homo sapiens
  misc_RNA (1)...(19): siRNA sense strand
uaucgggacgggcugauga

SEQ ID NO: 1493673 - RNA, 19 nt, Homo sapiens
  misc_RNA (1)...(19): siRNA sense strand
acaaggagcagcugaugag

SEQ ID NO: 1493674 - RNA, 19 nt, Homo sapiens
  misc_RNA (1)...(19): siRNA sense strand
gcacaggcaagaacuucgu

SEQ ID NO: 1493675 - RNA, 19 nt, Homo sapiens
  misc_RNA (1)...(19): siRNA sense strand
guacugcagcuucaaagac

SEQ ID NO: 1493676 - RNA, 19 nt, Homo sapiens
  misc_RNA (1)...(19): siRNA sense strand
uggaugaaauagcccagau

SEQ ID NO: 1493677 - RNA, 19 nt, Homo sapiens
  misc_RNA (1)...(19): siRNA sense strand
acagccgucuugugaagga

SEQ ID NO: 1493678 - RNA, 19 nt, Homo sapiens
  misc_RNA (1)...(19): siRNA sense strand
ccacuuuccucaccccaaa

SEQ ID NO: 1493679 - RNA, 19 nt, Homo sapiens
  misc_RNA (1)...(19): siRNA sense strand
ccaaggaggaacaacucuu

SEQ ID NO: 1493680 - RNA, 19 nt, Homo sapiens
  misc_RNA (1)...(19): siRNA sense strand
gcagcugguccuaagaaca

SEQ ID NO: 1493681 - RNA, 19 nt, Homo sapiens
  misc_RNA (1)...(19): siRNA sense strand
uagagugggaccugaaugu

SEQ ID NO: 1493682 - RNA, 19 nt, Homo sapiens
  misc_RNA (1)...(19): siRNA sense strand
gguacugcagcuucaaaga

SEQ ID NO: 1493683 - RNA, 19 nt, Homo sapiens
  misc_RNA (1)...(19): siRNA sense strand
ggggcgauauaaucaauga

SEQ ID NO: 1493684 - RNA, 19 nt, Homo sapiens
  misc_RNA (1)...(19): siRNA sense strand
gagauuguggagaccauag

SEQ ID NO: 1493685 - RNA, 19 nt, Homo sapiens
  misc_RNA (1)...(19): siRNA sense strand
guggagaccauagacaaug

SEQ ID NO: 1493686 - RNA, 19 nt, Homo sapiens
  misc_RNA (1)...(19): siRNA sense strand
augaggugguccuaaaguu

SEQ ID NO: 1493687 - RNA, 19 nt, Homo sapiens
  misc_RNA (1)...(19): siRNA sense strand
aggaacaacucuuuucuuc

SEQ ID NO: 1493688 - RNA, 19 nt, Homo sapiens
  misc_RNA (1)...(19): siRNA sense strand
agaaucuccaacaacuuua

SEQ ID NO: 1493689 - RNA, 19 nt, Homo sapiens
  misc_RNA (1)...(19): siRNA sense strand
gugaggggcuacuuagaga

SEQ ID NO: 1493690 - RNA, 19 nt, Homo sapiens
  misc_RNA (1)...(19): siRNA sense strand
ggauggucccgggaagaaa

SEQ ID NO: 1493691 - RNA, 19 nt, Homo sapiens
  misc_RNA (1)...(19): siRNA sense strand
gcaccaagguccacauaaa

SEQ ID NO: 1493692 - RNA, 19 nt, Homo sapiens
  misc_RNA (1)...(19): siRNA sense strand
aaacaaaccugucuucaug

SEQ ID NO: 1493693 - RNA, 19 nt, Homo sapiens
  misc_RNA (1)...(19): siRNA sense strand
gaacuacugcuuauaaugu

SEQ ID NO: 1493694 - RNA, 19 nt, Homo sapiens
  misc_RNA (1)...(19): siRNA sense strand
gccaauuucuccaaccuua

SEQ ID NO: 1493695 - RNA, 19 nt, Homo sapiens
  misc_RNA (1)...(19): siRNA sense strand
gcucuggguauuauuauua

SEQ ID NO: 1493696 - RNA, 19 nt, Homo sapiens
  misc_RNA (1)...(19): siRNA sense strand
gcuauuagauucagcuauc

SEQ ID NO: 1493697 - RNA, 19 nt, Homo sapiens
  misc_RNA (1)...(19): siRNA sense strand
uauaaugucugggcaguaa

SEQ ID NO: 1493698 - RNA, 19 nt, Homo sapiens
  misc_RNA (1)...(19): siRNA sense strand
gaaggaaacaugacuugga

SEQ ID NO: 1493699 - RNA, 19 nt, Homo sapiens
  misc_RNA (1)...(19): siRNA sense strand
cugcaaagcuauuagauuc

SEQ ID NO: 1493700 - RNA, 19 nt, Homo sapiens
  misc_RNA (1)...(19): siRNA sense strand
gaauaugaaggaaacauga

SEQ ID NO: 1493701 - RNA, 19 nt, Homo sapiens
  misc_RNA (1)...(19): siRNA sense strand
gguagugguucuauuuguu

SEQ ID NO: 1493702 - RNA, 19 nt, Homo sapiens
  misc_RNA (1)...(19): siRNA sense strand
gaaacaagaagcuaaagca

SEQ ID NO: 1493703 - RNA, 19 nt, Homo sapiens
  misc_RNA (1)...(19): siRNA sense strand
guagugguucuauuuguua

SEQ ID NO: 1493704 - RNA, 19 nt, Homo sapiens
  misc_RNA (1)...(19): siRNA sense strand
gguauucaacuguguuuaa

SEQ ID NO: 1493705 - RNA, 19 nt, Homo sapiens
  misc_RNA (1)...(19): siRNA sense strand
ggaaacaugacuuggaaga

SEQ ID NO: 1493706 - RNA, 19 nt, Homo sapiens
  misc_RNA (1)...(19): siRNA sense strand
aaacaugacuuggaagauc

SEQ ID NO: 1493707 - RNA, 19 nt, Homo sapiens
  misc_RNA (1)...(19): siRNA sense strand
ggagugcaguguaccuuuc

SEQ ID NO: 1493708 - RNA, 19 nt, Homo sapiens
  misc_RNA (1)...(19): siRNA sense strand
agaugcagcuccaugguaa

SEQ ID NO: 1493709 - RNA, 19 nt, Homo sapiens
  misc_RNA (1)...(19): siRNA sense strand
guuaaucuguucucugugu

SEQ ID NO: 1493710 - RNA, 19 nt, Homo sapiens
  misc_RNA (1)...(19): siRNA sense strand
gcaguaaccggccauuuca

SEQ ID NO: 1493711 - RNA, 19 nt, Homo sapiens
  misc_RNA (1)...(19): siRNA sense strand
ugacuuggaagaucaaauu

SEQ ID NO: 1493712 - RNA, 19 nt, Homo sapiens
  misc_RNA (1)...(19): siRNA sense strand
gcagcuccaugguaaagga

SEQ ID NO: 1493713 - RNA, 19 nt, Homo sapiens
  misc_RNA (1)...(19): siRNA sense strand
cuacuagccucagcauauu

SEQ ID NO: 1493714 - RNA, 19 nt, Homo sapiens
  misc_RNA (1)...(19): siRNA sense strand
guuaugugccguuuacuuu

SEQ ID NO: 1493715 - RNA, 19 nt, Homo sapiens
  misc_RNA (1)...(19): siRNA sense strand
aaggaaacaugacuuggaa

SEQ ID NO: 1493716 - RNA, 19 nt, Homo sapiens
  misc_RNA (1)...(19): siRNA sense strand
ugauaucaguuuggaguuu

SEQ ID NO: 1493717 - RNA, 19 nt, Homo sapiens
  misc_RNA (1)...(19): siRNA sense strand
gcaaagcuauuagauucag

SEQ ID NO: 1493718 - RNA, 19 nt, Homo sapiens
  misc_RNA (1)...(19): siRNA sense strand
acaaaccugucuucauguu

SEQ ID NO: 1493719 - RNA, 19 nt, Homo sapiens
  misc_RNA (1)...(19): siRNA sense strand
gugauaaacaugaaagaga

SEQ ID NO: 1493720 - RNA, 19 nt, Homo sapiens
  misc_RNA (1)...(19): siRNA sense strand
ucauagcauugguaaauuc

SEQ ID NO: 1493721 - RNA, 19 nt, Homo sapiens
  misc_RNA (1)...(19): siRNA sense strand
uaaccacgcuaggaaacuu

SEQ ID NO: 1493722 - RNA, 19 nt, Homo sapiens
  misc_RNA (1)...(19): siRNA sense strand
gcaguguaccuuucagaug

SEQ ID NO: 1493723 - RNA, 19 nt, Homo sapiens
  misc_RNA (1)...(19): siRNA sense strand
caauuucuccaaccuuauu

SEQ ID NO: 1493724 - RNA, 19 nt, Homo sapiens
  misc_RNA (1)...(19): siRNA sense strand
gugguucuauuuguuauug

SEQ ID NO: 1493725 - RNA, 19 nt, Homo sapiens
  misc_RNA (1)...(19): siRNA sense strand
ccauaaugauaucaguuug

SEQ ID NO: 1493726 - RNA, 19 nt, Homo sapiens
  misc_RNA (1)...(19): siRNA sense strand
aaaccugucuucauguucu

SEQ ID NO: 1493727 - RNA, 19 nt, Homo sapiens
  misc_RNA (1)...(19): siRNA sense strand
ggcaguaaccggccauuuc

SEQ ID NO: 1493728 - RNA, 19 nt, Homo sapiens
  misc_RNA (1)...(19): siRNA sense strand
guguaaacaucucaagaag

SEQ ID NO: 1493729 - RNA, 19 nt, Homo sapiens
  misc_RNA (1)...(19): siRNA sense strand
gagcgggucaagagacaaa

SEQ ID NO: 1493730 - RNA, 19 nt, Homo sapiens
  misc_RNA (1)...(19): siRNA sense strand
gguuugcucuggguauuau

SEQ ID NO: 1493731 - RNA, 19 nt, Homo sapiens
  misc_RNA (1)...(19): siRNA sense strand
guuggggccuuuacuauuu

SEQ ID NO: 1493732 - RNA, 19 nt, Homo sapiens
  misc_RNA (1)...(19): siRNA sense strand
cauaaaagcuuugcaaacu

SEQ ID NO: 1493733 - RNA, 19 nt, Homo sapiens
  misc_RNA (1)...(19): siRNA sense strand
agaggagaguuaagagugu

SEQ ID NO: 1493734 - RNA, 19 nt, Homo sapiens
  misc_RNA (1)...(19): siRNA sense strand
gaaacaugacuuggaagau

SEQ ID NO: 1493735 - RNA, 19 nt, Homo sapiens
  misc_RNA (1)...(19): siRNA sense strand
cuucauagcauugguaaau

SEQ ID NO: 1493736 - RNA, 19 nt, Homo sapiens
  misc_RNA (1)...(19): siRNA sense strand
agauucagcuauccuucaa

SEQ ID NO: 1493737 - RNA, 19 nt, Homo sapiens
  misc_RNA (1)...(19): siRNA sense strand
uacuuucuguccauaauga

SEQ ID NO: 1493738 - RNA, 19 nt, Homo sapiens
  misc_RNA (1)...(19): siRNA sense strand
cuguuaaucuguucucugu

SEQ ID NO: 1493739 - RNA, 19 nt, Homo sapiens
  misc_RNA (1)...(19): siRNA sense strand
uguguaaacaucucaagaa

SEQ ID NO: 1493740 - RNA, 19 nt, Homo sapiens
  misc_RNA (1)...(19): siRNA sense strand
gauaucaguuuggaguuuu

SEQ ID NO: 1493741 - RNA, 19 nt, Homo sapiens
  misc_RNA (1)...(19): siRNA sense strand
uaaaagcuuugcaaacugu

SEQ ID NO: 1493742 - RNA, 19 nt, Homo sapiens
  misc_RNA (1)...(19): siRNA sense strand
gaagaugcagcuccauggu

SEQ ID NO: 1493743 - RNA, 19 nt, Homo sapiens
  misc_RNA (1)...(19): siRNA sense strand
cagcaccaagguccacaua

SEQ ID NO: 1493744 - RNA, 19 nt, Homo sapiens
  misc_RNA (1)...(19): siRNA sense strand
ugugguagugguucuauuu

SEQ ID NO: 1493745 - RNA, 19 nt, Homo sapiens
  misc_RNA (1)...(19): siRNA sense strand
uuugcaaacugugaucuuu

SEQ ID NO: 1493746 - RNA, 19 nt, Homo sapiens
  misc_RNA (1)...(19): siRNA sense strand
cacuuaaagaggagaguua

SEQ ID NO: 1493747 - RNA, 19 nt, Homo sapiens
  misc_RNA (1)...(19): siRNA sense strand
gacaaaagaauaugaagga

SEQ ID NO: 1493748 - RNA, 19 nt, Homo sapiens
  misc_RNA (1)...(19): siRNA sense strand
gguucuauuuguuauugga

SEQ ID NO: 1493749 - RNA, 19 nt, Homo sapiens
  misc_RNA (1)...(19): siRNA sense strand
uuaaucuguucucugugua

SEQ ID NO: 1493750 - RNA, 19 nt, Homo sapiens
  misc_RNA (1)...(19): siRNA sense strand
aacaugacuuggaagauca

SEQ ID NO: 1493751 - RNA, 19 nt, Homo sapiens
  misc_RNA (1)...(19): siRNA sense strand
gaguuaagagugucauucu

SEQ ID NO: 1493752 - RNA, 19 nt, Homo sapiens
  misc_RNA (1)...(19): siRNA sense strand
gcauugguaaauuccauug

SEQ ID NO: 1493753 - RNA, 19 nt, Homo sapiens
  misc_RNA (1)...(19): siRNA sense strand
aaucuguucucuguguaaa

SEQ ID NO: 1493754 - RNA, 19 nt, Homo sapiens
  misc_RNA (1)...(19): siRNA sense strand
ggaaacaagaagcuaaagc

SEQ ID NO: 1493755 - RNA, 19 nt, Homo sapiens
  misc_RNA (1)...(19): siRNA sense strand
gaaacuuagugcccuucac

SEQ ID NO: 1493756 - RNA, 19 nt, Homo sapiens
  misc_RNA (1)...(19): siRNA sense strand
uagcauugguaaauuccau

SEQ ID NO: 1493757 - RNA, 19 nt, Homo sapiens
  misc_RNA (1)...(19): siRNA sense strand
acucugacccugcuauguu

SEQ ID NO: 1493758 - RNA, 19 nt, Homo sapiens
  misc_RNA (1)...(19): siRNA sense strand
uaaagaggagaguuaagag

SEQ ID NO: 1493759 - RNA, 19 nt, Homo sapiens
  misc_RNA (1)...(19): siRNA sense strand
aagaugcagcuccauggua

SEQ ID NO: 1493760 - RNA, 19 nt, Homo sapiens
  misc_RNA (1)...(19): siRNA sense strand
uaaccggccauuucagcaa

SEQ ID NO: 1493761 - RNA, 19 nt, Homo sapiens
  misc_RNA (1)...(19): siRNA sense strand
ggaaaacaaaccugucuuc

SEQ ID NO: 1493762 - RNA, 19 nt, Homo sapiens
  misc_RNA (1)...(19): siRNA sense strand
uaugugccguuuacuuucu

SEQ ID NO: 1493763 - RNA, 19 nt, Homo sapiens
  misc_RNA (1)...(19): siRNA sense strand
uaaucuguucucuguguaa

SEQ ID NO: 1493764 - RNA, 19 nt, Homo sapiens
  misc_RNA (1)...(19): siRNA sense strand
gagaguuaagagugucauu

SEQ ID NO: 1493765 - RNA, 19 nt, Homo sapiens
  misc_RNA (1)...(19): siRNA sense strand
gggcaguaaccggccauuu

SEQ ID NO: 1493766 - RNA, 19 nt, Homo sapiens
  misc_RNA (1)...(19): siRNA sense strand
cucugacccugcuauguuu

SEQ ID NO: 1493767 - RNA, 19 nt, Homo sapiens
  misc_RNA (1)...(19): siRNA sense strand
ggaaacuuagugcccuuca

SEQ ID NO: 1493768 - RNA, 19 nt, Homo sapiens
  misc_RNA (1)...(19): siRNA sense strand
gaaaacaaaccugucuuca

SEQ ID NO: 1493769 - RNA, 19 nt, Homo sapiens
  misc_RNA (1)...(19): siRNA sense strand
agaacuacugcuuauaaug

SEQ ID NO: 1493770 - RNA, 19 nt, Homo sapiens
  misc_RNA (1)...(19): siRNA sense strand
agaauaugaaggaaacaug

SEQ ID NO: 1493771 - RNA, 19 nt, Homo sapiens
  misc_RNA (1)...(19): siRNA sense strand
auucagcuauccuucaauc

SEQ ID NO: 1493772 - RNA, 19 nt, Homo sapiens
  misc_RNA (1)...(19): siRNA sense strand
cuuguuaugugccguuuac

SEQ ID NO: 1493773 - RNA, 19 nt, Homo sapiens
  misc_RNA (1)...(19): siRNA sense strand
uguaaacaucucaagaaga

SEQ ID NO: 1493774 - RNA, 19 nt, Homo sapiens
  misc_RNA (1)...(19): siRNA sense strand
uuuauuugcucaagauugc

SEQ ID NO: 1493775 - RNA, 19 nt, Homo sapiens
  misc_RNA (1)...(19): siRNA sense strand
acccauucauccugauuug

SEQ ID NO: 1493776 - RNA, 19 nt, Homo sapiens
  misc_RNA (1)...(19): siRNA sense strand
guucugcaaagcuauuaga

SEQ ID NO: 1493777 - RNA, 19 nt, Homo sapiens
  misc_RNA (1)...(19): siRNA sense strand
ugguagugguucuauuugu

SEQ ID NO: 1493778 - RNA, 19 nt, Homo sapiens
  misc_RNA (1)...(19): siRNA sense strand
gagugucauucuggugaug

SEQ ID NO: 1493779 - RNA, 19 nt, Homo sapiens
  misc_RNA (1)...(19): siRNA sense strand
gagcaagauugauagauua

SEQ ID NO: 1493780 - RNA, 19 nt, Homo sapiens
  misc_RNA (1)...(19): siRNA sense strand
ggagcaagauugauagauu

SEQ ID NO: 1493781 - RNA, 19 nt, Homo sapiens
  misc_RNA (1)...(19): siRNA sense strand
ccacaguccucaccucaau

SEQ ID NO: 1493782 - RNA, 19 nt, Homo sapiens
  misc_RNA (1)...(19): siRNA sense strand
guacaagcaugcgaagaga

SEQ ID NO: 1493783 - RNA, 19 nt, Homo sapiens
  misc_RNA (1)...(19): siRNA sense strand
ggugaagaaugcugagaug

SEQ ID NO: 1493784 - RNA, 19 nt, Homo sapiens
  misc_RNA (1)...(19): siRNA sense strand
caagauugauagauuagag

SEQ ID NO: 1493785 - RNA, 19 nt, Homo sapiens
  misc_RNA (1)...(19): siRNA sense strand
gacccagacuaugagaaua

SEQ ID NO: 1493786 - RNA, 19 nt, Homo sapiens
  misc_RNA (1)...(19): siRNA sense strand
gucaggagcaagauugaua

SEQ ID NO: 1493787 - RNA, 19 nt, Homo sapiens
  misc_RNA (1)...(19): siRNA sense strand
gaaucaaggugcccaugac

SEQ ID NO: 1493788 - RNA, 19 nt, Homo sapiens
  misc_RNA (1)...(19): siRNA sense strand
ugacacaaagguacagaaa

SEQ ID NO: 1493789 - RNA, 19 nt, Homo sapiens
  misc_RNA (1)...(19): siRNA sense strand
ggaaguggaggaaaucuac

SEQ ID NO: 1493790 - RNA, 19 nt, Homo sapiens
  misc_RNA (1)...(19): siRNA sense strand
cagaagagaggcugggauu

SEQ ID NO: 1493791 - RNA, 19 nt, Homo sapiens
  misc_RNA (1)...(19): siRNA sense strand
gacauuagcaggcauaaaa

SEQ ID NO: 1493792 - RNA, 19 nt, Homo sapiens
  misc_RNA (1)...(19): siRNA sense strand
acacaaagguacagaaaau

SEQ ID NO: 1493793 - RNA, 19 nt, Homo sapiens
  misc_RNA (1)...(19): siRNA sense strand
uagauuagagacgacauua

SEQ ID NO: 1493794 - RNA, 19 nt, Homo sapiens
  misc_RNA (1)...(19): siRNA sense strand
gcaccaggaagucaagaug

SEQ ID NO: 1493795 - RNA, 19 nt, Homo sapiens
  misc_RNA (1)...(19): siRNA sense strand
ugcaaaggguggucauuca

SEQ ID NO: 1493796 - RNA, 19 nt, Homo sapiens
  misc_RNA (1)...(19): siRNA sense strand
aaacguugacacaaaggua

SEQ ID NO: 1493797 - RNA, 19 nt, Homo sapiens
  misc_RNA (1)...(19): siRNA sense strand
uggaggaaaucuacaagca

SEQ ID NO: 1493798 - RNA, 19 nt, Homo sapiens
  misc_RNA (1)...(19): siRNA sense strand
gagccauccugagccugua

SEQ ID NO: 1493799 - RNA, 19 nt, Homo sapiens
  misc_RNA (1)...(19): siRNA sense strand
augcugagauguccaagga

SEQ ID NO: 1493800 - RNA, 19 nt, Homo sapiens
  misc_RNA (1)...(19): siRNA sense strand
gaagagaggcugggauucc

SEQ ID NO: 1493801 - RNA, 19 nt, Homo sapiens
  misc_RNA (1)...(19): siRNA sense strand
cccaugacccagacuauga

SEQ ID NO: 1493802 - RNA, 19 nt, Homo sapiens
  misc_RNA (1)...(19): siRNA sense strand
acaguccucaccucaauaa

SEQ ID NO: 1493803 - RNA, 19 nt, Homo sapiens
  misc_RNA (1)...(19): siRNA sense strand
gcgaagagagacagaagag

SEQ ID NO: 1493804 - RNA, 19 nt, Homo sapiens
  misc_RNA (1)...(19): siRNA sense strand
ucuuggaggugcugcagaa

SEQ ID NO: 1493805 - RNA, 19 nt, Homo sapiens
  misc_RNA (1)...(19): siRNA sense strand
gauuagagacgacauuagc

SEQ ID NO: 1493806 - RNA, 19 nt, Homo sapiens
  misc_RNA (1)...(19): siRNA sense strand
ugaagaaugcugagauguc

SEQ ID NO: 1493807 - RNA, 19 nt, Homo sapiens
  misc_RNA (1)...(19): siRNA sense strand
ugacccagacuaugagaau

SEQ ID NO: 1493808 - RNA, 19 nt, Homo sapiens
  misc_RNA (1)...(19): siRNA sense strand
ccugucagccuucaucaug

SEQ ID NO: 1493809 - RNA, 19 nt, Homo sapiens
  misc_RNA (1)...(19): siRNA sense strand
gcaagauugauagauuaga

SEQ ID NO: 1493810 - RNA, 19 nt, Homo sapiens
  misc_RNA (1)...(19): siRNA sense strand
aauaucaccuuggccuuca

SEQ ID NO: 1493811 - RNA, 19 nt, Homo sapiens
  misc_RNA (1)...(19): siRNA sense strand
gacgacauuagcaggcaua

SEQ ID NO: 1493812 - RNA, 19 nt, Homo sapiens
  misc_RNA (1)...(19): siRNA sense strand
acaagcaugcgaagagaga

SEQ ID NO: 1493813 - RNA, 19 nt, Homo sapiens
  misc_RNA (1)...(19): siRNA sense strand
agaaucaaggugcccauga

SEQ ID NO: 1493814 - RNA, 19 nt, Homo sapiens
  misc_RNA (1)...(19): siRNA sense strand
ggucucagccaagaaucaa

SEQ ID NO: 1493815 - RNA, 19 nt, Homo sapiens
  misc_RNA (1)...(19): siRNA sense strand
gaaguggaggaaaucuaca

SEQ ID NO: 1493816 - RNA, 19 nt, Homo sapiens
  misc_RNA (1)...(19): siRNA sense strand
ggagcugcugggcuuuaaa

SEQ ID NO: 1493817 - RNA, 19 nt, Homo sapiens
  misc_RNA (1)...(19): siRNA sense strand
gauaauggcaucaguguua

SEQ ID NO: 1493818 - RNA, 19 nt, Homo sapiens
  misc_RNA (1)...(19): siRNA sense strand
cagagugucuucaggaauu

SEQ ID NO: 1493819 - RNA, 19 nt, Homo sapiens
  misc_RNA (1)...(19): siRNA sense strand
gaagacugaucaaucuguu

SEQ ID NO: 1493820 - RNA, 19 nt, Homo sapiens
  misc_RNA (1)...(19): siRNA sense strand
gcaaugagaagacugauca

SEQ ID NO: 1493821 - RNA, 19 nt, Homo sapiens
  misc_RNA (1)...(19): siRNA sense strand
gcauugaucuuguucuuac

SEQ ID NO: 1493822 - RNA, 19 nt, Homo sapiens
  misc_RNA (1)...(19): siRNA sense strand
ugagaagacugaucaaucu

SEQ ID NO: 1493823 - RNA, 19 nt, Homo sapiens
  misc_RNA (1)...(19): siRNA sense strand
gaauguguuugcucucaug

SEQ ID NO: 1493824 - RNA, 19 nt, Homo sapiens
  misc_RNA (1)...(19): siRNA sense strand
acugagaccuccuaaucua

SEQ ID NO: 1493825 - RNA, 19 nt, Homo sapiens
  misc_RNA (1)...(19): siRNA sense strand
ggcagaagguggauuugau

SEQ ID NO: 1493826 - RNA, 19 nt, Homo sapiens
  misc_RNA (1)...(19): siRNA sense strand
gaacaugcaaugagaagac

SEQ ID NO: 1493827 - RNA, 19 nt, Homo sapiens
  misc_RNA (1)...(19): siRNA sense strand
caaccaguccucauaaugg

SEQ ID NO: 1493828 - RNA, 19 nt, Homo sapiens
  misc_RNA (1)...(19): siRNA sense strand
uggcaucaguguuacaaug

SEQ ID NO: 1493829 - RNA, 19 nt, Homo sapiens
  misc_RNA (1)...(19): siRNA sense strand
uugguagccuggaugguua

SEQ ID NO: 1493830 - RNA, 19 nt, Homo sapiens
  misc_RNA (1)...(19): siRNA sense strand
guuauugcauugaucuugu

SEQ ID NO: 1493831 - RNA, 19 nt, Homo sapiens
  misc_RNA (1)...(19): siRNA sense strand
gaucuuguucuuacugaga

SEQ ID NO: 1493832 - RNA, 19 nt, Homo sapiens
  misc_RNA (1)...(19): siRNA sense strand
gagaccuccuaaucuaaga

SEQ ID NO: 1493833 - RNA, 19 nt, Homo sapiens
  misc_RNA (1)...(19): siRNA sense strand
uuacugagaccuccuaauc

SEQ ID NO: 1493834 - RNA, 19 nt, Homo sapiens
  misc_RNA (1)...(19): siRNA sense strand
gugaauguguuugcucuca

SEQ ID NO: 1493835 - RNA, 19 nt, Homo sapiens
  misc_RNA (1)...(19): siRNA sense strand
cacagagugucuucaggaa

SEQ ID NO: 1493836 - RNA, 19 nt, Homo sapiens
  misc_RNA (1)...(19): siRNA sense strand
gcagaagguggauuugauc

SEQ ID NO: 1493837 - RNA, 19 nt, Homo sapiens
  misc_RNA (1)...(19): siRNA sense strand
agagugucuucaggaauua

SEQ ID NO: 1493838 - RNA, 19 nt, Homo sapiens
  misc_RNA (1)...(19): siRNA sense strand
gccaaccaguccucauaau

SEQ ID NO: 1493839 - RNA, 19 nt, Homo sapiens
  misc_RNA (1)...(19): siRNA sense strand
ggaugguuauugcauugau

SEQ ID NO: 1493840 - RNA, 19 nt, Homo sapiens
  misc_RNA (1)...(19): siRNA sense strand
gggacccucuggugauaau

SEQ ID NO: 1493841 - RNA, 19 nt, Homo sapiens
  misc_RNA (1)...(19): siRNA sense strand
ccgggacccucuggugaua

SEQ ID NO: 1493842 - RNA, 19 nt, Homo sapiens
  misc_RNA (1)...(19): siRNA sense strand
gauuugaucccugugaaug

SEQ ID NO: 1493843 - RNA, 19 nt, Homo sapiens
  misc_RNA (1)...(19): siRNA sense strand
ggcaucaguguuacaauga

SEQ ID NO: 1493844 - RNA, 19 nt, Homo sapiens
  misc_RNA (1)...(19): siRNA sense strand
ccaaccaguccucauaaug

SEQ ID NO: 1493845 - RNA, 19 nt, Homo sapiens
  misc_RNA (1)...(19): siRNA sense strand
aagccaaccaguccucaua

SEQ ID NO: 1493846 - RNA, 19 nt, Homo sapiens
  misc_RNA (1)...(19): siRNA sense strand
gaugguuauugcauugauc

SEQ ID NO: 1493847 - RNA, 19 nt, Homo sapiens
  misc_RNA (1)...(19): siRNA sense strand
ccuggaugguuauugcauu

SEQ ID NO: 1493848 - RNA, 19 nt, Homo sapiens
  misc_RNA (1)...(19): siRNA sense strand
cuggaugguuauugcauug

SEQ ID NO: 1493849 - RNA, 19 nt, Homo sapiens
  misc_RNA (1)...(19): siRNA sense strand
aaccaguccucauaaugga

SEQ ID NO: 1493850 - RNA, 19 nt, Homo sapiens
  misc_RNA (1)...(19): siRNA sense strand
uugcauugaucuuguucuu

SEQ ID NO: 1493851 - RNA, 19 nt, Homo sapiens
  misc_RNA (1)...(19): siRNA sense strand
cagcuccuccuguggacua

SEQ ID NO: 1493852 - RNA, 19 nt, Homo sapiens
  misc_RNA (1)...(19): siRNA sense strand
gagaagacugaucaaucug

SEQ ID NO: 1493853 - RNA, 19 nt, Homo sapiens
  misc_RNA (1)...(19): siRNA sense strand
gguuauugcauugaucuug

SEQ ID NO: 1493854 - RNA, 19 nt, Homo sapiens
  misc_RNA (1)...(19): siRNA sense strand
uagccuggaugguuauugc

SEQ ID NO: 1493855 - RNA, 19 nt, Homo sapiens
  misc_RNA (1)...(19): siRNA sense strand
caugcaaugagaagacuga

SEQ ID NO: 1493856 - RNA, 19 nt, Homo sapiens
  misc_RNA (1)...(19): siRNA sense strand
aaacaaaccugucuucaug

SEQ ID NO: 1493857 - RNA, 19 nt, Homo sapiens
  misc_RNA (1)...(19): siRNA sense strand
gcaauguaccuuucaaaua

SEQ ID NO: 1493858 - RNA, 19 nt, Homo sapiens
  misc_RNA (1)...(19): siRNA sense strand
gcaugaagguccacauaaa

SEQ ID NO: 1493859 - RNA, 19 nt, Homo sapiens
  misc_RNA (1)...(19): siRNA sense strand
caauguaccuuucaaauac

SEQ ID NO: 1493860 - RNA, 19 nt, Homo sapiens
  misc_RNA (1)...(19): siRNA sense strand
gccaauuucuccaaccuua

SEQ ID NO: 1493861 - RNA, 19 nt, Homo sapiens
  misc_RNA (1)...(19): siRNA sense strand
uaaauuccauugagugguu

SEQ ID NO: 1493862 - RNA, 19 nt, Homo sapiens
  misc_RNA (1)...(19): siRNA sense strand
gggcaguaaucaaccauuu

SEQ ID NO: 1493863 - RNA, 19 nt, Homo sapiens
  misc_RNA (1)...(19): siRNA sense strand
gaaggaaacaugacuugga

SEQ ID NO: 1493864 - RNA, 19 nt, Homo sapiens
  misc_RNA (1)...(19): siRNA sense strand
gaauaugaaggaaacauga

SEQ ID NO: 1493865 - RNA, 19 nt, Homo sapiens
  misc_RNA (1)...(19): siRNA sense strand
gcauucagcuauccuucaa

SEQ ID NO: 1493866 - RNA, 19 nt, Homo sapiens
  misc_RNA (1)...(19): siRNA sense strand
gaaacaagaagcuaaagca

SEQ ID NO: 1493867 - RNA, 19 nt, Homo sapiens
  misc_RNA (1)...(19): siRNA sense strand
ggagugcaauguaccuuuc

SEQ ID NO: 1493868 - RNA, 19 nt, Homo sapiens
  misc_RNA (1)...(19): siRNA sense strand
ggaaacaugacuuggaaga

SEQ ID NO: 1493869 - RNA, 19 nt, Homo sapiens
  misc_RNA (1)...(19): siRNA sense strand
aaacaugacuuggaagauc

SEQ ID NO: 1493870 - RNA, 19 nt, Homo sapiens
  misc_RNA (1)...(19): siRNA sense strand
gaauuacugcuuacaaugu

SEQ ID NO: 1493871 - RNA, 19 nt, Homo sapiens
  misc_RNA (1)...(19): siRNA sense strand
guuaaucuguucucugugu

SEQ ID NO: 1493872 - RNA, 19 nt, Homo sapiens
  misc_RNA (1)...(19): siRNA sense strand
uuaguucccuucacucuga

SEQ ID NO: 1493873 - RNA, 19 nt, Homo sapiens
  misc_RNA (1)...(19): siRNA sense strand
uacaaugucugggcaguaa

SEQ ID NO: 1493874 - RNA, 19 nt, Homo sapiens
  misc_RNA (1)...(19): siRNA sense strand
gcaguaaucaaccauuuca

SEQ ID NO: 1493875 - RNA, 19 nt, Homo sapiens
  misc_RNA (1)...(19): siRNA sense strand
aaggaaacaugacuuggaa

SEQ ID NO: 1493876 - RNA, 19 nt, Homo sapiens
  misc_RNA (1)...(19): siRNA sense strand
cuacuagccucagcauauu

SEQ ID NO: 1493877 - RNA, 19 nt, Homo sapiens
  misc_RNA (1)...(19): siRNA sense strand
gcagcuccauggcaaagga

SEQ ID NO: 1493878 - RNA, 19 nt, Homo sapiens
  misc_RNA (1)...(19): siRNA sense strand
cugcgaagcuauugcauuc

SEQ ID NO: 1493879 - RNA, 19 nt, Homo sapiens
  misc_RNA (1)...(19): siRNA sense strand
uaaauugguaugcaacuga

SEQ ID NO: 1493880 - RNA, 19 nt, Homo sapiens
  misc_RNA (1)...(19): siRNA sense strand
acaaaccugucuucauguu

SEQ ID NO: 1493881 - RNA, 19 nt, Homo sapiens
  misc_RNA (1)...(19): siRNA sense strand
ucauagcauugguaaauuc

SEQ ID NO: 1493882 - RNA, 19 nt, Homo sapiens
  misc_RNA (1)...(19): siRNA sense strand
cagcaugaagguccacaua

SEQ ID NO: 1493883 - RNA, 19 nt, Homo sapiens
  misc_RNA (1)...(19): siRNA sense strand
gugguuacauuugugauug

SEQ ID NO: 1493884 - RNA, 19 nt, Homo sapiens
  misc_RNA (1)...(19): siRNA sense strand
guuaugugccauuuacuuu

SEQ ID NO: 1493885 - RNA, 19 nt, Homo sapiens
  misc_RNA (1)...(19): siRNA sense strand
gaggagaguuaagaguguu

SEQ ID NO: 1493886 - RNA, 19 nt, Homo sapiens
  misc_RNA (1)...(19): siRNA sense strand
caauuucuccaaccuuauu

SEQ ID NO: 1493887 - RNA, 19 nt, Homo sapiens
  misc_RNA (1)...(19): siRNA sense strand
gcuauugcauucagcuauc

SEQ ID NO: 1493888 - RNA, 19 nt, Homo sapiens
  misc_RNA (1)...(19): siRNA sense strand
uaaccauccuagcaaacuu

SEQ ID NO: 1493889 - RNA, 19 nt, Homo sapiens
  misc_RNA (1)...(19): siRNA sense strand
aaaccugucuucauguucu

SEQ ID NO: 1493890 - RNA, 19 nt, Homo sapiens
  misc_RNA (1)...(19): siRNA sense strand
gaauccagcuuuuaacagu

SEQ ID NO: 1493891 - RNA, 19 nt, Homo sapiens
  misc_RNA (1)...(19): siRNA sense strand
gcgaagcuauugcauucag

SEQ ID NO: 1493892 - RNA, 19 nt, Homo sapiens
  misc_RNA (1)...(19): siRNA sense strand
gaccuccuuccucuuguua

SEQ ID NO: 1493893 - RNA, 19 nt, Homo sapiens
  misc_RNA (1)...(19): siRNA sense strand
gaguguuguucuggugaua

SEQ ID NO: 1493894 - RNA, 19 nt, Homo sapiens
  misc_RNA (1)...(19): siRNA sense strand
acucuggguauuaguauua

SEQ ID NO: 1493895 - RNA, 19 nt, Homo sapiens
  misc_RNA (1)...(19): siRNA sense strand
uccauaaucaugucaguuu

SEQ ID NO: 1493896 - RNA, 19 nt, Homo sapiens
  misc_RNA (1)...(19): siRNA sense strand
agaggagaguuaagagugu

SEQ ID NO: 1493897 - RNA, 19 nt, Homo sapiens
  misc_RNA (1)...(19): siRNA sense strand
gaaacaugacuuggaagau

SEQ ID NO: 1493898 - RNA, 19 nt, Homo sapiens
  misc_RNA (1)...(19): siRNA sense strand
uccauugagugguuuaaga

SEQ ID NO: 1493899 - RNA, 19 nt, Homo sapiens
  misc_RNA (1)...(19): siRNA sense strand
cuucauagcauugguaaau

SEQ ID NO: 1493900 - RNA, 19 nt, Homo sapiens
  misc_RNA (1)...(19): siRNA sense strand
caaauacaacgguaaccau

SEQ ID NO: 1493901 - RNA, 19 nt, Homo sapiens
  misc_RNA (1)...(19): siRNA sense strand
aaacugaggagugcaaugu

SEQ ID NO: 1493902 - RNA, 19 nt, Homo sapiens
  misc_RNA (1)...(19): siRNA sense strand
cuaauagugguuacauuug

SEQ ID NO: 1493903 - RNA, 19 nt, Homo sapiens
  misc_RNA (1)...(19): siRNA sense strand
cuguuaaucuguucucugu

SEQ ID NO: 1493904 - RNA, 19 nt, Homo sapiens
  misc_RNA (1)...(19): siRNA sense strand
gguuuacucuggguauuag

SEQ ID NO: 1493905 - RNA, 19 nt, Homo sapiens
  misc_RNA (1)...(19): siRNA sense strand
cagauuauauggacaaaag

SEQ ID NO: 1493906 - RNA, 19 nt, Homo sapiens
  misc_RNA (1)...(19): siRNA sense strand
cacuuaaagaggagaguua

SEQ ID NO: 1493907 - RNA, 19 nt, Homo sapiens
  misc_RNA (1)...(19): siRNA sense strand
gacaaaagaauaugaagga

SEQ ID NO: 1493908 - RNA, 19 nt, Homo sapiens
  misc_RNA (1)...(19): siRNA sense strand
aacaugacuuggaagauca

SEQ ID NO: 1493909 - RNA, 19 nt, Homo sapiens
  misc_RNA (1)...(19): siRNA sense strand
ugaccuccuuccucuuguu

SEQ ID NO: 1493910 - RNA, 19 nt, Homo sapiens
  misc_RNA (1)...(19): siRNA sense strand
uuaaucuguucucugugua

SEQ ID NO: 1493911 - RNA, 19 nt, Homo sapiens
  misc_RNA (1)...(19): siRNA sense strand
cgguaaccauccuagcaaa

SEQ ID NO: 1493912 - RNA, 19 nt, Homo sapiens
  misc_RNA (1)...(19): siRNA sense strand
gcauugguaaauuccauug

SEQ ID NO: 1493913 - RNA, 19 nt, Homo sapiens
  misc_RNA (1)...(19): siRNA sense strand
ccauuuacuuucuguccau

SEQ ID NO: 1493914 - RNA, 19 nt, Homo sapiens
  misc_RNA (1)...(19): siRNA sense strand
aaucuguucucuguguaaa

SEQ ID NO: 1493915 - RNA, 19 nt, Homo sapiens
  misc_RNA (1)...(19): siRNA sense strand
ggaaacaagaagcuaaagc

SEQ ID NO: 1493916 - RNA, 19 nt, Homo sapiens
  misc_RNA (1)...(19): siRNA sense strand
uaugugccauuuacuuucu

SEQ ID NO: 1493917 - RNA, 19 nt, Homo sapiens
  misc_RNA (1)...(19): siRNA sense strand
agaauuacugcuuacaaug

SEQ ID NO: 1493918 - RNA, 19 nt, Homo sapiens
  misc_RNA (1)...(19): siRNA sense strand
uagcauugguaaauuccau

SEQ ID NO: 1493919 - RNA, 19 nt, Homo sapiens
  misc_RNA (1)...(19): siRNA sense strand
ccuccuuccucuuguuaug

SEQ ID NO: 1493920 - RNA, 19 nt, Homo sapiens
  misc_RNA (1)...(19): siRNA sense strand
cucugacccugauaucuuu

SEQ ID NO: 1493921 - RNA, 19 nt, Homo sapiens
  misc_RNA (1)...(19): siRNA sense strand
uaaucaaccauuucagcaa

SEQ ID NO: 1493922 - RNA, 19 nt, Homo sapiens
  misc_RNA (1)...(19): siRNA sense strand
aauagugguuacauuugug

SEQ ID NO: 1493923 - RNA, 19 nt, Homo sapiens
  misc_RNA (1)...(19): siRNA sense strand
uacuuucuguccauaauca

SEQ ID NO: 1493924 - RNA, 19 nt, Homo sapiens
  misc_RNA (1)...(19): siRNA sense strand
cauuuacuuucuguccaua

SEQ ID NO: 1493925 - RNA, 19 nt, Homo sapiens
  misc_RNA (1)...(19): siRNA sense strand
uaaagaggagaguuaagag

SEQ ID NO: 1493926 - RNA, 19 nt, Homo sapiens
  misc_RNA (1)...(19): siRNA sense strand
aaccauccuagcaaacuua

SEQ ID NO: 1493927 - RNA, 19 nt, Homo sapiens
  misc_RNA (1)...(19): siRNA sense strand
ggaaaacaaaccugucuuc

SEQ ID NO: 1493928 - RNA, 19 nt, Homo sapiens
  misc_RNA (1)...(19): siRNA sense strand
cuuguuaugugccauuuac

SEQ ID NO: 1493929 - RNA, 19 nt, Homo sapiens
  misc_RNA (1)...(19): siRNA sense strand
uaaucuguucucuguguaa

SEQ ID NO: 1493930 - RNA, 19 nt, Homo sapiens
  misc_RNA (1)...(19): siRNA sense strand
ugaguugaauccagcuuuu

SEQ ID NO: 1493931 - RNA, 19 nt, Homo sapiens
  misc_RNA (1)...(19): siRNA sense strand
gugcaauguaccuuucaaa

SEQ ID NO: 1493932 - RNA, 19 nt, Homo sapiens
  misc_RNA (1)...(19): siRNA sense strand
ugacuuggaagaucaaacu

SEQ ID NO: 1493933 - RNA, 19 nt, Homo sapiens
  misc_RNA (1)...(19): siRNA sense strand
gaguuaagaguguuguucu

SEQ ID NO: 1493934 - RNA, 19 nt, Homo sapiens
  misc_RNA (1)...(19): siRNA sense strand
gaaaacaaaccugucuuca

SEQ ID NO: 1493935 - RNA, 19 nt, Homo sapiens
  misc_RNA (1)...(19): siRNA sense strand
ugcaaacugugaccuccuu

SEQ ID NO: 1493936 - RNA, 19 nt, Homo sapiens
  misc_RNA (1)...(19): siRNA sense strand
uuucugcuguuaaucuguu

SEQ ID NO: 1493937 - RNA, 19 nt, Homo sapiens
  misc_RNA (1)...(19): siRNA sense strand
acucugacccugauaucuu

SEQ ID NO: 1493938 - RNA, 19 nt, Homo sapiens
  misc_RNA (1)...(19): siRNA sense strand
agaauaugaaggaaacaug

SEQ ID NO: 1493939 - RNA, 19 nt, Homo sapiens
  misc_RNA (1)...(19): siRNA sense strand
cauguucugcgaagcuauu

SEQ ID NO: 1493940 - RNA, 19 nt, Homo sapiens
  misc_RNA (1)...(19): siRNA sense strand
uuaaauugguaugcaacug

SEQ ID NO: 1493941 - RNA, 19 nt, Homo sapiens
  misc_RNA (1)...(19): siRNA sense strand
uuuauuugcucaagauugc

SEQ ID NO: 1493942 - RNA, 19 nt, Homo sapiens
  misc_RNA (1)...(19): siRNA sense strand
acccauucauccugauuug

SEQ ID NO: 1493943 - RNA, 19 nt, Homo sapiens
  misc_RNA (1)...(19): siRNA sense strand
gguuacauuugugauugga

SEQ ID NO: 1493944 - RNA, 19 nt, Homo sapiens
  misc_RNA (1)...(19): siRNA sense strand
aaacuaagauugaggauga

SEQ ID NO: 1493945 - RNA, 19 nt, Homo sapiens
  misc_RNA (1)...(19): siRNA sense strand
ggaacucaaucgugucaua

SEQ ID NO: 1493946 - RNA, 19 nt, Homo sapiens
  misc_RNA (1)...(19): siRNA sense strand
caaaaccacuccacaauua

SEQ ID NO: 1493947 - RNA, 19 nt, Homo sapiens
  misc_RNA (1)...(19): siRNA sense strand
uagcagaguuguucuauga

SEQ ID NO: 1493948 - RNA, 19 nt, Homo sapiens
  misc_RNA (1)...(19): siRNA sense strand
ucaacaagcuguccuguau

SEQ ID NO: 1493949 - RNA, 19 nt, Homo sapiens
  misc_RNA (1)...(19): siRNA sense strand
gguugaaucugcugccuua

SEQ ID NO: 1493950 - RNA, 19 nt, Homo sapiens
  misc_RNA (1)...(19): siRNA sense strand
gccaaaagcuuauuaauga

SEQ ID NO: 1493951 - RNA, 19 nt, Homo sapiens
  misc_RNA (1)...(19): siRNA sense strand
gcaaaggagugguugaauc

SEQ ID NO: 1493952 - RNA, 19 nt, Homo sapiens
  misc_RNA (1)...(19): siRNA sense strand
gugaagagauuccaaaaua

SEQ ID NO: 1493953 - RNA, 19 nt, Homo sapiens
  misc_RNA (1)...(19): siRNA sense strand
gaacaugaccaaguacgua

SEQ ID NO: 1493954 - RNA, 19 nt, Homo sapiens
  misc_RNA (1)...(19): siRNA sense strand
ggauuuagaggaagaagua

SEQ ID NO: 1493955 - RNA, 19 nt, Homo sapiens
  misc_RNA (1)...(19): siRNA sense strand
gaugagcuguugucuguug

SEQ ID NO: 1493956 - RNA, 19 nt, Homo sapiens
  misc_RNA (1)...(19): siRNA sense strand
ggccgcagcuuccugagua

SEQ ID NO: 1493957 - RNA, 19 nt, Homo sapiens
  misc_RNA (1)...(19): siRNA sense strand
gggcaaagcuguggagauc

SEQ ID NO: 1493958 - RNA, 19 nt, Homo sapiens
  misc_RNA (1)...(19): siRNA sense strand
gagaauaaggaucugauuu

SEQ ID NO: 1493959 - RNA, 19 nt, Homo sapiens
  misc_RNA (1)...(19): siRNA sense strand
gaauacaacacugagaaua

SEQ ID NO: 1493960 - RNA, 19 nt, Homo sapiens
  misc_RNA (1)...(19): siRNA sense strand
cagcaggaguuugggauua

SEQ ID NO: 1493961 - RNA, 19 nt, Homo sapiens
  misc_RNA (1)...(19): siRNA sense strand
aaacagcaccuuacagauu

SEQ ID NO: 1493962 - RNA, 19 nt, Homo sapiens
  misc_RNA (1)...(19): siRNA sense strand
gcagaguuguucuaugaug

SEQ ID NO: 1493963 - RNA, 19 nt, Homo sapiens
  misc_RNA (1)...(19): siRNA sense strand
acgaaagccucaagaaauu

SEQ ID NO: 1493964 - RNA, 19 nt, Homo sapiens
  misc_RNA (1)...(19): siRNA sense strand
gcuaacguuuggagucaua

SEQ ID NO: 1493965 - RNA, 19 nt, Homo sapiens
  misc_RNA (1)...(19): siRNA sense strand
gcaaagcuguggagaucau

SEQ ID NO: 1493966 - RNA, 19 nt, Homo sapiens
  misc_RNA (1)...(19): siRNA sense strand
uggagaacaugaccaagua

SEQ ID NO: 1493967 - RNA, 19 nt, Homo sapiens
  misc_RNA (1)...(19): siRNA sense strand
ggaaaggguuaccugaaca

SEQ ID NO: 1493968 - RNA, 19 nt, Homo sapiens
  misc_RNA (1)...(19): siRNA sense strand
ggacguauuugugauguuc

SEQ ID NO: 1493969 - RNA, 19 nt, Homo sapiens
  misc_RNA (1)...(19): siRNA sense strand
caaaguggacauuaccaua

SEQ ID NO: 1493970 - RNA, 19 nt, Homo sapiens
  misc_RNA (1)...(19): siRNA sense strand
ggaagaaguagcagaguug

SEQ ID NO: 1493971 - RNA, 19 nt, Homo sapiens
  misc_RNA (1)...(19): siRNA sense strand
gauagaagaggaagugcua

SEQ ID NO: 1493972 - RNA, 19 nt, Homo sapiens
  misc_RNA (1)...(19): siRNA sense strand
auuauaagcuggcaucaaa

SEQ ID NO: 1493973 - RNA, 19 nt, Homo sapiens
  misc_RNA (1)...(19): siRNA sense strand
gaaauggacgugucuucaa

SEQ ID NO: 1493974 - RNA, 19 nt, Homo sapiens
  misc_RNA (1)...(19): siRNA sense strand
ggucaucguuggcuucuuc

SEQ ID NO: 1493975 - RNA, 19 nt, Homo sapiens
  misc_RNA (1)...(19): siRNA sense strand
caacaaacaggaacucaau

SEQ ID NO: 1493976 - RNA, 19 nt, Homo sapiens
  misc_RNA (1)...(19): siRNA sense strand
aacaagcuguccuguauaa

SEQ ID NO: 1493977 - RNA, 19 nt, Homo sapiens
  misc_RNA (1)...(19): siRNA sense strand
gaacucaaucgugucauaa

SEQ ID NO: 1493978 - RNA, 19 nt, Homo sapiens
  misc_RNA (1)...(19): siRNA sense strand
gagcuaacguuuggaguca

SEQ ID NO: 1493979 - RNA, 19 nt, Homo sapiens
  misc_RNA (1)...(19): siRNA sense strand
ggacgugucuucaaguacu

SEQ ID NO: 1493980 - RNA, 19 nt, Homo sapiens
  misc_RNA (1)...(19): siRNA sense strand
ggaacgcagucuccuagug

SEQ ID NO: 1493981 - RNA, 19 nt, Homo sapiens
  misc_RNA (1)...(19): siRNA sense strand
aaagggaccuccagugcaa

SEQ ID NO: 1493982 - RNA, 19 nt, Homo sapiens
  misc_RNA (1)...(19): siRNA sense strand
gaaaaggacguauuuguga

SEQ ID NO: 1493983 - RNA, 19 nt, Homo sapiens
  misc_RNA (1)...(19): siRNA sense strand
aaacaucaauccagugaag

SEQ ID NO: 1493984 - RNA, 19 nt, Homo sapiens
  misc_RNA (1)...(19): siRNA sense strand
caaauuagccagaaagcau

SEQ ID NO: 1493985 - RNA, 19 nt, Homo sapiens
  misc_RNA (1)...(19): siRNA sense strand
gaaagccucaagaaauuug

SEQ ID NO: 1493986 - RNA, 19 nt, Homo sapiens
  misc_RNA (1)...(19): siRNA sense strand
gcgagcagguggcagaguu

SEQ ID NO: 1493987 - RNA, 19 nt, Homo sapiens
  misc_RNA (1)...(19): siRNA sense strand
aacagcaccuuacagauuu

SEQ ID NO: 1493988 - RNA, 19 nt, Homo sapiens
  misc_RNA (1)...(19): siRNA sense strand
ggaugaggaugagcuguug

SEQ ID NO: 1493989 - RNA, 19 nt, Homo sapiens
  misc_RNA (1)...(19): siRNA sense strand
aggaugagcuguugucugu

SEQ ID NO: 1493990 - RNA, 19 nt, Homo sapiens
  misc_RNA (1)...(19): siRNA sense strand
gcuguugucuguugagcaa

SEQ ID NO: 1493991 - RNA, 19 nt, Homo sapiens
  misc_RNA (1)...(19): siRNA sense strand
ugguugagacgacaaauua

SEQ ID NO: 1493992 - RNA, 19 nt, Homo sapiens
  misc_RNA (1)...(19): siRNA sense strand
caacaagcuguccuguaua

SEQ ID NO: 1493993 - RNA, 19 nt, Homo sapiens
  misc_RNA (1)...(19): siRNA sense strand
guccaaauccuaaacuuga

SEQ ID NO: 1493994 - RNA, 19 nt, Homo sapiens
  misc_RNA (1)...(19): siRNA sense strand
gaggaaaggguuaccugaa

SEQ ID NO: 1493995 - RNA, 19 nt, Homo sapiens
  misc_RNA (1)...(19): siRNA sense strand
cuacgaaagccucaagaaa

SEQ ID NO: 1493996 - RNA, 19 nt, Homo sapiens
  misc_RNA (1)...(19): siRNA sense strand
uaaugacaguaccaacaaa

SEQ ID NO: 1493997 - RNA, 19 nt, Homo sapiens
  misc_RNA (1)...(19): siRNA sense strand
caaagaaaaggacguauuu

SEQ ID NO: 1493998 - RNA, 19 nt, Homo sapiens
  misc_RNA (1)...(19): siRNA sense strand
ugacauaaccuacgaaagc

SEQ ID NO: 1493999 - RNA, 19 nt, Homo sapiens
  misc_RNA (1)...(19): siRNA sense strand
gcagacgaacccagaaaug

SEQ ID NO: 1494000 - RNA, 19 nt, Homo sapiens
  misc_RNA (1)...(19): siRNA sense strand
caaaggagugguugaaucu

SEQ ID NO: 1494001 - RNA, 19 nt, Homo sapiens
  misc_RNA (1)...(19): siRNA sense strand
gaaaaggaggugccuauga

SEQ ID NO: 1494002 - RNA, 19 nt, Homo sapiens
  misc_RNA (1)...(19): siRNA sense strand
caaaggaauuccaaaacaa

SEQ ID NO: 1494003 - RNA, 19 nt, Homo sapiens
  misc_RNA (1)...(19): siRNA sense strand
gaauaaggaucugauuucc

SEQ ID NO: 1494004 - RNA, 19 nt, Homo sapiens
  misc_RNA (1)...(19): siRNA sense strand
uggcagaguuugugauauc

SEQ ID NO: 1494005 - RNA, 19 nt, Homo sapiens
  misc_RNA (1)...(19): siRNA sense strand
gguggcagaguuugugaua

SEQ ID NO: 1494006 - RNA, 19 nt, Homo sapiens
  misc_RNA (1)...(19): siRNA sense strand
ccaggaacuuggcggaaga

SEQ ID NO: 1494007 - RNA, 19 nt, Homo sapiens
  misc_RNA (1)...(19): siRNA sense strand
cagaugacauaaccuacga

SEQ ID NO: 1494008 - RNA, 19 nt, Homo sapiens
  misc_RNA (1)...(19): siRNA sense strand
gagguuaacgccgguguuu

SEQ ID NO: 1494009 - RNA, 19 nt, Homo sapiens
  misc_RNA (1)...(19): siRNA sense strand
ggacauuaccauagagaag

SEQ ID NO: 1494010 - RNA, 19 nt, Homo sapiens
  misc_RNA (1)...(19): siRNA sense strand
uacgaaagccucaagaaau

SEQ ID NO: 1494011 - RNA, 19 nt, Homo sapiens
  misc_RNA (1)...(19): siRNA sense strand
agaauaaggaucugauuuc

SEQ ID NO: 1494012 - RNA, 19 nt, Homo sapiens
  misc_RNA (1)...(19): siRNA sense strand
gacgacaaauuagccagaa

SEQ ID NO: 1494013 - RNA, 19 nt, Homo sapiens
  misc_RNA (1)...(19): siRNA sense strand
gaagagcccgcugggaaga

SEQ ID NO: 1494014 - RNA, 19 nt, Homo sapiens
  misc_RNA (1)...(19): siRNA sense strand
cgccugagcuggagaacau

SEQ ID NO: 1494015 - RNA, 19 nt, Homo sapiens
  misc_RNA (1)...(19): siRNA sense strand
uaaccaagccugugcacau

SEQ ID NO: 1494016 - RNA, 19 nt, Homo sapiens
  misc_RNA (1)...(19): siRNA sense strand
ucaaagcaauccaggaacu

SEQ ID NO: 1494017 - RNA, 19 nt, Homo sapiens
  misc_RNA (1)...(19): siRNA sense strand
ggaucugauuuccgaguug

SEQ ID NO: 1494018 - RNA, 19 nt, Homo sapiens
  misc_RNA (1)...(19): siRNA sense strand
ccacagcucaccagagguu

SEQ ID NO: 1494019 - RNA, 19 nt, Homo sapiens
  misc_RNA (1)...(19): siRNA sense strand
ugaaucugcugccuuaguc

SEQ ID NO: 1494020 - RNA, 19 nt, Homo sapiens
  misc_RNA (1)...(19): siRNA sense strand
caacccauccucaaagcaa

SEQ ID NO: 1494021 - RNA, 19 nt, Homo sapiens
  misc_RNA (1)...(19): siRNA sense strand
gaugacauaaccuacgaaa

SEQ ID NO: 1494022 - RNA, 19 nt, Homo sapiens
  misc_RNA (1)...(19): siRNA sense strand
ccucaaagcaauccaggaa

SEQ ID NO: 1494023 - RNA, 19 nt, Homo sapiens
  misc_RNA (1)...(19): siRNA sense strand
guagcagaguuguucuaug

SEQ ID NO: 1494024 - RNA, 19 nt, Homo sapiens
  misc_RNA (1)...(19): siRNA sense strand
gaaagccacaucaaaacua

SEQ ID NO: 1494025 - RNA, 19 nt, Homo sapiens
  misc_RNA (1)...(19): siRNA sense strand
gauaucccauccguccaaa

SEQ ID NO: 1494026 - RNA, 19 nt, Homo sapiens
  misc_RNA (1)...(19): siRNA sense strand
cagaguuguucuaugaugu

SEQ ID NO: 1494027 - RNA, 19 nt, Homo sapiens
  misc_RNA (1)...(19): siRNA sense strand
ccaaguacguauccaagcu

SEQ ID NO: 1494028 - RNA, 19 nt, Homo sapiens
  misc_RNA (1)...(19): siRNA sense strand
ugagcaaaaugaagugaua

SEQ ID NO: 1494029 - RNA, 19 nt, Homo sapiens
  misc_RNA (1)...(19): siRNA sense strand
cgaaagccucaagaaauuu

SEQ ID NO: 1494030 - RNA, 19 nt, Homo sapiens
  misc_RNA (1)...(19): siRNA sense strand
aggaagaaguagcagaguu

SEQ ID NO: 1494031 - RNA, 19 nt, Homo sapiens
  misc_RNA (1)...(19): siRNA sense strand
ggaagaagaaaacaucuga

SEQ ID NO: 1494032 - RNA, 19 nt, Homo sapiens
  misc_RNA (1)...(19): siRNA sense strand
ggaccgguacccauucuuc

SEQ ID NO: 1494033 - RNA, 19 nt, Homo sapiens
  misc_RNA (1)...(19): siRNA sense strand
ggaauugggcagaaaauau

SEQ ID NO: 1494034 - RNA, 19 nt, Homo sapiens
  misc_RNA (1)...(19): siRNA sense strand
cggaagagcugggcaaagc

SEQ ID NO: 1494035 - RNA, 19 nt, Homo sapiens
  misc_RNA (1)...(19): siRNA sense strand
aaauggacgugucuucaag

SEQ ID NO: 1494036 - RNA, 19 nt, Homo sapiens
  misc_RNA (1)...(19): siRNA sense strand
auacaacacugagaauaag

SEQ ID NO: 1494037 - RNA, 19 nt, Homo sapiens
  misc_RNA (1)...(19): siRNA sense strand
uaagcuggcaucaaaggaa

SEQ ID NO: 1494038 - RNA, 19 nt, Homo sapiens
  misc_RNA (1)...(19): siRNA sense strand
gguaucauaauucagcauu

SEQ ID NO: 1494039 - RNA, 19 nt, Homo sapiens
  misc_RNA (1)...(19): siRNA sense strand
gguggccgcuugugucucu

SEQ ID NO: 1494040 - RNA, 19 nt, Homo sapiens
  misc_RNA (1)...(19): siRNA sense strand
ccagugaagagauuccaaa

SEQ ID NO: 1494041 - RNA, 19 nt, Homo sapiens
  misc_RNA (1)...(19): siRNA sense strand
gcaaaguggacauuaccau

SEQ ID NO: 1494042 - RNA, 19 nt, Homo sapiens
  misc_RNA (1)...(19): siRNA sense strand
ccacaacccauccucaaag

SEQ ID NO: 1494043 - RNA, 19 nt, Homo sapiens
  misc_RNA (1)...(19): siRNA sense strand
ucaaaggaauuccaaaaca

SEQ ID NO: 1494044 - RNA, 19 nt, Homo sapiens
  misc_RNA (1)...(19): siRNA sense strand
gcaccaagguccauauaaa

SEQ ID NO: 1494045 - RNA, 19 nt, Homo sapiens
  misc_RNA (1)...(19): siRNA sense strand
gcaaaccucauacccuuua

SEQ ID NO: 1494046 - RNA, 19 nt, Homo sapiens
  misc_RNA (1)...(19): siRNA sense strand
gccaauuucuccaaccuua

SEQ ID NO: 1494047 - RNA, 19 nt, Homo sapiens
  misc_RNA (1)...(19): siRNA sense strand
gcucaucauuucaucaauu

SEQ ID NO: 1494048 - RNA, 19 nt, Homo sapiens
  misc_RNA (1)...(19): siRNA sense strand
caauacaccuuucaagcuu

SEQ ID NO: 1494049 - RNA, 19 nt, Homo sapiens
  misc_RNA (1)...(19): siRNA sense strand
aaacagaccuuucuuucag

SEQ ID NO: 1494050 - RNA, 19 nt, Homo sapiens
  misc_RNA (1)...(19): siRNA sense strand
gaauaugaaggaaauguga

SEQ ID NO: 1494051 - RNA, 19 nt, Homo sapiens
  misc_RNA (1)...(19): siRNA sense strand
gaagagaauuaagaguguu

SEQ ID NO: 1494052 - RNA, 19 nt, Homo sapiens
  misc_RNA (1)...(19): siRNA sense strand
ggaaugcaauacaccuuuc

SEQ ID NO: 1494053 - RNA, 19 nt, Homo sapiens
  misc_RNA (1)...(19): siRNA sense strand
ggaaaugugacuuggaaga

SEQ ID NO: 1494054 - RNA, 19 nt, Homo sapiens
  misc_RNA (1)...(19): siRNA sense strand
guuaaucuguucucuuugu

SEQ ID NO: 1494055 - RNA, 19 nt, Homo sapiens
  misc_RNA (1)...(19): siRNA sense strand
cuucauagcccuaguaaau

SEQ ID NO: 1494056 - RNA, 19 nt, Homo sapiens
  misc_RNA (1)...(19): siRNA sense strand
gguaugcaacuguguuuaa

SEQ ID NO: 1494057 - RNA, 19 nt, Homo sapiens
  misc_RNA (1)...(19): siRNA sense strand
gcaacuguguuuaauucug

SEQ ID NO: 1494058 - RNA, 19 nt, Homo sapiens
  misc_RNA (1)...(19): siRNA sense strand
caucaauucugguaguguu

SEQ ID NO: 1494059 - RNA, 19 nt, Homo sapiens
  misc_RNA (1)...(19): siRNA sense strand
gccauuuacuuucugugua

SEQ ID NO: 1494060 - RNA, 19 nt, Homo sapiens
  misc_RNA (1)...(19): siRNA sense strand
cuguuaaucuguucucuuu

SEQ ID NO: 1494061 - RNA, 19 nt, Homo sapiens
  misc_RNA (1)...(19): siRNA sense strand
ugacuuggaagaucaaauu

SEQ ID NO: 1494062 - RNA, 19 nt, Homo sapiens
  misc_RNA (1)...(19): siRNA sense strand
ccauuuacuuucuguguau

SEQ ID NO: 1494063 - RNA, 19 nt, Homo sapiens
  misc_RNA (1)...(19): siRNA sense strand
gaaguaagaauuguugcuu

SEQ ID NO: 1494064 - RNA, 19 nt, Homo sapiens
  misc_RNA (1)...(19): siRNA sense strand
aaucauguauccuucauuc

SEQ ID NO: 1494065 - RNA, 19 nt, Homo sapiens
  misc_RNA (1)...(19): siRNA sense strand
aaggaaaugugacuuggaa

SEQ ID NO: 1494066 - RNA, 19 nt, Homo sapiens
  misc_RNA (1)...(19): siRNA sense strand
ucuaaugccugggcuguaa

SEQ ID NO: 1494067 - RNA, 19 nt, Homo sapiens
  misc_RNA (1)...(19): siRNA sense strand
gguaguguuugcauuuguu

SEQ ID NO: 1494068 - RNA, 19 nt, Homo sapiens
  misc_RNA (1)...(19): siRNA sense strand
gcaaucauguauccuucau

SEQ ID NO: 1494069 - RNA, 19 nt, Homo sapiens
  misc_RNA (1)...(19): siRNA sense strand
acaucaacuuggaaucuua

SEQ ID NO: 1494070 - RNA, 19 nt, Homo sapiens
  misc_RNA (1)...(19): siRNA sense strand
agaagagaauuaagagugu

SEQ ID NO: 1494071 - RNA, 19 nt, Homo sapiens
  misc_RNA (1)...(19): siRNA sense strand
ucauagcccuaguaaaugu

SEQ ID NO: 1494072 - RNA, 19 nt, Homo sapiens
  misc_RNA (1)...(19): siRNA sense strand
caccuaaagaagagaauua

SEQ ID NO: 1494073 - RNA, 19 nt, Homo sapiens
  misc_RNA (1)...(19): siRNA sense strand
gcaauacaccuuucaagcu

SEQ ID NO: 1494074 - RNA, 19 nt, Homo sapiens
  misc_RNA (1)...(19): siRNA sense strand
gaugagagaguguggacaa

SEQ ID NO: 1494075 - RNA, 19 nt, Homo sapiens
  misc_RNA (1)...(19): siRNA sense strand
gaaaugugacuuggaagau

SEQ ID NO: 1494076 - RNA, 19 nt, Homo sapiens
  misc_RNA (1)...(19): siRNA sense strand
ccaaacuguugcaaucaug

SEQ ID NO: 1494077 - RNA, 19 nt, Homo sapiens
  misc_RNA (1)...(19): siRNA sense strand
aaacuuguacuccugcuuu

SEQ ID NO: 1494078 - RNA, 19 nt, Homo sapiens
  misc_RNA (1)...(19): siRNA sense strand
guaugcaacuguguuuaau

SEQ ID NO: 1494079 - RNA, 19 nt, Homo sapiens
  misc_RNA (1)...(19): siRNA sense strand
aagaagaugcggcuccaua

SEQ ID NO: 1494080 - RNA, 19 nt, Homo sapiens
  misc_RNA (1)...(19): siRNA sense strand
gaauuaagaguguuguucu

SEQ ID NO: 1494081 - RNA, 19 nt, Homo sapiens
  misc_RNA (1)...(19): siRNA sense strand
caauuucuccaaccuuauu

SEQ ID NO: 1494082 - RNA, 19 nt, Homo sapiens
  misc_RNA (1)...(19): siRNA sense strand
gaaggaaaugugacuugga

SEQ ID NO: 1494083 - RNA, 19 nt, Homo sapiens
  misc_RNA (1)...(19): siRNA sense strand
acucugagccuaauauguu

SEQ ID NO: 1494084 - RNA, 19 nt, Homo sapiens
  misc_RNA (1)...(19): siRNA sense strand
ggacacagcagagcaaacu

SEQ ID NO: 1494085 - RNA, 19 nt, Homo sapiens
  misc_RNA (1)...(19): siRNA sense strand
uuauuucucuccaccuaaa

SEQ ID NO: 1494086 - RNA, 19 nt, Homo sapiens
  misc_RNA (1)...(19): siRNA sense strand
uaacgaaccauuucagcau

SEQ ID NO: 1494087 - RNA, 19 nt, Homo sapiens
  misc_RNA (1)...(19): siRNA sense strand
cucauacccuuuacucuga

SEQ ID NO: 1494088 - RNA, 19 nt, Homo sapiens
  misc_RNA (1)...(19): siRNA sense strand
gacuguaacuacucuagca

SEQ ID NO: 1494089 - RNA, 19 nt, Homo sapiens
  misc_RNA (1)...(19): siRNA sense strand
uaacuacucuagcaaaccu

SEQ ID NO: 1494090 - RNA, 19 nt, Homo sapiens
  misc_RNA (1)...(19): siRNA sense strand
augcaacuguguuuaauuc

SEQ ID NO: 1494091 - RNA, 19 nt, Homo sapiens
  misc_RNA (1)...(19): siRNA sense strand
cauguuauuugccauuuac

SEQ ID NO: 1494092 - RNA, 19 nt, Homo sapiens
  misc_RNA (1)...(19): siRNA sense strand
gaccuccuuccucauguua

SEQ ID NO: 1494093 - RNA, 19 nt, Homo sapiens
  misc_RNA (1)...(19): siRNA sense strand
gaguguuguucuggugaua

SEQ ID NO: 1494094 - RNA, 19 nt, Homo sapiens
  misc_RNA (1)...(19): siRNA sense strand
ugggucauguuauuccuuu

SEQ ID NO: 1494095 - RNA, 19 nt, Homo sapiens
  misc_RNA (1)...(19): siRNA sense strand
gccaaacuguugcaaucau

SEQ ID NO: 1494096 - RNA, 19 nt, Homo sapiens
  misc_RNA (1)...(19): siRNA sense strand
cagcagagcaaacuuguac

SEQ ID NO: 1494097 - RNA, 19 nt, Homo sapiens
  misc_RNA (1)...(19): siRNA sense strand
ucuccaaccuuauuucucu

SEQ ID NO: 1494098 - RNA, 19 nt, Homo sapiens
  misc_RNA (1)...(19): siRNA sense strand
gggcuguaacgaaccauuu

SEQ ID NO: 1494099 - RNA, 19 nt, Homo sapiens
  misc_RNA (1)...(19): siRNA sense strand
auaaucacaucaacuugga

SEQ ID NO: 1494100 - RNA, 19 nt, Homo sapiens
  misc_RNA (1)...(19): siRNA sense strand
ccuccuuccucauguuauu

SEQ ID NO: 1494101 - RNA, 19 nt, Homo sapiens
  misc_RNA (1)...(19): siRNA sense strand
ccuuauuucucuccaccua

SEQ ID NO: 1494102 - RNA, 19 nt, Homo sapiens
  misc_RNA (1)...(19): siRNA sense strand
cagcaccaagguccauaua

SEQ ID NO: 1494103 - RNA, 19 nt, Homo sapiens
  misc_RNA (1)...(19): siRNA sense strand
uaaaagcuuugcaaacugu

SEQ ID NO: 1494104 - RNA, 19 nt, Homo sapiens
  misc_RNA (1)...(19): siRNA sense strand
acucauucauccugauuau

SEQ ID NO: 1494105 - RNA, 19 nt, Homo sapiens
  misc_RNA (1)...(19): siRNA sense strand
aaugugacuuggaagauca

SEQ ID NO: 1494106 - RNA, 19 nt, Homo sapiens
  misc_RNA (1)...(19): siRNA sense strand
cacaucaacuuggaaucuu

SEQ ID NO: 1494107 - RNA, 19 nt, Homo sapiens
  misc_RNA (1)...(19): siRNA sense strand
ucauguuauuccuuuggua

SEQ ID NO: 1494108 - RNA, 19 nt, Homo sapiens
  misc_RNA (1)...(19): siRNA sense strand
acagaccuuucuuucaguu

SEQ ID NO: 1494109 - RNA, 19 nt, Homo sapiens
  misc_RNA (1)...(19): siRNA sense strand
acacagcagagcaaacuug

SEQ ID NO: 1494110 - RNA, 19 nt, Homo sapiens
  misc_RNA (1)...(19): siRNA sense strand
gacaaaagaauaugaagga

SEQ ID NO: 1494111 - RNA, 19 nt, Homo sapiens
  misc_RNA (1)...(19): siRNA sense strand
gguuuagaaguaagaauug

SEQ ID NO: 1494112 - RNA, 19 nt, Homo sapiens
  misc_RNA (1)...(19): siRNA sense strand
gguuuacucugggucaugu

SEQ ID NO: 1494113 - RNA, 19 nt, Homo sapiens
  misc_RNA (1)...(19): siRNA sense strand
aaacuguugcaaucaugua

SEQ ID NO: 1494114 - RNA, 19 nt, Homo sapiens
  misc_RNA (1)...(19): siRNA sense strand
gcagagcaaacuuguacuc

SEQ ID NO: 1494115 - RNA, 19 nt, Homo sapiens
  misc_RNA (1)...(19): siRNA sense strand
ugaccuccuuccucauguu

SEQ ID NO: 1494116 - RNA, 19 nt, Homo sapiens
  misc_RNA (1)...(19): siRNA sense strand
aaaugugacuuggaagauc

SEQ ID NO: 1494117 - RNA, 19 nt, Homo sapiens
  misc_RNA (1)...(19): siRNA sense strand
gagaauuaagaguguuguu

SEQ ID NO: 1494118 - RNA, 19 nt, Homo sapiens
  misc_RNA (1)...(19): siRNA sense strand
gaaugcaauacaccuuuca

SEQ ID NO: 1494119 - RNA, 19 nt, Homo sapiens
  misc_RNA (1)...(19): siRNA sense strand
gauaaccauggaugagaga

SEQ ID NO: 1494120 - RNA, 19 nt, Homo sapiens
  misc_RNA (1)...(19): siRNA sense strand
uaaaacagaccuuucuuuc

SEQ ID NO: 1494121 - RNA, 19 nt, Homo sapiens
  misc_RNA (1)...(19): siRNA sense strand
ccacucauucauccugauu

SEQ ID NO: 1494122 - RNA, 19 nt, Homo sapiens
  misc_RNA (1)...(19): siRNA sense strand
gaggaaugcaauacaccuu

SEQ ID NO: 1494123 - RNA, 19 nt, Homo sapiens
  misc_RNA (1)...(19): siRNA sense strand
gagagaguguggacaaaag

SEQ ID NO: 1494124 - RNA, 19 nt, Homo sapiens
  misc_RNA (1)...(19): siRNA sense strand
uggguuaacacacgaaaga

SEQ ID NO: 1494125 - RNA, 19 nt, Homo sapiens
  misc_RNA (1)...(19): siRNA sense strand
gaaguaggaagcuaaaaca

SEQ ID NO: 1494126 - RNA, 19 nt, Homo sapiens
  misc_RNA (1)...(19): siRNA sense strand
ucauucauccugauuaugg

SEQ ID NO: 1494127 - RNA, 19 nt, Homo sapiens
  misc_RNA (1)...(19): siRNA sense strand
agaugcggcuccauagcaa

SEQ ID NO: 1494128 - RNA, 19 nt, Homo sapiens
  misc_RNA (1)...(19): siRNA sense strand
cauguuauuccuuugguau

SEQ ID NO: 1494129 - RNA, 19 nt, Homo sapiens
  misc_RNA (1)...(19): siRNA sense strand
uugcauuuguucuuggaaa

SEQ ID NO: 1494130 - RNA, 19 nt, Homo sapiens
  misc_RNA (1)...(19): siRNA sense strand
gaauuguugcuucuaaugc

SEQ ID NO: 1494131 - RNA, 19 nt, Homo sapiens
  misc_RNA (1)...(19): siRNA sense strand
guuaacacacgaaagaucu

SEQ ID NO: 1494132 - RNA, 19 nt, Homo sapiens
  misc_RNA (1)...(19): siRNA sense strand
guauaaucacaucaacuug

SEQ ID NO: 1494133 - RNA, 19 nt, Homo sapiens
  misc_RNA (1)...(19): siRNA sense strand
ggucuccagaauugguuua

SEQ ID NO: 1494134 - RNA, 19 nt, Homo sapiens
  misc_RNA (1)...(19): siRNA sense strand
gugauaaccauggaugaga

SEQ ID NO: 1494135 - RNA, 19 nt, Homo sapiens
  misc_RNA (1)...(19): siRNA sense strand
uuuguaaucuugcugugau

SEQ ID NO: 1494136 - RNA, 19 nt, Homo sapiens
  misc_RNA (1)...(19): siRNA sense strand
ucugguaguguuugcauuu

SEQ ID NO: 1494137 - RNA, 19 nt, Homo sapiens
  misc_RNA (1)...(19): siRNA sense strand
aagcuugacuguaacuacu

SEQ ID NO: 1494138 - RNA, 19 nt, Homo sapiens
  misc_RNA (1)...(19): siRNA sense strand
uaugggaaguaggaagcua

SEQ ID NO: 1494139 - RNA, 19 nt, Homo sapiens
  misc_RNA (1)...(19): siRNA sense strand
ucacaucaacuuggaaucu

SEQ ID NO: 1494140 - RNA, 19 nt, Homo sapiens
  misc_RNA (1)...(19): siRNA sense strand
cucaucauuucaucaauuc

SEQ ID NO: 1494141 - RNA, 19 nt, Homo sapiens
  misc_RNA (1)...(19): siRNA sense strand
guguuugcauuuguucuug

SEQ ID NO: 1494142 - RNA, 19 nt, Homo sapiens
  misc_RNA (1)...(19): siRNA sense strand
ugcaaacugugaccuccuu

SEQ ID NO: 1494143 - RNA, 19 nt, Homo sapiens
  misc_RNA (1)...(19): siRNA sense strand
gguuaacacacgaaagauc

SEQ ID NO: 1494144 - RNA, 19 nt, Homo sapiens
  misc_RNA (1)...(19): siRNA sense strand
gcaguuguccgugcuagua

SEQ ID NO: 1494145 - RNA, 19 nt, Homo sapiens
  misc_RNA (1)...(19): siRNA sense strand
aaaggaggcugcaggacaa

SEQ ID NO: 1494146 - RNA, 19 nt, Homo sapiens
  misc_RNA (1)...(19): siRNA sense strand
uguaaggcaucaacaagaa

SEQ ID NO: 1494147 - RNA, 19 nt, Homo sapiens
  misc_RNA (1)...(19): siRNA sense strand
cgagacagaugggacuauu

SEQ ID NO: 1494148 - RNA, 19 nt, Homo sapiens
  misc_RNA (1)...(19): siRNA sense strand
gagacagaugggacuauua

SEQ ID NO: 1494149 - RNA, 19 nt, Homo sapiens
  misc_RNA (1)...(19): siRNA sense strand
agccuucgcuucuggagua

SEQ ID NO: 1494150 - RNA, 19 nt, Homo sapiens
  misc_RNA (1)...(19): siRNA sense strand
gagaggacacugcaguugu

SEQ ID NO: 1494151 - RNA, 19 nt, Homo sapiens
  misc_RNA (1)...(19): siRNA sense strand
cugggaaagucuucaguug

SEQ ID NO: 1494152 - RNA, 19 nt, Homo sapiens
  misc_RNA (1)...(19): siRNA sense strand
guaaggcaucaacaagaaa

SEQ ID NO: 1494153 - RNA, 19 nt, Homo sapiens
  misc_RNA (1)...(19): siRNA sense strand
agacagaugggacuauuag

SEQ ID NO: 1494154 - RNA, 19 nt, Homo sapiens
  misc_RNA (1)...(19): siRNA sense strand
guccaaagccugggaaagu

SEQ ID NO: 1494155 - RNA, 19 nt, Homo sapiens
  misc_RNA (1)...(19): siRNA sense strand
uaaggcaucaacaagaaau

SEQ ID NO: 1494156 - RNA, 19 nt, Homo sapiens
  misc_RNA (1)...(19): siRNA sense strand
ugggaaagucuucaguuga

SEQ ID NO: 1494157 - RNA, 19 nt, Homo sapiens
  misc_RNA (1)...(19): siRNA sense strand
cagagaggacacugcaguu

SEQ ID NO: 1494158 - RNA, 19 nt, Homo sapiens
  misc_RNA (1)...(19): siRNA sense strand
guugaaggcgagacagaug

SEQ ID NO: 1494159 - RNA, 19 nt, Homo sapiens
  misc_RNA (1)...(19): siRNA sense strand
cuacuuggacuggaggaaa

SEQ ID NO: 1494160 - RNA, 19 nt, Homo sapiens
  misc_RNA (1)...(19): siRNA sense strand
uuagugaguuucgagagau

SEQ ID NO: 1494161 - RNA, 19 nt, Homo sapiens
  misc_RNA (1)...(19): siRNA sense strand
auuagugaguuucgagaga

SEQ ID NO: 1494162 - RNA, 19 nt, Homo sapiens
  misc_RNA (1)...(19): siRNA sense strand
gcaccaagauccacauaaa

SEQ ID NO: 1494163 - RNA, 19 nt, Homo sapiens
  misc_RNA (1)...(19): siRNA sense strand
gucaauuucuccagacuua

SEQ ID NO: 1494164 - RNA, 19 nt, Homo sapiens
  misc_RNA (1)...(19): siRNA sense strand
gaaggaaacguaacuugga

SEQ ID NO: 1494165 - RNA, 19 nt, Homo sapiens
  misc_RNA (1)...(19): siRNA sense strand
gaauccaacuucaucuaau

SEQ ID NO: 1494166 - RNA, 19 nt, Homo sapiens
  misc_RNA (1)...(19): siRNA sense strand
gcacugauaaauuucauug

SEQ ID NO: 1494167 - RNA, 19 nt, Homo sapiens
  misc_RNA (1)...(19): siRNA sense strand
caaugcaccuuuccaacuu

SEQ ID NO: 1494168 - RNA, 19 nt, Homo sapiens
  misc_RNA (1)...(19): siRNA sense strand
gaguguaguucuggugaua

SEQ ID NO: 1494169 - RNA, 19 nt, Homo sapiens
  misc_RNA (1)...(19): siRNA sense strand
gcaucuggcuugcuacuag

SEQ ID NO: 1494170 - RNA, 19 nt, Homo sapiens
  misc_RNA (1)...(19): siRNA sense strand
uagcaaacuugauaccauu

SEQ ID NO: 1494171 - RNA, 19 nt, Homo sapiens
  misc_RNA (1)...(19): siRNA sense strand
aaacguaacuuggaagauc

SEQ ID NO: 1494172 - RNA, 19 nt, Homo sapiens
  misc_RNA (1)...(19): siRNA sense strand
gcagaccuuucuuucaguu

SEQ ID NO: 1494173 - RNA, 19 nt, Homo sapiens
  misc_RNA (1)...(19): siRNA sense strand
ggacagaaccagucaacuc

SEQ ID NO: 1494174 - RNA, 19 nt, Homo sapiens
  misc_RNA (1)...(19): siRNA sense strand
gaugaaacacacguauaua

SEQ ID NO: 1494175 - RNA, 19 nt, Homo sapiens
  misc_RNA (1)...(19): siRNA sense strand
ggaacaagacgcuaaagca

SEQ ID NO: 1494176 - RNA, 19 nt, Homo sapiens
  misc_RNA (1)...(19): siRNA sense strand
cuccucagcugaucaaauu

SEQ ID NO: 1494177 - RNA, 19 nt, Homo sapiens
  misc_RNA (1)...(19): siRNA sense strand
ggaaucauauauccaucau

SEQ ID NO: 1494178 - RNA, 19 nt, Homo sapiens
  misc_RNA (1)...(19): siRNA sense strand
gcaguaaccaaucauuuca

SEQ ID NO: 1494179 - RNA, 19 nt, Homo sapiens
  misc_RNA (1)...(19): siRNA sense strand
cuacuagccucagcauauu

SEQ ID NO: 1494180 - RNA, 19 nt, Homo sapiens
  misc_RNA (1)...(19): siRNA sense strand
uaaaagcucugcaaacugu

SEQ ID NO: 1494181 - RNA, 19 nt, Homo sapiens
  misc_RNA (1)...(19): siRNA sense strand
gaaugugaaggaaacguaa

SEQ ID NO: 1494182 - RNA, 19 nt, Homo sapiens
  misc_RNA (1)...(19): siRNA sense strand
gcagcuccauggcaaagga

SEQ ID NO: 1494183 - RNA, 19 nt, Homo sapiens
  misc_RNA (1)...(19): siRNA sense strand
gugguugcauuuauucuug

SEQ ID NO: 1494184 - RNA, 19 nt, Homo sapiens
  misc_RNA (1)...(19): siRNA sense strand
gggcaguaaccaaucauuu

SEQ ID NO: 1494185 - RNA, 19 nt, Homo sapiens
  misc_RNA (1)...(19): siRNA sense strand
gaccuccuuccucauauua

SEQ ID NO: 1494186 - RNA, 19 nt, Homo sapiens
  misc_RNA (1)...(19): siRNA sense strand
gacagaagaaugugaagga

SEQ ID NO: 1494187 - RNA, 19 nt, Homo sapiens
  misc_RNA (1)...(19): siRNA sense strand
ggaaacguaacuuggaaga

SEQ ID NO: 1494188 - RNA, 19 nt, Homo sapiens
  misc_RNA (1)...(19): siRNA sense strand
cauauuacuugccauuuac

SEQ ID NO: 1494189 - RNA, 19 nt, Homo sapiens
  misc_RNA (1)...(19): siRNA sense strand
caagaucccagcaccaaga

SEQ ID NO: 1494190 - RNA, 19 nt, Homo sapiens
  misc_RNA (1)...(19): siRNA sense strand
gguuugcucuggguaauau

SEQ ID NO: 1494191 - RNA, 19 nt, Homo sapiens
  misc_RNA (1)...(19): siRNA sense strand
gcaaugcaccuuuccaacu

SEQ ID NO: 1494192 - RNA, 19 nt, Homo sapiens
  misc_RNA (1)...(19): siRNA sense strand
aaaggaaggcuaagagugu

SEQ ID NO: 1494193 - RNA, 19 nt, Homo sapiens
  misc_RNA (1)...(19): siRNA sense strand
caugcuagcaaacuugaua

SEQ ID NO: 1494194 - RNA, 19 nt, Homo sapiens
  misc_RNA (1)...(19): siRNA sense strand
caauuucuccagacuuauu

SEQ ID NO: 1494195 - RNA, 19 nt, Homo sapiens
  misc_RNA (1)...(19): siRNA sense strand
agaagaaugugaaggaaac

SEQ ID NO: 1494196 - RNA, 19 nt, Homo sapiens
  misc_RNA (1)...(19): siRNA sense strand
ugaugaaacacacguauau

SEQ ID NO: 1494197 - RNA, 19 nt, Homo sapiens
  misc_RNA (1)...(19): siRNA sense strand
aagcagaccuuucuuucag

SEQ ID NO: 1494198 - RNA, 19 nt, Homo sapiens
  misc_RNA (1)...(19): siRNA sense strand
aaggaaacguaacuuggaa

SEQ ID NO: 1494199 - RNA, 19 nt, Homo sapiens
  misc_RNA (1)...(19): siRNA sense strand
uuaaucuacucucugugua

SEQ ID NO: 1494200 - RNA, 19 nt, Homo sapiens
  misc_RNA (1)...(19): siRNA sense strand
gugaugaaacacacguaua

SEQ ID NO: 1494201 - RNA, 19 nt, Homo sapiens
  misc_RNA (1)...(19): siRNA sense strand
gaaccagucaacuccauag

SEQ ID NO: 1494202 - RNA, 19 nt, Homo sapiens
  misc_RNA (1)...(19): siRNA sense strand
aguagugguugcauuuauu

SEQ ID NO: 1494203 - RNA, 19 nt, Homo sapiens
  misc_RNA (1)...(19): siRNA sense strand
aaucuacucucuguguaaa

SEQ ID NO: 1494204 - RNA, 19 nt, Homo sapiens
  misc_RNA (1)...(19): siRNA sense strand
ugaccuccuuccucauauu

SEQ ID NO: 1494205 - RNA, 19 nt, Homo sapiens
  misc_RNA (1)...(19): siRNA sense strand
ucauuccacucauucauuc

SEQ ID NO: 1494206 - RNA, 19 nt, Homo sapiens
  misc_RNA (1)...(19): siRNA sense strand
ggcaguaaccaaucauuuc

SEQ ID NO: 1494207 - RNA, 19 nt, Homo sapiens
  misc_RNA (1)...(19): siRNA sense strand
uaguagugguugcauuuau

SEQ ID NO: 1494208 - RNA, 19 nt, Homo sapiens
  misc_RNA (1)...(19): siRNA sense strand
cuagcaaacuugauaccau

SEQ ID NO: 1494209 - RNA, 19 nt, Homo sapiens
  misc_RNA (1)...(19): siRNA sense strand
ugcucaagaucgucaauuu

SEQ ID NO: 1494210 - RNA, 19 nt, Homo sapiens
  misc_RNA (1)...(19): siRNA sense strand
aaggaaggcuaagagugua

SEQ ID NO: 1494211 - RNA, 19 nt, Homo sapiens
  misc_RNA (1)...(19): siRNA sense strand
acucauucauucugauuug

SEQ ID NO: 1494212 - RNA, 19 nt, Homo sapiens
  misc_RNA (1)...(19): siRNA sense strand
acagaagaaugugaaggaa

SEQ ID NO: 1494213 - RNA, 19 nt, Homo sapiens
  misc_RNA (1)...(19): siRNA sense strand
auaaauguguggacagaag

SEQ ID NO: 1494214 - RNA, 19 nt, Homo sapiens
  misc_RNA (1)...(19): siRNA sense strand
uuacauugguauucaacug

SEQ ID NO: 1494215 - RNA, 19 nt, Homo sapiens
  misc_RNA (1)...(19): siRNA sense strand
cagaagaaugugaaggaaa

SEQ ID NO: 1494216 - RNA, 19 nt, Homo sapiens
  misc_RNA (1)...(19): siRNA sense strand
gcucaagaucgucaauuuc

SEQ ID NO: 1494217 - RNA, 19 nt, Homo sapiens
  misc_RNA (1)...(19): siRNA sense strand
uaacuuggaagaucaaacu

SEQ ID NO: 1494218 - RNA, 19 nt, Homo sapiens
  misc_RNA (1)...(19): siRNA sense strand
uaaucuacucucuguguaa

SEQ ID NO: 1494219 - RNA, 19 nt, Homo sapiens
  misc_RNA (1)...(19): siRNA sense strand
guuaaucuacucucugugu

SEQ ID NO: 1494220 - RNA, 19 nt, Homo sapiens
  misc_RNA (1)...(19): siRNA sense strand
uugauaccauucacucuga

SEQ ID NO: 1494221 - RNA, 19 nt, Homo sapiens
  misc_RNA (1)...(19): siRNA sense strand
ucuaguagugguugcauuu

SEQ ID NO: 1494222 - RNA, 19 nt, Homo sapiens
  misc_RNA (1)...(19): siRNA sense strand
ccauuuacuuucugugucu

SEQ ID NO: 1494223 - RNA, 19 nt, Homo sapiens
  misc_RNA (1)...(19): siRNA sense strand
cauaaaagcucugcaaacu

SEQ ID NO: 1494224 - RNA, 19 nt, Homo sapiens
  misc_RNA (1)...(19): siRNA sense strand
gcaaacuugauaccauuca

SEQ ID NO: 1494225 - RNA, 19 nt, Homo sapiens
  misc_RNA (1)...(19): siRNA sense strand
gaagaucaaacugaggaau

SEQ ID NO: 1494226 - RNA, 19 nt, Homo sapiens
  misc_RNA (1)...(19): siRNA sense strand
uaaccaaucauuucagcau

SEQ ID NO: 1494227 - RNA, 19 nt, Homo sapiens
  misc_RNA (1)...(19): siRNA sense strand
uguguaaacaucugaagaa

SEQ ID NO: 1494228 - RNA, 19 nt, Homo sapiens
  misc_RNA (1)...(19): siRNA sense strand
gugaaggaaacguaacuug

SEQ ID NO: 1494229 - RNA, 19 nt, Homo sapiens
  misc_RNA (1)...(19): siRNA sense strand
ugugaccuccuuccucaua

SEQ ID NO: 1494230 - RNA, 19 nt, Homo sapiens
  misc_RNA (1)...(19): siRNA sense strand
ccacucauucauucugauu

SEQ ID NO: 1494231 - RNA, 19 nt, Homo sapiens
  misc_RNA (1)...(19): siRNA sense strand
agaaugugaaggaaacgua

SEQ ID NO: 1494232 - RNA, 19 nt, Homo sapiens
  misc_RNA (1)...(19): siRNA sense strand
aaagaucuccucagcugau

SEQ ID NO: 1494233 - RNA, 19 nt, Homo sapiens
  misc_RNA (1)...(19): siRNA sense strand
auauaaauguguggacaga

SEQ ID NO: 1494234 - RNA, 19 nt, Homo sapiens
  misc_RNA (1)...(19): siRNA sense strand
guagugguugcauuuauuc

SEQ ID NO: 1494235 - RNA, 19 nt, Homo sapiens
  misc_RNA (1)...(19): siRNA sense strand
cagaaccagucaacuccau

SEQ ID NO: 1494236 - RNA, 19 nt, Homo sapiens
  misc_RNA (1)...(19): siRNA sense strand
gaaacguaacuuggaagau

SEQ ID NO: 1494237 - RNA, 19 nt, Homo sapiens
  misc_RNA (1)...(19): siRNA sense strand
ccucagcugaucaaauuau

SEQ ID NO: 1494238 - RNA, 19 nt, Homo sapiens
  misc_RNA (1)...(19): siRNA sense strand
cucugacccugauaucuuu

SEQ ID NO: 1494239 - RNA, 19 nt, Homo sapiens
  misc_RNA (1)...(19): siRNA sense strand
guaguucuggugauagugu

SEQ ID NO: 1494240 - RNA, 19 nt, Homo sapiens
  misc_RNA (1)...(19): siRNA sense strand
cuuucugugucuaaucaua

SEQ ID NO: 1494241 - RNA, 19 nt, Homo sapiens
  misc_RNA (1)...(19): siRNA sense strand
uacuuucugugucuaauca

SEQ ID NO: 1494242 - RNA, 19 nt, Homo sapiens
  misc_RNA (1)...(19): siRNA sense strand
ccucauauuacuugccauu

SEQ ID NO: 1494243 - RNA, 19 nt, Homo sapiens
  misc_RNA (1)...(19): siRNA sense strand
gaugaguuuucuacacauu

SEQ ID NO: 1494244 - RNA, 19 nt, Homo sapiens
  misc_RNA (1)...(19): siRNA sense strand
cuaguagugguugcauuua

SEQ ID NO: 1494245 - RNA, 19 nt, Homo sapiens
  misc_RNA (1)...(19): siRNA sense strand
ggaagaucaaacugaggaa

SEQ ID NO: 1494246 - RNA, 19 nt, Homo sapiens
  misc_RNA (1)...(19): siRNA sense strand
uaaauguguggacagaaga

SEQ ID NO: 1494247 - RNA, 19 nt, Homo sapiens
  misc_RNA (1)...(19): siRNA sense strand
cuggcagucuccaaaguug

SEQ ID NO: 1494248 - RNA, 19 nt, Homo sapiens
  misc_RNA (1)...(19): siRNA sense strand
gugaccuccuuccucauau

SEQ ID NO: 1494249 - RNA, 19 nt, Homo sapiens
  misc_RNA (1)...(19): siRNA sense strand
cagcaccaagauccacaua

SEQ ID NO: 1494250 - RNA, 19 nt, Homo sapiens
  misc_RNA (1)...(19): siRNA sense strand
guguaaacaucugaagaag

SEQ ID NO: 1494251 - RNA, 19 nt, Homo sapiens
  misc_RNA (1)...(19): siRNA sense strand
guguaguucuggugauagu

SEQ ID NO: 1494252 - RNA, 19 nt, Homo sapiens
  misc_RNA (1)...(19): siRNA sense strand
uuacuugccauuuacuuuc

SEQ ID NO: 1494253 - RNA, 19 nt, Homo sapiens
  misc_RNA (1)...(19): siRNA sense strand
cuguuaaucuacucucugu

SEQ ID NO: 1494254 - RNA, 19 nt, Homo sapiens
  misc_RNA (1)...(19): siRNA sense strand
ccugggcaguaaccaauca

SEQ ID NO: 1494255 - RNA, 19 nt, Homo sapiens
  misc_RNA (1)...(19): siRNA sense strand
ccaaucauuucagcaucug

SEQ ID NO: 1494256 - RNA, 19 nt, Homo sapiens
  misc_RNA (1)...(19): siRNA sense strand
ucaagaucgucaauuucuc

SEQ ID NO: 1494257 - RNA, 19 nt, Homo sapiens
  misc_RNA (1)...(19): siRNA sense strand
ugcaaacugugaccuccuu

SEQ ID NO: 1494258 - RNA, 19 nt, Homo sapiens
  misc_RNA (1)...(19): siRNA sense strand
ucuacucucuguguaaaca

SEQ ID NO: 1494259 - RNA, 19 nt, Homo sapiens
  misc_RNA (1)...(19): siRNA sense strand
acucugacccugauaucuu

SEQ ID NO: 1494260 - RNA, 19 nt, Homo sapiens
  misc_RNA (1)...(19): siRNA sense strand
aacguaacuuggaagauca

SEQ ID NO: 1494261 - RNA, 19 nt, Homo sapiens
  misc_RNA (1)...(19): siRNA sense strand
uguaaacaucugaagaaga

SEQ ID NO: 1494262 - RNA, 19 nt, Homo sapiens
  misc_RNA (1)...(19): siRNA sense strand
ggaagcagcagacagauga

SEQ ID NO: 1494263 - RNA, 19 nt, Homo sapiens
  misc_RNA (1)...(19): siRNA sense strand
cgaggcaucuggaggagaa

SEQ ID NO: 1494264 - RNA, 19 nt, Homo sapiens
  misc_RNA (1)...(19): siRNA sense strand
gcugcaacaucuucaucua

SEQ ID NO: 1494265 - RNA, 19 nt, Homo sapiens
  misc_RNA (1)...(19): siRNA sense strand
ccaaucaaagcaaauguuu

SEQ ID NO: 1494266 - RNA, 19 nt, Homo sapiens
  misc_RNA (1)...(19): siRNA sense strand
gcaaagagaaggcccugau

SEQ ID NO: 1494267 - RNA, 19 nt, Homo sapiens
  misc_RNA (1)...(19): siRNA sense strand
gcaugaagcgccucaaagu

SEQ ID NO: 1494268 - RNA, 19 nt, Homo sapiens
  misc_RNA (1)...(19): siRNA sense strand
ucagagauccuccagaugu

SEQ ID NO: 1494269 - RNA, 19 nt, Homo sapiens
  misc_RNA (1)...(19): siRNA sense strand
cagagauccuccagauguu

SEQ ID NO: 1494270 - RNA, 19 nt, Homo sapiens
  misc_RNA (1)...(19): siRNA sense strand
acucagagauccuccagau

SEQ ID NO: 1494271 - RNA, 19 nt, Homo sapiens
  misc_RNA (1)...(19): siRNA sense strand
caacagcagcagcagcaaa

SEQ ID NO: 1494272 - RNA, 19 nt, Homo sapiens
  misc_RNA (1)...(19): siRNA sense strand
gaugaggacguccggaaga

SEQ ID NO: 1494273 - RNA, 19 nt, Homo sapiens
  misc_RNA (1)...(19): siRNA sense strand
gaccgagccaccaaucaaa

SEQ ID NO: 1494274 - RNA, 19 nt, Homo sapiens
  misc_RNA (1)...(19): siRNA sense strand
gcccaucuucgaacaguuu

SEQ ID NO: 1494275 - RNA, 19 nt, Homo sapiens
  misc_RNA (1)...(19): siRNA sense strand
acaguuuggucggaucuuu

SEQ ID NO: 1494276 - RNA, 19 nt, Homo sapiens
  misc_RNA (1)...(19): siRNA sense strand
caaagagaaggcccugaug

SEQ ID NO: 1494277 - RNA, 19 nt, Homo sapiens
  misc_RNA (1)...(19): siRNA sense strand
gaggacguccggaagaugu

SEQ ID NO: 1494278 - RNA, 19 nt, Homo sapiens
  misc_RNA (1)...(19): siRNA sense strand
gagauccuccagauguuug

SEQ ID NO: 1494279 - RNA, 19 nt, Homo sapiens
  misc_RNA (1)...(19): siRNA sense strand
ccagauggcaccagcaaag

SEQ ID NO: 1494280 - RNA, 19 nt, Homo sapiens
  misc_RNA (1)...(19): siRNA sense strand
uagggaagcagcagacaga

SEQ ID NO: 1494281 - RNA, 19 nt, Homo sapiens
  misc_RNA (1)...(19): siRNA sense strand
ggacguccggaagauguuu

SEQ ID NO: 1494282 - RNA, 19 nt, Homo sapiens
  misc_RNA (1)...(19): siRNA sense strand
ugaccgagccaccaaucaa

SEQ ID NO: 1494283 - RNA, 19 nt, Homo sapiens
  misc_RNA (1)...(19): siRNA sense strand
ugaaguuugcugacacuga

SEQ ID NO: 1494284 - RNA, 19 nt, Homo sapiens
  misc_RNA (1)...(19): siRNA sense strand
gggaugugccuuccugaca

SEQ ID NO: 1494285 - RNA, 19 nt, Homo sapiens
  misc_RNA (1)...(19): siRNA sense strand
gcaacaucuucaucuacca

SEQ ID NO: 1494286 - RNA, 19 nt, Homo sapiens
  misc_RNA (1)...(19): siRNA sense strand
gaacaguuuggucggaucu

SEQ ID NO: 1494287 - RNA, 19 nt, Homo sapiens
  misc_RNA (1)...(19): siRNA sense strand
gggaagcagcagacagaug

SEQ ID NO: 1494288 - RNA, 19 nt, Homo sapiens
  misc_RNA (1)...(19): siRNA sense strand
ccacgucaucucagccaaa

SEQ ID NO: 1494289 - RNA, 19 nt, Homo sapiens
  misc_RNA (1)...(19): siRNA sense strand
ggugaaguuugcugacacu

SEQ ID NO: 1494290 - RNA, 19 nt, Homo sapiens
  misc_RNA (1)...(19): siRNA sense strand
gccucaaaguccagcuaaa

SEQ ID NO: 1494291 - RNA, 19 nt, Homo sapiens
  misc_RNA (1)...(19): siRNA sense strand
gcagcagcagcaaagagaa

SEQ ID NO: 1494292 - RNA, 19 nt, Homo sapiens
  misc_RNA (1)...(19): siRNA sense strand
ccaccaaucaaagcaaaug

SEQ ID NO: 1494293 - RNA, 19 nt, Homo sapiens
  misc_RNA (1)...(19): siRNA sense strand
ccagauguuuguccccuuu

SEQ ID NO: 1494294 - RNA, 19 nt, Homo sapiens
  misc_RNA (1)...(19): siRNA sense strand
guggugaaguuugcugaca

SEQ ID NO: 1494295 - RNA, 19 nt, Homo sapiens
  misc_RNA (1)...(19): siRNA sense strand
gugccuuccugacauacug

SEQ ID NO: 1494296 - RNA, 19 nt, Homo sapiens
  misc_RNA (1)...(19): siRNA sense strand
gcuaaagcggccuaaggau

SEQ ID NO: 1494297 - RNA, 19 nt, Homo sapiens
  misc_RNA (1)...(19): siRNA sense strand
cagcuaaagcggccuaagg

SEQ ID NO: 1494298 - RNA, 19 nt, Homo sapiens
  misc_RNA (1)...(19): siRNA sense strand
ccaucgcccuccaguuugg

SEQ ID NO: 1494299 - RNA, 19 nt, Homo sapiens
  misc_RNA (1)...(19): siRNA sense strand
cggcaugaagcgccucaaa

SEQ ID NO: 1494300 - RNA, 19 nt, Homo sapiens
  misc_RNA (1)...(19): siRNA sense strand
ggaggagaaggaccugaag

SEQ ID NO: 1494301 - RNA, 19 nt, Homo sapiens
  misc_RNA (1)...(19): siRNA sense strand
gcaaauaugugccaaauuc

SEQ ID NO: 1494302 - RNA, 19 nt, Homo sapiens
  misc_RNA (1)...(19): siRNA sense strand
gagaugggauccugaauga

SEQ ID NO: 1494303 - RNA, 19 nt, Homo sapiens
  misc_RNA (1)...(19): siRNA sense strand
gaaacgggaucaccuguau

SEQ ID NO: 1494304 - RNA, 19 nt, Homo sapiens
  misc_RNA (1)...(19): siRNA sense strand
gaaagaaacugcagaaacc

SEQ ID NO: 1494305 - RNA, 19 nt, Homo sapiens
  misc_RNA (1)...(19): siRNA sense strand
gcaaauaccaucccugcua

SEQ ID NO: 1494306 - RNA, 19 nt, Homo sapiens
  misc_RNA (1)...(19): siRNA sense strand
ccaagaagaugcagacaga

SEQ ID NO: 1494307 - RNA, 19 nt, Homo sapiens
  misc_RNA (1)...(19): siRNA sense strand
ccagacagaugaugacuau

SEQ ID NO: 1494308 - RNA, 19 nt, Homo sapiens
  misc_RNA (1)...(19): siRNA sense strand
ggauaacuguguccugauu

SEQ ID NO: 1494309 - RNA, 19 nt, Homo sapiens
  misc_RNA (1)...(19): siRNA sense strand
ggacaaggauggugauggu

SEQ ID NO: 1494310 - RNA, 19 nt, Homo sapiens
  misc_RNA (1)...(19): siRNA sense strand
ucaaggcugugaagucuaa

SEQ ID NO: 1494311 - RNA, 19 nt, Homo sapiens
  misc_RNA (1)...(19): siRNA sense strand
ggagaugccugugaugaug

SEQ ID NO: 1494312 - RNA, 19 nt, Homo sapiens
  misc_RNA (1)...(19): siRNA sense strand
ccagaaaccugagaccauu

SEQ ID NO: 1494313 - RNA, 19 nt, Homo sapiens
  misc_RNA (1)...(19): siRNA sense strand
ugaaugaucucuaugugau

SEQ ID NO: 1494314 - RNA, 19 nt, Homo sapiens
  misc_RNA (1)...(19): siRNA sense strand
gaaacaccauagcugaaug

SEQ ID NO: 1494315 - RNA, 19 nt, Homo sapiens
  misc_RNA (1)...(19): siRNA sense strand
ggauggagauggaauaaaa

SEQ ID NO: 1494316 - RNA, 19 nt, Homo sapiens
  misc_RNA (1)...(19): siRNA sense strand
guauacuggugaucagaua

SEQ ID NO: 1494317 - RNA, 19 nt, Homo sapiens
  misc_RNA (1)...(19): siRNA sense strand
ugacauggauggagaugga

SEQ ID NO: 1494318 - RNA, 19 nt, Homo sapiens
  misc_RNA (1)...(19): siRNA sense strand
guacacagcuuuuaaugga

SEQ ID NO: 1494319 - RNA, 19 nt, Homo sapiens
  misc_RNA (1)...(19): siRNA sense strand
agacggagcagacauauug

SEQ ID NO: 1494320 - RNA, 19 nt, Homo sapiens
  misc_RNA (1)...(19): siRNA sense strand
gaaggugcauuuggugguu

SEQ ID NO: 1494321 - RNA, 19 nt, Homo sapiens
  misc_RNA (1)...(19): siRNA sense strand
gaucugcguuaauacuuug

SEQ ID NO: 1494322 - RNA, 19 nt, Homo sapiens
  misc_RNA (1)...(19): siRNA sense strand
ggaaagaaacugcagaaac

SEQ ID NO: 1494323 - RNA, 19 nt, Homo sapiens
  misc_RNA (1)...(19): siRNA sense strand
uaauggaguugacuucgaa

SEQ ID NO: 1494324 - RNA, 19 nt, Homo sapiens
  misc_RNA (1)...(19): siRNA sense strand
gaagaggagaugccuguga

SEQ ID NO: 1494325 - RNA, 19 nt, Homo sapiens
  misc_RNA (1)...(19): siRNA sense strand
uaaauaacgaccagaaaga

SEQ ID NO: 1494326 - RNA, 19 nt, Homo sapiens
  misc_RNA (1)...(19): siRNA sense strand
agucugauguggauaauga

SEQ ID NO: 1494327 - RNA, 19 nt, Homo sapiens
  misc_RNA (1)...(19): siRNA sense strand
ccuucaagcugcagacuaa

SEQ ID NO: 1494328 - RNA, 19 nt, Homo sapiens
  misc_RNA (1)...(19): siRNA sense strand
gcagaaacccagagcugaa

SEQ ID NO: 1494329 - RNA, 19 nt, Homo sapiens
  misc_RNA (1)...(19): siRNA sense strand
ggucugcacugacauugau

SEQ ID NO: 1494330 - RNA, 19 nt, Homo sapiens
  misc_RNA (1)...(19): siRNA sense strand
ggacaacugcccaaaauuu

SEQ ID NO: 1494331 - RNA, 19 nt, Homo sapiens
  misc_RNA (1)...(19): siRNA sense strand
gcucaaggcugugaagucu

SEQ ID NO: 1494332 - RNA, 19 nt, Homo sapiens
  misc_RNA (1)...(19): siRNA sense strand
ggaaacgggaucaccugua

SEQ ID NO: 1494333 - RNA, 19 nt, Homo sapiens
  misc_RNA (1)...(19): siRNA sense strand
uaaccagucugauguggau

SEQ ID NO: 1494334 - RNA, 19 nt, Homo sapiens
  misc_RNA (1)...(19): siRNA sense strand
gccugagugucuuaaauaa

SEQ ID NO: 1494335 - RNA, 19 nt, Homo sapiens
  misc_RNA (1)...(19): siRNA sense strand
gaccaaaggaacagcgaua

SEQ ID NO: 1494336 - RNA, 19 nt, Homo sapiens
  misc_RNA (1)...(19): siRNA sense strand
aaggacaacugcaaauaug

SEQ ID NO: 1494337 - RNA, 19 nt, Homo sapiens
  misc_RNA (1)...(19): siRNA sense strand
gguccaaccucaaguaucg

SEQ ID NO: 1494338 - RNA, 19 nt, Homo sapiens
  misc_RNA (1)...(19): siRNA sense strand
ggagaugggauccugaaug

SEQ ID NO: 1494339 - RNA, 19 nt, Homo sapiens
  misc_RNA (1)...(19): siRNA sense strand
ggucuuuacucuucaacug

SEQ ID NO: 1494340 - RNA, 19 nt, Homo sapiens
  misc_RNA (1)...(19): siRNA sense strand
ggacuccugugacaccaau

SEQ ID NO: 1494341 - RNA, 19 nt, Homo sapiens
  misc_RNA (1)...(19): siRNA sense strand
ccaacucgaucugcguuaa

SEQ ID NO: 1494342 - RNA, 19 nt, Homo sapiens
  misc_RNA (1)...(19): siRNA sense strand
cgaucugcguuaauacuuu

SEQ ID NO: 1494343 - RNA, 19 nt, Homo sapiens
  misc_RNA (1)...(19): siRNA sense strand
uaugcaggcuuuaucuuug

SEQ ID NO: 1494344 - RNA, 19 nt, Homo sapiens
  misc_RNA (1)...(19): siRNA sense strand
ugaaugagcaggauaacug

SEQ ID NO: 1494345 - RNA, 19 nt, Homo sapiens
  misc_RNA (1)...(19): siRNA sense strand
caucuucggucuuuacucu

SEQ ID NO: 1494346 - RNA, 19 nt, Homo sapiens
  misc_RNA (1)...(19): siRNA sense strand
ucaaguaucgcugcaauga

SEQ ID NO: 1494347 - RNA, 19 nt, Homo sapiens
  misc_RNA (1)...(19): siRNA sense strand
ggacaacugcaaauaugug

SEQ ID NO: 1494348 - RNA, 19 nt, Homo sapiens
  misc_RNA (1)...(19): siRNA sense strand
ucaccuguauugauguuga

SEQ ID NO: 1494349 - RNA, 19 nt, Homo sapiens
  misc_RNA (1)...(19): siRNA sense strand
ggacaccgauaaggaugga

SEQ ID NO: 1494350 - RNA, 19 nt, Homo sapiens
  misc_RNA (1)...(19): siRNA sense strand
ccauugaauugaggacuuu

SEQ ID NO: 1494351 - RNA, 19 nt, Homo sapiens
  misc_RNA (1)...(19): siRNA sense strand
ccaaaggaacagcgauaaa

SEQ ID NO: 1494352 - RNA, 19 nt, Homo sapiens
  misc_RNA (1)...(19): siRNA sense strand
gaugcaaagcggaaagaaa

SEQ ID NO: 1494353 - RNA, 19 nt, Homo sapiens
  misc_RNA (1)...(19): siRNA sense strand
gacagcagguuaaggaaac

SEQ ID NO: 1494354 - RNA, 19 nt, Homo sapiens
  misc_RNA (1)...(19): siRNA sense strand
ugaauacccagacagauga

SEQ ID NO: 1494355 - RNA, 19 nt, Homo sapiens
  misc_RNA (1)...(19): siRNA sense strand
gagauuguacagaccauga

SEQ ID NO: 1494356 - RNA, 19 nt, Homo sapiens
  misc_RNA (1)...(19): siRNA sense strand
ccaacugggugguccugaa

SEQ ID NO: 1494357 - RNA, 19 nt, Homo sapiens
  misc_RNA (1)...(19): siRNA sense strand
gaggagaugccugugauga

SEQ ID NO: 1494358 - RNA, 19 nt, Homo sapiens
  misc_RNA (1)...(19): siRNA sense strand
ugagacagcagguuaagga

SEQ ID NO: 1494359 - RNA, 19 nt, Homo sapiens
  misc_RNA (1)...(19): siRNA sense strand
cuacaucaggguacgauuu

SEQ ID NO: 1494360 - RNA, 19 nt, Homo sapiens
  misc_RNA (1)...(19): siRNA sense strand
gugaauacccagacagaug

SEQ ID NO: 1494361 - RNA, 19 nt, Homo sapiens
  misc_RNA (1)...(19): siRNA sense strand
ggaacagcgauaaagauau

SEQ ID NO: 1494362 - RNA, 19 nt, Homo sapiens
  misc_RNA (1)...(19): siRNA sense strand
caaaggaacagcgauaaag

SEQ ID NO: 1494363 - RNA, 19 nt, Homo sapiens
  misc_RNA (1)...(19): siRNA sense strand
gaagaugcagacagagaug

SEQ ID NO: 1494364 - RNA, 19 nt, Homo sapiens
  misc_RNA (1)...(19): siRNA sense strand
aaaggacaacugcaaauau

SEQ ID NO: 1494365 - RNA, 19 nt, Homo sapiens
  misc_RNA (1)...(19): siRNA sense strand
gcgguccucucaaguuuca

SEQ ID NO: 1494366 - RNA, 19 nt, Homo sapiens
  misc_RNA (1)...(19): siRNA sense strand
ugaugacuaugcaggcuuu

SEQ ID NO: 1494367 - RNA, 19 nt, Homo sapiens
  misc_RNA (1)...(19): siRNA sense strand
ugaccgacuucagggcuua

SEQ ID NO: 1494368 - RNA, 19 nt, Homo sapiens
  misc_RNA (1)...(19): siRNA sense strand
ugacgagugugaugaugau

SEQ ID NO: 1494369 - RNA, 19 nt, Homo sapiens
  misc_RNA (1)...(19): siRNA sense strand
gaauuggugacgaguguga

SEQ ID NO: 1494370 - RNA, 19 nt, Homo sapiens
  misc_RNA (1)...(19): siRNA sense strand
cgauaaggauggaauuggu

SEQ ID NO: 1494371 - RNA, 19 nt, Homo sapiens
  misc_RNA (1)...(19): siRNA sense strand
cgaggaugcugacggagau

SEQ ID NO: 1494372 - RNA, 19 nt, Homo sapiens
  misc_RNA (1)...(19): siRNA sense strand
gccaccaucuucggucuuu

SEQ ID NO: 1494373 - RNA, 19 nt, Homo sapiens
  misc_RNA (1)...(19): siRNA sense strand
uacagaccaugaacaguga

SEQ ID NO: 1494374 - RNA, 19 nt, Homo sapiens
  misc_RNA (1)...(19): siRNA sense strand
cagcaacccuaaccagucu

SEQ ID NO: 1494375 - RNA, 19 nt, Homo sapiens
  misc_RNA (1)...(19): siRNA sense strand
aaaggaacagcgauaaaga

SEQ ID NO: 1494376 - RNA, 19 nt, Homo sapiens
  misc_RNA (1)...(19): siRNA sense strand
ggaaggacuccaggaaugu

SEQ ID NO: 1494377 - RNA, 19 nt, Homo sapiens
  misc_RNA (1)...(19): siRNA sense strand
aggaacagcgauaaagaua

SEQ ID NO: 1494378 - RNA, 19 nt, Homo sapiens
  misc_RNA (1)...(19): siRNA sense strand
gagcgugcguucccaacuc

SEQ ID NO: 1494379 - RNA, 19 nt, Homo sapiens
  misc_RNA (1)...(19): siRNA sense strand
aaguaucgcugcaaugaca

SEQ ID NO: 1494380 - RNA, 19 nt, Homo sapiens
  misc_RNA (1)...(19): siRNA sense strand
gaaccagggcauggagauu

SEQ ID NO: 1494381 - RNA, 19 nt, Homo sapiens
  misc_RNA (1)...(19): siRNA sense strand
uaacugccugagugucuua

SEQ ID NO: 1494382 - RNA, 19 nt, Homo sapiens
  misc_RNA (1)...(19): siRNA sense strand
guuaauacuuugggaucuu

SEQ ID NO: 1494383 - RNA, 19 nt, Homo sapiens
  misc_RNA (1)...(19): siRNA sense strand
gcgaaacaccauagcugaa

SEQ ID NO: 1494384 - RNA, 19 nt, Homo sapiens
  misc_RNA (1)...(19): siRNA sense strand
gaugaugacaaugauggua

SEQ ID NO: 1494385 - RNA, 19 nt, Homo sapiens
  misc_RNA (1)...(19): siRNA sense strand
cgagugugaugaugaugau

SEQ ID NO: 1494386 - RNA, 19 nt, Homo sapiens
  misc_RNA (1)...(19): siRNA sense strand
gcucugccaggaacuguaa

SEQ ID NO: 1494387 - RNA, 19 nt, Homo sapiens
  misc_RNA (1)...(19): siRNA sense strand
gguuaaggaaacaucauuu

SEQ ID NO: 1494388 - RNA, 19 nt, Homo sapiens
  misc_RNA (1)...(19): siRNA sense strand
ccugaggacuuccaagagu

SEQ ID NO: 1494389 - RNA, 19 nt, Homo sapiens
  misc_RNA (1)...(19): siRNA sense strand
ccucaaguaucgcugcaau

SEQ ID NO: 1494390 - RNA, 19 nt, Homo sapiens
  misc_RNA (1)...(19): siRNA sense strand
cuaugcaggcuuuaucuuu

SEQ ID NO: 1494391 - RNA, 19 nt, Homo sapiens
  misc_RNA (1)...(19): siRNA sense strand
gacagaugaugacuaugca

SEQ ID NO: 1494392 - RNA, 19 nt, Homo sapiens
  misc_RNA (1)...(19): siRNA sense strand
gauaacugccugagugucu

SEQ ID NO: 1494393 - RNA, 19 nt, Homo sapiens
  misc_RNA (1)...(19): siRNA sense strand
acuguguccugauucauaa

SEQ ID NO: 1494394 - RNA, 19 nt, Homo sapiens
  misc_RNA (1)...(19): siRNA sense strand
gaaugaucucuaugugauu

SEQ ID NO: 1494395 - RNA, 19 nt, Homo sapiens
  misc_RNA (1)...(19): siRNA sense strand
aaccugagaccauugaauu

SEQ ID NO: 1494396 - RNA, 19 nt, Homo sapiens
  misc_RNA (1)...(19): siRNA sense strand
caccaucccugaggacuuc

SEQ ID NO: 1494397 - RNA, 19 nt, Homo sapiens
  misc_RNA (1)...(19): siRNA sense strand
aagaggagaugccugugau

SEQ ID NO: 1494398 - RNA, 19 nt, Homo sapiens
  misc_RNA (1)...(19): siRNA sense strand
gcggaaagaaacugcagaa

SEQ ID NO: 1494399 - RNA, 19 nt, Homo sapiens
  misc_RNA (1)...(19): siRNA sense strand
cuucugagacagcagguua

SEQ ID NO: 1494400 - RNA, 19 nt, Homo sapiens
  misc_RNA (1)...(19): siRNA sense strand
cggcaguucuugggucaaa

SEQ ID NO: 1494401 - RNA, 19 nt, Homo sapiens
  misc_RNA (1)...(19): siRNA sense strand
gaucaagugugaagaagau

SEQ ID NO: 1494402 - RNA, 19 nt, Homo sapiens
  misc_RNA (1)...(19): siRNA sense strand
aggaugagaucuggaaaua

SEQ ID NO: 1494403 - RNA, 19 nt, Homo sapiens
  misc_RNA (1)...(19): siRNA sense strand
gaugagaucuggaaauacc

SEQ ID NO: 1494404 - RNA, 19 nt, Homo sapiens
  misc_RNA (1)...(19): siRNA sense strand
gaucagaagcugcaaaggu

SEQ ID NO: 1494405 - RNA, 19 nt, Homo sapiens
  misc_RNA (1)...(19): siRNA sense strand
agaaguacaucaaggucuu

SEQ ID NO: 1494406 - RNA, 19 nt, Homo sapiens
  misc_RNA (1)...(19): siRNA sense strand
gcucgacgaugcgaucaga

SEQ ID NO: 1494407 - RNA, 19 nt, Homo sapiens
  misc_RNA (1)...(19): siRNA sense strand
gaaguacaucaaggucuuu

SEQ ID NO: 1494408 - RNA, 19 nt, Homo sapiens
  misc_RNA (1)...(19): siRNA sense strand
ugccaggccugaacaagug

SEQ ID NO: 1494409 - RNA, 19 nt, Homo sapiens
  misc_RNA (1)...(19): siRNA sense strand
aggaguugaucaaguguga

SEQ ID NO: 1494410 - RNA, 19 nt, Homo sapiens
  misc_RNA (1)...(19): siRNA sense strand
guugaucaagugugaagaa

SEQ ID NO: 1494411 - RNA, 19 nt, Homo sapiens
  misc_RNA (1)...(19): siRNA sense strand
guacaucaaggucuuucca

SEQ ID NO: 1494412 - RNA, 19 nt, Homo sapiens
  misc_RNA (1)...(19): siRNA sense strand
gcgaucagaagcugcaaag

SEQ ID NO: 1494413 - RNA, 19 nt, Homo sapiens
  misc_RNA (1)...(19): siRNA sense strand
caagcagggcgugcacuga

SEQ ID NO: 1494414 - RNA, 19 nt, Homo sapiens
  misc_RNA (1)...(19): siRNA sense strand
ggacaaagguuaugugcuu

SEQ ID NO: 1494415 - RNA, 19 nt, Homo sapiens
  misc_RNA (1)...(19): siRNA sense strand
gaacgaacacggcuacuuu

SEQ ID NO: 1494416 - RNA, 19 nt, Homo sapiens
  misc_RNA (1)...(19): siRNA sense strand
aaacaagucuucuggauca

SEQ ID NO: 1494417 - RNA, 19 nt, Homo sapiens
  misc_RNA (1)...(19): siRNA sense strand
gcaaacaagucuucuggau

SEQ ID NO: 1494418 - RNA, 19 nt, Homo sapiens
  misc_RNA (1)...(19): siRNA sense strand
ggacugauuuagaacagaa

SEQ ID NO: 1494419 - RNA, 19 nt, Homo sapiens
  misc_RNA (1)...(19): siRNA sense strand
ugacuuacauucgugauuu

SEQ ID NO: 1494420 - RNA, 19 nt, Homo sapiens
  misc_RNA (1)...(19): siRNA sense strand
gcacuuagcaugcugacuu

SEQ ID NO: 1494421 - RNA, 19 nt, Homo sapiens
  misc_RNA (1)...(19): siRNA sense strand
ggaagccaauuuacaugga

SEQ ID NO: 1494422 - RNA, 19 nt, Homo sapiens
  misc_RNA (1)...(19): siRNA sense strand
gcagcagaauggucuaugu

SEQ ID NO: 1494423 - RNA, 19 nt, Homo sapiens
  misc_RNA (1)...(19): siRNA sense strand
ggauuaacccucuaugaca

SEQ ID NO: 1494424 - RNA, 19 nt, Homo sapiens
  misc_RNA (1)...(19): siRNA sense strand
caaaauccauggcaaacaa

SEQ ID NO: 1494425 - RNA, 19 nt, Homo sapiens
  misc_RNA (1)...(19): siRNA sense strand
gcaccuugcccuauuaaca

SEQ ID NO: 1494426 - RNA, 19 nt, Homo sapiens
  misc_RNA (1)...(19): siRNA sense strand
gaagccaauuuacauggau

SEQ ID NO: 1494427 - RNA, 19 nt, Homo sapiens
  misc_RNA (1)...(19): siRNA sense strand
gcagaauggucuaugucau

SEQ ID NO: 1494428 - RNA, 19 nt, Homo sapiens
  misc_RNA (1)...(19): siRNA sense strand
cggcuacuuuccagagaua

SEQ ID NO: 1494429 - RNA, 19 nt, Homo sapiens
  misc_RNA (1)...(19): siRNA sense strand
gaccauccuuuccuaccaa

SEQ ID NO: 1494430 - RNA, 19 nt, Homo sapiens
  misc_RNA (1)...(19): siRNA sense strand
caauuuacauggauuaacc

SEQ ID NO: 1494431 - RNA, 19 nt, Homo sapiens
  misc_RNA (1)...(19): siRNA sense strand
uaucugguguggaguaagu

SEQ ID NO: 1494432 - RNA, 19 nt, Homo sapiens
  misc_RNA (1)...(19): siRNA sense strand
gguggaagccaauuuacau

SEQ ID NO: 1494433 - RNA, 19 nt, Homo sapiens
  misc_RNA (1)...(19): siRNA sense strand
gggcucauuauauauguuu

SEQ ID NO: 1494434 - RNA, 19 nt, Homo sapiens
  misc_RNA (1)...(19): siRNA sense strand
caugcugacuugcucauca

SEQ ID NO: 1494435 - RNA, 19 nt, Homo sapiens
  misc_RNA (1)...(19): siRNA sense strand
ggaucagacuguuguuggu

SEQ ID NO: 1494436 - RNA, 19 nt, Homo sapiens
  misc_RNA (1)...(19): siRNA sense strand
gaucagacuguuguugguu

SEQ ID NO: 1494437 - RNA, 19 nt, Homo sapiens
  misc_RNA (1)...(19): siRNA sense strand
gugcuucacaugaucacua

SEQ ID NO: 1494438 - RNA, 19 nt, Homo sapiens
  misc_RNA (1)...(19): siRNA sense strand
guuaucugguguggaguaa

SEQ ID NO: 1494439 - RNA, 19 nt, Homo sapiens
  misc_RNA (1)...(19): siRNA sense strand
uagaacagaaacuccauug

SEQ ID NO: 1494440 - RNA, 19 nt, Homo sapiens
  misc_RNA (1)...(19): siRNA sense strand
caccuugcccuauuaacaa

SEQ ID NO: 1494441 - RNA, 19 nt, Homo sapiens
  misc_RNA (1)...(19): siRNA sense strand
cuacuuuccagagauauuu

SEQ ID NO: 1494442 - RNA, 19 nt, Homo sapiens
  misc_RNA (1)...(19): siRNA sense strand
ucagacuguuguugguuau

SEQ ID NO: 1494443 - RNA, 19 nt, Homo sapiens
  misc_RNA (1)...(19): siRNA sense strand
aucagacuguuguugguua

SEQ ID NO: 1494444 - RNA, 19 nt, Homo sapiens
  misc_RNA (1)...(19): siRNA sense strand
acugcaccuugcccuauua

SEQ ID NO: 1494445 - RNA, 19 nt, Homo sapiens
  misc_RNA (1)...(19): siRNA sense strand
gguuaucugguguggagua

SEQ ID NO: 1494446 - RNA, 19 nt, Homo sapiens
  misc_RNA (1)...(19): siRNA sense strand
cacuuagcaugcugacuug

SEQ ID NO: 1494447 - RNA, 19 nt, Homo sapiens
  misc_RNA (1)...(19): siRNA sense strand
cauccuuuccuaccaaaug

SEQ ID NO: 1494448 - RNA, 19 nt, Homo sapiens
  misc_RNA (1)...(19): siRNA sense strand
cacugcaccuugcccuauu

SEQ ID NO: 1494449 - RNA, 19 nt, Homo sapiens
  misc_RNA (1)...(19): siRNA sense strand
gggacugauuuagaacaga

SEQ ID NO: 1494450 - RNA, 19 nt, Homo sapiens
  misc_RNA (1)...(19): siRNA sense strand
gcuacuuuccagagauauu

SEQ ID NO: 1494451 - RNA, 19 nt, Homo sapiens
  misc_RNA (1)...(19): siRNA sense strand
aagccaauuuacauggauu

SEQ ID NO: 1494452 - RNA, 19 nt, Homo sapiens
  misc_RNA (1)...(19): siRNA sense strand
gcaauuuugggacugauuu

SEQ ID NO: 1494453 - RNA, 19 nt, Homo sapiens
  misc_RNA (1)...(19): siRNA sense strand
acggguggaagccaauuua

SEQ ID NO: 1494454 - RNA, 19 nt, Homo sapiens
  misc_RNA (1)...(19): siRNA sense strand
gcaagcagcuggaagauga

SEQ ID NO: 1494455 - RNA, 19 nt, Homo sapiens
  misc_RNA (1)...(19): siRNA sense strand
aagaugaacuggacaaaua

SEQ ID NO: 1494456 - RNA, 19 nt, Homo sapiens
  misc_RNA (1)...(19): siRNA sense strand
gaaaagcauugaugacuua

SEQ ID NO: 1494457 - RNA, 19 nt, Homo sapiens
  misc_RNA (1)...(19): siRNA sense strand
cgauaugacuuccauguaa

SEQ ID NO: 1494458 - RNA, 19 nt, Homo sapiens
  misc_RNA (1)...(19): siRNA sense strand
gaucagaccuugaaagcau

SEQ ID NO: 1494459 - RNA, 19 nt, Homo sapiens
  misc_RNA (1)...(19): siRNA sense strand
cgacguagcuucucugaac

SEQ ID NO: 1494460 - RNA, 19 nt, Homo sapiens
  misc_RNA (1)...(19): siRNA sense strand
gcggagaggucaguaacua

SEQ ID NO: 1494461 - RNA, 19 nt, Homo sapiens
  misc_RNA (1)...(19): siRNA sense strand
ggaccacgcucucaacgau

SEQ ID NO: 1494462 - RNA, 19 nt, Homo sapiens
  misc_RNA (1)...(19): siRNA sense strand
gagcuggugucacugcaaa

SEQ ID NO: 1494463 - RNA, 19 nt, Homo sapiens
  misc_RNA (1)...(19): siRNA sense strand
gcagaaggaagacagauau

SEQ ID NO: 1494464 - RNA, 19 nt, Homo sapiens
  misc_RNA (1)...(19): siRNA sense strand
guaagcuggucaucauuga

SEQ ID NO: 1494465 - RNA, 19 nt, Homo sapiens
  misc_RNA (1)...(19): siRNA sense strand
ggagaggucaguaacuaaa

SEQ ID NO: 1494466 - RNA, 19 nt, Homo sapiens
  misc_RNA (1)...(19): siRNA sense strand
gaaagaggcaaagcacauu

SEQ ID NO: 1494467 - RNA, 19 nt, Homo sapiens
  misc_RNA (1)...(19): siRNA sense strand
aagcauugaugacuuagaa

SEQ ID NO: 1494468 - RNA, 19 nt, Homo sapiens
  misc_RNA (1)...(19): siRNA sense strand
gagagaggcaugaaaguca

SEQ ID NO: 1494469 - RNA, 19 nt, Homo sapiens
  misc_RNA (1)...(19): siRNA sense strand
ggagcaagcagcuggaaga

SEQ ID NO: 1494470 - RNA, 19 nt, Homo sapiens
  misc_RNA (1)...(19): siRNA sense strand
gaaggcagcagaugagagu

SEQ ID NO: 1494471 - RNA, 19 nt, Homo sapiens
  misc_RNA (1)...(19): siRNA sense strand
ucaaagaugcccaggagaa

SEQ ID NO: 1494472 - RNA, 19 nt, Homo sapiens
  misc_RNA (1)...(19): siRNA sense strand
gcuggaagaacaauuaaga

SEQ ID NO: 1494473 - RNA, 19 nt, Homo sapiens
  misc_RNA (1)...(19): siRNA sense strand
gaagaugaacuggacaaau

SEQ ID NO: 1494474 - RNA, 19 nt, Homo sapiens
  misc_RNA (1)...(19): siRNA sense strand
gaaggaagacagauaugag

SEQ ID NO: 1494475 - RNA, 19 nt, Homo sapiens
  misc_RNA (1)...(19): siRNA sense strand
ggaagacagauaugaggaa

SEQ ID NO: 1494476 - RNA, 19 nt, Homo sapiens
  misc_RNA (1)...(19): siRNA sense strand
gaagaugccgaccgcaaau

SEQ ID NO: 1494477 - RNA, 19 nt, Homo sapiens
  misc_RNA (1)...(19): siRNA sense strand
agaggucaguaacuaaauu

SEQ ID NO: 1494478 - RNA, 19 nt, Homo sapiens
  misc_RNA (1)...(19): siRNA sense strand
augaagagguggcccguaa

SEQ ID NO: 1494479 - RNA, 19 nt, Homo sapiens
  misc_RNA (1)...(19): siRNA sense strand
caagggcaccgaagaugaa

SEQ ID NO: 1494480 - RNA, 19 nt, Homo sapiens
  misc_RNA (1)...(19): siRNA sense strand
aagaugagcuggugucacu

SEQ ID NO: 1494481 - RNA, 19 nt, Homo sapiens
  misc_RNA (1)...(19): siRNA sense strand
gaacuggacaaauauucug

SEQ ID NO: 1494482 - RNA, 19 nt, Homo sapiens
  misc_RNA (1)...(19): siRNA sense strand
aaauggaaauucaggagau

SEQ ID NO: 1494483 - RNA, 19 nt, Homo sapiens
  misc_RNA (1)...(19): siRNA sense strand
gcauugaugacuuagaaga

SEQ ID NO: 1494484 - RNA, 19 nt, Homo sapiens
  misc_RNA (1)...(19): siRNA sense strand
acagcuggaagaacaauua

SEQ ID NO: 1494485 - RNA, 19 nt, Homo sapiens
  misc_RNA (1)...(19): siRNA sense strand
gauaugaggaagagaucaa

SEQ ID NO: 1494486 - RNA, 19 nt, Homo sapiens
  misc_RNA (1)...(19): siRNA sense strand
gcuguacgcucagaaacug

SEQ ID NO: 1494487 - RNA, 19 nt, Homo sapiens
  misc_RNA (1)...(19): siRNA sense strand
agacagauaugaggaagag

SEQ ID NO: 1494488 - RNA, 19 nt, Homo sapiens
  misc_RNA (1)...(19): siRNA sense strand
agaagaagaugcagaugcu

SEQ ID NO: 1494489 - RNA, 19 nt, Homo sapiens
  misc_RNA (1)...(19): siRNA sense strand
ggagaacgccuuggaucga

SEQ ID NO: 1494490 - RNA, 19 nt, Homo sapiens
  misc_RNA (1)...(19): siRNA sense strand
gaugaacuggacaaauauu

SEQ ID NO: 1494491 - RNA, 19 nt, Homo sapiens
  misc_RNA (1)...(19): siRNA sense strand
ucaacgauaugacuuccau

SEQ ID NO: 1494492 - RNA, 19 nt, Homo sapiens
  misc_RNA (1)...(19): siRNA sense strand
uaauggaucagaccuugaa

SEQ ID NO: 1494493 - RNA, 19 nt, Homo sapiens
  misc_RNA (1)...(19): siRNA sense strand
gaauaauggaucagaccuu

SEQ ID NO: 1494494 - RNA, 19 nt, Homo sapiens
  misc_RNA (1)...(19): siRNA sense strand
ugaagaugccgaccgcaaa

SEQ ID NO: 1494495 - RNA, 19 nt, Homo sapiens
  misc_RNA (1)...(19): siRNA sense strand
ucaagaagaagaugcagau

SEQ ID NO: 1494496 - RNA, 19 nt, Homo sapiens
  misc_RNA (1)...(19): siRNA sense strand
gaccuugaaagcauuaaug

SEQ ID NO: 1494497 - RNA, 19 nt, Homo sapiens
  misc_RNA (1)...(19): siRNA sense strand
auuaauggcugcagaggau

SEQ ID NO: 1494498 - RNA, 19 nt, Homo sapiens
  misc_RNA (1)...(19): siRNA sense strand
ucaagggcaccgaagauga

SEQ ID NO: 1494499 - RNA, 19 nt, Homo sapiens
  misc_RNA (1)...(19): siRNA sense strand
gaggucaguaacuaaauug

SEQ ID NO: 1494500 - RNA, 19 nt, Homo sapiens
  misc_RNA (1)...(19): siRNA sense strand
ugaaagaggcaaagcacau

SEQ ID NO: 1494501 - RNA, 19 nt, Homo sapiens
  misc_RNA (1)...(19): siRNA sense strand
ugcugaagcucgacaagga

SEQ ID NO: 1494502 - RNA, 19 nt, Homo sapiens
  misc_RNA (1)...(19): siRNA sense strand
agaaggaagacagauauga

SEQ ID NO: 1494503 - RNA, 19 nt, Homo sapiens
  misc_RNA (1)...(19): siRNA sense strand
uccgacagcuggaagaaca

SEQ ID NO: 1494504 - RNA, 19 nt, Homo sapiens
  misc_RNA (1)...(19): siRNA sense strand
ggucaguaacuaaauugga

SEQ ID NO: 1494505 - RNA, 19 nt, Homo sapiens
  misc_RNA (1)...(19): siRNA sense strand
gagaggucaguaacuaaau

SEQ ID NO: 1494506 - RNA, 19 nt, Homo sapiens
  misc_RNA (1)...(19): siRNA sense strand
cccguaagcuggucaucau

SEQ ID NO: 1494507 - RNA, 19 nt, Homo sapiens
  misc_RNA (1)...(19): siRNA sense strand
gaccacgcucucaacgaua

SEQ ID NO: 1494508 - RNA, 19 nt, Homo sapiens
  misc_RNA (1)...(19): siRNA sense strand
caggagauccaacugaaag

SEQ ID NO: 1494509 - RNA, 19 nt, Homo sapiens
  misc_RNA (1)...(19): siRNA sense strand
cagcuggaagaacaauuaa

SEQ ID NO: 1494510 - RNA, 19 nt, Homo sapiens
  misc_RNA (1)...(19): siRNA sense strand
uaauggcugcagaggauaa

SEQ ID NO: 1494511 - RNA, 19 nt, Homo sapiens
  misc_RNA (1)...(19): siRNA sense strand
gacguagcuucucugaaca

SEQ ID NO: 1494512 - RNA, 19 nt, Homo sapiens
  misc_RNA (1)...(19): siRNA sense strand
cgcagaaggaagacagaua

SEQ ID NO: 1494513 - RNA, 19 nt, Homo sapiens
  misc_RNA (1)...(19): siRNA sense strand
cguaagcuggucaucauug

SEQ ID NO: 1494514 - RNA, 19 nt, Homo sapiens
  misc_RNA (1)...(19): siRNA sense strand
caaagaugcccaggagaag

SEQ ID NO: 1494515 - RNA, 19 nt, Homo sapiens
  misc_RNA (1)...(19): siRNA sense strand
gaagagguggcccguaagc

SEQ ID NO: 1494516 - RNA, 19 nt, Homo sapiens
  misc_RNA (1)...(19): siRNA sense strand
gagaaggcagcagaugaga

SEQ ID NO: 1494517 - RNA, 19 nt, Homo sapiens
  misc_RNA (1)...(19): siRNA sense strand
gagagugagagaggcauga

SEQ ID NO: 1494518 - RNA, 19 nt, Homo sapiens
  misc_RNA (1)...(19): siRNA sense strand
aggcggaggccgacaagaa

SEQ ID NO: 1494519 - RNA, 19 nt, Homo sapiens
  misc_RNA (1)...(19): siRNA sense strand
gcucucaacgauaugacuu

SEQ ID NO: 1494520 - RNA, 19 nt, Homo sapiens
  misc_RNA (1)...(19): siRNA sense strand
agaaaagcauugaugacuu

SEQ ID NO: 1494521 - RNA, 19 nt, Homo sapiens
  misc_RNA (1)...(19): siRNA sense strand
cggagaggucaguaacuaa

SEQ ID NO: 1494522 - RNA, 19 nt, Homo sapiens
  misc_RNA (1)...(19): siRNA sense strand
uaaguacucgcagaaggaa

SEQ ID NO: 1494523 - RNA, 19 nt, Homo sapiens
  misc_RNA (1)...(19): siRNA sense strand
ucagaccuugaaagcauua

SEQ ID NO: 1494524 - RNA, 19 nt, Homo sapiens
  misc_RNA (1)...(19): siRNA sense strand
ggaagaugagcugguguca

SEQ ID NO: 1494525 - RNA, 19 nt, Homo sapiens
  misc_RNA (1)...(19): siRNA sense strand
aaagaggcaaagcacauug

SEQ ID NO: 1494526 - RNA, 19 nt, Homo sapiens
  misc_RNA (1)...(19): siRNA sense strand
ggaaauucaggagauccaa

SEQ ID NO: 1494527 - RNA, 19 nt, Homo sapiens
  misc_RNA (1)...(19): siRNA sense strand
cugagaaggcagcagauga

SEQ ID NO: 1494528 - RNA, 19 nt, Homo sapiens
  misc_RNA (1)...(19): siRNA sense strand
gagugagagaggcaugaaa

SEQ ID NO: 1494529 - RNA, 19 nt, Homo sapiens
  misc_RNA (1)...(19): siRNA sense strand
gagcgucuggcaacagcuu

SEQ ID NO: 1494530 - RNA, 19 nt, Homo sapiens
  misc_RNA (1)...(19): siRNA sense strand
acagauaugaggaagagau

SEQ ID NO: 1494531 - RNA, 19 nt, Homo sapiens
  misc_RNA (1)...(19): siRNA sense strand
gagcaagcagcuggaagau

SEQ ID NO: 1494532 - RNA, 19 nt, Homo sapiens
  misc_RNA (1)...(19): siRNA sense strand
gcucucagaaggccaaguc

SEQ ID NO: 1494533 - RNA, 19 nt, Homo sapiens
  misc_RNA (1)...(19): siRNA sense strand
cgaagaugaacuggacaaa

SEQ ID NO: 1494534 - RNA, 19 nt, Homo sapiens
  misc_RNA (1)...(19): siRNA sense strand
gaugccgaccgcaaauaug

SEQ ID NO: 1494535 - RNA, 19 nt, Homo sapiens
  misc_RNA (1)...(19): siRNA sense strand
ugagaaggcagcagaugag

SEQ ID NO: 1494536 - RNA, 19 nt, Homo sapiens
  misc_RNA (1)...(19): siRNA sense strand
aagcuggucaucauugaga

SEQ ID NO: 1494537 - RNA, 19 nt, Homo sapiens
  misc_RNA (1)...(19): siRNA sense strand
agaagaugcagaugcugaa

SEQ ID NO: 1494538 - RNA, 19 nt, Homo sapiens
  misc_RNA (1)...(19): siRNA sense strand
uggcugcagaggauaagua

SEQ ID NO: 1494539 - RNA, 19 nt, Homo sapiens
  misc_RNA (1)...(19): siRNA sense strand
gcacaacucgucgcucuuc

SEQ ID NO: 1494540 - RNA, 19 nt, Homo sapiens
  misc_RNA (1)...(19): siRNA sense strand
acaacaaaguggcuucagu

SEQ ID NO: 1494541 - RNA, 19 nt, Homo sapiens
  misc_RNA (1)...(19): siRNA sense strand
ggacaacaaaguggcuuca

SEQ ID NO: 1494542 - RNA, 19 nt, Homo sapiens
  misc_RNA (1)...(19): siRNA sense strand
gggccgaggacaacaaagu

SEQ ID NO: 1494543 - RNA, 19 nt, Homo sapiens
  misc_RNA (1)...(19): siRNA sense strand
gcucacaggugcuggaguu

SEQ ID NO: 1494544 - RNA, 19 nt, Homo sapiens
  misc_RNA (1)...(19): siRNA sense strand
gcacaacucgucgcucuuc

SEQ ID NO: 1494545 - RNA, 19 nt, Homo sapiens
  misc_RNA (1)...(19): siRNA sense strand
acaacaaaguggcuucagu

SEQ ID NO: 1494546 - RNA, 19 nt, Homo sapiens
  misc_RNA (1)...(19): siRNA sense strand
cacaggugcuggaguugga

SEQ ID NO: 1494547 - RNA, 19 nt, Homo sapiens
  misc_RNA (1)...(19): siRNA sense strand
ggacaacaaaguggcuuca

SEQ ID NO: 1494548 - RNA, 19 nt, Homo sapiens
  misc_RNA (1)...(19): siRNA sense strand
gggccgaggacaacaaagu

SEQ ID NO: 1494549 - RNA, 19 nt, Homo sapiens
  misc_RNA (1)...(19): siRNA sense strand
gaaccaagcgcugaauuua

SEQ ID NO: 1494550 - RNA, 19 nt, Homo sapiens
  misc_RNA (1)...(19): siRNA sense strand
gaacaucacuuuccaaacg

SEQ ID NO: 1494551 - RNA, 19 nt, Homo sapiens
  misc_RNA (1)...(19): siRNA sense strand
ggagaaacauggagcaguu

SEQ ID NO: 1494552 - RNA, 19 nt, Homo sapiens
  misc_RNA (1)...(19): siRNA sense strand
caagagcagucucaaguug

SEQ ID NO: 1494553 - RNA, 19 nt, Homo sapiens
  misc_RNA (1)...(19): siRNA sense strand
gaacaaggccaggagcuuu

SEQ ID NO: 1494554 - RNA, 19 nt, Homo sapiens
  misc_RNA (1)...(19): siRNA sense strand
ccaagaagaggauggaaua

SEQ ID NO: 1494555 - RNA, 19 nt, Homo sapiens
  misc_RNA (1)...(19): siRNA sense strand
ccaggagcauccagaauaa

SEQ ID NO: 1494556 - RNA, 19 nt, Homo sapiens
  misc_RNA (1)...(19): siRNA sense strand
ccaaguauaucuuccacaa

SEQ ID NO: 1494557 - RNA, 19 nt, Homo sapiens
  misc_RNA (1)...(19): siRNA sense strand
gaaaguagaaacaggaaug

SEQ ID NO: 1494558 - RNA, 19 nt, Homo sapiens
  misc_RNA (1)...(19): siRNA sense strand
ccuuugagcuggucuauga

SEQ ID NO: 1494559 - RNA, 19 nt, Homo sapiens
  misc_RNA (1)...(19): siRNA sense strand
gcgcugaauuuaucacuug

SEQ ID NO: 1494560 - RNA, 19 nt, Homo sapiens
  misc_RNA (1)...(19): siRNA sense strand
ggaaccaagcgcugaauuu

SEQ ID NO: 1494561 - RNA, 19 nt, Homo sapiens
  misc_RNA (1)...(19): siRNA sense strand
gaagaaacaaccaugacaa

SEQ ID NO: 1494562 - RNA, 19 nt, Homo sapiens
  misc_RNA (1)...(19): siRNA sense strand
aaacaggaauguccacuca

SEQ ID NO: 1494563 - RNA, 19 nt, Homo sapiens
  misc_RNA (1)...(19): siRNA sense strand
gcugauggcugugcaguug

SEQ ID NO: 1494564 - RNA, 19 nt, Homo sapiens
  misc_RNA (1)...(19): siRNA sense strand
agauggagcugcccaagaa

SEQ ID NO: 1494565 - RNA, 19 nt, Homo sapiens
  misc_RNA (1)...(19): siRNA sense strand
gagaacggcuacuuuguac

SEQ ID NO: 1494566 - RNA, 19 nt, Homo sapiens
  misc_RNA (1)...(19): siRNA sense strand
gggaagcccuaaucaagau

SEQ ID NO: 1494567 - RNA, 19 nt, Homo sapiens
  misc_RNA (1)...(19): siRNA sense strand
uaaccacaaugcccaagaa

SEQ ID NO: 1494568 - RNA, 19 nt, Homo sapiens
  misc_RNA (1)...(19): siRNA sense strand
gggcauaccugacuaucca

SEQ ID NO: 1494569 - RNA, 19 nt, Homo sapiens
  misc_RNA (1)...(19): siRNA sense strand
cgagaacggcuacuuugua

SEQ ID NO: 1494570 - RNA, 19 nt, Homo sapiens
  misc_RNA (1)...(19): siRNA sense strand
ccacaaugcccaagaaugu

SEQ ID NO: 1494571 - RNA, 19 nt, Homo sapiens
  misc_RNA (1)...(19): siRNA sense strand
gaucgagaacggcuacuuu

SEQ ID NO: 1494572 - RNA, 19 nt, Homo sapiens
  misc_RNA (1)...(19): siRNA sense strand
guuccacuuucuucaaaua

SEQ ID NO: 1494573 - RNA, 19 nt, Homo sapiens
  misc_RNA (1)...(19): siRNA sense strand
ccacucagguuccacuuuc

SEQ ID NO: 1494574 - RNA, 19 nt, Homo sapiens
  misc_RNA (1)...(19): siRNA sense strand
cgaagaagcucugcguaca

SEQ ID NO: 1494575 - RNA, 19 nt, Homo sapiens
  misc_RNA (1)...(19): siRNA sense strand
acagagagcaccuucauga

SEQ ID NO: 1494576 - RNA, 19 nt, Homo sapiens
  misc_RNA (1)...(19): siRNA sense strand
ucacgccucucacaucuau

SEQ ID NO: 1494577 - RNA, 19 nt, Homo sapiens
  misc_RNA (1)...(19): siRNA sense strand
cuacacagaacaucacuuu

SEQ ID NO: 1494578 - RNA, 19 nt, Homo sapiens
  misc_RNA (1)...(19): siRNA sense strand
ucaagcaccugcagaugga

SEQ ID NO: 1494579 - RNA, 19 nt, Homo sapiens
  misc_RNA (1)...(19): siRNA sense strand
gaagaagcucugcguacaa

SEQ ID NO: 1494580 - RNA, 19 nt, Homo sapiens
  misc_RNA (1)...(19): siRNA sense strand
gugggaagcugccuacaca

SEQ ID NO: 1494581 - RNA, 19 nt, Homo sapiens
  misc_RNA (1)...(19): siRNA sense strand
ucacuugccuacagcuuug

SEQ ID NO: 1494582 - RNA, 19 nt, Homo sapiens
  misc_RNA (1)...(19): siRNA sense strand
agaauggcaucgacaucua

SEQ ID NO: 1494583 - RNA, 19 nt, Homo sapiens
  misc_RNA (1)...(19): siRNA sense strand
uggaggaggucacucagaa

SEQ ID NO: 1494584 - RNA, 19 nt, Homo sapiens
  misc_RNA (1)...(19): siRNA sense strand
ggaagcugccuacacagaa

SEQ ID NO: 1494585 - RNA, 19 nt, Homo sapiens
  misc_RNA (1)...(19): siRNA sense strand
cagugaaccugcucucaga

SEQ ID NO: 1494586 - RNA, 19 nt, Homo sapiens
  misc_RNA (1)...(19): siRNA sense strand
cccaggagcauccagaaua

SEQ ID NO: 1494587 - RNA, 19 nt, Homo sapiens
  misc_RNA (1)...(19): siRNA sense strand
cagaacaucacuuuccaaa

SEQ ID NO: 1494588 - RNA, 19 nt, Homo sapiens
  misc_RNA (1)...(19): siRNA sense strand
ggagggaccaacaucaaug

SEQ ID NO: 1494589 - RNA, 19 nt, Homo sapiens
  misc_RNA (1)...(19): siRNA sense strand
gcuggucuguggagcugua

SEQ ID NO: 1494590 - RNA, 19 nt, Homo sapiens
  misc_RNA (1)...(19): siRNA sense strand
gcucagugacccagacaaa

SEQ ID NO: 1494591 - RNA, 19 nt, Homo sapiens
  misc_RNA (1)...(19): siRNA sense strand
uguacgagcugcugcugaa

SEQ ID NO: 1494592 - RNA, 19 nt, Homo sapiens
  misc_RNA (1)...(19): siRNA sense strand
gagagcgcaggcuggauua

SEQ ID NO: 1494593 - RNA, 19 nt, Homo sapiens
  misc_RNA (1)...(19): siRNA sense strand
gaagcugccuacacagaac

SEQ ID NO: 1494594 - RNA, 19 nt, Homo sapiens
  misc_RNA (1)...(19): siRNA sense strand
gcuaugccuuccuggagaa

SEQ ID NO: 1494595 - RNA, 19 nt, Homo sapiens
  misc_RNA (1)...(19): siRNA sense strand
ggacggcaaccucauuauc

SEQ ID NO: 1494596 - RNA, 19 nt, Homo sapiens
  misc_RNA (1)...(19): siRNA sense strand
ugacagcagugaccuucga

SEQ ID NO: 1494597 - RNA, 19 nt, Homo sapiens
  misc_RNA (1)...(19): siRNA sense strand
cagcagugaccuucgagua

SEQ ID NO: 1494598 - RNA, 19 nt, Homo sapiens
  misc_RNA (1)...(19): siRNA sense strand
caaacccgaugaccaagag

SEQ ID NO: 1494599 - RNA, 19 nt, Homo sapiens
  misc_RNA (1)...(19): siRNA sense strand
ggaggucacucagaacaac

SEQ ID NO: 1494600 - RNA, 19 nt, Homo sapiens
  misc_RNA (1)...(19): siRNA sense strand
agaaagccuucaucaccaa

SEQ ID NO: 1494601 - RNA, 19 nt, Homo sapiens
  misc_RNA (1)...(19): siRNA sense strand
gaagcucugcguacaagug

SEQ ID NO: 1494602 - RNA, 19 nt, Homo sapiens
  misc_RNA (1)...(19): siRNA sense strand
ucaauagggccaauacugu

SEQ ID NO: 1494603 - RNA, 19 nt, Homo sapiens
  misc_RNA (1)...(19): siRNA sense strand
gagggaccaacaucaauga

SEQ ID NO: 1494604 - RNA, 19 nt, Homo sapiens
  misc_RNA (1)...(19): siRNA sense strand
accaagcgcugaauuuauc

SEQ ID NO: 1494605 - RNA, 19 nt, Homo sapiens
  misc_RNA (1)...(19): siRNA sense strand
gaagaggauggaauagaca

SEQ ID NO: 1494606 - RNA, 19 nt, Homo sapiens
  misc_RNA (1)...(19): siRNA sense strand
agaagaggauggaauagac

SEQ ID NO: 1494607 - RNA, 19 nt, Homo sapiens
  misc_RNA (1)...(19): siRNA sense strand
gggaagcugccuacacaga

SEQ ID NO: 1494608 - RNA, 19 nt, Homo sapiens
  misc_RNA (1)...(19): siRNA sense strand
gaagaugaccauggacaag

SEQ ID NO: 1494609 - RNA, 19 nt, Homo sapiens
  misc_RNA (1)...(19): siRNA sense strand
guccguaccugcagcaaag

SEQ ID NO: 1494610 - RNA, 19 nt, Homo sapiens
  misc_RNA (1)...(19): siRNA sense strand
caccaaacccgaugaccaa

SEQ ID NO: 1494611 - RNA, 19 nt, Homo sapiens
  misc_RNA (1)...(19): siRNA sense strand
gaacggcuacuuuguacac

SEQ ID NO: 1494612 - RNA, 19 nt, Homo sapiens
  misc_RNA (1)...(19): siRNA sense strand
ugucucgugucaugaauau

SEQ ID NO: 1494613 - RNA, 19 nt, Homo sapiens
  misc_RNA (1)...(19): siRNA sense strand
ggaggccaccuuccagaug

SEQ ID NO: 1494614 - RNA, 19 nt, Homo sapiens
  misc_RNA (1)...(19): siRNA sense strand
gcucacagccacagucagu

SEQ ID NO: 1494615 - RNA, 19 nt, Homo sapiens
  misc_RNA (1)...(19): siRNA sense strand
caaccucauuauccgcuau

SEQ ID NO: 1494616 - RNA, 19 nt, Homo sapiens
  misc_RNA (1)...(19): siRNA sense strand
gccugaagaugaccaugga

SEQ ID NO: 1494617 - RNA, 19 nt, Homo sapiens
  misc_RNA (1)...(19): siRNA sense strand
ccaagagcagucucaaguu

SEQ ID NO: 1494618 - RNA, 19 nt, Homo sapiens
  misc_RNA (1)...(19): siRNA sense strand
aaguauaucuuccacaacu

SEQ ID NO: 1494619 - RNA, 19 nt, Homo sapiens
  misc_RNA (1)...(19): siRNA sense strand
cgaagaaacaaccaugaca

SEQ ID NO: 1494620 - RNA, 19 nt, Homo sapiens
  misc_RNA (1)...(19): siRNA sense strand
gaaggcgaaaguagaaaca

SEQ ID NO: 1494621 - RNA, 19 nt, Homo sapiens
  misc_RNA (1)...(19): siRNA sense strand
augccaagaucaccuuuga

SEQ ID NO: 1494622 - RNA, 19 nt, Homo sapiens
  misc_RNA (1)...(19): siRNA sense strand
gaggaggucacucagaaca

SEQ ID NO: 1494623 - RNA, 19 nt, Homo sapiens
  misc_RNA (1)...(19): siRNA sense strand
cucaccaccuggcagaaua

SEQ ID NO: 1494624 - RNA, 19 nt, Homo sapiens
  misc_RNA (1)...(19): siRNA sense strand
cauggaaggcgaaaguaga

SEQ ID NO: 1494625 - RNA, 19 nt, Homo sapiens
  misc_RNA (1)...(19): siRNA sense strand
ucaccaacuucuccaugau

SEQ ID NO: 1494626 - RNA, 19 nt, Homo sapiens
  misc_RNA (1)...(19): siRNA sense strand
gaagcuggcacuggacaau

SEQ ID NO: 1494627 - RNA, 19 nt, Homo sapiens
  misc_RNA (1)...(19): siRNA sense strand
gcaccuucaugaccaacca

SEQ ID NO: 1494628 - RNA, 19 nt, Homo sapiens
  misc_RNA (1)...(19): siRNA sense strand
ccagcugugucucguguca

SEQ ID NO: 1494629 - RNA, 19 nt, Homo sapiens
  misc_RNA (1)...(19): siRNA sense strand
caacuuccggcuccucuuc

SEQ ID NO: 1494630 - RNA, 19 nt, Homo sapiens
  misc_RNA (1)...(19): siRNA sense strand
uaacgugcgggaagcugua

SEQ ID NO: 1494631 - RNA, 19 nt, Homo sapiens
  misc_RNA (1)...(19): siRNA sense strand
cagggucucaucccgauuu

SEQ ID NO: 1494632 - RNA, 19 nt, Homo sapiens
  misc_RNA (1)...(19): siRNA sense strand
acccagggaucaucaagga

SEQ ID NO: 1494633 - RNA, 19 nt, Homo sapiens
  misc_RNA (1)...(19): siRNA sense strand
ccgagggccuaaccacaau

SEQ ID NO: 1494634 - RNA, 19 nt, Homo sapiens
  misc_RNA (1)...(19): siRNA sense strand
agagagcgcaggcuggauu

SEQ ID NO: 1494635 - RNA, 19 nt, Homo sapiens
  misc_RNA (1)...(19): siRNA sense strand
gaccaucggccuguuguuc

SEQ ID NO: 1494636 - RNA, 19 nt, Homo sapiens
  misc_RNA (1)...(19): siRNA sense strand
ucagugacccagacaaagu

SEQ ID NO: 1494637 - RNA, 19 nt, Homo sapiens
  misc_RNA (1)...(19): siRNA sense strand
cgggaagcccuaaucaaga

SEQ ID NO: 1494638 - RNA, 19 nt, Homo sapiens
  misc_RNA (1)...(19): siRNA sense strand
aagaagcucugcguacaag

SEQ ID NO: 1494639 - RNA, 19 nt, Homo sapiens
  misc_RNA (1)...(19): siRNA sense strand
gcgaaaguagaaacaggaa

SEQ ID NO: 1494640 - RNA, 19 nt, Homo sapiens
  misc_RNA (1)...(19): siRNA sense strand
guauaucuuccacaacuuc

SEQ ID NO: 1494641 - RNA, 19 nt, Homo sapiens
  misc_RNA (1)...(19): siRNA sense strand
caacuucuccaugaucauc

SEQ ID NO: 1494642 - RNA, 19 nt, Homo sapiens
  misc_RNA (1)...(19): siRNA sense strand
gggagggaccaacaucaau

SEQ ID NO: 1494643 - RNA, 19 nt, Homo sapiens
  misc_RNA (1)...(19): siRNA sense strand
cuacuuuguacacuacuuu

SEQ ID NO: 1494644 - RNA, 19 nt, Homo sapiens
  misc_RNA (1)...(19): siRNA sense strand
cagggaucaucaaggagaa

SEQ ID NO: 1494645 - RNA, 19 nt, Homo sapiens
  misc_RNA (1)...(19): siRNA sense strand
cagcaguggccaagggaaa

SEQ ID NO: 1494646 - RNA, 19 nt, Homo sapiens
  misc_RNA (1)...(19): siRNA sense strand
cacagaacaucacuuucca

SEQ ID NO: 1494647 - RNA, 19 nt, Homo sapiens
  misc_RNA (1)...(19): siRNA sense strand
gagaccaguucaaccucau

SEQ ID NO: 1494648 - RNA, 19 nt, Homo sapiens
  misc_RNA (1)...(19): siRNA sense strand
ucagggcaaugaccacucu

SEQ ID NO: 1494649 - RNA, 19 nt, Homo sapiens
  misc_RNA (1)...(19): siRNA sense strand
cccauaaacucguguguua

SEQ ID NO: 1494650 - RNA, 19 nt, Homo sapiens
  misc_RNA (1)...(19): siRNA sense strand
cuaaggaucuccaggauga

SEQ ID NO: 1494651 - RNA, 19 nt, Homo sapiens
  misc_RNA (1)...(19): siRNA sense strand
gaugugcgcuuucuaggaa

SEQ ID NO: 1494652 - RNA, 19 nt, Homo sapiens
  misc_RNA (1)...(19): siRNA sense strand
gaaacuguaucccuuggaa

SEQ ID NO: 1494653 - RNA, 19 nt, Homo sapiens
  misc_RNA (1)...(19): siRNA sense strand
ucacugagauccacggaaa

SEQ ID NO: 1494654 - RNA, 19 nt, Homo sapiens
  misc_RNA (1)...(19): siRNA sense strand
uaacuugggucuucagaug

SEQ ID NO: 1494655 - RNA, 19 nt, Homo sapiens
  misc_RNA (1)...(19): siRNA sense strand
uacaaggcaugguuuauaa

SEQ ID NO: 1494656 - RNA, 19 nt, Homo sapiens
  misc_RNA (1)...(19): siRNA sense strand
gaacaaacuccucuagcuu

SEQ ID NO: 1494657 - RNA, 19 nt, Homo sapiens
  misc_RNA (1)...(19): siRNA sense strand
ucaucaaugucuugucuua

SEQ ID NO: 1494658 - RNA, 19 nt, Homo sapiens
  misc_RNA (1)...(19): siRNA sense strand
aagaagcacuggauugauu

SEQ ID NO: 1494659 - RNA, 19 nt, Homo sapiens
  misc_RNA (1)...(19): siRNA sense strand
ggaaguacaccaagcaaga

SEQ ID NO: 1494660 - RNA, 19 nt, Homo sapiens
  misc_RNA (1)...(19): siRNA sense strand
caaguccucuuucucuaaa

SEQ ID NO: 1494661 - RNA, 19 nt, Homo sapiens
  misc_RNA (1)...(19): siRNA sense strand
ggaacaaacuccucuagcu

SEQ ID NO: 1494662 - RNA, 19 nt, Homo sapiens
  misc_RNA (1)...(19): siRNA sense strand
caacuucuuuaccacaauu

SEQ ID NO: 1494663 - RNA, 19 nt, Homo sapiens
  misc_RNA (1)...(19): siRNA sense strand
gaaagguucacaggacaua

SEQ ID NO: 1494664 - RNA, 19 nt, Homo sapiens
  misc_RNA (1)...(19): siRNA sense strand
ggacauuggacauggauga

SEQ ID NO: 1494665 - RNA, 19 nt, Homo sapiens
  misc_RNA (1)...(19): siRNA sense strand
ccucaaagccucuaagaau

SEQ ID NO: 1494666 - RNA, 19 nt, Homo sapiens
  misc_RNA (1)...(19): siRNA sense strand
gcuaugaauuauuggagaa

SEQ ID NO: 1494667 - RNA, 19 nt, Homo sapiens
  misc_RNA (1)...(19): siRNA sense strand
gccaucagcuucaguuaca

SEQ ID NO: 1494668 - RNA, 19 nt, Homo sapiens
  misc_RNA (1)...(19): siRNA sense strand
uaaaggagaggaacagaga

SEQ ID NO: 1494669 - RNA, 19 nt, Homo sapiens
  misc_RNA (1)...(19): siRNA sense strand
gaagacuccuggauuucau

SEQ ID NO: 1494670 - RNA, 19 nt, Homo sapiens
  misc_RNA (1)...(19): siRNA sense strand
gaggacacaugacuuugau

SEQ ID NO: 1494671 - RNA, 19 nt, Homo sapiens
  misc_RNA (1)...(19): siRNA sense strand
gcacccaccugauauuugc

SEQ ID NO: 1494672 - RNA, 19 nt, Homo sapiens
  misc_RNA (1)...(19): siRNA sense strand
gcugucaucugcugugaau

SEQ ID NO: 1494673 - RNA, 19 nt, Homo sapiens
  misc_RNA (1)...(19): siRNA sense strand
ucaaugucuugucuuauga

SEQ ID NO: 1494674 - RNA, 19 nt, Homo sapiens
  misc_RNA (1)...(19): siRNA sense strand
cgaagaagcacuggauuga

SEQ ID NO: 1494675 - RNA, 19 nt, Homo sapiens
  misc_RNA (1)...(19): siRNA sense strand
ucaaacaaguccucuuucu

SEQ ID NO: 1494676 - RNA, 19 nt, Homo sapiens
  misc_RNA (1)...(19): siRNA sense strand
gaaguacaccaagcaagaa

SEQ ID NO: 1494677 - RNA, 19 nt, Homo sapiens
  misc_RNA (1)...(19): siRNA sense strand
gcauggaccacugauagua

SEQ ID NO: 1494678 - RNA, 19 nt, Homo sapiens
  misc_RNA (1)...(19): siRNA sense strand
caucugcugugaauucuuc

SEQ ID NO: 1494679 - RNA, 19 nt, Homo sapiens
  misc_RNA (1)...(19): siRNA sense strand
uuacaaggcaugguuuaua

SEQ ID NO: 1494680 - RNA, 19 nt, Homo sapiens
  misc_RNA (1)...(19): siRNA sense strand
gaaagaguggguuggcuau

SEQ ID NO: 1494681 - RNA, 19 nt, Homo sapiens
  misc_RNA (1)...(19): siRNA sense strand
gaacuuuggcaccucaaga

SEQ ID NO: 1494682 - RNA, 19 nt, Homo sapiens
  misc_RNA (1)...(19): siRNA sense strand
agaagacccugaccucugu

SEQ ID NO: 1494683 - RNA, 19 nt, Homo sapiens
  misc_RNA (1)...(19): siRNA sense strand
gaccacugauaguaagauu

SEQ ID NO: 1494684 - RNA, 19 nt, Homo sapiens
  misc_RNA (1)...(19): siRNA sense strand
aaacucguguguuauuuca

SEQ ID NO: 1494685 - RNA, 19 nt, Homo sapiens
  misc_RNA (1)...(19): siRNA sense strand
cuucuuauauccuggacua

SEQ ID NO: 1494686 - RNA, 19 nt, Homo sapiens
  misc_RNA (1)...(19): siRNA sense strand
ggaagacuccuggauuuca

SEQ ID NO: 1494687 - RNA, 19 nt, Homo sapiens
  misc_RNA (1)...(19): siRNA sense strand
gcgaagaagcacuggauug

SEQ ID NO: 1494688 - RNA, 19 nt, Homo sapiens
  misc_RNA (1)...(19): siRNA sense strand
aaacaaguccucuuucucu

SEQ ID NO: 1494689 - RNA, 19 nt, Homo sapiens
  misc_RNA (1)...(19): siRNA sense strand
ggacuuuucucuucuuaau

SEQ ID NO: 1494690 - RNA, 19 nt, Homo sapiens
  misc_RNA (1)...(19): siRNA sense strand
ccucaaacaaguccucuuu

SEQ ID NO: 1494691 - RNA, 19 nt, Homo sapiens
  misc_RNA (1)...(19): siRNA sense strand
aaagcacacuguagcucua

SEQ ID NO: 1494692 - RNA, 19 nt, Homo sapiens
  misc_RNA (1)...(19): siRNA sense strand
ccucaagauucaccacuau

SEQ ID NO: 1494693 - RNA, 19 nt, Homo sapiens
  misc_RNA (1)...(19): siRNA sense strand
gagauuuguuccuuugucu

SEQ ID NO: 1494694 - RNA, 19 nt, Homo sapiens
  misc_RNA (1)...(19): siRNA sense strand
ucaaugaacaacaaucaga

SEQ ID NO: 1494695 - RNA, 19 nt, Homo sapiens
  misc_RNA (1)...(19): siRNA sense strand
aagaguggguuggcuauga

SEQ ID NO: 1494696 - RNA, 19 nt, Homo sapiens
  misc_RNA (1)...(19): siRNA sense strand
uugaagagcuccuguuugc

SEQ ID NO: 1494697 - RNA, 19 nt, Homo sapiens
  misc_RNA (1)...(19): siRNA sense strand
cucaaagccucuaagaaug

SEQ ID NO: 1494698 - RNA, 19 nt, Homo sapiens
  misc_RNA (1)...(19): siRNA sense strand
ggguugggcugguucuugu

SEQ ID NO: 1494699 - RNA, 19 nt, Homo sapiens
  misc_RNA (1)...(19): siRNA sense strand
gagcgaagaagcacuggau

SEQ ID NO: 1494700 - RNA, 19 nt, Homo sapiens
  misc_RNA (1)...(19): siRNA sense strand
caagauucaccacuauguu

SEQ ID NO: 1494701 - RNA, 19 nt, Homo sapiens
  misc_RNA (1)...(19): siRNA sense strand
ccauuccucugucaacuca

SEQ ID NO: 1494702 - RNA, 19 nt, Homo sapiens
  misc_RNA (1)...(19): siRNA sense strand
ggagagaagacugagauca

SEQ ID NO: 1494703 - RNA, 19 nt, Homo sapiens
  misc_RNA (1)...(19): siRNA sense strand
gucuacguauugaaugaua

SEQ ID NO: 1494704 - RNA, 19 nt, Homo sapiens
  misc_RNA (1)...(19): siRNA sense strand
gaagaagcacuggauugau

SEQ ID NO: 1494705 - RNA, 19 nt, Homo sapiens
  misc_RNA (1)...(19): siRNA sense strand
ccacacaucguccaaacau

SEQ ID NO: 1494706 - RNA, 19 nt, Homo sapiens
  misc_RNA (1)...(19): siRNA sense strand
agaagcacuggauugauua

SEQ ID NO: 1494707 - RNA, 19 nt, Homo sapiens
  misc_RNA (1)...(19): siRNA sense strand
ucucugcacccaccugaua

SEQ ID NO: 1494708 - RNA, 19 nt, Homo sapiens
  misc_RNA (1)...(19): siRNA sense strand
gaacagagagcugaaaaca

SEQ ID NO: 1494709 - RNA, 19 nt, Homo sapiens
  misc_RNA (1)...(19): siRNA sense strand
aacaaacuccucuagcuuu

SEQ ID NO: 1494710 - RNA, 19 nt, Homo sapiens
  misc_RNA (1)...(19): siRNA sense strand
cauggaccacugauaguaa

SEQ ID NO: 1494711 - RNA, 19 nt, Homo sapiens
  misc_RNA (1)...(19): siRNA sense strand
cagcaucuccagggaagua

SEQ ID NO: 1494712 - RNA, 19 nt, Homo sapiens
  misc_RNA (1)...(19): siRNA sense strand
caccugauauuugccuuug

SEQ ID NO: 1494713 - RNA, 19 nt, Homo sapiens
  misc_RNA (1)...(19): siRNA sense strand
acaaguccucuuucucuaa

SEQ ID NO: 1494714 - RNA, 19 nt, Homo sapiens
  misc_RNA (1)...(19): siRNA sense strand
agacugagacccuuagaca

SEQ ID NO: 1494715 - RNA, 19 nt, Homo sapiens
  misc_RNA (1)...(19): siRNA sense strand
gaaaaugccaucagcuuca

SEQ ID NO: 1494716 - RNA, 19 nt, Homo sapiens
  misc_RNA (1)...(19): siRNA sense strand
agaguggguuggcuaugaa

SEQ ID NO: 1494717 - RNA, 19 nt, Homo sapiens
  misc_RNA (1)...(19): siRNA sense strand
ggauugauuaccaguaugu

SEQ ID NO: 1494718 - RNA, 19 nt, Homo sapiens
  misc_RNA (1)...(19): siRNA sense strand
ugaggacacaugacuuuga

SEQ ID NO: 1494719 - RNA, 19 nt, Homo sapiens
  misc_RNA (1)...(19): siRNA sense strand
uuacauggaaguugggaaa

SEQ ID NO: 1494720 - RNA, 19 nt, Homo sapiens
  misc_RNA (1)...(19): siRNA sense strand
gcugcugucugcugcuguu

SEQ ID NO: 1494721 - RNA, 19 nt, Homo sapiens
  misc_RNA (1)...(19): siRNA sense strand
aacaaguccucuuucucua

SEQ ID NO: 1494722 - RNA, 19 nt, Homo sapiens
  misc_RNA (1)...(19): siRNA sense strand
ucagauuguugcuaaggau

SEQ ID NO: 1494723 - RNA, 19 nt, Homo sapiens
  misc_RNA (1)...(19): siRNA sense strand
aucaaugucuugucuuaug

SEQ ID NO: 1494724 - RNA, 19 nt, Homo sapiens
  misc_RNA (1)...(19): siRNA sense strand
aaacucugcuguggaucaa

SEQ ID NO: 1494725 - RNA, 19 nt, Homo sapiens
  misc_RNA (1)...(19): siRNA sense strand
gaaaccauuccucugucaa

SEQ ID NO: 1494726 - RNA, 19 nt, Homo sapiens
  misc_RNA (1)...(19): siRNA sense strand
ucugaggacacaugacuuu

SEQ ID NO: 1494727 - RNA, 19 nt, Homo sapiens
  misc_RNA (1)...(19): siRNA sense strand
gagagaagacugagaucac

SEQ ID NO: 1494728 - RNA, 19 nt, Homo sapiens
  misc_RNA (1)...(19): siRNA sense strand
ccacugauaguaagauuuu

SEQ ID NO: 1494729 - RNA, 19 nt, Homo sapiens
  misc_RNA (1)...(19): siRNA sense strand
uuauaaggcgagagcauuu

SEQ ID NO: 1494730 - RNA, 19 nt, Homo sapiens
  misc_RNA (1)...(19): siRNA sense strand
uuugagauuuguuccuuug

SEQ ID NO: 1494731 - RNA, 19 nt, Homo sapiens
  misc_RNA (1)...(19): siRNA sense strand
ucaagauucaccacuaugu

SEQ ID NO: 1494732 - RNA, 19 nt, Homo sapiens
  misc_RNA (1)...(19): siRNA sense strand
ccgcuuuguucccaucuau

SEQ ID NO: 1494733 - RNA, 19 nt, Homo sapiens
  misc_RNA (1)...(19): siRNA sense strand
ugucaucugcugugaauuc

SEQ ID NO: 1494734 - RNA, 19 nt, Homo sapiens
  misc_RNA (1)...(19): siRNA sense strand
ugagauuuguuccuuuguc

SEQ ID NO: 1494735 - RNA, 19 nt, Homo sapiens
  misc_RNA (1)...(19): siRNA sense strand
ucaaagccucuaagaaugg

SEQ ID NO: 1494736 - RNA, 19 nt, Homo sapiens
  misc_RNA (1)...(19): siRNA sense strand
gccuuugccucaaugaaca

SEQ ID NO: 1494737 - RNA, 19 nt, Homo sapiens
  misc_RNA (1)...(19): siRNA sense strand
acugagacccuuagacaga

SEQ ID NO: 1494738 - RNA, 19 nt, Homo sapiens
  misc_RNA (1)...(19): siRNA sense strand
uuaccaguaugucccguau

SEQ ID NO: 1494739 - RNA, 19 nt, Homo sapiens
  misc_RNA (1)...(19): siRNA sense strand
uaaacucguguguuauuuc

SEQ ID NO: 1494740 - RNA, 19 nt, Homo sapiens
  misc_RNA (1)...(19): siRNA sense strand
ggauuucaucaaugucuug

SEQ ID NO: 1494741 - RNA, 19 nt, Homo sapiens
  misc_RNA (1)...(19): siRNA sense strand
aagauucaccacuauguug

SEQ ID NO: 1494742 - RNA, 19 nt, Homo sapiens
  misc_RNA (1)...(19): siRNA sense strand
gccaugguguggacauugg

SEQ ID NO: 1494743 - RNA, 19 nt, Homo sapiens
  misc_RNA (1)...(19): siRNA sense strand
caaacaaguccucuuucuc

SEQ ID NO: 1494744 - RNA, 19 nt, Homo sapiens
  misc_RNA (1)...(19): siRNA sense strand
ucauccagcucccggaaca

SEQ ID NO: 1494745 - RNA, 19 nt, Homo sapiens
  misc_RNA (1)...(19): siRNA sense strand
gcacacuguagcucuagga

SEQ ID NO: 1494746 - RNA, 19 nt, Homo sapiens
  misc_RNA (1)...(19): siRNA sense strand
ugagauccacggaaagugu

SEQ ID NO: 1494747 - RNA, 19 nt, Homo sapiens
  misc_RNA (1)...(19): siRNA sense strand
acagagagcugaaaacacu

SEQ ID NO: 1494748 - RNA, 19 nt, Homo sapiens
  misc_RNA (1)...(19): siRNA sense strand
cggcauggaccacugauag

SEQ ID NO: 1494749 - RNA, 19 nt, Homo sapiens
  misc_RNA (1)...(19): siRNA sense strand
gaagaaaucuggaccuuga

SEQ ID NO: 1494750 - RNA, 19 nt, Homo sapiens
  misc_RNA (1)...(19): siRNA sense strand
ggaaggaggugcucaagaa

SEQ ID NO: 1494751 - RNA, 19 nt, Homo sapiens
  misc_RNA (1)...(19): siRNA sense strand
ggaagagaaccacaaauua

SEQ ID NO: 1494752 - RNA, 19 nt, Homo sapiens
  misc_RNA (1)...(19): siRNA sense strand
cuaaggaagucauuaagua

SEQ ID NO: 1494753 - RNA, 19 nt, Homo sapiens
  misc_RNA (1)...(19): siRNA sense strand
ucaaagaggugacuaagga

SEQ ID NO: 1494754 - RNA, 19 nt, Homo sapiens
  misc_RNA (1)...(19): siRNA sense strand
agaagaaccugcuagauga

SEQ ID NO: 1494755 - RNA, 19 nt, Homo sapiens
  misc_RNA (1)...(19): siRNA sense strand
gaacaucaccaacgagcua

SEQ ID NO: 1494756 - RNA, 19 nt, Homo sapiens
  misc_RNA (1)...(19): siRNA sense strand
gaucgaaaggugugauuua

SEQ ID NO: 1494757 - RNA, 19 nt, Homo sapiens
  misc_RNA (1)...(19): siRNA sense strand
gaaggcagcugggagcaaa

SEQ ID NO: 1494758 - RNA, 19 nt, Homo sapiens
  misc_RNA (1)...(19): siRNA sense strand
cauaacaucuuccacaaug

SEQ ID NO: 1494759 - RNA, 19 nt, Homo sapiens
  misc_RNA (1)...(19): siRNA sense strand
ggacaaagaccucgagauc

SEQ ID NO: 1494760 - RNA, 19 nt, Homo sapiens
  misc_RNA (1)...(19): siRNA sense strand
agaaggugcuggacaagua

SEQ ID NO: 1494761 - RNA, 19 nt, Homo sapiens
  misc_RNA (1)...(19): siRNA sense strand
gggaagagaaccacaaauu

SEQ ID NO: 1494762 - RNA, 19 nt, Homo sapiens
  misc_RNA (1)...(19): siRNA sense strand
gaagagaaacaaaggcaaa

SEQ ID NO: 1494763 - RNA, 19 nt, Homo sapiens
  misc_RNA (1)...(19): siRNA sense strand
ucaaguacauggaggacua

SEQ ID NO: 1494764 - RNA, 19 nt, Homo sapiens
  misc_RNA (1)...(19): siRNA sense strand
gaagagaaccacaaauuac

SEQ ID NO: 1494765 - RNA, 19 nt, Homo sapiens
  misc_RNA (1)...(19): siRNA sense strand
ccaaggaccucaagaacau

SEQ ID NO: 1494766 - RNA, 19 nt, Homo sapiens
  misc_RNA (1)...(19): siRNA sense strand
ggacagcgcugggaacaag

SEQ ID NO: 1494767 - RNA, 19 nt, Homo sapiens
  misc_RNA (1)...(19): siRNA sense strand
gggaggagaucucagugaa

SEQ ID NO: 1494768 - RNA, 19 nt, Homo sapiens
  misc_RNA (1)...(19): siRNA sense strand
ugaguucgcugcaggacua

SEQ ID NO: 1494769 - RNA, 19 nt, Homo sapiens
  misc_RNA (1)...(19): siRNA sense strand
gacagaggcugcagaaucu

SEQ ID NO: 1494770 - RNA, 19 nt, Homo sapiens
  misc_RNA (1)...(19): siRNA sense strand
uguaaaggacuaugaguua

SEQ ID NO: 1494771 - RNA, 19 nt, Homo sapiens
  misc_RNA (1)...(19): siRNA sense strand
cugagaagcugcucuaugu

SEQ ID NO: 1494772 - RNA, 19 nt, Homo sapiens
  misc_RNA (1)...(19): siRNA sense strand
gggaggagaucguggacaa

SEQ ID NO: 1494773 - RNA, 19 nt, Homo sapiens
  misc_RNA (1)...(19): siRNA sense strand
ucaagaggcuagagaagga

SEQ ID NO: 1494774 - RNA, 19 nt, Homo sapiens
  misc_RNA (1)...(19): siRNA sense strand
agaaagagguggugaaacu

SEQ ID NO: 1494775 - RNA, 19 nt, Homo sapiens
  misc_RNA (1)...(19): siRNA sense strand
gcuacacccugcagaagaa

SEQ ID NO: 1494776 - RNA, 19 nt, Homo sapiens
  misc_RNA (1)...(19): siRNA sense strand
ggaaacacaagcagaucua

SEQ ID NO: 1494777 - RNA, 19 nt, Homo sapiens
  misc_RNA (1)...(19): siRNA sense strand
ggaacuggaugaccucaag

SEQ ID NO: 1494778 - RNA, 19 nt, Homo sapiens
  misc_RNA (1)...(19): siRNA sense strand
ccaaggaacuagacuuucu

SEQ ID NO: 1494779 - RNA, 19 nt, Homo sapiens
  misc_RNA (1)...(19): siRNA sense strand
cgaaaggugugauuuagag

SEQ ID NO: 1494780 - RNA, 19 nt, Homo sapiens
  misc_RNA (1)...(19): siRNA sense strand
ccaccaaagugaaggaaga

SEQ ID NO: 1494781 - RNA, 19 nt, Homo sapiens
  misc_RNA (1)...(19): siRNA sense strand
ucaagaacaucaccaacga

SEQ ID NO: 1494782 - RNA, 19 nt, Homo sapiens
  misc_RNA (1)...(19): siRNA sense strand
uaaggucucuucucgacuu

SEQ ID NO: 1494783 - RNA, 19 nt, Homo sapiens
  misc_RNA (1)...(19): siRNA sense strand
cagaagaaccugcuagaug

SEQ ID NO: 1494784 - RNA, 19 nt, Homo sapiens
  misc_RNA (1)...(19): siRNA sense strand
ggacacagaggccaagaug

SEQ ID NO: 1494785 - RNA, 19 nt, Homo sapiens
  misc_RNA (1)...(19): siRNA sense strand
ucgagcagcugcagaagaa

SEQ ID NO: 1494786 - RNA, 19 nt, Homo sapiens
  misc_RNA (1)...(19): siRNA sense strand
ucaaggaggugcucaaggu

SEQ ID NO: 1494787 - RNA, 19 nt, Homo sapiens
  misc_RNA (1)...(19): siRNA sense strand
ggaggacuaccaccaguuu

SEQ ID NO: 1494788 - RNA, 19 nt, Homo sapiens
  misc_RNA (1)...(19): siRNA sense strand
gaggaggcguggaagauca

SEQ ID NO: 1494789 - RNA, 19 nt, Homo sapiens
  misc_RNA (1)...(19): siRNA sense strand
ggaggagcauaacaucuuc

SEQ ID NO: 1494790 - RNA, 19 nt, Homo sapiens
  misc_RNA (1)...(19): siRNA sense strand
gaagaucugugccaauucc

SEQ ID NO: 1494791 - RNA, 19 nt, Homo sapiens
  misc_RNA (1)...(19): siRNA sense strand
gguaugaggugcugaagac

SEQ ID NO: 1494792 - RNA, 19 nt, Homo sapiens
  misc_RNA (1)...(19): siRNA sense strand
cagaggagcagcacaagaa

SEQ ID NO: 1494793 - RNA, 19 nt, Homo sapiens
  misc_RNA (1)...(19): siRNA sense strand
gaaccugcuagaugagaua

SEQ ID NO: 1494794 - RNA, 19 nt, Homo sapiens
  misc_RNA (1)...(19): siRNA sense strand
uagaugagauagcaaguag

SEQ ID NO: 1494795 - RNA, 19 nt, Homo sapiens
  misc_RNA (1)...(19): siRNA sense strand
ggacaagaccagacugauc

SEQ ID NO: 1494796 - RNA, 19 nt, Homo sapiens
  misc_RNA (1)...(19): siRNA sense strand
uggugaaacugcagaauga

SEQ ID NO: 1494797 - RNA, 19 nt, Homo sapiens
  misc_RNA (1)...(19): siRNA sense strand
guaaaggacuaugaguuag

SEQ ID NO: 1494798 - RNA, 19 nt, Homo sapiens
  misc_RNA (1)...(19): siRNA sense strand
ggaagucuggcaagaaguu

SEQ ID NO: 1494799 - RNA, 19 nt, Homo sapiens
  misc_RNA (1)...(19): siRNA sense strand
ggagaaggucacagagaaa

SEQ ID NO: 1494800 - RNA, 19 nt, Homo sapiens
  misc_RNA (1)...(19): siRNA sense strand
gaucucacccgccaauaug

SEQ ID NO: 1494801 - RNA, 19 nt, Homo sapiens
  misc_RNA (1)...(19): siRNA sense strand
agaccaagcugaagaacca

SEQ ID NO: 1494802 - RNA, 19 nt, Homo sapiens
  misc_RNA (1)...(19): siRNA sense strand
ggagcuggcggucuuggua

SEQ ID NO: 1494803 - RNA, 19 nt, Homo sapiens
  misc_RNA (1)...(19): siRNA sense strand
caugagacccugcaaagga

SEQ ID NO: 1494804 - RNA, 19 nt, Homo sapiens
  misc_RNA (1)...(19): siRNA sense strand
cagaggagcagaagaaaca

SEQ ID NO: 1494805 - RNA, 19 nt, Homo sapiens
  misc_RNA (1)...(19): siRNA sense strand
caagagcacccaggaagaa

SEQ ID NO: 1494806 - RNA, 19 nt, Homo sapiens
  misc_RNA (1)...(19): siRNA sense strand
ggaggcacucugugacuuu

SEQ ID NO: 1494807 - RNA, 19 nt, Homo sapiens
  misc_RNA (1)...(19): siRNA sense strand
gacaggaagucuggcaaga

SEQ ID NO: 1494808 - RNA, 19 nt, Homo sapiens
  misc_RNA (1)...(19): siRNA sense strand
aggagaaggucacagagaa

SEQ ID NO: 1494809 - RNA, 19 nt, Homo sapiens
  misc_RNA (1)...(19): siRNA sense strand
aaaggacuaugaguuagaa

SEQ ID NO: 1494810 - RNA, 19 nt, Homo sapiens
  misc_RNA (1)...(19): siRNA sense strand
acucggaccugaaccagaa

SEQ ID NO: 1494811 - RNA, 19 nt, Homo sapiens
  misc_RNA (1)...(19): siRNA sense strand
caggaagucuggcaagaag

SEQ ID NO: 1494812 - RNA, 19 nt, Homo sapiens
  misc_RNA (1)...(19): siRNA sense strand
aaguagaagugacccauga

SEQ ID NO: 1494813 - RNA, 19 nt, Homo sapiens
  misc_RNA (1)...(19): siRNA sense strand
gggaguugcuggccacaca

SEQ ID NO: 1494814 - RNA, 19 nt, Homo sapiens
  misc_RNA (1)...(19): siRNA sense strand
ugaaggagcgugugaccaa

SEQ ID NO: 1494815 - RNA, 19 nt, Homo sapiens
  misc_RNA (1)...(19): siRNA sense strand
gaaguucuccaucgaagag

SEQ ID NO: 1494816 - RNA, 19 nt, Homo sapiens
  misc_RNA (1)...(19): siRNA sense strand
ccaaucuccugccaccaaa

SEQ ID NO: 1494817 - RNA, 19 nt, Homo sapiens
  misc_RNA (1)...(19): siRNA sense strand
gagcaggaaguacagaaga

SEQ ID NO: 1494818 - RNA, 19 nt, Homo sapiens
  misc_RNA (1)...(19): siRNA sense strand
gagaaacaaaggcaaauac

SEQ ID NO: 1494819 - RNA, 19 nt, Homo sapiens
  misc_RNA (1)...(19): siRNA sense strand
ggaagaggaagcagcacuu

SEQ ID NO: 1494820 - RNA, 19 nt, Homo sapiens
  misc_RNA (1)...(19): siRNA sense strand
gagggaagagaaccacaaa

SEQ ID NO: 1494821 - RNA, 19 nt, Homo sapiens
  misc_RNA (1)...(19): siRNA sense strand
gaagaggaagcagcacuug

SEQ ID NO: 1494822 - RNA, 19 nt, Homo sapiens
  misc_RNA (1)...(19): siRNA sense strand
gaaacaaaggcaaauacag

SEQ ID NO: 1494823 - RNA, 19 nt, Homo sapiens
  misc_RNA (1)...(19): siRNA sense strand
gugagaagguaacccauac

SEQ ID NO: 1494824 - RNA, 19 nt, Homo sapiens
  misc_RNA (1)...(19): siRNA sense strand
caagaagacccucaaacca

SEQ ID NO: 1494825 - RNA, 19 nt, Homo sapiens
  misc_RNA (1)...(19): siRNA sense strand
agacagaggcugcagaauc

SEQ ID NO: 1494826 - RNA, 19 nt, Homo sapiens
  misc_RNA (1)...(19): siRNA sense strand
caaagugaaggaagaggaa

SEQ ID NO: 1494827 - RNA, 19 nt, Homo sapiens
  misc_RNA (1)...(19): siRNA sense strand
guauggcccugacuucaag

SEQ ID NO: 1494828 - RNA, 19 nt, Homo sapiens
  misc_RNA (1)...(19): siRNA sense strand
aagaagacccucaaaccaa

SEQ ID NO: 1494829 - RNA, 19 nt, Homo sapiens
  misc_RNA (1)...(19): siRNA sense strand
aggaaucgguggugaggaa

SEQ ID NO: 1494830 - RNA, 19 nt, Homo sapiens
  misc_RNA (1)...(19): siRNA sense strand
gacagcagccggaaguaga

SEQ ID NO: 1494831 - RNA, 19 nt, Homo sapiens
  misc_RNA (1)...(19): siRNA sense strand
ggaggacaccaaccggaaa

SEQ ID NO: 1494832 - RNA, 19 nt, Homo sapiens
  misc_RNA (1)...(19): siRNA sense strand
ggagagaaucaacaaacug

SEQ ID NO: 1494833 - RNA, 19 nt, Homo sapiens
  misc_RNA (1)...(19): siRNA sense strand
aaccaugacuccagacugu

SEQ ID NO: 1494834 - RNA, 19 nt, Homo sapiens
  misc_RNA (1)...(19): siRNA sense strand
gacaugaucgccgaggaua

SEQ ID NO: 1494835 - RNA, 19 nt, Homo sapiens
  misc_RNA (1)...(19): siRNA sense strand
aggcggaggucaaggagaa

SEQ ID NO: 1494836 - RNA, 19 nt, Homo sapiens
  misc_RNA (1)...(19): siRNA sense strand
agcaggagguggucaggua

SEQ ID NO: 1494837 - RNA, 19 nt, Homo sapiens
  misc_RNA (1)...(19): siRNA sense strand
gaggagaucguggacaaga

SEQ ID NO: 1494838 - RNA, 19 nt, Homo sapiens
  misc_RNA (1)...(19): siRNA sense strand
agaagguguuggacucuga

SEQ ID NO: 1494839 - RNA, 19 nt, Homo sapiens
  misc_RNA (1)...(19): siRNA sense strand
aggccaagaugcagaguga

SEQ ID NO: 1494840 - RNA, 19 nt, Homo sapiens
  misc_RNA (1)...(19): siRNA sense strand
uaaaggacuaugaguuaga

SEQ ID NO: 1494841 - RNA, 19 nt, Homo sapiens
  misc_RNA (1)...(19): siRNA sense strand
ggacuuggcccaggagaag

SEQ ID NO: 1494842 - RNA, 19 nt, Homo sapiens
  misc_RNA (1)...(19): siRNA sense strand
gaggagagaaucaacaaac

SEQ ID NO: 1494843 - RNA, 19 nt, Homo sapiens
  misc_RNA (1)...(19): siRNA sense strand
ccgaccagguggagaagaa

SEQ ID NO: 1494844 - RNA, 19 nt, Homo sapiens
  misc_RNA (1)...(19): siRNA sense strand
ggaggagaacgccaaagug

SEQ ID NO: 1494845 - RNA, 19 nt, Homo sapiens
  misc_RNA (1)...(19): siRNA sense strand
gcaagaucaccgucaagga

SEQ ID NO: 1494846 - RNA, 19 nt, Homo sapiens
  misc_RNA (1)...(19): siRNA sense strand
gugcugcaguuccuaguca

SEQ ID NO: 1494847 - RNA, 19 nt, Homo sapiens
  misc_RNA (1)...(19): siRNA sense strand
ggauugaaccugagaagac

SEQ ID NO: 1494848 - RNA, 19 nt, Homo sapiens
  misc_RNA (1)...(19): siRNA sense strand
gaaggugcuggacaaguau

SEQ ID NO: 1494849 - RNA, 19 nt, Homo sapiens
  misc_RNA (1)...(19): siRNA sense strand
gaagaacuguaucauuguu

SEQ ID NO: 1494850 - RNA, 19 nt, Homo sapiens
  misc_RNA (1)...(19): siRNA sense strand
auacagggauucuuugaua

SEQ ID NO: 1494851 - RNA, 19 nt, Homo sapiens
  misc_RNA (1)...(19): siRNA sense strand
uggaagaacuguaucauug

SEQ ID NO: 1494852 - RNA, 19 nt, Homo sapiens
  misc_RNA (1)...(19): siRNA sense strand
gcaagguggucacgaagaa

SEQ ID NO: 1494853 - RNA, 19 nt, Homo sapiens
  misc_RNA (1)...(19): siRNA sense strand
gaucaaugccugcaagauu

SEQ ID NO: 1494854 - RNA, 19 nt, Homo sapiens
  misc_RNA (1)...(19): siRNA sense strand
caaaguguaugcuauccuu

SEQ ID NO: 1494855 - RNA, 19 nt, Homo sapiens
  misc_RNA (1)...(19): siRNA sense strand
gaagaaggcgaaugaagug

SEQ ID NO: 1494856 - RNA, 19 nt, Homo sapiens
  misc_RNA (1)...(19): siRNA sense strand
ggaagaaggcgaaugaagu

SEQ ID NO: 1494857 - RNA, 19 nt, Homo sapiens
  misc_RNA (1)...(19): siRNA sense strand
uaaauaaugccgccuuuga

SEQ ID NO: 1494858 - RNA, 19 nt, Homo sapiens
  misc_RNA (1)...(19): siRNA sense strand
gaccagcuauuuccagaau

SEQ ID NO: 1494859 - RNA, 19 nt, Homo sapiens
  misc_RNA (1)...(19): siRNA sense strand
caaacacaauuccgcaaga

SEQ ID NO: 1494860 - RNA, 19 nt, Homo sapiens
  misc_RNA (1)...(19): siRNA sense strand
cagaguaacugccgugauc

SEQ ID NO: 1494861 - RNA, 19 nt, Homo sapiens
  misc_RNA (1)...(19): siRNA sense strand
ccaccaaaguguaugcuau

SEQ ID NO: 1494862 - RNA, 19 nt, Homo sapiens
  misc_RNA (1)...(19): siRNA sense strand
gcaccaagauucaggucau

SEQ ID NO: 1494863 - RNA, 19 nt, Homo sapiens
  misc_RNA (1)...(19): siRNA sense strand
gaucuuggccgaagcaauc

SEQ ID NO: 1494864 - RNA, 19 nt, Homo sapiens
  misc_RNA (1)...(19): siRNA sense strand
ucagauacagggauucuuu

SEQ ID NO: 1494865 - RNA, 19 nt, Homo sapiens
  misc_RNA (1)...(19): siRNA sense strand
cagguugaauguggaauuu

SEQ ID NO: 1494866 - RNA, 19 nt, Homo sapiens
  misc_RNA (1)...(19): siRNA sense strand
gaaacacugcaccaagauu

SEQ ID NO: 1494867 - RNA, 19 nt, Homo sapiens
  misc_RNA (1)...(19): siRNA sense strand
gaauguggaauuugcuuug

SEQ ID NO: 1494868 - RNA, 19 nt, Homo sapiens
  misc_RNA (1)...(19): siRNA sense strand
ggaagaacuguaucauugu

SEQ ID NO: 1494869 - RNA, 19 nt, Homo sapiens
  misc_RNA (1)...(19): siRNA sense strand
caaaaggguuacaucaauu

SEQ ID NO: 1494870 - RNA, 19 nt, Homo sapiens
  misc_RNA (1)...(19): siRNA sense strand
ccugcaugcuucucagaua

SEQ ID NO: 1494871 - RNA, 19 nt, Homo sapiens
  misc_RNA (1)...(19): siRNA sense strand
aauaaauaaugccgccuuu

SEQ ID NO: 1494872 - RNA, 19 nt, Homo sapiens
  misc_RNA (1)...(19): siRNA sense strand
ccaaaaggguuacaucaau

SEQ ID NO: 1494873 - RNA, 19 nt, Homo sapiens
  misc_RNA (1)...(19): siRNA sense strand
ccauacgcccgacaagaua

SEQ ID NO: 1494874 - RNA, 19 nt, Homo sapiens
  misc_RNA (1)...(19): siRNA sense strand
agaggaagaaggcgaauga

SEQ ID NO: 1494875 - RNA, 19 nt, Homo sapiens
  misc_RNA (1)...(19): siRNA sense strand
ucagccaugucccgcuaua

SEQ ID NO: 1494876 - RNA, 19 nt, Homo sapiens
  misc_RNA (1)...(19): siRNA sense strand
cgaagaaguucagcaacca

SEQ ID NO: 1494877 - RNA, 19 nt, Homo sapiens
  misc_RNA (1)...(19): siRNA sense strand
ucacgaagaaguucagcaa

SEQ ID NO: 1494878 - RNA, 19 nt, Homo sapiens
  misc_RNA (1)...(19): siRNA sense strand
ccaagauucaggucauuga

SEQ ID NO: 1494879 - RNA, 19 nt, Homo sapiens
  misc_RNA (1)...(19): siRNA sense strand
augaaacacugcaccaaga

SEQ ID NO: 1494880 - RNA, 19 nt, Homo sapiens
  misc_RNA (1)...(19): siRNA sense strand
gaacuguaucauuguuuca

SEQ ID NO: 1494881 - RNA, 19 nt, Homo sapiens
  misc_RNA (1)...(19): siRNA sense strand
caaaacuuguggccaauau

SEQ ID NO: 1494882 - RNA, 19 nt, Homo sapiens
  misc_RNA (1)...(19): siRNA sense strand
agaacuguaucauuguuuc

SEQ ID NO: 1494883 - RNA, 19 nt, Homo sapiens
  misc_RNA (1)...(19): siRNA sense strand
guggaagaacuguaucauu

SEQ ID NO: 1494884 - RNA, 19 nt, Homo sapiens
  misc_RNA (1)...(19): siRNA sense strand
cagggauucuuugauauuc

SEQ ID NO: 1494885 - RNA, 19 nt, Homo sapiens
  misc_RNA (1)...(19): siRNA sense strand
gcaagaggacaaaaugaaa

SEQ ID NO: 1494886 - RNA, 19 nt, Homo sapiens
  misc_RNA (1)...(19): siRNA sense strand
uacagggauucuuugauau

SEQ ID NO: 1494887 - RNA, 19 nt, Homo sapiens
  misc_RNA (1)...(19): siRNA sense strand
aaacacugcaccaagauuc

SEQ ID NO: 1494888 - RNA, 19 nt, Homo sapiens
  misc_RNA (1)...(19): siRNA sense strand
gauauuccuguggauaauu

SEQ ID NO: 1494889 - RNA, 19 nt, Homo sapiens
  misc_RNA (1)...(19): siRNA sense strand
acagggauucuuugauauu

SEQ ID NO: 1494890 - RNA, 19 nt, Homo sapiens
  misc_RNA (1)...(19): siRNA sense strand
gcaauccgaaggacacaca

SEQ ID NO: 1494891 - RNA, 19 nt, Homo sapiens
  misc_RNA (1)...(19): siRNA sense strand
gagaccagcguggagauug

SEQ ID NO: 1494892 - RNA, 19 nt, Homo sapiens
  misc_RNA (1)...(19): siRNA sense strand
gguugaauguggaauuugc

SEQ ID NO: 1494893 - RNA, 19 nt, Homo sapiens
  misc_RNA (1)...(19): siRNA sense strand
caccaagauucaggucauu

SEQ ID NO: 1494894 - RNA, 19 nt, Homo sapiens
  misc_RNA (1)...(19): siRNA sense strand
cuucucagauacagggauu

SEQ ID NO: 1494895 - RNA, 19 nt, Homo sapiens
  misc_RNA (1)...(19): siRNA sense strand
gggaauccguguccuaccu

SEQ ID NO: 1494896 - RNA, 19 nt, Homo sapiens
  misc_RNA (1)...(19): siRNA sense strand
aaacacaauuccgcaagag

SEQ ID NO: 1494897 - RNA, 19 nt, Homo sapiens
  misc_RNA (1)...(19): siRNA sense strand
gaucccguguuucccauac

SEQ ID NO: 1494898 - RNA, 19 nt, Homo sapiens
  misc_RNA (1)...(19): siRNA sense strand
ggagaccagcguggagauu

SEQ ID NO: 1494899 - RNA, 19 nt, Homo sapiens
  misc_RNA (1)...(19): siRNA sense strand
ugauauuccuguggauaau

SEQ ID NO: 1494900 - RNA, 19 nt, Homo sapiens
  misc_RNA (1)...(19): siRNA sense strand
uaacgacaaccugauggaa

SEQ ID NO: 1494901 - RNA, 19 nt, Homo sapiens
  misc_RNA (1)...(19): siRNA sense strand
gcgucaucauccagaguaa

SEQ ID NO: 1494902 - RNA, 19 nt, Homo sapiens
  misc_RNA (1)...(19): siRNA sense strand
ugggcaagguggucacgaa

SEQ ID NO: 1494903 - RNA, 19 nt, Homo sapiens
  misc_RNA (1)...(19): siRNA sense strand
aauguggaauuugcuuuga

SEQ ID NO: 1494904 - RNA, 19 nt, Homo sapiens
  misc_RNA (1)...(19): siRNA sense strand
gcguggagauuggugaaag

SEQ ID NO: 1494905 - RNA, 19 nt, Homo sapiens
  misc_RNA (1)...(19): siRNA sense strand
gauacagggauucuuugau

SEQ ID NO: 1494906 - RNA, 19 nt, Homo sapiens
  misc_RNA (1)...(19): siRNA sense strand
ugacauuuccaugaucuug

SEQ ID NO: 1494907 - RNA, 19 nt, Homo sapiens
  misc_RNA (1)...(19): siRNA sense strand
caagagucgugccccaauu

SEQ ID NO: 1494908 - RNA, 19 nt, Homo sapiens
  misc_RNA (1)...(19): siRNA sense strand
ggaccagcuauuuccagaa

SEQ ID NO: 1494909 - RNA, 19 nt, Homo sapiens
  misc_RNA (1)...(19): siRNA sense strand
cauacgcccgacaagauaa

SEQ ID NO: 1494910 - RNA, 19 nt, Homo sapiens
  misc_RNA (1)...(19): siRNA sense strand
ugaauguggaauuugcuuu

SEQ ID NO: 1494911 - RNA, 19 nt, Homo sapiens
  misc_RNA (1)...(19): siRNA sense strand
uugauauuccuguggauaa

SEQ ID NO: 1494912 - RNA, 19 nt, Homo sapiens
  misc_RNA (1)...(19): siRNA sense strand
uguggaauuugcuuugauc

SEQ ID NO: 1494913 - RNA, 19 nt, Homo sapiens
  misc_RNA (1)...(19): siRNA sense strand
gaguggaagaacuguauca

SEQ ID NO: 1494914 - RNA, 19 nt, Homo sapiens
  misc_RNA (1)...(19): siRNA sense strand
cagauacagggauucuuug

SEQ ID NO: 1494915 - RNA, 19 nt, Homo sapiens
  misc_RNA (1)...(19): siRNA sense strand
aaaguguaugcuauccuua

SEQ ID NO: 1494916 - RNA, 19 nt, Homo sapiens
  misc_RNA (1)...(19): siRNA sense strand
ccacaaagagaggaagaag

SEQ ID NO: 1494917 - RNA, 19 nt, Homo sapiens
  misc_RNA (1)...(19): siRNA sense strand
ccgaguggaagaacuguau

SEQ ID NO: 1494918 - RNA, 19 nt, Homo sapiens
  misc_RNA (1)...(19): siRNA sense strand
cggaucacaucaucaccau

SEQ ID NO: 1494919 - RNA, 19 nt, Homo sapiens
  misc_RNA (1)...(19): siRNA sense strand
cugccgugaucccguguuu

SEQ ID NO: 1494920 - RNA, 19 nt, Homo sapiens
  misc_RNA (1)...(19): siRNA sense strand
cagcucgcaucaggaccua

SEQ ID NO: 1494921 - RNA, 19 nt, Homo sapiens
  misc_RNA (1)...(19): siRNA sense strand
ugaaacacugcaccaagau

SEQ ID NO: 1494922 - RNA, 19 nt, Homo sapiens
  misc_RNA (1)...(19): siRNA sense strand
gaggaagaaggcgaaugaa

SEQ ID NO: 1494923 - RNA, 19 nt, Homo sapiens
  misc_RNA (1)...(19): siRNA sense strand
gaagaacuacgacagauua

SEQ ID NO: 1494924 - RNA, 19 nt, Homo sapiens
  misc_RNA (1)...(19): siRNA sense strand
gagcaacucugaagaagga

SEQ ID NO: 1494925 - RNA, 19 nt, Homo sapiens
  misc_RNA (1)...(19): siRNA sense strand
ggaguagcauuucccauuu

SEQ ID NO: 1494926 - RNA, 19 nt, Homo sapiens
  misc_RNA (1)...(19): siRNA sense strand
caaagaggauucccaagga

SEQ ID NO: 1494927 - RNA, 19 nt, Homo sapiens
  misc_RNA (1)...(19): siRNA sense strand
caaacaaccaugcuauaua

SEQ ID NO: 1494928 - RNA, 19 nt, Homo sapiens
  misc_RNA (1)...(19): siRNA sense strand
ccagggauaugaauggaua

SEQ ID NO: 1494929 - RNA, 19 nt, Homo sapiens
  misc_RNA (1)...(19): siRNA sense strand
ugaaguauuuggaacagua

SEQ ID NO: 1494930 - RNA, 19 nt, Homo sapiens
  misc_RNA (1)...(19): siRNA sense strand
gcuagaaauuguagaaaga

SEQ ID NO: 1494931 - RNA, 19 nt, Homo sapiens
  misc_RNA (1)...(19): siRNA sense strand
ucaaugagguacagacuga

SEQ ID NO: 1494932 - RNA, 19 nt, Homo sapiens
  misc_RNA (1)...(19): siRNA sense strand
guauaaacauucccaugaa

SEQ ID NO: 1494933 - RNA, 19 nt, Homo sapiens
  misc_RNA (1)...(19): siRNA sense strand
gaaggagacuauuuagagu

SEQ ID NO: 1494934 - RNA, 19 nt, Homo sapiens
  misc_RNA (1)...(19): siRNA sense strand
uuagaaagaucgagauaga

SEQ ID NO: 1494935 - RNA, 19 nt, Homo sapiens
  misc_RNA (1)...(19): siRNA sense strand
uaagagagcggaugcugua

SEQ ID NO: 1494936 - RNA, 19 nt, Homo sapiens
  misc_RNA (1)...(19): siRNA sense strand
gagagcggaugcuguauuc

SEQ ID NO: 1494937 - RNA, 19 nt, Homo sapiens
  misc_RNA (1)...(19): siRNA sense strand
gaaagacaacuacaaaugg

SEQ ID NO: 1494938 - RNA, 19 nt, Homo sapiens
  misc_RNA (1)...(19): siRNA sense strand
ggacaaacaaccaugcuau

SEQ ID NO: 1494939 - RNA, 19 nt, Homo sapiens
  misc_RNA (1)...(19): siRNA sense strand
gugaagauguuaaagagau

SEQ ID NO: 1494940 - RNA, 19 nt, Homo sapiens
  misc_RNA (1)...(19): siRNA sense strand
gcaguuggaaauagauaua

SEQ ID NO: 1494941 - RNA, 19 nt, Homo sapiens
  misc_RNA (1)...(19): siRNA sense strand
ggauuaugauuccuuuguu

SEQ ID NO: 1494942 - RNA, 19 nt, Homo sapiens
  misc_RNA (1)...(19): siRNA sense strand
ccaagcaagugaagauguu

SEQ ID NO: 1494943 - RNA, 19 nt, Homo sapiens
  misc_RNA (1)...(19): siRNA sense strand
ccaugaaggagacuauuua

SEQ ID NO: 1494944 - RNA, 19 nt, Homo sapiens
  misc_RNA (1)...(19): siRNA sense strand
gacaaacaaccaugcuaua

SEQ ID NO: 1494945 - RNA, 19 nt, Homo sapiens
  misc_RNA (1)...(19): siRNA sense strand
aaacugaagcuacuacuga

SEQ ID NO: 1494946 - RNA, 19 nt, Homo sapiens
  misc_RNA (1)...(19): siRNA sense strand
ggauucagcucguuaccau

SEQ ID NO: 1494947 - RNA, 19 nt, Homo sapiens
  misc_RNA (1)...(19): siRNA sense strand
caacaaauacagaacugaa

SEQ ID NO: 1494948 - RNA, 19 nt, Homo sapiens
  misc_RNA (1)...(19): siRNA sense strand
caacacaacaaauacagaa

SEQ ID NO: 1494949 - RNA, 19 nt, Homo sapiens
  misc_RNA (1)...(19): siRNA sense strand
aaagacaacuacaaaugga

SEQ ID NO: 1494950 - RNA, 19 nt, Homo sapiens
  misc_RNA (1)...(19): siRNA sense strand
gagcggaugcuguauucua

SEQ ID NO: 1494951 - RNA, 19 nt, Homo sapiens
  misc_RNA (1)...(19): siRNA sense strand
caagugaagauguuaaaga

SEQ ID NO: 1494952 - RNA, 19 nt, Homo sapiens
  misc_RNA (1)...(19): siRNA sense strand
caagagccgucugcuagaa

SEQ ID NO: 1494953 - RNA, 19 nt, Homo sapiens
  misc_RNA (1)...(19): siRNA sense strand
ggaagaacuacgacagauu

SEQ ID NO: 1494954 - RNA, 19 nt, Homo sapiens
  misc_RNA (1)...(19): siRNA sense strand
cugcagacuuccuuuauga

SEQ ID NO: 1494955 - RNA, 19 nt, Homo sapiens
  misc_RNA (1)...(19): siRNA sense strand
ugaguugacugcagacuuc

SEQ ID NO: 1494956 - RNA, 19 nt, Homo sapiens
  misc_RNA (1)...(19): siRNA sense strand
gaacuacgacagauuaaaa

SEQ ID NO: 1494957 - RNA, 19 nt, Homo sapiens
  misc_RNA (1)...(19): siRNA sense strand
ccagaucauucucauguuc

SEQ ID NO: 1494958 - RNA, 19 nt, Homo sapiens
  misc_RNA (1)...(19): siRNA sense strand
ugaagcuacuacugauuaa

SEQ ID NO: 1494959 - RNA, 19 nt, Homo sapiens
  misc_RNA (1)...(19): siRNA sense strand
gaacaguaaaggaagaugu

SEQ ID NO: 1494960 - RNA, 19 nt, Homo sapiens
  misc_RNA (1)...(19): siRNA sense strand
ccacauuaaagaugaagua

SEQ ID NO: 1494961 - RNA, 19 nt, Homo sapiens
  misc_RNA (1)...(19): siRNA sense strand
agaaagacaacuacaaaug

SEQ ID NO: 1494962 - RNA, 19 nt, Homo sapiens
  misc_RNA (1)...(19): siRNA sense strand
ggagguggccacauuaaag

SEQ ID NO: 1494963 - RNA, 19 nt, Homo sapiens
  misc_RNA (1)...(19): siRNA sense strand
gaaguauuuggaacaguaa

SEQ ID NO: 1494964 - RNA, 19 nt, Homo sapiens
  misc_RNA (1)...(19): siRNA sense strand
cugaagcuacuacugauua

SEQ ID NO: 1494965 - RNA, 19 nt, Homo sapiens
  misc_RNA (1)...(19): siRNA sense strand
ggauguaauuagaaagauc

SEQ ID NO: 1494966 - RNA, 19 nt, Homo sapiens
  misc_RNA (1)...(19): siRNA sense strand
ccaaggauucagcucguua

SEQ ID NO: 1494967 - RNA, 19 nt, Homo sapiens
  misc_RNA (1)...(19): siRNA sense strand
ugaaggagacuauuuagag

SEQ ID NO: 1494968 - RNA, 19 nt, Homo sapiens
  misc_RNA (1)...(19): siRNA sense strand
gaguagcauuucccauuuc

SEQ ID NO: 1494969 - RNA, 19 nt, Homo sapiens
  misc_RNA (1)...(19): siRNA sense strand
aagaggaauucgaagacua

SEQ ID NO: 1494970 - RNA, 19 nt, Homo sapiens
  misc_RNA (1)...(19): siRNA sense strand
gagguggccacauuaaaga

SEQ ID NO: 1494971 - RNA, 19 nt, Homo sapiens
  misc_RNA (1)...(19): siRNA sense strand
gcaagagccgucugcuaga

SEQ ID NO: 1494972 - RNA, 19 nt, Homo sapiens
  misc_RNA (1)...(19): siRNA sense strand
gaggaagaacuacgacaga

SEQ ID NO: 1494973 - RNA, 19 nt, Homo sapiens
  misc_RNA (1)...(19): siRNA sense strand
gacugcagcugaggaagaa

SEQ ID NO: 1494974 - RNA, 19 nt, Homo sapiens
  misc_RNA (1)...(19): siRNA sense strand
caaauacagaacugaaaga

SEQ ID NO: 1494975 - RNA, 19 nt, Homo sapiens
  misc_RNA (1)...(19): siRNA sense strand
gaaaaugagcaacuuguga

SEQ ID NO: 1494976 - RNA, 19 nt, Homo sapiens
  misc_RNA (1)...(19): siRNA sense strand
uguauaaacauucccauga

SEQ ID NO: 1494977 - RNA, 19 nt, Homo sapiens
  misc_RNA (1)...(19): siRNA sense strand
ugacugcagacuuccuuua

SEQ ID NO: 1494978 - RNA, 19 nt, Homo sapiens
  misc_RNA (1)...(19): siRNA sense strand
gcaucaaacacuacaagga

SEQ ID NO: 1494979 - RNA, 19 nt, Homo sapiens
  misc_RNA (1)...(19): siRNA sense strand
uuuauucaaugccuggaua

SEQ ID NO: 1494980 - RNA, 19 nt, Homo sapiens
  misc_RNA (1)...(19): siRNA sense strand
gaaagaucgagauagacaa

SEQ ID NO: 1494981 - RNA, 19 nt, Homo sapiens
  misc_RNA (1)...(19): siRNA sense strand
ccaagcagcaugcacacaa

SEQ ID NO: 1494982 - RNA, 19 nt, Homo sapiens
  misc_RNA (1)...(19): siRNA sense strand
gaaauggaaaguacagacu

SEQ ID NO: 1494983 - RNA, 19 nt, Homo sapiens
  misc_RNA (1)...(19): siRNA sense strand
gaaacugaagcuacuacug

SEQ ID NO: 1494984 - RNA, 19 nt, Homo sapiens
  misc_RNA (1)...(19): siRNA sense strand
acaaacaaccaugcuauau

SEQ ID NO: 1494985 - RNA, 19 nt, Homo sapiens
  misc_RNA (1)...(19): siRNA sense strand
agaggaauucgaagacuaa

SEQ ID NO: 1494986 - RNA, 19 nt, Homo sapiens
  misc_RNA (1)...(19): siRNA sense strand
uauaaacauucccaugaag

SEQ ID NO: 1494987 - RNA, 19 nt, Homo sapiens
  misc_RNA (1)...(19): siRNA sense strand
ucaaacacuacaaggagua

SEQ ID NO: 1494988 - RNA, 19 nt, Homo sapiens
  misc_RNA (1)...(19): siRNA sense strand
gaugaaguauuuggaacag

SEQ ID NO: 1494989 - RNA, 19 nt, Homo sapiens
  misc_RNA (1)...(19): siRNA sense strand
guuaccauuucuuucugua

SEQ ID NO: 1494990 - RNA, 19 nt, Homo sapiens
  misc_RNA (1)...(19): siRNA sense strand
cacuaagcaucaaacacua

SEQ ID NO: 1494991 - RNA, 19 nt, Homo sapiens
  misc_RNA (1)...(19): siRNA sense strand
caacucugaagaaggaauu

SEQ ID NO: 1494992 - RNA, 19 nt, Homo sapiens
  misc_RNA (1)...(19): siRNA sense strand
caagcaagugaagauguua

SEQ ID NO: 1494993 - RNA, 19 nt, Homo sapiens
  misc_RNA (1)...(19): siRNA sense strand
aaagaggauucccaaggau

SEQ ID NO: 1494994 - RNA, 19 nt, Homo sapiens
  misc_RNA (1)...(19): siRNA sense strand
guggccacauuaaagauga

SEQ ID NO: 1494995 - RNA, 19 nt, Homo sapiens
  misc_RNA (1)...(19): siRNA sense strand
auaauagacagcucaacua

SEQ ID NO: 1494996 - RNA, 19 nt, Homo sapiens
  misc_RNA (1)...(19): siRNA sense strand
uaaacauucccaugaagga

SEQ ID NO: 1494997 - RNA, 19 nt, Homo sapiens
  misc_RNA (1)...(19): siRNA sense strand
cacaacaaauacagaacug

SEQ ID NO: 1494998 - RNA, 19 nt, Homo sapiens
  misc_RNA (1)...(19): siRNA sense strand
caagcagcaugcacacaag

SEQ ID NO: 1494999 - RNA, 19 nt, Homo sapiens
  misc_RNA (1)...(19): siRNA sense strand
agaaagaucgagauagaca

SEQ ID NO: 1495000 - RNA, 19 nt, Homo sapiens
  misc_RNA (1)...(19): siRNA sense strand
aagugaagauguuaaagag

SEQ ID NO: 1495001 - RNA, 19 nt, Homo sapiens
  misc_RNA (1)...(19): siRNA sense strand
cauauagucagccuucaga

SEQ ID NO: 1495002 - RNA, 19 nt, Homo sapiens
  misc_RNA (1)...(19): siRNA sense strand
acacuaagcaucaaacacu

SEQ ID NO: 1495003 - RNA, 19 nt, Homo sapiens
  misc_RNA (1)...(19): siRNA sense strand
uauagucagccuucagauu

SEQ ID NO: 1495004 - RNA, 19 nt, Homo sapiens
  misc_RNA (1)...(19): siRNA sense strand
ggacacuaagcaucaaaca

SEQ ID NO: 1495005 - RNA, 19 nt, Homo sapiens
  misc_RNA (1)...(19): siRNA sense strand
acacaugcaguauaagaga

SEQ ID NO: 1495006 - RNA, 19 nt, Homo sapiens
  misc_RNA (1)...(19): siRNA sense strand
aauacuugcugucacaauc

SEQ ID NO: 1495007 - RNA, 19 nt, Homo sapiens
  misc_RNA (1)...(19): siRNA sense strand
aggaguagcauuucccauu

SEQ ID NO: 1495008 - RNA, 19 nt, Homo sapiens
  misc_RNA (1)...(19): siRNA sense strand
gagccagaaauggaaagua

SEQ ID NO: 1495009 - RNA, 19 nt, Homo sapiens
  misc_RNA (1)...(19): siRNA sense strand
ugaagauguuaaagagauc

SEQ ID NO: 1495010 - RNA, 19 nt, Homo sapiens
  misc_RNA (1)...(19): siRNA sense strand
aguaaaggaagauguauca

SEQ ID NO: 1495011 - RNA, 19 nt, Homo sapiens
  misc_RNA (1)...(19): siRNA sense strand
gacugcagacuuccuuuau

SEQ ID NO: 1495012 - RNA, 19 nt, Homo sapiens
  misc_RNA (1)...(19): siRNA sense strand
aaagaucgagauagacaau

SEQ ID NO: 1495013 - RNA, 19 nt, Homo sapiens
  misc_RNA (1)...(19): siRNA sense strand
auagucagccuucagauuc

SEQ ID NO: 1495014 - RNA, 19 nt, Homo sapiens
  misc_RNA (1)...(19): siRNA sense strand
ugacugcagcugaggaaga

SEQ ID NO: 1495015 - RNA, 19 nt, Homo sapiens
  misc_RNA (1)...(19): siRNA sense strand
cauccaagcaagugaagau

SEQ ID NO: 1495016 - RNA, 19 nt, Homo sapiens
  misc_RNA (1)...(19): siRNA sense strand
gcccagggauaugaaugga

SEQ ID NO: 1495017 - RNA, 19 nt, Homo sapiens
  misc_RNA (1)...(19): siRNA sense strand
ucagaaugcccagggauau

SEQ ID NO: 1495018 - RNA, 19 nt, Homo sapiens
  misc_RNA (1)...(19): siRNA sense strand
gagcaacuugugauuggau

SEQ ID NO: 1495019 - RNA, 19 nt, Homo sapiens
  misc_RNA (1)...(19): siRNA sense strand
cagcaugcacacaagcaaa

SEQ ID NO: 1495020 - RNA, 19 nt, Homo sapiens
  misc_RNA (1)...(19): siRNA sense strand
uaugugcaguuggaaauag

SEQ ID NO: 1495021 - RNA, 19 nt, Homo sapiens
  misc_RNA (1)...(19): siRNA sense strand
agaaugcccagggauauga

SEQ ID NO: 1495022 - RNA, 19 nt, Homo sapiens
  misc_RNA (1)...(19): siRNA sense strand
agccagaaauggaaaguac

SEQ ID NO: 1495023 - RNA, 19 nt, Homo sapiens
  misc_RNA (1)...(19): siRNA sense strand
gaaaugcaaccacaucuuu

SEQ ID NO: 1495024 - RNA, 19 nt, Homo sapiens
  misc_RNA (1)...(19): siRNA sense strand
gaagguggcuggugacauc

SEQ ID NO: 1495025 - RNA, 19 nt, Homo sapiens
  misc_RNA (1)...(19): siRNA sense strand
ggugacaucuucaaggaua

SEQ ID NO: 1495026 - RNA, 19 nt, Homo sapiens
  misc_RNA (1)...(19): siRNA sense strand
ucacagagcccuucacgaa

SEQ ID NO: 1495027 - RNA, 19 nt, Homo sapiens
  misc_RNA (1)...(19): siRNA sense strand
guccagcgcuuuccagauu

SEQ ID NO: 1495028 - RNA, 19 nt, Homo sapiens
  misc_RNA (1)...(19): siRNA sense strand
gaaaugccaccauggagaa

SEQ ID NO: 1495029 - RNA, 19 nt, Homo sapiens
  misc_RNA (1)...(19): siRNA sense strand
ggaaacgcacggccaagua

SEQ ID NO: 1495030 - RNA, 19 nt, Homo sapiens
  misc_RNA (1)...(19): siRNA sense strand
ucacgaagcucaucaucca

SEQ ID NO: 1495031 - RNA, 19 nt, Homo sapiens
  misc_RNA (1)...(19): siRNA sense strand
gugcaugacugcuuuaacu

SEQ ID NO: 1495032 - RNA, 19 nt, Homo sapiens
  misc_RNA (1)...(19): siRNA sense strand
caacaucucggguauccuu

SEQ ID NO: 1495033 - RNA, 19 nt, Homo sapiens
  misc_RNA (1)...(19): siRNA sense strand
ccaagugguuacagacaug

SEQ ID NO: 1495034 - RNA, 19 nt, Homo sapiens
  misc_RNA (1)...(19): siRNA sense strand
ggagaaaugcaaccacauc

SEQ ID NO: 1495035 - RNA, 19 nt, Homo sapiens
  misc_RNA (1)...(19): siRNA sense strand
gcuggacgagucugugaua

SEQ ID NO: 1495036 - RNA, 19 nt, Homo sapiens
  misc_RNA (1)...(19): siRNA sense strand
gcaccugcccaagugguua

SEQ ID NO: 1495037 - RNA, 19 nt, Homo sapiens
  misc_RNA (1)...(19): siRNA sense strand
ggacgagucugugauaacc

SEQ ID NO: 1495038 - RNA, 19 nt, Homo sapiens
  misc_RNA (1)...(19): siRNA sense strand
ggugugaucagcauugaga

SEQ ID NO: 1495039 - RNA, 19 nt, Homo sapiens
  misc_RNA (1)...(19): siRNA sense strand
uccagaaggucaucaauac

SEQ ID NO: 1495040 - RNA, 19 nt, Homo sapiens
  misc_RNA (1)...(19): siRNA sense strand
uggccaaggucauccagaa

SEQ ID NO: 1495041 - RNA, 19 nt, Homo sapiens
  misc_RNA (1)...(19): siRNA sense strand
ggucaucaauacggacuuc

SEQ ID NO: 1495042 - RNA, 19 nt, Homo sapiens
  misc_RNA (1)...(19): siRNA sense strand
gaaacgcacggccaaguac

SEQ ID NO: 1495043 - RNA, 19 nt, Homo sapiens
  misc_RNA (1)...(19): siRNA sense strand
cggguauccuucuguggua

SEQ ID NO: 1495044 - RNA, 19 nt, Homo sapiens
  misc_RNA (1)...(19): siRNA sense strand
ggacggccuuugccuacgu

SEQ ID NO: 1495045 - RNA, 19 nt, Homo sapiens
  misc_RNA (1)...(19): siRNA sense strand
caucaugggcuccaacauc

SEQ ID NO: 1495046 - RNA, 19 nt, Homo sapiens
  misc_RNA (1)...(19): siRNA sense strand
ggccaaguaccgcugguuu

SEQ ID NO: 1495047 - RNA, 19 nt, Homo sapiens
  misc_RNA (1)...(19): siRNA sense strand
cacggugcaugacugcuuu

SEQ ID NO: 1495048 - RNA, 19 nt, Homo sapiens
  misc_RNA (1)...(19): siRNA sense strand
gcgccaugcugcucaaggu

SEQ ID NO: 1495049 - RNA, 19 nt, Homo sapiens
  misc_RNA (1)...(19): siRNA sense strand
gugacaucuucaaggauaa

SEQ ID NO: 1495050 - RNA, 19 nt, Homo sapiens
  misc_RNA (1)...(19): siRNA sense strand
ccaaggucauccagaaggu

SEQ ID NO: 1495051 - RNA, 19 nt, Homo sapiens
  misc_RNA (1)...(19): siRNA sense strand
gugaugagucccugaggaa

SEQ ID NO: 1495052 - RNA, 19 nt, Homo sapiens
  misc_RNA (1)...(19): siRNA sense strand
cuccugaccugcucaagau

SEQ ID NO: 1495053 - RNA, 19 nt, Homo sapiens
  misc_RNA (1)...(19): siRNA sense strand
gugguggccuccuucaaca

SEQ ID NO: 1495054 - RNA, 19 nt, Homo sapiens
  misc_RNA (1)...(19): siRNA sense strand
caccacaucacucgacuug

SEQ ID NO: 1495055 - RNA, 19 nt, Homo sapiens
  misc_RNA (1)...(19): siRNA sense strand
gcaccucugucaccaacac

SEQ ID NO: 1495056 - RNA, 19 nt, Homo sapiens
  misc_RNA (1)...(19): siRNA sense strand
cuggugacaucuucaagga

SEQ ID NO: 1495057 - RNA, 19 nt, Homo sapiens
  misc_RNA (1)...(19): siRNA sense strand
gagaaaugcaaccacaucu

SEQ ID NO: 1495058 - RNA, 19 nt, Homo sapiens
  misc_RNA (1)...(19): siRNA sense strand
gcuccugaccugcucaaga

SEQ ID NO: 1495059 - RNA, 19 nt, Homo sapiens
  misc_RNA (1)...(19): siRNA sense strand
gcucaaggugccacugaug

SEQ ID NO: 1495060 - RNA, 19 nt, Homo sapiens
  misc_RNA (1)...(19): siRNA sense strand
gugccacccagacuccuua

SEQ ID NO: 1495061 - RNA, 19 nt, Homo sapiens
  misc_RNA (1)...(19): siRNA sense strand
gguggcuggugacaucuuc

SEQ ID NO: 1495062 - RNA, 19 nt, Homo sapiens
  misc_RNA (1)...(19): siRNA sense strand
gguuugccguccucuaucu

SEQ ID NO: 1495063 - RNA, 19 nt, Homo sapiens
  misc_RNA (1)...(19): siRNA sense strand
ugucacuucuucuucaaca

SEQ ID NO: 1495064 - RNA, 19 nt, Homo sapiens
  misc_RNA (1)...(19): siRNA sense strand
gcauugccacuggugauga

SEQ ID NO: 1495065 - RNA, 19 nt, Homo sapiens
  misc_RNA (1)...(19): siRNA sense strand
gccaaguaccgcugguuug

SEQ ID NO: 1495066 - RNA, 19 nt, Homo sapiens
  misc_RNA (1)...(19): siRNA sense strand
cacacuggguuccaacauc

SEQ ID NO: 1495067 - RNA, 19 nt, Homo sapiens
  misc_RNA (1)...(19): siRNA sense strand
gccagacccuuggaaaugc

SEQ ID NO: 1495068 - RNA, 19 nt, Homo sapiens
  misc_RNA (1)...(19): siRNA sense strand
ucguggugcucaucaaugu

SEQ ID NO: 1495069 - RNA, 19 nt, Homo sapiens
  misc_RNA (1)...(19): siRNA sense strand
ucaccuuccucuaccucuu

SEQ ID NO: 1495070 - RNA, 19 nt, Homo sapiens
  misc_RNA (1)...(19): siRNA sense strand
ccacggugcaugacugcuu

SEQ ID NO: 1495071 - RNA, 19 nt, Homo sapiens
  misc_RNA (1)...(19): siRNA sense strand
ucacugguguuuggcaucu

SEQ ID NO: 1495072 - RNA, 19 nt, Homo sapiens
  misc_RNA (1)...(19): siRNA sense strand
gcucaacucccugcucaag

SEQ ID NO: 1495073 - RNA, 19 nt, Homo sapiens
  misc_RNA (1)...(19): siRNA sense strand
ccagccagacccuuggaaa

SEQ ID NO: 1495074 - RNA, 19 nt, Homo sapiens
  misc_RNA (1)...(19): siRNA sense strand
gaccugcucaagaucauca

SEQ ID NO: 1495075 - RNA, 19 nt, Homo sapiens
  misc_RNA (1)...(19): siRNA sense strand
cagcuggacgagucuguga

SEQ ID NO: 1495076 - RNA, 19 nt, Homo sapiens
  misc_RNA (1)...(19): siRNA sense strand
gaggaaccacagucucauc

SEQ ID NO: 1495077 - RNA, 19 nt, Homo sapiens
  misc_RNA (1)...(19): siRNA sense strand
gaugcucaccuuccucuac

SEQ ID NO: 1495078 - RNA, 19 nt, Homo sapiens
  misc_RNA (1)...(19): siRNA sense strand
cagccagacccuuggaaau

SEQ ID NO: 1495079 - RNA, 19 nt, Homo sapiens
  misc_RNA (1)...(19): siRNA sense strand
gcugugcaccugccucauc

SEQ ID NO: 1495080 - RNA, 19 nt, Homo sapiens
  misc_RNA (1)...(19): siRNA sense strand
aaaugcaaccacaucuuug

SEQ ID NO: 1495081 - RNA, 19 nt, Homo sapiens
  misc_RNA (1)...(19): siRNA sense strand
agaaaugcaaccacaucuu

SEQ ID NO: 1495082 - RNA, 19 nt, Homo sapiens
  misc_RNA (1)...(19): siRNA sense strand
ccaaguggccaaggucauc

SEQ ID NO: 1495083 - RNA, 19 nt, Homo sapiens
  misc_RNA (1)...(19): siRNA sense strand
gggaaacgcacggccaagu

SEQ ID NO: 1495084 - RNA, 19 nt, Homo sapiens
  misc_RNA (1)...(19): siRNA sense strand
ucacuucuucuucaacauc

SEQ ID NO: 1495085 - RNA, 19 nt, Homo sapiens
  misc_RNA (1)...(19): siRNA sense strand
ggacuuaauuugagcauaa

SEQ ID NO: 1495086 - RNA, 19 nt, Homo sapiens
  misc_RNA (1)...(19): siRNA sense strand
ggaaagaaauucagaaacu

SEQ ID NO: 1495087 - RNA, 19 nt, Homo sapiens
  misc_RNA (1)...(19): siRNA sense strand
gaaacugggugcugauuau

SEQ ID NO: 1495088 - RNA, 19 nt, Homo sapiens
  misc_RNA (1)...(19): siRNA sense strand
cgcauaagcuguugaauuu

SEQ ID NO: 1495089 - RNA, 19 nt, Homo sapiens
  misc_RNA (1)...(19): siRNA sense strand
ggacaagaaugaaguaaag

SEQ ID NO: 1495090 - RNA, 19 nt, Homo sapiens
  misc_RNA (1)...(19): siRNA sense strand
guugagaugugcaguguua

SEQ ID NO: 1495091 - RNA, 19 nt, Homo sapiens
  misc_RNA (1)...(19): siRNA sense strand
uggcuaagcuaccgauuua

SEQ ID NO: 1495092 - RNA, 19 nt, Homo sapiens
  misc_RNA (1)...(19): siRNA sense strand
ucaugaagaucucaguuua

SEQ ID NO: 1495093 - RNA, 19 nt, Homo sapiens
  misc_RNA (1)...(19): siRNA sense strand
gaucuuuacuuguggcuaa

SEQ ID NO: 1495094 - RNA, 19 nt, Homo sapiens
  misc_RNA (1)...(19): siRNA sense strand
gcaauuggcaugggacuua

SEQ ID NO: 1495095 - RNA, 19 nt, Homo sapiens
  misc_RNA (1)...(19): siRNA sense strand
gcacagcuccuaucaacaa

SEQ ID NO: 1495096 - RNA, 19 nt, Homo sapiens
  misc_RNA (1)...(19): siRNA sense strand
gaaagaaauucagaaacug

SEQ ID NO: 1495097 - RNA, 19 nt, Homo sapiens
  misc_RNA (1)...(19): siRNA sense strand
agaaagaacuagaugguau

SEQ ID NO: 1495098 - RNA, 19 nt, Homo sapiens
  misc_RNA (1)...(19): siRNA sense strand
acaaauauuuccuguguug

SEQ ID NO: 1495099 - RNA, 19 nt, Homo sapiens
  misc_RNA (1)...(19): siRNA sense strand
ggaaacaggcuucacaugu

SEQ ID NO: 1495100 - RNA, 19 nt, Homo sapiens
  misc_RNA (1)...(19): siRNA sense strand
agauucagcucacgguuua

SEQ ID NO: 1495101 - RNA, 19 nt, Homo sapiens
  misc_RNA (1)...(19): siRNA sense strand
ccaaagcucuagggaguaa

SEQ ID NO: 1495102 - RNA, 19 nt, Homo sapiens
  misc_RNA (1)...(19): siRNA sense strand
ugaaguggcuguaauugau

SEQ ID NO: 1495103 - RNA, 19 nt, Homo sapiens
  misc_RNA (1)...(19): siRNA sense strand
uggcagagcuggcagauuc

SEQ ID NO: 1495104 - RNA, 19 nt, Homo sapiens
  misc_RNA (1)...(19): siRNA sense strand
uuaaagaccucauggaucu

SEQ ID NO: 1495105 - RNA, 19 nt, Homo sapiens
  misc_RNA (1)...(19): siRNA sense strand
gaacuagaaccaaucacaa

SEQ ID NO: 1495106 - RNA, 19 nt, Homo sapiens
  misc_RNA (1)...(19): siRNA sense strand
aaacugaacacaacaaaga

SEQ ID NO: 1495107 - RNA, 19 nt, Homo sapiens
  misc_RNA (1)...(19): siRNA sense strand
gaaagaacuagaugguauu

SEQ ID NO: 1495108 - RNA, 19 nt, Homo sapiens
  misc_RNA (1)...(19): siRNA sense strand
gcaacacuguccaaucuca

SEQ ID NO: 1495109 - RNA, 19 nt, Homo sapiens
  misc_RNA (1)...(19): siRNA sense strand
gagacaugccaaacaaaua

SEQ ID NO: 1495110 - RNA, 19 nt, Homo sapiens
  misc_RNA (1)...(19): siRNA sense strand
gaccagagcacuucuagga

SEQ ID NO: 1495111 - RNA, 19 nt, Homo sapiens
  misc_RNA (1)...(19): siRNA sense strand
gaggaaagaaauucagaaa

SEQ ID NO: 1495112 - RNA, 19 nt, Homo sapiens
  misc_RNA (1)...(19): siRNA sense strand
ggagagcugucccuugcuu

SEQ ID NO: 1495113 - RNA, 19 nt, Homo sapiens
  misc_RNA (1)...(19): siRNA sense strand
caagauggugugcacaaua

SEQ ID NO: 1495114 - RNA, 19 nt, Homo sapiens
  misc_RNA (1)...(19): siRNA sense strand
guaaggaugaucuacguaa

SEQ ID NO: 1495115 - RNA, 19 nt, Homo sapiens
  misc_RNA (1)...(19): siRNA sense strand
caaauggccuuuacuucca

SEQ ID NO: 1495116 - RNA, 19 nt, Homo sapiens
  misc_RNA (1)...(19): siRNA sense strand
gggacugcauugucuguuu

SEQ ID NO: 1495117 - RNA, 19 nt, Homo sapiens
  misc_RNA (1)...(19): siRNA sense strand
uaaggaugaucuacguaaa

SEQ ID NO: 1495118 - RNA, 19 nt, Homo sapiens
  misc_RNA (1)...(19): siRNA sense strand
gcacaugagaucuucgaaa

SEQ ID NO: 1495119 - RNA, 19 nt, Homo sapiens
  misc_RNA (1)...(19): siRNA sense strand
aaggagagguuacaacaau

SEQ ID NO: 1495120 - RNA, 19 nt, Homo sapiens
  misc_RNA (1)...(19): siRNA sense strand
ugucuuggaucuuuacuug

SEQ ID NO: 1495121 - RNA, 19 nt, Homo sapiens
  misc_RNA (1)...(19): siRNA sense strand
agaacuagaugguauuauc

SEQ ID NO: 1495122 - RNA, 19 nt, Homo sapiens
  misc_RNA (1)...(19): siRNA sense strand
uguguguucuucacuguua

SEQ ID NO: 1495123 - RNA, 19 nt, Homo sapiens
  misc_RNA (1)...(19): siRNA sense strand
uaaaauuacuggcacauga

SEQ ID NO: 1495124 - RNA, 19 nt, Homo sapiens
  misc_RNA (1)...(19): siRNA sense strand
ggagagguuacaacaauga

SEQ ID NO: 1495125 - RNA, 19 nt, Homo sapiens
  misc_RNA (1)...(19): siRNA sense strand
uggagaaccugcugcuauu

SEQ ID NO: 1495126 - RNA, 19 nt, Homo sapiens
  misc_RNA (1)...(19): siRNA sense strand
gcaugggacuuaauuugag

SEQ ID NO: 1495127 - RNA, 19 nt, Homo sapiens
  misc_RNA (1)...(19): siRNA sense strand
cauaagcuguugaauuugg

SEQ ID NO: 1495128 - RNA, 19 nt, Homo sapiens
  misc_RNA (1)...(19): siRNA sense strand
ggccuuuacuuccaccuaa

SEQ ID NO: 1495129 - RNA, 19 nt, Homo sapiens
  misc_RNA (1)...(19): siRNA sense strand
agagagaacuagaaccaau

SEQ ID NO: 1495130 - RNA, 19 nt, Homo sapiens
  misc_RNA (1)...(19): siRNA sense strand
gaagagcgugugacaguuc

SEQ ID NO: 1495131 - RNA, 19 nt, Homo sapiens
  misc_RNA (1)...(19): siRNA sense strand
uagaugguauuauccaaga

SEQ ID NO: 1495132 - RNA, 19 nt, Homo sapiens
  misc_RNA (1)...(19): siRNA sense strand
cacgaugucuuggaucuuu

SEQ ID NO: 1495133 - RNA, 19 nt, Homo sapiens
  misc_RNA (1)...(19): siRNA sense strand
cagaguugauccagcauau

SEQ ID NO: 1495134 - RNA, 19 nt, Homo sapiens
  misc_RNA (1)...(19): siRNA sense strand
gcuggaccaugcacuagaa

SEQ ID NO: 1495135 - RNA, 19 nt, Homo sapiens
  misc_RNA (1)...(19): siRNA sense strand
gauccagcauauuccacua

SEQ ID NO: 1495136 - RNA, 19 nt, Homo sapiens
  misc_RNA (1)...(19): siRNA sense strand
aagauggugugcacaauau

SEQ ID NO: 1495137 - RNA, 19 nt, Homo sapiens
  misc_RNA (1)...(19): siRNA sense strand
caaacaguggaaagacuua

SEQ ID NO: 1495138 - RNA, 19 nt, Homo sapiens
  misc_RNA (1)...(19): siRNA sense strand
gaaggagagguuacaacaa

SEQ ID NO: 1495139 - RNA, 19 nt, Homo sapiens
  misc_RNA (1)...(19): siRNA sense strand
aaucagcuguuauauaugg

SEQ ID NO: 1495140 - RNA, 19 nt, Homo sapiens
  misc_RNA (1)...(19): siRNA sense strand
gagaaccugcugcuauuga

SEQ ID NO: 1495141 - RNA, 19 nt, Homo sapiens
  misc_RNA (1)...(19): siRNA sense strand
gaaauacuucucagcaaag

SEQ ID NO: 1495142 - RNA, 19 nt, Homo sapiens
  misc_RNA (1)...(19): siRNA sense strand
cagcuccuaucaacaagaa

SEQ ID NO: 1495143 - RNA, 19 nt, Homo sapiens
  misc_RNA (1)...(19): siRNA sense strand
uuaaagagccaagcuagaa

SEQ ID NO: 1495144 - RNA, 19 nt, Homo sapiens
  misc_RNA (1)...(19): siRNA sense strand
ucugcaauauggaugauuu

SEQ ID NO: 1495145 - RNA, 19 nt, Homo sapiens
  misc_RNA (1)...(19): siRNA sense strand
uuacuuccaccuaagaaua

SEQ ID NO: 1495146 - RNA, 19 nt, Homo sapiens
  misc_RNA (1)...(19): siRNA sense strand
ugagcagauugaaauguuu

SEQ ID NO: 1495147 - RNA, 19 nt, Homo sapiens
  misc_RNA (1)...(19): siRNA sense strand
ggacgagaagaaagaagaa

SEQ ID NO: 1495148 - RNA, 19 nt, Homo sapiens
  misc_RNA (1)...(19): siRNA sense strand
gcuaagcuaccgauuuaug

SEQ ID NO: 1495149 - RNA, 19 nt, Homo sapiens
  misc_RNA (1)...(19): siRNA sense strand
gaguugauccagcauauuc

SEQ ID NO: 1495150 - RNA, 19 nt, Homo sapiens
  misc_RNA (1)...(19): siRNA sense strand
caaagucuggaguguauug

SEQ ID NO: 1495151 - RNA, 19 nt, Homo sapiens
  misc_RNA (1)...(19): siRNA sense strand
acaacaaacugaacacaac

SEQ ID NO: 1495152 - RNA, 19 nt, Homo sapiens
  misc_RNA (1)...(19): siRNA sense strand
uauucgagaucuccagaaa

SEQ ID NO: 1495153 - RNA, 19 nt, Homo sapiens
  misc_RNA (1)...(19): siRNA sense strand
ggcaugggacuuaauuuga

SEQ ID NO: 1495154 - RNA, 19 nt, Homo sapiens
  misc_RNA (1)...(19): siRNA sense strand
gcaguguuacaacuccuua

SEQ ID NO: 1495155 - RNA, 19 nt, Homo sapiens
  misc_RNA (1)...(19): siRNA sense strand
agacaugccaaacaaauau

SEQ ID NO: 1495156 - RNA, 19 nt, Homo sapiens
  misc_RNA (1)...(19): siRNA sense strand
ccagaugccagccuuauuc

SEQ ID NO: 1495157 - RNA, 19 nt, Homo sapiens
  misc_RNA (1)...(19): siRNA sense strand
caucaaauggccuuuacuu

SEQ ID NO: 1495158 - RNA, 19 nt, Homo sapiens
  misc_RNA (1)...(19): siRNA sense strand
agaaugaaguaaagaaggu

SEQ ID NO: 1495159 - RNA, 19 nt, Homo sapiens
  misc_RNA (1)...(19): siRNA sense strand
gcagaguugauccagcaua

SEQ ID NO: 1495160 - RNA, 19 nt, Homo sapiens
  misc_RNA (1)...(19): siRNA sense strand
uaaauuuucugcagaguug

SEQ ID NO: 1495161 - RNA, 19 nt, Homo sapiens
  misc_RNA (1)...(19): siRNA sense strand
caauuggcaugggacuuaa

SEQ ID NO: 1495162 - RNA, 19 nt, Homo sapiens
  misc_RNA (1)...(19): siRNA sense strand
cuauugaccuggugaugga

SEQ ID NO: 1495163 - RNA, 19 nt, Homo sapiens
  misc_RNA (1)...(19): siRNA sense strand
gcagcggaagauaauauuu

SEQ ID NO: 1495164 - RNA, 19 nt, Homo sapiens
  misc_RNA (1)...(19): siRNA sense strand
gaagaaggaaccugauucg

SEQ ID NO: 1495165 - RNA, 19 nt, Homo sapiens
  misc_RNA (1)...(19): siRNA sense strand
uucgagaucuccagaaaga

SEQ ID NO: 1495166 - RNA, 19 nt, Homo sapiens
  misc_RNA (1)...(19): siRNA sense strand
cugagcagauugaaauguu

SEQ ID NO: 1495167 - RNA, 19 nt, Homo sapiens
  misc_RNA (1)...(19): siRNA sense strand
ggacugcauugucuguuuu

SEQ ID NO: 1495168 - RNA, 19 nt, Homo sapiens
  misc_RNA (1)...(19): siRNA sense strand
uguuacaacuccuuaugaa

SEQ ID NO: 1495169 - RNA, 19 nt, Homo sapiens
  misc_RNA (1)...(19): siRNA sense strand
cuugagacaugccaaacaa

SEQ ID NO: 1495170 - RNA, 19 nt, Homo sapiens
  misc_RNA (1)...(19): siRNA sense strand
ucaacaagaagcagccuuu

SEQ ID NO: 1495171 - RNA, 19 nt, Homo sapiens
  misc_RNA (1)...(19): siRNA sense strand
uaaagcccaguaucaauga

SEQ ID NO: 1495172 - RNA, 19 nt, Homo sapiens
  misc_RNA (1)...(19): siRNA sense strand
ugauggagcuuauguacac

SEQ ID NO: 1495173 - RNA, 19 nt, Homo sapiens
  misc_RNA (1)...(19): siRNA sense strand
gugaagagcgugugacagu

SEQ ID NO: 1495174 - RNA, 19 nt, Homo sapiens
  misc_RNA (1)...(19): siRNA sense strand
agcaaagucuggaguguau

SEQ ID NO: 1495175 - RNA, 19 nt, Homo sapiens
  misc_RNA (1)...(19): siRNA sense strand
gagcagauugaaauguuug

SEQ ID NO: 1495176 - RNA, 19 nt, Homo sapiens
  misc_RNA (1)...(19): siRNA sense strand
ggaaugagccccugaccuu

SEQ ID NO: 1495177 - RNA, 19 nt, Homo sapiens
  misc_RNA (1)...(19): siRNA sense strand
gaagcagccuuuugugugu

SEQ ID NO: 1495178 - RNA, 19 nt, Homo sapiens
  misc_RNA (1)...(19): siRNA sense strand
gaaguggcuguaauugaug

SEQ ID NO: 1495179 - RNA, 19 nt, Homo sapiens
  misc_RNA (1)...(19): siRNA sense strand
gcucuagggaguaaagcua

SEQ ID NO: 1495180 - RNA, 19 nt, Homo sapiens
  misc_RNA (1)...(19): siRNA sense strand
cagaaagaacuagauggua

SEQ ID NO: 1495181 - RNA, 19 nt, Homo sapiens
  misc_RNA (1)...(19): siRNA sense strand
agaaacugggugcugauua

SEQ ID NO: 1495182 - RNA, 19 nt, Homo sapiens
  misc_RNA (1)...(19): siRNA sense strand
gaauauuaaagaccucaug

SEQ ID NO: 1495183 - RNA, 19 nt, Homo sapiens
  misc_RNA (1)...(19): siRNA sense strand
aaagggagagagagaacua

SEQ ID NO: 1495184 - RNA, 19 nt, Homo sapiens
  misc_RNA (1)...(19): siRNA sense strand
guggagaaccugcugcuau

SEQ ID NO: 1495185 - RNA, 19 nt, Homo sapiens
  misc_RNA (1)...(19): siRNA sense strand
cgacauggauuguguauau

SEQ ID NO: 1495186 - RNA, 19 nt, Homo sapiens
  misc_RNA (1)...(19): siRNA sense strand
gcucaggacuucaguauga

SEQ ID NO: 1495187 - RNA, 19 nt, Homo sapiens
  misc_RNA (1)...(19): siRNA sense strand
cgaagcauaucccgucuua

SEQ ID NO: 1495188 - RNA, 19 nt, Homo sapiens
  misc_RNA (1)...(19): siRNA sense strand
gggagaagauguccacuga

SEQ ID NO: 1495189 - RNA, 19 nt, Homo sapiens
  misc_RNA (1)...(19): siRNA sense strand
gagaagauguccacugacu

SEQ ID NO: 1495190 - RNA, 19 nt, Homo sapiens
  misc_RNA (1)...(19): siRNA sense strand
gagccacacucguaucuuc

SEQ ID NO: 1495191 - RNA, 19 nt, Homo sapiens
  misc_RNA (1)...(19): siRNA sense strand
ggacauugacguuguggaa

SEQ ID NO: 1495192 - RNA, 19 nt, Homo sapiens
  misc_RNA (1)...(19): siRNA sense strand
gaauccaguucauaagaug

SEQ ID NO: 1495193 - RNA, 19 nt, Homo sapiens
  misc_RNA (1)...(19): siRNA sense strand
ccagagauguggugaagca

SEQ ID NO: 1495194 - RNA, 19 nt, Homo sapiens
  misc_RNA (1)...(19): siRNA sense strand
acacgaauccaguucauaa

SEQ ID NO: 1495195 - RNA, 19 nt, Homo sapiens
  misc_RNA (1)...(19): siRNA sense strand
gggcuucccuuccuaccaa

SEQ ID NO: 1495196 - RNA, 19 nt, Homo sapiens
  misc_RNA (1)...(19): siRNA sense strand
cgaauccaguucauaagau

SEQ ID NO: 1495197 - RNA, 19 nt, Homo sapiens
  misc_RNA (1)...(19): siRNA sense strand
ugaagcaccaccucucuaa

SEQ ID NO: 1495198 - RNA, 19 nt, Homo sapiens
  misc_RNA (1)...(19): siRNA sense strand
gcauaucccgucuuacaga

SEQ ID NO: 1495199 - RNA, 19 nt, Homo sapiens
  misc_RNA (1)...(19): siRNA sense strand
caucaugcgagaucgaaua

SEQ ID NO: 1495200 - RNA, 19 nt, Homo sapiens
  misc_RNA (1)...(19): siRNA sense strand
gcaggugagacgaagcaua

SEQ ID NO: 1495201 - RNA, 19 nt, Homo sapiens
  misc_RNA (1)...(19): siRNA sense strand
guucggacauugacguugu

SEQ ID NO: 1495202 - RNA, 19 nt, Homo sapiens
  misc_RNA (1)...(19): siRNA sense strand
gacauggauuguguauauu

SEQ ID NO: 1495203 - RNA, 19 nt, Homo sapiens
  misc_RNA (1)...(19): siRNA sense strand
caggugagacgaagcauau

SEQ ID NO: 1495204 - RNA, 19 nt, Homo sapiens
  misc_RNA (1)...(19): siRNA sense strand
aaagugaggcugugucugu

SEQ ID NO: 1495205 - RNA, 19 nt, Homo sapiens
  misc_RNA (1)...(19): siRNA sense strand
gauaauuacgacauggauu

SEQ ID NO: 1495206 - RNA, 19 nt, Homo sapiens
  misc_RNA (1)...(19): siRNA sense strand
caugcgagaucgaauagag

SEQ ID NO: 1495207 - RNA, 19 nt, Homo sapiens
  misc_RNA (1)...(19): siRNA sense strand
uggauuguguauauucuug

SEQ ID NO: 1495208 - RNA, 19 nt, Homo sapiens
  misc_RNA (1)...(19): siRNA sense strand
aagcauaucccgucuuaca

SEQ ID NO: 1495209 - RNA, 19 nt, Homo sapiens
  misc_RNA (1)...(19): siRNA sense strand
guauauucuugcucggaaa

SEQ ID NO: 1495210 - RNA, 19 nt, Homo sapiens
  misc_RNA (1)...(19): siRNA sense strand
ggaaagugaggcugugucu

SEQ ID NO: 1495211 - RNA, 19 nt, Homo sapiens
  misc_RNA (1)...(19): siRNA sense strand
ugucucagcucaggacuuc

SEQ ID NO: 1495212 - RNA, 19 nt, Homo sapiens
  misc_RNA (1)...(19): siRNA sense strand
gaggacaucaugcgagauc

SEQ ID NO: 1495213 - RNA, 19 nt, Homo sapiens
  misc_RNA (1)...(19): siRNA sense strand
agauggagccacacucgua

SEQ ID NO: 1495214 - RNA, 19 nt, Homo sapiens
  misc_RNA (1)...(19): siRNA sense strand
cucuaagucugauuuguug

SEQ ID NO: 1495215 - RNA, 19 nt, Homo sapiens
  misc_RNA (1)...(19): siRNA sense strand
cuacaucauugguugaaaa

SEQ ID NO: 1495216 - RNA, 19 nt, Homo sapiens
  misc_RNA (1)...(19): siRNA sense strand
auaauuacgacauggauug

SEQ ID NO: 1495217 - RNA, 19 nt, Homo sapiens
  misc_RNA (1)...(19): siRNA sense strand
cagcucaggacuucaguau

SEQ ID NO: 1495218 - RNA, 19 nt, Homo sapiens
  misc_RNA (1)...(19): siRNA sense strand
uaucccgucuuacagaugu

SEQ ID NO: 1495219 - RNA, 19 nt, Homo sapiens
  misc_RNA (1)...(19): siRNA sense strand
gauggagccacacucguau

SEQ ID NO: 1495220 - RNA, 19 nt, Homo sapiens
  misc_RNA (1)...(19): siRNA sense strand
gaggagagaacacgaaucc

SEQ ID NO: 1495221 - RNA, 19 nt, Homo sapiens
  misc_RNA (1)...(19): siRNA sense strand
ucucuaagucugauuuguu

SEQ ID NO: 1495222 - RNA, 19 nt, Homo sapiens
  misc_RNA (1)...(19): siRNA sense strand
guacuacaucauugguuga

SEQ ID NO: 1495223 - RNA, 19 nt, Homo sapiens
  misc_RNA (1)...(19): siRNA sense strand
aauaaccaguucggacauu

SEQ ID NO: 1495224 - RNA, 19 nt, Homo sapiens
  misc_RNA (1)...(19): siRNA sense strand
uaaccaguucggacauuga

SEQ ID NO: 1495225 - RNA, 19 nt, Homo sapiens
  misc_RNA (1)...(19): siRNA sense strand
cauaucccgucuuacagau

SEQ ID NO: 1495226 - RNA, 19 nt, Homo sapiens
  misc_RNA (1)...(19): siRNA sense strand
aggaaaagcuguccaucaa

SEQ ID NO: 1495227 - RNA, 19 nt, Homo sapiens
  misc_RNA (1)...(19): siRNA sense strand
acauugacguuguggaaag

SEQ ID NO: 1495228 - RNA, 19 nt, Homo sapiens
  misc_RNA (1)...(19): siRNA sense strand
gagccaagagguccuagag

SEQ ID NO: 1495229 - RNA, 19 nt, Homo sapiens
  misc_RNA (1)...(19): siRNA sense strand
gagcaggugagacgaagca

SEQ ID NO: 1495230 - RNA, 19 nt, Homo sapiens
  misc_RNA (1)...(19): siRNA sense strand
ggacaucaugcgagaucga

SEQ ID NO: 1495231 - RNA, 19 nt, Homo sapiens
  misc_RNA (1)...(19): siRNA sense strand
gugaagcaccaccucucua

SEQ ID NO: 1495232 - RNA, 19 nt, Homo sapiens
  misc_RNA (1)...(19): siRNA sense strand
ccaagugccaagugagaug

SEQ ID NO: 1495233 - RNA, 19 nt, Homo sapiens
  misc_RNA (1)...(19): siRNA sense strand
acacucguaucuuccaagu

SEQ ID NO: 1495234 - RNA, 19 nt, Homo sapiens
  misc_RNA (1)...(19): siRNA sense strand
ccacacucguaucuuccaa

SEQ ID NO: 1495235 - RNA, 19 nt, Homo sapiens
  misc_RNA (1)...(19): siRNA sense strand
ccacgugaccagagaugug

SEQ ID NO: 1495236 - RNA, 19 nt, Homo sapiens
  misc_RNA (1)...(19): siRNA sense strand
gacauugacguuguggaaa

SEQ ID NO: 1495237 - RNA, 19 nt, Homo sapiens
  misc_RNA (1)...(19): siRNA sense strand
aagugaggcugugucugua

SEQ ID NO: 1495238 - RNA, 19 nt, Homo sapiens
  misc_RNA (1)...(19): siRNA sense strand
gguguaagggagaagaugu

SEQ ID NO: 1495239 - RNA, 19 nt, Homo sapiens
  misc_RNA (1)...(19): siRNA sense strand
gaagcaccaccucucuaag

SEQ ID NO: 1495240 - RNA, 19 nt, Homo sapiens
  misc_RNA (1)...(19): siRNA sense strand
caagugccaagugagauga

SEQ ID NO: 1495241 - RNA, 19 nt, Homo sapiens
  misc_RNA (1)...(19): siRNA sense strand
cauggauuguguauauucu

SEQ ID NO: 1495242 - RNA, 19 nt, Homo sapiens
  misc_RNA (1)...(19): siRNA sense strand
agagaacacgaauccaguu

SEQ ID NO: 1495243 - RNA, 19 nt, Homo sapiens
  misc_RNA (1)...(19): siRNA sense strand
gaagagaauuggcaacuga

SEQ ID NO: 1495244 - RNA, 19 nt, Homo sapiens
  misc_RNA (1)...(19): siRNA sense strand
caaaugaguuucgcuguua

SEQ ID NO: 1495245 - RNA, 19 nt, Homo sapiens
  misc_RNA (1)...(19): siRNA sense strand
ggacuuacccgaaagaauu

SEQ ID NO: 1495246 - RNA, 19 nt, Homo sapiens
  misc_RNA (1)...(19): siRNA sense strand
gcuguuaugugaauuauga

SEQ ID NO: 1495247 - RNA, 19 nt, Homo sapiens
  misc_RNA (1)...(19): siRNA sense strand
gcaaaugaguuucgcuguu

SEQ ID NO: 1495248 - RNA, 19 nt, Homo sapiens
  misc_RNA (1)...(19): siRNA sense strand
gaguuucgcuguuauguga

SEQ ID NO: 1495249 - RNA, 19 nt, Homo sapiens
  misc_RNA (1)...(19): siRNA sense strand
uagcagcucuccaggaauu

SEQ ID NO: 1495250 - RNA, 19 nt, Homo sapiens
  misc_RNA (1)...(19): siRNA sense strand
gcgaggaugauaaauauaa

SEQ ID NO: 1495251 - RNA, 19 nt, Homo sapiens
  misc_RNA (1)...(19): siRNA sense strand
ucagagagcugugcagaga

SEQ ID NO: 1495252 - RNA, 19 nt, Homo sapiens
  misc_RNA (1)...(19): siRNA sense strand
gaaagaauugcugcacaua

SEQ ID NO: 1495253 - RNA, 19 nt, Homo sapiens
  misc_RNA (1)...(19): siRNA sense strand
gugaagaugugcacguuug

SEQ ID NO: 1495254 - RNA, 19 nt, Homo sapiens
  misc_RNA (1)...(19): siRNA sense strand
ggaggcaauugcagcugua

SEQ ID NO: 1495255 - RNA, 19 nt, Homo sapiens
  misc_RNA (1)...(19): siRNA sense strand
caucggaaaccgucaagua

SEQ ID NO: 1495256 - RNA, 19 nt, Homo sapiens
  misc_RNA (1)...(19): siRNA sense strand
gagaggaguuuauuuucua

SEQ ID NO: 1495257 - RNA, 19 nt, Homo sapiens
  misc_RNA (1)...(19): siRNA sense strand
ggaggaaugucucagaaaa

SEQ ID NO: 1495258 - RNA, 19 nt, Homo sapiens
  misc_RNA (1)...(19): siRNA sense strand
ggaagaacaggcagcagaa

SEQ ID NO: 1495259 - RNA, 19 nt, Homo sapiens
  misc_RNA (1)...(19): siRNA sense strand
cgaaagaauugcugcacau

SEQ ID NO: 1495260 - RNA, 19 nt, Homo sapiens
  misc_RNA (1)...(19): siRNA sense strand
gcacguuuguuccaagaca

SEQ ID NO: 1495261 - RNA, 19 nt, Homo sapiens
  misc_RNA (1)...(19): siRNA sense strand
gaauugcugcacauaguuu

SEQ ID NO: 1495262 - RNA, 19 nt, Homo sapiens
  misc_RNA (1)...(19): siRNA sense strand
agagagcugugcagagaaa

SEQ ID NO: 1495263 - RNA, 19 nt, Homo sapiens
  misc_RNA (1)...(19): siRNA sense strand
ccauuggacuuacccgaaa

SEQ ID NO: 1495264 - RNA, 19 nt, Homo sapiens
  misc_RNA (1)...(19): siRNA sense strand
aggcgaggaugauaaauau

SEQ ID NO: 1495265 - RNA, 19 nt, Homo sapiens
  misc_RNA (1)...(19): siRNA sense strand
gagugaagaugugcacguu

SEQ ID NO: 1495266 - RNA, 19 nt, Homo sapiens
  misc_RNA (1)...(19): siRNA sense strand
caggcgaggaugauaaaua

SEQ ID NO: 1495267 - RNA, 19 nt, Homo sapiens
  misc_RNA (1)...(19): siRNA sense strand
cuuagcagcucuccaggaa

SEQ ID NO: 1495268 - RNA, 19 nt, Homo sapiens
  misc_RNA (1)...(19): siRNA sense strand
aagaauugcugcacauagu

SEQ ID NO: 1495269 - RNA, 19 nt, Homo sapiens
  misc_RNA (1)...(19): siRNA sense strand
ggcagaaucgcauguguga

SEQ ID NO: 1495270 - RNA, 19 nt, Homo sapiens
  misc_RNA (1)...(19): siRNA sense strand
gagcaaaagcaacaaauug

SEQ ID NO: 1495271 - RNA, 19 nt, Homo sapiens
  misc_RNA (1)...(19): siRNA sense strand
aauugcagcuguaggagaa

SEQ ID NO: 1495272 - RNA, 19 nt, Homo sapiens
  misc_RNA (1)...(19): siRNA sense strand
gaagaugugcacguuuguu

SEQ ID NO: 1495273 - RNA, 19 nt, Homo sapiens
  misc_RNA (1)...(19): siRNA sense strand
cagaaucgcaugugugagu

SEQ ID NO: 1495274 - RNA, 19 nt, Homo sapiens
  misc_RNA (1)...(19): siRNA sense strand
aggagaagguggcagaauc

SEQ ID NO: 1495275 - RNA, 19 nt, Homo sapiens
  misc_RNA (1)...(19): siRNA sense strand
ggagaggaguuuauuuucu

SEQ ID NO: 1495276 - RNA, 19 nt, Homo sapiens
  misc_RNA (1)...(19): siRNA sense strand
gcuggacugugggaucuga

SEQ ID NO: 1495277 - RNA, 19 nt, Homo sapiens
  misc_RNA (1)...(19): siRNA sense strand
ucggaggaaugucucagaa

SEQ ID NO: 1495278 - RNA, 19 nt, Homo sapiens
  misc_RNA (1)...(19): siRNA sense strand
cccggaacuuggcaaauga

SEQ ID NO: 1495279 - RNA, 19 nt, Homo sapiens
  misc_RNA (1)...(19): siRNA sense strand
gugcacguuuguuccaaga

SEQ ID NO: 1495280 - RNA, 19 nt, Homo sapiens
  misc_RNA (1)...(19): siRNA sense strand
guauggagaggaguuuauu

SEQ ID NO: 1495281 - RNA, 19 nt, Homo sapiens
  misc_RNA (1)...(19): siRNA sense strand
gagccaggcgaggaugaua

SEQ ID NO: 1495282 - RNA, 19 nt, Homo sapiens
  misc_RNA (1)...(19): siRNA sense strand
gcuuucugcccaugccuua

SEQ ID NO: 1495283 - RNA, 19 nt, Homo sapiens
  misc_RNA (1)...(19): siRNA sense strand
gggcuggacugugggaucu

SEQ ID NO: 1495284 - RNA, 19 nt, Homo sapiens
  misc_RNA (1)...(19): siRNA sense strand
uuuggaagaugaugagaca

SEQ ID NO: 1495285 - RNA, 19 nt, Homo sapiens
  misc_RNA (1)...(19): siRNA sense strand
aaaugaguuucgcuguuau

SEQ ID NO: 1495286 - RNA, 19 nt, Homo sapiens
  misc_RNA (1)...(19): siRNA sense strand
ggcaauugcagcuguagga

SEQ ID NO: 1495287 - RNA, 19 nt, Homo sapiens
  misc_RNA (1)...(19): siRNA sense strand
gccaggcgaggaugauaaa

SEQ ID NO: 1495288 - RNA, 19 nt, Homo sapiens
  misc_RNA (1)...(19): siRNA sense strand
caagacacacccggaacuu

SEQ ID NO: 1495289 - RNA, 19 nt, Homo sapiens
  misc_RNA (1)...(19): siRNA sense strand
cgaggaugauaaauauaac

SEQ ID NO: 1495290 - RNA, 19 nt, Homo sapiens
  misc_RNA (1)...(19): siRNA sense strand
gaugagacaccccagcuuu

SEQ ID NO: 1495291 - RNA, 19 nt, Homo sapiens
  misc_RNA (1)...(19): siRNA sense strand
ggagaagguggcagaaucg

SEQ ID NO: 1495292 - RNA, 19 nt, Homo sapiens
  misc_RNA (1)...(19): siRNA sense strand
agaagagaauuggcaacug

SEQ ID NO: 1495293 - RNA, 19 nt, Homo sapiens
  misc_RNA (1)...(19): siRNA sense strand
acccggaacuuggcaaaug

SEQ ID NO: 1495294 - RNA, 19 nt, Homo sapiens
  misc_RNA (1)...(19): siRNA sense strand
gacuuacccgaaagaauug

SEQ ID NO: 1495295 - RNA, 19 nt, Homo sapiens
  misc_RNA (1)...(19): siRNA sense strand
aaagaauugcugcacauag

SEQ ID NO: 1495296 - RNA, 19 nt, Homo sapiens
  misc_RNA (1)...(19): siRNA sense strand
uauggagaggaguuuauuu

SEQ ID NO: 1495297 - RNA, 19 nt, Homo sapiens
  misc_RNA (1)...(19): siRNA sense strand
aaacaucggaaaccgucaa

SEQ ID NO: 1495298 - RNA, 19 nt, Homo sapiens
  misc_RNA (1)...(19): siRNA sense strand
gaaaucagccgaugucugu

SEQ ID NO: 1495299 - RNA, 19 nt, Homo sapiens
  misc_RNA (1)...(19): siRNA sense strand
gcagagaagcuaaguggua

SEQ ID NO: 1495300 - RNA, 19 nt, Homo sapiens
  misc_RNA (1)...(19): siRNA sense strand
aaagacaagugaaucaaga

SEQ ID NO: 1495301 - RNA, 19 nt, Homo sapiens
  misc_RNA (1)...(19): siRNA sense strand
uccgaaggauccaugauua

SEQ ID NO: 1495302 - RNA, 19 nt, Homo sapiens
  misc_RNA (1)...(19): siRNA sense strand
agcaagagcuuacuacaga

SEQ ID NO: 1495303 - RNA, 19 nt, Homo sapiens
  misc_RNA (1)...(19): siRNA sense strand
cugauuaucuuccagcaaa

SEQ ID NO: 1495304 - RNA, 19 nt, Homo sapiens
  misc_RNA (1)...(19): siRNA sense strand
ugaacgacaugaagcaaga

SEQ ID NO: 1495305 - RNA, 19 nt, Homo sapiens
  misc_RNA (1)...(19): siRNA sense strand
ggagaaauuccucauucaa

SEQ ID NO: 1495306 - RNA, 19 nt, Homo sapiens
  misc_RNA (1)...(19): siRNA sense strand
gccgaugucuguucuuugu

SEQ ID NO: 1495307 - RNA, 19 nt, Homo sapiens
  misc_RNA (1)...(19): siRNA sense strand
aaacugagcaaacaaggaa

SEQ ID NO: 1495308 - RNA, 19 nt, Homo sapiens
  misc_RNA (1)...(19): siRNA sense strand
gaaauuccucauucaacuu

SEQ ID NO: 1495309 - RNA, 19 nt, Homo sapiens
  misc_RNA (1)...(19): siRNA sense strand
gugauaaccuuagauuaca

SEQ ID NO: 1495310 - RNA, 19 nt, Homo sapiens
  misc_RNA (1)...(19): siRNA sense strand
guagugauaaccuuagauu

SEQ ID NO: 1495311 - RNA, 19 nt, Homo sapiens
  misc_RNA (1)...(19): siRNA sense strand
acaagugaaucaagaaagu

SEQ ID NO: 1495312 - RNA, 19 nt, Homo sapiens
  misc_RNA (1)...(19): siRNA sense strand
gcaaagacaagugaaucaa

SEQ ID NO: 1495313 - RNA, 19 nt, Homo sapiens
  misc_RNA (1)...(19): siRNA sense strand
gauuaucaagcacuucuuu

SEQ ID NO: 1495314 - RNA, 19 nt, Homo sapiens
  misc_RNA (1)...(19): siRNA sense strand
cagccgaugucuguucuuu

SEQ ID NO: 1495315 - RNA, 19 nt, Homo sapiens
  misc_RNA (1)...(19): siRNA sense strand
ucauucaacuucaucaaca

SEQ ID NO: 1495316 - RNA, 19 nt, Homo sapiens
  misc_RNA (1)...(19): siRNA sense strand
gagcuuacuacagaguuua

SEQ ID NO: 1495317 - RNA, 19 nt, Homo sapiens
  misc_RNA (1)...(19): siRNA sense strand
gaagacccuugaacgacau

SEQ ID NO: 1495318 - RNA, 19 nt, Homo sapiens
  misc_RNA (1)...(19): siRNA sense strand
cggagaaauuccucauuca

SEQ ID NO: 1495319 - RNA, 19 nt, Homo sapiens
  misc_RNA (1)...(19): siRNA sense strand
agaaauuccucauucaacu

SEQ ID NO: 1495320 - RNA, 19 nt, Homo sapiens
  misc_RNA (1)...(19): siRNA sense strand
ucucuagauuugaaacuga

SEQ ID NO: 1495321 - RNA, 19 nt, Homo sapiens
  misc_RNA (1)...(19): siRNA sense strand
guagaaaucagccgauguc

SEQ ID NO: 1495322 - RNA, 19 nt, Homo sapiens
  misc_RNA (1)...(19): siRNA sense strand
acggagaaauuccucauuc

SEQ ID NO: 1495323 - RNA, 19 nt, Homo sapiens
  misc_RNA (1)...(19): siRNA sense strand
cgaugucuguucuuugugu

SEQ ID NO: 1495324 - RNA, 19 nt, Homo sapiens
  misc_RNA (1)...(19): siRNA sense strand
gagaaauuccucauucaac

SEQ ID NO: 1495325 - RNA, 19 nt, Homo sapiens
  misc_RNA (1)...(19): siRNA sense strand
ucaacuucaucaacagcua

SEQ ID NO: 1495326 - RNA, 19 nt, Homo sapiens
  misc_RNA (1)...(19): siRNA sense strand
cugcuggccucuaccacua

SEQ ID NO: 1495327 - RNA, 19 nt, Homo sapiens
  misc_RNA (1)...(19): siRNA sense strand
guacuuuggguagugauaa

SEQ ID NO: 1495328 - RNA, 19 nt, Homo sapiens
  misc_RNA (1)...(19): siRNA sense strand
gacacacucuggccauucu

SEQ ID NO: 1495329 - RNA, 19 nt, Homo sapiens
  misc_RNA (1)...(19): siRNA sense strand
caaagacaagugaaucaag

SEQ ID NO: 1495330 - RNA, 19 nt, Homo sapiens
  misc_RNA (1)...(19): siRNA sense strand
agagcuuacuacagaguuu

SEQ ID NO: 1495331 - RNA, 19 nt, Homo sapiens
  misc_RNA (1)...(19): siRNA sense strand
ggguagugauaaccuuaga

SEQ ID NO: 1495332 - RNA, 19 nt, Homo sapiens
  misc_RNA (1)...(19): siRNA sense strand
ccacuaucuucucucuaga

SEQ ID NO: 1495333 - RNA, 19 nt, Homo sapiens
  misc_RNA (1)...(19): siRNA sense strand
ugaaacugauuaucuucca

SEQ ID NO: 1495334 - RNA, 19 nt, Homo sapiens
  misc_RNA (1)...(19): siRNA sense strand
ggacacacucuggccauuc

SEQ ID NO: 1495335 - RNA, 19 nt, Homo sapiens
  misc_RNA (1)...(19): siRNA sense strand
gcagaucuucagccucuuc

SEQ ID NO: 1495336 - RNA, 19 nt, Homo sapiens
  misc_RNA (1)...(19): siRNA sense strand
gaugucuguucuuuguguu

SEQ ID NO: 1495337 - RNA, 19 nt, Homo sapiens
  misc_RNA (1)...(19): siRNA sense strand
aucaagcacuucuuuggaa

SEQ ID NO: 1495338 - RNA, 19 nt, Homo sapiens
  misc_RNA (1)...(19): siRNA sense strand
agacaagugaaucaagaaa

SEQ ID NO: 1495339 - RNA, 19 nt, Homo sapiens
  misc_RNA (1)...(19): siRNA sense strand
caagugaaucaagaaaguu

SEQ ID NO: 1495340 - RNA, 19 nt, Homo sapiens
  misc_RNA (1)...(19): siRNA sense strand
uaucaagcacuucuuugga

SEQ ID NO: 1495341 - RNA, 19 nt, Homo sapiens
  misc_RNA (1)...(19): siRNA sense strand
ggccauuguccaaguagaa

SEQ ID NO: 1495342 - RNA, 19 nt, Homo sapiens
  misc_RNA (1)...(19): siRNA sense strand
ggcaaauauuucucuggau

SEQ ID NO: 1495343 - RNA, 19 nt, Homo sapiens
  misc_RNA (1)...(19): siRNA sense strand
cuaccacuaucuucucucu

SEQ ID NO: 1495344 - RNA, 19 nt, Homo sapiens
  misc_RNA (1)...(19): siRNA sense strand
cagcaaagacaagugaauc

SEQ ID NO: 1495345 - RNA, 19 nt, Homo sapiens
  misc_RNA (1)...(19): siRNA sense strand
accacuaucuucucucuag

SEQ ID NO: 1495346 - RNA, 19 nt, Homo sapiens
  misc_RNA (1)...(19): siRNA sense strand
ggaagcagagaagcuaagu

SEQ ID NO: 1495347 - RNA, 19 nt, Homo sapiens
  misc_RNA (1)...(19): siRNA sense strand
agugauaaccuuagauuac

SEQ ID NO: 1495348 - RNA, 19 nt, Homo sapiens
  misc_RNA (1)...(19): siRNA sense strand
gacaagugaaucaagaaag

SEQ ID NO: 1495349 - RNA, 19 nt, Homo sapiens
  misc_RNA (1)...(19): siRNA sense strand
gguacuuuggguagugaua

SEQ ID NO: 1495350 - RNA, 19 nt, Homo sapiens
  misc_RNA (1)...(19): siRNA sense strand
gaagcagagaagcuaagug

SEQ ID NO: 1495351 - RNA, 19 nt, Homo sapiens
  misc_RNA (1)...(19): siRNA sense strand
gggccauuguccaaguaga

SEQ ID NO: 1495352 - RNA, 19 nt, Homo sapiens
  misc_RNA (1)...(19): siRNA sense strand
gauaaccuuagauuacaag

SEQ ID NO: 1495353 - RNA, 19 nt, Homo sapiens
  misc_RNA (1)...(19): siRNA sense strand
gccauuguccaaguagaaa

SEQ ID NO: 1495354 - RNA, 19 nt, Homo sapiens
  misc_RNA (1)...(19): siRNA sense strand
aaaccacacggagaaauuc

SEQ ID NO: 1495355 - RNA, 19 nt, Homo sapiens
  misc_RNA (1)...(19): siRNA sense strand
caagagcuuacuacagagu

SEQ ID NO: 1495356 - RNA, 19 nt, Homo sapiens
  misc_RNA (1)...(19): siRNA sense strand
gaagagacauuuagaaaga

SEQ ID NO: 1495357 - RNA, 19 nt, Homo sapiens
  misc_RNA (1)...(19): siRNA sense strand
gaacacgacuggaagauga

SEQ ID NO: 1495358 - RNA, 19 nt, Homo sapiens
  misc_RNA (1)...(19): siRNA sense strand
ucacagugcugaaguauuu

SEQ ID NO: 1495359 - RNA, 19 nt, Homo sapiens
  misc_RNA (1)...(19): siRNA sense strand
gauauugaguucucugaua

SEQ ID NO: 1495360 - RNA, 19 nt, Homo sapiens
  misc_RNA (1)...(19): siRNA sense strand
gguagugacuucuuugaua

SEQ ID NO: 1495361 - RNA, 19 nt, Homo sapiens
  misc_RNA (1)...(19): siRNA sense strand
ggacaagaauccuuuccua

SEQ ID NO: 1495362 - RNA, 19 nt, Homo sapiens
  misc_RNA (1)...(19): siRNA sense strand
gcacauugcucccaagaau

SEQ ID NO: 1495363 - RNA, 19 nt, Homo sapiens
  misc_RNA (1)...(19): siRNA sense strand
gaagcaacaugaggaauuu

SEQ ID NO: 1495364 - RNA, 19 nt, Homo sapiens
  misc_RNA (1)...(19): siRNA sense strand
gagcuggccugacggauaa

SEQ ID NO: 1495365 - RNA, 19 nt, Homo sapiens
  misc_RNA (1)...(19): siRNA sense strand
ggucgacgcuggcugauuu

SEQ ID NO: 1495366 - RNA, 19 nt, Homo sapiens
  misc_RNA (1)...(19): siRNA sense strand
gcaaugaacucgaauccau

SEQ ID NO: 1495367 - RNA, 19 nt, Homo sapiens
  misc_RNA (1)...(19): siRNA sense strand
gcaaggaacugaacaacca

SEQ ID NO: 1495368 - RNA, 19 nt, Homo sapiens
  misc_RNA (1)...(19): siRNA sense strand
guacacagcccguuaaaga

SEQ ID NO: 1495369 - RNA, 19 nt, Homo sapiens
  misc_RNA (1)...(19): siRNA sense strand
aaacaauccugaucagaaa

SEQ ID NO: 1495370 - RNA, 19 nt, Homo sapiens
  misc_RNA (1)...(19): siRNA sense strand
gcucaggcaucuuacuaua

SEQ ID NO: 1495371 - RNA, 19 nt, Homo sapiens
  misc_RNA (1)...(19): siRNA sense strand
gaucugcccucgcauguug

SEQ ID NO: 1495372 - RNA, 19 nt, Homo sapiens
  misc_RNA (1)...(19): siRNA sense strand
gaagauggcgcaacucaga

SEQ ID NO: 1495373 - RNA, 19 nt, Homo sapiens
  misc_RNA (1)...(19): siRNA sense strand
ugaugagccugauggauua

SEQ ID NO: 1495374 - RNA, 19 nt, Homo sapiens
  misc_RNA (1)...(19): siRNA sense strand
gcuauaacccucuacagua

SEQ ID NO: 1495375 - RNA, 19 nt, Homo sapiens
  misc_RNA (1)...(19): siRNA sense strand
ucagaaaccugcucuaaag

SEQ ID NO: 1495376 - RNA, 19 nt, Homo sapiens
  misc_RNA (1)...(19): siRNA sense strand
ggaggaaguugcgaauaaa

SEQ ID NO: 1495377 - RNA, 19 nt, Homo sapiens
  misc_RNA (1)...(19): siRNA sense strand
ggauugggauggagacauu

SEQ ID NO: 1495378 - RNA, 19 nt, Homo sapiens
  misc_RNA (1)...(19): siRNA sense strand
uaugagcgcuguauucuau

SEQ ID NO: 1495379 - RNA, 19 nt, Homo sapiens
  misc_RNA (1)...(19): siRNA sense strand
ugaaggcgcucacaaggaa

SEQ ID NO: 1495380 - RNA, 19 nt, Homo sapiens
  misc_RNA (1)...(19): siRNA sense strand
gagaaaacaugaaggaauu

SEQ ID NO: 1495381 - RNA, 19 nt, Homo sapiens
  misc_RNA (1)...(19): siRNA sense strand
gaagucagcccuacaucuu

SEQ ID NO: 1495382 - RNA, 19 nt, Homo sapiens
  misc_RNA (1)...(19): siRNA sense strand
cagaagccaugaacaaaga

SEQ ID NO: 1495383 - RNA, 19 nt, Homo sapiens
  misc_RNA (1)...(19): siRNA sense strand
gugaggaguucaaagauga

SEQ ID NO: 1495384 - RNA, 19 nt, Homo sapiens
  misc_RNA (1)...(19): siRNA sense strand
gaucagaaaccugcucuaa

SEQ ID NO: 1495385 - RNA, 19 nt, Homo sapiens
  misc_RNA (1)...(19): siRNA sense strand
caaacaauccugaucagaa

SEQ ID NO: 1495386 - RNA, 19 nt, Homo sapiens
  misc_RNA (1)...(19): siRNA sense strand
gaaaggaagagacauuuag

SEQ ID NO: 1495387 - RNA, 19 nt, Homo sapiens
  misc_RNA (1)...(19): siRNA sense strand
ccagugauacagcgaauua

SEQ ID NO: 1495388 - RNA, 19 nt, Homo sapiens
  misc_RNA (1)...(19): siRNA sense strand
gcaaagacaaggcuaagga

SEQ ID NO: 1495389 - RNA, 19 nt, Homo sapiens
  misc_RNA (1)...(19): siRNA sense strand
ggagugaggaguucaaaga

SEQ ID NO: 1495390 - RNA, 19 nt, Homo sapiens
  misc_RNA (1)...(19): siRNA sense strand
ggaggaggauguggugauu

SEQ ID NO: 1495391 - RNA, 19 nt, Homo sapiens
  misc_RNA (1)...(19): siRNA sense strand
gcccagcgaugcaugauau

SEQ ID NO: 1495392 - RNA, 19 nt, Homo sapiens
  misc_RNA (1)...(19): siRNA sense strand
aaggagauauugcuaggua

SEQ ID NO: 1495393 - RNA, 19 nt, Homo sapiens
  misc_RNA (1)...(19): siRNA sense strand
guccugaucuggaaaucua

SEQ ID NO: 1495394 - RNA, 19 nt, Homo sapiens
  misc_RNA (1)...(19): siRNA sense strand
ggacacugaugaugaaguc

SEQ ID NO: 1495395 - RNA, 19 nt, Homo sapiens
  misc_RNA (1)...(19): siRNA sense strand
gaggaaagccugacaaagg

SEQ ID NO: 1495396 - RNA, 19 nt, Homo sapiens
  misc_RNA (1)...(19): siRNA sense strand
aggaggaaguugcgaauaa

SEQ ID NO: 1495397 - RNA, 19 nt, Homo sapiens
  misc_RNA (1)...(19): siRNA sense strand
gaugaccucacccuucuua

SEQ ID NO: 1495398 - RNA, 19 nt, Homo sapiens
  misc_RNA (1)...(19): siRNA sense strand
ggucguggcauucugauuu

SEQ ID NO: 1495399 - RNA, 19 nt, Homo sapiens
  misc_RNA (1)...(19): siRNA sense strand
ugagcgcuguauucuauua

SEQ ID NO: 1495400 - RNA, 19 nt, Homo sapiens
  misc_RNA (1)...(19): siRNA sense strand
gcauguugcuguggaugua

SEQ ID NO: 1495401 - RNA, 19 nt, Homo sapiens
  misc_RNA (1)...(19): siRNA sense strand
ggaaagcacgcaguuggua

SEQ ID NO: 1495402 - RNA, 19 nt, Homo sapiens
  misc_RNA (1)...(19): siRNA sense strand
ggagcuggccugacggaua

SEQ ID NO: 1495403 - RNA, 19 nt, Homo sapiens
  misc_RNA (1)...(19): siRNA sense strand
guagugacuucuuugauag

SEQ ID NO: 1495404 - RNA, 19 nt, Homo sapiens
  misc_RNA (1)...(19): siRNA sense strand
cgagauugcucugcuguug

SEQ ID NO: 1495405 - RNA, 19 nt, Homo sapiens
  misc_RNA (1)...(19): siRNA sense strand
ggaaggauucugagcaaga

SEQ ID NO: 1495406 - RNA, 19 nt, Homo sapiens
  misc_RNA (1)...(19): siRNA sense strand
caagaggaucguagucuaa

SEQ ID NO: 1495407 - RNA, 19 nt, Homo sapiens
  misc_RNA (1)...(19): siRNA sense strand
gaccagccguggcaaugaa

SEQ ID NO: 1495408 - RNA, 19 nt, Homo sapiens
  misc_RNA (1)...(19): siRNA sense strand
acaagaggaucguagucua

SEQ ID NO: 1495409 - RNA, 19 nt, Homo sapiens
  misc_RNA (1)...(19): siRNA sense strand
gaccggaaccugcguguga

SEQ ID NO: 1495410 - RNA, 19 nt, Homo sapiens
  misc_RNA (1)...(19): siRNA sense strand
ucaaggaguuccagguguu

SEQ ID NO: 1495411 - RNA, 19 nt, Homo sapiens
  misc_RNA (1)...(19): siRNA sense strand
gcagaaugguccuauagac

SEQ ID NO: 1495412 - RNA, 19 nt, Homo sapiens
  misc_RNA (1)...(19): siRNA sense strand
cagcuuaugaccaucaaua

SEQ ID NO: 1495413 - RNA, 19 nt, Homo sapiens
  misc_RNA (1)...(19): siRNA sense strand
ugaggaaccugcagcaaca

SEQ ID NO: 1495414 - RNA, 19 nt, Homo sapiens
  misc_RNA (1)...(19): siRNA sense strand
gaaaccugcucuaaagacu

SEQ ID NO: 1495415 - RNA, 19 nt, Homo sapiens
  misc_RNA (1)...(19): siRNA sense strand
gaauaucgaggcacucuuc

SEQ ID NO: 1495416 - RNA, 19 nt, Homo sapiens
  misc_RNA (1)...(19): siRNA sense strand
ggaagagacauuuagaaag

SEQ ID NO: 1495417 - RNA, 19 nt, Homo sapiens
  misc_RNA (1)...(19): siRNA sense strand
gauugaagacuuugaggaa

SEQ ID NO: 1495418 - RNA, 19 nt, Homo sapiens
  misc_RNA (1)...(19): siRNA sense strand
acaaggacccggaugauga

SEQ ID NO: 1495419 - RNA, 19 nt, Homo sapiens
  misc_RNA (1)...(19): siRNA sense strand
aaagguucauccucaguuu

SEQ ID NO: 1495420 - RNA, 19 nt, Homo sapiens
  misc_RNA (1)...(19): siRNA sense strand
gacgcugucuauuacuaua

SEQ ID NO: 1495421 - RNA, 19 nt, Homo sapiens
  misc_RNA (1)...(19): siRNA sense strand
uuaaagaugucugcaagga

SEQ ID NO: 1495422 - RNA, 19 nt, Homo sapiens
  misc_RNA (1)...(19): siRNA sense strand
gcagauggagcucgaaauc

SEQ ID NO: 1495423 - RNA, 19 nt, Homo sapiens
  misc_RNA (1)...(19): siRNA sense strand
gaggagugccgcucuguga

SEQ ID NO: 1495424 - RNA, 19 nt, Homo sapiens
  misc_RNA (1)...(19): siRNA sense strand
ugacuucuuugauaguuug

SEQ ID NO: 1495425 - RNA, 19 nt, Homo sapiens
  misc_RNA (1)...(19): siRNA sense strand
ggaugaggguagugacuuc

SEQ ID NO: 1495426 - RNA, 19 nt, Homo sapiens
  misc_RNA (1)...(19): siRNA sense strand
gcagacuguuagcaaagaa

SEQ ID NO: 1495427 - RNA, 19 nt, Homo sapiens
  misc_RNA (1)...(19): siRNA sense strand
cacccuaucugucaauuca

SEQ ID NO: 1495428 - RNA, 19 nt, Homo sapiens
  misc_RNA (1)...(19): siRNA sense strand
gcugauuucuguaacauac

SEQ ID NO: 1495429 - RNA, 19 nt, Homo sapiens
  misc_RNA (1)...(19): siRNA sense strand
gagaagauggcgcaacuca

SEQ ID NO: 1495430 - RNA, 19 nt, Homo sapiens
  misc_RNA (1)...(19): siRNA sense strand
gcucugggcuuggccaugu

SEQ ID NO: 1495431 - RNA, 19 nt, Homo sapiens
  misc_RNA (1)...(19): siRNA sense strand
agacaaggcuaaggacuuc

SEQ ID NO: 1495432 - RNA, 19 nt, Homo sapiens
  misc_RNA (1)...(19): siRNA sense strand
gacgcuggcugauuucugu

SEQ ID NO: 1495433 - RNA, 19 nt, Homo sapiens
  misc_RNA (1)...(19): siRNA sense strand
ggaccaggaugaccaagac

SEQ ID NO: 1495434 - RNA, 19 nt, Homo sapiens
  misc_RNA (1)...(19): siRNA sense strand
gagcagaaugguccuauag

SEQ ID NO: 1495435 - RNA, 19 nt, Homo sapiens
  misc_RNA (1)...(19): siRNA sense strand
gaaggauucugagcaagag

SEQ ID NO: 1495436 - RNA, 19 nt, Homo sapiens
  misc_RNA (1)...(19): siRNA sense strand
cagaacagauggaaaagaa

SEQ ID NO: 1495437 - RNA, 19 nt, Homo sapiens
  misc_RNA (1)...(19): siRNA sense strand
gcacucuucgugucacuuu

SEQ ID NO: 1495438 - RNA, 19 nt, Homo sapiens
  misc_RNA (1)...(19): siRNA sense strand
agaaaggaagagacauuua

SEQ ID NO: 1495439 - RNA, 19 nt, Homo sapiens
  misc_RNA (1)...(19): siRNA sense strand
caggagaaguucagaaagg

SEQ ID NO: 1495440 - RNA, 19 nt, Homo sapiens
  misc_RNA (1)...(19): siRNA sense strand
gggcaaaggcucugagaag

SEQ ID NO: 1495441 - RNA, 19 nt, Homo sapiens
  misc_RNA (1)...(19): siRNA sense strand
agucugaggugccacugua

SEQ ID NO: 1495442 - RNA, 19 nt, Homo sapiens
  misc_RNA (1)...(19): siRNA sense strand
ugaggguagugacuucuuu

SEQ ID NO: 1495443 - RNA, 19 nt, Homo sapiens
  misc_RNA (1)...(19): siRNA sense strand
gaacaaccaagagcagaau

SEQ ID NO: 1495444 - RNA, 19 nt, Homo sapiens
  misc_RNA (1)...(19): siRNA sense strand
ggaaaggaaagaagucuac

SEQ ID NO: 1495445 - RNA, 19 nt, Homo sapiens
  misc_RNA (1)...(19): siRNA sense strand
gcuugacgcugucuauuac

SEQ ID NO: 1495446 - RNA, 19 nt, Homo sapiens
  misc_RNA (1)...(19): siRNA sense strand
gccaggcucaggcaucuua

SEQ ID NO: 1495447 - RNA, 19 nt, Homo sapiens
  misc_RNA (1)...(19): siRNA sense strand
gcagaagccaugaacaaag

SEQ ID NO: 1495448 - RNA, 19 nt, Homo sapiens
  misc_RNA (1)...(19): siRNA sense strand
uagaacaacugagaguaga

SEQ ID NO: 1495449 - RNA, 19 nt, Homo sapiens
  misc_RNA (1)...(19): siRNA sense strand
gcacugagucugggaagga

SEQ ID NO: 1495450 - RNA, 19 nt, Homo sapiens
  misc_RNA (1)...(19): siRNA sense strand
ucagaaaggaagagacauu

SEQ ID NO: 1495451 - RNA, 19 nt, Homo sapiens
  misc_RNA (1)...(19): siRNA sense strand
aggaggauguggugauuga

SEQ ID NO: 1495452 - RNA, 19 nt, Homo sapiens
  misc_RNA (1)...(19): siRNA sense strand
cgcugcaccugcuuacuua

SEQ ID NO: 1495453 - RNA, 19 nt, Homo sapiens
  misc_RNA (1)...(19): siRNA sense strand
gaagcuguuuacccggauu

SEQ ID NO: 1495454 - RNA, 19 nt, Homo sapiens
  misc_RNA (1)...(19): siRNA sense strand
gaagcuugacgcugucuau

SEQ ID NO: 1495455 - RNA, 19 nt, Homo sapiens
  misc_RNA (1)...(19): siRNA sense strand
ggagcaagccagugauaca

SEQ ID NO: 1495456 - RNA, 19 nt, Homo sapiens
  misc_RNA (1)...(19): siRNA sense strand
ggacucgacugguguuuga

SEQ ID NO: 1495457 - RNA, 19 nt, Homo sapiens
  misc_RNA (1)...(19): siRNA sense strand
cauaaggaauuucaaagga

SEQ ID NO: 1495458 - RNA, 19 nt, Homo sapiens
  misc_RNA (1)...(19): siRNA sense strand
aaacugacuccuagaagua

SEQ ID NO: 1495459 - RNA, 19 nt, Homo sapiens
  misc_RNA (1)...(19): siRNA sense strand
guauucagcucugucaaga

SEQ ID NO: 1495460 - RNA, 19 nt, Homo sapiens
  misc_RNA (1)...(19): siRNA sense strand
ggacaacgugaucacugua

SEQ ID NO: 1495461 - RNA, 19 nt, Homo sapiens
  misc_RNA (1)...(19): siRNA sense strand
aaacuucgaaggcuuaaug

SEQ ID NO: 1495462 - RNA, 19 nt, Homo sapiens
  misc_RNA (1)...(19): siRNA sense strand
gguccagguucuucuagau

SEQ ID NO: 1495463 - RNA, 19 nt, Homo sapiens
  misc_RNA (1)...(19): siRNA sense strand
gggaaaaucauccagaaaa

SEQ ID NO: 1495464 - RNA, 19 nt, Homo sapiens
  misc_RNA (1)...(19): siRNA sense strand
acaacgugaucacuguauu

SEQ ID NO: 1495465 - RNA, 19 nt, Homo sapiens
  misc_RNA (1)...(19): siRNA sense strand
caacgugaucacuguauuc

SEQ ID NO: 1495466 - RNA, 19 nt, Homo sapiens
  misc_RNA (1)...(19): siRNA sense strand
uucgaaggcuuaaugaugu

SEQ ID NO: 1495467 - RNA, 19 nt, Homo sapiens
  misc_RNA (1)...(19): siRNA sense strand
ggaaaaucauccagaaaac

SEQ ID NO: 1495468 - RNA, 19 nt, Homo sapiens
  misc_RNA (1)...(19): siRNA sense strand
gcaaaacugacuccuagaa

SEQ ID NO: 1495469 - RNA, 19 nt, Homo sapiens
  misc_RNA (1)...(19): siRNA sense strand
uccagguucuucuagauga

SEQ ID NO: 1495470 - RNA, 19 nt, Homo sapiens
  misc_RNA (1)...(19): siRNA sense strand
cuucgaaggcuuaaugaug

SEQ ID NO: 1495471 - RNA, 19 nt, Homo sapiens
  misc_RNA (1)...(19): siRNA sense strand
agaagaaacgugccugcuu

SEQ ID NO: 1495472 - RNA, 19 nt, Homo sapiens
  misc_RNA (1)...(19): siRNA sense strand
ucagcucugucaagaaugg

SEQ ID NO: 1495473 - RNA, 19 nt, Homo sapiens
  misc_RNA (1)...(19): siRNA sense strand
gacaacgugaucacuguau

SEQ ID NO: 1495474 - RNA, 19 nt, Homo sapiens
  misc_RNA (1)...(19): siRNA sense strand
ccauaaggaauuucaaagg

SEQ ID NO: 1495475 - RNA, 19 nt, Homo sapiens
  misc_RNA (1)...(19): siRNA sense strand
aggacaacgugaucacugu

SEQ ID NO: 1495476 - RNA, 19 nt, Homo sapiens
  misc_RNA (1)...(19): siRNA sense strand
ggaauauuaagaagaaacg

SEQ ID NO: 1495477 - RNA, 19 nt, Homo sapiens
  misc_RNA (1)...(19): siRNA sense strand
cgaugaagcugucaagaug

SEQ ID NO: 1495478 - RNA, 19 nt, Homo sapiens
  misc_RNA (1)...(19): siRNA sense strand
gaccagcacucucccagaa

SEQ ID NO: 1495479 - RNA, 19 nt, Homo sapiens
  misc_RNA (1)...(19): siRNA sense strand
gaaacccagcccucuccuu

SEQ ID NO: 1495480 - RNA, 19 nt, Homo sapiens
  misc_RNA (1)...(19): siRNA sense strand
acucaacuaccaccuugua

SEQ ID NO: 1495481 - RNA, 19 nt, Homo sapiens
  misc_RNA (1)...(19): siRNA sense strand
ccagcacucucccagaaac

SEQ ID NO: 1495482 - RNA, 19 nt, Homo sapiens
  misc_RNA (1)...(19): siRNA sense strand
ggccaagcccagagaggaa

SEQ ID NO: 1495483 - RNA, 19 nt, Homo sapiens
  misc_RNA (1)...(19): siRNA sense strand
gaacuuacuucagauugug

SEQ ID NO: 1495484 - RNA, 19 nt, Homo sapiens
  misc_RNA (1)...(19): siRNA sense strand
gugaagaaguuaccuggaa

SEQ ID NO: 1495485 - RNA, 19 nt, Homo sapiens
  misc_RNA (1)...(19): siRNA sense strand
gcaacccagugaagaaguu

SEQ ID NO: 1495486 - RNA, 19 nt, Homo sapiens
  misc_RNA (1)...(19): siRNA sense strand
gauuugucauuggauguua

SEQ ID NO: 1495487 - RNA, 19 nt, Homo sapiens
  misc_RNA (1)...(19): siRNA sense strand
ccacuggguucauguucuu

SEQ ID NO: 1495488 - RNA, 19 nt, Homo sapiens
  misc_RNA (1)...(19): siRNA sense strand
gucauuggauguuauuuag

SEQ ID NO: 1495489 - RNA, 19 nt, Homo sapiens
  misc_RNA (1)...(19): siRNA sense strand
ccuaugggauuugucauug

SEQ ID NO: 1495490 - RNA, 19 nt, Homo sapiens
  misc_RNA (1)...(19): siRNA sense strand
ggaauugcaacccagugaa

SEQ ID NO: 1495491 - RNA, 19 nt, Homo sapiens
  misc_RNA (1)...(19): siRNA sense strand
cagcuaucauggugaacuu

SEQ ID NO: 1495492 - RNA, 19 nt, Homo sapiens
  misc_RNA (1)...(19): siRNA sense strand
gggaauugcaacccaguga

SEQ ID NO: 1495493 - RNA, 19 nt, Homo sapiens
  misc_RNA (1)...(19): siRNA sense strand
cuaacugccuuccggaaca

SEQ ID NO: 1495494 - RNA, 19 nt, Homo sapiens
  misc_RNA (1)...(19): siRNA sense strand
gaagaaguuaccuggaagu

SEQ ID NO: 1495495 - RNA, 19 nt, Homo sapiens
  misc_RNA (1)...(19): siRNA sense strand
uaacugccuuccggaacaa

SEQ ID NO: 1495496 - RNA, 19 nt, Homo sapiens
  misc_RNA (1)...(19): siRNA sense strand
uaugggauuugucauugga

SEQ ID NO: 1495497 - RNA, 19 nt, Homo sapiens
  misc_RNA (1)...(19): siRNA sense strand
gaauugcaacccagugaag

SEQ ID NO: 1495498 - RNA, 19 nt, Homo sapiens
  misc_RNA (1)...(19): siRNA sense strand
cggguugaguucccuguug

SEQ ID NO: 1495499 - RNA, 19 nt, Homo sapiens
  misc_RNA (1)...(19): siRNA sense strand
ggaccacuggguucauguu

SEQ ID NO: 1495500 - RNA, 19 nt, Homo sapiens
  misc_RNA (1)...(19): siRNA sense strand
caacccagugaagaaguua

SEQ ID NO: 1495501 - RNA, 19 nt, Homo sapiens
  misc_RNA (1)...(19): siRNA sense strand
agacagaaagagugaugaa

SEQ ID NO: 1495502 - RNA, 19 nt, Homo sapiens
  misc_RNA (1)...(19): siRNA sense strand
cauuggauguuauuuagac

SEQ ID NO: 1495503 - RNA, 19 nt, Homo sapiens
  misc_RNA (1)...(19): siRNA sense strand
uggauguuauuuagacaga

SEQ ID NO: 1495504 - RNA, 19 nt, Homo sapiens
  misc_RNA (1)...(19): siRNA sense strand
cugcagcuaucauggugaa

SEQ ID NO: 1495505 - RNA, 19 nt, Homo sapiens
  misc_RNA (1)...(19): siRNA sense strand
ggauguuauuuagacagaa

SEQ ID NO: 1495506 - RNA, 19 nt, Homo sapiens
  misc_RNA (1)...(19): siRNA sense strand
ggauuugucauuggauguu

SEQ ID NO: 1495507 - RNA, 19 nt, Homo sapiens
  misc_RNA (1)...(19): siRNA sense strand
gagcauagcauuuagauua

SEQ ID NO: 1495508 - RNA, 19 nt, Homo sapiens
  misc_RNA (1)...(19): siRNA sense strand
guagaaagcuugccaaaga

SEQ ID NO: 1495509 - RNA, 19 nt, Homo sapiens
  misc_RNA (1)...(19): siRNA sense strand
gagaugaugucuugauaaa

SEQ ID NO: 1495510 - RNA, 19 nt, Homo sapiens
  misc_RNA (1)...(19): siRNA sense strand
ggaaacaguuaaugugaaa

SEQ ID NO: 1495511 - RNA, 19 nt, Homo sapiens
  misc_RNA (1)...(19): siRNA sense strand
gaauccagcaugaauauua

SEQ ID NO: 1495512 - RNA, 19 nt, Homo sapiens
  misc_RNA (1)...(19): siRNA sense strand
ugaacaagaugcuguagua

SEQ ID NO: 1495513 - RNA, 19 nt, Homo sapiens
  misc_RNA (1)...(19): siRNA sense strand
uagcggaucugucaguuua

SEQ ID NO: 1495514 - RNA, 19 nt, Homo sapiens
  misc_RNA (1)...(19): siRNA sense strand
gcaguuggacgguuuaaua

SEQ ID NO: 1495515 - RNA, 19 nt, Homo sapiens
  misc_RNA (1)...(19): siRNA sense strand
gaauggagcuuacacaaaa

SEQ ID NO: 1495516 - RNA, 19 nt, Homo sapiens
  misc_RNA (1)...(19): siRNA sense strand
gaaagaauccagcaugaau

SEQ ID NO: 1495517 - RNA, 19 nt, Homo sapiens
  misc_RNA (1)...(19): siRNA sense strand
gaucuucccuuuauauauc

SEQ ID NO: 1495518 - RNA, 19 nt, Homo sapiens
  misc_RNA (1)...(19): siRNA sense strand
cgaaggagcauagcauuua

SEQ ID NO: 1495519 - RNA, 19 nt, Homo sapiens
  misc_RNA (1)...(19): siRNA sense strand
gaauggcucucuucugugu

SEQ ID NO: 1495520 - RNA, 19 nt, Homo sapiens
  misc_RNA (1)...(19): siRNA sense strand
uaacuuacaccaaucgaua

SEQ ID NO: 1495521 - RNA, 19 nt, Homo sapiens
  misc_RNA (1)...(19): siRNA sense strand
gcauuuagauuacguuugg

SEQ ID NO: 1495522 - RNA, 19 nt, Homo sapiens
  misc_RNA (1)...(19): siRNA sense strand
gcuguaacuucuuguauau

SEQ ID NO: 1495523 - RNA, 19 nt, Homo sapiens
  misc_RNA (1)...(19): siRNA sense strand
gaaggaaacaguuaaugug

SEQ ID NO: 1495524 - RNA, 19 nt, Homo sapiens
  misc_RNA (1)...(19): siRNA sense strand
gaacaacuggcuaucaaau

SEQ ID NO: 1495525 - RNA, 19 nt, Homo sapiens
  misc_RNA (1)...(19): siRNA sense strand
guaucgagaugaugucuug

SEQ ID NO: 1495526 - RNA, 19 nt, Homo sapiens
  misc_RNA (1)...(19): siRNA sense strand
gaugaugucuugauaaagc

SEQ ID NO: 1495527 - RNA, 19 nt, Homo sapiens
  misc_RNA (1)...(19): siRNA sense strand
acagugacauuaagauuug

SEQ ID NO: 1495528 - RNA, 19 nt, Homo sapiens
  misc_RNA (1)...(19): siRNA sense strand
gaaggagcauagcauuuag

SEQ ID NO: 1495529 - RNA, 19 nt, Homo sapiens
  misc_RNA (1)...(19): siRNA sense strand
gaacucaguauaaauguca

SEQ ID NO: 1495530 - RNA, 19 nt, Homo sapiens
  misc_RNA (1)...(19): siRNA sense strand
aagaagaacuagagggaaa

SEQ ID NO: 1495531 - RNA, 19 nt, Homo sapiens
  misc_RNA (1)...(19): siRNA sense strand
aaguggagauggauauaua

SEQ ID NO: 1495532 - RNA, 19 nt, Homo sapiens
  misc_RNA (1)...(19): siRNA sense strand
gaauacugcuggcguugga

SEQ ID NO: 1495533 - RNA, 19 nt, Homo sapiens
  misc_RNA (1)...(19): siRNA sense strand
uugaauggcuucuaaacaa

SEQ ID NO: 1495534 - RNA, 19 nt, Homo sapiens
  misc_RNA (1)...(19): siRNA sense strand
uagaacaacuggcuaucaa

SEQ ID NO: 1495535 - RNA, 19 nt, Homo sapiens
  misc_RNA (1)...(19): siRNA sense strand
cuaaacagaggaaagauuu

SEQ ID NO: 1495536 - RNA, 19 nt, Homo sapiens
  misc_RNA (1)...(19): siRNA sense strand
ggagauggauauauacacu

SEQ ID NO: 1495537 - RNA, 19 nt, Homo sapiens
  misc_RNA (1)...(19): siRNA sense strand
ggaaagauuuugaagguau

SEQ ID NO: 1495538 - RNA, 19 nt, Homo sapiens
  misc_RNA (1)...(19): siRNA sense strand
cuucugaucuucccuuuau

SEQ ID NO: 1495539 - RNA, 19 nt, Homo sapiens
  misc_RNA (1)...(19): siRNA sense strand
gggcagaacaggacaguga

SEQ ID NO: 1495540 - RNA, 19 nt, Homo sapiens
  misc_RNA (1)...(19): siRNA sense strand
gauuugugcucuaggagaa

SEQ ID NO: 1495541 - RNA, 19 nt, Homo sapiens
  misc_RNA (1)...(19): siRNA sense strand
uggauuagauucuguaaag

SEQ ID NO: 1495542 - RNA, 19 nt, Homo sapiens
  misc_RNA (1)...(19): siRNA sense strand
ggagaagaauggagcuuac

SEQ ID NO: 1495543 - RNA, 19 nt, Homo sapiens
  misc_RNA (1)...(19): siRNA sense strand
gcagggaccuauggauuag

SEQ ID NO: 1495544 - RNA, 19 nt, Homo sapiens
  misc_RNA (1)...(19): siRNA sense strand
uaagauuugugcucuagga

SEQ ID NO: 1495545 - RNA, 19 nt, Homo sapiens
  misc_RNA (1)...(19): siRNA sense strand
uguaguaccuucagaaugg

SEQ ID NO: 1495546 - RNA, 19 nt, Homo sapiens
  misc_RNA (1)...(19): siRNA sense strand
guucagugguucuuggaaa

SEQ ID NO: 1495547 - RNA, 19 nt, Homo sapiens
  misc_RNA (1)...(19): siRNA sense strand
gauuacguuuggcuucuuu

SEQ ID NO: 1495548 - RNA, 19 nt, Homo sapiens
  misc_RNA (1)...(19): siRNA sense strand
uaacuucggcuucgaccua

SEQ ID NO: 1495549 - RNA, 19 nt, Homo sapiens
  misc_RNA (1)...(19): siRNA sense strand
gauaaagcccagucgaguu

SEQ ID NO: 1495550 - RNA, 19 nt, Homo sapiens
  misc_RNA (1)...(19): siRNA sense strand
ucgagaugaugucuugaua

SEQ ID NO: 1495551 - RNA, 19 nt, Homo sapiens
  misc_RNA (1)...(19): siRNA sense strand
ggaaagaauccagcaugaa

SEQ ID NO: 1495552 - RNA, 19 nt, Homo sapiens
  misc_RNA (1)...(19): siRNA sense strand
ggagauuccugaccagaac

SEQ ID NO: 1495553 - RNA, 19 nt, Homo sapiens
  misc_RNA (1)...(19): siRNA sense strand
acaaugaaggaaacaguua

SEQ ID NO: 1495554 - RNA, 19 nt, Homo sapiens
  misc_RNA (1)...(19): siRNA sense strand
aaagaauccagcaugaaua

SEQ ID NO: 1495555 - RNA, 19 nt, Homo sapiens
  misc_RNA (1)...(19): siRNA sense strand
gcaaguggagauggauaua

SEQ ID NO: 1495556 - RNA, 19 nt, Homo sapiens
  misc_RNA (1)...(19): siRNA sense strand
gaauggcuucuaaacaauu

SEQ ID NO: 1495557 - RNA, 19 nt, Homo sapiens
  misc_RNA (1)...(19): siRNA sense strand
ucuaguauguucagugguu

SEQ ID NO: 1495558 - RNA, 19 nt, Homo sapiens
  misc_RNA (1)...(19): siRNA sense strand
ugccaaagauggugaauac

SEQ ID NO: 1495559 - RNA, 19 nt, Homo sapiens
  misc_RNA (1)...(19): siRNA sense strand
ggauuagauucuguaaaga

SEQ ID NO: 1495560 - RNA, 19 nt, Homo sapiens
  misc_RNA (1)...(19): siRNA sense strand
caaacgcaauacacugaau

SEQ ID NO: 1495561 - RNA, 19 nt, Homo sapiens
  misc_RNA (1)...(19): siRNA sense strand
gaggaaagauuuugaaggu

SEQ ID NO: 1495562 - RNA, 19 nt, Homo sapiens
  misc_RNA (1)...(19): siRNA sense strand
ugaauggcuucuaaacaau

SEQ ID NO: 1495563 - RNA, 19 nt, Homo sapiens
  misc_RNA (1)...(19): siRNA sense strand
acaacuggcuaucaaauac

SEQ ID NO: 1495564 - RNA, 19 nt, Homo sapiens
  misc_RNA (1)...(19): siRNA sense strand
ggauguuccuucaacuugu

SEQ ID NO: 1495565 - RNA, 19 nt, Homo sapiens
  misc_RNA (1)...(19): siRNA sense strand
ggauauauacacugcucua

SEQ ID NO: 1495566 - RNA, 19 nt, Homo sapiens
  misc_RNA (1)...(19): siRNA sense strand
ucaccagaauguugaacuu

SEQ ID NO: 1495567 - RNA, 19 nt, Homo sapiens
  misc_RNA (1)...(19): siRNA sense strand
gaacaaguggugaugaacu

SEQ ID NO: 1495568 - RNA, 19 nt, Homo sapiens
  misc_RNA (1)...(19): siRNA sense strand
accaaucgauacaucauuu

SEQ ID NO: 1495569 - RNA, 19 nt, Homo sapiens
  misc_RNA (1)...(19): siRNA sense strand
caauaaagaagaacuagag

SEQ ID NO: 1495570 - RNA, 19 nt, Homo sapiens
  misc_RNA (1)...(19): siRNA sense strand
gaauggaucuuuaaaacag

SEQ ID NO: 1495571 - RNA, 19 nt, Homo sapiens
  misc_RNA (1)...(19): siRNA sense strand
gcaguguggugagacaaug

SEQ ID NO: 1495572 - RNA, 19 nt, Homo sapiens
  misc_RNA (1)...(19): siRNA sense strand
ugcuguaacuucuuguaua

SEQ ID NO: 1495573 - RNA, 19 nt, Homo sapiens
  misc_RNA (1)...(19): siRNA sense strand
ccaaagauggugaauacug

SEQ ID NO: 1495574 - RNA, 19 nt, Homo sapiens
  misc_RNA (1)...(19): siRNA sense strand
gaagaauggagcuuacaca

SEQ ID NO: 1495575 - RNA, 19 nt, Homo sapiens
  misc_RNA (1)...(19): siRNA sense strand
caaugaaggaaacaguuaa

SEQ ID NO: 1495576 - RNA, 19 nt, Homo sapiens
  misc_RNA (1)...(19): siRNA sense strand
gcauuugguucacuguauc

SEQ ID NO: 1495577 - RNA, 19 nt, Homo sapiens
  misc_RNA (1)...(19): siRNA sense strand
uaucugcuguaacuucuug

SEQ ID NO: 1495578 - RNA, 19 nt, Homo sapiens
  misc_RNA (1)...(19): siRNA sense strand
ugaucuggcuucugcaaga

SEQ ID NO: 1495579 - RNA, 19 nt, Homo sapiens
  misc_RNA (1)...(19): siRNA sense strand
ugaaggaaacaguuaaugu

SEQ ID NO: 1495580 - RNA, 19 nt, Homo sapiens
  misc_RNA (1)...(19): siRNA sense strand
caacaccccucgaaggaaa

SEQ ID NO: 1495581 - RNA, 19 nt, Homo sapiens
  misc_RNA (1)...(19): siRNA sense strand
gauauauacacugcucuaa

SEQ ID NO: 1495582 - RNA, 19 nt, Homo sapiens
  misc_RNA (1)...(19): siRNA sense strand
cagcagggaccuauggauu

SEQ ID NO: 1495583 - RNA, 19 nt, Homo sapiens
  misc_RNA (1)...(19): siRNA sense strand
cgagaugaugucuugauaa

SEQ ID NO: 1495584 - RNA, 19 nt, Homo sapiens
  misc_RNA (1)...(19): siRNA sense strand
ucgaccuacuuguaacuua

SEQ ID NO: 1495585 - RNA, 19 nt, Homo sapiens
  misc_RNA (1)...(19): siRNA sense strand
uagaaagcuugccaaagau

SEQ ID NO: 1495586 - RNA, 19 nt, Homo sapiens
  misc_RNA (1)...(19): siRNA sense strand
gcucucuucuguguauaaa

SEQ ID NO: 1495587 - RNA, 19 nt, Homo sapiens
  misc_RNA (1)...(19): siRNA sense strand
gaacaaggaaaaccauuug

SEQ ID NO: 1495588 - RNA, 19 nt, Homo sapiens
  misc_RNA (1)...(19): siRNA sense strand
gauguuccuucaacuugug

SEQ ID NO: 1495589 - RNA, 19 nt, Homo sapiens
  misc_RNA (1)...(19): siRNA sense strand
ggugagacaaugaaggaaa

SEQ ID NO: 1495590 - RNA, 19 nt, Homo sapiens
  misc_RNA (1)...(19): siRNA sense strand
ggacagcaggcuucugauc

SEQ ID NO: 1495591 - RNA, 19 nt, Homo sapiens
  misc_RNA (1)...(19): siRNA sense strand
caacuugugccuucuugga

SEQ ID NO: 1495592 - RNA, 19 nt, Homo sapiens
  misc_RNA (1)...(19): siRNA sense strand
gacaaugaaggaaacaguu

SEQ ID NO: 1495593 - RNA, 19 nt, Homo sapiens
  misc_RNA (1)...(19): siRNA sense strand
ucucuucuguguauaaaca

SEQ ID NO: 1495594 - RNA, 19 nt, Homo sapiens
  misc_RNA (1)...(19): siRNA sense strand
ugccuugaauggcuucuaa

SEQ ID NO: 1495595 - RNA, 19 nt, Homo sapiens
  misc_RNA (1)...(19): siRNA sense strand
ggaccuauggauuagauuc

SEQ ID NO: 1495596 - RNA, 19 nt, Homo sapiens
  misc_RNA (1)...(19): siRNA sense strand
acagcaggcuucugaucuu

SEQ ID NO: 1495597 - RNA, 19 nt, Homo sapiens
  misc_RNA (1)...(19): siRNA sense strand
ccauguagcggaucuguca

SEQ ID NO: 1495598 - RNA, 19 nt, Homo sapiens
  misc_RNA (1)...(19): siRNA sense strand
agaauggagcuuacacaaa

SEQ ID NO: 1495599 - RNA, 19 nt, Homo sapiens
  misc_RNA (1)...(19): siRNA sense strand
gcucauugguucaucuaac

SEQ ID NO: 1495600 - RNA, 19 nt, Homo sapiens
  misc_RNA (1)...(19): siRNA sense strand
ugacucaccagaauguuga

SEQ ID NO: 1495601 - RNA, 19 nt, Homo sapiens
  misc_RNA (1)...(19): siRNA sense strand
aggaacaaguggugaugaa

SEQ ID NO: 1495602 - RNA, 19 nt, Homo sapiens
  misc_RNA (1)...(19): siRNA sense strand
caugaggugugguagaaag

SEQ ID NO: 1495603 - RNA, 19 nt, Homo sapiens
  misc_RNA (1)...(19): siRNA sense strand
cugcaagaauuauugaaca

SEQ ID NO: 1495604 - RNA, 19 nt, Homo sapiens
  misc_RNA (1)...(19): siRNA sense strand
gucaguauucagacauuua

SEQ ID NO: 1495605 - RNA, 19 nt, Homo sapiens
  misc_RNA (1)...(19): siRNA sense strand
aaacagcuuuugacagaaa

SEQ ID NO: 1495606 - RNA, 19 nt, Homo sapiens
  misc_RNA (1)...(19): siRNA sense strand
gaaaacagugacauuaaga

SEQ ID NO: 1495607 - RNA, 19 nt, Homo sapiens
  misc_RNA (1)...(19): siRNA sense strand
gaaaugcccugcugguuua

SEQ ID NO: 1495608 - RNA, 19 nt, Homo sapiens
  misc_RNA (1)...(19): siRNA sense strand
ccacagcacugccuuacua

SEQ ID NO: 1495609 - RNA, 19 nt, Homo sapiens
  misc_RNA (1)...(19): siRNA sense strand
ggaaaugcccugcugguuu

SEQ ID NO: 1495610 - RNA, 19 nt, Homo sapiens
  misc_RNA (1)...(19): siRNA sense strand
gggcaaguauagcgcauuu

SEQ ID NO: 1495611 - RNA, 19 nt, Homo sapiens
  misc_RNA (1)...(19): siRNA sense strand
gcaaguauagcgcauuuga

SEQ ID NO: 1495612 - RNA, 19 nt, Homo sapiens
  misc_RNA (1)...(19): siRNA sense strand
gcuaccaucuuccuccuuu

SEQ ID NO: 1495613 - RNA, 19 nt, Homo sapiens
  misc_RNA (1)...(19): siRNA sense strand
gggcuacgcugaccuguac

SEQ ID NO: 1495614 - RNA, 19 nt, Homo sapiens
  misc_RNA (1)...(19): siRNA sense strand
ccacagcacaucuucuuug

SEQ ID NO: 1495615 - RNA, 19 nt, Homo sapiens
  misc_RNA (1)...(19): siRNA sense strand
gggcggugcucuacaucuu

SEQ ID NO: 1495616 - RNA, 19 nt, Homo sapiens
  misc_RNA (1)...(19): siRNA sense strand
ggucauaggccugaucuuc

SEQ ID NO: 1495617 - RNA, 19 nt, Homo sapiens
  misc_RNA (1)...(19): siRNA sense strand
gcggugcucuacaucuuga

SEQ ID NO: 1495618 - RNA, 19 nt, Homo sapiens
  misc_RNA (1)...(19): siRNA sense strand
gaaggaggcacugcuguuc

SEQ ID NO: 1495619 - RNA, 19 nt, Homo sapiens
  misc_RNA (1)...(19): siRNA sense strand
ggagagcgaccugcaguuc

SEQ ID NO: 1495620 - RNA, 19 nt, Homo sapiens
  misc_RNA (1)...(19): siRNA sense strand
gcgggauccuugucuuugu

SEQ ID NO: 1495621 - RNA, 19 nt, Homo sapiens
  misc_RNA (1)...(19): siRNA sense strand
agagcgaccugcaguucaa

SEQ ID NO: 1495622 - RNA, 19 nt, Homo sapiens
  misc_RNA (1)...(19): siRNA sense strand
gcccacagcacaucuucuu

SEQ ID NO: 1495623 - RNA, 19 nt, Homo sapiens
  misc_RNA (1)...(19): siRNA sense strand
gggaaaugcccugcugguu

SEQ ID NO: 1495624 - RNA, 19 nt, Homo sapiens
  misc_RNA (1)...(19): siRNA sense strand
gagagcgaccugcaguuca

SEQ ID NO: 1495625 - RNA, 19 nt, Homo sapiens
  misc_RNA (1)...(19): siRNA sense strand
ugaaggaggcacugcuguu

SEQ ID NO: 1495626 - RNA, 19 nt, Homo sapiens
  misc_RNA (1)...(19): siRNA sense strand
cacagcacaucuucuuugg

SEQ ID NO: 1495627 - RNA, 19 nt, Homo sapiens
  misc_RNA (1)...(19): siRNA sense strand
aggaggcacugcuguucaa

SEQ ID NO: 1495628 - RNA, 19 nt, Homo sapiens
  misc_RNA (1)...(19): siRNA sense strand
ggugcgggauccuugucuu

SEQ ID NO: 1495629 - RNA, 19 nt, Homo sapiens
  misc_RNA (1)...(19): siRNA sense strand
gugcgggauccuugucuuu

SEQ ID NO: 1495630 - RNA, 19 nt, Homo sapiens
  misc_RNA (1)...(19): siRNA sense strand
aagcuaaacgcaccaccaa

SEQ ID NO: 1495631 - RNA, 19 nt, Homo sapiens
  misc_RNA (1)...(19): siRNA sense strand
ugguggcgguguucgacua

SEQ ID NO: 1495632 - RNA, 19 nt, Homo sapiens
  misc_RNA (1)...(19): siRNA sense strand
gaauuuaccaucaacguua

SEQ ID NO: 1495633 - RNA, 19 nt, Homo sapiens
  misc_RNA (1)...(19): siRNA sense strand
caacggaauuuaccaucaa

SEQ ID NO: 1495634 - RNA, 19 nt, Homo sapiens
  misc_RNA (1)...(19): siRNA sense strand
ggaggggucuucuuccuaa

SEQ ID NO: 1495635 - RNA, 19 nt, Homo sapiens
  misc_RNA (1)...(19): siRNA sense strand
ccaacggaauuuaccauca

SEQ ID NO: 1495636 - RNA, 19 nt, Homo sapiens
  misc_RNA (1)...(19): siRNA sense strand
ccacccaagaucaaauuua

SEQ ID NO: 1495637 - RNA, 19 nt, Homo sapiens
  misc_RNA (1)...(19): siRNA sense strand
ggaauuuaccaucaacguu

SEQ ID NO: 1495638 - RNA, 19 nt, Homo sapiens
  misc_RNA (1)...(19): siRNA sense strand
ggucuucuuccuaaaguuu

SEQ ID NO: 1495639 - RNA, 19 nt, Homo sapiens
  misc_RNA (1)...(19): siRNA sense strand
uaaaguuucccuccgacua

SEQ ID NO: 1495640 - RNA, 19 nt, Homo sapiens
  misc_RNA (1)...(19): siRNA sense strand
cccuaaagcucauccacaa

SEQ ID NO: 1495641 - RNA, 19 nt, Homo sapiens
  misc_RNA (1)...(19): siRNA sense strand
cacccaagaucaaauuuac

SEQ ID NO: 1495642 - RNA, 19 nt, Homo sapiens
  misc_RNA (1)...(19): siRNA sense strand
uaaagcucauccacaagga

SEQ ID NO: 1495643 - RNA, 19 nt, Homo sapiens
  misc_RNA (1)...(19): siRNA sense strand
ucaaaccacccaagaucaa

SEQ ID NO: 1495644 - RNA, 19 nt, Homo sapiens
  misc_RNA (1)...(19): siRNA sense strand
caaaccacccaagaucaaa

SEQ ID NO: 1495645 - RNA, 19 nt, Homo sapiens
  misc_RNA (1)...(19): siRNA sense strand
gggccagugugggacgaua

SEQ ID NO: 1495646 - RNA, 19 nt, Homo sapiens
  misc_RNA (1)...(19): siRNA sense strand
ucaaauuuaccaacggaau

SEQ ID NO: 1495647 - RNA, 19 nt, Homo sapiens
  misc_RNA (1)...(19): siRNA sense strand
ggaggugccuggagaagga

SEQ ID NO: 1495648 - RNA, 19 nt, Homo sapiens
  misc_RNA (1)...(19): siRNA sense strand
ccaauccuaucuacaauga

SEQ ID NO: 1495649 - RNA, 19 nt, Homo sapiens
  misc_RNA (1)...(19): siRNA sense strand
gcucccagcugcauucuga

SEQ ID NO: 1495650 - RNA, 19 nt, Homo sapiens
  misc_RNA (1)...(19): siRNA sense strand
gaccgaagaaucaaacuuu

SEQ ID NO: 1495651 - RNA, 19 nt, Homo sapiens
  misc_RNA (1)...(19): siRNA sense strand
ugaccuucgugcugacuua

SEQ ID NO: 1495652 - RNA, 19 nt, Homo sapiens
  misc_RNA (1)...(19): siRNA sense strand
guacagcccaaucaucaaa

SEQ ID NO: 1495653 - RNA, 19 nt, Homo sapiens
  misc_RNA (1)...(19): siRNA sense strand
ucugagaacucugugauug

SEQ ID NO: 1495654 - RNA, 19 nt, Homo sapiens
  misc_RNA (1)...(19): siRNA sense strand
cccaagcccuccaauccua

SEQ ID NO: 1495655 - RNA, 19 nt, Homo sapiens
  misc_RNA (1)...(19): siRNA sense strand
cugaugaacccauagcuuu

SEQ ID NO: 1495656 - RNA, 19 nt, Homo sapiens
  misc_RNA (1)...(19): siRNA sense strand
ccagaagucuacacaaucc

SEQ ID NO: 1495657 - RNA, 19 nt, Homo sapiens
  misc_RNA (1)...(19): siRNA sense strand
caguacagcccaaucauca

SEQ ID NO: 1495658 - RNA, 19 nt, Homo sapiens
  misc_RNA (1)...(19): siRNA sense strand
ggaccgaagaaucaaacuu

SEQ ID NO: 1495659 - RNA, 19 nt, Homo sapiens
  misc_RNA (1)...(19): siRNA sense strand
cccacaaucuuucuagaca

SEQ ID NO: 1495660 - RNA, 19 nt, Homo sapiens
  misc_RNA (1)...(19): siRNA sense strand
ccuccaauccuaucuacaa

SEQ ID NO: 1495661 - RNA, 19 nt, Homo sapiens
  misc_RNA (1)...(19): siRNA sense strand
ccugaggaccgaagaauca

SEQ ID NO: 1495662 - RNA, 19 nt, Homo sapiens
  misc_RNA (1)...(19): siRNA sense strand
gggcuugguuccagaagac

SEQ ID NO: 1495663 - RNA, 19 nt, Homo sapiens
  misc_RNA (1)...(19): siRNA sense strand
gcaccuuccagaucacaga

SEQ ID NO: 1495664 - RNA, 19 nt, Homo sapiens
  misc_RNA (1)...(19): siRNA sense strand
gcaaaagccaggacccaaa

SEQ ID NO: 1495665 - RNA, 19 nt, Homo sapiens
  misc_RNA (1)...(19): siRNA sense strand
gggcuacacugcggcaucu

SEQ ID NO: 1495666 - RNA, 19 nt, Homo sapiens
  misc_RNA (1)...(19): siRNA sense strand
ugagccugaugaacccaua

SEQ ID NO: 1495667 - RNA, 19 nt, Homo sapiens
  misc_RNA (1)...(19): siRNA sense strand
cuacaaugagccugaugaa

SEQ ID NO: 1495668 - RNA, 19 nt, Homo sapiens
  misc_RNA (1)...(19): siRNA sense strand
cagucccgaugcagaaaga

SEQ ID NO: 1495669 - RNA, 19 nt, Homo sapiens
  misc_RNA (1)...(19): siRNA sense strand
uucagcaccuuccagauca

SEQ ID NO: 1495670 - RNA, 19 nt, Homo sapiens
  misc_RNA (1)...(19): siRNA sense strand
gaugaacccauagcuuucu

SEQ ID NO: 1495671 - RNA, 19 nt, Homo sapiens
  misc_RNA (1)...(19): siRNA sense strand
gcccuccaauccuaucuac

SEQ ID NO: 1495672 - RNA, 19 nt, Homo sapiens
  misc_RNA (1)...(19): siRNA sense strand
uaacugaagucaccaagaa

SEQ ID NO: 1495673 - RNA, 19 nt, Homo sapiens
  misc_RNA (1)...(19): siRNA sense strand
guacauccauggccuguga

SEQ ID NO: 1495674 - RNA, 19 nt, Homo sapiens
  misc_RNA (1)...(19): siRNA sense strand
ggaaguuucucuaucacaa

SEQ ID NO: 1495675 - RNA, 19 nt, Homo sapiens
  misc_RNA (1)...(19): siRNA sense strand
gcagguauuucuauaaugg

SEQ ID NO: 1495676 - RNA, 19 nt, Homo sapiens
  misc_RNA (1)...(19): siRNA sense strand
ggagacgucuggagcuuau

SEQ ID NO: 1495677 - RNA, 19 nt, Homo sapiens
  misc_RNA (1)...(19): siRNA sense strand
ggaaccagagcccaucuua

SEQ ID NO: 1495678 - RNA, 19 nt, Homo sapiens
  misc_RNA (1)...(19): siRNA sense strand
ggaaugaccagcagguauu

SEQ ID NO: 1495679 - RNA, 19 nt, Homo sapiens
  misc_RNA (1)...(19): siRNA sense strand
caauaucucucggaucuau

SEQ ID NO: 1495680 - RNA, 19 nt, Homo sapiens
  misc_RNA (1)...(19): siRNA sense strand
cagcagguauuucuauaau

SEQ ID NO: 1495681 - RNA, 19 nt, Homo sapiens
  misc_RNA (1)...(19): siRNA sense strand
gaaccagagcccaucuuaa

SEQ ID NO: 1495682 - RNA, 19 nt, Homo sapiens
  misc_RNA (1)...(19): siRNA sense strand
gggcaacgguaacaacuuc

SEQ ID NO: 1495683 - RNA, 19 nt, Homo sapiens
  misc_RNA (1)...(19): siRNA sense strand
gagaaggagugcagagagu

SEQ ID NO: 1495684 - RNA, 19 nt, Homo sapiens
  misc_RNA (1)...(19): siRNA sense strand
guaacaacuucgucacaga

SEQ ID NO: 1495685 - RNA, 19 nt, Homo sapiens
  misc_RNA (1)...(19): siRNA sense strand
gucuggagcuuaugagaaa

SEQ ID NO: 1495686 - RNA, 19 nt, Homo sapiens
  misc_RNA (1)...(19): siRNA sense strand
caccaacuaugaugaguau

SEQ ID NO: 1495687 - RNA, 19 nt, Homo sapiens
  misc_RNA (1)...(19): siRNA sense strand
gaugggaaguuucucuauc

SEQ ID NO: 1495688 - RNA, 19 nt, Homo sapiens
  misc_RNA (1)...(19): siRNA sense strand
gugggcaacugguaacuga

SEQ ID NO: 1495689 - RNA, 19 nt, Homo sapiens
  misc_RNA (1)...(19): siRNA sense strand
gaaguuucucuaucacaaa

SEQ ID NO: 1495690 - RNA, 19 nt, Homo sapiens
  misc_RNA (1)...(19): siRNA sense strand
ccaagaagaggaaggauca

SEQ ID NO: 1495691 - RNA, 19 nt, Homo sapiens
  misc_RNA (1)...(19): siRNA sense strand
gaggagacgucuggagcuu

SEQ ID NO: 1495692 - RNA, 19 nt, Homo sapiens
  misc_RNA (1)...(19): siRNA sense strand
uaacaacuucgucacagaa

SEQ ID NO: 1495693 - RNA, 19 nt, Homo sapiens
  misc_RNA (1)...(19): siRNA sense strand
gaaauucagccgccaucau

SEQ ID NO: 1495694 - RNA, 19 nt, Homo sapiens
  misc_RNA (1)...(19): siRNA sense strand
gaaugaccagcagguauuu

SEQ ID NO: 1495695 - RNA, 19 nt, Homo sapiens
  misc_RNA (1)...(19): siRNA sense strand
ccugugagacuuuccagua

SEQ ID NO: 1495696 - RNA, 19 nt, Homo sapiens
  misc_RNA (1)...(19): siRNA sense strand
acauaaccauggaguccua

SEQ ID NO: 1495697 - RNA, 19 nt, Homo sapiens
  misc_RNA (1)...(19): siRNA sense strand
caggaaaacuucaauaucu

SEQ ID NO: 1495698 - RNA, 19 nt, Homo sapiens
  misc_RNA (1)...(19): siRNA sense strand
aaccagagcccaucuuaau

SEQ ID NO: 1495699 - RNA, 19 nt, Homo sapiens
  misc_RNA (1)...(19): siRNA sense strand
ccugaggacuccaucuuca

SEQ ID NO: 1495700 - RNA, 19 nt, Homo sapiens
  misc_RNA (1)...(19): siRNA sense strand
gaccagcagguauuucuau

SEQ ID NO: 1495701 - RNA, 19 nt, Homo sapiens
  misc_RNA (1)...(19): siRNA sense strand
uaugaugaguaugccauuu

SEQ ID NO: 1495702 - RNA, 19 nt, Homo sapiens
  misc_RNA (1)...(19): siRNA sense strand
ggaucuaugggaaguggua

SEQ ID NO: 1495703 - RNA, 19 nt, Homo sapiens
  misc_RNA (1)...(19): siRNA sense strand
gggaaugaccagcagguau

SEQ ID NO: 1495704 - RNA, 19 nt, Homo sapiens
  misc_RNA (1)...(19): siRNA sense strand
gaagucaccaagaaagaag

SEQ ID NO: 1495705 - RNA, 19 nt, Homo sapiens
  misc_RNA (1)...(19): siRNA sense strand
ccagcagguauuucuauaa

SEQ ID NO: 1495706 - RNA, 19 nt, Homo sapiens
  misc_RNA (1)...(19): siRNA sense strand
aaauucagccgccaucaug

SEQ ID NO: 1495707 - RNA, 19 nt, Homo sapiens
  misc_RNA (1)...(19): siRNA sense strand
uucaauaucucucggaucu

SEQ ID NO: 1495708 - RNA, 19 nt, Homo sapiens
  misc_RNA (1)...(19): siRNA sense strand
caacauccaagugcaggaa

SEQ ID NO: 1495709 - RNA, 19 nt, Homo sapiens
  misc_RNA (1)...(19): siRNA sense strand
ugaagucaccaagaaagaa

SEQ ID NO: 1495710 - RNA, 19 nt, Homo sapiens
  misc_RNA (1)...(19): siRNA sense strand
accagcagguauuucuaua

SEQ ID NO: 1495711 - RNA, 19 nt, Homo sapiens
  misc_RNA (1)...(19): siRNA sense strand
gaaggagugcagagaguac

SEQ ID NO: 1495712 - RNA, 19 nt, Homo sapiens
  misc_RNA (1)...(19): siRNA sense strand
augggaaguuucucuauca

SEQ ID NO: 1495713 - RNA, 19 nt, Homo sapiens
  misc_RNA (1)...(19): siRNA sense strand
aacaaguucuacucagaga

SEQ ID NO: 1495714 - RNA, 19 nt, Homo sapiens
  misc_RNA (1)...(19): siRNA sense strand
guaacugaagucaccaaga

SEQ ID NO: 1495715 - RNA, 19 nt, Homo sapiens
  misc_RNA (1)...(19): siRNA sense strand
ucaccaagaaagaagauuc

SEQ ID NO: 1495716 - RNA, 19 nt, Homo sapiens
  misc_RNA (1)...(19): siRNA sense strand
agauacugaugggaaguuu

SEQ ID NO: 1495717 - RNA, 19 nt, Homo sapiens
  misc_RNA (1)...(19): siRNA sense strand
agaagaucauggacaggau

SEQ ID NO: 1495718 - RNA, 19 nt, Homo sapiens
  misc_RNA (1)...(19): siRNA sense strand
caacugguaacugaaguca

SEQ ID NO: 1495719 - RNA, 19 nt, Homo sapiens
  misc_RNA (1)...(19): siRNA sense strand
cuacagaggcggagaucag

SEQ ID NO: 1495720 - RNA, 19 nt, Homo sapiens
  misc_RNA (1)...(19): siRNA sense strand
agaaggagugcagagagua

SEQ ID NO: 1495721 - RNA, 19 nt, Homo sapiens
  misc_RNA (1)...(19): siRNA sense strand
acaccaacuaugaugagua

SEQ ID NO: 1495722 - RNA, 19 nt, Homo sapiens
  misc_RNA (1)...(19): siRNA sense strand
uaaccauggaguccuaugu

SEQ ID NO: 1495723 - RNA, 19 nt, Homo sapiens
  misc_RNA (1)...(19): siRNA sense strand
cugcugcgcuucuccaacu

SEQ ID NO: 1495724 - RNA, 19 nt, Homo sapiens
  misc_RNA (1)...(19): siRNA sense strand
gcaggaaaacuucaauauc

SEQ ID NO: 1495725 - RNA, 19 nt, Homo sapiens
  misc_RNA (1)...(19): siRNA sense strand
gcaggacuucagagugguu

SEQ ID NO: 1495726 - RNA, 19 nt, Homo sapiens
  misc_RNA (1)...(19): siRNA sense strand
ccaacuaugaugaguaugc

SEQ ID NO: 1495727 - RNA, 19 nt, Homo sapiens
  misc_RNA (1)...(19): siRNA sense strand
cagagaaggagugcagaga

SEQ ID NO: 1495728 - RNA, 19 nt, Homo sapiens
  misc_RNA (1)...(19): siRNA sense strand
gggcaacugguaacugaag

SEQ ID NO: 1495729 - RNA, 19 nt, Homo sapiens
  misc_RNA (1)...(19): siRNA sense strand
cgucuggagcuuaugagaa

SEQ ID NO: 1495730 - RNA, 19 nt, Homo sapiens
  misc_RNA (1)...(19): siRNA sense strand
ggcggaaaggugucuguga

SEQ ID NO: 1495731 - RNA, 19 nt, Homo sapiens
  misc_RNA (1)...(19): siRNA sense strand
gagcuuaugagaaaacaga

SEQ ID NO: 1495732 - RNA, 19 nt, Homo sapiens
  misc_RNA (1)...(19): siRNA sense strand
agacgucuggagcuuauga

SEQ ID NO: 1495733 - RNA, 19 nt, Homo sapiens
  misc_RNA (1)...(19): siRNA sense strand
ccacgcagguguucuucaa

SEQ ID NO: 1495734 - RNA, 19 nt, Homo sapiens
  misc_RNA (1)...(19): siRNA sense strand
ggacggcaccaccuccaaa

SEQ ID NO: 1495735 - RNA, 19 nt, Homo sapiens
  misc_RNA (1)...(19): siRNA sense strand
gcgguuccaucgcagugaa

SEQ ID NO: 1495736 - RNA, 19 nt, Homo sapiens
  misc_RNA (1)...(19): siRNA sense strand
ccgugacgcuggacauguu

SEQ ID NO: 1495737 - RNA, 19 nt, Homo sapiens
  misc_RNA (1)...(19): siRNA sense strand
acucuucggugcaguuguu

SEQ ID NO: 1495738 - RNA, 19 nt, Homo sapiens
  misc_RNA (1)...(19): siRNA sense strand
gcaccaccuccaaauacuu

SEQ ID NO: 1495739 - RNA, 19 nt, Homo sapiens
  misc_RNA (1)...(19): siRNA sense strand
caacgaggcccuggugaag

SEQ ID NO: 1495740 - RNA, 19 nt, Homo sapiens
  misc_RNA (1)...(19): siRNA sense strand
caccaccuccaaauacuuu

SEQ ID NO: 1495741 - RNA, 19 nt, Homo sapiens
  misc_RNA (1)...(19): siRNA sense strand
ccaacgaggcccuggugaa

SEQ ID NO: 1495742 - RNA, 19 nt, Homo sapiens
  misc_RNA (1)...(19): siRNA sense strand
ggugaaggcccuggaguag

SEQ ID NO: 1495743 - RNA, 19 nt, Homo sapiens
  misc_RNA (1)...(19): siRNA sense strand
gggcagccaaggcaaacuu

SEQ ID NO: 1495744 - RNA, 19 nt, Homo sapiens
  misc_RNA (1)...(19): siRNA sense strand
gcagugaacgccgacucuu

SEQ ID NO: 1495745 - RNA, 19 nt, Homo sapiens
  misc_RNA (1)...(19): siRNA sense strand
ggcaccaccuccaaauacu

SEQ ID NO: 1495746 - RNA, 19 nt, Homo sapiens
  misc_RNA (1)...(19): siRNA sense strand
ccaaccagauguccuucac

SEQ ID NO: 1495747 - RNA, 19 nt, Homo sapiens
  misc_RNA (1)...(19): siRNA sense strand
gaucucugcugauaagaaa

SEQ ID NO: 1495748 - RNA, 19 nt, Homo sapiens
  misc_RNA (1)...(19): siRNA sense strand
gaacagaggcagcgcauca

SEQ ID NO: 1495749 - RNA, 19 nt, Homo sapiens
  misc_RNA (1)...(19): siRNA sense strand
gcacagggcauuuggaaga

SEQ ID NO: 1495750 - RNA, 19 nt, Homo sapiens
  misc_RNA (1)...(19): siRNA sense strand
gucaagaucucugcugaua

SEQ ID NO: 1495751 - RNA, 19 nt, Homo sapiens
  misc_RNA (1)...(19): siRNA sense strand
ggaagaacauuggcgaguu

SEQ ID NO: 1495752 - RNA, 19 nt, Homo sapiens
  misc_RNA (1)...(19): siRNA sense strand
caagaucucugcugauaag

SEQ ID NO: 1495753 - RNA, 19 nt, Homo sapiens
  misc_RNA (1)...(19): siRNA sense strand
gaaagaauaggauggaugu

SEQ ID NO: 1495754 - RNA, 19 nt, Homo sapiens
  misc_RNA (1)...(19): siRNA sense strand
ggaaagaaggaauuuaugu

SEQ ID NO: 1495755 - RNA, 19 nt, Homo sapiens
  misc_RNA (1)...(19): siRNA sense strand
ggaaccaggugcugcauuc

SEQ ID NO: 1495756 - RNA, 19 nt, Homo sapiens
  misc_RNA (1)...(19): siRNA sense strand
ccaccgagaucaucaagug

SEQ ID NO: 1495757 - RNA, 19 nt, Homo sapiens
  misc_RNA (1)...(19): siRNA sense strand
ggauggauguguucucuca

SEQ ID NO: 1495758 - RNA, 19 nt, Homo sapiens
  misc_RNA (1)...(19): siRNA sense strand
gaacagaagggagagaaga

SEQ ID NO: 1495759 - RNA, 19 nt, Homo sapiens
  misc_RNA (1)...(19): siRNA sense strand
uaagggacccgaacacuga

SEQ ID NO: 1495760 - RNA, 19 nt, Homo sapiens
  misc_RNA (1)...(19): siRNA sense strand
acaccaaagugcucaacua

SEQ ID NO: 1495761 - RNA, 19 nt, Homo sapiens
  misc_RNA (1)...(19): siRNA sense strand
gaaagaaggaauuuauguc

SEQ ID NO: 1495762 - RNA, 19 nt, Homo sapiens
  misc_RNA (1)...(19): siRNA sense strand
ccaaagugcucaacuacgu

SEQ ID NO: 1495763 - RNA, 19 nt, Homo sapiens
  misc_RNA (1)...(19): siRNA sense strand
aggagaagauugcucauga

SEQ ID NO: 1495764 - RNA, 19 nt, Homo sapiens
  misc_RNA (1)...(19): siRNA sense strand
ucaaguuccuggagccuuu

SEQ ID NO: 1495765 - RNA, 19 nt, Homo sapiens
  misc_RNA (1)...(19): siRNA sense strand
ccaagacccuagacgaguu

SEQ ID NO: 1495766 - RNA, 19 nt, Homo sapiens
  misc_RNA (1)...(19): siRNA sense strand
ggaccaucauguucuacaa

SEQ ID NO: 1495767 - RNA, 19 nt, Homo sapiens
  misc_RNA (1)...(19): siRNA sense strand
gcaaggcuaccagcucaua

SEQ ID NO: 1495768 - RNA, 19 nt, Homo sapiens
  misc_RNA (1)...(19): siRNA sense strand
agaauaggauggauguguu

SEQ ID NO: 1495769 - RNA, 19 nt, Homo sapiens
  misc_RNA (1)...(19): siRNA sense strand
gaaacaaccacugugauca

SEQ ID NO: 1495770 - RNA, 19 nt, Homo sapiens
  misc_RNA (1)...(19): siRNA sense strand
caaugggagugaacaccua

SEQ ID NO: 1495771 - RNA, 19 nt, Homo sapiens
  misc_RNA (1)...(19): siRNA sense strand
gaccugcgcugcaacuaca

SEQ ID NO: 1495772 - RNA, 19 nt, Homo sapiens
  misc_RNA (1)...(19): siRNA sense strand
ucccaucccucagaaguua

SEQ ID NO: 1495773 - RNA, 19 nt, Homo sapiens
  misc_RNA (1)...(19): siRNA sense strand
ugacaacgauaccuucuac

SEQ ID NO: 1495774 - RNA, 19 nt, Homo sapiens
  misc_RNA (1)...(19): siRNA sense strand
ggacacccaucucuaaagc

SEQ ID NO: 1495775 - RNA, 19 nt, Homo sapiens
  misc_RNA (1)...(19): siRNA sense strand
gcacagcacagggcauuug

SEQ ID NO: 1495776 - RNA, 19 nt, Homo sapiens
  misc_RNA (1)...(19): siRNA sense strand
gcuggacacccaucucuaa

SEQ ID NO: 1495777 - RNA, 19 nt, Homo sapiens
  misc_RNA (1)...(19): siRNA sense strand
ucaugaagcuaggaaauca

SEQ ID NO: 1495778 - RNA, 19 nt, Homo sapiens
  misc_RNA (1)...(19): siRNA sense strand
gccaugagccauauuacaa

SEQ ID NO: 1495779 - RNA, 19 nt, Homo sapiens
  misc_RNA (1)...(19): siRNA sense strand
acacagacuucuccaacga

SEQ ID NO: 1495780 - RNA, 19 nt, Homo sapiens
  misc_RNA (1)...(19): siRNA sense strand
ccaguuccgugacuacuuc

SEQ ID NO: 1495781 - RNA, 19 nt, Homo sapiens
  misc_RNA (1)...(19): siRNA sense strand
acaagaugcugcugaccuu

SEQ ID NO: 1495782 - RNA, 19 nt, Homo sapiens
  misc_RNA (1)...(19): siRNA sense strand
caugagccauauuacaaga

SEQ ID NO: 1495783 - RNA, 19 nt, Homo sapiens
  misc_RNA (1)...(19): siRNA sense strand
cuaccaagcuguggaccuu

SEQ ID NO: 1495784 - RNA, 19 nt, Homo sapiens
  misc_RNA (1)...(19): siRNA sense strand
caacgccucuuuggaugug

SEQ ID NO: 1495785 - RNA, 19 nt, Homo sapiens
  misc_RNA (1)...(19): siRNA sense strand
cccgaaaccugccuaaugg

SEQ ID NO: 1495786 - RNA, 19 nt, Homo sapiens
  misc_RNA (1)...(19): siRNA sense strand
uggacuggaucaagaaaga

SEQ ID NO: 1495787 - RNA, 19 nt, Homo sapiens
  misc_RNA (1)...(19): siRNA sense strand
gggaaagaaggaauuuaug

SEQ ID NO: 1495788 - RNA, 19 nt, Homo sapiens
  misc_RNA (1)...(19): siRNA sense strand
ucaacuacguggacuggau

SEQ ID NO: 1495789 - RNA, 19 nt, Homo sapiens
  misc_RNA (1)...(19): siRNA sense strand
gaacacgaagcgcaaagca

SEQ ID NO: 1495790 - RNA, 19 nt, Homo sapiens
  misc_RNA (1)...(19): siRNA sense strand
cccaacaacuuugaaacaa

SEQ ID NO: 1495791 - RNA, 19 nt, Homo sapiens
  misc_RNA (1)...(19): siRNA sense strand
cuaauggugacuuccguua

SEQ ID NO: 1495792 - RNA, 19 nt, Homo sapiens
  misc_RNA (1)...(19): siRNA sense strand
gcuauggcuucuacaccaa

SEQ ID NO: 1495793 - RNA, 19 nt, Homo sapiens
  misc_RNA (1)...(19): siRNA sense strand
ggagaagauugcucaugac

SEQ ID NO: 1495794 - RNA, 19 nt, Homo sapiens
  misc_RNA (1)...(19): siRNA sense strand
cgggaaagaaggaauuuau

SEQ ID NO: 1495795 - RNA, 19 nt, Homo sapiens
  misc_RNA (1)...(19): siRNA sense strand
ugagccauauuacaagaug

SEQ ID NO: 1495796 - RNA, 19 nt, Homo sapiens
  misc_RNA (1)...(19): siRNA sense strand
guuggaggcuacuucuguu

SEQ ID NO: 1495797 - RNA, 19 nt, Homo sapiens
  misc_RNA (1)...(19): siRNA sense strand
aaggcugcuucuaugauua

SEQ ID NO: 1495798 - RNA, 19 nt, Homo sapiens
  misc_RNA (1)...(19): siRNA sense strand
gaauaggauggauguguuc

SEQ ID NO: 1495799 - RNA, 19 nt, Homo sapiens
  misc_RNA (1)...(19): siRNA sense strand
ccaacaacuuugaaacaac

SEQ ID NO: 1495800 - RNA, 19 nt, Homo sapiens
  misc_RNA (1)...(19): siRNA sense strand
ugaaacaaccacugugauc

SEQ ID NO: 1495801 - RNA, 19 nt, Homo sapiens
  misc_RNA (1)...(19): siRNA sense strand
ggucauggaggagaagauu

SEQ ID NO: 1495802 - RNA, 19 nt, Homo sapiens
  misc_RNA (1)...(19): siRNA sense strand
acaaggcccguauccagua

SEQ ID NO: 1495803 - RNA, 19 nt, Homo sapiens
  misc_RNA (1)...(19): siRNA sense strand
cuagacgaguucaccauca

SEQ ID NO: 1495804 - RNA, 19 nt, Homo sapiens
  misc_RNA (1)...(19): siRNA sense strand
ggacuaccgucaggaugag

SEQ ID NO: 1495805 - RNA, 19 nt, Homo sapiens
  misc_RNA (1)...(19): siRNA sense strand
ccucggugcuugccagugu

SEQ ID NO: 1495806 - RNA, 19 nt, Homo sapiens
  misc_RNA (1)...(19): siRNA sense strand
cagcacagggcauuuggaa

SEQ ID NO: 1495807 - RNA, 19 nt, Homo sapiens
  misc_RNA (1)...(19): siRNA sense strand
cuacugccaugagccauau

SEQ ID NO: 1495808 - RNA, 19 nt, Homo sapiens
  misc_RNA (1)...(19): siRNA sense strand
cgugacuacuucauugcua

SEQ ID NO: 1495809 - RNA, 19 nt, Homo sapiens
  misc_RNA (1)...(19): siRNA sense strand
ggaggcaucaggcuacauc

SEQ ID NO: 1495810 - RNA, 19 nt, Homo sapiens
  misc_RNA (1)...(19): siRNA sense strand
uacguggacuggaucaaga

SEQ ID NO: 1495811 - RNA, 19 nt, Homo sapiens
  misc_RNA (1)...(19): siRNA sense strand
ggaugaguccuacaauuuu

SEQ ID NO: 1495812 - RNA, 19 nt, Homo sapiens
  misc_RNA (1)...(19): siRNA sense strand
gcucaugaagcuaggaaau

SEQ ID NO: 1495813 - RNA, 19 nt, Homo sapiens
  misc_RNA (1)...(19): siRNA sense strand
aagcaacgccucuuuggau

SEQ ID NO: 1495814 - RNA, 19 nt, Homo sapiens
  misc_RNA (1)...(19): siRNA sense strand
gaugaguccuacaauuuug

SEQ ID NO: 1495815 - RNA, 19 nt, Homo sapiens
  misc_RNA (1)...(19): siRNA sense strand
gcaguaagggacccgaaca

SEQ ID NO: 1495816 - RNA, 19 nt, Homo sapiens
  misc_RNA (1)...(19): siRNA sense strand
cuguggaccuugaugaaug

SEQ ID NO: 1495817 - RNA, 19 nt, Homo sapiens
  misc_RNA (1)...(19): siRNA sense strand
gggaaagaauaggauggau

SEQ ID NO: 1495818 - RNA, 19 nt, Homo sapiens
  misc_RNA (1)...(19): siRNA sense strand
aauggugacuuccguuaca

SEQ ID NO: 1495819 - RNA, 19 nt, Homo sapiens
  misc_RNA (1)...(19): siRNA sense strand
ccagaugcaagaucaagga

SEQ ID NO: 1495820 - RNA, 19 nt, Homo sapiens
  misc_RNA (1)...(19): siRNA sense strand
gaggagaagauugcucaug

SEQ ID NO: 1495821 - RNA, 19 nt, Homo sapiens
  misc_RNA (1)...(19): siRNA sense strand
ucaagaucucugcugauaa

SEQ ID NO: 1495822 - RNA, 19 nt, Homo sapiens
  misc_RNA (1)...(19): siRNA sense strand
cacagggcauuuggaagaa

SEQ ID NO: 1495823 - RNA, 19 nt, Homo sapiens
  misc_RNA (1)...(19): siRNA sense strand
gcuggaagcugcgcuacac

SEQ ID NO: 1495824 - RNA, 19 nt, Homo sapiens
  misc_RNA (1)...(19): siRNA sense strand
caaguacacugccccuaug

SEQ ID NO: 1495825 - RNA, 19 nt, Homo sapiens
  misc_RNA (1)...(19): siRNA sense strand
auggauguguucucucaaa

SEQ ID NO: 1495826 - RNA, 19 nt, Homo sapiens
  misc_RNA (1)...(19): siRNA sense strand
ccaucugccucccugacaa

SEQ ID NO: 1495827 - RNA, 19 nt, Homo sapiens
  misc_RNA (1)...(19): siRNA sense strand
gcaacgccucuuuggaugu

SEQ ID NO: 1495828 - RNA, 19 nt, Homo sapiens
  misc_RNA (1)...(19): siRNA sense strand
aagccaagaugggcaacuu

SEQ ID NO: 1495829 - RNA, 19 nt, Homo sapiens
  misc_RNA (1)...(19): siRNA sense strand
gcaaguacacugccccuau

SEQ ID NO: 1495830 - RNA, 19 nt, Homo sapiens
  misc_RNA (1)...(19): siRNA sense strand
gagguucugugggcaacug

SEQ ID NO: 1495831 - RNA, 19 nt, Homo sapiens
  misc_RNA (1)...(19): siRNA sense strand
ccauucccaucccucagaa

SEQ ID NO: 1495832 - RNA, 19 nt, Homo sapiens
  misc_RNA (1)...(19): siRNA sense strand
cagaagggagagaagauuc

SEQ ID NO: 1495833 - RNA, 19 nt, Homo sapiens
  misc_RNA (1)...(19): siRNA sense strand
gaaccugcagccucaguac

SEQ ID NO: 1495834 - RNA, 19 nt, Homo sapiens
  misc_RNA (1)...(19): siRNA sense strand
cgaguucugugggaagcaa

SEQ ID NO: 1495835 - RNA, 19 nt, Homo sapiens
  misc_RNA (1)...(19): siRNA sense strand
uaggauggauguguucucu

SEQ ID NO: 1495836 - RNA, 19 nt, Homo sapiens
  misc_RNA (1)...(19): siRNA sense strand
uagacgaguucaccaucau

SEQ ID NO: 1495837 - RNA, 19 nt, Homo sapiens
  misc_RNA (1)...(19): siRNA sense strand
cggacuaccgucaggauga

SEQ ID NO: 1495838 - RNA, 19 nt, Homo sapiens
  misc_RNA (1)...(19): siRNA sense strand
cacccuguaucccaaggaa

SEQ ID NO: 1495839 - RNA, 19 nt, Homo sapiens
  misc_RNA (1)...(19): siRNA sense strand
cagcugcccacacccugua

SEQ ID NO: 1495840 - RNA, 19 nt, Homo sapiens
  misc_RNA (1)...(19): siRNA sense strand
cagcagggagucugagcaa

SEQ ID NO: 1495841 - RNA, 19 nt, Homo sapiens
  misc_RNA (1)...(19): siRNA sense strand
ggugcugcauuccuucaca

SEQ ID NO: 1495842 - RNA, 19 nt, Homo sapiens
  misc_RNA (1)...(19): siRNA sense strand
gaccagcuacagaucuaug

SEQ ID NO: 1495843 - RNA, 19 nt, Homo sapiens
  misc_RNA (1)...(19): siRNA sense strand
gauggaggaggaggacuga

SEQ ID NO: 1495844 - RNA, 19 nt, Homo sapiens
  misc_RNA (1)...(19): siRNA sense strand
ccaccacaaugggagugaa

SEQ ID NO: 1495845 - RNA, 19 nt, Homo sapiens
  misc_RNA (1)...(19): siRNA sense strand
cuucuaugauuaugucaag

SEQ ID NO: 1495846 - RNA, 19 nt, Homo sapiens
  misc_RNA (1)...(19): siRNA sense strand
cuguggaucugcuguucuu

SEQ ID NO: 1495847 - RNA, 19 nt, Homo sapiens
  misc_RNA (1)...(19): siRNA sense strand
gaaacagccuccucaauuu

SEQ ID NO: 1495848 - RNA, 19 nt, Homo sapiens
  misc_RNA (1)...(19): siRNA sense strand
gaaacacucugacauacua

SEQ ID NO: 1495849 - RNA, 19 nt, Homo sapiens
  misc_RNA (1)...(19): siRNA sense strand
gaacguggcuucuuugauc

SEQ ID NO: 1495850 - RNA, 19 nt, Homo sapiens
  misc_RNA (1)...(19): siRNA sense strand
ggaaacagccuccucaauu

SEQ ID NO: 1495851 - RNA, 19 nt, Homo sapiens
  misc_RNA (1)...(19): siRNA sense strand
ggaaagguguugaacuaaa

SEQ ID NO: 1495852 - RNA, 19 nt, Homo sapiens
  misc_RNA (1)...(19): siRNA sense strand
gcggaaagguguugaacua

SEQ ID NO: 1495853 - RNA, 19 nt, Homo sapiens
  misc_RNA (1)...(19): siRNA sense strand
ggaauugccugugaaauca

SEQ ID NO: 1495854 - RNA, 19 nt, Homo sapiens
  misc_RNA (1)...(19): siRNA sense strand
caacugggccucuuccaua

SEQ ID NO: 1495855 - RNA, 19 nt, Homo sapiens
  misc_RNA (1)...(19): siRNA sense strand
gggaagauuuguaaugaga

SEQ ID NO: 1495856 - RNA, 19 nt, Homo sapiens
  misc_RNA (1)...(19): siRNA sense strand
caagagaagacaucaaauu

SEQ ID NO: 1495857 - RNA, 19 nt, Homo sapiens
  misc_RNA (1)...(19): siRNA sense strand
gauguuguuucacucauaa

SEQ ID NO: 1495858 - RNA, 19 nt, Homo sapiens
  misc_RNA (1)...(19): siRNA sense strand
ggaggacucuaugaacuaa

SEQ ID NO: 1495859 - RNA, 19 nt, Homo sapiens
  misc_RNA (1)...(19): siRNA sense strand
gaaccgaacauuacgaaga

SEQ ID NO: 1495860 - RNA, 19 nt, Homo sapiens
  misc_RNA (1)...(19): siRNA sense strand
ggguagagcuguaaacauc

SEQ ID NO: 1495861 - RNA, 19 nt, Homo sapiens
  misc_RNA (1)...(19): siRNA sense strand
gacaaugaguucuacaaug

SEQ ID NO: 1495862 - RNA, 19 nt, Homo sapiens
  misc_RNA (1)...(19): siRNA sense strand
guacagugauucuaaugga

SEQ ID NO: 1495863 - RNA, 19 nt, Homo sapiens
  misc_RNA (1)...(19): siRNA sense strand
cacauagacugcagaauga

SEQ ID NO: 1495864 - RNA, 19 nt, Homo sapiens
  misc_RNA (1)...(19): siRNA sense strand
caaauaaagcugaacaaug

SEQ ID NO: 1495865 - RNA, 19 nt, Homo sapiens
  misc_RNA (1)...(19): siRNA sense strand
agacaaauguuucguucaa

SEQ ID NO: 1495866 - RNA, 19 nt, Homo sapiens
  misc_RNA (1)...(19): siRNA sense strand
ggagguacagugauucuaa

SEQ ID NO: 1495867 - RNA, 19 nt, Homo sapiens
  misc_RNA (1)...(19): siRNA sense strand
ggaaagagccauugaagac

SEQ ID NO: 1495868 - RNA, 19 nt, Homo sapiens
  misc_RNA (1)...(19): siRNA sense strand
gaggaugacugcggaaaug

SEQ ID NO: 1495869 - RNA, 19 nt, Homo sapiens
  misc_RNA (1)...(19): siRNA sense strand
aaagagccauugaagacua

SEQ ID NO: 1495870 - RNA, 19 nt, Homo sapiens
  misc_RNA (1)...(19): siRNA sense strand
gaaagguguugaacuaaaa

SEQ ID NO: 1495871 - RNA, 19 nt, Homo sapiens
  misc_RNA (1)...(19): siRNA sense strand
gaggaaccgugauugaugu

SEQ ID NO: 1495872 - RNA, 19 nt, Homo sapiens
  misc_RNA (1)...(19): siRNA sense strand
ugaggucuuuggacaauuu

SEQ ID NO: 1495873 - RNA, 19 nt, Homo sapiens
  misc_RNA (1)...(19): siRNA sense strand
acaaugaguucuacaaugg

SEQ ID NO: 1495874 - RNA, 19 nt, Homo sapiens
  misc_RNA (1)...(19): siRNA sense strand
uaaugcagcuauaucucua

SEQ ID NO: 1495875 - RNA, 19 nt, Homo sapiens
  misc_RNA (1)...(19): siRNA sense strand
acacauagacugcagaaug

SEQ ID NO: 1495876 - RNA, 19 nt, Homo sapiens
  misc_RNA (1)...(19): siRNA sense strand
aaauggagguacagugauu

SEQ ID NO: 1495877 - RNA, 19 nt, Homo sapiens
  misc_RNA (1)...(19): siRNA sense strand
acaggcagaugcauaaaga

SEQ ID NO: 1495878 - RNA, 19 nt, Homo sapiens
  misc_RNA (1)...(19): siRNA sense strand
ggauguaucucuggcuuuc

SEQ ID NO: 1495879 - RNA, 19 nt, Homo sapiens
  misc_RNA (1)...(19): siRNA sense strand
acaaauguuucguucaaga

SEQ ID NO: 1495880 - RNA, 19 nt, Homo sapiens
  misc_RNA (1)...(19): siRNA sense strand
gaaaggagaaauucaucug

SEQ ID NO: 1495881 - RNA, 19 nt, Homo sapiens
  misc_RNA (1)...(19): siRNA sense strand
gagacagagugguagaaga

SEQ ID NO: 1495882 - RNA, 19 nt, Homo sapiens
  misc_RNA (1)...(19): siRNA sense strand
gaacauuacgaagaacaaa

SEQ ID NO: 1495883 - RNA, 19 nt, Homo sapiens
  misc_RNA (1)...(19): siRNA sense strand
ucuaauggauggaaagugu

SEQ ID NO: 1495884 - RNA, 19 nt, Homo sapiens
  misc_RNA (1)...(19): siRNA sense strand
cacaguacacgaccaguua

SEQ ID NO: 1495885 - RNA, 19 nt, Homo sapiens
  misc_RNA (1)...(19): siRNA sense strand
gcuaugggaucaacauuuu

SEQ ID NO: 1495886 - RNA, 19 nt, Homo sapiens
  misc_RNA (1)...(19): siRNA sense strand
cauaaaugaugcuccuguu

SEQ ID NO: 1495887 - RNA, 19 nt, Homo sapiens
  misc_RNA (1)...(19): siRNA sense strand
gcauuugaacugaaagaaa

SEQ ID NO: 1495888 - RNA, 19 nt, Homo sapiens
  misc_RNA (1)...(19): siRNA sense strand
cauagaugauguuguuuca

SEQ ID NO: 1495889 - RNA, 19 nt, Homo sapiens
  misc_RNA (1)...(19): siRNA sense strand
gggagaggguagagcugua

SEQ ID NO: 1495890 - RNA, 19 nt, Homo sapiens
  misc_RNA (1)...(19): siRNA sense strand
gggaauugccugugaaauc

SEQ ID NO: 1495891 - RNA, 19 nt, Homo sapiens
  misc_RNA (1)...(19): siRNA sense strand
cagaugaggaugauuguga

SEQ ID NO: 1495892 - RNA, 19 nt, Homo sapiens
  misc_RNA (1)...(19): siRNA sense strand
gagguacagugauucuaau

SEQ ID NO: 1495893 - RNA, 19 nt, Homo sapiens
  misc_RNA (1)...(19): siRNA sense strand
aaugagaaaucgcgauguu

SEQ ID NO: 1495894 - RNA, 19 nt, Homo sapiens
  misc_RNA (1)...(19): siRNA sense strand
gcacaccuuuugacaauga

SEQ ID NO: 1495895 - RNA, 19 nt, Homo sapiens
  misc_RNA (1)...(19): siRNA sense strand
uguuggagcugaauuuaau

SEQ ID NO: 1495896 - RNA, 19 nt, Homo sapiens
  misc_RNA (1)...(19): siRNA sense strand
aggacucuaugaacuaaua

SEQ ID NO: 1495897 - RNA, 19 nt, Homo sapiens
  misc_RNA (1)...(19): siRNA sense strand
gcacaguacacgaccaguu

SEQ ID NO: 1495898 - RNA, 19 nt, Homo sapiens
  misc_RNA (1)...(19): siRNA sense strand
aaccgaacauuacgaagaa

SEQ ID NO: 1495899 - RNA, 19 nt, Homo sapiens
  misc_RNA (1)...(19): siRNA sense strand
gggagaauauuuugccuuu

SEQ ID NO: 1495900 - RNA, 19 nt, Homo sapiens
  misc_RNA (1)...(19): siRNA sense strand
gguguaauggugacaauga

SEQ ID NO: 1495901 - RNA, 19 nt, Homo sapiens
  misc_RNA (1)...(19): siRNA sense strand
ugauguuguuucacucaua

SEQ ID NO: 1495902 - RNA, 19 nt, Homo sapiens
  misc_RNA (1)...(19): siRNA sense strand
agagaugccuuggguauca

SEQ ID NO: 1495903 - RNA, 19 nt, Homo sapiens
  misc_RNA (1)...(19): siRNA sense strand
gcagcuauaucucuaaaau

SEQ ID NO: 1495904 - RNA, 19 nt, Homo sapiens
  misc_RNA (1)...(19): siRNA sense strand
gcacaccuaaagaaacaaa

SEQ ID NO: 1495905 - RNA, 19 nt, Homo sapiens
  misc_RNA (1)...(19): siRNA sense strand
cugggaagauuuguaauga

SEQ ID NO: 1495906 - RNA, 19 nt, Homo sapiens
  misc_RNA (1)...(19): siRNA sense strand
gcaugugaaaggagaaauu

SEQ ID NO: 1495907 - RNA, 19 nt, Homo sapiens
  misc_RNA (1)...(19): siRNA sense strand
guucuacaauggacucugu

SEQ ID NO: 1495908 - RNA, 19 nt, Homo sapiens
  misc_RNA (1)...(19): siRNA sense strand
aaagagaugccuuggguau

SEQ ID NO: 1495909 - RNA, 19 nt, Homo sapiens
  misc_RNA (1)...(19): siRNA sense strand
uggcuucuuugaucuauga

SEQ ID NO: 1495910 - RNA, 19 nt, Homo sapiens
  misc_RNA (1)...(19): siRNA sense strand
cuuggaacguggcuucuuu

SEQ ID NO: 1495911 - RNA, 19 nt, Homo sapiens
  misc_RNA (1)...(19): siRNA sense strand
gaggaugauugugaaagug

SEQ ID NO: 1495912 - RNA, 19 nt, Homo sapiens
  misc_RNA (1)...(19): siRNA sense strand
cuauggaacucacuacagu

SEQ ID NO: 1495913 - RNA, 19 nt, Homo sapiens
  misc_RNA (1)...(19): siRNA sense strand
aaaguaucauccaagagaa

SEQ ID NO: 1495914 - RNA, 19 nt, Homo sapiens
  misc_RNA (1)...(19): siRNA sense strand
caaauguuucguucaagaa

SEQ ID NO: 1495915 - RNA, 19 nt, Homo sapiens
  misc_RNA (1)...(19): siRNA sense strand
ugauugaugugacugacuu

SEQ ID NO: 1495916 - RNA, 19 nt, Homo sapiens
  misc_RNA (1)...(19): siRNA sense strand
ggagaggguagagcuguaa

SEQ ID NO: 1495917 - RNA, 19 nt, Homo sapiens
  misc_RNA (1)...(19): siRNA sense strand
aaauuuacacccacugaaa

SEQ ID NO: 1495918 - RNA, 19 nt, Homo sapiens
  misc_RNA (1)...(19): siRNA sense strand
ugaggaugauugugaaagu

SEQ ID NO: 1495919 - RNA, 19 nt, Homo sapiens
  misc_RNA (1)...(19): siRNA sense strand
uagaugauguuguuucacu

SEQ ID NO: 1495920 - RNA, 19 nt, Homo sapiens
  misc_RNA (1)...(19): siRNA sense strand
cgaggaaccgugauugaug

SEQ ID NO: 1495921 - RNA, 19 nt, Homo sapiens
  misc_RNA (1)...(19): siRNA sense strand
gugaggaugcugaggauga

SEQ ID NO: 1495922 - RNA, 19 nt, Homo sapiens
  misc_RNA (1)...(19): siRNA sense strand
ugccggagcuuugcaguug

SEQ ID NO: 1495923 - RNA, 19 nt, Homo sapiens
  misc_RNA (1)...(19): siRNA sense strand
ugacugcggaaaugacuuu

SEQ ID NO: 1495924 - RNA, 19 nt, Homo sapiens
  misc_RNA (1)...(19): siRNA sense strand
ugagggaauugccugugaa

SEQ ID NO: 1495925 - RNA, 19 nt, Homo sapiens
  misc_RNA (1)...(19): siRNA sense strand
ggauggaaaguguuugugu

SEQ ID NO: 1495926 - RNA, 19 nt, Homo sapiens
  misc_RNA (1)...(19): siRNA sense strand
ugagaaaucgcgauguugu

SEQ ID NO: 1495927 - RNA, 19 nt, Homo sapiens
  misc_RNA (1)...(19): siRNA sense strand
gcagagacagagugguaga

SEQ ID NO: 1495928 - RNA, 19 nt, Homo sapiens
  misc_RNA (1)...(19): siRNA sense strand
caaaauggagguacaguga

SEQ ID NO: 1495929 - RNA, 19 nt, Homo sapiens
  misc_RNA (1)...(19): siRNA sense strand
aaacaaaacuuggaaagag

SEQ ID NO: 1495930 - RNA, 19 nt, Homo sapiens
  misc_RNA (1)...(19): siRNA sense strand
uaaaugaugcuccuguucu

SEQ ID NO: 1495931 - RNA, 19 nt, Homo sapiens
  misc_RNA (1)...(19): siRNA sense strand
aaauguuucugcaugugaa

SEQ ID NO: 1495932 - RNA, 19 nt, Homo sapiens
  misc_RNA (1)...(19): siRNA sense strand
agaugaggaugauugugaa

SEQ ID NO: 1495933 - RNA, 19 nt, Homo sapiens
  misc_RNA (1)...(19): siRNA sense strand
gagggaauugccugugaaa

SEQ ID NO: 1495934 - RNA, 19 nt, Homo sapiens
  misc_RNA (1)...(19): siRNA sense strand
uaauggauggaaaguguuu

SEQ ID NO: 1495935 - RNA, 19 nt, Homo sapiens
  misc_RNA (1)...(19): siRNA sense strand
gaugcuccuguucucauua

SEQ ID NO: 1495936 - RNA, 19 nt, Homo sapiens
  misc_RNA (1)...(19): siRNA sense strand
uaggaggacucuaugaacu

SEQ ID NO: 1495937 - RNA, 19 nt, Homo sapiens
  misc_RNA (1)...(19): siRNA sense strand
caacuuuuguggaugauau

SEQ ID NO: 1495938 - RNA, 19 nt, Homo sapiens
  misc_RNA (1)...(19): siRNA sense strand
ggaaacacucugacauacu

SEQ ID NO: 1495939 - RNA, 19 nt, Homo sapiens
  misc_RNA (1)...(19): siRNA sense strand
cugcagagacagaguggua

SEQ ID NO: 1495940 - RNA, 19 nt, Homo sapiens
  misc_RNA (1)...(19): siRNA sense strand
acccagagcuaacagaaag

SEQ ID NO: 1495941 - RNA, 19 nt, Homo sapiens
  misc_RNA (1)...(19): siRNA sense strand
gaagcggaaagguguugaa

SEQ ID NO: 1495942 - RNA, 19 nt, Homo sapiens
  misc_RNA (1)...(19): siRNA sense strand
ggaagauuuguaaugagaa

SEQ ID NO: 1495943 - RNA, 19 nt, Homo sapiens
  misc_RNA (1)...(19): siRNA sense strand
aaacagccuccucaauuuc

SEQ ID NO: 1495944 - RNA, 19 nt, Homo sapiens
  misc_RNA (1)...(19): siRNA sense strand
uccaagagaagacaucaaa

SEQ ID NO: 1495945 - RNA, 19 nt, Homo sapiens
  misc_RNA (1)...(19): siRNA sense strand
gaaacaaaacuuggaaaga

SEQ ID NO: 1495946 - RNA, 19 nt, Homo sapiens
  misc_RNA (1)...(19): siRNA sense strand
gaaagagccauugaagacu

SEQ ID NO: 1495947 - RNA, 19 nt, Homo sapiens
  misc_RNA (1)...(19): siRNA sense strand
gaagaauaguugaugauug

SEQ ID NO: 1495948 - RNA, 19 nt, Homo sapiens
  misc_RNA (1)...(19): siRNA sense strand
guggaaaucugcucaauga

SEQ ID NO: 1495949 - RNA, 19 nt, Homo sapiens
  misc_RNA (1)...(19): siRNA sense strand
ggaagugguugcuguguau

SEQ ID NO: 1495950 - RNA, 19 nt, Homo sapiens
  misc_RNA (1)...(19): siRNA sense strand
ugacaugacuccuccugua

SEQ ID NO: 1495951 - RNA, 19 nt, Homo sapiens
  misc_RNA (1)...(19): siRNA sense strand
ccagugguauggaguauaa

SEQ ID NO: 1495952 - RNA, 19 nt, Homo sapiens
  misc_RNA (1)...(19): siRNA sense strand
gaaagacgauaccgaugau

SEQ ID NO: 1495953 - RNA, 19 nt, Homo sapiens
  misc_RNA (1)...(19): siRNA sense strand
gaaaagugaugcugaagaa

SEQ ID NO: 1495954 - RNA, 19 nt, Homo sapiens
  misc_RNA (1)...(19): siRNA sense strand
gaaaucugcucaaugacau

SEQ ID NO: 1495955 - RNA, 19 nt, Homo sapiens
  misc_RNA (1)...(19): siRNA sense strand
gaacagaucaccaagaaac

SEQ ID NO: 1495956 - RNA, 19 nt, Homo sapiens
  misc_RNA (1)...(19): siRNA sense strand
aagagaaacuugaagagaa

SEQ ID NO: 1495957 - RNA, 19 nt, Homo sapiens
  misc_RNA (1)...(19): siRNA sense strand
cgauaccgaugaugaaauu

SEQ ID NO: 1495958 - RNA, 19 nt, Homo sapiens
  misc_RNA (1)...(19): siRNA sense strand
gaagagaaacuugaagaga

SEQ ID NO: 1495959 - RNA, 19 nt, Homo sapiens
  misc_RNA (1)...(19): siRNA sense strand
ggauugggaugaagacaug

SEQ ID NO: 1495960 - RNA, 19 nt, Homo sapiens
  misc_RNA (1)...(19): siRNA sense strand
uugaagaucuggaaccuuu

SEQ ID NO: 1495961 - RNA, 19 nt, Homo sapiens
  misc_RNA (1)...(19): siRNA sense strand
gaaauugccaaauaugaug

SEQ ID NO: 1495962 - RNA, 19 nt, Homo sapiens
  misc_RNA (1)...(19): siRNA sense strand
ggaggaaggagaagagaaa

SEQ ID NO: 1495963 - RNA, 19 nt, Homo sapiens
  misc_RNA (1)...(19): siRNA sense strand
aaacacaucuuuacacacu

SEQ ID NO: 1495964 - RNA, 19 nt, Homo sapiens
  misc_RNA (1)...(19): siRNA sense strand
agagaaacuugaagagaaa

SEQ ID NO: 1495965 - RNA, 19 nt, Homo sapiens
  misc_RNA (1)...(19): siRNA sense strand
ggaagccuccuaugauuga

SEQ ID NO: 1495966 - RNA, 19 nt, Homo sapiens
  misc_RNA (1)...(19): siRNA sense strand
gggaagugguugcugugua

SEQ ID NO: 1495967 - RNA, 19 nt, Homo sapiens
  misc_RNA (1)...(19): siRNA sense strand
ugauugauauugaggauga

SEQ ID NO: 1495968 - RNA, 19 nt, Homo sapiens
  misc_RNA (1)...(19): siRNA sense strand
gaaaacacaucuuuacaca

SEQ ID NO: 1495969 - RNA, 19 nt, Homo sapiens
  misc_RNA (1)...(19): siRNA sense strand
gcuuggaacugcuauuguu

SEQ ID NO: 1495970 - RNA, 19 nt, Homo sapiens
  misc_RNA (1)...(19): siRNA sense strand
aaacggguaucuaugaaga

SEQ ID NO: 1495971 - RNA, 19 nt, Homo sapiens
  misc_RNA (1)...(19): siRNA sense strand
uuacaaagcuccaguucca

SEQ ID NO: 1495972 - RNA, 19 nt, Homo sapiens
  misc_RNA (1)...(19): siRNA sense strand
gagaagagaaacuugaaga

SEQ ID NO: 1495973 - RNA, 19 nt, Homo sapiens
  misc_RNA (1)...(19): siRNA sense strand
gcaaauggaagccuccuau

SEQ ID NO: 1495974 - RNA, 19 nt, Homo sapiens
  misc_RNA (1)...(19): siRNA sense strand
agacauggauggagaaugg

SEQ ID NO: 1495975 - RNA, 19 nt, Homo sapiens
  misc_RNA (1)...(19): siRNA sense strand
cugcuaagauuccagauga

SEQ ID NO: 1495976 - RNA, 19 nt, Homo sapiens
  misc_RNA (1)...(19): siRNA sense strand
acacaucuuuacacacuaa

SEQ ID NO: 1495977 - RNA, 19 nt, Homo sapiens
  misc_RNA (1)...(19): siRNA sense strand
ugagucagcuccuggaugu

SEQ ID NO: 1495978 - RNA, 19 nt, Homo sapiens
  misc_RNA (1)...(19): siRNA sense strand
cagagaaaccugaggauug

SEQ ID NO: 1495979 - RNA, 19 nt, Homo sapiens
  misc_RNA (1)...(19): siRNA sense strand
ggaaaucugcucaaugaca

SEQ ID NO: 1495980 - RNA, 19 nt, Homo sapiens
  misc_RNA (1)...(19): siRNA sense strand
caccaagccucucauuguu

SEQ ID NO: 1495981 - RNA, 19 nt, Homo sapiens
  misc_RNA (1)...(19): siRNA sense strand
gaaggaagaggaagaagag

SEQ ID NO: 1495982 - RNA, 19 nt, Homo sapiens
  misc_RNA (1)...(19): siRNA sense strand
gauaaaggacuuguguuga

SEQ ID NO: 1495983 - RNA, 19 nt, Homo sapiens
  misc_RNA (1)...(19): siRNA sense strand
gaugaugaugugauugaua

SEQ ID NO: 1495984 - RNA, 19 nt, Homo sapiens
  misc_RNA (1)...(19): siRNA sense strand
uaaaggacuuguguugaug

SEQ ID NO: 1495985 - RNA, 19 nt, Homo sapiens
  misc_RNA (1)...(19): siRNA sense strand
uugaacagaucaccaagaa

SEQ ID NO: 1495986 - RNA, 19 nt, Homo sapiens
  misc_RNA (1)...(19): siRNA sense strand
ggaaggagaagagaaacuu

SEQ ID NO: 1495987 - RNA, 19 nt, Homo sapiens
  misc_RNA (1)...(19): siRNA sense strand
aagaauaguugaugauugg

SEQ ID NO: 1495988 - RNA, 19 nt, Homo sapiens
  misc_RNA (1)...(19): siRNA sense strand
augcagaucugaagaccua

SEQ ID NO: 1495989 - RNA, 19 nt, Homo sapiens
  misc_RNA (1)...(19): siRNA sense strand
auaaaggacuuguguugau

SEQ ID NO: 1495990 - RNA, 19 nt, Homo sapiens
  misc_RNA (1)...(19): siRNA sense strand
ccaagccucucauuguuca

SEQ ID NO: 1495991 - RNA, 19 nt, Homo sapiens
  misc_RNA (1)...(19): siRNA sense strand
gcagagaaaccugaggauu

SEQ ID NO: 1495992 - RNA, 19 nt, Homo sapiens
  misc_RNA (1)...(19): siRNA sense strand
gaagaugguggcacuguca

SEQ ID NO: 1495993 - RNA, 19 nt, Homo sapiens
  misc_RNA (1)...(19): siRNA sense strand
gaacucaaccuggaucagu

SEQ ID NO: 1495994 - RNA, 19 nt, Homo sapiens
  misc_RNA (1)...(19): siRNA sense strand
uggguagucuauauucuaa

SEQ ID NO: 1495995 - RNA, 19 nt, Homo sapiens
  misc_RNA (1)...(19): siRNA sense strand
gacaugacuccuccuguaa

SEQ ID NO: 1495996 - RNA, 19 nt, Homo sapiens
  misc_RNA (1)...(19): siRNA sense strand
aaacagaaagccacgaaga

SEQ ID NO: 1495997 - RNA, 19 nt, Homo sapiens
  misc_RNA (1)...(19): siRNA sense strand
ggagguagaggaaaugaag

SEQ ID NO: 1495998 - RNA, 19 nt, Homo sapiens
  misc_RNA (1)...(19): siRNA sense strand
gaucugaagaccuauuuua

SEQ ID NO: 1495999 - RNA, 19 nt, Homo sapiens
  misc_RNA (1)...(19): siRNA sense strand
agaaagacgauaccgauga

SEQ ID NO: 1496000 - RNA, 19 nt, Homo sapiens
  misc_RNA (1)...(19): siRNA sense strand
gaaggagaagagaaacuug

SEQ ID NO: 1496001 - RNA, 19 nt, Homo sapiens
  misc_RNA (1)...(19): siRNA sense strand
gaucgaagaauaguugaug

SEQ ID NO: 1496002 - RNA, 19 nt, Homo sapiens
  misc_RNA (1)...(19): siRNA sense strand
gcugaucgaagaauaguug

SEQ ID NO: 1496003 - RNA, 19 nt, Homo sapiens
  misc_RNA (1)...(19): siRNA sense strand
uccaugaccucugacauuu

SEQ ID NO: 1496004 - RNA, 19 nt, Homo sapiens
  misc_RNA (1)...(19): siRNA sense strand
gaaggcugguuagaugaug

SEQ ID NO: 1496005 - RNA, 19 nt, Homo sapiens
  misc_RNA (1)...(19): siRNA sense strand
ggaaguauauuuugcugau

SEQ ID NO: 1496006 - RNA, 19 nt, Homo sapiens
  misc_RNA (1)...(19): siRNA sense strand
gaagaucuggaaccuuuca

SEQ ID NO: 1496007 - RNA, 19 nt, Homo sapiens
  misc_RNA (1)...(19): siRNA sense strand
aggaugaccuugacgaugu

SEQ ID NO: 1496008 - RNA, 19 nt, Homo sapiens
  misc_RNA (1)...(19): siRNA sense strand
uauguuugguccagauaaa

SEQ ID NO: 1496009 - RNA, 19 nt, Homo sapiens
  misc_RNA (1)...(19): siRNA sense strand
cgaugucauugaagaggua

SEQ ID NO: 1496010 - RNA, 19 nt, Homo sapiens
  misc_RNA (1)...(19): siRNA sense strand
ugauaaaggacuuguguug

SEQ ID NO: 1496011 - RNA, 19 nt, Homo sapiens
  misc_RNA (1)...(19): siRNA sense strand
gaugaaauugccaaauaug

SEQ ID NO: 1496012 - RNA, 19 nt, Homo sapiens
  misc_RNA (1)...(19): siRNA sense strand
caagguuacuuacaaagcu

SEQ ID NO: 1496013 - RNA, 19 nt, Homo sapiens
  misc_RNA (1)...(19): siRNA sense strand
gcagaggaggaugaaauuu

SEQ ID NO: 1496014 - RNA, 19 nt, Homo sapiens
  misc_RNA (1)...(19): siRNA sense strand
gaagagaaggaagaggaaa

SEQ ID NO: 1496015 - RNA, 19 nt, Homo sapiens
  misc_RNA (1)...(19): siRNA sense strand
ggaagaggaagaagagaag

SEQ ID NO: 1496016 - RNA, 19 nt, Homo sapiens
  misc_RNA (1)...(19): siRNA sense strand
cccgaaggcugguuagaug

SEQ ID NO: 1496017 - RNA, 19 nt, Homo sapiens
  misc_RNA (1)...(19): siRNA sense strand
caucaugccaucucugcua

SEQ ID NO: 1496018 - RNA, 19 nt, Homo sapiens
  misc_RNA (1)...(19): siRNA sense strand
aaagugaugcugaagaaga

SEQ ID NO: 1496019 - RNA, 19 nt, Homo sapiens
  misc_RNA (1)...(19): siRNA sense strand
aaauggaagccuccuauga

SEQ ID NO: 1496020 - RNA, 19 nt, Homo sapiens
  misc_RNA (1)...(19): siRNA sense strand
gaugaugugauugauauug

SEQ ID NO: 1496021 - RNA, 19 nt, Homo sapiens
  misc_RNA (1)...(19): siRNA sense strand
acaccaagccucucauugu

SEQ ID NO: 1496022 - RNA, 19 nt, Homo sapiens
  misc_RNA (1)...(19): siRNA sense strand
cgaagaauaguugaugauu

SEQ ID NO: 1496023 - RNA, 19 nt, Homo sapiens
  misc_RNA (1)...(19): siRNA sense strand
cauuugugcugaucgaaga

SEQ ID NO: 1496024 - RNA, 19 nt, Homo sapiens
  misc_RNA (1)...(19): siRNA sense strand
agagaaaccugaggauugg

SEQ ID NO: 1496025 - RNA, 19 nt, Homo sapiens
  misc_RNA (1)...(19): siRNA sense strand
caugacuccuccuguaaau

SEQ ID NO: 1496026 - RNA, 19 nt, Homo sapiens
  misc_RNA (1)...(19): siRNA sense strand
ugaugagccugaguacgua

SEQ ID NO: 1496027 - RNA, 19 nt, Homo sapiens
  misc_RNA (1)...(19): siRNA sense strand
guuauccucuucugcuguu

SEQ ID NO: 1496028 - RNA, 19 nt, Homo sapiens
  misc_RNA (1)...(19): siRNA sense strand
gguagucuauauucuaacu

SEQ ID NO: 1496029 - RNA, 19 nt, Homo sapiens
  misc_RNA (1)...(19): siRNA sense strand
gaaaauaccaaauccagau

SEQ ID NO: 1496030 - RNA, 19 nt, Homo sapiens
  misc_RNA (1)...(19): siRNA sense strand
ccaaauaugauggaaagug

SEQ ID NO: 1496031 - RNA, 19 nt, Homo sapiens
  misc_RNA (1)...(19): siRNA sense strand
guccaugaccucugacauu

SEQ ID NO: 1496032 - RNA, 19 nt, Homo sapiens
  misc_RNA (1)...(19): siRNA sense strand
gauuauguuugguccagau

SEQ ID NO: 1496033 - RNA, 19 nt, Homo sapiens
  misc_RNA (1)...(19): siRNA sense strand
caagaccccuuauacgauu

SEQ ID NO: 1496034 - RNA, 19 nt, Homo sapiens
  misc_RNA (1)...(19): siRNA sense strand
gaaaugaaggagucaaagc

SEQ ID NO: 1496035 - RNA, 19 nt, Homo sapiens
  misc_RNA (1)...(19): siRNA sense strand
caacaggggaaguauauuu

SEQ ID NO: 1496036 - RNA, 19 nt, Homo sapiens
  misc_RNA (1)...(19): siRNA sense strand
agaaugugguggugccuau

SEQ ID NO: 1496037 - RNA, 19 nt, Homo sapiens
  misc_RNA (1)...(19): siRNA sense strand
gaucgaggcagcugaagag

SEQ ID NO: 1496038 - RNA, 19 nt, Homo sapiens
  misc_RNA (1)...(19): siRNA sense strand
caaaacggguaucuaugaa

SEQ ID NO: 1496039 - RNA, 19 nt, Homo sapiens
  misc_RNA (1)...(19): siRNA sense strand
acuauaaacugcacuucau

SEQ ID NO: 1496040 - RNA, 19 nt, Homo sapiens
  misc_RNA (1)...(19): siRNA sense strand
ggugauaaaggacuugugu

SEQ ID NO: 1496041 - RNA, 19 nt, Homo sapiens
  misc_RNA (1)...(19): siRNA sense strand
gaagagaaacagaaaagug

SEQ ID NO: 1496042 - RNA, 19 nt, Homo sapiens
  misc_RNA (1)...(19): siRNA sense strand
ugauggacaugaugaugau

SEQ ID NO: 1496043 - RNA, 19 nt, Homo sapiens
  misc_RNA (1)...(19): siRNA sense strand
cuuccuguguuccugguua

SEQ ID NO: 1496044 - RNA, 19 nt, Homo sapiens
  misc_RNA (1)...(19): siRNA sense strand
gaucaccaagaaacagaaa

SEQ ID NO: 1496045 - RNA, 19 nt, Homo sapiens
  misc_RNA (1)...(19): siRNA sense strand
caucucccaagguuacuua

SEQ ID NO: 1496046 - RNA, 19 nt, Homo sapiens
  misc_RNA (1)...(19): siRNA sense strand
ugaaggaagaggaagaaga

SEQ ID NO: 1496047 - RNA, 19 nt, Homo sapiens
  misc_RNA (1)...(19): siRNA sense strand
ggacaucuaucucaucauu

SEQ ID NO: 1496048 - RNA, 19 nt, Homo sapiens
  misc_RNA (1)...(19): siRNA sense strand
ccaaagaucuccuggacuu

SEQ ID NO: 1496049 - RNA, 19 nt, Homo sapiens
  misc_RNA (1)...(19): siRNA sense strand
gacaagagcccacagagua

SEQ ID NO: 1496050 - RNA, 19 nt, Homo sapiens
  misc_RNA (1)...(19): siRNA sense strand
ccaaagagauuacgaaugc

SEQ ID NO: 1496051 - RNA, 19 nt, Homo sapiens
  misc_RNA (1)...(19): siRNA sense strand
gaacaaagucagcaaggaa

SEQ ID NO: 1496052 - RNA, 19 nt, Homo sapiens
  misc_RNA (1)...(19): siRNA sense strand
gaagaccgaugaucaggau

SEQ ID NO: 1496053 - RNA, 19 nt, Homo sapiens
  misc_RNA (1)...(19): siRNA sense strand
agaaaggucuggacaucua

SEQ ID NO: 1496054 - RNA, 19 nt, Homo sapiens
  misc_RNA (1)...(19): siRNA sense strand
guagccagcuuccuucuga

SEQ ID NO: 1496055 - RNA, 19 nt, Homo sapiens
  misc_RNA (1)...(19): siRNA sense strand
gaauuaaaccuguaucaag

SEQ ID NO: 1496056 - RNA, 19 nt, Homo sapiens
  misc_RNA (1)...(19): siRNA sense strand
caggauaucuacaagguau

SEQ ID NO: 1496057 - RNA, 19 nt, Homo sapiens
  misc_RNA (1)...(19): siRNA sense strand
gagcuuuccauguaaauuu

SEQ ID NO: 1496058 - RNA, 19 nt, Homo sapiens
  misc_RNA (1)...(19): siRNA sense strand
gaacugaccccgaauuaaa

SEQ ID NO: 1496059 - RNA, 19 nt, Homo sapiens
  misc_RNA (1)...(19): siRNA sense strand
ggaacaaagucagcaagga

SEQ ID NO: 1496060 - RNA, 19 nt, Homo sapiens
  misc_RNA (1)...(19): siRNA sense strand
ggacaucaacuuggacauu

SEQ ID NO: 1496061 - RNA, 19 nt, Homo sapiens
  misc_RNA (1)...(19): siRNA sense strand
gacaucaacuuggacauuc

SEQ ID NO: 1496062 - RNA, 19 nt, Homo sapiens
  misc_RNA (1)...(19): siRNA sense strand
aaacagaggagucggagaa

SEQ ID NO: 1496063 - RNA, 19 nt, Homo sapiens
  misc_RNA (1)...(19): siRNA sense strand
ugucagcuguccagagaaa

SEQ ID NO: 1496064 - RNA, 19 nt, Homo sapiens
  misc_RNA (1)...(19): siRNA sense strand
caaaggugcagucuccaaa

SEQ ID NO: 1496065 - RNA, 19 nt, Homo sapiens
  misc_RNA (1)...(19): siRNA sense strand
ccugucagcuguccagaga

SEQ ID NO: 1496066 - RNA, 19 nt, Homo sapiens
  misc_RNA (1)...(19): siRNA sense strand
gcacagcagggaacaaagu

SEQ ID NO: 1496067 - RNA, 19 nt, Homo sapiens
  misc_RNA (1)...(19): siRNA sense strand
caaaugagugaugauauug

SEQ ID NO: 1496068 - RNA, 19 nt, Homo sapiens
  misc_RNA (1)...(19): siRNA sense strand
gauuacgaaugccuuggaa

SEQ ID NO: 1496069 - RNA, 19 nt, Homo sapiens
  misc_RNA (1)...(19): siRNA sense strand
guaaauuuguagccagcuu

SEQ ID NO: 1496070 - RNA, 19 nt, Homo sapiens
  misc_RNA (1)...(19): siRNA sense strand
ccaacaaauuccagcuuca

SEQ ID NO: 1496071 - RNA, 19 nt, Homo sapiens
  misc_RNA (1)...(19): siRNA sense strand
caauguuucuuccaaaggu

SEQ ID NO: 1496072 - RNA, 19 nt, Homo sapiens
  misc_RNA (1)...(19): siRNA sense strand
agagaaaggucuggacauc

SEQ ID NO: 1496073 - RNA, 19 nt, Homo sapiens
  misc_RNA (1)...(19): siRNA sense strand
cagaggagucggagaaaug

SEQ ID NO: 1496074 - RNA, 19 nt, Homo sapiens
  misc_RNA (1)...(19): siRNA sense strand
ucucaucauuggcauaugu

SEQ ID NO: 1496075 - RNA, 19 nt, Homo sapiens
  misc_RNA (1)...(19): siRNA sense strand
gaccucgaguucagccaaa

SEQ ID NO: 1496076 - RNA, 19 nt, Homo sapiens
  misc_RNA (1)...(19): siRNA sense strand
caacaaauuccagcuucaa

SEQ ID NO: 1496077 - RNA, 19 nt, Homo sapiens
  misc_RNA (1)...(19): siRNA sense strand
ccaccagccugagugcaaa

SEQ ID NO: 1496078 - RNA, 19 nt, Homo sapiens
  misc_RNA (1)...(19): siRNA sense strand
ggagacaagagcccacaga

SEQ ID NO: 1496079 - RNA, 19 nt, Homo sapiens
  misc_RNA (1)...(19): siRNA sense strand
gcacugcucguuuucuaua

SEQ ID NO: 1496080 - RNA, 19 nt, Homo sapiens
  misc_RNA (1)...(19): siRNA sense strand
ggacauuccuaguuuucaa

SEQ ID NO: 1496081 - RNA, 19 nt, Homo sapiens
  misc_RNA (1)...(19): siRNA sense strand
gaaaggucuggacaucuau

SEQ ID NO: 1496082 - RNA, 19 nt, Homo sapiens
  misc_RNA (1)...(19): siRNA sense strand
ccgaugaucaggauaucua

SEQ ID NO: 1496083 - RNA, 19 nt, Homo sapiens
  misc_RNA (1)...(19): siRNA sense strand
gucaggacaucaacuugga

SEQ ID NO: 1496084 - RNA, 19 nt, Homo sapiens
  misc_RNA (1)...(19): siRNA sense strand
ccugugagguaaugaaugg

SEQ ID NO: 1496085 - RNA, 19 nt, Homo sapiens
  misc_RNA (1)...(19): siRNA sense strand
acuuggacauuccuaguuu

SEQ ID NO: 1496086 - RNA, 19 nt, Homo sapiens
  misc_RNA (1)...(19): siRNA sense strand
aagaucuccuggacuugua

SEQ ID NO: 1496087 - RNA, 19 nt, Homo sapiens
  misc_RNA (1)...(19): siRNA sense strand
ggucuggacaucuaucuca

SEQ ID NO: 1496088 - RNA, 19 nt, Homo sapiens
  misc_RNA (1)...(19): siRNA sense strand
uuaaaccuguaucaagaug

SEQ ID NO: 1496089 - RNA, 19 nt, Homo sapiens
  misc_RNA (1)...(19): siRNA sense strand
cgaauuaaaccuguaucaa

SEQ ID NO: 1496090 - RNA, 19 nt, Homo sapiens
  misc_RNA (1)...(19): siRNA sense strand
ggagucggagaaaugauga

SEQ ID NO: 1496091 - RNA, 19 nt, Homo sapiens
  misc_RNA (1)...(19): siRNA sense strand
guaucaagaugggaaacau

SEQ ID NO: 1496092 - RNA, 19 nt, Homo sapiens
  misc_RNA (1)...(19): siRNA sense strand
aaggugcagucuccaaaga

SEQ ID NO: 1496093 - RNA, 19 nt, Homo sapiens
  misc_RNA (1)...(19): siRNA sense strand
acaucuaucucaucauugg

SEQ ID NO: 1496094 - RNA, 19 nt, Homo sapiens
  misc_RNA (1)...(19): siRNA sense strand
gugcacagcagggaacaaa

SEQ ID NO: 1496095 - RNA, 19 nt, Homo sapiens
  misc_RNA (1)...(19): siRNA sense strand
augaggagcuggagacaag

SEQ ID NO: 1496096 - RNA, 19 nt, Homo sapiens
  misc_RNA (1)...(19): siRNA sense strand
caacuuggacauuccuagu

SEQ ID NO: 1496097 - RNA, 19 nt, Homo sapiens
  misc_RNA (1)...(19): siRNA sense strand
cuggacaucuaucucauca

SEQ ID NO: 1496098 - RNA, 19 nt, Homo sapiens
  misc_RNA (1)...(19): siRNA sense strand
ccagcaacuucccaacauc

SEQ ID NO: 1496099 - RNA, 19 nt, Homo sapiens
  misc_RNA (1)...(19): siRNA sense strand
caaguucaccagcagaaag

SEQ ID NO: 1496100 - RNA, 19 nt, Homo sapiens
  misc_RNA (1)...(19): siRNA sense strand
gcacaauucagaaaagaga

SEQ ID NO: 1496101 - RNA, 19 nt, Homo sapiens
  misc_RNA (1)...(19): siRNA sense strand
guucagcaccagccucaga

SEQ ID NO: 1496102 - RNA, 19 nt, Homo sapiens
  misc_RNA (1)...(19): siRNA sense strand
aaauuaagcaucugaagac

SEQ ID NO: 1496103 - RNA, 19 nt, Homo sapiens
  misc_RNA (1)...(19): siRNA sense strand
gagugaugauauugacgau

SEQ ID NO: 1496104 - RNA, 19 nt, Homo sapiens
  misc_RNA (1)...(19): siRNA sense strand
ccaaaggugcagucuccaa

SEQ ID NO: 1496105 - RNA, 19 nt, Homo sapiens
  misc_RNA (1)...(19): siRNA sense strand
gccagcuuccuucugauuu

SEQ ID NO: 1496106 - RNA, 19 nt, Homo sapiens
  misc_RNA (1)...(19): siRNA sense strand
gaccgaugaucaggauauc

SEQ ID NO: 1496107 - RNA, 19 nt, Homo sapiens
  misc_RNA (1)...(19): siRNA sense strand
gggaaacaucuaaaacuuu

SEQ ID NO: 1496108 - RNA, 19 nt, Homo sapiens
  misc_RNA (1)...(19): siRNA sense strand
acagaggagucggagaaau

SEQ ID NO: 1496109 - RNA, 19 nt, Homo sapiens
  misc_RNA (1)...(19): siRNA sense strand
gagaaaggucuggacaucu

SEQ ID NO: 1496110 - RNA, 19 nt, Homo sapiens
  misc_RNA (1)...(19): siRNA sense strand
aaagaucuccuggacuugu

SEQ ID NO: 1496111 - RNA, 19 nt, Homo sapiens
  misc_RNA (1)...(19): siRNA sense strand
ccagcuuccuucugauuuu

SEQ ID NO: 1496112 - RNA, 19 nt, Homo sapiens
  misc_RNA (1)...(19): siRNA sense strand
ggaacugaccccgaauuaa

SEQ ID NO: 1496113 - RNA, 19 nt, Homo sapiens
  misc_RNA (1)...(19): siRNA sense strand
agaccgaugaucaggauau

SEQ ID NO: 1496114 - RNA, 19 nt, Homo sapiens
  misc_RNA (1)...(19): siRNA sense strand
uccagcaacuucccaacau

SEQ ID NO: 1496115 - RNA, 19 nt, Homo sapiens
  misc_RNA (1)...(19): siRNA sense strand
uaucucaucauuggcauau

SEQ ID NO: 1496116 - RNA, 19 nt, Homo sapiens
  misc_RNA (1)...(19): siRNA sense strand
cagcaccagccucagaaga

SEQ ID NO: 1496117 - RNA, 19 nt, Homo sapiens
  misc_RNA (1)...(19): siRNA sense strand
ugaagaagaugaagaagaa

SEQ ID NO: 1496118 - RNA, 19 nt, Homo sapiens
  misc_RNA (1)...(19): siRNA sense strand
gagaagaacaucuauauug

SEQ ID NO: 1496119 - RNA, 19 nt, Homo sapiens
  misc_RNA (1)...(19): siRNA sense strand
ggaugaagaugaauauaag

SEQ ID NO: 1496120 - RNA, 19 nt, Homo sapiens
  misc_RNA (1)...(19): siRNA sense strand
gaacagccuaugaagauaa

SEQ ID NO: 1496121 - RNA, 19 nt, Homo sapiens
  misc_RNA (1)...(19): siRNA sense strand
ggaacagccuaugaagaua

SEQ ID NO: 1496122 - RNA, 19 nt, Homo sapiens
  misc_RNA (1)...(19): siRNA sense strand
agaaggagaucucagaaga

SEQ ID NO: 1496123 - RNA, 19 nt, Homo sapiens
  misc_RNA (1)...(19): siRNA sense strand
gcagaacaguuucgaaugc

SEQ ID NO: 1496124 - RNA, 19 nt, Homo sapiens
  misc_RNA (1)...(19): siRNA sense strand
agaccuaucuucaaauugu

SEQ ID NO: 1496125 - RNA, 19 nt, Homo sapiens
  misc_RNA (1)...(19): siRNA sense strand
uaagcaagaugaaaugaag

SEQ ID NO: 1496126 - RNA, 19 nt, Homo sapiens
  misc_RNA (1)...(19): siRNA sense strand
gaaggagaucucagaagaa

SEQ ID NO: 1496127 - RNA, 19 nt, Homo sapiens
  misc_RNA (1)...(19): siRNA sense strand
gauuuaagcguacuggaaa

SEQ ID NO: 1496128 - RNA, 19 nt, Homo sapiens
  misc_RNA (1)...(19): siRNA sense strand
gaagcaugguacugguuga

SEQ ID NO: 1496129 - RNA, 19 nt, Homo sapiens
  misc_RNA (1)...(19): siRNA sense strand
agaacaggaugaagaugaa

SEQ ID NO: 1496130 - RNA, 19 nt, Homo sapiens
  misc_RNA (1)...(19): siRNA sense strand
aagaugaaaugaagcuaga

SEQ ID NO: 1496131 - RNA, 19 nt, Homo sapiens
  misc_RNA (1)...(19): siRNA sense strand
caacuucugcagaucauga

SEQ ID NO: 1496132 - RNA, 19 nt, Homo sapiens
  misc_RNA (1)...(19): siRNA sense strand
gcuagaaggagaucucaga

SEQ ID NO: 1496133 - RNA, 19 nt, Homo sapiens
  misc_RNA (1)...(19): siRNA sense strand
agaggagacugaagaagau

SEQ ID NO: 1496134 - RNA, 19 nt, Homo sapiens
  misc_RNA (1)...(19): siRNA sense strand
gaagauaaagaagaccuau

SEQ ID NO: 1496135 - RNA, 19 nt, Homo sapiens
  misc_RNA (1)...(19): siRNA sense strand
ccagcgagccugucaacaa

SEQ ID NO: 1496136 - RNA, 19 nt, Homo sapiens
  misc_RNA (1)...(19): siRNA sense strand
aaaguggcauuggucauga

SEQ ID NO: 1496137 - RNA, 19 nt, Homo sapiens
  misc_RNA (1)...(19): siRNA sense strand
uggaacagccuaugaagau

SEQ ID NO: 1496138 - RNA, 19 nt, Homo sapiens
  misc_RNA (1)...(19): siRNA sense strand
ggaccaacuucugcagauc

SEQ ID NO: 1496139 - RNA, 19 nt, Homo sapiens
  misc_RNA (1)...(19): siRNA sense strand
ugaaaugaagcuagaagga

SEQ ID NO: 1496140 - RNA, 19 nt, Homo sapiens
  misc_RNA (1)...(19): siRNA sense strand
gacugaagaagaugaagaa

SEQ ID NO: 1496141 - RNA, 19 nt, Homo sapiens
  misc_RNA (1)...(19): siRNA sense strand
aagaggagacugaagaaga

SEQ ID NO: 1496142 - RNA, 19 nt, Homo sapiens
  misc_RNA (1)...(19): siRNA sense strand
caguuucgaaugcgacuua

SEQ ID NO: 1496143 - RNA, 19 nt, Homo sapiens
  misc_RNA (1)...(19): siRNA sense strand
aagaacaggaugaagauga

SEQ ID NO: 1496144 - RNA, 19 nt, Homo sapiens
  misc_RNA (1)...(19): siRNA sense strand
gaagaagaugaagaagaaa

SEQ ID NO: 1496145 - RNA, 19 nt, Homo sapiens
  misc_RNA (1)...(19): siRNA sense strand
gaagccagcgagccuguca

SEQ ID NO: 1496146 - RNA, 19 nt, Homo sapiens
  misc_RNA (1)...(19): siRNA sense strand
cagcgagccugucaacaac

SEQ ID NO: 1496147 - RNA, 19 nt, Homo sapiens
  misc_RNA (1)...(19): siRNA sense strand
aaggagaucucagaagaag

SEQ ID NO: 1496148 - RNA, 19 nt, Homo sapiens
  misc_RNA (1)...(19): siRNA sense strand
ggagacugaagaagaugaa

SEQ ID NO: 1496149 - RNA, 19 nt, Homo sapiens
  misc_RNA (1)...(19): siRNA sense strand
uauuguauuugguguggaa

SEQ ID NO: 1496150 - RNA, 19 nt, Homo sapiens
  misc_RNA (1)...(19): siRNA sense strand
gaagcuagaaggagaucuc

SEQ ID NO: 1496151 - RNA, 19 nt, Homo sapiens
  misc_RNA (1)...(19): siRNA sense strand
ugaagaggagacugaagaa

SEQ ID NO: 1496152 - RNA, 19 nt, Homo sapiens
  misc_RNA (1)...(19): siRNA sense strand
gcgagccugucaacaacug

SEQ ID NO: 1496153 - RNA, 19 nt, Homo sapiens
  misc_RNA (1)...(19): siRNA sense strand
gaccaacuucugcagauca

SEQ ID NO: 1496154 - RNA, 19 nt, Homo sapiens
  misc_RNA (1)...(19): siRNA sense strand
ccuaugaagauaaagaaga

SEQ ID NO: 1496155 - RNA, 19 nt, Homo sapiens
  misc_RNA (1)...(19): siRNA sense strand
gaugaaaugaagcuagaag

SEQ ID NO: 1496156 - RNA, 19 nt, Homo sapiens
  misc_RNA (1)...(19): siRNA sense strand
gaacaggaugaagaugaau

SEQ ID NO: 1496157 - RNA, 19 nt, Homo sapiens
  misc_RNA (1)...(19): siRNA sense strand
aacagccuaugaagauaaa

SEQ ID NO: 1496158 - RNA, 19 nt, Homo sapiens
  misc_RNA (1)...(19): siRNA sense strand
cuaugaagauaaagaagac

SEQ ID NO: 1496159 - RNA, 19 nt, Homo sapiens
  misc_RNA (1)...(19): siRNA sense strand
gguacugguugaggcuuga

SEQ ID NO: 1496160 - RNA, 19 nt, Homo sapiens
  misc_RNA (1)...(19): siRNA sense strand
gguguggaacagccuauga

SEQ ID NO: 1496161 - RNA, 19 nt, Homo sapiens
  misc_RNA (1)...(19): siRNA sense strand
gaagaggagacugaagaag

SEQ ID NO: 1496162 - RNA, 19 nt, Homo sapiens
  misc_RNA (1)...(19): siRNA sense strand
gcaagaugaaaugaagcua

SEQ ID NO: 1496163 - RNA, 19 nt, Homo sapiens
  misc_RNA (1)...(19): siRNA sense strand
aaacggaaagcagaggaaa

SEQ ID NO: 1496164 - RNA, 19 nt, Homo sapiens
  misc_RNA (1)...(19): siRNA sense strand
guggaacagccuaugaaga

SEQ ID NO: 1496165 - RNA, 19 nt, Homo sapiens
  misc_RNA (1)...(19): siRNA sense strand
cugaagaagaugaagaaga

SEQ ID NO: 1496166 - RNA, 19 nt, Homo sapiens
  misc_RNA (1)...(19): siRNA sense strand
uugaagaggagacugaaga

SEQ ID NO: 1496167 - RNA, 19 nt, Homo sapiens
  misc_RNA (1)...(19): siRNA sense strand
agauuuaagcguacuggaa

SEQ ID NO: 1496168 - RNA, 19 nt, Homo sapiens
  misc_RNA (1)...(19): siRNA sense strand
gggaagcaugguacugguu

SEQ ID NO: 1496169 - RNA, 19 nt, Homo sapiens
  misc_RNA (1)...(19): siRNA sense strand
gaccuaucuucaaauuguc

SEQ ID NO: 1496170 - RNA, 19 nt, Homo sapiens
  misc_RNA (1)...(19): siRNA sense strand
ugaagauaaagaagaccua

SEQ ID NO: 1496171 - RNA, 19 nt, Homo sapiens
  misc_RNA (1)...(19): siRNA sense strand
acaggaugaagaugaauau

SEQ ID NO: 1496172 - RNA, 19 nt, Homo sapiens
  misc_RNA (1)...(19): siRNA sense strand
agacugaagaagaugaaga

SEQ ID NO: 1496173 - RNA, 19 nt, Homo sapiens
  misc_RNA (1)...(19): siRNA sense strand
cugcagaacaguuucgaau

SEQ ID NO: 1496174 - RNA, 19 nt, Homo sapiens
  misc_RNA (1)...(19): siRNA sense strand
uucugcagaucaugacuaa

SEQ ID NO: 1496175 - RNA, 19 nt, Homo sapiens
  misc_RNA (1)...(19): siRNA sense strand
cagccuaugaagauaaaga

SEQ ID NO: 1496176 - RNA, 19 nt, Homo sapiens
  misc_RNA (1)...(19): siRNA sense strand
aacaggaugaagaugaaua

SEQ ID NO: 1496177 - RNA, 19 nt, Homo sapiens
  misc_RNA (1)...(19): siRNA sense strand
cuagaaggagaucucagaa

SEQ ID NO: 1496178 - RNA, 19 nt, Homo sapiens
  misc_RNA (1)...(19): siRNA sense strand
caggaugaagaugaauaua

SEQ ID NO: 1496179 - RNA, 19 nt, Homo sapiens
  misc_RNA (1)...(19): siRNA sense strand
gaagagauuuccaaccauu

SEQ ID NO: 1496180 - RNA, 19 nt, Homo sapiens
  misc_RNA (1)...(19): siRNA sense strand
uaaccaagauugacaacua

SEQ ID NO: 1496181 - RNA, 19 nt, Homo sapiens
  misc_RNA (1)...(19): siRNA sense strand
ccaccgaccugaaguauga

SEQ ID NO: 1496182 - RNA, 19 nt, Homo sapiens
  misc_RNA (1)...(19): siRNA sense strand
caaagcagcagccaaguuu

SEQ ID NO: 1496183 - RNA, 19 nt, Homo sapiens
  misc_RNA (1)...(19): siRNA sense strand
gaagaugauugagcaaaug

SEQ ID NO: 1496184 - RNA, 19 nt, Homo sapiens
  misc_RNA (1)...(19): siRNA sense strand
ccacagagccucccauaau

SEQ ID NO: 1496185 - RNA, 19 nt, Homo sapiens
  misc_RNA (1)...(19): siRNA sense strand
aaagaaacucccagauuua

SEQ ID NO: 1496186 - RNA, 19 nt, Homo sapiens
  misc_RNA (1)...(19): siRNA sense strand
aaaagaaacucccagauuu

SEQ ID NO: 1496187 - RNA, 19 nt, Homo sapiens
  misc_RNA (1)...(19): siRNA sense strand
gaacuugaaggguguauuc

SEQ ID NO: 1496188 - RNA, 19 nt, Homo sapiens
  misc_RNA (1)...(19): siRNA sense strand
gcagccaaguuuccacgua

SEQ ID NO: 1496189 - RNA, 19 nt, Homo sapiens
  misc_RNA (1)...(19): siRNA sense strand
gaaaagaaacucccagauu

SEQ ID NO: 1496190 - RNA, 19 nt, Homo sapiens
  misc_RNA (1)...(19): siRNA sense strand
gcacuugacuaugguguuc

SEQ ID NO: 1496191 - RNA, 19 nt, Homo sapiens
  misc_RNA (1)...(19): siRNA sense strand
gaagucaaagcgcuaaaug

SEQ ID NO: 1496192 - RNA, 19 nt, Homo sapiens
  misc_RNA (1)...(19): siRNA sense strand
gaacuaccuugaccugaac

SEQ ID NO: 1496193 - RNA, 19 nt, Homo sapiens
  misc_RNA (1)...(19): siRNA sense strand
acuacacucugcuggauua

SEQ ID NO: 1496194 - RNA, 19 nt, Homo sapiens
  misc_RNA (1)...(19): siRNA sense strand
ucaaagcgcuaaccaacca

SEQ ID NO: 1496195 - RNA, 19 nt, Homo sapiens
  misc_RNA (1)...(19): siRNA sense strand
ugaagaugauugagcaaau

SEQ ID NO: 1496196 - RNA, 19 nt, Homo sapiens
  misc_RNA (1)...(19): siRNA sense strand
ccacacaaauucuuauucg

SEQ ID NO: 1496197 - RNA, 19 nt, Homo sapiens
  misc_RNA (1)...(19): siRNA sense strand
agaacuaccuugaccugaa

SEQ ID NO: 1496198 - RNA, 19 nt, Homo sapiens
  misc_RNA (1)...(19): siRNA sense strand
caacuacacucugcuggau

SEQ ID NO: 1496199 - RNA, 19 nt, Homo sapiens
  misc_RNA (1)...(19): siRNA sense strand
gcaacuccaugcucuacau

SEQ ID NO: 1496200 - RNA, 19 nt, Homo sapiens
  misc_RNA (1)...(19): siRNA sense strand
ccgaagagauuuccaacca

SEQ ID NO: 1496201 - RNA, 19 nt, Homo sapiens
  misc_RNA (1)...(19): siRNA sense strand
gcagcaacauugaggucuu

SEQ ID NO: 1496202 - RNA, 19 nt, Homo sapiens
  misc_RNA (1)...(19): siRNA sense strand
cauaaucaaucuacaacca

SEQ ID NO: 1496203 - RNA, 19 nt, Homo sapiens
  misc_RNA (1)...(19): siRNA sense strand
acauugaggucuugagguu

SEQ ID NO: 1496204 - RNA, 19 nt, Homo sapiens
  misc_RNA (1)...(19): siRNA sense strand
ggucugaaccugauaagca

SEQ ID NO: 1496205 - RNA, 19 nt, Homo sapiens
  misc_RNA (1)...(19): siRNA sense strand
cauccucucagaccauuua

SEQ ID NO: 1496206 - RNA, 19 nt, Homo sapiens
  misc_RNA (1)...(19): siRNA sense strand
guucugagucucuugaauu

SEQ ID NO: 1496207 - RNA, 19 nt, Homo sapiens
  misc_RNA (1)...(19): siRNA sense strand
ucagagggcacuugacuau

SEQ ID NO: 1496208 - RNA, 19 nt, Homo sapiens
  misc_RNA (1)...(19): siRNA sense strand
cccugaagcuccaagauug

SEQ ID NO: 1496209 - RNA, 19 nt, Homo sapiens
  misc_RNA (1)...(19): siRNA sense strand
cacagagccucccauaauc

SEQ ID NO: 1496210 - RNA, 19 nt, Homo sapiens
  misc_RNA (1)...(19): siRNA sense strand
cagccaaguuuccacguau

SEQ ID NO: 1496211 - RNA, 19 nt, Homo sapiens
  misc_RNA (1)...(19): siRNA sense strand
cuccagaaauuacugagaa

SEQ ID NO: 1496212 - RNA, 19 nt, Homo sapiens
  misc_RNA (1)...(19): siRNA sense strand
aauauucuaucguccauuc

SEQ ID NO: 1496213 - RNA, 19 nt, Homo sapiens
  misc_RNA (1)...(19): siRNA sense strand
cagaaauuacugagaacua

SEQ ID NO: 1496214 - RNA, 19 nt, Homo sapiens
  misc_RNA (1)...(19): siRNA sense strand
aagaaacucccagauuuaa

SEQ ID NO: 1496215 - RNA, 19 nt, Homo sapiens
  misc_RNA (1)...(19): siRNA sense strand
agagggcacuugacuaugg

SEQ ID NO: 1496216 - RNA, 19 nt, Homo sapiens
  misc_RNA (1)...(19): siRNA sense strand
uugaaguucuugaggguuu

SEQ ID NO: 1496217 - RNA, 19 nt, Homo sapiens
  misc_RNA (1)...(19): siRNA sense strand
caauccacacaaauucuua

SEQ ID NO: 1496218 - RNA, 19 nt, Homo sapiens
  misc_RNA (1)...(19): siRNA sense strand
gaacagauuccgccuugcu

SEQ ID NO: 1496219 - RNA, 19 nt, Homo sapiens
  misc_RNA (1)...(19): siRNA sense strand
cgccgaguauuucuuuaaa

SEQ ID NO: 1496220 - RNA, 19 nt, Homo sapiens
  misc_RNA (1)...(19): siRNA sense strand
gauuuaagcgguucugagu

SEQ ID NO: 1496221 - RNA, 19 nt, Homo sapiens
  misc_RNA (1)...(19): siRNA sense strand
gaaucaaagcgcuaaccaa

SEQ ID NO: 1496222 - RNA, 19 nt, Homo sapiens
  misc_RNA (1)...(19): siRNA sense strand
caaauaccucauuggcuuu

SEQ ID NO: 1496223 - RNA, 19 nt, Homo sapiens
  misc_RNA (1)...(19): siRNA sense strand
caagcuggaaugaagauga

SEQ ID NO: 1496224 - RNA, 19 nt, Homo sapiens
  misc_RNA (1)...(19): siRNA sense strand
uaugaaacauccucaaagc

SEQ ID NO: 1496225 - RNA, 19 nt, Homo sapiens
  misc_RNA (1)...(19): siRNA sense strand
uaucguccauucuucacuu

SEQ ID NO: 1496226 - RNA, 19 nt, Homo sapiens
  misc_RNA (1)...(19): siRNA sense strand
cagcaacauugaggucuug

SEQ ID NO: 1496227 - RNA, 19 nt, Homo sapiens
  misc_RNA (1)...(19): siRNA sense strand
gagaaacccauuuuaaaga

SEQ ID NO: 1496228 - RNA, 19 nt, Homo sapiens
  misc_RNA (1)...(19): siRNA sense strand
uacuuuaccgguaucauua

SEQ ID NO: 1496229 - RNA, 19 nt, Homo sapiens
  misc_RNA (1)...(19): siRNA sense strand
gaaacucccagauuuaagc

SEQ ID NO: 1496230 - RNA, 19 nt, Homo sapiens
  misc_RNA (1)...(19): siRNA sense strand
cuacuuuaccgguaucauu

SEQ ID NO: 1496231 - RNA, 19 nt, Homo sapiens
  misc_RNA (1)...(19): siRNA sense strand
cuuuaaaucugcguccuuu

SEQ ID NO: 1496232 - RNA, 19 nt, Homo sapiens
  misc_RNA (1)...(19): siRNA sense strand
uauugcaagugaagucaaa

SEQ ID NO: 1496233 - RNA, 19 nt, Homo sapiens
  misc_RNA (1)...(19): siRNA sense strand
uuacugagaacuaccuuga

SEQ ID NO: 1496234 - RNA, 19 nt, Homo sapiens
  misc_RNA (1)...(19): siRNA sense strand
acauuggaaucgccgagua

SEQ ID NO: 1496235 - RNA, 19 nt, Homo sapiens
  misc_RNA (1)...(19): siRNA sense strand
ggguucgagucuccacuuu

SEQ ID NO: 1496236 - RNA, 19 nt, Homo sapiens
  misc_RNA (1)...(19): siRNA sense strand
ggccacagagccucccaua

SEQ ID NO: 1496237 - RNA, 19 nt, Homo sapiens
  misc_RNA (1)...(19): siRNA sense strand
guccuuugcucauuucaca

SEQ ID NO: 1496238 - RNA, 19 nt, Homo sapiens
  misc_RNA (1)...(19): siRNA sense strand
agaaauuacugagaacuac

SEQ ID NO: 1496239 - RNA, 19 nt, Homo sapiens
  misc_RNA (1)...(19): siRNA sense strand
ggagaaacccauuuuaaag

SEQ ID NO: 1496240 - RNA, 19 nt, Homo sapiens
  misc_RNA (1)...(19): siRNA sense strand
gagucuacuuuaccgguau

SEQ ID NO: 1496241 - RNA, 19 nt, Homo sapiens
  misc_RNA (1)...(19): siRNA sense strand
ucaaagcagcagccaaguu

SEQ ID NO: 1496242 - RNA, 19 nt, Homo sapiens
  misc_RNA (1)...(19): siRNA sense strand
cgaagagauuuccaaccau

SEQ ID NO: 1496243 - RNA, 19 nt, Homo sapiens
  misc_RNA (1)...(19): siRNA sense strand
cauuuacccuggaaucaag

SEQ ID NO: 1496244 - RNA, 19 nt, Homo sapiens
  misc_RNA (1)...(19): siRNA sense strand
gaccugaaguaugaaacau

SEQ ID NO: 1496245 - RNA, 19 nt, Homo sapiens
  misc_RNA (1)...(19): siRNA sense strand
ucaguguucuguauaacuc

SEQ ID NO: 1496246 - RNA, 19 nt, Homo sapiens
  misc_RNA (1)...(19): siRNA sense strand
uucugagucucuugaauuu

SEQ ID NO: 1496247 - RNA, 19 nt, Homo sapiens
  misc_RNA (1)...(19): siRNA sense strand
guaugaaacauccucaaag

SEQ ID NO: 1496248 - RNA, 19 nt, Homo sapiens
  misc_RNA (1)...(19): siRNA sense strand
uguccaauccacacaaauu

SEQ ID NO: 1496249 - RNA, 19 nt, Homo sapiens
  misc_RNA (1)...(19): siRNA sense strand
cugcguccuuugcucauuu

SEQ ID NO: 1496250 - RNA, 19 nt, Homo sapiens
  misc_RNA (1)...(19): siRNA sense strand
cugagucucuugaauuucu

SEQ ID NO: 1496251 - RNA, 19 nt, Homo sapiens
  misc_RNA (1)...(19): siRNA sense strand
gagccaugcccacgucuca

SEQ ID NO: 1496252 - RNA, 19 nt, Homo sapiens
  misc_RNA (1)...(19): siRNA sense strand
ugacuaugguguucaagcu

SEQ ID NO: 1496253 - RNA, 19 nt, Homo sapiens
  misc_RNA (1)...(19): siRNA sense strand
caacgugcucucccggauu

SEQ ID NO: 1496254 - RNA, 19 nt, Homo sapiens
  misc_RNA (1)...(19): siRNA sense strand
ggaaucaaagcgcuaacca

SEQ ID NO: 1496255 - RNA, 19 nt, Homo sapiens
  misc_RNA (1)...(19): siRNA sense strand
cuugaaggguguauucuac

SEQ ID NO: 1496256 - RNA, 19 nt, Homo sapiens
  misc_RNA (1)...(19): siRNA sense strand
uugcugagcccauggagaa

SEQ ID NO: 1496257 - RNA, 19 nt, Homo sapiens
  misc_RNA (1)...(19): siRNA sense strand
aagcuggaaugaagaugau

SEQ ID NO: 1496258 - RNA, 19 nt, Homo sapiens
  misc_RNA (1)...(19): siRNA sense strand
auugaggucuugagguuug

SEQ ID NO: 1496259 - RNA, 19 nt, Homo sapiens
  misc_RNA (1)...(19): siRNA sense strand
cagcugggguuuucaaugu

SEQ ID NO: 1496260 - RNA, 19 nt, Homo sapiens
  misc_RNA (1)...(19): siRNA sense strand
uuuaagcgguucugagucu

SEQ ID NO: 1496261 - RNA, 19 nt, Homo sapiens
  misc_RNA (1)...(19): siRNA sense strand
ucauuauccuaacccgaaa

SEQ ID NO: 1496262 - RNA, 19 nt, Homo sapiens
  misc_RNA (1)...(19): siRNA sense strand
ccaauccacacaaauucuu

SEQ ID NO: 1496263 - RNA, 19 nt, Homo sapiens
  misc_RNA (1)...(19): siRNA sense strand
cuacaaccaggcaauuuca

SEQ ID NO: 1496264 - RNA, 19 nt, Homo sapiens
  misc_RNA (1)...(19): siRNA sense strand
gagccucccauaaucaauc

SEQ ID NO: 1496265 - RNA, 19 nt, Homo sapiens
  misc_RNA (1)...(19): siRNA sense strand
ugaggaucauggccacaga

SEQ ID NO: 1496266 - RNA, 19 nt, Homo sapiens
  misc_RNA (1)...(19): siRNA sense strand
aacgugcucucccggauug

SEQ ID NO: 1496267 - RNA, 19 nt, Homo sapiens
  misc_RNA (1)...(19): siRNA sense strand
caacuccaugcucuacauu

SEQ ID NO: 1496268 - RNA, 19 nt, Homo sapiens
  misc_RNA (1)...(19): siRNA sense strand
gcuggaaugaagaugauug

SEQ ID NO: 1496269 - RNA, 19 nt, Homo sapiens
  misc_RNA (1)...(19): siRNA sense strand
acacucugcuggauuacuc

SEQ ID NO: 1496270 - RNA, 19 nt, Homo sapiens
  misc_RNA (1)...(19): siRNA sense strand
gccaugcccacgucucauu

SEQ ID NO: 1496271 - RNA, 19 nt, Homo sapiens
  misc_RNA (1)...(19): siRNA sense strand
aguguuggccugguuauuu

SEQ ID NO: 1496272 - RNA, 19 nt, Homo sapiens
  misc_RNA (1)...(19): siRNA sense strand
aggaggggcugaucuguuu

SEQ ID NO: 1496273 - RNA, 19 nt, Homo sapiens
  misc_RNA (1)...(19): siRNA sense strand
guucuugaggguuuccuuu

SEQ ID NO: 1496274 - RNA, 19 nt, Homo sapiens
  misc_RNA (1)...(19): siRNA sense strand
uggaaucgccgaguauuuc

SEQ ID NO: 1496275 - RNA, 19 nt, Homo sapiens
  misc_RNA (1)...(19): siRNA sense strand
uaccuugaccugaacuuga

SEQ ID NO: 1496276 - RNA, 19 nt, Homo sapiens
  misc_RNA (1)...(19): siRNA sense strand
aaucgccgaguauuucuuu

SEQ ID NO: 1496277 - RNA, 19 nt, Homo sapiens
  misc_RNA (1)...(19): siRNA sense strand
cagauuccgccuugcuuug

SEQ ID NO: 1496278 - RNA, 19 nt, Homo sapiens
  misc_RNA (1)...(19): siRNA sense strand
ucaaggcaaggauuacuca

SEQ ID NO: 1496279 - RNA, 19 nt, Homo sapiens
  misc_RNA (1)...(19): siRNA sense strand
ccacuucccuuacgacuua

SEQ ID NO: 1496280 - RNA, 19 nt, Homo sapiens
  misc_RNA (1)...(19): siRNA sense strand
gaccagaucugcucacauu

SEQ ID NO: 1496281 - RNA, 19 nt, Homo sapiens
  misc_RNA (1)...(19): siRNA sense strand
caacaaagcugcgauugga

SEQ ID NO: 1496282 - RNA, 19 nt, Homo sapiens
  misc_RNA (1)...(19): siRNA sense strand
gaagaaaccuuggacuaug

SEQ ID NO: 1496283 - RNA, 19 nt, Homo sapiens
  misc_RNA (1)...(19): siRNA sense strand
gaaaagugguccccuguua

SEQ ID NO: 1496284 - RNA, 19 nt, Homo sapiens
  misc_RNA (1)...(19): siRNA sense strand
gaaaauggguugccuagaa

SEQ ID NO: 1496285 - RNA, 19 nt, Homo sapiens
  misc_RNA (1)...(19): siRNA sense strand
ccaugaaacccuacaauua

SEQ ID NO: 1496286 - RNA, 19 nt, Homo sapiens
  misc_RNA (1)...(19): siRNA sense strand
gagaagaaaccgagaaaga

SEQ ID NO: 1496287 - RNA, 19 nt, Homo sapiens
  misc_RNA (1)...(19): siRNA sense strand
gcaugggacucuugauaau

SEQ ID NO: 1496288 - RNA, 19 nt, Homo sapiens
  misc_RNA (1)...(19): siRNA sense strand
gaaagaagaagaggaggaa

SEQ ID NO: 1496289 - RNA, 19 nt, Homo sapiens
  misc_RNA (1)...(19): siRNA sense strand
caugaaacccuacaauuau

SEQ ID NO: 1496290 - RNA, 19 nt, Homo sapiens
  misc_RNA (1)...(19): siRNA sense strand
cagccaaucucucacaaug

SEQ ID NO: 1496291 - RNA, 19 nt, Homo sapiens
  misc_RNA (1)...(19): siRNA sense strand
gaagaaaccgagaaagaag

SEQ ID NO: 1496292 - RNA, 19 nt, Homo sapiens
  misc_RNA (1)...(19): siRNA sense strand
acaauuacggcaugcauua

SEQ ID NO: 1496293 - RNA, 19 nt, Homo sapiens
  misc_RNA (1)...(19): siRNA sense strand
gggcaugggacucuugaua

SEQ ID NO: 1496294 - RNA, 19 nt, Homo sapiens
  misc_RNA (1)...(19): siRNA sense strand
cacaaugcaagaugaauua

SEQ ID NO: 1496295 - RNA, 19 nt, Homo sapiens
  misc_RNA (1)...(19): siRNA sense strand
ugaugagucuguuguaaug

SEQ ID NO: 1496296 - RNA, 19 nt, Homo sapiens
  misc_RNA (1)...(19): siRNA sense strand
gaccagaagcaaauuaaga

SEQ ID NO: 1496297 - RNA, 19 nt, Homo sapiens
  misc_RNA (1)...(19): siRNA sense strand
guaugaauccuucuaugaa

SEQ ID NO: 1496298 - RNA, 19 nt, Homo sapiens
  misc_RNA (1)...(19): siRNA sense strand
caaauuaagaagccagaaa

SEQ ID NO: 1496299 - RNA, 19 nt, Homo sapiens
  misc_RNA (1)...(19): siRNA sense strand
uaacacuaccguuugauga

SEQ ID NO: 1496300 - RNA, 19 nt, Homo sapiens
  misc_RNA (1)...(19): siRNA sense strand
caacgacgcucuggacaac

SEQ ID NO: 1496301 - RNA, 19 nt, Homo sapiens
  misc_RNA (1)...(19): siRNA sense strand
gccaaucucucacaaugca

SEQ ID NO: 1496302 - RNA, 19 nt, Homo sapiens
  misc_RNA (1)...(19): siRNA sense strand
ggcaugggacucuugauaa

SEQ ID NO: 1496303 - RNA, 19 nt, Homo sapiens
  misc_RNA (1)...(19): siRNA sense strand
gaggaccagaagcaaauua

SEQ ID NO: 1496304 - RNA, 19 nt, Homo sapiens
  misc_RNA (1)...(19): siRNA sense strand
ccagccaacuacaaacuug

SEQ ID NO: 1496305 - RNA, 19 nt, Homo sapiens
  misc_RNA (1)...(19): siRNA sense strand
agaagaaaccgagaaagaa

SEQ ID NO: 1496306 - RNA, 19 nt, Homo sapiens
  misc_RNA (1)...(19): siRNA sense strand
gauaauuccaaguccauga

SEQ ID NO: 1496307 - RNA, 19 nt, Homo sapiens
  misc_RNA (1)...(19): siRNA sense strand
ccagaugugcagaaaguuu

SEQ ID NO: 1496308 - RNA, 19 nt, Homo sapiens
  misc_RNA (1)...(19): siRNA sense strand
ggaagacagggaagaggaa

SEQ ID NO: 1496309 - RNA, 19 nt, Homo sapiens
  misc_RNA (1)...(19): siRNA sense strand
ucacaaugcaagaugaauu

SEQ ID NO: 1496310 - RNA, 19 nt, Homo sapiens
  misc_RNA (1)...(19): siRNA sense strand
aagaagaaaccuuggacua

SEQ ID NO: 1496311 - RNA, 19 nt, Homo sapiens
  misc_RNA (1)...(19): siRNA sense strand
gaauccuucuaugaaagua

SEQ ID NO: 1496312 - RNA, 19 nt, Homo sapiens
  misc_RNA (1)...(19): siRNA sense strand
cguaugaauccuucuauga

SEQ ID NO: 1496313 - RNA, 19 nt, Homo sapiens
  misc_RNA (1)...(19): siRNA sense strand
agaagaaaccuuggacuau

SEQ ID NO: 1496314 - RNA, 19 nt, Homo sapiens
  misc_RNA (1)...(19): siRNA sense strand
gaaaguacuuccccugagu

SEQ ID NO: 1496315 - RNA, 19 nt, Homo sapiens
  misc_RNA (1)...(19): siRNA sense strand
gagaaugcgaggaccagaa

SEQ ID NO: 1496316 - RNA, 19 nt, Homo sapiens
  misc_RNA (1)...(19): siRNA sense strand
gcgaggaccagaagcaaau

SEQ ID NO: 1496317 - RNA, 19 nt, Homo sapiens
  misc_RNA (1)...(19): siRNA sense strand
gcguaugaauccuucuaug

SEQ ID NO: 1496318 - RNA, 19 nt, Homo sapiens
  misc_RNA (1)...(19): siRNA sense strand
acaaagcugcgauuggaaa

SEQ ID NO: 1496319 - RNA, 19 nt, Homo sapiens
  misc_RNA (1)...(19): siRNA sense strand
gcucuggacaacuuaagaa

SEQ ID NO: 1496320 - RNA, 19 nt, Homo sapiens
  misc_RNA (1)...(19): siRNA sense strand
caaacagauuguccuucga

SEQ ID NO: 1496321 - RNA, 19 nt, Homo sapiens
  misc_RNA (1)...(19): siRNA sense strand
caaggucacccuacucuac

SEQ ID NO: 1496322 - RNA, 19 nt, Homo sapiens
  misc_RNA (1)...(19): siRNA sense strand
ucccagaugugcagaaagu

SEQ ID NO: 1496323 - RNA, 19 nt, Homo sapiens
  misc_RNA (1)...(19): siRNA sense strand
gagaccagaucugcucaca

SEQ ID NO: 1496324 - RNA, 19 nt, Homo sapiens
  misc_RNA (1)...(19): siRNA sense strand
gauuggaaagggucaaguu

SEQ ID NO: 1496325 - RNA, 19 nt, Homo sapiens
  misc_RNA (1)...(19): siRNA sense strand
gcaagaugaauuaaaugca

SEQ ID NO: 1496326 - RNA, 19 nt, Homo sapiens
  misc_RNA (1)...(19): siRNA sense strand
cagaaacuguccaaaauag

SEQ ID NO: 1496327 - RNA, 19 nt, Homo sapiens
  misc_RNA (1)...(19): siRNA sense strand
aagaaaccuuggacuaugg

SEQ ID NO: 1496328 - RNA, 19 nt, Homo sapiens
  misc_RNA (1)...(19): siRNA sense strand
cagggaagaggaagaugaa

SEQ ID NO: 1496329 - RNA, 19 nt, Homo sapiens
  misc_RNA (1)...(19): siRNA sense strand
ggucuuucccagccaacua

SEQ ID NO: 1496330 - RNA, 19 nt, Homo sapiens
  misc_RNA (1)...(19): siRNA sense strand
ggaagaggaagaugaaaau

SEQ ID NO: 1496331 - RNA, 19 nt, Homo sapiens
  misc_RNA (1)...(19): siRNA sense strand
aaaccgagaaagaagaaga

SEQ ID NO: 1496332 - RNA, 19 nt, Homo sapiens
  misc_RNA (1)...(19): siRNA sense strand
uuugaugagucuguuguaa

SEQ ID NO: 1496333 - RNA, 19 nt, Homo sapiens
  misc_RNA (1)...(19): siRNA sense strand
augggacucuugauaauuc

SEQ ID NO: 1496334 - RNA, 19 nt, Homo sapiens
  misc_RNA (1)...(19): siRNA sense strand
ccagaaacuguccaaaaua

SEQ ID NO: 1496335 - RNA, 19 nt, Homo sapiens
  misc_RNA (1)...(19): siRNA sense strand
aaucccagaugugcagaaa

SEQ ID NO: 1496336 - RNA, 19 nt, Homo sapiens
  misc_RNA (1)...(19): siRNA sense strand
gcagugcguaugaauccuu

SEQ ID NO: 1496337 - RNA, 19 nt, Homo sapiens
  misc_RNA (1)...(19): siRNA sense strand
aagaagaagaggaggaaga

SEQ ID NO: 1496338 - RNA, 19 nt, Homo sapiens
  misc_RNA (1)...(19): siRNA sense strand
aaacuuaugcaaaggucuu

SEQ ID NO: 1496339 - RNA, 19 nt, Homo sapiens
  misc_RNA (1)...(19): siRNA sense strand
guccaaaacuuaugcaaag

SEQ ID NO: 1496340 - RNA, 19 nt, Homo sapiens
  misc_RNA (1)...(19): siRNA sense strand
caaaauagagacuuuacga

SEQ ID NO: 1496341 - RNA, 19 nt, Homo sapiens
  misc_RNA (1)...(19): siRNA sense strand
agaaaccgagaaagaagaa

SEQ ID NO: 1496342 - RNA, 19 nt, Homo sapiens
  misc_RNA (1)...(19): siRNA sense strand
ggaccagaagcaaauuaag

SEQ ID NO: 1496343 - RNA, 19 nt, Homo sapiens
  misc_RNA (1)...(19): siRNA sense strand
agacaacaaagcugcgauu

SEQ ID NO: 1496344 - RNA, 19 nt, Homo sapiens
  misc_RNA (1)...(19): siRNA sense strand
acagggaagaggaagauga

SEQ ID NO: 1496345 - RNA, 19 nt, Homo sapiens
  misc_RNA (1)...(19): siRNA sense strand
gugccagcccucaguuuga

SEQ ID NO: 1496346 - RNA, 19 nt, Homo sapiens
  misc_RNA (1)...(19): siRNA sense strand
gcucaacgccaggaguuuc

SEQ ID NO: 1496347 - RNA, 19 nt, Homo sapiens
  misc_RNA (1)...(19): siRNA sense strand
gacaacaaagcugcgauug

SEQ ID NO: 1496348 - RNA, 19 nt, Homo sapiens
  misc_RNA (1)...(19): siRNA sense strand
uggaaagggucaaguucag

SEQ ID NO: 1496349 - RNA, 19 nt, Homo sapiens
  misc_RNA (1)...(19): siRNA sense strand
aaaccuuggacuaugguaa

SEQ ID NO: 1496350 - RNA, 19 nt, Homo sapiens
  misc_RNA (1)...(19): siRNA sense strand
gaaaccuuggacuauggua

SEQ ID NO: 1496351 - RNA, 19 nt, Homo sapiens
  misc_RNA (1)...(19): siRNA sense strand
uccaugaaacccuacaauu

SEQ ID NO: 1496352 - RNA, 19 nt, Homo sapiens
  misc_RNA (1)...(19): siRNA sense strand
caugggacucuugauaauu

SEQ ID NO: 1496353 - RNA, 19 nt, Homo sapiens
  misc_RNA (1)...(19): siRNA sense strand
cagcucaacgccaggaguu

SEQ ID NO: 1496354 - RNA, 19 nt, Homo sapiens
  misc_RNA (1)...(19): siRNA sense strand
cccagaaacuguccaaaau

SEQ ID NO: 1496355 - RNA, 19 nt, Homo sapiens
  misc_RNA (1)...(19): siRNA sense strand
accagaagcaaauuaagaa

SEQ ID NO: 1496356 - RNA, 19 nt, Homo sapiens
  misc_RNA (1)...(19): siRNA sense strand
ccgacagccacuucccuua

SEQ ID NO: 1496357 - RNA, 19 nt, Homo sapiens
  misc_RNA (1)...(19): siRNA sense strand
ggaggaagacagggaagag

SEQ ID NO: 1496358 - RNA, 19 nt, Homo sapiens
  misc_RNA (1)...(19): siRNA sense strand
ugccagcccucaguuugaa

SEQ ID NO: 1496359 - RNA, 19 nt, Homo sapiens
  misc_RNA (1)...(19): siRNA sense strand
gcaaauuaagaagccagaa

SEQ ID NO: 1496360 - RNA, 19 nt, Homo sapiens
  misc_RNA (1)...(19): siRNA sense strand
aaauuaagaagccagaaag

SEQ ID NO: 1496361 - RNA, 19 nt, Homo sapiens
  misc_RNA (1)...(19): siRNA sense strand
acgacgcucuggacaacuu

SEQ ID NO: 1496362 - RNA, 19 nt, Homo sapiens
  misc_RNA (1)...(19): siRNA sense strand
cgacagccacuucccuuac

SEQ ID NO: 1496363 - RNA, 19 nt, Homo sapiens
  misc_RNA (1)...(19): siRNA sense strand
uggagaagaaaccgagaaa

SEQ ID NO: 1496364 - RNA, 19 nt, Homo sapiens
  misc_RNA (1)...(19): siRNA sense strand
gaggaaagagcaucaaaag

SEQ ID NO: 1496365 - RNA, 19 nt, Homo sapiens
  misc_RNA (1)...(19): siRNA sense strand
gggaagaggaagaugaaaa

SEQ ID NO: 1496366 - RNA, 19 nt, Homo sapiens
  misc_RNA (1)...(19): siRNA sense strand
acacuaccguuugaugagu

SEQ ID NO: 1496367 - RNA, 19 nt, Homo sapiens
  misc_RNA (1)...(19): siRNA sense strand
gaaggaggggucuuaggaa

SEQ ID NO: 1496368 - RNA, 19 nt, Homo sapiens
  misc_RNA (1)...(19): siRNA sense strand
gcagccaaucucucacaau

SEQ ID NO: 1496369 - RNA, 19 nt, Homo sapiens
  misc_RNA (1)...(19): siRNA sense strand
ggacucuugauaauuccaa

SEQ ID NO: 1496370 - RNA, 19 nt, Homo sapiens
  misc_RNA (1)...(19): siRNA sense strand
ucaacgacgcucuggacaa

SEQ ID NO: 1496371 - RNA, 19 nt, Homo sapiens
  misc_RNA (1)...(19): siRNA sense strand
caaguucaggagacaggaa

SEQ ID NO: 1496372 - RNA, 19 nt, Homo sapiens
  misc_RNA (1)...(19): siRNA sense strand
gacagccacuucccuuacg

SEQ ID NO: 1496373 - RNA, 19 nt, Homo sapiens
  misc_RNA (1)...(19): siRNA sense strand
gugcguaugaauccuucua

SEQ ID NO: 1496374 - RNA, 19 nt, Homo sapiens
  misc_RNA (1)...(19): siRNA sense strand
aagaaaccgagaaagaaga

SEQ ID NO: 1496375 - RNA, 19 nt, Homo sapiens
  misc_RNA (1)...(19): siRNA sense strand
ucacauucguccaaaacuu

SEQ ID NO: 1496376 - RNA, 19 nt, Homo sapiens
  misc_RNA (1)...(19): siRNA sense strand
cagaucugcucacauucgu

SEQ ID NO: 1496377 - RNA, 19 nt, Homo sapiens
  misc_RNA (1)...(19): siRNA sense strand
gaagaagaggaggaagaca

SEQ ID NO: 1496378 - RNA, 19 nt, Homo sapiens
  misc_RNA (1)...(19): siRNA sense strand
gaucugaaauccuugcuua

SEQ ID NO: 1496379 - RNA, 19 nt, Homo sapiens
  misc_RNA (1)...(19): siRNA sense strand
gagcuuagaugaucccaaa

SEQ ID NO: 1496380 - RNA, 19 nt, Homo sapiens
  misc_RNA (1)...(19): siRNA sense strand
guucagaaauccucaagua

SEQ ID NO: 1496381 - RNA, 19 nt, Homo sapiens
  misc_RNA (1)...(19): siRNA sense strand
gaauaugaguuggaaguaa

SEQ ID NO: 1496382 - RNA, 19 nt, Homo sapiens
  misc_RNA (1)...(19): siRNA sense strand
gauuuaaccuguacuguga

SEQ ID NO: 1496383 - RNA, 19 nt, Homo sapiens
  misc_RNA (1)...(19): siRNA sense strand
ggacaauggugguucagaa

SEQ ID NO: 1496384 - RNA, 19 nt, Homo sapiens
  misc_RNA (1)...(19): siRNA sense strand
ucaaggaccugcugaaguu

SEQ ID NO: 1496385 - RNA, 19 nt, Homo sapiens
  misc_RNA (1)...(19): siRNA sense strand
ggagaagaauuagaaugua

SEQ ID NO: 1496386 - RNA, 19 nt, Homo sapiens
  misc_RNA (1)...(19): siRNA sense strand
gggaagagccgugcaauaa

SEQ ID NO: 1496387 - RNA, 19 nt, Homo sapiens
  misc_RNA (1)...(19): siRNA sense strand
gcaagaauaugaguuggaa

SEQ ID NO: 1496388 - RNA, 19 nt, Homo sapiens
  misc_RNA (1)...(19): siRNA sense strand
gaauucaggcuauaaauga

SEQ ID NO: 1496389 - RNA, 19 nt, Homo sapiens
  misc_RNA (1)...(19): siRNA sense strand
caaagcaccucgaguaaca

SEQ ID NO: 1496390 - RNA, 19 nt, Homo sapiens
  misc_RNA (1)...(19): siRNA sense strand
gaagugaggucaugcuuac

SEQ ID NO: 1496391 - RNA, 19 nt, Homo sapiens
  misc_RNA (1)...(19): siRNA sense strand
gaucagaauucaggcuaua

SEQ ID NO: 1496392 - RNA, 19 nt, Homo sapiens
  misc_RNA (1)...(19): siRNA sense strand
gcacaacaguauacaaugg

SEQ ID NO: 1496393 - RNA, 19 nt, Homo sapiens
  misc_RNA (1)...(19): siRNA sense strand
gaagaauccuuagaacuca

SEQ ID NO: 1496394 - RNA, 19 nt, Homo sapiens
  misc_RNA (1)...(19): siRNA sense strand
ggagaggauuuaaccugua

SEQ ID NO: 1496395 - RNA, 19 nt, Homo sapiens
  misc_RNA (1)...(19): siRNA sense strand
gccaagagguggugugcua

SEQ ID NO: 1496396 - RNA, 19 nt, Homo sapiens
  misc_RNA (1)...(19): siRNA sense strand
caaagcaccuuguauuucu

SEQ ID NO: 1496397 - RNA, 19 nt, Homo sapiens
  misc_RNA (1)...(19): siRNA sense strand
ccacagguuucuaauauuc

SEQ ID NO: 1496398 - RNA, 19 nt, Homo sapiens
  misc_RNA (1)...(19): siRNA sense strand
gaagagaaucugaguacaa

SEQ ID NO: 1496399 - RNA, 19 nt, Homo sapiens
  misc_RNA (1)...(19): siRNA sense strand
caucaaagcaccucgagua

SEQ ID NO: 1496400 - RNA, 19 nt, Homo sapiens
  misc_RNA (1)...(19): siRNA sense strand
gcaagaagcagcccaaagu

SEQ ID NO: 1496401 - RNA, 19 nt, Homo sapiens
  misc_RNA (1)...(19): siRNA sense strand
gaagaagccacauuccaaa

SEQ ID NO: 1496402 - RNA, 19 nt, Homo sapiens
  misc_RNA (1)...(19): siRNA sense strand
gaaaccaccuaccggauca

SEQ ID NO: 1496403 - RNA, 19 nt, Homo sapiens
  misc_RNA (1)...(19): siRNA sense strand
cagaagcacugcaaguuga

SEQ ID NO: 1496404 - RNA, 19 nt, Homo sapiens
  misc_RNA (1)...(19): siRNA sense strand
ccuuagaacucauuuauca

SEQ ID NO: 1496405 - RNA, 19 nt, Homo sapiens
  misc_RNA (1)...(19): siRNA sense strand
gaauguaaccugaaagauc

SEQ ID NO: 1496406 - RNA, 19 nt, Homo sapiens
  misc_RNA (1)...(19): siRNA sense strand
ucucauggcuuuaguguca

SEQ ID NO: 1496407 - RNA, 19 nt, Homo sapiens
  misc_RNA (1)...(19): siRNA sense strand
aauuggagcuggaccauuu

SEQ ID NO: 1496408 - RNA, 19 nt, Homo sapiens
  misc_RNA (1)...(19): siRNA sense strand
guuauucucguucaaguua

SEQ ID NO: 1496409 - RNA, 19 nt, Homo sapiens
  misc_RNA (1)...(19): siRNA sense strand
acagugaacuuguccuuug

SEQ ID NO: 1496410 - RNA, 19 nt, Homo sapiens
  misc_RNA (1)...(19): siRNA sense strand
gcaaagcaccuuguauuuc

SEQ ID NO: 1496411 - RNA, 19 nt, Homo sapiens
  misc_RNA (1)...(19): siRNA sense strand
cagaaauccucaaguacuu

SEQ ID NO: 1496412 - RNA, 19 nt, Homo sapiens
  misc_RNA (1)...(19): siRNA sense strand
gaagccacauuccaaaucu

SEQ ID NO: 1496413 - RNA, 19 nt, Homo sapiens
  misc_RNA (1)...(19): siRNA sense strand
ucagaaaccuauaccuuca

SEQ ID NO: 1496414 - RNA, 19 nt, Homo sapiens
  misc_RNA (1)...(19): siRNA sense strand
ggcaagagcaguuguguug

SEQ ID NO: 1496415 - RNA, 19 nt, Homo sapiens
  misc_RNA (1)...(19): siRNA sense strand
gguauugguuggaagagaa

SEQ ID NO: 1496416 - RNA, 19 nt, Homo sapiens
  misc_RNA (1)...(19): siRNA sense strand
ugacggaauucacaugcua

SEQ ID NO: 1496417 - RNA, 19 nt, Homo sapiens
  misc_RNA (1)...(19): siRNA sense strand
caccaugcauguuaugaaa

SEQ ID NO: 1496418 - RNA, 19 nt, Homo sapiens
  misc_RNA (1)...(19): siRNA sense strand
gaagagccgugcaauaacg

SEQ ID NO: 1496419 - RNA, 19 nt, Homo sapiens
  misc_RNA (1)...(19): siRNA sense strand
gagaagaccaguacagcaa

SEQ ID NO: 1496420 - RNA, 19 nt, Homo sapiens
  misc_RNA (1)...(19): siRNA sense strand
aagagaaucugaguacaaa

SEQ ID NO: 1496421 - RNA, 19 nt, Homo sapiens
  misc_RNA (1)...(19): siRNA sense strand
aaagaucuccuuccagaaa

SEQ ID NO: 1496422 - RNA, 19 nt, Homo sapiens
  misc_RNA (1)...(19): siRNA sense strand
gaagcacacaguauacauu

SEQ ID NO: 1496423 - RNA, 19 nt, Homo sapiens
  misc_RNA (1)...(19): siRNA sense strand
gcaacagauuaucauguga

SEQ ID NO: 1496424 - RNA, 19 nt, Homo sapiens
  misc_RNA (1)...(19): siRNA sense strand
cacaauauauggugagcaa

SEQ ID NO: 1496425 - RNA, 19 nt, Homo sapiens
  misc_RNA (1)...(19): siRNA sense strand
cuacaggccuucaaucaag

SEQ ID NO: 1496426 - RNA, 19 nt, Homo sapiens
  misc_RNA (1)...(19): siRNA sense strand
gaccaaagcacaaagaagu

SEQ ID NO: 1496427 - RNA, 19 nt, Homo sapiens
  misc_RNA (1)...(19): siRNA sense strand
uuacaguggagaagaauua

SEQ ID NO: 1496428 - RNA, 19 nt, Homo sapiens
  misc_RNA (1)...(19): siRNA sense strand
gagguggccuuaucagaca

SEQ ID NO: 1496429 - RNA, 19 nt, Homo sapiens
  misc_RNA (1)...(19): siRNA sense strand
gggagaagaugaagaaucc

SEQ ID NO: 1496430 - RNA, 19 nt, Homo sapiens
  misc_RNA (1)...(19): siRNA sense strand
gguauggucccuauucuga

SEQ ID NO: 1496431 - RNA, 19 nt, Homo sapiens
  misc_RNA (1)...(19): siRNA sense strand
gcgaaguucuuguuuguac

SEQ ID NO: 1496432 - RNA, 19 nt, Homo sapiens
  misc_RNA (1)...(19): siRNA sense strand
cagcaagccuccgcacaaa

SEQ ID NO: 1496433 - RNA, 19 nt, Homo sapiens
  misc_RNA (1)...(19): siRNA sense strand
ccauuuagucaguucauua

SEQ ID NO: 1496434 - RNA, 19 nt, Homo sapiens
  misc_RNA (1)...(19): siRNA sense strand
ugaaauaagagaccuguug

SEQ ID NO: 1496435 - RNA, 19 nt, Homo sapiens
  misc_RNA (1)...(19): siRNA sense strand
gaugaugaccgaccaaauc

SEQ ID NO: 1496436 - RNA, 19 nt, Homo sapiens
  misc_RNA (1)...(19): siRNA sense strand
uaaagagggugcaagacau

SEQ ID NO: 1496437 - RNA, 19 nt, Homo sapiens
  misc_RNA (1)...(19): siRNA sense strand
guaaagagggugcaagaca

SEQ ID NO: 1496438 - RNA, 19 nt, Homo sapiens
  misc_RNA (1)...(19): siRNA sense strand
ggagaguccugauaguucu

SEQ ID NO: 1496439 - RNA, 19 nt, Homo sapiens
  misc_RNA (1)...(19): siRNA sense strand
uaacuacauucugcaggua

SEQ ID NO: 1496440 - RNA, 19 nt, Homo sapiens
  misc_RNA (1)...(19): siRNA sense strand
ccaaaucccucuggaacug

SEQ ID NO: 1496441 - RNA, 19 nt, Homo sapiens
  misc_RNA (1)...(19): siRNA sense strand
ccaugcauguuaugaaaga

SEQ ID NO: 1496442 - RNA, 19 nt, Homo sapiens
  misc_RNA (1)...(19): siRNA sense strand
caagagcaguuguguuguc

SEQ ID NO: 1496443 - RNA, 19 nt, Homo sapiens
  misc_RNA (1)...(19): siRNA sense strand
caugaugccuacugaugaa

SEQ ID NO: 1496444 - RNA, 19 nt, Homo sapiens
  misc_RNA (1)...(19): siRNA sense strand
gaugaagaauccuuagaac

SEQ ID NO: 1496445 - RNA, 19 nt, Homo sapiens
  misc_RNA (1)...(19): siRNA sense strand
ccagaccgcuugucaaagg

SEQ ID NO: 1496446 - RNA, 19 nt, Homo sapiens
  misc_RNA (1)...(19): siRNA sense strand
gcacauaggagcaaaaguu

SEQ ID NO: 1496447 - RNA, 19 nt, Homo sapiens
  misc_RNA (1)...(19): siRNA sense strand
ccgaggaagugaucaccua

SEQ ID NO: 1496448 - RNA, 19 nt, Homo sapiens
  misc_RNA (1)...(19): siRNA sense strand
ugacucaccauccacauuu

SEQ ID NO: 1496449 - RNA, 19 nt, Homo sapiens
  misc_RNA (1)...(19): siRNA sense strand
aaugaaaggugacccuguu

SEQ ID NO: 1496450 - RNA, 19 nt, Homo sapiens
  misc_RNA (1)...(19): siRNA sense strand
ucacaugggucacguugca

SEQ ID NO: 1496451 - RNA, 19 nt, Homo sapiens
  misc_RNA (1)...(19): siRNA sense strand
gcucgaaacgacauuggua

SEQ ID NO: 1496452 - RNA, 19 nt, Homo sapiens
  misc_RNA (1)...(19): siRNA sense strand
gagauaugccgccucaguu

SEQ ID NO: 1496453 - RNA, 19 nt, Homo sapiens
  misc_RNA (1)...(19): siRNA sense strand
gugcuuggcuuugcaacuu

SEQ ID NO: 1496454 - RNA, 19 nt, Homo sapiens
  misc_RNA (1)...(19): siRNA sense strand
cgaagugaggucaugcuua

SEQ ID NO: 1496455 - RNA, 19 nt, Homo sapiens
  misc_RNA (1)...(19): siRNA sense strand
caagagguuuauuucaauc

SEQ ID NO: 1496456 - RNA, 19 nt, Homo sapiens
  misc_RNA (1)...(19): siRNA sense strand
agagauuacugauggaaau

SEQ ID NO: 1496457 - RNA, 19 nt, Homo sapiens
  misc_RNA (1)...(19): siRNA sense strand
ggaaggcaccaauugacaa

SEQ ID NO: 1496458 - RNA, 19 nt, Homo sapiens
  misc_RNA (1)...(19): siRNA sense strand
gguaguggucccggaauua

SEQ ID NO: 1496459 - RNA, 19 nt, Homo sapiens
  misc_RNA (1)...(19): siRNA sense strand
uaccggaccuggagauaug

SEQ ID NO: 1496460 - RNA, 19 nt, Homo sapiens
  misc_RNA (1)...(19): siRNA sense strand
gacgguaccaucaaugaaa

SEQ ID NO: 1496461 - RNA, 19 nt, Homo sapiens
  misc_RNA (1)...(19): siRNA sense strand
gagacgguaccaucaauga

SEQ ID NO: 1496462 - RNA, 19 nt, Homo sapiens
  misc_RNA (1)...(19): siRNA sense strand
ggcuauaaaugaaauugga

SEQ ID NO: 1496463 - RNA, 19 nt, Homo sapiens
  misc_RNA (1)...(19): siRNA sense strand
gcaauaacggaucugaaau

SEQ ID NO: 1496464 - RNA, 19 nt, Homo sapiens
  misc_RNA (1)...(19): siRNA sense strand
ggagauaugccgccucagu

SEQ ID NO: 1496465 - RNA, 19 nt, Homo sapiens
  misc_RNA (1)...(19): siRNA sense strand
uaggaaauaucccucagau

SEQ ID NO: 1496466 - RNA, 19 nt, Homo sapiens
  misc_RNA (1)...(19): siRNA sense strand
gagaaucugaguacaaaca

SEQ ID NO: 1496467 - RNA, 19 nt, Homo sapiens
  misc_RNA (1)...(19): siRNA sense strand
ggaagagaaucugaguaca

SEQ ID NO: 1496468 - RNA, 19 nt, Homo sapiens
  misc_RNA (1)...(19): siRNA sense strand
gggagacgguaccaucaau

SEQ ID NO: 1496469 - RNA, 19 nt, Homo sapiens
  misc_RNA (1)...(19): siRNA sense strand
ggugagggcucugaaugau

SEQ ID NO: 1496470 - RNA, 19 nt, Homo sapiens
  misc_RNA (1)...(19): siRNA sense strand
caauggugguucagaaauc

SEQ ID NO: 1496471 - RNA, 19 nt, Homo sapiens
  misc_RNA (1)...(19): siRNA sense strand
aagcgaaguucuuguuugu

SEQ ID NO: 1496472 - RNA, 19 nt, Homo sapiens
  misc_RNA (1)...(19): siRNA sense strand
gagaggauuuaaccuguac

SEQ ID NO: 1496473 - RNA, 19 nt, Homo sapiens
  misc_RNA (1)...(19): siRNA sense strand
caauauauggugagcaaga

SEQ ID NO: 1496474 - RNA, 19 nt, Homo sapiens
  misc_RNA (1)...(19): siRNA sense strand
gacuacagguuccgcguau

SEQ ID NO: 1496475 - RNA, 19 nt, Homo sapiens
  misc_RNA (1)...(19): siRNA sense strand
ugauggaugugucuuagug

SEQ ID NO: 1496476 - RNA, 19 nt, Homo sapiens
  misc_RNA (1)...(19): siRNA sense strand
uaaggacaauggugguuca

SEQ ID NO: 1496477 - RNA, 19 nt, Homo sapiens
  misc_RNA (1)...(19): siRNA sense strand
ggaucagaauucaggcuau

SEQ ID NO: 1496478 - RNA, 19 nt, Homo sapiens
  misc_RNA (1)...(19): siRNA sense strand
ggauugcucucuaauauua

SEQ ID NO: 1496479 - RNA, 19 nt, Homo sapiens
  misc_RNA (1)...(19): siRNA sense strand
gauaauaccuguaggauau

SEQ ID NO: 1496480 - RNA, 19 nt, Homo sapiens
  misc_RNA (1)...(19): siRNA sense strand
gcacauauauugccacuga

SEQ ID NO: 1496481 - RNA, 19 nt, Homo sapiens
  misc_RNA (1)...(19): siRNA sense strand
gcacacugaugaaaucuuu

SEQ ID NO: 1496482 - RNA, 19 nt, Homo sapiens
  misc_RNA (1)...(19): siRNA sense strand
gaaggaagguaaauaucuu

SEQ ID NO: 1496483 - RNA, 19 nt, Homo sapiens
  misc_RNA (1)...(19): siRNA sense strand
cgaggaaguuuacaccuua

SEQ ID NO: 1496484 - RNA, 19 nt, Homo sapiens
  misc_RNA (1)...(19): siRNA sense strand
ggaauuauguuggaauaug

SEQ ID NO: 1496485 - RNA, 19 nt, Homo sapiens
  misc_RNA (1)...(19): siRNA sense strand
ggacacaacagccaaauug

SEQ ID NO: 1496486 - RNA, 19 nt, Homo sapiens
  misc_RNA (1)...(19): siRNA sense strand
ugacuaauguugcacuuaa

SEQ ID NO: 1496487 - RNA, 19 nt, Homo sapiens
  misc_RNA (1)...(19): siRNA sense strand
cuagacagcugcuuugauu

SEQ ID NO: 1496488 - RNA, 19 nt, Homo sapiens
  misc_RNA (1)...(19): siRNA sense strand
cagcagaaauaguguguuu

SEQ ID NO: 1496489 - RNA, 19 nt, Homo sapiens
  misc_RNA (1)...(19): siRNA sense strand
gaaaucaucuccuugucau

SEQ ID NO: 1496490 - RNA, 19 nt, Homo sapiens
  misc_RNA (1)...(19): siRNA sense strand
gaacagagcaagucaaacu

SEQ ID NO: 1496491 - RNA, 19 nt, Homo sapiens
  misc_RNA (1)...(19): siRNA sense strand
gcagaaauaguguguuuau

SEQ ID NO: 1496492 - RNA, 19 nt, Homo sapiens
  misc_RNA (1)...(19): siRNA sense strand
caagggaaccaucuucuaa

SEQ ID NO: 1496493 - RNA, 19 nt, Homo sapiens
  misc_RNA (1)...(19): siRNA sense strand
auacagagguugcaagaga

SEQ ID NO: 1496494 - RNA, 19 nt, Homo sapiens
  misc_RNA (1)...(19): siRNA sense strand
aaaucgggcucaugcuuua

SEQ ID NO: 1496495 - RNA, 19 nt, Homo sapiens
  misc_RNA (1)...(19): siRNA sense strand
ucucaaagcacauauauug

SEQ ID NO: 1496496 - RNA, 19 nt, Homo sapiens
  misc_RNA (1)...(19): siRNA sense strand
aaucacacguucuaucuuu

SEQ ID NO: 1496497 - RNA, 19 nt, Homo sapiens
  misc_RNA (1)...(19): siRNA sense strand
gauggaacagcaagaauuu

SEQ ID NO: 1496498 - RNA, 19 nt, Homo sapiens
  misc_RNA (1)...(19): siRNA sense strand
caggaauuauguuggaaua

SEQ ID NO: 1496499 - RNA, 19 nt, Homo sapiens
  misc_RNA (1)...(19): siRNA sense strand
uaacaggccaugaugauga

SEQ ID NO: 1496500 - RNA, 19 nt, Homo sapiens
  misc_RNA (1)...(19): siRNA sense strand
caugugcuuucaacuauaa

SEQ ID NO: 1496501 - RNA, 19 nt, Homo sapiens
  misc_RNA (1)...(19): siRNA sense strand
ggauaauaccuguaggaua

SEQ ID NO: 1496502 - RNA, 19 nt, Homo sapiens
  misc_RNA (1)...(19): siRNA sense strand
gccacuggguccuuugaua

SEQ ID NO: 1496503 - RNA, 19 nt, Homo sapiens
  misc_RNA (1)...(19): siRNA sense strand
aauauuaacuggcucuaug

SEQ ID NO: 1496504 - RNA, 19 nt, Homo sapiens
  misc_RNA (1)...(19): siRNA sense strand
gcgaggaaguuuacaccuu

SEQ ID NO: 1496505 - RNA, 19 nt, Homo sapiens
  misc_RNA (1)...(19): siRNA sense strand
gaggaaguuuacaccuuaa

SEQ ID NO: 1496506 - RNA, 19 nt, Homo sapiens
  misc_RNA (1)...(19): siRNA sense strand
ggaaggaagguaaauaucu

SEQ ID NO: 1496507 - RNA, 19 nt, Homo sapiens
  misc_RNA (1)...(19): siRNA sense strand
ccaugaugaugaaauacua

SEQ ID NO: 1496508 - RNA, 19 nt, Homo sapiens
  misc_RNA (1)...(19): siRNA sense strand
ugggauugcucucuaauau

SEQ ID NO: 1496509 - RNA, 19 nt, Homo sapiens
  misc_RNA (1)...(19): siRNA sense strand
ggcagaaccucuacucaca

SEQ ID NO: 1496510 - RNA, 19 nt, Homo sapiens
  misc_RNA (1)...(19): siRNA sense strand
gcaaggauaauaccuguag

SEQ ID NO: 1496511 - RNA, 19 nt, Homo sapiens
  misc_RNA (1)...(19): siRNA sense strand
ggaaggucaugaaggugaa

SEQ ID NO: 1496512 - RNA, 19 nt, Homo sapiens
  misc_RNA (1)...(19): siRNA sense strand
gaaaauguguggcaaccuu

SEQ ID NO: 1496513 - RNA, 19 nt, Homo sapiens
  misc_RNA (1)...(19): siRNA sense strand
cauggagaauuaaagacua

SEQ ID NO: 1496514 - RNA, 19 nt, Homo sapiens
  misc_RNA (1)...(19): siRNA sense strand
gauuagcagugccucauuc

SEQ ID NO: 1496515 - RNA, 19 nt, Homo sapiens
  misc_RNA (1)...(19): siRNA sense strand
ccacuggguccuuugauaa

SEQ ID NO: 1496516 - RNA, 19 nt, Homo sapiens
  misc_RNA (1)...(19): siRNA sense strand
caaaucgggcucaugcuuu

SEQ ID NO: 1496517 - RNA, 19 nt, Homo sapiens
  misc_RNA (1)...(19): siRNA sense strand
gcugugggaugcuacaaau

SEQ ID NO: 1496518 - RNA, 19 nt, Homo sapiens
  misc_RNA (1)...(19): siRNA sense strand
caacuauaaaggcaacaua

SEQ ID NO: 1496519 - RNA, 19 nt, Homo sapiens
  misc_RNA (1)...(19): siRNA sense strand
gaaaaugcauugccaaacu

SEQ ID NO: 1496520 - RNA, 19 nt, Homo sapiens
  misc_RNA (1)...(19): siRNA sense strand
gcaaucacacguucuaucu

SEQ ID NO: 1496521 - RNA, 19 nt, Homo sapiens
  misc_RNA (1)...(19): siRNA sense strand
gaucauaccguuguagugu

SEQ ID NO: 1496522 - RNA, 19 nt, Homo sapiens
  misc_RNA (1)...(19): siRNA sense strand
acucacagcuucacgaaca

SEQ ID NO: 1496523 - RNA, 19 nt, Homo sapiens
  misc_RNA (1)...(19): siRNA sense strand
aaaggcaacauagucauua

SEQ ID NO: 1496524 - RNA, 19 nt, Homo sapiens
  misc_RNA (1)...(19): siRNA sense strand
ggucaugaaggugaaauuu

SEQ ID NO: 1496525 - RNA, 19 nt, Homo sapiens
  misc_RNA (1)...(19): siRNA sense strand
gaaccucuacucacagcuu

SEQ ID NO: 1496526 - RNA, 19 nt, Homo sapiens
  misc_RNA (1)...(19): siRNA sense strand
uaaaggcaacauagucauu

SEQ ID NO: 1496527 - RNA, 19 nt, Homo sapiens
  misc_RNA (1)...(19): siRNA sense strand
gauacuggaaggaagguaa

SEQ ID NO: 1496528 - RNA, 19 nt, Homo sapiens
  misc_RNA (1)...(19): siRNA sense strand
ggaaguuuacaccuuaaga

SEQ ID NO: 1496529 - RNA, 19 nt, Homo sapiens
  misc_RNA (1)...(19): siRNA sense strand
gagaaacucggccagaaca

SEQ ID NO: 1496530 - RNA, 19 nt, Homo sapiens
  misc_RNA (1)...(19): siRNA sense strand
ccagaaggcagaaccucua

SEQ ID NO: 1496531 - RNA, 19 nt, Homo sapiens
  misc_RNA (1)...(19): siRNA sense strand
aagagaaacucggccagaa

SEQ ID NO: 1496532 - RNA, 19 nt, Homo sapiens
  misc_RNA (1)...(19): siRNA sense strand
ucaugugcuuucaacuaua

SEQ ID NO: 1496533 - RNA, 19 nt, Homo sapiens
  misc_RNA (1)...(19): siRNA sense strand
ugauuacacuggaaagcuu

SEQ ID NO: 1496534 - RNA, 19 nt, Homo sapiens
  misc_RNA (1)...(19): siRNA sense strand
aggccaugaugaugaaaua

SEQ ID NO: 1496535 - RNA, 19 nt, Homo sapiens
  misc_RNA (1)...(19): siRNA sense strand
aaucaucuccuugucauuu

SEQ ID NO: 1496536 - RNA, 19 nt, Homo sapiens
  misc_RNA (1)...(19): siRNA sense strand
guccauagauuugcuugau

SEQ ID NO: 1496537 - RNA, 19 nt, Homo sapiens
  misc_RNA (1)...(19): siRNA sense strand
gccauagcauucaacaauc

SEQ ID NO: 1496538 - RNA, 19 nt, Homo sapiens
  misc_RNA (1)...(19): siRNA sense strand
gauuacacuggaaagcuua

SEQ ID NO: 1496539 - RNA, 19 nt, Homo sapiens
  misc_RNA (1)...(19): siRNA sense strand
uaacaccucaggagacaga

SEQ ID NO: 1496540 - RNA, 19 nt, Homo sapiens
  misc_RNA (1)...(19): siRNA sense strand
gcuaugaucggacgugcaa

SEQ ID NO: 1496541 - RNA, 19 nt, Homo sapiens
  misc_RNA (1)...(19): siRNA sense strand
caaacuggaaggucaugaa

SEQ ID NO: 1496542 - RNA, 19 nt, Homo sapiens
  misc_RNA (1)...(19): siRNA sense strand
gcagugccucauucaauug

SEQ ID NO: 1496543 - RNA, 19 nt, Homo sapiens
  misc_RNA (1)...(19): siRNA sense strand
cgaaaucaucuccuuguca

SEQ ID NO: 1496544 - RNA, 19 nt, Homo sapiens
  misc_RNA (1)...(19): siRNA sense strand
gaaguuuacaccuuaagag

SEQ ID NO: 1496545 - RNA, 19 nt, Homo sapiens
  misc_RNA (1)...(19): siRNA sense strand
acaggaaugugguuuaugc

SEQ ID NO: 1496546 - RNA, 19 nt, Homo sapiens
  misc_RNA (1)...(19): siRNA sense strand
ucauacagcagaaauagug

SEQ ID NO: 1496547 - RNA, 19 nt, Homo sapiens
  misc_RNA (1)...(19): siRNA sense strand
uauaaaggcaacauaguca

SEQ ID NO: 1496548 - RNA, 19 nt, Homo sapiens
  misc_RNA (1)...(19): siRNA sense strand
ugaugucagugcguuagua

SEQ ID NO: 1496549 - RNA, 19 nt, Homo sapiens
  misc_RNA (1)...(19): siRNA sense strand
uuucagugcugccacaaga

SEQ ID NO: 1496550 - RNA, 19 nt, Homo sapiens
  misc_RNA (1)...(19): siRNA sense strand
ggucauacagcagaaauag

SEQ ID NO: 1496551 - RNA, 19 nt, Homo sapiens
  misc_RNA (1)...(19): siRNA sense strand
uuacaggcagcaaggauaa

SEQ ID NO: 1496552 - RNA, 19 nt, Homo sapiens
  misc_RNA (1)...(19): siRNA sense strand
ucaagggaaccaucuucua

SEQ ID NO: 1496553 - RNA, 19 nt, Homo sapiens
  misc_RNA (1)...(19): siRNA sense strand
ugauggaacagcaagaauu

SEQ ID NO: 1496554 - RNA, 19 nt, Homo sapiens
  misc_RNA (1)...(19): siRNA sense strand
gggauugcucucuaauauu

SEQ ID NO: 1496555 - RNA, 19 nt, Homo sapiens
  misc_RNA (1)...(19): siRNA sense strand
cagaauggcgaggaaguuu

SEQ ID NO: 1496556 - RNA, 19 nt, Homo sapiens
  misc_RNA (1)...(19): siRNA sense strand
ucagugcguuaguagaaga

SEQ ID NO: 1496557 - RNA, 19 nt, Homo sapiens
  misc_RNA (1)...(19): siRNA sense strand
gcaacugcuucagcugaug

SEQ ID NO: 1496558 - RNA, 19 nt, Homo sapiens
  misc_RNA (1)...(19): siRNA sense strand
agcagugccucauucaauu

SEQ ID NO: 1496559 - RNA, 19 nt, Homo sapiens
  misc_RNA (1)...(19): siRNA sense strand
uagcagugccucauucaau

SEQ ID NO: 1496560 - RNA, 19 nt, Homo sapiens
  misc_RNA (1)...(19): siRNA sense strand
ggucauugugcugagauua

SEQ ID NO: 1496561 - RNA, 19 nt, Homo sapiens
  misc_RNA (1)...(19): siRNA sense strand
agaauggcgaggaaguuua

SEQ ID NO: 1496562 - RNA, 19 nt, Homo sapiens
  misc_RNA (1)...(19): siRNA sense strand
acaggaaaauguuaccaua

SEQ ID NO: 1496563 - RNA, 19 nt, Homo sapiens
  misc_RNA (1)...(19): siRNA sense strand
gaaggcagaaccucuacuc

SEQ ID NO: 1496564 - RNA, 19 nt, Homo sapiens
  misc_RNA (1)...(19): siRNA sense strand
uagcauucaacaauccuua

SEQ ID NO: 1496565 - RNA, 19 nt, Homo sapiens
  misc_RNA (1)...(19): siRNA sense strand
gaugaugaaauacuagaca

SEQ ID NO: 1496566 - RNA, 19 nt, Homo sapiens
  misc_RNA (1)...(19): siRNA sense strand
ucaucuccuugucauuuaa

SEQ ID NO: 1496567 - RNA, 19 nt, Homo sapiens
  misc_RNA (1)...(19): siRNA sense strand
guucucaaagcacauauau

SEQ ID NO: 1496568 - RNA, 19 nt, Homo sapiens
  misc_RNA (1)...(19): siRNA sense strand
uacagagguugcaagagaa

SEQ ID NO: 1496569 - RNA, 19 nt, Homo sapiens
  misc_RNA (1)...(19): siRNA sense strand
gguggcgacuggaaguaug

SEQ ID NO: 1496570 - RNA, 19 nt, Homo sapiens
  misc_RNA (1)...(19): siRNA sense strand
ggccagaacagcaaucaca

SEQ ID NO: 1496571 - RNA, 19 nt, Homo sapiens
  misc_RNA (1)...(19): siRNA sense strand
ugccauagcauucaacaau

SEQ ID NO: 1496572 - RNA, 19 nt, Homo sapiens
  misc_RNA (1)...(19): siRNA sense strand
gaauggcgaggaaguuuac

SEQ ID NO: 1496573 - RNA, 19 nt, Homo sapiens
  misc_RNA (1)...(19): siRNA sense strand
guauuacccgccaggaauu

SEQ ID NO: 1496574 - RNA, 19 nt, Homo sapiens
  misc_RNA (1)...(19): siRNA sense strand
uauugccacugacuaaugu

SEQ ID NO: 1496575 - RNA, 19 nt, Homo sapiens
  misc_RNA (1)...(19): siRNA sense strand
ucauuuaacccucaaagca

SEQ ID NO: 1496576 - RNA, 19 nt, Homo sapiens
  misc_RNA (1)...(19): siRNA sense strand
ugucagugcguuaguagaa

SEQ ID NO: 1496577 - RNA, 19 nt, Homo sapiens
  misc_RNA (1)...(19): siRNA sense strand
uucaugugcuuucaacuau

SEQ ID NO: 1496578 - RNA, 19 nt, Homo sapiens
  misc_RNA (1)...(19): siRNA sense strand
cuacaugcaucacaaguuu

SEQ ID NO: 1496579 - RNA, 19 nt, Homo sapiens
  misc_RNA (1)...(19): siRNA sense strand
ggagggagauugcuuucau

SEQ ID NO: 1496580 - RNA, 19 nt, Homo sapiens
  misc_RNA (1)...(19): siRNA sense strand
gacaagagggugcucauca

SEQ ID NO: 1496581 - RNA, 19 nt, Homo sapiens
  misc_RNA (1)...(19): siRNA sense strand
ucacggaggacgacgagua

SEQ ID NO: 1496582 - RNA, 19 nt, Homo sapiens
  misc_RNA (1)...(19): siRNA sense strand
cagcgaaagccaaaccuaa

SEQ ID NO: 1496583 - RNA, 19 nt, Homo sapiens
  misc_RNA (1)...(19): siRNA sense strand
guuuaacccuacaaaguau

SEQ ID NO: 1496584 - RNA, 19 nt, Homo sapiens
  misc_RNA (1)...(19): siRNA sense strand
gcgcaucugggaacaguuu

SEQ ID NO: 1496585 - RNA, 19 nt, Homo sapiens
  misc_RNA (1)...(19): siRNA sense strand
gagggagauugcuuucaug

SEQ ID NO: 1496586 - RNA, 19 nt, Homo sapiens
  misc_RNA (1)...(19): siRNA sense strand
gagcgcaucugggaacagu

SEQ ID NO: 1496587 - RNA, 19 nt, Homo sapiens
  misc_RNA (1)...(19): siRNA sense strand
aguuuaacccuacaaagua

SEQ ID NO: 1496588 - RNA, 19 nt, Homo sapiens
  misc_RNA (1)...(19): siRNA sense strand
gcgacuacauggcccucaa

SEQ ID NO: 1496589 - RNA, 19 nt, Homo sapiens
  misc_RNA (1)...(19): siRNA sense strand
gaacaguuuaacccuacaa

SEQ ID NO: 1496590 - RNA, 19 nt, Homo sapiens
  misc_RNA (1)...(19): siRNA sense strand
cgcaagccauccagaacaa

SEQ ID NO: 1496591 - RNA, 19 nt, Homo sapiens
  misc_RNA (1)...(19): siRNA sense strand
caggcuacaugcaucacaa

SEQ ID NO: 1496592 - RNA, 19 nt, Homo sapiens
  misc_RNA (1)...(19): siRNA sense strand
caguuuaacccuacaaagu

SEQ ID NO: 1496593 - RNA, 19 nt, Homo sapiens
  misc_RNA (1)...(19): siRNA sense strand
ccacgcaagccauccagaa

SEQ ID NO: 1496594 - RNA, 19 nt, Homo sapiens
  misc_RNA (1)...(19): siRNA sense strand
gcuacaugcaucacaaguu

SEQ ID NO: 1496595 - RNA, 19 nt, Homo sapiens
  misc_RNA (1)...(19): siRNA sense strand
gcaucugggaacaguuuaa

SEQ ID NO: 1496596 - RNA, 19 nt, Homo sapiens
  misc_RNA (1)...(19): siRNA sense strand
gcuggagggagauugcuuu

SEQ ID NO: 1496597 - RNA, 19 nt, Homo sapiens
  misc_RNA (1)...(19): siRNA sense strand
ggaacaguuuaacccuaca

SEQ ID NO: 1496598 - RNA, 19 nt, Homo sapiens
  misc_RNA (1)...(19): siRNA sense strand
gaucaagacccaggcuaca

SEQ ID NO: 1496599 - RNA, 19 nt, Homo sapiens
  misc_RNA (1)...(19): siRNA sense strand
ucaagacccaggcuacaug

SEQ ID NO: 1496600 - RNA, 19 nt, Homo sapiens
  misc_RNA (1)...(19): siRNA sense strand
ggacaagagggugcucauc

SEQ ID NO: 1496601 - RNA, 19 nt, Homo sapiens
  misc_RNA (1)...(19): siRNA sense strand
gacgaguacgugcggcuuu

SEQ ID NO: 1496602 - RNA, 19 nt, Homo sapiens
  misc_RNA (1)...(19): siRNA sense strand
cagaacaacagggagaaug

SEQ ID NO: 1496603 - RNA, 19 nt, Homo sapiens
  misc_RNA (1)...(19): siRNA sense strand
agaacaacagggagaaugu

SEQ ID NO: 1496604 - RNA, 19 nt, Homo sapiens
  misc_RNA (1)...(19): siRNA sense strand
ccagcgaaagccaaaccua

SEQ ID NO: 1496605 - RNA, 19 nt, Homo sapiens
  misc_RNA (1)...(19): siRNA sense strand
caagccauccagaacaaca

SEQ ID NO: 1496606 - RNA, 19 nt, Homo sapiens
  misc_RNA (1)...(19): siRNA sense strand
gaacuacguugguggauaa

SEQ ID NO: 1496607 - RNA, 19 nt, Homo sapiens
  misc_RNA (1)...(19): siRNA sense strand
gauaauaacaccuggaaua

SEQ ID NO: 1496608 - RNA, 19 nt, Homo sapiens
  misc_RNA (1)...(19): siRNA sense strand
ggaagaagccuuuacauca

SEQ ID NO: 1496609 - RNA, 19 nt, Homo sapiens
  misc_RNA (1)...(19): siRNA sense strand
gaaaagcuaugucuucuaa

SEQ ID NO: 1496610 - RNA, 19 nt, Homo sapiens
  misc_RNA (1)...(19): siRNA sense strand
uaucaacgaugaaagagua

SEQ ID NO: 1496611 - RNA, 19 nt, Homo sapiens
  misc_RNA (1)...(19): siRNA sense strand
cgacugauguugacuuuga

SEQ ID NO: 1496612 - RNA, 19 nt, Homo sapiens
  misc_RNA (1)...(19): siRNA sense strand
cuacauaucucggucagua

SEQ ID NO: 1496613 - RNA, 19 nt, Homo sapiens
  misc_RNA (1)...(19): siRNA sense strand
gcauguauuuguguuguua

SEQ ID NO: 1496614 - RNA, 19 nt, Homo sapiens
  misc_RNA (1)...(19): siRNA sense strand
uaggauagcugaaggagaa

SEQ ID NO: 1496615 - RNA, 19 nt, Homo sapiens
  misc_RNA (1)...(19): siRNA sense strand
guagcuggauccuuugaua

SEQ ID NO: 1496616 - RNA, 19 nt, Homo sapiens
  misc_RNA (1)...(19): siRNA sense strand
aaauuucucuggaugguua

SEQ ID NO: 1496617 - RNA, 19 nt, Homo sapiens
  misc_RNA (1)...(19): siRNA sense strand
caugaggacucuagaugua

SEQ ID NO: 1496618 - RNA, 19 nt, Homo sapiens
  misc_RNA (1)...(19): siRNA sense strand
gucaguagcuggauccuuu

SEQ ID NO: 1496619 - RNA, 19 nt, Homo sapiens
  misc_RNA (1)...(19): siRNA sense strand
gaagaagccuuuacaucag

SEQ ID NO: 1496620 - RNA, 19 nt, Homo sapiens
  misc_RNA (1)...(19): siRNA sense strand
gaugaaagaguauuuguug

SEQ ID NO: 1496621 - RNA, 19 nt, Homo sapiens
  misc_RNA (1)...(19): siRNA sense strand
aaucagugcugucuacuuu

SEQ ID NO: 1496622 - RNA, 19 nt, Homo sapiens
  misc_RNA (1)...(19): siRNA sense strand
cuacguugguggauaauaa

SEQ ID NO: 1496623 - RNA, 19 nt, Homo sapiens
  misc_RNA (1)...(19): siRNA sense strand
gaggaaacaugcaacugaa

SEQ ID NO: 1496624 - RNA, 19 nt, Homo sapiens
  misc_RNA (1)...(19): siRNA sense strand
ggacagcagugaugaggau

SEQ ID NO: 1496625 - RNA, 19 nt, Homo sapiens
  misc_RNA (1)...(19): siRNA sense strand
gcaauugccuuuucaaaug

SEQ ID NO: 1496626 - RNA, 19 nt, Homo sapiens
  misc_RNA (1)...(19): siRNA sense strand
ggccuuacaucuauaucua

SEQ ID NO: 1496627 - RNA, 19 nt, Homo sapiens
  misc_RNA (1)...(19): siRNA sense strand
ugaaacagcagccuauaaa

SEQ ID NO: 1496628 - RNA, 19 nt, Homo sapiens
  misc_RNA (1)...(19): siRNA sense strand
caagagaacuuuggaacca

SEQ ID NO: 1496629 - RNA, 19 nt, Homo sapiens
  misc_RNA (1)...(19): siRNA sense strand
aauaacaccuggaauaaca

SEQ ID NO: 1496630 - RNA, 19 nt, Homo sapiens
  misc_RNA (1)...(19): siRNA sense strand
guauuuguguuguuacuga

SEQ ID NO: 1496631 - RNA, 19 nt, Homo sapiens
  misc_RNA (1)...(19): siRNA sense strand
gacaaugugcugcugcuua

SEQ ID NO: 1496632 - RNA, 19 nt, Homo sapiens
  misc_RNA (1)...(19): siRNA sense strand
aaagcuaugucuucuaaug

SEQ ID NO: 1496633 - RNA, 19 nt, Homo sapiens
  misc_RNA (1)...(19): siRNA sense strand
gauguuugcuguccacugu

SEQ ID NO: 1496634 - RNA, 19 nt, Homo sapiens
  misc_RNA (1)...(19): siRNA sense strand
gaguauuuguugcucuaua

SEQ ID NO: 1496635 - RNA, 19 nt, Homo sapiens
  misc_RNA (1)...(19): siRNA sense strand
cagaacaagugaacacaug

SEQ ID NO: 1496636 - RNA, 19 nt, Homo sapiens
  misc_RNA (1)...(19): siRNA sense strand
cgacuugggugucuuucuu

SEQ ID NO: 1496637 - RNA, 19 nt, Homo sapiens
  misc_RNA (1)...(19): siRNA sense strand
agaauuccguguagacaaa

SEQ ID NO: 1496638 - RNA, 19 nt, Homo sapiens
  misc_RNA (1)...(19): siRNA sense strand
caugauggcaccaggaaua

SEQ ID NO: 1496639 - RNA, 19 nt, Homo sapiens
  misc_RNA (1)...(19): siRNA sense strand
ggaagaauaguagguggua

SEQ ID NO: 1496640 - RNA, 19 nt, Homo sapiens
  misc_RNA (1)...(19): siRNA sense strand
gcauauagcacuuucuaca

SEQ ID NO: 1496641 - RNA, 19 nt, Homo sapiens
  misc_RNA (1)...(19): siRNA sense strand
gcacuucaguucacauacu

SEQ ID NO: 1496642 - RNA, 19 nt, Homo sapiens
  misc_RNA (1)...(19): siRNA sense strand
ccgcuggccuuauucauug

SEQ ID NO: 1496643 - RNA, 19 nt, Homo sapiens
  misc_RNA (1)...(19): siRNA sense strand
gauaaggcagguaaaguga

SEQ ID NO: 1496644 - RNA, 19 nt, Homo sapiens
  misc_RNA (1)...(19): siRNA sense strand
cuacuuugcuggagugaug

SEQ ID NO: 1496645 - RNA, 19 nt, Homo sapiens
  misc_RNA (1)...(19): siRNA sense strand
ggagaaaugcagcuggauu

SEQ ID NO: 1496646 - RNA, 19 nt, Homo sapiens
  misc_RNA (1)...(19): siRNA sense strand
ccaaggagcaggacuuuua

SEQ ID NO: 1496647 - RNA, 19 nt, Homo sapiens
  misc_RNA (1)...(19): siRNA sense strand
gaaaccaaggaaauuugua

SEQ ID NO: 1496648 - RNA, 19 nt, Homo sapiens
  misc_RNA (1)...(19): siRNA sense strand
gacccgugguuuaacuaua

SEQ ID NO: 1496649 - RNA, 19 nt, Homo sapiens
  misc_RNA (1)...(19): siRNA sense strand
caacgaugaaagaguauuu

SEQ ID NO: 1496650 - RNA, 19 nt, Homo sapiens
  misc_RNA (1)...(19): siRNA sense strand
gaaccaaggagcaggacuu

SEQ ID NO: 1496651 - RNA, 19 nt, Homo sapiens
  misc_RNA (1)...(19): siRNA sense strand
gacauuagaucacaaaccu

SEQ ID NO: 1496652 - RNA, 19 nt, Homo sapiens
  misc_RNA (1)...(19): siRNA sense strand
ccaaagacauucgggaaag

SEQ ID NO: 1496653 - RNA, 19 nt, Homo sapiens
  misc_RNA (1)...(19): siRNA sense strand
ggcagucgcuucucuccuu

SEQ ID NO: 1496654 - RNA, 19 nt, Homo sapiens
  misc_RNA (1)...(19): siRNA sense strand
guaccugggucacaagcaa

SEQ ID NO: 1496655 - RNA, 19 nt, Homo sapiens
  misc_RNA (1)...(19): siRNA sense strand
ccaaggaaauuuguaugau

SEQ ID NO: 1496656 - RNA, 19 nt, Homo sapiens
  misc_RNA (1)...(19): siRNA sense strand
acaaugugcugcugcuuau

SEQ ID NO: 1496657 - RNA, 19 nt, Homo sapiens
  misc_RNA (1)...(19): siRNA sense strand
cacaucaucuugcaucuca

SEQ ID NO: 1496658 - RNA, 19 nt, Homo sapiens
  misc_RNA (1)...(19): siRNA sense strand
gaucacaaaccucgaguca

SEQ ID NO: 1496659 - RNA, 19 nt, Homo sapiens
  misc_RNA (1)...(19): siRNA sense strand
gaacaucccaaagacauuc

SEQ ID NO: 1496660 - RNA, 19 nt, Homo sapiens
  misc_RNA (1)...(19): siRNA sense strand
agaugaacaugcacgagua

SEQ ID NO: 1496661 - RNA, 19 nt, Homo sapiens
  misc_RNA (1)...(19): siRNA sense strand
cauaacuguucacauaaga

SEQ ID NO: 1496662 - RNA, 19 nt, Homo sapiens
  misc_RNA (1)...(19): siRNA sense strand
gaagcguggcuacauuaaa

SEQ ID NO: 1496663 - RNA, 19 nt, Homo sapiens
  misc_RNA (1)...(19): siRNA sense strand
acacuggcuuguuaggaua

SEQ ID NO: 1496664 - RNA, 19 nt, Homo sapiens
  misc_RNA (1)...(19): siRNA sense strand
augcugagauuggaaauaa

SEQ ID NO: 1496665 - RNA, 19 nt, Homo sapiens
  misc_RNA (1)...(19): siRNA sense strand
gcuaugucuucuaaugaaa

SEQ ID NO: 1496666 - RNA, 19 nt, Homo sapiens
  misc_RNA (1)...(19): siRNA sense strand
ggagugauggugcgacuga

SEQ ID NO: 1496667 - RNA, 19 nt, Homo sapiens
  misc_RNA (1)...(19): siRNA sense strand
gagaacaucccaaagacau

SEQ ID NO: 1496668 - RNA, 19 nt, Homo sapiens
  misc_RNA (1)...(19): siRNA sense strand
ggaagcguggcuacauuaa

SEQ ID NO: 1496669 - RNA, 19 nt, Homo sapiens
  misc_RNA (1)...(19): siRNA sense strand
ggagacauuagaucacaaa

SEQ ID NO: 1496670 - RNA, 19 nt, Homo sapiens
  misc_RNA (1)...(19): siRNA sense strand
uauagcacuuucuacauug

SEQ ID NO: 1496671 - RNA, 19 nt, Homo sapiens
  misc_RNA (1)...(19): siRNA sense strand
ugagagaccgauuaacaaa

SEQ ID NO: 1496672 - RNA, 19 nt, Homo sapiens
  misc_RNA (1)...(19): siRNA sense strand
cuacauuguggguuuaaua

SEQ ID NO: 1496673 - RNA, 19 nt, Homo sapiens
  misc_RNA (1)...(19): siRNA sense strand
ugaggaaacaugcaacuga

SEQ ID NO: 1496674 - RNA, 19 nt, Homo sapiens
  misc_RNA (1)...(19): siRNA sense strand
acauagcacuggugggaaa

SEQ ID NO: 1496675 - RNA, 19 nt, Homo sapiens
  misc_RNA (1)...(19): siRNA sense strand
gaauaacagccacauagca

SEQ ID NO: 1496676 - RNA, 19 nt, Homo sapiens
  misc_RNA (1)...(19): siRNA sense strand
gcaccaggaauaucuuaga

SEQ ID NO: 1496677 - RNA, 19 nt, Homo sapiens
  misc_RNA (1)...(19): siRNA sense strand
guguaguccuggccucaua

SEQ ID NO: 1496678 - RNA, 19 nt, Homo sapiens
  misc_RNA (1)...(19): siRNA sense strand
ggaaacaugcaacugaaca

SEQ ID NO: 1496679 - RNA, 19 nt, Homo sapiens
  misc_RNA (1)...(19): siRNA sense strand
gaagcuuacuuuuggcuaa

SEQ ID NO: 1496680 - RNA, 19 nt, Homo sapiens
  misc_RNA (1)...(19): siRNA sense strand
gauuggaaauaaggacauu

SEQ ID NO: 1496681 - RNA, 19 nt, Homo sapiens
  misc_RNA (1)...(19): siRNA sense strand
ugaaggagaacaucccaaa

SEQ ID NO: 1496682 - RNA, 19 nt, Homo sapiens
  misc_RNA (1)...(19): siRNA sense strand
aaauacagaugaacaugca

SEQ ID NO: 1496683 - RNA, 19 nt, Homo sapiens
  misc_RNA (1)...(19): siRNA sense strand
gagcaucaaccuacgacuu

SEQ ID NO: 1496684 - RNA, 19 nt, Homo sapiens
  misc_RNA (1)...(19): siRNA sense strand
agaacuacguugguggaua

SEQ ID NO: 1496685 - RNA, 19 nt, Homo sapiens
  misc_RNA (1)...(19): siRNA sense strand
uaagagacguauguguguu

SEQ ID NO: 1496686 - RNA, 19 nt, Homo sapiens
  misc_RNA (1)...(19): siRNA sense strand
gaacacguaaugcugagau

SEQ ID NO: 1496687 - RNA, 19 nt, Homo sapiens
  misc_RNA (1)...(19): siRNA sense strand
gaugaaagagcaugguauc

SEQ ID NO: 1496688 - RNA, 19 nt, Homo sapiens
  misc_RNA (1)...(19): siRNA sense strand
guaaugucuuggugggauu

SEQ ID NO: 1496689 - RNA, 19 nt, Homo sapiens
  misc_RNA (1)...(19): siRNA sense strand
gaugaacaugcacgaguaa

SEQ ID NO: 1496690 - RNA, 19 nt, Homo sapiens
  misc_RNA (1)...(19): siRNA sense strand
ggaaauuuguaugauaagg

SEQ ID NO: 1496691 - RNA, 19 nt, Homo sapiens
  misc_RNA (1)...(19): siRNA sense strand
uugggugucuuucuucuuu

SEQ ID NO: 1496692 - RNA, 19 nt, Homo sapiens
  misc_RNA (1)...(19): siRNA sense strand
gcaggugcuguguuccuua

SEQ ID NO: 1496693 - RNA, 19 nt, Homo sapiens
  misc_RNA (1)...(19): siRNA sense strand
uagcauauagcacuuucua

SEQ ID NO: 1496694 - RNA, 19 nt, Homo sapiens
  misc_RNA (1)...(19): siRNA sense strand
gagucuacauagcauauag

SEQ ID NO: 1496695 - RNA, 19 nt, Homo sapiens
  misc_RNA (1)...(19): siRNA sense strand
cugcuuauccuauuucuau

SEQ ID NO: 1496696 - RNA, 19 nt, Homo sapiens
  misc_RNA (1)...(19): siRNA sense strand
caagaguuccagacccuuu

SEQ ID NO: 1496697 - RNA, 19 nt, Homo sapiens
  misc_RNA (1)...(19): siRNA sense strand
gcaggugucuuugcauugc

SEQ ID NO: 1496698 - RNA, 19 nt, Homo sapiens
  misc_RNA (1)...(19): siRNA sense strand
gauaacagggagacauuag

SEQ ID NO: 1496699 - RNA, 19 nt, Homo sapiens
  misc_RNA (1)...(19): siRNA sense strand
caaagacauucgggaaagu

SEQ ID NO: 1496700 - RNA, 19 nt, Homo sapiens
  misc_RNA (1)...(19): siRNA sense strand
ggaauggcuaauagaacua

SEQ ID NO: 1496701 - RNA, 19 nt, Homo sapiens
  misc_RNA (1)...(19): siRNA sense strand
acaugcaacugaacaggaa

SEQ ID NO: 1496702 - RNA, 19 nt, Homo sapiens
  misc_RNA (1)...(19): siRNA sense strand
gcacaagucgucccucaac

SEQ ID NO: 1496703 - RNA, 19 nt, Homo sapiens
  misc_RNA (1)...(19): siRNA sense strand
uaucugagagaccgauuaa

SEQ ID NO: 1496704 - RNA, 19 nt, Homo sapiens
  misc_RNA (1)...(19): siRNA sense strand
uaacagggagacauuagau

SEQ ID NO: 1496705 - RNA, 19 nt, Homo sapiens
  misc_RNA (1)...(19): siRNA sense strand
aaggaagcguggcuacauu

SEQ ID NO: 1496706 - RNA, 19 nt, Homo sapiens
  misc_RNA (1)...(19): siRNA sense strand
gcaaagagauggauuguuu

SEQ ID NO: 1496707 - RNA, 19 nt, Homo sapiens
  misc_RNA (1)...(19): siRNA sense strand
gaauugcguuucuuuauga

SEQ ID NO: 1496708 - RNA, 19 nt, Homo sapiens
  misc_RNA (1)...(19): siRNA sense strand
caacagauguauauucaug

SEQ ID NO: 1496709 - RNA, 19 nt, Homo sapiens
  misc_RNA (1)...(19): siRNA sense strand
ggaauugcguuucuuuaug

SEQ ID NO: 1496710 - RNA, 19 nt, Homo sapiens
  misc_RNA (1)...(19): siRNA sense strand
gaagcuugcuggagauuug

SEQ ID NO: 1496711 - RNA, 19 nt, Homo sapiens
  misc_RNA (1)...(19): siRNA sense strand
caaauacugucuuagagaa

SEQ ID NO: 1496712 - RNA, 19 nt, Homo sapiens
  misc_RNA (1)...(19): siRNA sense strand
ggagugaugacgaggauua

SEQ ID NO: 1496713 - RNA, 19 nt, Homo sapiens
  misc_RNA (1)...(19): siRNA sense strand
gagauggauuguuuaaaga

SEQ ID NO: 1496714 - RNA, 19 nt, Homo sapiens
  misc_RNA (1)...(19): siRNA sense strand
guggaaagaugguuuagga

SEQ ID NO: 1496715 - RNA, 19 nt, Homo sapiens
  misc_RNA (1)...(19): siRNA sense strand
gauaaaccuuggcuauaug

SEQ ID NO: 1496716 - RNA, 19 nt, Homo sapiens
  misc_RNA (1)...(19): siRNA sense strand
gaaugguucugguuggaaa

SEQ ID NO: 1496717 - RNA, 19 nt, Homo sapiens
  misc_RNA (1)...(19): siRNA sense strand
ugauaaaccuuggcuauau

SEQ ID NO: 1496718 - RNA, 19 nt, Homo sapiens
  misc_RNA (1)...(19): siRNA sense strand
ugaagaugcucaacagaug

SEQ ID NO: 1496719 - RNA, 19 nt, Homo sapiens
  misc_RNA (1)...(19): siRNA sense strand
gcaaacugauauuuaugga

SEQ ID NO: 1496720 - RNA, 19 nt, Homo sapiens
  misc_RNA (1)...(19): siRNA sense strand
agagauggauuguuuaaag

SEQ ID NO: 1496721 - RNA, 19 nt, Homo sapiens
  misc_RNA (1)...(19): siRNA sense strand
cgaaagguuacaccaaaua

SEQ ID NO: 1496722 - RNA, 19 nt, Homo sapiens
  misc_RNA (1)...(19): siRNA sense strand
gauggacgcagaccuguaa

SEQ ID NO: 1496723 - RNA, 19 nt, Homo sapiens
  misc_RNA (1)...(19): siRNA sense strand
gaucacuguugcuggaauu

SEQ ID NO: 1496724 - RNA, 19 nt, Homo sapiens
  misc_RNA (1)...(19): siRNA sense strand
gauggacucgucuuuguaa

SEQ ID NO: 1496725 - RNA, 19 nt, Homo sapiens
  misc_RNA (1)...(19): siRNA sense strand
caaagagauggauuguuua

SEQ ID NO: 1496726 - RNA, 19 nt, Homo sapiens
  misc_RNA (1)...(19): siRNA sense strand
uaucaggcguguauuugaa

SEQ ID NO: 1496727 - RNA, 19 nt, Homo sapiens
  misc_RNA (1)...(19): siRNA sense strand
caucuucuccaccauauuu

SEQ ID NO: 1496728 - RNA, 19 nt, Homo sapiens
  misc_RNA (1)...(19): siRNA sense strand
ggagucugcuaagauguuu

SEQ ID NO: 1496729 - RNA, 19 nt, Homo sapiens
  misc_RNA (1)...(19): siRNA sense strand
gcuggagucugcuaagaug

SEQ ID NO: 1496730 - RNA, 19 nt, Homo sapiens
  misc_RNA (1)...(19): siRNA sense strand
acaauaaaguggucagauc

SEQ ID NO: 1496731 - RNA, 19 nt, Homo sapiens
  misc_RNA (1)...(19): siRNA sense strand
gcacgcugaucuugccuau

SEQ ID NO: 1496732 - RNA, 19 nt, Homo sapiens
  misc_RNA (1)...(19): siRNA sense strand
ccaccuggcugcuauuagu

SEQ ID NO: 1496733 - RNA, 19 nt, Homo sapiens
  misc_RNA (1)...(19): siRNA sense strand
agacuuggcuuugauguca

SEQ ID NO: 1496734 - RNA, 19 nt, Homo sapiens
  misc_RNA (1)...(19): siRNA sense strand
ugacgaggauuaugaagag

SEQ ID NO: 1496735 - RNA, 19 nt, Homo sapiens
  misc_RNA (1)...(19): siRNA sense strand
gauuaucaggcguguauuu

SEQ ID NO: 1496736 - RNA, 19 nt, Homo sapiens
  misc_RNA (1)...(19): siRNA sense strand
uguaucaccucgagccuuu

SEQ ID NO: 1496737 - RNA, 19 nt, Homo sapiens
  misc_RNA (1)...(19): siRNA sense strand
acgcugaucuugccuaugu

SEQ ID NO: 1496738 - RNA, 19 nt, Homo sapiens
  misc_RNA (1)...(19): siRNA sense strand
gcuuuucucuugcugauua

SEQ ID NO: 1496739 - RNA, 19 nt, Homo sapiens
  misc_RNA (1)...(19): siRNA sense strand
agagacaguucgaaagguu

SEQ ID NO: 1496740 - RNA, 19 nt, Homo sapiens
  misc_RNA (1)...(19): siRNA sense strand
uuaaagagacaguucgaaa

SEQ ID NO: 1496741 - RNA, 19 nt, Homo sapiens
  misc_RNA (1)...(19): siRNA sense strand
ccaaauacugucuuagaga

SEQ ID NO: 1496742 - RNA, 19 nt, Homo sapiens
  misc_RNA (1)...(19): siRNA sense strand
ggaagaggaagaggaagaa

SEQ ID NO: 1496743 - RNA, 19 nt, Homo sapiens
  misc_RNA (1)...(19): siRNA sense strand
gaggagugaugacgaggau

SEQ ID NO: 1496744 - RNA, 19 nt, Homo sapiens
  misc_RNA (1)...(19): siRNA sense strand
gcucaacagauguauauuc

SEQ ID NO: 1496745 - RNA, 19 nt, Homo sapiens
  misc_RNA (1)...(19): siRNA sense strand
gagacaguucgaaagguua

SEQ ID NO: 1496746 - RNA, 19 nt, Homo sapiens
  misc_RNA (1)...(19): siRNA sense strand
gaauggcuaucccaaacag

SEQ ID NO: 1496747 - RNA, 19 nt, Homo sapiens
  misc_RNA (1)...(19): siRNA sense strand
uuuauggacuggcaaagaa

SEQ ID NO: 1496748 - RNA, 19 nt, Homo sapiens
  misc_RNA (1)...(19): siRNA sense strand
ugacaauuccauaugcuuu

SEQ ID NO: 1496749 - RNA, 19 nt, Homo sapiens
  misc_RNA (1)...(19): siRNA sense strand
uacaccaaauacugucuua

SEQ ID NO: 1496750 - RNA, 19 nt, Homo sapiens
  misc_RNA (1)...(19): siRNA sense strand
gaagaagaggcuaccaaag

SEQ ID NO: 1496751 - RNA, 19 nt, Homo sapiens
  misc_RNA (1)...(19): siRNA sense strand
ggaagaggaagaagaagag

SEQ ID NO: 1496752 - RNA, 19 nt, Homo sapiens
  misc_RNA (1)...(19): siRNA sense strand
caccaaauacugucuuaga

SEQ ID NO: 1496753 - RNA, 19 nt, Homo sapiens
  misc_RNA (1)...(19): siRNA sense strand
gugaugacgaggauuauga

SEQ ID NO: 1496754 - RNA, 19 nt, Homo sapiens
  misc_RNA (1)...(19): siRNA sense strand
cucaacagauguauauuca

SEQ ID NO: 1496755 - RNA, 19 nt, Homo sapiens
  misc_RNA (1)...(19): siRNA sense strand
gaagaugcucaacagaugu

SEQ ID NO: 1496756 - RNA, 19 nt, Homo sapiens
  misc_RNA (1)...(19): siRNA sense strand
ggagucggcggaaucaaga

SEQ ID NO: 1496757 - RNA, 19 nt, Homo sapiens
  misc_RNA (1)...(19): siRNA sense strand
gaaagguuacaccaaauac

SEQ ID NO: 1496758 - RNA, 19 nt, Homo sapiens
  misc_RNA (1)...(19): siRNA sense strand
cgaggauuaugaagaggaa

SEQ ID NO: 1496759 - RNA, 19 nt, Homo sapiens
  misc_RNA (1)...(19): siRNA sense strand
ucucuuggugugcuaauua

SEQ ID NO: 1496760 - RNA, 19 nt, Homo sapiens
  misc_RNA (1)...(19): siRNA sense strand
cugaugagcuucucuuggu

SEQ ID NO: 1496761 - RNA, 19 nt, Homo sapiens
  misc_RNA (1)...(19): siRNA sense strand
agaagaagaggcuaccaaa

SEQ ID NO: 1496762 - RNA, 19 nt, Homo sapiens
  misc_RNA (1)...(19): siRNA sense strand
ggacuggcaaagaagugua

SEQ ID NO: 1496763 - RNA, 19 nt, Homo sapiens
  misc_RNA (1)...(19): siRNA sense strand
agaggaagaggaagaagaa

SEQ ID NO: 1496764 - RNA, 19 nt, Homo sapiens
  misc_RNA (1)...(19): siRNA sense strand
cuauuagucugaugagcuu

SEQ ID NO: 1496765 - RNA, 19 nt, Homo sapiens
  misc_RNA (1)...(19): siRNA sense strand
uaaagagacaguucgaaag

SEQ ID NO: 1496766 - RNA, 19 nt, Homo sapiens
  misc_RNA (1)...(19): siRNA sense strand
auaaaguggucagaucuug

SEQ ID NO: 1496767 - RNA, 19 nt, Homo sapiens
  misc_RNA (1)...(19): siRNA sense strand
uaugauaaaccuuggcuau

SEQ ID NO: 1496768 - RNA, 19 nt, Homo sapiens
  misc_RNA (1)...(19): siRNA sense strand
caaccauugcaaacugaua

SEQ ID NO: 1496769 - RNA, 19 nt, Homo sapiens
  misc_RNA (1)...(19): siRNA sense strand
uucgaaagguuacaccaaa

SEQ ID NO: 1496770 - RNA, 19 nt, Homo sapiens
  misc_RNA (1)...(19): siRNA sense strand
gcuggagauuugcauuuua

SEQ ID NO: 1496771 - RNA, 19 nt, Homo sapiens
  misc_RNA (1)...(19): siRNA sense strand
uaaaguggucagaucuuga

SEQ ID NO: 1496772 - RNA, 19 nt, Homo sapiens
  misc_RNA (1)...(19): siRNA sense strand
ucucuguuauuuagacuug

SEQ ID NO: 1496773 - RNA, 19 nt, Homo sapiens
  misc_RNA (1)...(19): siRNA sense strand
gcuggaauugcguuucuuu

SEQ ID NO: 1496774 - RNA, 19 nt, Homo sapiens
  misc_RNA (1)...(19): siRNA sense strand
gguucugguuggaaagauu

SEQ ID NO: 1496775 - RNA, 19 nt, Homo sapiens
  misc_RNA (1)...(19): siRNA sense strand
uuucauacaucuuccucaa

SEQ ID NO: 1496776 - RNA, 19 nt, Homo sapiens
  misc_RNA (1)...(19): siRNA sense strand
ucaccucgagccuuucuuu

SEQ ID NO: 1496777 - RNA, 19 nt, Homo sapiens
  misc_RNA (1)...(19): siRNA sense strand
uauuuagacuuggcuuuga

SEQ ID NO: 1496778 - RNA, 19 nt, Homo sapiens
  misc_RNA (1)...(19): siRNA sense strand
guggucagaucuugaggau

SEQ ID NO: 1496779 - RNA, 19 nt, Homo sapiens
  misc_RNA (1)...(19): siRNA sense strand
gauggauuguuuaaagaac

SEQ ID NO: 1496780 - RNA, 19 nt, Homo sapiens
  misc_RNA (1)...(19): siRNA sense strand
uaugggagguuuggaaugg

SEQ ID NO: 1496781 - RNA, 19 nt, Homo sapiens
  misc_RNA (1)...(19): siRNA sense strand
ucauuuggcauuaaagaga

SEQ ID NO: 1496782 - RNA, 19 nt, Homo sapiens
  misc_RNA (1)...(19): siRNA sense strand
aaccuuggcuauaugacuu

SEQ ID NO: 1496783 - RNA, 19 nt, Homo sapiens
  misc_RNA (1)...(19): siRNA sense strand
ggauggacgcagaccugua

SEQ ID NO: 1496784 - RNA, 19 nt, Homo sapiens
  misc_RNA (1)...(19): siRNA sense strand
ggacccucgugaugauugu

SEQ ID NO: 1496785 - RNA, 19 nt, Homo sapiens
  misc_RNA (1)...(19): siRNA sense strand
ggaauggcuaucccaaaca

SEQ ID NO: 1496786 - RNA, 19 nt, Homo sapiens
  misc_RNA (1)...(19): siRNA sense strand
uggaauggcuaucccaaac

SEQ ID NO: 1496787 - RNA, 19 nt, Homo sapiens
  misc_RNA (1)...(19): siRNA sense strand
ucgaaagguuacaccaaau

SEQ ID NO: 1496788 - RNA, 19 nt, Homo sapiens
  misc_RNA (1)...(19): siRNA sense strand
aagaagaggcuaccaaagg

SEQ ID NO: 1496789 - RNA, 19 nt, Homo sapiens
  misc_RNA (1)...(19): siRNA sense strand
gauguauauucaugaagag

SEQ ID NO: 1496790 - RNA, 19 nt, Homo sapiens
  misc_RNA (1)...(19): siRNA sense strand
caucagccgccucauuguu

SEQ ID NO: 1496791 - RNA, 19 nt, Homo sapiens
  misc_RNA (1)...(19): siRNA sense strand
caauaaaguggucagaucu

SEQ ID NO: 1496792 - RNA, 19 nt, Homo sapiens
  misc_RNA (1)...(19): siRNA sense strand
gaugucaagagaaaggauu

SEQ ID NO: 1496793 - RNA, 19 nt, Homo sapiens
  misc_RNA (1)...(19): siRNA sense strand
uggaauugcguuucuuuau

SEQ ID NO: 1496794 - RNA, 19 nt, Homo sapiens
  misc_RNA (1)...(19): siRNA sense strand
cgauggacucgucuuugua

SEQ ID NO: 1496795 - RNA, 19 nt, Homo sapiens
  misc_RNA (1)...(19): siRNA sense strand
uaccaaaggcaaagagaug

SEQ ID NO: 1496796 - RNA, 19 nt, Homo sapiens
  misc_RNA (1)...(19): siRNA sense strand
guauauucaugaagagcau

SEQ ID NO: 1496797 - RNA, 19 nt, Homo sapiens
  misc_RNA (1)...(19): siRNA sense strand
gaugcucaacagauguaua

SEQ ID NO: 1496798 - RNA, 19 nt, Homo sapiens
  misc_RNA (1)...(19): siRNA sense strand
caaccuacagcucaugauc

SEQ ID NO: 1496799 - RNA, 19 nt, Homo sapiens
  misc_RNA (1)...(19): siRNA sense strand
cagguggaaagaugguuua

SEQ ID NO: 1496800 - RNA, 19 nt, Homo sapiens
  misc_RNA (1)...(19): siRNA sense strand
ggaagcuugcuggagauuu

SEQ ID NO: 1496801 - RNA, 19 nt, Homo sapiens
  misc_RNA (1)...(19): siRNA sense strand
gugggacccucgugaugau

SEQ ID NO: 1496802 - RNA, 19 nt, Homo sapiens
  misc_RNA (1)...(19): siRNA sense strand
agaggaagaggaagaggaa

SEQ ID NO: 1496803 - RNA, 19 nt, Homo sapiens
  misc_RNA (1)...(19): siRNA sense strand
ggacguuuaaagaaugguu

SEQ ID NO: 1496804 - RNA, 19 nt, Homo sapiens
  misc_RNA (1)...(19): siRNA sense strand
gcagugggacccucgugau

SEQ ID NO: 1496805 - RNA, 19 nt, Homo sapiens
  misc_RNA (1)...(19): siRNA sense strand
aaagagacaguucgaaagg

SEQ ID NO: 1496806 - RNA, 19 nt, Homo sapiens
  misc_RNA (1)...(19): siRNA sense strand
cagcugaaaucucgaaaua

SEQ ID NO: 1496807 - RNA, 19 nt, Homo sapiens
  misc_RNA (1)...(19): siRNA sense strand
gaagcaauguugaagaaau

SEQ ID NO: 1496808 - RNA, 19 nt, Homo sapiens
  misc_RNA (1)...(19): siRNA sense strand
cgaaauaccucacccuuag

SEQ ID NO: 1496809 - RNA, 19 nt, Homo sapiens
  misc_RNA (1)...(19): siRNA sense strand
guccuuaucuuugcaaaua

SEQ ID NO: 1496810 - RNA, 19 nt, Homo sapiens
  misc_RNA (1)...(19): siRNA sense strand
gcaaauaaacaggauauga

SEQ ID NO: 1496811 - RNA, 19 nt, Homo sapiens
  misc_RNA (1)...(19): siRNA sense strand
gaucauccauggcacauuc

SEQ ID NO: 1496812 - RNA, 19 nt, Homo sapiens
  misc_RNA (1)...(19): siRNA sense strand
uaaccaagaacacaaagua

SEQ ID NO: 1496813 - RNA, 19 nt, Homo sapiens
  misc_RNA (1)...(19): siRNA sense strand
gauaugaaaggguguauga

SEQ ID NO: 1496814 - RNA, 19 nt, Homo sapiens
  misc_RNA (1)...(19): siRNA sense strand
ccaagaacacaaaguaauu

SEQ ID NO: 1496815 - RNA, 19 nt, Homo sapiens
  misc_RNA (1)...(19): siRNA sense strand
gaacgacuagcuauuacaa

SEQ ID NO: 1496816 - RNA, 19 nt, Homo sapiens
  misc_RNA (1)...(19): siRNA sense strand
gaagaaauaguugugaaga

SEQ ID NO: 1496817 - RNA, 19 nt, Homo sapiens
  misc_RNA (1)...(19): siRNA sense strand
ccaccauucuuuaccaauu

SEQ ID NO: 1496818 - RNA, 19 nt, Homo sapiens
  misc_RNA (1)...(19): siRNA sense strand
ggaaaaccaccauucuuua

SEQ ID NO: 1496819 - RNA, 19 nt, Homo sapiens
  misc_RNA (1)...(19): siRNA sense strand
uggaugaccucccggauug

SEQ ID NO: 1496820 - RNA, 19 nt, Homo sapiens
  misc_RNA (1)...(19): siRNA sense strand
cauccuggaacacauauua

SEQ ID NO: 1496821 - RNA, 19 nt, Homo sapiens
  misc_RNA (1)...(19): siRNA sense strand
gaucauccuggaacacaua

SEQ ID NO: 1496822 - RNA, 19 nt, Homo sapiens
  misc_RNA (1)...(19): siRNA sense strand
guucaucauucuuguuguu

SEQ ID NO: 1496823 - RNA, 19 nt, Homo sapiens
  misc_RNA (1)...(19): siRNA sense strand
uguggagccucuucuguaa

SEQ ID NO: 1496824 - RNA, 19 nt, Homo sapiens
  misc_RNA (1)...(19): siRNA sense strand
aggaagcaauguugaagaa

SEQ ID NO: 1496825 - RNA, 19 nt, Homo sapiens
  misc_RNA (1)...(19): siRNA sense strand
auacagaguucaucauucu

SEQ ID NO: 1496826 - RNA, 19 nt, Homo sapiens
  misc_RNA (1)...(19): siRNA sense strand
ucauacuucuccaaccaua

SEQ ID NO: 1496827 - RNA, 19 nt, Homo sapiens
  misc_RNA (1)...(19): siRNA sense strand
cuuaaugaaugaagugguu

SEQ ID NO: 1496828 - RNA, 19 nt, Homo sapiens
  misc_RNA (1)...(19): siRNA sense strand
gcugaaaucucgaaauacc

SEQ ID NO: 1496829 - RNA, 19 nt, Homo sapiens
  misc_RNA (1)...(19): siRNA sense strand
gaaauaguugugaagaaca

SEQ ID NO: 1496830 - RNA, 19 nt, Homo sapiens
  misc_RNA (1)...(19): siRNA sense strand
gaacacucauuuucuuaug

SEQ ID NO: 1496831 - RNA, 19 nt, Homo sapiens
  misc_RNA (1)...(19): siRNA sense strand
acagaauguuggcucauga

SEQ ID NO: 1496832 - RNA, 19 nt, Homo sapiens
  misc_RNA (1)...(19): siRNA sense strand
gggaacgacuagcuauuac

SEQ ID NO: 1496833 - RNA, 19 nt, Homo sapiens
  misc_RNA (1)...(19): siRNA sense strand
gggaaaaccaccauucuuu

SEQ ID NO: 1496834 - RNA, 19 nt, Homo sapiens
  misc_RNA (1)...(19): siRNA sense strand
ucgaaauaccucacccuua

SEQ ID NO: 1496835 - RNA, 19 nt, Homo sapiens
  misc_RNA (1)...(19): siRNA sense strand
ggaacacauauuacucaaa

SEQ ID NO: 1496836 - RNA, 19 nt, Homo sapiens
  misc_RNA (1)...(19): siRNA sense strand
guucauacuucuccaacca

SEQ ID NO: 1496837 - RNA, 19 nt, Homo sapiens
  misc_RNA (1)...(19): siRNA sense strand
gccaaggucuagaguggau

SEQ ID NO: 1496838 - RNA, 19 nt, Homo sapiens
  misc_RNA (1)...(19): siRNA sense strand
gaguucaucauucuuguug

SEQ ID NO: 1496839 - RNA, 19 nt, Homo sapiens
  misc_RNA (1)...(19): siRNA sense strand
agaaauaguugugaagaac

SEQ ID NO: 1496840 - RNA, 19 nt, Homo sapiens
  misc_RNA (1)...(19): siRNA sense strand
uuucuuaugugggauauug

SEQ ID NO: 1496841 - RNA, 19 nt, Homo sapiens
  misc_RNA (1)...(19): siRNA sense strand
aauguuggcucaugaggau

SEQ ID NO: 1496842 - RNA, 19 nt, Homo sapiens
  misc_RNA (1)...(19): siRNA sense strand
ucaaauacagaguucauca

SEQ ID NO: 1496843 - RNA, 19 nt, Homo sapiens
  misc_RNA (1)...(19): siRNA sense strand
gggcugaucuucgccaaac

SEQ ID NO: 1496844 - RNA, 19 nt, Homo sapiens
  misc_RNA (1)...(19): siRNA sense strand
caccauucuuuaccaauuc

SEQ ID NO: 1496845 - RNA, 19 nt, Homo sapiens
  misc_RNA (1)...(19): siRNA sense strand
ccggauuggugugagauaa

SEQ ID NO: 1496846 - RNA, 19 nt, Homo sapiens
  misc_RNA (1)...(19): siRNA sense strand
ggaagcaauguugaagaaa

SEQ ID NO: 1496847 - RNA, 19 nt, Homo sapiens
  misc_RNA (1)...(19): siRNA sense strand
agggaacgacuagcuauua

SEQ ID NO: 1496848 - RNA, 19 nt, Homo sapiens
  misc_RNA (1)...(19): siRNA sense strand
ucaggagucucugcgauca

SEQ ID NO: 1496849 - RNA, 19 nt, Homo sapiens
  misc_RNA (1)...(19): siRNA sense strand
cauaggaagcaauguugaa

SEQ ID NO: 1496850 - RNA, 19 nt, Homo sapiens
  misc_RNA (1)...(19): siRNA sense strand
gaaauaccucacccuuagu

SEQ ID NO: 1496851 - RNA, 19 nt, Homo sapiens
  misc_RNA (1)...(19): siRNA sense strand
gacagggaacgacuagcua

SEQ ID NO: 1496852 - RNA, 19 nt, Homo sapiens
  misc_RNA (1)...(19): siRNA sense strand
aauacagaguucaucauuc

SEQ ID NO: 1496853 - RNA, 19 nt, Homo sapiens
  misc_RNA (1)...(19): siRNA sense strand
aaaccaccauucuuuacca

SEQ ID NO: 1496854 - RNA, 19 nt, Homo sapiens
  misc_RNA (1)...(19): siRNA sense strand
cagaguucaucauucuugu

SEQ ID NO: 1496855 - RNA, 19 nt, Homo sapiens
  misc_RNA (1)...(19): siRNA sense strand
ucaucauucuuguuguuga

SEQ ID NO: 1496856 - RNA, 19 nt, Homo sapiens
  misc_RNA (1)...(19): siRNA sense strand
uaugaaaggguguaugaca

SEQ ID NO: 1496857 - RNA, 19 nt, Homo sapiens
  misc_RNA (1)...(19): siRNA sense strand
ggaacgacuagcuauuaca

SEQ ID NO: 1496858 - RNA, 19 nt, Homo sapiens
  misc_RNA (1)...(19): siRNA sense strand
guggaugaccucccggauu

SEQ ID NO: 1496859 - RNA, 19 nt, Homo sapiens
  misc_RNA (1)...(19): siRNA sense strand
uacagaauguuggcucaug

SEQ ID NO: 1496860 - RNA, 19 nt, Homo sapiens
  misc_RNA (1)...(19): siRNA sense strand
caaauacagaguucaucau

SEQ ID NO: 1496861 - RNA, 19 nt, Homo sapiens
  misc_RNA (1)...(19): siRNA sense strand
caaggucuagaguggauga

SEQ ID NO: 1496862 - RNA, 19 nt, Homo sapiens
  misc_RNA (1)...(19): siRNA sense strand
gcugcaguccuuaucuuug

SEQ ID NO: 1496863 - RNA, 19 nt, Homo sapiens
  misc_RNA (1)...(19): siRNA sense strand
gacuagcuauuacaaaaga

SEQ ID NO: 1496864 - RNA, 19 nt, Homo sapiens
  misc_RNA (1)...(19): siRNA sense strand
acagaguucaucauucuug

SEQ ID NO: 1496865 - RNA, 19 nt, Homo sapiens
  misc_RNA (1)...(19): siRNA sense strand
aaauaccucacccuuaguu

SEQ ID NO: 1496866 - RNA, 19 nt, Homo sapiens
  misc_RNA (1)...(19): siRNA sense strand
ccucacccuuaguucaauu

SEQ ID NO: 1496867 - RNA, 19 nt, Homo sapiens
  misc_RNA (1)...(19): siRNA sense strand
uggaacacauauuacucaa

SEQ ID NO: 1496868 - RNA, 19 nt, Homo sapiens
  misc_RNA (1)...(19): siRNA sense strand
aaccaagaacacaaaguaa

SEQ ID NO: 1496869 - RNA, 19 nt, Homo sapiens
  misc_RNA (1)...(19): siRNA sense strand
gaaaaccaccauucuuuac

SEQ ID NO: 1496870 - RNA, 19 nt, Homo sapiens
  misc_RNA (1)...(19): siRNA sense strand
gcagcugaaaucucgaaau

SEQ ID NO: 1496871 - RNA, 19 nt, Homo sapiens
  misc_RNA (1)...(19): siRNA sense strand
guuggcucaugaggauuua

SEQ ID NO: 1496872 - RNA, 19 nt, Homo sapiens
  misc_RNA (1)...(19): siRNA sense strand
ccauaggaagcaauguuga

SEQ ID NO: 1496873 - RNA, 19 nt, Homo sapiens
  misc_RNA (1)...(19): siRNA sense strand
uagugggacuggauaaugc

SEQ ID NO: 1496874 - RNA, 19 nt, Homo sapiens
  misc_RNA (1)...(19): siRNA sense strand
ugaagaaauaguugugaag

SEQ ID NO: 1496875 - RNA, 19 nt, Homo sapiens
  misc_RNA (1)...(19): siRNA sense strand
cuguggagccucuucugua

SEQ ID NO: 1496876 - RNA, 19 nt, Homo sapiens
  misc_RNA (1)...(19): siRNA sense strand
acgacuagcuauuacaaaa

SEQ ID NO: 1496877 - RNA, 19 nt, Homo sapiens
  misc_RNA (1)...(19): siRNA sense strand
gcgaucauccuggaacaca

SEQ ID NO: 1496878 - RNA, 19 nt, Homo sapiens
  misc_RNA (1)...(19): siRNA sense strand
auaaacaggauaugaaagg

SEQ ID NO: 1496879 - RNA, 19 nt, Homo sapiens
  misc_RNA (1)...(19): siRNA sense strand
gcaaauacgugaagcugaa

SEQ ID NO: 1496880 - RNA, 19 nt, Homo sapiens
  misc_RNA (1)...(19): siRNA sense strand
gagguugggugcugauuga

SEQ ID NO: 1496881 - RNA, 19 nt, Homo sapiens
  misc_RNA (1)...(19): siRNA sense strand
gaugacaaccuacuuaaga

SEQ ID NO: 1496882 - RNA, 19 nt, Homo sapiens
  misc_RNA (1)...(19): siRNA sense strand
gaacagcaaauacgugaag

SEQ ID NO: 1496883 - RNA, 19 nt, Homo sapiens
  misc_RNA (1)...(19): siRNA sense strand
ucagaugacaaccuacuua

SEQ ID NO: 1496884 - RNA, 19 nt, Homo sapiens
  misc_RNA (1)...(19): siRNA sense strand
uugguacaauccucaauua

SEQ ID NO: 1496885 - RNA, 19 nt, Homo sapiens
  misc_RNA (1)...(19): siRNA sense strand
ccucauggccaacaaauug

SEQ ID NO: 1496886 - RNA, 19 nt, Homo sapiens
  misc_RNA (1)...(19): siRNA sense strand
gcaccuccauugucuaugc

SEQ ID NO: 1496887 - RNA, 19 nt, Homo sapiens
  misc_RNA (1)...(19): siRNA sense strand
guacaauccucaauuaccu

SEQ ID NO: 1496888 - RNA, 19 nt, Homo sapiens
  misc_RNA (1)...(19): siRNA sense strand
guaacaacaaguacuccua

SEQ ID NO: 1496889 - RNA, 19 nt, Homo sapiens
  misc_RNA (1)...(19): siRNA sense strand
cagaugacaaccuacuuaa

SEQ ID NO: 1496890 - RNA, 19 nt, Homo sapiens
  misc_RNA (1)...(19): siRNA sense strand
gcagaccaagguggaauuu

SEQ ID NO: 1496891 - RNA, 19 nt, Homo sapiens
  misc_RNA (1)...(19): siRNA sense strand
ggccgucacuuugguacaa

SEQ ID NO: 1496892 - RNA, 19 nt, Homo sapiens
  misc_RNA (1)...(19): siRNA sense strand
gggcgaagcacgcuacuac

SEQ ID NO: 1496893 - RNA, 19 nt, Homo sapiens
  misc_RNA (1)...(19): siRNA sense strand
agaagaagcagaccaaggu

SEQ ID NO: 1496894 - RNA, 19 nt, Homo sapiens
  misc_RNA (1)...(19): siRNA sense strand
ugaacauccucaucuacga

SEQ ID NO: 1496895 - RNA, 19 nt, Homo sapiens
  misc_RNA (1)...(19): siRNA sense strand
ggagguugggugcugauug

SEQ ID NO: 1496896 - RNA, 19 nt, Homo sapiens
  misc_RNA (1)...(19): siRNA sense strand
cacuucagaugacaaccua

SEQ ID NO: 1496897 - RNA, 19 nt, Homo sapiens
  misc_RNA (1)...(19): siRNA sense strand
caaccgcaguaacaacaag

SEQ ID NO: 1496898 - RNA, 19 nt, Homo sapiens
  misc_RNA (1)...(19): siRNA sense strand
uggugaagcuccugcacaa

SEQ ID NO: 1496899 - RNA, 19 nt, Homo sapiens
  misc_RNA (1)...(19): siRNA sense strand
augacaaccuacuuaagaa

SEQ ID NO: 1496900 - RNA, 19 nt, Homo sapiens
  misc_RNA (1)...(19): siRNA sense strand
gcacaaccgcaguaacaac

SEQ ID NO: 1496901 - RNA, 19 nt, Homo sapiens
  misc_RNA (1)...(19): siRNA sense strand
caaccuacuuaagaacauc

SEQ ID NO: 1496902 - RNA, 19 nt, Homo sapiens
  misc_RNA (1)...(19): siRNA sense strand
caccagcacuucagaugac

SEQ ID NO: 1496903 - RNA, 19 nt, Homo sapiens
  misc_RNA (1)...(19): siRNA sense strand
gacaaccuacuuaagaaca

SEQ ID NO: 1496904 - RNA, 19 nt, Homo sapiens
  misc_RNA (1)...(19): siRNA sense strand
gaagcagaccaagguggaa

SEQ ID NO: 1496905 - RNA, 19 nt, Homo sapiens
  misc_RNA (1)...(19): siRNA sense strand
gacaggacaccaugcucaa

SEQ ID NO: 1496906 - RNA, 19 nt, Homo sapiens
  misc_RNA (1)...(19): siRNA sense strand
gagaucuguugcuggucuu

SEQ ID NO: 1496907 - RNA, 19 nt, Homo sapiens
  misc_RNA (1)...(19): siRNA sense strand
ccuccaagcccguggugaa

SEQ ID NO: 1496908 - RNA, 19 nt, Homo sapiens
  misc_RNA (1)...(19): siRNA sense strand
ggagaguacgagagaacug

SEQ ID NO: 1496909 - RNA, 19 nt, Homo sapiens
  misc_RNA (1)...(19): siRNA sense strand
cccugaacauccucaucua

SEQ ID NO: 1496910 - RNA, 19 nt, Homo sapiens
  misc_RNA (1)...(19): siRNA sense strand
acaccagcacuucagauga

SEQ ID NO: 1496911 - RNA, 19 nt, Homo sapiens
  misc_RNA (1)...(19): siRNA sense strand
ucuaugcuacggagaagaa

SEQ ID NO: 1496912 - RNA, 19 nt, Homo sapiens
  misc_RNA (1)...(19): siRNA sense strand
acaaccuacuuaagaacau

SEQ ID NO: 1496913 - RNA, 19 nt, Homo sapiens
  misc_RNA (1)...(19): siRNA sense strand
cggagaagaagcagaccaa

SEQ ID NO: 1496914 - RNA, 19 nt, Homo sapiens
  misc_RNA (1)...(19): siRNA sense strand
caccacaccucaaauauau

SEQ ID NO: 1496915 - RNA, 19 nt, Homo sapiens
  misc_RNA (1)...(19): siRNA sense strand
auacacaacugaaaggaaa

SEQ ID NO: 1496916 - RNA, 19 nt, Homo sapiens
  misc_RNA (1)...(19): siRNA sense strand
gcagauggagauucagaaa

SEQ ID NO: 1496917 - RNA, 19 nt, Homo sapiens
  misc_RNA (1)...(19): siRNA sense strand
acacaccacaccucaaaua

SEQ ID NO: 1496918 - RNA, 19 nt, Homo sapiens
  misc_RNA (1)...(19): siRNA sense strand
agauggagauucagaaaca

SEQ ID NO: 1496919 - RNA, 19 nt, Homo sapiens
  misc_RNA (1)...(19): siRNA sense strand
acaccacaccucaaauaua

SEQ ID NO: 1496920 - RNA, 19 nt, Homo sapiens
  misc_RNA (1)...(19): siRNA sense strand
caagguaucauuauagucu

SEQ ID NO: 1496921 - RNA, 19 nt, Homo sapiens
  misc_RNA (1)...(19): siRNA sense strand
aaacauaaggacaacaaga

SEQ ID NO: 1496922 - RNA, 19 nt, Homo sapiens
  misc_RNA (1)...(19): siRNA sense strand
acacacaccacaccucaaa

SEQ ID NO: 1496923 - RNA, 19 nt, Homo sapiens
  misc_RNA (1)...(19): siRNA sense strand
agaacccuauuccgaguaa

SEQ ID NO: 1496924 - RNA, 19 nt, Homo sapiens
  misc_RNA (1)...(19): siRNA sense strand
ccucaaauauauacacaac

SEQ ID NO: 1496925 - RNA, 19 nt, Homo sapiens
  misc_RNA (1)...(19): siRNA sense strand
gccggcagauggagauuca

SEQ ID NO: 1496926 - RNA, 19 nt, Homo sapiens
  misc_RNA (1)...(19): siRNA sense strand
agaaacauaaggacaacaa

SEQ ID NO: 1496927 - RNA, 19 nt, Homo sapiens
  misc_RNA (1)...(19): siRNA sense strand
cccaagguaucauuauagu

SEQ ID NO: 1496928 - RNA, 19 nt, Homo sapiens
  misc_RNA (1)...(19): siRNA sense strand
aacauaaggacaacaagaa

SEQ ID NO: 1496929 - RNA, 19 nt, Homo sapiens
  misc_RNA (1)...(19): siRNA sense strand
acauaaggacaacaagaaa

SEQ ID NO: 1496930 - RNA, 19 nt, Homo sapiens
  misc_RNA (1)...(19): siRNA sense strand
ccacaccucaaauauauac

SEQ ID NO: 1496931 - RNA, 19 nt, Homo sapiens
  misc_RNA (1)...(19): siRNA sense strand
caccucaaauauauacaca

SEQ ID NO: 1496932 - RNA, 19 nt, Homo sapiens
  misc_RNA (1)...(19): siRNA sense strand
gaaacauaaggacaacaag

SEQ ID NO: 1496933 - RNA, 19 nt, Homo sapiens
  misc_RNA (1)...(19): siRNA sense strand
caagaaacuuccccaaggu

SEQ ID NO: 1496934 - RNA, 19 nt, Homo sapiens
  misc_RNA (1)...(19): siRNA sense strand
uggagauucagaaacauaa

SEQ ID NO: 1496935 - RNA, 19 nt, Homo sapiens
  misc_RNA (1)...(19): siRNA sense strand
gauggagauucagaaacau

SEQ ID NO: 1496936 - RNA, 19 nt, Homo sapiens
  misc_RNA (1)...(19): siRNA sense strand
ucagaaacauaaggacaac

SEQ ID NO: 1496937 - RNA, 19 nt, Homo sapiens
  misc_RNA (1)...(19): siRNA sense strand
ucuuuagacuucagacaca

SEQ ID NO: 1496938 - RNA, 19 nt, Homo sapiens
  misc_RNA (1)...(19): siRNA sense strand
uauacacaacugaaaggaa

SEQ ID NO: 1496939 - RNA, 19 nt, Homo sapiens
  misc_RNA (1)...(19): siRNA sense strand
cuacaaagcuuucucaaac

SEQ ID NO: 1496940 - RNA, 19 nt, Homo sapiens
  misc_RNA (1)...(19): siRNA sense strand
gaacggcaggcucuugauu

SEQ ID NO: 1496941 - RNA, 19 nt, Homo sapiens
  misc_RNA (1)...(19): siRNA sense strand
ccaacgggcugcagaaugg

SEQ ID NO: 1496942 - RNA, 19 nt, Homo sapiens
  misc_RNA (1)...(19): siRNA sense strand
gcucuugauuucaucuuug

SEQ ID NO: 1496943 - RNA, 19 nt, Homo sapiens
  misc_RNA (1)...(19): siRNA sense strand
ggaccuguauugggaacaa

SEQ ID NO: 1496944 - RNA, 19 nt, Homo sapiens
  misc_RNA (1)...(19): siRNA sense strand
gggagugguucaccuuuua

SEQ ID NO: 1496945 - RNA, 19 nt, Homo sapiens
  misc_RNA (1)...(19): siRNA sense strand
acaaagcuuucucaaacug

SEQ ID NO: 1496946 - RNA, 19 nt, Homo sapiens
  misc_RNA (1)...(19): siRNA sense strand
ggaagugcccacggacgua

SEQ ID NO: 1496947 - RNA, 19 nt, Homo sapiens
  misc_RNA (1)...(19): siRNA sense strand
accagaagcuguaccacaa

SEQ ID NO: 1496948 - RNA, 19 nt, Homo sapiens
  misc_RNA (1)...(19): siRNA sense strand
ccgcaaggauggaaaauga

SEQ ID NO: 1496949 - RNA, 19 nt, Homo sapiens
  misc_RNA (1)...(19): siRNA sense strand
ccaccgcugucaucacugu

SEQ ID NO: 1496950 - RNA, 19 nt, Homo sapiens
  misc_RNA (1)...(19): siRNA sense strand
ggcgcugccuucucuuuga

SEQ ID NO: 1496951 - RNA, 19 nt, Homo sapiens
  misc_RNA (1)...(19): siRNA sense strand
gcagaauggcuacguguac

SEQ ID NO: 1496952 - RNA, 19 nt, Homo sapiens
  misc_RNA (1)...(19): siRNA sense strand
ggcaggcucuugauuucau

SEQ ID NO: 1496953 - RNA, 19 nt, Homo sapiens
  misc_RNA (1)...(19): siRNA sense strand
cccaggaacuguaggaagu

SEQ ID NO: 1496954 - RNA, 19 nt, Homo sapiens
  misc_RNA (1)...(19): siRNA sense strand
gaccauccugugugaguuu

SEQ ID NO: 1496955 - RNA, 19 nt, Homo sapiens
  misc_RNA (1)...(19): siRNA sense strand
gagacccucuacaaagcuu

SEQ ID NO: 1496956 - RNA, 19 nt, Homo sapiens
  misc_RNA (1)...(19): siRNA sense strand
gauaacggagcacuaugga

SEQ ID NO: 1496957 - RNA, 19 nt, Homo sapiens
  misc_RNA (1)...(19): siRNA sense strand
accacaaccugcaggagua

SEQ ID NO: 1496958 - RNA, 19 nt, Homo sapiens
  misc_RNA (1)...(19): siRNA sense strand
gcugccuucucuuugauga

SEQ ID NO: 1496959 - RNA, 19 nt, Homo sapiens
  misc_RNA (1)...(19): siRNA sense strand
gggacgcacagaaacauga

SEQ ID NO: 1496960 - RNA, 19 nt, Homo sapiens
  misc_RNA (1)...(19): siRNA sense strand
ggcucuugauuucaucuuu

SEQ ID NO: 1496961 - RNA, 19 nt, Homo sapiens
  misc_RNA (1)...(19): siRNA sense strand
gcgcugccuucucuuugau

SEQ ID NO: 1496962 - RNA, 19 nt, Homo sapiens
  misc_RNA (1)...(19): siRNA sense strand
caccaccgcugucaucacu

SEQ ID NO: 1496963 - RNA, 19 nt, Homo sapiens
  misc_RNA (1)...(19): siRNA sense strand
ucuacaaagcuuucucaaa

SEQ ID NO: 1496964 - RNA, 19 nt, Homo sapiens
  misc_RNA (1)...(19): siRNA sense strand
ugaugacucuuuccugcau

SEQ ID NO: 1496965 - RNA, 19 nt, Homo sapiens
  misc_RNA (1)...(19): siRNA sense strand
ucucuuugaugacucuuuc

SEQ ID NO: 1496966 - RNA, 19 nt, Homo sapiens
  misc_RNA (1)...(19): siRNA sense strand
uccagaccauccuguguga

SEQ ID NO: 1496967 - RNA, 19 nt, Homo sapiens
  misc_RNA (1)...(19): siRNA sense strand
ggaacgcgugcaucucugu

SEQ ID NO: 1496968 - RNA, 19 nt, Homo sapiens
  misc_RNA (1)...(19): siRNA sense strand
gcaggcucuugauuucauc

SEQ ID NO: 1496969 - RNA, 19 nt, Homo sapiens
  misc_RNA (1)...(19): siRNA sense strand
cagaauggcuacguguacu

SEQ ID NO: 1496970 - RNA, 19 nt, Homo sapiens
  misc_RNA (1)...(19): siRNA sense strand
uacaaagcuuucucaaacu

SEQ ID NO: 1496971 - RNA, 19 nt, Homo sapiens
  misc_RNA (1)...(19): siRNA sense strand
ggacgcacagaaacaugau

SEQ ID NO: 1496972 - RNA, 19 nt, Homo sapiens
  misc_RNA (1)...(19): siRNA sense strand
acggcaggcucuugauuuc

SEQ ID NO: 1496973 - RNA, 19 nt, Homo sapiens
  misc_RNA (1)...(19): siRNA sense strand
gggcgcugccuucucuuug

SEQ ID NO: 1496974 - RNA, 19 nt, Homo sapiens
  misc_RNA (1)...(19): siRNA sense strand
ggggagugguucaccuuuu

SEQ ID NO: 1496975 - RNA, 19 nt, Homo sapiens
  misc_RNA (1)...(19): siRNA sense strand
gccaacgggcugcagaaug

SEQ ID NO: 1496976 - RNA, 19 nt, Homo sapiens
  misc_RNA (1)...(19): siRNA sense strand
ggcccuacgucuccgucaa

SEQ ID NO: 1496977 - RNA, 19 nt, Homo sapiens
  misc_RNA (1)...(19): siRNA sense strand
ccaccacgcccuauuucuc

SEQ ID NO: 1496978 - RNA, 19 nt, Homo sapiens
  misc_RNA (1)...(19): siRNA sense strand
ccgaacggcaggcucuuga

SEQ ID NO: 1496979 - RNA, 19 nt, Homo sapiens
  misc_RNA (1)...(19): siRNA sense strand
ggaagaagaugacgacuuu

SEQ ID NO: 1496980 - RNA, 19 nt, Homo sapiens
  misc_RNA (1)...(19): siRNA sense strand
gaacaugacuucacagaug

SEQ ID NO: 1496981 - RNA, 19 nt, Homo sapiens
  misc_RNA (1)...(19): siRNA sense strand
ggacagcacugacucauau

SEQ ID NO: 1496982 - RNA, 19 nt, Homo sapiens
  misc_RNA (1)...(19): siRNA sense strand
ccaaagaacucaagaacaa

SEQ ID NO: 1496983 - RNA, 19 nt, Homo sapiens
  misc_RNA (1)...(19): siRNA sense strand
gaggagaucuucaauaugu

SEQ ID NO: 1496984 - RNA, 19 nt, Homo sapiens
  misc_RNA (1)...(19): siRNA sense strand
ggaaagcugugauuaccua

SEQ ID NO: 1496985 - RNA, 19 nt, Homo sapiens
  misc_RNA (1)...(19): siRNA sense strand
ccagagaccuucuacauug

SEQ ID NO: 1496986 - RNA, 19 nt, Homo sapiens
  misc_RNA (1)...(19): siRNA sense strand
aaagaaggcucaagacauu

SEQ ID NO: 1496987 - RNA, 19 nt, Homo sapiens
  misc_RNA (1)...(19): siRNA sense strand
gaaccuagaugaucaggau

SEQ ID NO: 1496988 - RNA, 19 nt, Homo sapiens
  misc_RNA (1)...(19): siRNA sense strand
cagaggagaucuucaauau

SEQ ID NO: 1496989 - RNA, 19 nt, Homo sapiens
  misc_RNA (1)...(19): siRNA sense strand
ugaaagaccuggaccuuga

SEQ ID NO: 1496990 - RNA, 19 nt, Homo sapiens
  misc_RNA (1)...(19): siRNA sense strand
gucgaaagcucuacaauug

SEQ ID NO: 1496991 - RNA, 19 nt, Homo sapiens
  misc_RNA (1)...(19): siRNA sense strand
gcacacccauccuuccaua

SEQ ID NO: 1496992 - RNA, 19 nt, Homo sapiens
  misc_RNA (1)...(19): siRNA sense strand
gcacaucaaugaccuaugg

SEQ ID NO: 1496993 - RNA, 19 nt, Homo sapiens
  misc_RNA (1)...(19): siRNA sense strand
gcaacgaccagacauauuu

SEQ ID NO: 1496994 - RNA, 19 nt, Homo sapiens
  misc_RNA (1)...(19): siRNA sense strand
gcucaaggauguccaauca

SEQ ID NO: 1496995 - RNA, 19 nt, Homo sapiens
  misc_RNA (1)...(19): siRNA sense strand
ggaccagggugaugugauu

SEQ ID NO: 1496996 - RNA, 19 nt, Homo sapiens
  misc_RNA (1)...(19): siRNA sense strand
gagcaucuuugaaauguau

SEQ ID NO: 1496997 - RNA, 19 nt, Homo sapiens
  misc_RNA (1)...(19): siRNA sense strand
ccaaagacaccuacuauga

SEQ ID NO: 1496998 - RNA, 19 nt, Homo sapiens
  misc_RNA (1)...(19): siRNA sense strand
uaagaagccucauguagug

SEQ ID NO: 1496999 - RNA, 19 nt, Homo sapiens
  misc_RNA (1)...(19): siRNA sense strand
gcaaguuccuacugggaua

SEQ ID NO: 1497000 - RNA, 19 nt, Homo sapiens
  misc_RNA (1)...(19): siRNA sense strand
gaugcaggcuuaucaguau

SEQ ID NO: 1497001 - RNA, 19 nt, Homo sapiens
  misc_RNA (1)...(19): siRNA sense strand
caagaaagguagaaaggau

SEQ ID NO: 1497002 - RNA, 19 nt, Homo sapiens
  misc_RNA (1)...(19): siRNA sense strand
gaacagggacgcccagaug

SEQ ID NO: 1497003 - RNA, 19 nt, Homo sapiens
  misc_RNA (1)...(19): siRNA sense strand
ucacagaucaggacaauga

SEQ ID NO: 1497004 - RNA, 19 nt, Homo sapiens
  misc_RNA (1)...(19): siRNA sense strand
ccacauacaucaagagagu

SEQ ID NO: 1497005 - RNA, 19 nt, Homo sapiens
  misc_RNA (1)...(19): siRNA sense strand
gcagggcuauggugacaaa

SEQ ID NO: 1497006 - RNA, 19 nt, Homo sapiens
  misc_RNA (1)...(19): siRNA sense strand
caagagagagccaaguuaa

SEQ ID NO: 1497007 - RNA, 19 nt, Homo sapiens
  misc_RNA (1)...(19): siRNA sense strand
ugaauggacuguuuagaug

SEQ ID NO: 1497008 - RNA, 19 nt, Homo sapiens
  misc_RNA (1)...(19): siRNA sense strand
ucaugaagauugacauuga

SEQ ID NO: 1497009 - RNA, 19 nt, Homo sapiens
  misc_RNA (1)...(19): siRNA sense strand
ggagaucuucaauauguua

SEQ ID NO: 1497010 - RNA, 19 nt, Homo sapiens
  misc_RNA (1)...(19): siRNA sense strand
gcaagaagcccaggaaauc

SEQ ID NO: 1497011 - RNA, 19 nt, Homo sapiens
  misc_RNA (1)...(19): siRNA sense strand
gaucaacagugaggaauuc

SEQ ID NO: 1497012 - RNA, 19 nt, Homo sapiens
  misc_RNA (1)...(19): siRNA sense strand
ccaagaaauuuguggaaga

SEQ ID NO: 1497013 - RNA, 19 nt, Homo sapiens
  misc_RNA (1)...(19): siRNA sense strand
ggguagagcugguugacaa

SEQ ID NO: 1497014 - RNA, 19 nt, Homo sapiens
  misc_RNA (1)...(19): siRNA sense strand
ugacaaaccucuugcugau

SEQ ID NO: 1497015 - RNA, 19 nt, Homo sapiens
  misc_RNA (1)...(19): siRNA sense strand
gaaagggcccagcacaauu

SEQ ID NO: 1497016 - RNA, 19 nt, Homo sapiens
  misc_RNA (1)...(19): siRNA sense strand
gaugaggagucagauauug

SEQ ID NO: 1497017 - RNA, 19 nt, Homo sapiens
  misc_RNA (1)...(19): siRNA sense strand
gagagagccaaguuaaaua

SEQ ID NO: 1497018 - RNA, 19 nt, Homo sapiens
  misc_RNA (1)...(19): siRNA sense strand
ccaagaagaccaccaagaa

SEQ ID NO: 1497019 - RNA, 19 nt, Homo sapiens
  misc_RNA (1)...(19): siRNA sense strand
caaugaguaugaugaagaa

SEQ ID NO: 1497020 - RNA, 19 nt, Homo sapiens
  misc_RNA (1)...(19): siRNA sense strand
gugaggaauucgaagauuu

SEQ ID NO: 1497021 - RNA, 19 nt, Homo sapiens
  misc_RNA (1)...(19): siRNA sense strand
ccaaagucuucaugaauug

SEQ ID NO: 1497022 - RNA, 19 nt, Homo sapiens
  misc_RNA (1)...(19): siRNA sense strand
ggacccaccuccugaagau

SEQ ID NO: 1497023 - RNA, 19 nt, Homo sapiens
  misc_RNA (1)...(19): siRNA sense strand
guagaaaggauguggauga

SEQ ID NO: 1497024 - RNA, 19 nt, Homo sapiens
  misc_RNA (1)...(19): siRNA sense strand
ugaagaugaugaacuagaa

SEQ ID NO: 1497025 - RNA, 19 nt, Homo sapiens
  misc_RNA (1)...(19): siRNA sense strand
caaugacgaugaugaugaa

SEQ ID NO: 1497026 - RNA, 19 nt, Homo sapiens
  misc_RNA (1)...(19): siRNA sense strand
aaagaugucuacaaccauu

SEQ ID NO: 1497027 - RNA, 19 nt, Homo sapiens
  misc_RNA (1)...(19): siRNA sense strand
uggaugagcugaaagaugu

SEQ ID NO: 1497028 - RNA, 19 nt, Homo sapiens
  misc_RNA (1)...(19): siRNA sense strand
ucaaggauguccaaucaau

SEQ ID NO: 1497029 - RNA, 19 nt, Homo sapiens
  misc_RNA (1)...(19): siRNA sense strand
ggaagaauacaaugaugaa

SEQ ID NO: 1497030 - RNA, 19 nt, Homo sapiens
  misc_RNA (1)...(19): siRNA sense strand
ggaggaagaguaugaguau

SEQ ID NO: 1497031 - RNA, 19 nt, Homo sapiens
  misc_RNA (1)...(19): siRNA sense strand
uugagaagaugcaggcuua

SEQ ID NO: 1497032 - RNA, 19 nt, Homo sapiens
  misc_RNA (1)...(19): siRNA sense strand
ggaagagggagaugaagaa

SEQ ID NO: 1497033 - RNA, 19 nt, Homo sapiens
  misc_RNA (1)...(19): siRNA sense strand
cccaaagucuucaugaauu

SEQ ID NO: 1497034 - RNA, 19 nt, Homo sapiens
  misc_RNA (1)...(19): siRNA sense strand
ggucaauggugaaggagaa

SEQ ID NO: 1497035 - RNA, 19 nt, Homo sapiens
  misc_RNA (1)...(19): siRNA sense strand
uuaaggaacugagagauga

SEQ ID NO: 1497036 - RNA, 19 nt, Homo sapiens
  misc_RNA (1)...(19): siRNA sense strand
gcugaaagaugucuacaac

SEQ ID NO: 1497037 - RNA, 19 nt, Homo sapiens
  misc_RNA (1)...(19): siRNA sense strand
ugaaugcccugccucagaa

SEQ ID NO: 1497038 - RNA, 19 nt, Homo sapiens
  misc_RNA (1)...(19): siRNA sense strand
gaauaagaagccucaugua

SEQ ID NO: 1497039 - RNA, 19 nt, Homo sapiens
  misc_RNA (1)...(19): siRNA sense strand
ugaaagaugucuacaacca

SEQ ID NO: 1497040 - RNA, 19 nt, Homo sapiens
  misc_RNA (1)...(19): siRNA sense strand
gcagccaccucacagauca

SEQ ID NO: 1497041 - RNA, 19 nt, Homo sapiens
  misc_RNA (1)...(19): siRNA sense strand
gaggaagaauacaaugaug

SEQ ID NO: 1497042 - RNA, 19 nt, Homo sapiens
  misc_RNA (1)...(19): siRNA sense strand
ccuauuccuucaaguauuu

SEQ ID NO: 1497043 - RNA, 19 nt, Homo sapiens
  misc_RNA (1)...(19): siRNA sense strand
gaagcugacuggaucuaca

SEQ ID NO: 1497044 - RNA, 19 nt, Homo sapiens
  misc_RNA (1)...(19): siRNA sense strand
ggcugaagaugaugaacua

SEQ ID NO: 1497045 - RNA, 19 nt, Homo sapiens
  misc_RNA (1)...(19): siRNA sense strand
ggaaagggcccagcacaau

SEQ ID NO: 1497046 - RNA, 19 nt, Homo sapiens
  misc_RNA (1)...(19): siRNA sense strand
gcagaacggcggaaacaga

SEQ ID NO: 1497047 - RNA, 19 nt, Homo sapiens
  misc_RNA (1)...(19): siRNA sense strand
ccaccuucaucccuuauuu

SEQ ID NO: 1497048 - RNA, 19 nt, Homo sapiens
  misc_RNA (1)...(19): siRNA sense strand
gagaaccaccugacaguga

SEQ ID NO: 1497049 - RNA, 19 nt, Homo sapiens
  misc_RNA (1)...(19): siRNA sense strand
aaacacggcuagacaaugg

SEQ ID NO: 1497050 - RNA, 19 nt, Homo sapiens
  misc_RNA (1)...(19): siRNA sense strand
gcacugacucauauauuga

SEQ ID NO: 1497051 - RNA, 19 nt, Homo sapiens
  misc_RNA (1)...(19): siRNA sense strand
ggacuuugacuaugaugaa

SEQ ID NO: 1497052 - RNA, 19 nt, Homo sapiens
  misc_RNA (1)...(19): siRNA sense strand
ccaccaaauuccucaguga

SEQ ID NO: 1497053 - RNA, 19 nt, Homo sapiens
  misc_RNA (1)...(19): siRNA sense strand
auaaaggccuguagucgaa

SEQ ID NO: 1497054 - RNA, 19 nt, Homo sapiens
  misc_RNA (1)...(19): siRNA sense strand
gaugaccaguuucucaaga

SEQ ID NO: 1497055 - RNA, 19 nt, Homo sapiens
  misc_RNA (1)...(19): siRNA sense strand
aggcaaaccuuccaagaga

SEQ ID NO: 1497056 - RNA, 19 nt, Homo sapiens
  misc_RNA (1)...(19): siRNA sense strand
guaggagcaucuuugaaau

SEQ ID NO: 1497057 - RNA, 19 nt, Homo sapiens
  misc_RNA (1)...(19): siRNA sense strand
guaaacccaggauagaaua

SEQ ID NO: 1497058 - RNA, 19 nt, Homo sapiens
  misc_RNA (1)...(19): siRNA sense strand
gaaagcucaucaucugcaa

SEQ ID NO: 1497059 - RNA, 19 nt, Homo sapiens
  misc_RNA (1)...(19): siRNA sense strand
acaaacacaucacacucua

SEQ ID NO: 1497060 - RNA, 19 nt, Homo sapiens
  misc_RNA (1)...(19): siRNA sense strand
ugaccaguuucucaagaua

SEQ ID NO: 1497061 - RNA, 19 nt, Homo sapiens
  misc_RNA (1)...(19): siRNA sense strand
caggagcccuugaagaaau

SEQ ID NO: 1497062 - RNA, 19 nt, Homo sapiens
  misc_RNA (1)...(19): siRNA sense strand
gcaggagcauguggugaaa

SEQ ID NO: 1497063 - RNA, 19 nt, Homo sapiens
  misc_RNA (1)...(19): siRNA sense strand
gaagaugacgacuuuaugg

SEQ ID NO: 1497064 - RNA, 19 nt, Homo sapiens
  misc_RNA (1)...(19): siRNA sense strand
ccaagagagagccaaguua

SEQ ID NO: 1497065 - RNA, 19 nt, Homo sapiens
  misc_RNA (1)...(19): siRNA sense strand
ggacaauuucccugaacua

SEQ ID NO: 1497066 - RNA, 19 nt, Homo sapiens
  misc_RNA (1)...(19): siRNA sense strand
ugaagauccugaagcagaa

SEQ ID NO: 1497067 - RNA, 19 nt, Homo sapiens
  misc_RNA (1)...(19): siRNA sense strand
cauccugugucucaaguuu

SEQ ID NO: 1497068 - RNA, 19 nt, Homo sapiens
  misc_RNA (1)...(19): siRNA sense strand
cgaaagcucuacaauuggu

SEQ ID NO: 1497069 - RNA, 19 nt, Homo sapiens
  misc_RNA (1)...(19): siRNA sense strand
cacccauccuuccauaaua

SEQ ID NO: 1497070 - RNA, 19 nt, Homo sapiens
  misc_RNA (1)...(19): siRNA sense strand
aguggaagcugcccaaaga

SEQ ID NO: 1497071 - RNA, 19 nt, Homo sapiens
  misc_RNA (1)...(19): siRNA sense strand
gcccagauguugauugaag

SEQ ID NO: 1497072 - RNA, 19 nt, Homo sapiens
  misc_RNA (1)...(19): siRNA sense strand
cguaggagcaucuuugaaa

SEQ ID NO: 1497073 - RNA, 19 nt, Homo sapiens
  misc_RNA (1)...(19): siRNA sense strand
agauugacauugagaaguu

SEQ ID NO: 1497074 - RNA, 19 nt, Homo sapiens
  misc_RNA (1)...(19): siRNA sense strand
aggcagaguuccgggauua

SEQ ID NO: 1497075 - RNA, 19 nt, Homo sapiens
  misc_RNA (1)...(19): siRNA sense strand
gaagucagaggcagaguuc

SEQ ID NO: 1497076 - RNA, 19 nt, Homo sapiens
  misc_RNA (1)...(19): siRNA sense strand
ugaagcgcauuguacauga

SEQ ID NO: 1497077 - RNA, 19 nt, Homo sapiens
  misc_RNA (1)...(19): siRNA sense strand
gcacgagacagagcaguuu

SEQ ID NO: 1497078 - RNA, 19 nt, Homo sapiens
  misc_RNA (1)...(19): siRNA sense strand
gaauuuaucaaccgaguca

SEQ ID NO: 1497079 - RNA, 19 nt, Homo sapiens
  misc_RNA (1)...(19): siRNA sense strand
uggaauaacuggacucuuu

SEQ ID NO: 1497080 - RNA, 19 nt, Homo sapiens
  misc_RNA (1)...(19): siRNA sense strand
gagaauggaucaucacugu

SEQ ID NO: 1497081 - RNA, 19 nt, Homo sapiens
  misc_RNA (1)...(19): siRNA sense strand
ggaauuauguaacaagugu

SEQ ID NO: 1497082 - RNA, 19 nt, Homo sapiens
  misc_RNA (1)...(19): siRNA sense strand
acacugaacuucuuacuug

SEQ ID NO: 1497083 - RNA, 19 nt, Homo sapiens
  misc_RNA (1)...(19): siRNA sense strand
gaucaucacuguccaugga

SEQ ID NO: 1497084 - RNA, 19 nt, Homo sapiens
  misc_RNA (1)...(19): siRNA sense strand
gaaagggaguucugggaau

SEQ ID NO: 1497085 - RNA, 19 nt, Homo sapiens
  misc_RNA (1)...(19): siRNA sense strand
gaaaagaugucaaacuguu

SEQ ID NO: 1497086 - RNA, 19 nt, Homo sapiens
  misc_RNA (1)...(19): siRNA sense strand
guccauggauuaacaauug

SEQ ID NO: 1497087 - RNA, 19 nt, Homo sapiens
  misc_RNA (1)...(19): siRNA sense strand
gauugucuuuguuugguua

SEQ ID NO: 1497088 - RNA, 19 nt, Homo sapiens
  misc_RNA (1)...(19): siRNA sense strand
gauaaucauuggcucuuuc

SEQ ID NO: 1497089 - RNA, 19 nt, Homo sapiens
  misc_RNA (1)...(19): siRNA sense strand
gaccaaagcguucccauca

SEQ ID NO: 1497090 - RNA, 19 nt, Homo sapiens
  misc_RNA (1)...(19): siRNA sense strand
agacaugaauuggccauaa

SEQ ID NO: 1497091 - RNA, 19 nt, Homo sapiens
  misc_RNA (1)...(19): siRNA sense strand
gacaugaauuggccauaau

SEQ ID NO: 1497092 - RNA, 19 nt, Homo sapiens
  misc_RNA (1)...(19): siRNA sense strand
guuggaagauccugugguu

SEQ ID NO: 1497093 - RNA, 19 nt, Homo sapiens
  misc_RNA (1)...(19): siRNA sense strand
gagacuagcagccuuuaug

SEQ ID NO: 1497094 - RNA, 19 nt, Homo sapiens
  misc_RNA (1)...(19): siRNA sense strand
ggauucacuuuguuguuga

SEQ ID NO: 1497095 - RNA, 19 nt, Homo sapiens
  misc_RNA (1)...(19): siRNA sense strand
caagaucccacauggagaa

SEQ ID NO: 1497096 - RNA, 19 nt, Homo sapiens
  misc_RNA (1)...(19): siRNA sense strand
aaagggaguucugggaauu

SEQ ID NO: 1497097 - RNA, 19 nt, Homo sapiens
  misc_RNA (1)...(19): siRNA sense strand
ugaauuggccauaaugaga

SEQ ID NO: 1497098 - RNA, 19 nt, Homo sapiens
  misc_RNA (1)...(19): siRNA sense strand
ucaaacuguugugaagaua

SEQ ID NO: 1497099 - RNA, 19 nt, Homo sapiens
  misc_RNA (1)...(19): siRNA sense strand
uaauuggcaucaucacaga

SEQ ID NO: 1497100 - RNA, 19 nt, Homo sapiens
  misc_RNA (1)...(19): siRNA sense strand
cgaguucccuaccacuuug

SEQ ID NO: 1497101 - RNA, 19 nt, Homo sapiens
  misc_RNA (1)...(19): siRNA sense strand
cauaacugauccaggaaga

SEQ ID NO: 1497102 - RNA, 19 nt, Homo sapiens
  misc_RNA (1)...(19): siRNA sense strand
uaugggcauuacuauguua

SEQ ID NO: 1497103 - RNA, 19 nt, Homo sapiens
  misc_RNA (1)...(19): siRNA sense strand
cggauucacuuuguuguug

SEQ ID NO: 1497104 - RNA, 19 nt, Homo sapiens
  misc_RNA (1)...(19): siRNA sense strand
gcacugauguuuucuuucu

SEQ ID NO: 1497105 - RNA, 19 nt, Homo sapiens
  misc_RNA (1)...(19): siRNA sense strand
ugaggagaauggaucauca

SEQ ID NO: 1497106 - RNA, 19 nt, Homo sapiens
  misc_RNA (1)...(19): siRNA sense strand
gcgaguucccuaccacuuu

SEQ ID NO: 1497107 - RNA, 19 nt, Homo sapiens
  misc_RNA (1)...(19): siRNA sense strand
caacuaauuggcaucauca

SEQ ID NO: 1497108 - RNA, 19 nt, Homo sapiens
  misc_RNA (1)...(19): siRNA sense strand
ggaguucugggaauuaugu

SEQ ID NO: 1497109 - RNA, 19 nt, Homo sapiens
  misc_RNA (1)...(19): siRNA sense strand
gucaaacuguugugaagau

SEQ ID NO: 1497110 - RNA, 19 nt, Homo sapiens
  misc_RNA (1)...(19): siRNA sense strand
ccaaagcguucccaucacu

SEQ ID NO: 1497111 - RNA, 19 nt, Homo sapiens
  misc_RNA (1)...(19): siRNA sense strand
ccucuuuccucacuaugaa

SEQ ID NO: 1497112 - RNA, 19 nt, Homo sapiens
  misc_RNA (1)...(19): siRNA sense strand
caucacuguccauggauua

SEQ ID NO: 1497113 - RNA, 19 nt, Homo sapiens
  misc_RNA (1)...(19): siRNA sense strand
caaguguaauuugaugaga

SEQ ID NO: 1497114 - RNA, 19 nt, Homo sapiens
  misc_RNA (1)...(19): siRNA sense strand
ucaacuaauuggcaucauc

SEQ ID NO: 1497115 - RNA, 19 nt, Homo sapiens
  misc_RNA (1)...(19): siRNA sense strand
gaucccacauggagaaagg

SEQ ID NO: 1497116 - RNA, 19 nt, Homo sapiens
  misc_RNA (1)...(19): siRNA sense strand
gaagauccugugguucauu

SEQ ID NO: 1497117 - RNA, 19 nt, Homo sapiens
  misc_RNA (1)...(19): siRNA sense strand
ggaagauccugugguucau

SEQ ID NO: 1497118 - RNA, 19 nt, Homo sapiens
  misc_RNA (1)...(19): siRNA sense strand
gcauuuccauauucugucu

SEQ ID NO: 1497119 - RNA, 19 nt, Homo sapiens
  misc_RNA (1)...(19): siRNA sense strand
uaauuuggaccucuuuguu

SEQ ID NO: 1497120 - RNA, 19 nt, Homo sapiens
  misc_RNA (1)...(19): siRNA sense strand
acaauuguguuggugaaga

SEQ ID NO: 1497121 - RNA, 19 nt, Homo sapiens
  misc_RNA (1)...(19): siRNA sense strand
caauuguguuggugaagau

SEQ ID NO: 1497122 - RNA, 19 nt, Homo sapiens
  misc_RNA (1)...(19): siRNA sense strand
caucaucacagauacaaca

SEQ ID NO: 1497123 - RNA, 19 nt, Homo sapiens
  misc_RNA (1)...(19): siRNA sense strand
cugaacuucuuacuugcua

SEQ ID NO: 1497124 - RNA, 19 nt, Homo sapiens
  misc_RNA (1)...(19): siRNA sense strand
gaugucaaacuguugugaa

SEQ ID NO: 1497125 - RNA, 19 nt, Homo sapiens
  misc_RNA (1)...(19): siRNA sense strand
gaauaacuggacucuuuua

SEQ ID NO: 1497126 - RNA, 19 nt, Homo sapiens
  misc_RNA (1)...(19): siRNA sense strand
gcauggguuugauugucuu

SEQ ID NO: 1497127 - RNA, 19 nt, Homo sapiens
  misc_RNA (1)...(19): siRNA sense strand
uggaagauccugugguuca

SEQ ID NO: 1497128 - RNA, 19 nt, Homo sapiens
  misc_RNA (1)...(19): siRNA sense strand
uuucuacacugaacuucuu

SEQ ID NO: 1497129 - RNA, 19 nt, Homo sapiens
  misc_RNA (1)...(19): siRNA sense strand
gguuugauugucuuuguuu

SEQ ID NO: 1497130 - RNA, 19 nt, Homo sapiens
  misc_RNA (1)...(19): siRNA sense strand
ggguuugauugucuuuguu

SEQ ID NO: 1497131 - RNA, 19 nt, Homo sapiens
  misc_RNA (1)...(19): siRNA sense strand
guaauuuggaccucuuugu

SEQ ID NO: 1497132 - RNA, 19 nt, Homo sapiens
  misc_RNA (1)...(19): siRNA sense strand
caaacuguugugaagauau

SEQ ID NO: 1497133 - RNA, 19 nt, Homo sapiens
  misc_RNA (1)...(19): siRNA sense strand
agauaaucauuggcucuuu

SEQ ID NO: 1497134 - RNA, 19 nt, Homo sapiens
  misc_RNA (1)...(19): siRNA sense strand
aauuuggaccucuuuguuu

SEQ ID NO: 1497135 - RNA, 19 nt, Homo sapiens
  misc_RNA (1)...(19): siRNA sense strand
uuaugggcauuacuauguu

SEQ ID NO: 1497136 - RNA, 19 nt, Homo sapiens
  misc_RNA (1)...(19): siRNA sense strand
ggcagcagaccuucucaga

SEQ ID NO: 1497137 - RNA, 19 nt, Homo sapiens
  misc_RNA (1)...(19): siRNA sense strand
caugaauuggccauaauga

SEQ ID NO: 1497138 - RNA, 19 nt, Homo sapiens
  misc_RNA (1)...(19): siRNA sense strand
ggaauaacuggacucuuuu

SEQ ID NO: 1497139 - RNA, 19 nt, Homo sapiens
  misc_RNA (1)...(19): siRNA sense strand
guuguugacccacaugguu

SEQ ID NO: 1497140 - RNA, 19 nt, Homo sapiens
  misc_RNA (1)...(19): siRNA sense strand
aagauccugugguucauuc

SEQ ID NO: 1497141 - RNA, 19 nt, Homo sapiens
  misc_RNA (1)...(19): siRNA sense strand
ucaucacuguccauggauu

SEQ ID NO: 1497142 - RNA, 19 nt, Homo sapiens
  misc_RNA (1)...(19): siRNA sense strand
ccuaccacuuugccaauca

SEQ ID NO: 1497143 - RNA, 19 nt, Homo sapiens
  misc_RNA (1)...(19): siRNA sense strand
uuuaugggcauuacuaugu

SEQ ID NO: 1497144 - RNA, 19 nt, Homo sapiens
  misc_RNA (1)...(19): siRNA sense strand
ugaagaaggacauauucca

SEQ ID NO: 1497145 - RNA, 19 nt, Homo sapiens
  misc_RNA (1)...(19): siRNA sense strand
gcuacgcacugauguuuuc

SEQ ID NO: 1497146 - RNA, 19 nt, Homo sapiens
  misc_RNA (1)...(19): siRNA sense strand
aaagaugucaaacuguugu

SEQ ID NO: 1497147 - RNA, 19 nt, Homo sapiens
  misc_RNA (1)...(19): siRNA sense strand
uggguuugauugucuuugu

SEQ ID NO: 1497148 - RNA, 19 nt, Homo sapiens
  misc_RNA (1)...(19): siRNA sense strand
guuugauugucuuuguuug

SEQ ID NO: 1497149 - RNA, 19 nt, Homo sapiens
  misc_RNA (1)...(19): siRNA sense strand
ccacuuugccaaucauguc

SEQ ID NO: 1497150 - RNA, 19 nt, Homo sapiens
  misc_RNA (1)...(19): siRNA sense strand
gccuuuaugggcauuacua

SEQ ID NO: 1497151 - RNA, 19 nt, Homo sapiens
  misc_RNA (1)...(19): siRNA sense strand
ggucuccggauucacuuug

SEQ ID NO: 1497152 - RNA, 19 nt, Homo sapiens
  misc_RNA (1)...(19): siRNA sense strand
uaacuggacucuuuuacac

SEQ ID NO: 1497153 - RNA, 19 nt, Homo sapiens
  misc_RNA (1)...(19): siRNA sense strand
aaacgcagguugcaauaaa

SEQ ID NO: 1497154 - RNA, 19 nt, Homo sapiens
  misc_RNA (1)...(19): siRNA sense strand
ccacuuugcugccauuuau

SEQ ID NO: 1497155 - RNA, 19 nt, Homo sapiens
  misc_RNA (1)...(19): siRNA sense strand
ggaaccagcucugacaguu

SEQ ID NO: 1497156 - RNA, 19 nt, Homo sapiens
  misc_RNA (1)...(19): siRNA sense strand
gaaaaucuaucgugagguu

SEQ ID NO: 1497157 - RNA, 19 nt, Homo sapiens
  misc_RNA (1)...(19): siRNA sense strand
acaucaagcuggcagauuu

SEQ ID NO: 1497158 - RNA, 19 nt, Homo sapiens
  misc_RNA (1)...(19): siRNA sense strand
gcucggaccucagugguuu

SEQ ID NO: 1497159 - RNA, 19 nt, Homo sapiens
  misc_RNA (1)...(19): siRNA sense strand
gaaccauccacacaucaua

SEQ ID NO: 1497160 - RNA, 19 nt, Homo sapiens
  misc_RNA (1)...(19): siRNA sense strand
cagcagcuauaaccacuuu

SEQ ID NO: 1497161 - RNA, 19 nt, Homo sapiens
  misc_RNA (1)...(19): siRNA sense strand
ccacacaucauaaagcuuu

SEQ ID NO: 1497162 - RNA, 19 nt, Homo sapiens
  misc_RNA (1)...(19): siRNA sense strand
ugaugaagcuucugaacca

SEQ ID NO: 1497163 - RNA, 19 nt, Homo sapiens
  misc_RNA (1)...(19): siRNA sense strand
acacacaccugcacauugg

SEQ ID NO: 1497164 - RNA, 19 nt, Homo sapiens
  misc_RNA (1)...(19): siRNA sense strand
ggacacacaccugcacauu

SEQ ID NO: 1497165 - RNA, 19 nt, Homo sapiens
  misc_RNA (1)...(19): siRNA sense strand
ggaaacaaaggacaugcuu

SEQ ID NO: 1497166 - RNA, 19 nt, Homo sapiens
  misc_RNA (1)...(19): siRNA sense strand
uuuauuaccuccuccuuga

SEQ ID NO: 1497167 - RNA, 19 nt, Homo sapiens
  misc_RNA (1)...(19): siRNA sense strand
gaccuucucugcgagcaaa

SEQ ID NO: 1497168 - RNA, 19 nt, Homo sapiens
  misc_RNA (1)...(19): siRNA sense strand
uuacaucgucacugaauuu

SEQ ID NO: 1497169 - RNA, 19 nt, Homo sapiens
  misc_RNA (1)...(19): siRNA sense strand
gaaccagcucugacaguug

SEQ ID NO: 1497170 - RNA, 19 nt, Homo sapiens
  misc_RNA (1)...(19): siRNA sense strand
cgauuagauucaagcaauu

SEQ ID NO: 1497171 - RNA, 19 nt, Homo sapiens
  misc_RNA (1)...(19): siRNA sense strand
acgauuagauucaagcaau

SEQ ID NO: 1497172 - RNA, 19 nt, Homo sapiens
  misc_RNA (1)...(19): siRNA sense strand
ggaguacugucacgaccau

SEQ ID NO: 1497173 - RNA, 19 nt, Homo sapiens
  misc_RNA (1)...(19): siRNA sense strand
uaaccacuuugcugccauu

SEQ ID NO: 1497174 - RNA, 19 nt, Homo sapiens
  misc_RNA (1)...(19): siRNA sense strand
gcuggcagauuuuggauuu

SEQ ID NO: 1497175 - RNA, 19 nt, Homo sapiens
  misc_RNA (1)...(19): siRNA sense strand
ccaacgggcaccugaguga

SEQ ID NO: 1497176 - RNA, 19 nt, Homo sapiens
  misc_RNA (1)...(19): siRNA sense strand
gacacacaccugcacauug

SEQ ID NO: 1497177 - RNA, 19 nt, Homo sapiens
  misc_RNA (1)...(19): siRNA sense strand
aggccgagauggacuguga

SEQ ID NO: 1497178 - RNA, 19 nt, Homo sapiens
  misc_RNA (1)...(19): siRNA sense strand
gcaguggcccuuguucuuc

SEQ ID NO: 1497179 - RNA, 19 nt, Homo sapiens
  misc_RNA (1)...(19): siRNA sense strand
caucgucacugaauuugcu

SEQ ID NO: 1497180 - RNA, 19 nt, Homo sapiens
  misc_RNA (1)...(19): siRNA sense strand
gaagaccacgcggaccaaa

SEQ ID NO: 1497181 - RNA, 19 nt, Homo sapiens
  misc_RNA (1)...(19): siRNA sense strand
gauuugggaauuucuacaa

SEQ ID NO: 1497182 - RNA, 19 nt, Homo sapiens
  misc_RNA (1)...(19): siRNA sense strand
gcucaaggaguaucggaau

SEQ ID NO: 1497183 - RNA, 19 nt, Homo sapiens
  misc_RNA (1)...(19): siRNA sense strand
gagcaggcgcuggguauca

SEQ ID NO: 1497184 - RNA, 19 nt, Homo sapiens
  misc_RNA (1)...(19): siRNA sense strand
aaccagcucugacaguugu

SEQ ID NO: 1497185 - RNA, 19 nt, Homo sapiens
  misc_RNA (1)...(19): siRNA sense strand
gagggaaccagcucugaca

SEQ ID NO: 1497186 - RNA, 19 nt, Homo sapiens
  misc_RNA (1)...(19): siRNA sense strand
gcagaggacgguggaguca

SEQ ID NO: 1497187 - RNA, 19 nt, Homo sapiens
  misc_RNA (1)...(19): siRNA sense strand
ccuccaaccugggcgacua

SEQ ID NO: 1497188 - RNA, 19 nt, Homo sapiens
  misc_RNA (1)...(19): siRNA sense strand
aaacacgauuagauucaag

SEQ ID NO: 1497189 - RNA, 19 nt, Homo sapiens
  misc_RNA (1)...(19): siRNA sense strand
caaccugggcgacuacgau

SEQ ID NO: 1497190 - RNA, 19 nt, Homo sapiens
  misc_RNA (1)...(19): siRNA sense strand
ugagauggaggaccugaug

SEQ ID NO: 1497191 - RNA, 19 nt, Homo sapiens
  misc_RNA (1)...(19): siRNA sense strand
gcaucaccaucgcccagau

SEQ ID NO: 1497192 - RNA, 19 nt, Homo sapiens
  misc_RNA (1)...(19): siRNA sense strand
acuuugcugccauuuauua

SEQ ID NO: 1497193 - RNA, 19 nt, Homo sapiens
  misc_RNA (1)...(19): siRNA sense strand
ggacaucaagcuggcagau

SEQ ID NO: 1497194 - RNA, 19 nt, Homo sapiens
  misc_RNA (1)...(19): siRNA sense strand
acaguugucugaccuucuc

SEQ ID NO: 1497195 - RNA, 19 nt, Homo sapiens
  misc_RNA (1)...(19): siRNA sense strand
caaaacgcagguugcaaua

SEQ ID NO: 1497196 - RNA, 19 nt, Homo sapiens
  misc_RNA (1)...(19): siRNA sense strand
ugcuuuacaucgucacuga

SEQ ID NO: 1497197 - RNA, 19 nt, Homo sapiens
  misc_RNA (1)...(19): siRNA sense strand
gaugaagcuucugaaccau

SEQ ID NO: 1497198 - RNA, 19 nt, Homo sapiens
  misc_RNA (1)...(19): siRNA sense strand
gacaucaagcuggcagauu

SEQ ID NO: 1497199 - RNA, 19 nt, Homo sapiens
  misc_RNA (1)...(19): siRNA sense strand
ucugaaccauccacacauc

SEQ ID NO: 1497200 - RNA, 19 nt, Homo sapiens
  misc_RNA (1)...(19): siRNA sense strand
ccugcuggauggcaacaug

SEQ ID NO: 1497201 - RNA, 19 nt, Homo sapiens
  misc_RNA (1)...(19): siRNA sense strand
ggaagaccacgcggaccaa

SEQ ID NO: 1497202 - RNA, 19 nt, Homo sapiens
  misc_RNA (1)...(19): siRNA sense strand
guuaucaugucggaguuca

SEQ ID NO: 1497203 - RNA, 19 nt, Homo sapiens
  misc_RNA (1)...(19): siRNA sense strand
gauuuuggauuugggaauu

SEQ ID NO: 1497204 - RNA, 19 nt, Homo sapiens
  misc_RNA (1)...(19): siRNA sense strand
aaccauccacacaucauaa

SEQ ID NO: 1497205 - RNA, 19 nt, Homo sapiens
  misc_RNA (1)...(19): siRNA sense strand
ggacaccucacugacucaa

SEQ ID NO: 1497206 - RNA, 19 nt, Homo sapiens
  misc_RNA (1)...(19): siRNA sense strand
agaggcugcuccaguuaca

SEQ ID NO: 1497207 - RNA, 19 nt, Homo sapiens
  misc_RNA (1)...(19): siRNA sense strand
uucaagcaauuuggagaaa

SEQ ID NO: 1497208 - RNA, 19 nt, Homo sapiens
  misc_RNA (1)...(19): siRNA sense strand
guacagagauggagaauga

SEQ ID NO: 1497209 - RNA, 19 nt, Homo sapiens
  misc_RNA (1)...(19): siRNA sense strand
gcacuaugaugaagaauau

SEQ ID NO: 1497210 - RNA, 19 nt, Homo sapiens
  misc_RNA (1)...(19): siRNA sense strand
gaccauguuuguagauuua

SEQ ID NO: 1497211 - RNA, 19 nt, Homo sapiens
  misc_RNA (1)...(19): siRNA sense strand
gcaagaaauugauuccaaa

SEQ ID NO: 1497212 - RNA, 19 nt, Homo sapiens
  misc_RNA (1)...(19): siRNA sense strand
gaacaugaguauccauaug

SEQ ID NO: 1497213 - RNA, 19 nt, Homo sapiens
  misc_RNA (1)...(19): siRNA sense strand
gaaagaccauguuuguaga

SEQ ID NO: 1497214 - RNA, 19 nt, Homo sapiens
  misc_RNA (1)...(19): siRNA sense strand
ggaaucagcucaacaacca

SEQ ID NO: 1497215 - RNA, 19 nt, Homo sapiens
  misc_RNA (1)...(19): siRNA sense strand
ccaguaaacucagcagaua

SEQ ID NO: 1497216 - RNA, 19 nt, Homo sapiens
  misc_RNA (1)...(19): siRNA sense strand
ggagaagacuggaaaugau

SEQ ID NO: 1497217 - RNA, 19 nt, Homo sapiens
  misc_RNA (1)...(19): siRNA sense strand
gaccauaucucuucuuugg

SEQ ID NO: 1497218 - RNA, 19 nt, Homo sapiens
  misc_RNA (1)...(19): siRNA sense strand
ggaaagaccauguuuguag

SEQ ID NO: 1497219 - RNA, 19 nt, Homo sapiens
  misc_RNA (1)...(19): siRNA sense strand
cgaggcacauucaccauua

SEQ ID NO: 1497220 - RNA, 19 nt, Homo sapiens
  misc_RNA (1)...(19): siRNA sense strand
ggaggaagcagaacagauu

SEQ ID NO: 1497221 - RNA, 19 nt, Homo sapiens
  misc_RNA (1)...(19): siRNA sense strand
uggcuuggcucgacaauuu

SEQ ID NO: 1497222 - RNA, 19 nt, Homo sapiens
  misc_RNA (1)...(19): siRNA sense strand
ggagaacuauuucauugug

SEQ ID NO: 1497223 - RNA, 19 nt, Homo sapiens
  misc_RNA (1)...(19): siRNA sense strand
caaguaggcucuauuaagg

SEQ ID NO: 1497224 - RNA, 19 nt, Homo sapiens
  misc_RNA (1)...(19): siRNA sense strand
caaauggucuucucaaugc

SEQ ID NO: 1497225 - RNA, 19 nt, Homo sapiens
  misc_RNA (1)...(19): siRNA sense strand
caaaagaacuuccugauca

SEQ ID NO: 1497226 - RNA, 19 nt, Homo sapiens
  misc_RNA (1)...(19): siRNA sense strand
gaagaugagaaguuaagua

SEQ ID NO: 1497227 - RNA, 19 nt, Homo sapiens
  misc_RNA (1)...(19): siRNA sense strand
gaugagaaguuaaguagag

SEQ ID NO: 1497228 - RNA, 19 nt, Homo sapiens
  misc_RNA (1)...(19): siRNA sense strand
gaaucauccucuccaguuu

SEQ ID NO: 1497229 - RNA, 19 nt, Homo sapiens
  misc_RNA (1)...(19): siRNA sense strand
caacacagaucaggucaau

SEQ ID NO: 1497230 - RNA, 19 nt, Homo sapiens
  misc_RNA (1)...(19): siRNA sense strand
acaauagcaucaagacuuu

SEQ ID NO: 1497231 - RNA, 19 nt, Homo sapiens
  misc_RNA (1)...(19): siRNA sense strand
gagauagacucaacuuugg

SEQ ID NO: 1497232 - RNA, 19 nt, Homo sapiens
  misc_RNA (1)...(19): siRNA sense strand
uaaugaagcuucugacagu

SEQ ID NO: 1497233 - RNA, 19 nt, Homo sapiens
  misc_RNA (1)...(19): siRNA sense strand
gaacuuccugaucauaaua

SEQ ID NO: 1497234 - RNA, 19 nt, Homo sapiens
  misc_RNA (1)...(19): siRNA sense strand
aaacuucucuggcuugguu

SEQ ID NO: 1497235 - RNA, 19 nt, Homo sapiens
  misc_RNA (1)...(19): siRNA sense strand
gauaaagcuuggaauuugu

SEQ ID NO: 1497236 - RNA, 19 nt, Homo sapiens
  misc_RNA (1)...(19): siRNA sense strand
gggaagacaugaugaccuu

SEQ ID NO: 1497237 - RNA, 19 nt, Homo sapiens
  misc_RNA (1)...(19): siRNA sense strand
caucaugagugaagacuug

SEQ ID NO: 1497238 - RNA, 19 nt, Homo sapiens
  misc_RNA (1)...(19): siRNA sense strand
agauaaagcuuggaauuug

SEQ ID NO: 1497239 - RNA, 19 nt, Homo sapiens
  misc_RNA (1)...(19): siRNA sense strand
gaugagguauuuccagaug

SEQ ID NO: 1497240 - RNA, 19 nt, Homo sapiens
  misc_RNA (1)...(19): siRNA sense strand
gagaauuacugccacacuu

SEQ ID NO: 1497241 - RNA, 19 nt, Homo sapiens
  misc_RNA (1)...(19): siRNA sense strand
ggucagagcuuggccuaug

SEQ ID NO: 1497242 - RNA, 19 nt, Homo sapiens
  misc_RNA (1)...(19): siRNA sense strand
gaaaugggaagacaugaug

SEQ ID NO: 1497243 - RNA, 19 nt, Homo sapiens
  misc_RNA (1)...(19): siRNA sense strand
ggaaucauccucuccaguu

SEQ ID NO: 1497244 - RNA, 19 nt, Homo sapiens
  misc_RNA (1)...(19): siRNA sense strand
gcaaauggucuucucaaug

SEQ ID NO: 1497245 - RNA, 19 nt, Homo sapiens
  misc_RNA (1)...(19): siRNA sense strand
ucaagacccucaacaacaa

SEQ ID NO: 1497246 - RNA, 19 nt, Homo sapiens
  misc_RNA (1)...(19): siRNA sense strand
gcaaguaggcucuauuaag

SEQ ID NO: 1497247 - RNA, 19 nt, Homo sapiens
  misc_RNA (1)...(19): siRNA sense strand
ggaaguugcuguuuugaaa

SEQ ID NO: 1497248 - RNA, 19 nt, Homo sapiens
  misc_RNA (1)...(19): siRNA sense strand
agagauggaugccaacaaa

SEQ ID NO: 1497249 - RNA, 19 nt, Homo sapiens
  misc_RNA (1)...(19): siRNA sense strand
ucaggcagcuguaugaaga

SEQ ID NO: 1497250 - RNA, 19 nt, Homo sapiens
  misc_RNA (1)...(19): siRNA sense strand
caaggaguauguagaugaa

SEQ ID NO: 1497251 - RNA, 19 nt, Homo sapiens
  misc_RNA (1)...(19): siRNA sense strand
ccaacguccugcccaauuu

SEQ ID NO: 1497252 - RNA, 19 nt, Homo sapiens
  misc_RNA (1)...(19): siRNA sense strand
cagcaagaauggccugaaa

SEQ ID NO: 1497253 - RNA, 19 nt, Homo sapiens
  misc_RNA (1)...(19): siRNA sense strand
gaaaguaacaaaucucaag

SEQ ID NO: 1497254 - RNA, 19 nt, Homo sapiens
  misc_RNA (1)...(19): siRNA sense strand
uggcagcaauggauuuaua

SEQ ID NO: 1497255 - RNA, 19 nt, Homo sapiens
  misc_RNA (1)...(19): siRNA sense strand
gcaaggaaagaccauguuu

SEQ ID NO: 1497256 - RNA, 19 nt, Homo sapiens
  misc_RNA (1)...(19): siRNA sense strand
gaccacaucuggcacuaug

SEQ ID NO: 1497257 - RNA, 19 nt, Homo sapiens
  misc_RNA (1)...(19): siRNA sense strand
gacaauagcaucaagacuu

SEQ ID NO: 1497258 - RNA, 19 nt, Homo sapiens
  misc_RNA (1)...(19): siRNA sense strand
gcuggagucuucccugaaa

SEQ ID NO: 1497259 - RNA, 19 nt, Homo sapiens
  misc_RNA (1)...(19): siRNA sense strand
gaacaaguaugagguugag

SEQ ID NO: 1497260 - RNA, 19 nt, Homo sapiens
  misc_RNA (1)...(19): siRNA sense strand
gaaacuagcuacuguuccu

SEQ ID NO: 1497261 - RNA, 19 nt, Homo sapiens
  misc_RNA (1)...(19): siRNA sense strand
gaaaagcuccuccaaaaga

SEQ ID NO: 1497262 - RNA, 19 nt, Homo sapiens
  misc_RNA (1)...(19): siRNA sense strand
gagcaggaccuucaggauu

SEQ ID NO: 1497263 - RNA, 19 nt, Homo sapiens
  misc_RNA (1)...(19): siRNA sense strand
ucagauagaucacauuggu

SEQ ID NO: 1497264 - RNA, 19 nt, Homo sapiens
  misc_RNA (1)...(19): siRNA sense strand
gaauucagcaucuuucuag

SEQ ID NO: 1497265 - RNA, 19 nt, Homo sapiens
  misc_RNA (1)...(19): siRNA sense strand
gaaauuucuuccagagaca

SEQ ID NO: 1497266 - RNA, 19 nt, Homo sapiens
  misc_RNA (1)...(19): siRNA sense strand
gaaaauggcaucccuguug

SEQ ID NO: 1497267 - RNA, 19 nt, Homo sapiens
  misc_RNA (1)...(19): siRNA sense strand
aaugauggcucccuaacaa

SEQ ID NO: 1497268 - RNA, 19 nt, Homo sapiens
  misc_RNA (1)...(19): siRNA sense strand
ggaaaguguugagaaagau

SEQ ID NO: 1497269 - RNA, 19 nt, Homo sapiens
  misc_RNA (1)...(19): siRNA sense strand
guagagggcagcauuguau

SEQ ID NO: 1497270 - RNA, 19 nt, Homo sapiens
  misc_RNA (1)...(19): siRNA sense strand
gguguggucuuagcacuuu

SEQ ID NO: 1497271 - RNA, 19 nt, Homo sapiens
  misc_RNA (1)...(19): siRNA sense strand
gaaaguuacguuccauuca

SEQ ID NO: 1497272 - RNA, 19 nt, Homo sapiens
  misc_RNA (1)...(19): siRNA sense strand
gaagacaugaugaccuuug

SEQ ID NO: 1497273 - RNA, 19 nt, Homo sapiens
  misc_RNA (1)...(19): siRNA sense strand
ucaagugccucugauaaau

SEQ ID NO: 1497274 - RNA, 19 nt, Homo sapiens
  misc_RNA (1)...(19): siRNA sense strand
aagaaaagcuccuccaaaa

SEQ ID NO: 1497275 - RNA, 19 nt, Homo sapiens
  misc_RNA (1)...(19): siRNA sense strand
cauaauagacugguuguga

SEQ ID NO: 1497276 - RNA, 19 nt, Homo sapiens
  misc_RNA (1)...(19): siRNA sense strand
guugagaucaguaaaugua

SEQ ID NO: 1497277 - RNA, 19 nt, Homo sapiens
  misc_RNA (1)...(19): siRNA sense strand
ccauaucucuucuuuggau

SEQ ID NO: 1497278 - RNA, 19 nt, Homo sapiens
  misc_RNA (1)...(19): siRNA sense strand
gggcagcauuguauugaga

SEQ ID NO: 1497279 - RNA, 19 nt, Homo sapiens
  misc_RNA (1)...(19): siRNA sense strand
gggagaagacuggaaauga

SEQ ID NO: 1497280 - RNA, 19 nt, Homo sapiens
  misc_RNA (1)...(19): siRNA sense strand
ggagcaacauggacaacau

SEQ ID NO: 1497281 - RNA, 19 nt, Homo sapiens
  misc_RNA (1)...(19): siRNA sense strand
ggucauccuuuguaacuag

SEQ ID NO: 1497282 - RNA, 19 nt, Homo sapiens
  misc_RNA (1)...(19): siRNA sense strand
caucaagacuuuuggagua

SEQ ID NO: 1497283 - RNA, 19 nt, Homo sapiens
  misc_RNA (1)...(19): siRNA sense strand
agauggagcuggagucuuc

SEQ ID NO: 1497284 - RNA, 19 nt, Homo sapiens
  misc_RNA (1)...(19): siRNA sense strand
gauggagaaugaauuugug

SEQ ID NO: 1497285 - RNA, 19 nt, Homo sapiens
  misc_RNA (1)...(19): siRNA sense strand
uagaccauaucucuucuuu

SEQ ID NO: 1497286 - RNA, 19 nt, Homo sapiens
  misc_RNA (1)...(19): siRNA sense strand
agacucaacuuuggaauca

SEQ ID NO: 1497287 - RNA, 19 nt, Homo sapiens
  misc_RNA (1)...(19): siRNA sense strand
gaaaaucaccccuagaaau

SEQ ID NO: 1497288 - RNA, 19 nt, Homo sapiens
  misc_RNA (1)...(19): siRNA sense strand
ugaggagccugaaguacuu

SEQ ID NO: 1497289 - RNA, 19 nt, Homo sapiens
  misc_RNA (1)...(19): siRNA sense strand
gccagacacugacaaguuc

SEQ ID NO: 1497290 - RNA, 19 nt, Homo sapiens
  misc_RNA (1)...(19): siRNA sense strand
ggaaaugauggcucccuaa

SEQ ID NO: 1497291 - RNA, 19 nt, Homo sapiens
  misc_RNA (1)...(19): siRNA sense strand
aaacaucucccuccagaau

SEQ ID NO: 1497292 - RNA, 19 nt, Homo sapiens
  misc_RNA (1)...(19): siRNA sense strand
agaguaagccagccaguaa

SEQ ID NO: 1497293 - RNA, 19 nt, Homo sapiens
  misc_RNA (1)...(19): siRNA sense strand
acacagaucaggucaauag

SEQ ID NO: 1497294 - RNA, 19 nt, Homo sapiens
  misc_RNA (1)...(19): siRNA sense strand
guuaggucauccuuuguaa

SEQ ID NO: 1497295 - RNA, 19 nt, Homo sapiens
  misc_RNA (1)...(19): siRNA sense strand
guauguagaugaagcuuac

SEQ ID NO: 1497296 - RNA, 19 nt, Homo sapiens
  misc_RNA (1)...(19): siRNA sense strand
caccaucacugucaaccaa

SEQ ID NO: 1497297 - RNA, 19 nt, Homo sapiens
  misc_RNA (1)...(19): siRNA sense strand
gucaauagcucaacuucgu

SEQ ID NO: 1497298 - RNA, 19 nt, Homo sapiens
  misc_RNA (1)...(19): siRNA sense strand
agagauagacucaacuuug

SEQ ID NO: 1497299 - RNA, 19 nt, Homo sapiens
  misc_RNA (1)...(19): siRNA sense strand
guuggaacuucagaaauuu

SEQ ID NO: 1497300 - RNA, 19 nt, Homo sapiens
  misc_RNA (1)...(19): siRNA sense strand
caggagauuugguaauugu

SEQ ID NO: 1497301 - RNA, 19 nt, Homo sapiens
  misc_RNA (1)...(19): siRNA sense strand
agcaggaccuucaggauuu

SEQ ID NO: 1497302 - RNA, 19 nt, Homo sapiens
  misc_RNA (1)...(19): siRNA sense strand
uaacaaccaccacuacuuc

SEQ ID NO: 1497303 - RNA, 19 nt, Homo sapiens
  misc_RNA (1)...(19): siRNA sense strand
ggacauggacagcaucauc

SEQ ID NO: 1497304 - RNA, 19 nt, Homo sapiens
  misc_RNA (1)...(19): siRNA sense strand
cccaggagauuugguaauu

SEQ ID NO: 1497305 - RNA, 19 nt, Homo sapiens
  misc_RNA (1)...(19): siRNA sense strand
cacgaggccuggaguagaa

SEQ ID NO: 1497306 - RNA, 19 nt, Homo sapiens
  misc_RNA (1)...(19): siRNA sense strand
auaaauugcuagaggagaa

SEQ ID NO: 1497307 - RNA, 19 nt, Homo sapiens
  misc_RNA (1)...(19): siRNA sense strand
gcaccaagagggcaagaga

SEQ ID NO: 1497308 - RNA, 19 nt, Homo sapiens
  misc_RNA (1)...(19): siRNA sense strand
ggaggcagcucaucuauug

SEQ ID NO: 1497309 - RNA, 19 nt, Homo sapiens
  misc_RNA (1)...(19): siRNA sense strand
ggcaacugcuggcuuuguu

SEQ ID NO: 1497310 - RNA, 19 nt, Homo sapiens
  misc_RNA (1)...(19): siRNA sense strand
gcucaucuauuggcaacug

SEQ ID NO: 1497311 - RNA, 19 nt, Homo sapiens
  misc_RNA (1)...(19): siRNA sense strand
gugucaagaugaauacaug

SEQ ID NO: 1497312 - RNA, 19 nt, Homo sapiens
  misc_RNA (1)...(19): siRNA sense strand
gcaacugcuggcuuuguuu

SEQ ID NO: 1497313 - RNA, 19 nt, Homo sapiens
  misc_RNA (1)...(19): siRNA sense strand
auuggcaacugcuggcuuu

SEQ ID NO: 1497314 - RNA, 19 nt, Homo sapiens
  misc_RNA (1)...(19): siRNA sense strand
ggaggcagcucaucuauug

SEQ ID NO: 1497315 - RNA, 19 nt, Homo sapiens
  misc_RNA (1)...(19): siRNA sense strand
gagcucugcugucuucuca

SEQ ID NO: 1497316 - RNA, 19 nt, Homo sapiens
  misc_RNA (1)...(19): siRNA sense strand
gaggcucuguugagaauca

SEQ ID NO: 1497317 - RNA, 19 nt, Homo sapiens
  misc_RNA (1)...(19): siRNA sense strand
ggcaacugcuggcuuuguu

SEQ ID NO: 1497318 - RNA, 19 nt, Homo sapiens
  misc_RNA (1)...(19): siRNA sense strand
gcucaucuauuggcaacug

SEQ ID NO: 1497319 - RNA, 19 nt, Homo sapiens
  misc_RNA (1)...(19): siRNA sense strand
gugucaagaugaauacaug

SEQ ID NO: 1497320 - RNA, 19 nt, Homo sapiens
  misc_RNA (1)...(19): siRNA sense strand
gcaacugcuggcuuuguuu

SEQ ID NO: 1497321 - RNA, 19 nt, Homo sapiens
  misc_RNA (1)...(19): siRNA sense strand
cugaggcucuguugagaau

SEQ ID NO: 1497322 - RNA, 19 nt, Homo sapiens
  misc_RNA (1)...(19): siRNA sense strand
cuggagcucugcugucuuc

SEQ ID NO: 1497323 - RNA, 19 nt, Homo sapiens
  misc_RNA (1)...(19): siRNA sense strand
auuggcaacugcuggcuuu

SEQ ID NO: 1497324 - RNA, 19 nt, Homo sapiens
  misc_RNA (1)...(19): siRNA sense strand
gaagagaucaacaacuuaa

SEQ ID NO: 1497325 - RNA, 19 nt, Homo sapiens
  misc_RNA (1)...(19): siRNA sense strand
gaacgagccugcgcugauu

SEQ ID NO: 1497326 - RNA, 19 nt, Homo sapiens
  misc_RNA (1)...(19): siRNA sense strand
cagaagaccucccagagaa

SEQ ID NO: 1497327 - RNA, 19 nt, Homo sapiens
  misc_RNA (1)...(19): siRNA sense strand
gagagaaggucaugaagca

SEQ ID NO: 1497328 - RNA, 19 nt, Homo sapiens
  misc_RNA (1)...(19): siRNA sense strand
ggaaaugaagcaugucuuu

SEQ ID NO: 1497329 - RNA, 19 nt, Homo sapiens
  misc_RNA (1)...(19): siRNA sense strand
gggacgagcucucugaaga

SEQ ID NO: 1497330 - RNA, 19 nt, Homo sapiens
  misc_RNA (1)...(19): siRNA sense strand
ucacuacgcugacaauugu

SEQ ID NO: 1497331 - RNA, 19 nt, Homo sapiens
  misc_RNA (1)...(19): siRNA sense strand
gaaaagagcaccagggauu

SEQ ID NO: 1497332 - RNA, 19 nt, Homo sapiens
  misc_RNA (1)...(19): siRNA sense strand
cugaagagaucaacaacuu

SEQ ID NO: 1497333 - RNA, 19 nt, Homo sapiens
  misc_RNA (1)...(19): siRNA sense strand
cuacccagcuuucaugaug

SEQ ID NO: 1497334 - RNA, 19 nt, Homo sapiens
  misc_RNA (1)...(19): siRNA sense strand
gaagggacgagcucucuga

SEQ ID NO: 1497335 - RNA, 19 nt, Homo sapiens
  misc_RNA (1)...(19): siRNA sense strand
uaagagagaaggucaugaa

SEQ ID NO: 1497336 - RNA, 19 nt, Homo sapiens
  misc_RNA (1)...(19): siRNA sense strand
ugccagaucuucauggaaa

SEQ ID NO: 1497337 - RNA, 19 nt, Homo sapiens
  misc_RNA (1)...(19): siRNA sense strand
caccagggauuucucaguu

SEQ ID NO: 1497338 - RNA, 19 nt, Homo sapiens
  misc_RNA (1)...(19): siRNA sense strand
gaaaugaagcaugucuuug

SEQ ID NO: 1497339 - RNA, 19 nt, Homo sapiens
  misc_RNA (1)...(19): siRNA sense strand
aaaugaagcaugucuuuga

SEQ ID NO: 1497340 - RNA, 19 nt, Homo sapiens
  misc_RNA (1)...(19): siRNA sense strand
ccagggauuucucaguuga

SEQ ID NO: 1497341 - RNA, 19 nt, Homo sapiens
  misc_RNA (1)...(19): siRNA sense strand
ggcagugcauucacauuga

SEQ ID NO: 1497342 - RNA, 19 nt, Homo sapiens
  misc_RNA (1)...(19): siRNA sense strand
gcacaacuacccagcuuuc

SEQ ID NO: 1497343 - RNA, 19 nt, Homo sapiens
  misc_RNA (1)...(19): siRNA sense strand
cagacaugcuggcuccuuu

SEQ ID NO: 1497344 - RNA, 19 nt, Homo sapiens
  misc_RNA (1)...(19): siRNA sense strand
caacuacccagcuuucaug

SEQ ID NO: 1497345 - RNA, 19 nt, Homo sapiens
  misc_RNA (1)...(19): siRNA sense strand
ggaacgagccugcgcugau

SEQ ID NO: 1497346 - RNA, 19 nt, Homo sapiens
  misc_RNA (1)...(19): siRNA sense strand
gcauucacauugagagaag

SEQ ID NO: 1497347 - RNA, 19 nt, Homo sapiens
  misc_RNA (1)...(19): siRNA sense strand
gaggaagagugcccagaag

SEQ ID NO: 1497348 - RNA, 19 nt, Homo sapiens
  misc_RNA (1)...(19): siRNA sense strand
gccaaggccucaaagucuu

SEQ ID NO: 1497349 - RNA, 19 nt, Homo sapiens
  misc_RNA (1)...(19): siRNA sense strand
gggcagugcauucacauug

SEQ ID NO: 1497350 - RNA, 19 nt, Homo sapiens
  misc_RNA (1)...(19): siRNA sense strand
ugauggaaaugaagcaugu

SEQ ID NO: 1497351 - RNA, 19 nt, Homo sapiens
  misc_RNA (1)...(19): siRNA sense strand
gaaccugugccucuacugu

SEQ ID NO: 1497352 - RNA, 19 nt, Homo sapiens
  misc_RNA (1)...(19): siRNA sense strand
ugaagagaucaacaacuua

SEQ ID NO: 1497353 - RNA, 19 nt, Homo sapiens
  misc_RNA (1)...(19): siRNA sense strand
ccagaagaccucccagaga

SEQ ID NO: 1497354 - RNA, 19 nt, Homo sapiens
  misc_RNA (1)...(19): siRNA sense strand
aaugaagcaugucuuugaa

SEQ ID NO: 1497355 - RNA, 19 nt, Homo sapiens
  misc_RNA (1)...(19): siRNA sense strand
ccaaugcuuuccagaugau

SEQ ID NO: 1497356 - RNA, 19 nt, Homo sapiens
  misc_RNA (1)...(19): siRNA sense strand
gguguugccucacauugca

SEQ ID NO: 1497357 - RNA, 19 nt, Homo sapiens
  misc_RNA (1)...(19): siRNA sense strand
gcagugcauucacauugag

SEQ ID NO: 1497358 - RNA, 19 nt, Homo sapiens
  misc_RNA (1)...(19): siRNA sense strand
aaagaaagacgcagaaagc

SEQ ID NO: 1497359 - RNA, 19 nt, Homo sapiens
  misc_RNA (1)...(19): siRNA sense strand
gcgcugguguugccucaca

SEQ ID NO: 1497360 - RNA, 19 nt, Homo sapiens
  misc_RNA (1)...(19): siRNA sense strand
ggagaacaccacccuucga

SEQ ID NO: 1497361 - RNA, 19 nt, Homo sapiens
  misc_RNA (1)...(19): siRNA sense strand
ggcgagagguugccaaacg

SEQ ID NO: 1497362 - RNA, 19 nt, Homo sapiens
  misc_RNA (1)...(19): siRNA sense strand
gaagaccucccagagaagu

SEQ ID NO: 1497363 - RNA, 19 nt, Homo sapiens
  misc_RNA (1)...(19): siRNA sense strand
aucaacaacuuaagagaga

SEQ ID NO: 1497364 - RNA, 19 nt, Homo sapiens
  misc_RNA (1)...(19): siRNA sense strand
cuccaaugcuuuccagaug

SEQ ID NO: 1497365 - RNA, 19 nt, Homo sapiens
  misc_RNA (1)...(19): siRNA sense strand
cgacuacuccaaugcuuuc

SEQ ID NO: 1497366 - RNA, 19 nt, Homo sapiens
  misc_RNA (1)...(19): siRNA sense strand
uccaaugcuuuccagauga

SEQ ID NO: 1497367 - RNA, 19 nt, Homo sapiens
  misc_RNA (1)...(19): siRNA sense strand
gagaucaacaacuuaagag

SEQ ID NO: 1497368 - RNA, 19 nt, Homo sapiens
  misc_RNA (1)...(19): siRNA sense strand
gaggcgagagguugccaaa

SEQ ID NO: 1497369 - RNA, 19 nt, Homo sapiens
  misc_RNA (1)...(19): siRNA sense strand
agagaucaacaacuuaaga

SEQ ID NO: 1497370 - RNA, 19 nt, Homo sapiens
  misc_RNA (1)...(19): siRNA sense strand
cccacuaccugaugcacaa

SEQ ID NO: 1497371 - RNA, 19 nt, Homo sapiens
  misc_RNA (1)...(19): siRNA sense strand
ggaagagugcccagaagac

SEQ ID NO: 1497372 - RNA, 19 nt, Homo sapiens
  misc_RNA (1)...(19): siRNA sense strand
gcaccagggauuucucagu

SEQ ID NO: 1497373 - RNA, 19 nt, Homo sapiens
  misc_RNA (1)...(19): siRNA sense strand
gagcaccagggauuucuca

SEQ ID NO: 1497374 - RNA, 19 nt, Homo sapiens
  misc_RNA (1)...(19): siRNA sense strand
ugaagcagucggaggagaa

SEQ ID NO: 1497375 - RNA, 19 nt, Homo sapiens
  misc_RNA (1)...(19): siRNA sense strand
gucgcugucugcucugauu

SEQ ID NO: 1497376 - RNA, 19 nt, Homo sapiens
  misc_RNA (1)...(19): siRNA sense strand
ucaacaacuuaagagagaa

SEQ ID NO: 1497377 - RNA, 19 nt, Homo sapiens
  misc_RNA (1)...(19): siRNA sense strand
agaggaagagugcccagaa

SEQ ID NO: 1497378 - RNA, 19 nt, Homo sapiens
  misc_RNA (1)...(19): siRNA sense strand
ggucugucaucgacuacuc

SEQ ID NO: 1497379 - RNA, 19 nt, Homo sapiens
  misc_RNA (1)...(19): siRNA sense strand
gucaucgacuacuccaaug

SEQ ID NO: 1497380 - RNA, 19 nt, Homo sapiens
  misc_RNA (1)...(19): siRNA sense strand
ugucaucgacuacuccaau

SEQ ID NO: 1497381 - RNA, 19 nt, Homo sapiens
  misc_RNA (1)...(19): siRNA sense strand
cugcgcugauugaccagua

SEQ ID NO: 1497382 - RNA, 19 nt, Homo sapiens
  misc_RNA (1)...(19): siRNA sense strand
caacaacuuaagagagaag

SEQ ID NO: 1497383 - RNA, 19 nt, Homo sapiens
  misc_RNA (1)...(19): siRNA sense strand
gggccucagcgaccacauu

SEQ ID NO: 1497384 - RNA, 19 nt, Homo sapiens
  misc_RNA (1)...(19): siRNA sense strand
aagaagagcuggcugauau

SEQ ID NO: 1497385 - RNA, 19 nt, Homo sapiens
  misc_RNA (1)...(19): siRNA sense strand
gcaaaguacugcaaaucuu

SEQ ID NO: 1497386 - RNA, 19 nt, Homo sapiens
  misc_RNA (1)...(19): siRNA sense strand
gaagagcuggcugauauua

SEQ ID NO: 1497387 - RNA, 19 nt, Homo sapiens
  misc_RNA (1)...(19): siRNA sense strand
gaacccaggauaaggaaua

SEQ ID NO: 1497388 - RNA, 19 nt, Homo sapiens
  misc_RNA (1)...(19): siRNA sense strand
ggagaggucccauccuaua

SEQ ID NO: 1497389 - RNA, 19 nt, Homo sapiens
  misc_RNA (1)...(19): siRNA sense strand
gaaaagacauacaaagguu

SEQ ID NO: 1497390 - RNA, 19 nt, Homo sapiens
  misc_RNA (1)...(19): siRNA sense strand
gaagaagagcuggcugaua

SEQ ID NO: 1497391 - RNA, 19 nt, Homo sapiens
  misc_RNA (1)...(19): siRNA sense strand
gaagcaaaguacugcaaau

SEQ ID NO: 1497392 - RNA, 19 nt, Homo sapiens
  misc_RNA (1)...(19): siRNA sense strand
uagaggacauucaagcuuu

SEQ ID NO: 1497393 - RNA, 19 nt, Homo sapiens
  misc_RNA (1)...(19): siRNA sense strand
aaagaugaaugcaaggaaa

SEQ ID NO: 1497394 - RNA, 19 nt, Homo sapiens
  misc_RNA (1)...(19): siRNA sense strand
cugcaaaucuuccaaagga

SEQ ID NO: 1497395 - RNA, 19 nt, Homo sapiens
  misc_RNA (1)...(19): siRNA sense strand
auacaaagguucggaagaa

SEQ ID NO: 1497396 - RNA, 19 nt, Homo sapiens
  misc_RNA (1)...(19): siRNA sense strand
aaucugcucucaagaaaga

SEQ ID NO: 1497397 - RNA, 19 nt, Homo sapiens
  misc_RNA (1)...(19): siRNA sense strand
gucaaagaaucgaaacaaa

SEQ ID NO: 1497398 - RNA, 19 nt, Homo sapiens
  misc_RNA (1)...(19): siRNA sense strand
ccggagaggucccauccua

SEQ ID NO: 1497399 - RNA, 19 nt, Homo sapiens
  misc_RNA (1)...(19): siRNA sense strand
agagagcaguguacgauga

SEQ ID NO: 1497400 - RNA, 19 nt, Homo sapiens
  misc_RNA (1)...(19): siRNA sense strand
ggaagaggccaaagaagca

SEQ ID NO: 1497401 - RNA, 19 nt, Homo sapiens
  misc_RNA (1)...(19): siRNA sense strand
gagaggucccauccuauaa

SEQ ID NO: 1497402 - RNA, 19 nt, Homo sapiens
  misc_RNA (1)...(19): siRNA sense strand
gaggucccauccuauaaug

SEQ ID NO: 1497403 - RNA, 19 nt, Homo sapiens
  misc_RNA (1)...(19): siRNA sense strand
ggccaaagaagcagaaaug

SEQ ID NO: 1497404 - RNA, 19 nt, Homo sapiens
  misc_RNA (1)...(19): siRNA sense strand
ggaagcaaaguacugcaaa

SEQ ID NO: 1497405 - RNA, 19 nt, Homo sapiens
  misc_RNA (1)...(19): siRNA sense strand
gagaacagagagcagugua

SEQ ID NO: 1497406 - RNA, 19 nt, Homo sapiens
  misc_RNA (1)...(19): siRNA sense strand
gaucauggagucugugcuu

SEQ ID NO: 1497407 - RNA, 19 nt, Homo sapiens
  misc_RNA (1)...(19): siRNA sense strand
caaaguacugcaaaucuuc

SEQ ID NO: 1497408 - RNA, 19 nt, Homo sapiens
  misc_RNA (1)...(19): siRNA sense strand
ucuauuccguucucaguga

SEQ ID NO: 1497409 - RNA, 19 nt, Homo sapiens
  misc_RNA (1)...(19): siRNA sense strand
gaggaacccaggauaagga

SEQ ID NO: 1497410 - RNA, 19 nt, Homo sapiens
  misc_RNA (1)...(19): siRNA sense strand
ggacuucaagggugacaug

SEQ ID NO: 1497411 - RNA, 19 nt, Homo sapiens
  misc_RNA (1)...(19): siRNA sense strand
uggcucagauggaagcaaa

SEQ ID NO: 1497412 - RNA, 19 nt, Homo sapiens
  misc_RNA (1)...(19): siRNA sense strand
ucaggaagaggccaaagaa

SEQ ID NO: 1497413 - RNA, 19 nt, Homo sapiens
  misc_RNA (1)...(19): siRNA sense strand
gagacugggaggcguauug

SEQ ID NO: 1497414 - RNA, 19 nt, Homo sapiens
  misc_RNA (1)...(19): siRNA sense strand
caaggugucccugcaggua

SEQ ID NO: 1497415 - RNA, 19 nt, Homo sapiens
  misc_RNA (1)...(19): siRNA sense strand
guacugcaaaucuuccaaa

SEQ ID NO: 1497416 - RNA, 19 nt, Homo sapiens
  misc_RNA (1)...(19): siRNA sense strand
acagaggaacccaggauaa

SEQ ID NO: 1497417 - RNA, 19 nt, Homo sapiens
  misc_RNA (1)...(19): siRNA sense strand
agagcuggcugauauuaag

SEQ ID NO: 1497418 - RNA, 19 nt, Homo sapiens
  misc_RNA (1)...(19): siRNA sense strand
gaagcagaaaugagcagaa

SEQ ID NO: 1497419 - RNA, 19 nt, Homo sapiens
  misc_RNA (1)...(19): siRNA sense strand
aaaaucugcucucaagaaa

SEQ ID NO: 1497420 - RNA, 19 nt, Homo sapiens
  misc_RNA (1)...(19): siRNA sense strand
cuucaagggugacauggau

SEQ ID NO: 1497421 - RNA, 19 nt, Homo sapiens
  misc_RNA (1)...(19): siRNA sense strand
gcaggccuaucuggacuuc

SEQ ID NO: 1497422 - RNA, 19 nt, Homo sapiens
  misc_RNA (1)...(19): siRNA sense strand
uauuggcggcuacucuuua

SEQ ID NO: 1497423 - RNA, 19 nt, Homo sapiens
  misc_RNA (1)...(19): siRNA sense strand
ccaaagaagcagaaaugag

SEQ ID NO: 1497424 - RNA, 19 nt, Homo sapiens
  misc_RNA (1)...(19): siRNA sense strand
aaaggagggcucaggaaga

SEQ ID NO: 1497425 - RNA, 19 nt, Homo sapiens
  misc_RNA (1)...(19): siRNA sense strand
gcuggaccuuugcgaggaa

SEQ ID NO: 1497426 - RNA, 19 nt, Homo sapiens
  misc_RNA (1)...(19): siRNA sense strand
ggaagaagagcuggcugau

SEQ ID NO: 1497427 - RNA, 19 nt, Homo sapiens
  misc_RNA (1)...(19): siRNA sense strand
aggccuaucuggacuucaa

SEQ ID NO: 1497428 - RNA, 19 nt, Homo sapiens
  misc_RNA (1)...(19): siRNA sense strand
guauuggcggcuacucuuu

SEQ ID NO: 1497429 - RNA, 19 nt, Homo sapiens
  misc_RNA (1)...(19): siRNA sense strand
gaaaaggagggcucaggaa

SEQ ID NO: 1497430 - RNA, 19 nt, Homo sapiens
  misc_RNA (1)...(19): siRNA sense strand
acaaagguucggaagaaga

SEQ ID NO: 1497431 - RNA, 19 nt, Homo sapiens
  misc_RNA (1)...(19): siRNA sense strand
gccaaagaagcagaaauga

SEQ ID NO: 1497432 - RNA, 19 nt, Homo sapiens
  misc_RNA (1)...(19): siRNA sense strand
caaagguucggaagaagag

SEQ ID NO: 1497433 - RNA, 19 nt, Homo sapiens
  misc_RNA (1)...(19): siRNA sense strand
ucauucagcaagcuauuga

SEQ ID NO: 1497434 - RNA, 19 nt, Homo sapiens
  misc_RNA (1)...(19): siRNA sense strand
cacagaggaacccaggaua

SEQ ID NO: 1497435 - RNA, 19 nt, Homo sapiens
  misc_RNA (1)...(19): siRNA sense strand
ugucaaagaaucgaaacaa

SEQ ID NO: 1497436 - RNA, 19 nt, Homo sapiens
  misc_RNA (1)...(19): siRNA sense strand
cauacaaagguucggaaga

SEQ ID NO: 1497437 - RNA, 19 nt, Homo sapiens
  misc_RNA (1)...(19): siRNA sense strand
ucagauggaagcaaaguac

SEQ ID NO: 1497438 - RNA, 19 nt, Homo sapiens
  misc_RNA (1)...(19): siRNA sense strand
aaggagggcucaggaagag

SEQ ID NO: 1497439 - RNA, 19 nt, Homo sapiens
  misc_RNA (1)...(19): siRNA sense strand
caaagaaucgaaacaaaag

SEQ ID NO: 1497440 - RNA, 19 nt, Homo sapiens
  misc_RNA (1)...(19): siRNA sense strand
ucauggagucugugcuuug

SEQ ID NO: 1497441 - RNA, 19 nt, Homo sapiens
  misc_RNA (1)...(19): siRNA sense strand
gccauucagagcagacaaa

SEQ ID NO: 1497442 - RNA, 19 nt, Homo sapiens
  misc_RNA (1)...(19): siRNA sense strand
auuggcggcuacucuuuaa

SEQ ID NO: 1497443 - RNA, 19 nt, Homo sapiens
  misc_RNA (1)...(19): siRNA sense strand
ccuauaaugccuuugucaa

SEQ ID NO: 1497444 - RNA, 19 nt, Homo sapiens
  misc_RNA (1)...(19): siRNA sense strand
acagagagcaguguacgau

SEQ ID NO: 1497445 - RNA, 19 nt, Homo sapiens
  misc_RNA (1)...(19): siRNA sense strand
aagagcuggcugauauuaa

SEQ ID NO: 1497446 - RNA, 19 nt, Homo sapiens
  misc_RNA (1)...(19): siRNA sense strand
uuagaggacauucaagcuu

SEQ ID NO: 1497447 - RNA, 19 nt, Homo sapiens
  misc_RNA (1)...(19): siRNA sense strand
cauccuauaaugccuuugu

SEQ ID NO: 1497448 - RNA, 19 nt, Homo sapiens
  misc_RNA (1)...(19): siRNA sense strand
cagaggaacccaggauaag

SEQ ID NO: 1497449 - RNA, 19 nt, Homo sapiens
  misc_RNA (1)...(19): siRNA sense strand
ucaagggugacauggauca

SEQ ID NO: 1497450 - RNA, 19 nt, Homo sapiens
  misc_RNA (1)...(19): siRNA sense strand
cuccugugcucacccaaga

SEQ ID NO: 1497451 - RNA, 19 nt, Homo sapiens
  misc_RNA (1)...(19): siRNA sense strand
guaccaaacuguucgauau

SEQ ID NO: 1497452 - RNA, 19 nt, Homo sapiens
  misc_RNA (1)...(19): siRNA sense strand
cagauaaacuggacaauag

SEQ ID NO: 1497453 - RNA, 19 nt, Homo sapiens
  misc_RNA (1)...(19): siRNA sense strand
gcacugcacuuuggaguug

SEQ ID NO: 1497454 - RNA, 19 nt, Homo sapiens
  misc_RNA (1)...(19): siRNA sense strand
gcagauaaacuggacaaua

SEQ ID NO: 1497455 - RNA, 19 nt, Homo sapiens
  misc_RNA (1)...(19): siRNA sense strand
gacaauagcagaagcauuc

SEQ ID NO: 1497456 - RNA, 19 nt, Homo sapiens
  misc_RNA (1)...(19): siRNA sense strand
gguacgagcuggugguguu

SEQ ID NO: 1497457 - RNA, 19 nt, Homo sapiens
  misc_RNA (1)...(19): siRNA sense strand
cagcaagcauggagaucua

SEQ ID NO: 1497458 - RNA, 19 nt, Homo sapiens
  misc_RNA (1)...(19): siRNA sense strand
gccgaaaccuucaccaaca

SEQ ID NO: 1497459 - RNA, 19 nt, Homo sapiens
  misc_RNA (1)...(19): siRNA sense strand
caaacuguucgauaugaua

SEQ ID NO: 1497460 - RNA, 19 nt, Homo sapiens
  misc_RNA (1)...(19): siRNA sense strand
agacagcacugcacuuugg

SEQ ID NO: 1497461 - RNA, 19 nt, Homo sapiens
  misc_RNA (1)...(19): siRNA sense strand
cucuggagcuucuucauuu

SEQ ID NO: 1497462 - RNA, 19 nt, Homo sapiens
  misc_RNA (1)...(19): siRNA sense strand
ucuggagcuucuucauuua

SEQ ID NO: 1497463 - RNA, 19 nt, Homo sapiens
  misc_RNA (1)...(19): siRNA sense strand
gaucuggaugagacacuua

SEQ ID NO: 1497464 - RNA, 19 nt, Homo sapiens
  misc_RNA (1)...(19): siRNA sense strand
cgacacagcccuucucaac

SEQ ID NO: 1497465 - RNA, 19 nt, Homo sapiens
  misc_RNA (1)...(19): siRNA sense strand
ggacaauagcagaagcauu

SEQ ID NO: 1497466 - RNA, 19 nt, Homo sapiens
  misc_RNA (1)...(19): siRNA sense strand
gaugagacacuuauucacu

SEQ ID NO: 1497467 - RNA, 19 nt, Homo sapiens
  misc_RNA (1)...(19): siRNA sense strand
caggagccauccagacaau

SEQ ID NO: 1497468 - RNA, 19 nt, Homo sapiens
  misc_RNA (1)...(19): siRNA sense strand
uaagaggagauauuacaga

SEQ ID NO: 1497469 - RNA, 19 nt, Homo sapiens
  misc_RNA (1)...(19): siRNA sense strand
ccaaacuguucgauaugau

SEQ ID NO: 1497470 - RNA, 19 nt, Homo sapiens
  misc_RNA (1)...(19): siRNA sense strand
aggcagauccgcacgguaa

SEQ ID NO: 1497471 - RNA, 19 nt, Homo sapiens
  misc_RNA (1)...(19): siRNA sense strand
gcagauccgcacgguaauu

SEQ ID NO: 1497472 - RNA, 19 nt, Homo sapiens
  misc_RNA (1)...(19): siRNA sense strand
uagcccaggugaagaggaa

SEQ ID NO: 1497473 - RNA, 19 nt, Homo sapiens
  misc_RNA (1)...(19): siRNA sense strand
acagugaccucuccagcau

SEQ ID NO: 1497474 - RNA, 19 nt, Homo sapiens
  misc_RNA (1)...(19): siRNA sense strand
ucaaggugguaauagacaa

SEQ ID NO: 1497475 - RNA, 19 nt, Homo sapiens
  misc_RNA (1)...(19): siRNA sense strand
caucaaauccugguucagu

SEQ ID NO: 1497476 - RNA, 19 nt, Homo sapiens
  misc_RNA (1)...(19): siRNA sense strand
acagacagcacugcacuuu

SEQ ID NO: 1497477 - RNA, 19 nt, Homo sapiens
  misc_RNA (1)...(19): siRNA sense strand
acacagcccuucucaaccu

SEQ ID NO: 1497478 - RNA, 19 nt, Homo sapiens
  misc_RNA (1)...(19): siRNA sense strand
gagccgaaaccuucaccaa

SEQ ID NO: 1497479 - RNA, 19 nt, Homo sapiens
  misc_RNA (1)...(19): siRNA sense strand
guucaccgcugauguucgu

SEQ ID NO: 1497480 - RNA, 19 nt, Homo sapiens
  misc_RNA (1)...(19): siRNA sense strand
ucaaauccugguucaguga

SEQ ID NO: 1497481 - RNA, 19 nt, Homo sapiens
  misc_RNA (1)...(19): siRNA sense strand
ggaucuggaugagacacuu

SEQ ID NO: 1497482 - RNA, 19 nt, Homo sapiens
  misc_RNA (1)...(19): siRNA sense strand
gaguugggcagcuacauca

SEQ ID NO: 1497483 - RNA, 19 nt, Homo sapiens
  misc_RNA (1)...(19): siRNA sense strand
aaacuggacaauagcagaa

SEQ ID NO: 1497484 - RNA, 19 nt, Homo sapiens
  misc_RNA (1)...(19): siRNA sense strand
caaggugguaauagacaaa

SEQ ID NO: 1497485 - RNA, 19 nt, Homo sapiens
  misc_RNA (1)...(19): siRNA sense strand
gauaaacuggacaauagca

SEQ ID NO: 1497486 - RNA, 19 nt, Homo sapiens
  misc_RNA (1)...(19): siRNA sense strand
agugaccucuccagcauug

SEQ ID NO: 1497487 - RNA, 19 nt, Homo sapiens
  misc_RNA (1)...(19): siRNA sense strand
ggaguugggcagcuacauc

SEQ ID NO: 1497488 - RNA, 19 nt, Homo sapiens
  misc_RNA (1)...(19): siRNA sense strand
accaaacuguucgauauga

SEQ ID NO: 1497489 - RNA, 19 nt, Homo sapiens
  misc_RNA (1)...(19): siRNA sense strand
gcaagcauggagaucuaug

SEQ ID NO: 1497490 - RNA, 19 nt, Homo sapiens
  misc_RNA (1)...(19): siRNA sense strand
cuuaagaggagauauuaca

SEQ ID NO: 1497491 - RNA, 19 nt, Homo sapiens
  misc_RNA (1)...(19): siRNA sense strand
ccgaaaccuucaccaacau

SEQ ID NO: 1497492 - RNA, 19 nt, Homo sapiens
  misc_RNA (1)...(19): siRNA sense strand
cagguucaccgcugauguu

SEQ ID NO: 1497493 - RNA, 19 nt, Homo sapiens
  misc_RNA (1)...(19): siRNA sense strand
uggaugagacacuuauuca

SEQ ID NO: 1497494 - RNA, 19 nt, Homo sapiens
  misc_RNA (1)...(19): siRNA sense strand
gguaauagacaaacauccu

SEQ ID NO: 1497495 - RNA, 19 nt, Homo sapiens
  misc_RNA (1)...(19): siRNA sense strand
gagcuucuucauuuaccuu

SEQ ID NO: 1497496 - RNA, 19 nt, Homo sapiens
  misc_RNA (1)...(19): siRNA sense strand
guacgccuccugacuucau

SEQ ID NO: 1497497 - RNA, 19 nt, Homo sapiens
  misc_RNA (1)...(19): siRNA sense strand
guuccgugcugagccgaaa

SEQ ID NO: 1497498 - RNA, 19 nt, Homo sapiens
  misc_RNA (1)...(19): siRNA sense strand
cauccucaaggugguaaua

SEQ ID NO: 1497499 - RNA, 19 nt, Homo sapiens
  misc_RNA (1)...(19): siRNA sense strand
guacgagcuggugguguuu

SEQ ID NO: 1497500 - RNA, 19 nt, Homo sapiens
  misc_RNA (1)...(19): siRNA sense strand
cccaucaaauccugguuca

SEQ ID NO: 1497501 - RNA, 19 nt, Homo sapiens
  misc_RNA (1)...(19): siRNA sense strand
gggaaggucuuggaaauua

SEQ ID NO: 1497502 - RNA, 19 nt, Homo sapiens
  misc_RNA (1)...(19): siRNA sense strand
ucagggagaucuacaaaua

SEQ ID NO: 1497503 - RNA, 19 nt, Homo sapiens
  misc_RNA (1)...(19): siRNA sense strand
gcagacagguuaucaaguu

SEQ ID NO: 1497504 - RNA, 19 nt, Homo sapiens
  misc_RNA (1)...(19): siRNA sense strand
gcauagaucuacaugaauu

SEQ ID NO: 1497505 - RNA, 19 nt, Homo sapiens
  misc_RNA (1)...(19): siRNA sense strand
gcaaggagauuccagguau

SEQ ID NO: 1497506 - RNA, 19 nt, Homo sapiens
  misc_RNA (1)...(19): siRNA sense strand
gaaugaugcugcugaaauu

SEQ ID NO: 1497507 - RNA, 19 nt, Homo sapiens
  misc_RNA (1)...(19): siRNA sense strand
ccaaugacaucuuaccaua

SEQ ID NO: 1497508 - RNA, 19 nt, Homo sapiens
  misc_RNA (1)...(19): siRNA sense strand
gcacugaagaaacaaauua

SEQ ID NO: 1497509 - RNA, 19 nt, Homo sapiens
  misc_RNA (1)...(19): siRNA sense strand
aagaauaccugaucagaaa

SEQ ID NO: 1497510 - RNA, 19 nt, Homo sapiens
  misc_RNA (1)...(19): siRNA sense strand
ggaagucugucauaguaaa

SEQ ID NO: 1497511 - RNA, 19 nt, Homo sapiens
  misc_RNA (1)...(19): siRNA sense strand
cgccagauauuuagaguua

SEQ ID NO: 1497512 - RNA, 19 nt, Homo sapiens
  misc_RNA (1)...(19): siRNA sense strand
ggaguccaguuguguauaa

SEQ ID NO: 1497513 - RNA, 19 nt, Homo sapiens
  misc_RNA (1)...(19): siRNA sense strand
ggacagaaguguguagaau

SEQ ID NO: 1497514 - RNA, 19 nt, Homo sapiens
  misc_RNA (1)...(19): siRNA sense strand
gcacagcccucaacucagu

SEQ ID NO: 1497515 - RNA, 19 nt, Homo sapiens
  misc_RNA (1)...(19): siRNA sense strand
gaaaccugcuguaaccaaa

SEQ ID NO: 1497516 - RNA, 19 nt, Homo sapiens
  misc_RNA (1)...(19): siRNA sense strand
acagaaguguguagaauuu

SEQ ID NO: 1497517 - RNA, 19 nt, Homo sapiens
  misc_RNA (1)...(19): siRNA sense strand
gagaauacguuugaaagau

SEQ ID NO: 1497518 - RNA, 19 nt, Homo sapiens
  misc_RNA (1)...(19): siRNA sense strand
ucagacagcucucuucgaa

SEQ ID NO: 1497519 - RNA, 19 nt, Homo sapiens
  misc_RNA (1)...(19): siRNA sense strand
ggaaauuacugaacuacca

SEQ ID NO: 1497520 - RNA, 19 nt, Homo sapiens
  misc_RNA (1)...(19): siRNA sense strand
gcaagaagcacuaugacuu

SEQ ID NO: 1497521 - RNA, 19 nt, Homo sapiens
  misc_RNA (1)...(19): siRNA sense strand
gcaaaucuauagaagaaag

SEQ ID NO: 1497522 - RNA, 19 nt, Homo sapiens
  misc_RNA (1)...(19): siRNA sense strand
gaggaugucugauacuguu

SEQ ID NO: 1497523 - RNA, 19 nt, Homo sapiens
  misc_RNA (1)...(19): siRNA sense strand
gaauacguuugaaagauga

SEQ ID NO: 1497524 - RNA, 19 nt, Homo sapiens
  misc_RNA (1)...(19): siRNA sense strand
gaucagaacaaguacaauu

SEQ ID NO: 1497525 - RNA, 19 nt, Homo sapiens
  misc_RNA (1)...(19): siRNA sense strand
ccacagcagucugguuaua

SEQ ID NO: 1497526 - RNA, 19 nt, Homo sapiens
  misc_RNA (1)...(19): siRNA sense strand
gaacaagcaagaagcacua

SEQ ID NO: 1497527 - RNA, 19 nt, Homo sapiens
  misc_RNA (1)...(19): siRNA sense strand
gcacugagaaugaguugaa

SEQ ID NO: 1497528 - RNA, 19 nt, Homo sapiens
  misc_RNA (1)...(19): siRNA sense strand
uggcauagaucuacaugaa

SEQ ID NO: 1497529 - RNA, 19 nt, Homo sapiens
  misc_RNA (1)...(19): siRNA sense strand
caagaagcacuaugacuuu

SEQ ID NO: 1497530 - RNA, 19 nt, Homo sapiens
  misc_RNA (1)...(19): siRNA sense strand
uggaauaacucgcauggaa

SEQ ID NO: 1497531 - RNA, 19 nt, Homo sapiens
  misc_RNA (1)...(19): siRNA sense strand
gacagguuaucaaguuaua

SEQ ID NO: 1497532 - RNA, 19 nt, Homo sapiens
  misc_RNA (1)...(19): siRNA sense strand
uaagucaagcucaaaguua

SEQ ID NO: 1497533 - RNA, 19 nt, Homo sapiens
  misc_RNA (1)...(19): siRNA sense strand
caaguacaauuuccucgaa

SEQ ID NO: 1497534 - RNA, 19 nt, Homo sapiens
  misc_RNA (1)...(19): siRNA sense strand
ccaguuaacacaaucauuu

SEQ ID NO: 1497535 - RNA, 19 nt, Homo sapiens
  misc_RNA (1)...(19): siRNA sense strand
gugauaaguugcccagaaa

SEQ ID NO: 1497536 - RNA, 19 nt, Homo sapiens
  misc_RNA (1)...(19): siRNA sense strand
gacaagaggugauaguucu

SEQ ID NO: 1497537 - RNA, 19 nt, Homo sapiens
  misc_RNA (1)...(19): siRNA sense strand
ugggaagucugucauagua

SEQ ID NO: 1497538 - RNA, 19 nt, Homo sapiens
  misc_RNA (1)...(19): siRNA sense strand
gcacuaugacuuucacauu

SEQ ID NO: 1497539 - RNA, 19 nt, Homo sapiens
  misc_RNA (1)...(19): siRNA sense strand
gaugauaaccagaugagaa

SEQ ID NO: 1497540 - RNA, 19 nt, Homo sapiens
  misc_RNA (1)...(19): siRNA sense strand
guacaauccuccugcuguu

SEQ ID NO: 1497541 - RNA, 19 nt, Homo sapiens
  misc_RNA (1)...(19): siRNA sense strand
gaaugccuguuuacuauag

SEQ ID NO: 1497542 - RNA, 19 nt, Homo sapiens
  misc_RNA (1)...(19): siRNA sense strand
ucaagguucucaaggaauu

SEQ ID NO: 1497543 - RNA, 19 nt, Homo sapiens
  misc_RNA (1)...(19): siRNA sense strand
cagaggcgccagauauuua

SEQ ID NO: 1497544 - RNA, 19 nt, Homo sapiens
  misc_RNA (1)...(19): siRNA sense strand
caaacaauccacaaucuug

SEQ ID NO: 1497545 - RNA, 19 nt, Homo sapiens
  misc_RNA (1)...(19): siRNA sense strand
cacuaugacuuucacauuu

SEQ ID NO: 1497546 - RNA, 19 nt, Homo sapiens
  misc_RNA (1)...(19): siRNA sense strand
aauaaugagucuccacgua

SEQ ID NO: 1497547 - RNA, 19 nt, Homo sapiens
  misc_RNA (1)...(19): siRNA sense strand
agaaugcacugaagaaaca

SEQ ID NO: 1497548 - RNA, 19 nt, Homo sapiens
  misc_RNA (1)...(19): siRNA sense strand
gccagcagcuucaguggaa

SEQ ID NO: 1497549 - RNA, 19 nt, Homo sapiens
  misc_RNA (1)...(19): siRNA sense strand
caaagaugauaaccagaug

SEQ ID NO: 1497550 - RNA, 19 nt, Homo sapiens
  misc_RNA (1)...(19): siRNA sense strand
caauuuaagcucuucagua

SEQ ID NO: 1497551 - RNA, 19 nt, Homo sapiens
  misc_RNA (1)...(19): siRNA sense strand
caucaaagcagcacugaga

SEQ ID NO: 1497552 - RNA, 19 nt, Homo sapiens
  misc_RNA (1)...(19): siRNA sense strand
uaaugagucuccacguaaa

SEQ ID NO: 1497553 - RNA, 19 nt, Homo sapiens
  misc_RNA (1)...(19): siRNA sense strand
cagacagguuaucaaguua

SEQ ID NO: 1497554 - RNA, 19 nt, Homo sapiens
  misc_RNA (1)...(19): siRNA sense strand
uaaccuagggucucaguuu

SEQ ID NO: 1497555 - RNA, 19 nt, Homo sapiens
  misc_RNA (1)...(19): siRNA sense strand
ugaacuaccagauggaaua

SEQ ID NO: 1497556 - RNA, 19 nt, Homo sapiens
  misc_RNA (1)...(19): siRNA sense strand
gaugaaacugcaacaauga

SEQ ID NO: 1497557 - RNA, 19 nt, Homo sapiens
  misc_RNA (1)...(19): siRNA sense strand
auacuucagugccaacaua

SEQ ID NO: 1497558 - RNA, 19 nt, Homo sapiens
  misc_RNA (1)...(19): siRNA sense strand
cagaagaagcaaaucuaua

SEQ ID NO: 1497559 - RNA, 19 nt, Homo sapiens
  misc_RNA (1)...(19): siRNA sense strand
caagcaagaagcacuauga

SEQ ID NO: 1497560 - RNA, 19 nt, Homo sapiens
  misc_RNA (1)...(19): siRNA sense strand
gcacagaaugcacugaaga

SEQ ID NO: 1497561 - RNA, 19 nt, Homo sapiens
  misc_RNA (1)...(19): siRNA sense strand
gaacuaccagauggaauaa

SEQ ID NO: 1497562 - RNA, 19 nt, Homo sapiens
  misc_RNA (1)...(19): siRNA sense strand
cugcaacaaugaaggauuu

SEQ ID NO: 1497563 - RNA, 19 nt, Homo sapiens
  misc_RNA (1)...(19): siRNA sense strand
ucauaguucucuuuccuuu

SEQ ID NO: 1497564 - RNA, 19 nt, Homo sapiens
  misc_RNA (1)...(19): siRNA sense strand
gcagaggcgccagauauuu

SEQ ID NO: 1497565 - RNA, 19 nt, Homo sapiens
  misc_RNA (1)...(19): siRNA sense strand
gaagcaaaucuauagaaga

SEQ ID NO: 1497566 - RNA, 19 nt, Homo sapiens
  misc_RNA (1)...(19): siRNA sense strand
ggggaacucuuuaaaauug

SEQ ID NO: 1497567 - RNA, 19 nt, Homo sapiens
  misc_RNA (1)...(19): siRNA sense strand
aggaaugccuguuuacuau

SEQ ID NO: 1497568 - RNA, 19 nt, Homo sapiens
  misc_RNA (1)...(19): siRNA sense strand
gcaaaacuaccaaggaaua

SEQ ID NO: 1497569 - RNA, 19 nt, Homo sapiens
  misc_RNA (1)...(19): siRNA sense strand
gcagucugguuauaucaug

SEQ ID NO: 1497570 - RNA, 19 nt, Homo sapiens
  misc_RNA (1)...(19): siRNA sense strand
gaauaccugaucagaaauu

SEQ ID NO: 1497571 - RNA, 19 nt, Homo sapiens
  misc_RNA (1)...(19): siRNA sense strand
agaugaaacugcaacaaug

SEQ ID NO: 1497572 - RNA, 19 nt, Homo sapiens
  misc_RNA (1)...(19): siRNA sense strand
caacauaucagguuucacu

SEQ ID NO: 1497573 - RNA, 19 nt, Homo sapiens
  misc_RNA (1)...(19): siRNA sense strand
aaccuagggucucaguuua

SEQ ID NO: 1497574 - RNA, 19 nt, Homo sapiens
  misc_RNA (1)...(19): siRNA sense strand
agaauacguuugaaagaug

SEQ ID NO: 1497575 - RNA, 19 nt, Homo sapiens
  misc_RNA (1)...(19): siRNA sense strand
aagucaagcucaaaguuaa

SEQ ID NO: 1497576 - RNA, 19 nt, Homo sapiens
  misc_RNA (1)...(19): siRNA sense strand
aauuuaagcucuucaguag

SEQ ID NO: 1497577 - RNA, 19 nt, Homo sapiens
  misc_RNA (1)...(19): siRNA sense strand
ggaaugccuguuuacuaua

SEQ ID NO: 1497578 - RNA, 19 nt, Homo sapiens
  misc_RNA (1)...(19): siRNA sense strand
auaguucucuuuccuuuga

SEQ ID NO: 1497579 - RNA, 19 nt, Homo sapiens
  misc_RNA (1)...(19): siRNA sense strand
cagcagaggcgccagauau

SEQ ID NO: 1497580 - RNA, 19 nt, Homo sapiens
  misc_RNA (1)...(19): siRNA sense strand
gacagaagaagcaaaucua

SEQ ID NO: 1497581 - RNA, 19 nt, Homo sapiens
  misc_RNA (1)...(19): siRNA sense strand
caagaauaccugaucagaa

SEQ ID NO: 1497582 - RNA, 19 nt, Homo sapiens
  misc_RNA (1)...(19): siRNA sense strand
gauuagaccacaauguuga

SEQ ID NO: 1497583 - RNA, 19 nt, Homo sapiens
  misc_RNA (1)...(19): siRNA sense strand
cacaaucauuugagaaaga

SEQ ID NO: 1497584 - RNA, 19 nt, Homo sapiens
  misc_RNA (1)...(19): siRNA sense strand
gcucaaaguuaaagcuagu

SEQ ID NO: 1497585 - RNA, 19 nt, Homo sapiens
  misc_RNA (1)...(19): siRNA sense strand
acaaauagccaucaaagca

SEQ ID NO: 1497586 - RNA, 19 nt, Homo sapiens
  misc_RNA (1)...(19): siRNA sense strand
gaagaagcaaaucuauaga

SEQ ID NO: 1497587 - RNA, 19 nt, Homo sapiens
  misc_RNA (1)...(19): siRNA sense strand
gaugagaauacguuugaaa

SEQ ID NO: 1497588 - RNA, 19 nt, Homo sapiens
  misc_RNA (1)...(19): siRNA sense strand
cagaugagaauacguuuga

SEQ ID NO: 1497589 - RNA, 19 nt, Homo sapiens
  misc_RNA (1)...(19): siRNA sense strand
gagaagcccucaaaagaug

SEQ ID NO: 1497590 - RNA, 19 nt, Homo sapiens
  misc_RNA (1)...(19): siRNA sense strand
uuugaaagaugacagaaga

SEQ ID NO: 1497591 - RNA, 19 nt, Homo sapiens
  misc_RNA (1)...(19): siRNA sense strand
caauucacaucuaaaccaa

SEQ ID NO: 1497592 - RNA, 19 nt, Homo sapiens
  misc_RNA (1)...(19): siRNA sense strand
cagcagccaucaccacaga

SEQ ID NO: 1497593 - RNA, 19 nt, Homo sapiens
  misc_RNA (1)...(19): siRNA sense strand
gagaaugaguugaaguacu

SEQ ID NO: 1497594 - RNA, 19 nt, Homo sapiens
  misc_RNA (1)...(19): siRNA sense strand
guuauauccucaagagaga

SEQ ID NO: 1497595 - RNA, 19 nt, Homo sapiens
  misc_RNA (1)...(19): siRNA sense strand
cagcacagcccucaacuca

SEQ ID NO: 1497596 - RNA, 19 nt, Homo sapiens
  misc_RNA (1)...(19): siRNA sense strand
agaagaagcaaaucuauag

SEQ ID NO: 1497597 - RNA, 19 nt, Homo sapiens
  misc_RNA (1)...(19): siRNA sense strand
cauuucagcugcacagaau

SEQ ID NO: 1497598 - RNA, 19 nt, Homo sapiens
  misc_RNA (1)...(19): siRNA sense strand
gaauuuagcaguguagaca

SEQ ID NO: 1497599 - RNA, 19 nt, Homo sapiens
  misc_RNA (1)...(19): siRNA sense strand
ccucaagguucucaaggaa

SEQ ID NO: 1497600 - RNA, 19 nt, Homo sapiens
  misc_RNA (1)...(19): siRNA sense strand
gcagucauuuggacagaca

SEQ ID NO: 1497601 - RNA, 19 nt, Homo sapiens
  misc_RNA (1)...(19): siRNA sense strand
gaacaagcaacucauauuu

SEQ ID NO: 1497602 - RNA, 19 nt, Homo sapiens
  misc_RNA (1)...(19): siRNA sense strand
agaagaagcugaauuuguu

SEQ ID NO: 1497603 - RNA, 19 nt, Homo sapiens
  misc_RNA (1)...(19): siRNA sense strand
ucacugaaaucaucucuuu

SEQ ID NO: 1497604 - RNA, 19 nt, Homo sapiens
  misc_RNA (1)...(19): siRNA sense strand
ccaaauggguuagacguua

SEQ ID NO: 1497605 - RNA, 19 nt, Homo sapiens
  misc_RNA (1)...(19): siRNA sense strand
gaacugggcugccucucaa

SEQ ID NO: 1497606 - RNA, 19 nt, Homo sapiens
  misc_RNA (1)...(19): siRNA sense strand
gauaagccgucaagcauug

SEQ ID NO: 1497607 - RNA, 19 nt, Homo sapiens
  misc_RNA (1)...(19): siRNA sense strand
gaacacacuucuuucucaa

SEQ ID NO: 1497608 - RNA, 19 nt, Homo sapiens
  misc_RNA (1)...(19): siRNA sense strand
acaagcaacucauauuuga

SEQ ID NO: 1497609 - RNA, 19 nt, Homo sapiens
  misc_RNA (1)...(19): siRNA sense strand
gguuagacguuaccuuuga

SEQ ID NO: 1497610 - RNA, 19 nt, Homo sapiens
  misc_RNA (1)...(19): siRNA sense strand
gagaagaagcugaauuugu

SEQ ID NO: 1497611 - RNA, 19 nt, Homo sapiens
  misc_RNA (1)...(19): siRNA sense strand
gagaggugcuuugcugaaa

SEQ ID NO: 1497612 - RNA, 19 nt, Homo sapiens
  misc_RNA (1)...(19): siRNA sense strand
ccaaagcucauauucguaa

SEQ ID NO: 1497613 - RNA, 19 nt, Homo sapiens
  misc_RNA (1)...(19): siRNA sense strand
uaacugaauugaggagauu

SEQ ID NO: 1497614 - RNA, 19 nt, Homo sapiens
  misc_RNA (1)...(19): siRNA sense strand
cgaacacacuucuuucuca

SEQ ID NO: 1497615 - RNA, 19 nt, Homo sapiens
  misc_RNA (1)...(19): siRNA sense strand
gaaagcggacauucacuga

SEQ ID NO: 1497616 - RNA, 19 nt, Homo sapiens
  misc_RNA (1)...(19): siRNA sense strand
gcugaaaguuaaccaggaa

SEQ ID NO: 1497617 - RNA, 19 nt, Homo sapiens
  misc_RNA (1)...(19): siRNA sense strand
gguuggaacuuaauuacug

SEQ ID NO: 1497618 - RNA, 19 nt, Homo sapiens
  misc_RNA (1)...(19): siRNA sense strand
gagcgaaggagacuaccua

SEQ ID NO: 1497619 - RNA, 19 nt, Homo sapiens
  misc_RNA (1)...(19): siRNA sense strand
ggaaacuucgaaagaaauu

SEQ ID NO: 1497620 - RNA, 19 nt, Homo sapiens
  misc_RNA (1)...(19): siRNA sense strand
caaugaaggcaguauggua

SEQ ID NO: 1497621 - RNA, 19 nt, Homo sapiens
  misc_RNA (1)...(19): siRNA sense strand
gaacaaaagaaacuucgua

SEQ ID NO: 1497622 - RNA, 19 nt, Homo sapiens
  misc_RNA (1)...(19): siRNA sense strand
ccggaaacuucgaaagaaa

SEQ ID NO: 1497623 - RNA, 19 nt, Homo sapiens
  misc_RNA (1)...(19): siRNA sense strand
ggacuuggaaggacuaaag

SEQ ID NO: 1497624 - RNA, 19 nt, Homo sapiens
  misc_RNA (1)...(19): siRNA sense strand
gaagaagcugaauuuguug

SEQ ID NO: 1497625 - RNA, 19 nt, Homo sapiens
  misc_RNA (1)...(19): siRNA sense strand
guaacugaauugaggagau

SEQ ID NO: 1497626 - RNA, 19 nt, Homo sapiens
  misc_RNA (1)...(19): siRNA sense strand
agacguuaccuuugaagua

SEQ ID NO: 1497627 - RNA, 19 nt, Homo sapiens
  misc_RNA (1)...(19): siRNA sense strand
gaaggacuaaagaugauau

SEQ ID NO: 1497628 - RNA, 19 nt, Homo sapiens
  misc_RNA (1)...(19): siRNA sense strand
ugaacaagcaacucauauu

SEQ ID NO: 1497629 - RNA, 19 nt, Homo sapiens
  misc_RNA (1)...(19): siRNA sense strand
ggaaggacuaaagaugaua

SEQ ID NO: 1497630 - RNA, 19 nt, Homo sapiens
  misc_RNA (1)...(19): siRNA sense strand
cgaaggagacuaccuaggu

SEQ ID NO: 1497631 - RNA, 19 nt, Homo sapiens
  misc_RNA (1)...(19): siRNA sense strand
ggagaggugcuuugcugaa

SEQ ID NO: 1497632 - RNA, 19 nt, Homo sapiens
  misc_RNA (1)...(19): siRNA sense strand
gaagcugaauuuguugaag

SEQ ID NO: 1497633 - RNA, 19 nt, Homo sapiens
  misc_RNA (1)...(19): siRNA sense strand
caccaugguuggaaacaau

SEQ ID NO: 1497634 - RNA, 19 nt, Homo sapiens
  misc_RNA (1)...(19): siRNA sense strand
gaaguugagccugaagcua

SEQ ID NO: 1497635 - RNA, 19 nt, Homo sapiens
  misc_RNA (1)...(19): siRNA sense strand
aggagaagaagcugaauuu

SEQ ID NO: 1497636 - RNA, 19 nt, Homo sapiens
  misc_RNA (1)...(19): siRNA sense strand
acagacaggcgacaggaua

SEQ ID NO: 1497637 - RNA, 19 nt, Homo sapiens
  misc_RNA (1)...(19): siRNA sense strand
ccacaagcguccgcggauu

SEQ ID NO: 1497638 - RNA, 19 nt, Homo sapiens
  misc_RNA (1)...(19): siRNA sense strand
gaagcuaaacaggaaauuc

SEQ ID NO: 1497639 - RNA, 19 nt, Homo sapiens
  misc_RNA (1)...(19): siRNA sense strand
caaauggguuagacguuac

SEQ ID NO: 1497640 - RNA, 19 nt, Homo sapiens
  misc_RNA (1)...(19): siRNA sense strand
ucaaggugaugacgcacuu

SEQ ID NO: 1497641 - RNA, 19 nt, Homo sapiens
  misc_RNA (1)...(19): siRNA sense strand
gccucaagcuuccuaaucu

SEQ ID NO: 1497642 - RNA, 19 nt, Homo sapiens
  misc_RNA (1)...(19): siRNA sense strand
ggagaagaagcugaauuug

SEQ ID NO: 1497643 - RNA, 19 nt, Homo sapiens
  misc_RNA (1)...(19): siRNA sense strand
gaugacgcacuuccaaaug

SEQ ID NO: 1497644 - RNA, 19 nt, Homo sapiens
  misc_RNA (1)...(19): siRNA sense strand
gaaggcguauggcgagaac

SEQ ID NO: 1497645 - RNA, 19 nt, Homo sapiens
  misc_RNA (1)...(19): siRNA sense strand
gcccggaaacuucgaaaga

SEQ ID NO: 1497646 - RNA, 19 nt, Homo sapiens
  misc_RNA (1)...(19): siRNA sense strand
cguauggccuguccuucuu

SEQ ID NO: 1497647 - RNA, 19 nt, Homo sapiens
  misc_RNA (1)...(19): siRNA sense strand
guuagacguuaccuuugaa

SEQ ID NO: 1497648 - RNA, 19 nt, Homo sapiens
  misc_RNA (1)...(19): siRNA sense strand
gcuaaacaggaaauucuug

SEQ ID NO: 1497649 - RNA, 19 nt, Homo sapiens
  misc_RNA (1)...(19): siRNA sense strand
aaguugagccugaagcuaa

SEQ ID NO: 1497650 - RNA, 19 nt, Homo sapiens
  misc_RNA (1)...(19): siRNA sense strand
acaaguggauguuuugauu

SEQ ID NO: 1497651 - RNA, 19 nt, Homo sapiens
  misc_RNA (1)...(19): siRNA sense strand
gaaacaaugaaggcaguau

SEQ ID NO: 1497652 - RNA, 19 nt, Homo sapiens
  misc_RNA (1)...(19): siRNA sense strand
gugauaagccgucaagcau

SEQ ID NO: 1497653 - RNA, 19 nt, Homo sapiens
  misc_RNA (1)...(19): siRNA sense strand
caaaagaaacuucguaugg

SEQ ID NO: 1497654 - RNA, 19 nt, Homo sapiens
  misc_RNA (1)...(19): siRNA sense strand
uggaaggacuaaagaugau

SEQ ID NO: 1497655 - RNA, 19 nt, Homo sapiens
  misc_RNA (1)...(19): siRNA sense strand
caacucauauuugauucag

SEQ ID NO: 1497656 - RNA, 19 nt, Homo sapiens
  misc_RNA (1)...(19): siRNA sense strand
ggaagaccagccacacugu

SEQ ID NO: 1497657 - RNA, 19 nt, Homo sapiens
  misc_RNA (1)...(19): siRNA sense strand
ggagacggacagaggaaug

SEQ ID NO: 1497658 - RNA, 19 nt, Homo sapiens
  misc_RNA (1)...(19): siRNA sense strand
ccuuugaaguaacugaauu

SEQ ID NO: 1497659 - RNA, 19 nt, Homo sapiens
  misc_RNA (1)...(19): siRNA sense strand
guaaugcggaaaucucaug

SEQ ID NO: 1497660 - RNA, 19 nt, Homo sapiens
  misc_RNA (1)...(19): siRNA sense strand
cuaaacaggaaauucuuga

SEQ ID NO: 1497661 - RNA, 19 nt, Homo sapiens
  misc_RNA (1)...(19): siRNA sense strand
cccggaaacuucgaaagaa

SEQ ID NO: 1497662 - RNA, 19 nt, Homo sapiens
  misc_RNA (1)...(19): siRNA sense strand
cugaauuuguugaaguuga

SEQ ID NO: 1497663 - RNA, 19 nt, Homo sapiens
  misc_RNA (1)...(19): siRNA sense strand
ggugauaagccgucaagca

SEQ ID NO: 1497664 - RNA, 19 nt, Homo sapiens
  misc_RNA (1)...(19): siRNA sense strand
aagcugaauuuguugaagu

SEQ ID NO: 1497665 - RNA, 19 nt, Homo sapiens
  misc_RNA (1)...(19): siRNA sense strand
caagcuuccuaaucuucuu

SEQ ID NO: 1497666 - RNA, 19 nt, Homo sapiens
  misc_RNA (1)...(19): siRNA sense strand
ggaaacaaugaaggcagua

SEQ ID NO: 1497667 - RNA, 19 nt, Homo sapiens
  misc_RNA (1)...(19): siRNA sense strand
uggguuagacguuaccuuu

SEQ ID NO: 1497668 - RNA, 19 nt, Homo sapiens
  misc_RNA (1)...(19): siRNA sense strand
ccucaagcuuccuaaucuu

SEQ ID NO: 1497669 - RNA, 19 nt, Homo sapiens
  misc_RNA (1)...(19): siRNA sense strand
gcaguuauaacaccauggu

SEQ ID NO: 1497670 - RNA, 19 nt, Homo sapiens
  misc_RNA (1)...(19): siRNA sense strand
ucugcaaccucaacuaugg

SEQ ID NO: 1497671 - RNA, 19 nt, Homo sapiens
  misc_RNA (1)...(19): siRNA sense strand
gcaacucauauuugauuca

SEQ ID NO: 1497672 - RNA, 19 nt, Homo sapiens
  misc_RNA (1)...(19): siRNA sense strand
gaggaaugucagcugagua

SEQ ID NO: 1497673 - RNA, 19 nt, Homo sapiens
  misc_RNA (1)...(19): siRNA sense strand
gaguacaguuuucccauau

SEQ ID NO: 1497674 - RNA, 19 nt, Homo sapiens
  misc_RNA (1)...(19): siRNA sense strand
aaauugcuccgucuuggaa

SEQ ID NO: 1497675 - RNA, 19 nt, Homo sapiens
  misc_RNA (1)...(19): siRNA sense strand
ugaauuuguugaaguugag

SEQ ID NO: 1497676 - RNA, 19 nt, Homo sapiens
  misc_RNA (1)...(19): siRNA sense strand
gaaaagaaagcggacauuc

SEQ ID NO: 1497677 - RNA, 19 nt, Homo sapiens
  misc_RNA (1)...(19): siRNA sense strand
auaacaccaugguuggaaa

SEQ ID NO: 1497678 - RNA, 19 nt, Homo sapiens
  misc_RNA (1)...(19): siRNA sense strand
ggugaugacgcacuuccaa

SEQ ID NO: 1497679 - RNA, 19 nt, Homo sapiens
  misc_RNA (1)...(19): siRNA sense strand
ucgcucgguuggaacuuaa

SEQ ID NO: 1497680 - RNA, 19 nt, Homo sapiens
  misc_RNA (1)...(19): siRNA sense strand
ggaacuggcaggcuacacu

SEQ ID NO: 1497681 - RNA, 19 nt, Homo sapiens
  misc_RNA (1)...(19): siRNA sense strand
caagugggaaggcguaugg

SEQ ID NO: 1497682 - RNA, 19 nt, Homo sapiens
  misc_RNA (1)...(19): siRNA sense strand
ugaguacaguuuucccaua

SEQ ID NO: 1497683 - RNA, 19 nt, Homo sapiens
  misc_RNA (1)...(19): siRNA sense strand
aaacaaugaaggcaguaug

SEQ ID NO: 1497684 - RNA, 19 nt, Homo sapiens
  misc_RNA (1)...(19): siRNA sense strand
guuuggagcugggauaagg

SEQ ID NO: 1497685 - RNA, 19 nt, Homo sapiens
  misc_RNA (1)...(19): siRNA sense strand
aacaagcaacucauauuug

SEQ ID NO: 1497686 - RNA, 19 nt, Homo sapiens
  misc_RNA (1)...(19): siRNA sense strand
ugucagcugaguacaguuu

SEQ ID NO: 1497687 - RNA, 19 nt, Homo sapiens
  misc_RNA (1)...(19): siRNA sense strand
aaagaaagcggacauucac

SEQ ID NO: 1497688 - RNA, 19 nt, Homo sapiens
  misc_RNA (1)...(19): siRNA sense strand
gugauggcguccaguuugg

SEQ ID NO: 1497689 - RNA, 19 nt, Homo sapiens
  misc_RNA (1)...(19): siRNA sense strand
ugauaagccgucaagcauu

SEQ ID NO: 1497690 - RNA, 19 nt, Homo sapiens
  misc_RNA (1)...(19): siRNA sense strand
gaaugucagcugaguacag

SEQ ID NO: 1497691 - RNA, 19 nt, Homo sapiens
  misc_RNA (1)...(19): siRNA sense strand
gugaugacgcacuuccaaa

SEQ ID NO: 1497692 - RNA, 19 nt, Homo sapiens
  misc_RNA (1)...(19): siRNA sense strand
ccucaggcuuggcaacauc

SEQ ID NO: 1497693 - RNA, 19 nt, Homo sapiens
  misc_RNA (1)...(19): siRNA sense strand
caggaaaccucugcaaccu

SEQ ID NO: 1497694 - RNA, 19 nt, Homo sapiens
  misc_RNA (1)...(19): siRNA sense strand
ggaaggcguauggcgagaa

SEQ ID NO: 1497695 - RNA, 19 nt, Homo sapiens
  misc_RNA (1)...(19): siRNA sense strand
caaagaugugguuguucaa

SEQ ID NO: 1497696 - RNA, 19 nt, Homo sapiens
  misc_RNA (1)...(19): siRNA sense strand
aaugucagcugaguacagu

SEQ ID NO: 1497697 - RNA, 19 nt, Homo sapiens
  misc_RNA (1)...(19): siRNA sense strand
uuggaaggacuaaagauga

SEQ ID NO: 1497698 - RNA, 19 nt, Homo sapiens
  misc_RNA (1)...(19): siRNA sense strand
gucauuugcuguucgaaaa

SEQ ID NO: 1497699 - RNA, 19 nt, Homo sapiens
  misc_RNA (1)...(19): siRNA sense strand
gagguaaugcggaaaucuc

SEQ ID NO: 1497700 - RNA, 19 nt, Homo sapiens
  misc_RNA (1)...(19): siRNA sense strand
gcaccucuacaccccauua

SEQ ID NO: 1497701 - RNA, 19 nt, Homo sapiens
  misc_RNA (1)...(19): siRNA sense strand
caaggaaucucaagaaaug

SEQ ID NO: 1497702 - RNA, 19 nt, Homo sapiens
  misc_RNA (1)...(19): siRNA sense strand
ggagaugccuucgacuuua

SEQ ID NO: 1497703 - RNA, 19 nt, Homo sapiens
  misc_RNA (1)...(19): siRNA sense strand
gaaaggaggugcuucuaag

SEQ ID NO: 1497704 - RNA, 19 nt, Homo sapiens
  misc_RNA (1)...(19): siRNA sense strand
gaagacugccuauaucaaa

SEQ ID NO: 1497705 - RNA, 19 nt, Homo sapiens
  misc_RNA (1)...(19): siRNA sense strand
gagaugccuucgacuuuaa

SEQ ID NO: 1497706 - RNA, 19 nt, Homo sapiens
  misc_RNA (1)...(19): siRNA sense strand
guagaacaauauccuggua

SEQ ID NO: 1497707 - RNA, 19 nt, Homo sapiens
  misc_RNA (1)...(19): siRNA sense strand
gcagauauccuuuuagauu

SEQ ID NO: 1497708 - RNA, 19 nt, Homo sapiens
  misc_RNA (1)...(19): siRNA sense strand
ggcauuggcuucacagauc

SEQ ID NO: 1497709 - RNA, 19 nt, Homo sapiens
  misc_RNA (1)...(19): siRNA sense strand
ggguaaagcaggaaucuga

SEQ ID NO: 1497710 - RNA, 19 nt, Homo sapiens
  misc_RNA (1)...(19): siRNA sense strand
gggagaugccuucgacuuu

SEQ ID NO: 1497711 - RNA, 19 nt, Homo sapiens
  misc_RNA (1)...(19): siRNA sense strand
gaaauuagaccagccugau

SEQ ID NO: 1497712 - RNA, 19 nt, Homo sapiens
  misc_RNA (1)...(19): siRNA sense strand
guacgagucugugcugugu

SEQ ID NO: 1497713 - RNA, 19 nt, Homo sapiens
  misc_RNA (1)...(19): siRNA sense strand
ggaagacugccuauaucaa

SEQ ID NO: 1497714 - RNA, 19 nt, Homo sapiens
  misc_RNA (1)...(19): siRNA sense strand
gaaauggaugcucguccua

SEQ ID NO: 1497715 - RNA, 19 nt, Homo sapiens
  misc_RNA (1)...(19): siRNA sense strand
ccaccauccuccucaguug

SEQ ID NO: 1497716 - RNA, 19 nt, Homo sapiens
  misc_RNA (1)...(19): siRNA sense strand
cgaccgaguuggaguacga

SEQ ID NO: 1497717 - RNA, 19 nt, Homo sapiens
  misc_RNA (1)...(19): siRNA sense strand
uccaaggaaucucaagaaa

SEQ ID NO: 1497718 - RNA, 19 nt, Homo sapiens
  misc_RNA (1)...(19): siRNA sense strand
ggaggcaaagucacuauuc

SEQ ID NO: 1497719 - RNA, 19 nt, Homo sapiens
  misc_RNA (1)...(19): siRNA sense strand
gggaagacugccuauauca

SEQ ID NO: 1497720 - RNA, 19 nt, Homo sapiens
  misc_RNA (1)...(19): siRNA sense strand
ccaaggaaucucaagaaau

SEQ ID NO: 1497721 - RNA, 19 nt, Homo sapiens
  misc_RNA (1)...(19): siRNA sense strand
ucgggaacauuacaaacaa

SEQ ID NO: 1497722 - RNA, 19 nt, Homo sapiens
  misc_RNA (1)...(19): siRNA sense strand
aagggaagacugccuauau

SEQ ID NO: 1497723 - RNA, 19 nt, Homo sapiens
  misc_RNA (1)...(19): siRNA sense strand
caaaccaucaaguugugua

SEQ ID NO: 1497724 - RNA, 19 nt, Homo sapiens
  misc_RNA (1)...(19): siRNA sense strand
uggagacggugacagauuc

SEQ ID NO: 1497725 - RNA, 19 nt, Homo sapiens
  misc_RNA (1)...(19): siRNA sense strand
ggacuggucgccuccgaau

SEQ ID NO: 1497726 - RNA, 19 nt, Homo sapiens
  misc_RNA (1)...(19): siRNA sense strand
ggaacauuacaaacaagaa

SEQ ID NO: 1497727 - RNA, 19 nt, Homo sapiens
  misc_RNA (1)...(19): siRNA sense strand
gaaggacaaaccaucaagu

SEQ ID NO: 1497728 - RNA, 19 nt, Homo sapiens
  misc_RNA (1)...(19): siRNA sense strand
guaaagcaggaaucugaga

SEQ ID NO: 1497729 - RNA, 19 nt, Homo sapiens
  misc_RNA (1)...(19): siRNA sense strand
ggaugcucguccuaaguug

SEQ ID NO: 1497730 - RNA, 19 nt, Homo sapiens
  misc_RNA (1)...(19): siRNA sense strand
cagggccucugacuggaaa

SEQ ID NO: 1497731 - RNA, 19 nt, Homo sapiens
  misc_RNA (1)...(19): siRNA sense strand
aggcaccaguagaacaaua

SEQ ID NO: 1497732 - RNA, 19 nt, Homo sapiens
  misc_RNA (1)...(19): siRNA sense strand
ggaaggacaaaccaucaag

SEQ ID NO: 1497733 - RNA, 19 nt, Homo sapiens
  misc_RNA (1)...(19): siRNA sense strand
ugaugcagauauccuuuua

SEQ ID NO: 1497734 - RNA, 19 nt, Homo sapiens
  misc_RNA (1)...(19): siRNA sense strand
ggaucugggcuucaaggaa

SEQ ID NO: 1497735 - RNA, 19 nt, Homo sapiens
  misc_RNA (1)...(19): siRNA sense strand
gggaacauuacaaacaaga

SEQ ID NO: 1497736 - RNA, 19 nt, Homo sapiens
  misc_RNA (1)...(19): siRNA sense strand
uccgaaaucuaaccaugga

SEQ ID NO: 1497737 - RNA, 19 nt, Homo sapiens
  misc_RNA (1)...(19): siRNA sense strand
agggaagacugccuauauc

SEQ ID NO: 1497738 - RNA, 19 nt, Homo sapiens
  misc_RNA (1)...(19): siRNA sense strand
guggagacggugacagauu

SEQ ID NO: 1497739 - RNA, 19 nt, Homo sapiens
  misc_RNA (1)...(19): siRNA sense strand
acucgaggauaaaguuuca

SEQ ID NO: 1497740 - RNA, 19 nt, Homo sapiens
  misc_RNA (1)...(19): siRNA sense strand
aaauuagaccagccugauu

SEQ ID NO: 1497741 - RNA, 19 nt, Homo sapiens
  misc_RNA (1)...(19): siRNA sense strand
gaggcaaagucacuauucc

SEQ ID NO: 1497742 - RNA, 19 nt, Homo sapiens
  misc_RNA (1)...(19): siRNA sense strand
ggccucugacuggaaauua

SEQ ID NO: 1497743 - RNA, 19 nt, Homo sapiens
  misc_RNA (1)...(19): siRNA sense strand
gggcgcagugcuuucauug

SEQ ID NO: 1497744 - RNA, 19 nt, Homo sapiens
  misc_RNA (1)...(19): siRNA sense strand
gcgguuacagggccucuga

SEQ ID NO: 1497745 - RNA, 19 nt, Homo sapiens
  misc_RNA (1)...(19): siRNA sense strand
aaggacaaaccaucaaguu

SEQ ID NO: 1497746 - RNA, 19 nt, Homo sapiens
  misc_RNA (1)...(19): siRNA sense strand
ggaggcagugaugcagaua

SEQ ID NO: 1497747 - RNA, 19 nt, Homo sapiens
  misc_RNA (1)...(19): siRNA sense strand
aauuagaccagccugauug

SEQ ID NO: 1497748 - RNA, 19 nt, Homo sapiens
  misc_RNA (1)...(19): siRNA sense strand
guaucgggaacauuacaaa

SEQ ID NO: 1497749 - RNA, 19 nt, Homo sapiens
  misc_RNA (1)...(19): siRNA sense strand
uuguguaucgggaacauua

SEQ ID NO: 1497750 - RNA, 19 nt, Homo sapiens
  misc_RNA (1)...(19): siRNA sense strand
ucaggcaccaguagaacaa

SEQ ID NO: 1497751 - RNA, 19 nt, Homo sapiens
  misc_RNA (1)...(19): siRNA sense strand
caguuucuguaagcaauga

SEQ ID NO: 1497752 - RNA, 19 nt, Homo sapiens
  misc_RNA (1)...(19): siRNA sense strand
gccaucagcaaucauguca

SEQ ID NO: 1497753 - RNA, 19 nt, Homo sapiens
  misc_RNA (1)...(19): siRNA sense strand
aaagggaagacugccuaua

SEQ ID NO: 1497754 - RNA, 19 nt, Homo sapiens
  misc_RNA (1)...(19): siRNA sense strand
gccucugacuggaaauuag

SEQ ID NO: 1497755 - RNA, 19 nt, Homo sapiens
  misc_RNA (1)...(19): siRNA sense strand
caccacagccauccaacug

SEQ ID NO: 1497756 - RNA, 19 nt, Homo sapiens
  misc_RNA (1)...(19): siRNA sense strand
ggucgccuccgaaucacuu

SEQ ID NO: 1497757 - RNA, 19 nt, Homo sapiens
  misc_RNA (1)...(19): siRNA sense strand
aggcagugaugcagauauc

SEQ ID NO: 1497758 - RNA, 19 nt, Homo sapiens
  misc_RNA (1)...(19): siRNA sense strand
cgucagcgucuaccggauu

SEQ ID NO: 1497759 - RNA, 19 nt, Homo sapiens
  misc_RNA (1)...(19): siRNA sense strand
uggaugcucguccuaaguu

SEQ ID NO: 1497760 - RNA, 19 nt, Homo sapiens
  misc_RNA (1)...(19): siRNA sense strand
aaauggaugcucguccuaa

SEQ ID NO: 1497761 - RNA, 19 nt, Homo sapiens
  misc_RNA (1)...(19): siRNA sense strand
ccagcucuguuccaaacca

SEQ ID NO: 1497762 - RNA, 19 nt, Homo sapiens
  misc_RNA (1)...(19): siRNA sense strand
guacugaacuggacaaaga

SEQ ID NO: 1497763 - RNA, 19 nt, Homo sapiens
  misc_RNA (1)...(19): siRNA sense strand
gaaagcauuugcacuguuu

SEQ ID NO: 1497764 - RNA, 19 nt, Homo sapiens
  misc_RNA (1)...(19): siRNA sense strand
gaaauggaaucuacagugu

SEQ ID NO: 1497765 - RNA, 19 nt, Homo sapiens
  misc_RNA (1)...(19): siRNA sense strand
acaaagaacugucugaaga

SEQ ID NO: 1497766 - RNA, 19 nt, Homo sapiens
  misc_RNA (1)...(19): siRNA sense strand
gcuguagacuccuucuuua

SEQ ID NO: 1497767 - RNA, 19 nt, Homo sapiens
  misc_RNA (1)...(19): siRNA sense strand
gaagagagcauuuaaagcu

SEQ ID NO: 1497768 - RNA, 19 nt, Homo sapiens
  misc_RNA (1)...(19): siRNA sense strand
gaucugacaggaauacaua

SEQ ID NO: 1497769 - RNA, 19 nt, Homo sapiens
  misc_RNA (1)...(19): siRNA sense strand
guuuggagauguaaaguuu

SEQ ID NO: 1497770 - RNA, 19 nt, Homo sapiens
  misc_RNA (1)...(19): siRNA sense strand
caaccuaccagcaauguuu

SEQ ID NO: 1497771 - RNA, 19 nt, Homo sapiens
  misc_RNA (1)...(19): siRNA sense strand
acaaggagcucggguuuga

SEQ ID NO: 1497772 - RNA, 19 nt, Homo sapiens
  misc_RNA (1)...(19): siRNA sense strand
gcacaaggagcucggguuu

SEQ ID NO: 1497773 - RNA, 19 nt, Homo sapiens
  misc_RNA (1)...(19): siRNA sense strand
gcaaagaaauccccaacuu

SEQ ID NO: 1497774 - RNA, 19 nt, Homo sapiens
  misc_RNA (1)...(19): siRNA sense strand
caacuugccucaugauguc

SEQ ID NO: 1497775 - RNA, 19 nt, Homo sapiens
  misc_RNA (1)...(19): siRNA sense strand
caugagaucugacaggaau

SEQ ID NO: 1497776 - RNA, 19 nt, Homo sapiens
  misc_RNA (1)...(19): siRNA sense strand
aauggaaucuacaguguuu

SEQ ID NO: 1497777 - RNA, 19 nt, Homo sapiens
  misc_RNA (1)...(19): siRNA sense strand
uaacggauauagcuguaga

SEQ ID NO: 1497778 - RNA, 19 nt, Homo sapiens
  misc_RNA (1)...(19): siRNA sense strand
cagaucaacuugccucaug

SEQ ID NO: 1497779 - RNA, 19 nt, Homo sapiens
  misc_RNA (1)...(19): siRNA sense strand
ugacaggaauacauauguu

SEQ ID NO: 1497780 - RNA, 19 nt, Homo sapiens
  misc_RNA (1)...(19): siRNA sense strand
ugaggaagcugaagaagac

SEQ ID NO: 1497781 - RNA, 19 nt, Homo sapiens
  misc_RNA (1)...(19): siRNA sense strand
ucaggaauauugaaaugga

SEQ ID NO: 1497782 - RNA, 19 nt, Homo sapiens
  misc_RNA (1)...(19): siRNA sense strand
guucaacuguagcaaagaa

SEQ ID NO: 1497783 - RNA, 19 nt, Homo sapiens
  misc_RNA (1)...(19): siRNA sense strand
gcaacggccucagcuccua

SEQ ID NO: 1497784 - RNA, 19 nt, Homo sapiens
  misc_RNA (1)...(19): siRNA sense strand
ggaugaagacauucucuau

SEQ ID NO: 1497785 - RNA, 19 nt, Homo sapiens
  misc_RNA (1)...(19): siRNA sense strand
accagggacuguuguaaua

SEQ ID NO: 1497786 - RNA, 19 nt, Homo sapiens
  misc_RNA (1)...(19): siRNA sense strand
gaugucaccauuauuagaa

SEQ ID NO: 1497787 - RNA, 19 nt, Homo sapiens
  misc_RNA (1)...(19): siRNA sense strand
caaagaacugucugaagaa

SEQ ID NO: 1497788 - RNA, 19 nt, Homo sapiens
  misc_RNA (1)...(19): siRNA sense strand
ggaagcugaagaagacaua

SEQ ID NO: 1497789 - RNA, 19 nt, Homo sapiens
  misc_RNA (1)...(19): siRNA sense strand
caauguguaccuaugauuu

SEQ ID NO: 1497790 - RNA, 19 nt, Homo sapiens
  misc_RNA (1)...(19): siRNA sense strand
gugcugcgaugucaccauu

SEQ ID NO: 1497791 - RNA, 19 nt, Homo sapiens
  misc_RNA (1)...(19): siRNA sense strand
aaagguuuguucacguuaa

SEQ ID NO: 1497792 - RNA, 19 nt, Homo sapiens
  misc_RNA (1)...(19): siRNA sense strand
gcugcgaugucaccauuau

SEQ ID NO: 1497793 - RNA, 19 nt, Homo sapiens
  misc_RNA (1)...(19): siRNA sense strand
ugaaagcauuugcacuguu

SEQ ID NO: 1497794 - RNA, 19 nt, Homo sapiens
  misc_RNA (1)...(19): siRNA sense strand
augaagacauucucuauca

SEQ ID NO: 1497795 - RNA, 19 nt, Homo sapiens
  misc_RNA (1)...(19): siRNA sense strand
uuugauggaugaagacauu

SEQ ID NO: 1497796 - RNA, 19 nt, Homo sapiens
  misc_RNA (1)...(19): siRNA sense strand
ugucaggaauauugaaaug

SEQ ID NO: 1497797 - RNA, 19 nt, Homo sapiens
  misc_RNA (1)...(19): siRNA sense strand
ggaauacauauguuggaaa

SEQ ID NO: 1497798 - RNA, 19 nt, Homo sapiens
  misc_RNA (1)...(19): siRNA sense strand
aauaacggauauagcugua

SEQ ID NO: 1497799 - RNA, 19 nt, Homo sapiens
  misc_RNA (1)...(19): siRNA sense strand
uccaauagguccaugagau

SEQ ID NO: 1497800 - RNA, 19 nt, Homo sapiens
  misc_RNA (1)...(19): siRNA sense strand
cuacaguguuugcagcuau

SEQ ID NO: 1497801 - RNA, 19 nt, Homo sapiens
  misc_RNA (1)...(19): siRNA sense strand
gcuggugucaggaauauug

SEQ ID NO: 1497802 - RNA, 19 nt, Homo sapiens
  misc_RNA (1)...(19): siRNA sense strand
ugcgaugucaccauuauua

SEQ ID NO: 1497803 - RNA, 19 nt, Homo sapiens
  misc_RNA (1)...(19): siRNA sense strand
agaacugucugaagaacug

SEQ ID NO: 1497804 - RNA, 19 nt, Homo sapiens
  misc_RNA (1)...(19): siRNA sense strand
ucacuuggauuugggaaca

SEQ ID NO: 1497805 - RNA, 19 nt, Homo sapiens
  misc_RNA (1)...(19): siRNA sense strand
gcaccagggacuguuguaa

SEQ ID NO: 1497806 - RNA, 19 nt, Homo sapiens
  misc_RNA (1)...(19): siRNA sense strand
ccauuucuauuaugcuuca

SEQ ID NO: 1497807 - RNA, 19 nt, Homo sapiens
  misc_RNA (1)...(19): siRNA sense strand
gaagacauucucuaucacu

SEQ ID NO: 1497808 - RNA, 19 nt, Homo sapiens
  misc_RNA (1)...(19): siRNA sense strand
gaacuggacaaagaacugu

SEQ ID NO: 1497809 - RNA, 19 nt, Homo sapiens
  misc_RNA (1)...(19): siRNA sense strand
acacacaaccuaccagcaa

SEQ ID NO: 1497810 - RNA, 19 nt, Homo sapiens
  misc_RNA (1)...(19): siRNA sense strand
uaaagcuggugucaggaau

SEQ ID NO: 1497811 - RNA, 19 nt, Homo sapiens
  misc_RNA (1)...(19): siRNA sense strand
gacaggaauacauauguug

SEQ ID NO: 1497812 - RNA, 19 nt, Homo sapiens
  misc_RNA (1)...(19): siRNA sense strand
gaugaagacauucucuauc

SEQ ID NO: 1497813 - RNA, 19 nt, Homo sapiens
  misc_RNA (1)...(19): siRNA sense strand
ggccucagcuccuaaucuc

SEQ ID NO: 1497814 - RNA, 19 nt, Homo sapiens
  misc_RNA (1)...(19): siRNA sense strand
gugcugggacagacagaua

SEQ ID NO: 1497815 - RNA, 19 nt, Homo sapiens
  misc_RNA (1)...(19): siRNA sense strand
guagacuccuucuuuaagc

SEQ ID NO: 1497816 - RNA, 19 nt, Homo sapiens
  misc_RNA (1)...(19): siRNA sense strand
caggaauauugaaauggaa

SEQ ID NO: 1497817 - RNA, 19 nt, Homo sapiens
  misc_RNA (1)...(19): siRNA sense strand
uggauuugauggaugaaga

SEQ ID NO: 1497818 - RNA, 19 nt, Homo sapiens
  misc_RNA (1)...(19): siRNA sense strand
ccagcaauguuuggagaug

SEQ ID NO: 1497819 - RNA, 19 nt, Homo sapiens
  misc_RNA (1)...(19): siRNA sense strand
uguggacucuguggucuaa

SEQ ID NO: 1497820 - RNA, 19 nt, Homo sapiens
  misc_RNA (1)...(19): siRNA sense strand
gcagcuauguguggacucu

SEQ ID NO: 1497821 - RNA, 19 nt, Homo sapiens
  misc_RNA (1)...(19): siRNA sense strand
caacuucccaacccucguu

SEQ ID NO: 1497822 - RNA, 19 nt, Homo sapiens
  misc_RNA (1)...(19): siRNA sense strand
caaauuacuccaccaugca

SEQ ID NO: 1497823 - RNA, 19 nt, Homo sapiens
  misc_RNA (1)...(19): siRNA sense strand
gaagaagacauaaaagaca

SEQ ID NO: 1497824 - RNA, 19 nt, Homo sapiens
  misc_RNA (1)...(19): siRNA sense strand
gcuuggacuuugugacuag

SEQ ID NO: 1497825 - RNA, 19 nt, Homo sapiens
  misc_RNA (1)...(19): siRNA sense strand
cuccuaaucuccaacuuca

SEQ ID NO: 1497826 - RNA, 19 nt, Homo sapiens
  misc_RNA (1)...(19): siRNA sense strand
uuacuuggauuugauggau

SEQ ID NO: 1497827 - RNA, 19 nt, Homo sapiens
  misc_RNA (1)...(19): siRNA sense strand
ccagggacuguuguaauaa

SEQ ID NO: 1497828 - RNA, 19 nt, Homo sapiens
  misc_RNA (1)...(19): siRNA sense strand
agacucgacugugaucaga

SEQ ID NO: 1497829 - RNA, 19 nt, Homo sapiens
  misc_RNA (1)...(19): siRNA sense strand
aagcuggugucaggaauau

SEQ ID NO: 1497830 - RNA, 19 nt, Homo sapiens
  misc_RNA (1)...(19): siRNA sense strand
agcaauguuuggagaugua

SEQ ID NO: 1497831 - RNA, 19 nt, Homo sapiens
  misc_RNA (1)...(19): siRNA sense strand
gaaguacugaacuggacaa

SEQ ID NO: 1497832 - RNA, 19 nt, Homo sapiens
  misc_RNA (1)...(19): siRNA sense strand
gaagcugaagaagacauaa

SEQ ID NO: 1497833 - RNA, 19 nt, Homo sapiens
  misc_RNA (1)...(19): siRNA sense strand
ggagcucggguuugaggaa

SEQ ID NO: 1497834 - RNA, 19 nt, Homo sapiens
  misc_RNA (1)...(19): siRNA sense strand
ccaauagguccaugagauc

SEQ ID NO: 1497835 - RNA, 19 nt, Homo sapiens
  misc_RNA (1)...(19): siRNA sense strand
gcaauguuuggagauguaa

SEQ ID NO: 1497836 - RNA, 19 nt, Homo sapiens
  misc_RNA (1)...(19): siRNA sense strand
ggugucaggaauauugaaa

SEQ ID NO: 1497837 - RNA, 19 nt, Homo sapiens
  misc_RNA (1)...(19): siRNA sense strand
aggaauacauauguuggaa

SEQ ID NO: 1497838 - RNA, 19 nt, Homo sapiens
  misc_RNA (1)...(19): siRNA sense strand
aguuauaccugccuccaau

SEQ ID NO: 1497839 - RNA, 19 nt, Homo sapiens
  misc_RNA (1)...(19): siRNA sense strand
aagguuuguucacguuaaa

SEQ ID NO: 1497840 - RNA, 19 nt, Homo sapiens
  misc_RNA (1)...(19): siRNA sense strand
caacggccucagcuccuaa

SEQ ID NO: 1497841 - RNA, 19 nt, Homo sapiens
  misc_RNA (1)...(19): siRNA sense strand
ucaacuugccucaugaugu

SEQ ID NO: 1497842 - RNA, 19 nt, Homo sapiens
  misc_RNA (1)...(19): siRNA sense strand
cagcaauguuuggagaugu

SEQ ID NO: 1497843 - RNA, 19 nt, Homo sapiens
  misc_RNA (1)...(19): siRNA sense strand
caacuguagcaaagaaauc

SEQ ID NO: 1497844 - RNA, 19 nt, Homo sapiens
  misc_RNA (1)...(19): siRNA sense strand
ggagauguaaaguuugucu

SEQ ID NO: 1497845 - RNA, 19 nt, Homo sapiens
  misc_RNA (1)...(19): siRNA sense strand
agaucaacuugccucauga

SEQ ID NO: 1497846 - RNA, 19 nt, Homo sapiens
  misc_RNA (1)...(19): siRNA sense strand
ugacacuucucgacagacu

SEQ ID NO: 1497847 - RNA, 19 nt, Homo sapiens
  misc_RNA (1)...(19): siRNA sense strand
aagcugcuguggucugugu

SEQ ID NO: 1497848 - RNA, 19 nt, Homo sapiens
  misc_RNA (1)...(19): siRNA sense strand
cacacaaccuaccagcaau

SEQ ID NO: 1497849 - RNA, 19 nt, Homo sapiens
  misc_RNA (1)...(19): siRNA sense strand
cuacuugaagagagcauuu

SEQ ID NO: 1497850 - RNA, 19 nt, Homo sapiens
  misc_RNA (1)...(19): siRNA sense strand
cgaugucaccauuauuaga

SEQ ID NO: 1497851 - RNA, 19 nt, Homo sapiens
  misc_RNA (1)...(19): siRNA sense strand
ggcuuggacuuugugacua

SEQ ID NO: 1497852 - RNA, 19 nt, Homo sapiens
  misc_RNA (1)...(19): siRNA sense strand
guuauaccugccuccaaua

SEQ ID NO: 1497853 - RNA, 19 nt, Homo sapiens
  misc_RNA (1)...(19): siRNA sense strand
aaagcuggugucaggaaua

SEQ ID NO: 1497854 - RNA, 19 nt, Homo sapiens
  misc_RNA (1)...(19): siRNA sense strand
aaagaacugucugaagaac

SEQ ID NO: 1497855 - RNA, 19 nt, Homo sapiens
  misc_RNA (1)...(19): siRNA sense strand
aacauugucacccgaagua

SEQ ID NO: 1497856 - RNA, 19 nt, Homo sapiens
  misc_RNA (1)...(19): siRNA sense strand
cuauuaugcuucaugaacu

SEQ ID NO: 1497857 - RNA, 19 nt, Homo sapiens
  misc_RNA (1)...(19): siRNA sense strand
gcuccuaaucuccaacuuc

SEQ ID NO: 1497858 - RNA, 19 nt, Homo sapiens
  misc_RNA (1)...(19): siRNA sense strand
uuggagauguaaaguuugu

SEQ ID NO: 1497859 - RNA, 19 nt, Homo sapiens
  misc_RNA (1)...(19): siRNA sense strand
uugaagagagcauuuaaag

SEQ ID NO: 1497860 - RNA, 19 nt, Homo sapiens
  misc_RNA (1)...(19): siRNA sense strand
augauguccugguggagua

SEQ ID NO: 1497861 - RNA, 19 nt, Homo sapiens
  misc_RNA (1)...(19): siRNA sense strand
ccuaaucuccaacuucauc

SEQ ID NO: 1497862 - RNA, 19 nt, Homo sapiens
  misc_RNA (1)...(19): siRNA sense strand
gcacgguggcugauaguga

SEQ ID NO: 1497863 - RNA, 19 nt, Homo sapiens
  misc_RNA (1)...(19): siRNA sense strand
gccuggcccuugucucuaa

SEQ ID NO: 1497864 - RNA, 19 nt, Homo sapiens
  misc_RNA (1)...(19): siRNA sense strand
uugcuucccuccucaacua

SEQ ID NO: 1497865 - RNA, 19 nt, Homo sapiens
  misc_RNA (1)...(19): siRNA sense strand
gggcuucaccaacuucauu

SEQ ID NO: 1497866 - RNA, 19 nt, Homo sapiens
  misc_RNA (1)...(19): siRNA sense strand
cacgguggcugauagugaa

SEQ ID NO: 1497867 - RNA, 19 nt, Homo sapiens
  misc_RNA (1)...(19): siRNA sense strand
gcccuccucugcauucuca

SEQ ID NO: 1497868 - RNA, 19 nt, Homo sapiens
  misc_RNA (1)...(19): siRNA sense strand
uggcuggccugguuuguuc

SEQ ID NO: 1497869 - RNA, 19 nt, Homo sapiens
  misc_RNA (1)...(19): siRNA sense strand
aggcugccaucaccacuuu

SEQ ID NO: 1497870 - RNA, 19 nt, Homo sapiens
  misc_RNA (1)...(19): siRNA sense strand
gauccuggcugagcgaaac

SEQ ID NO: 1497871 - RNA, 19 nt, Homo sapiens
  misc_RNA (1)...(19): siRNA sense strand
uagugaagcggcagauuga

SEQ ID NO: 1497872 - RNA, 19 nt, Homo sapiens
  misc_RNA (1)...(19): siRNA sense strand
ccucugcauucucagcauu

SEQ ID NO: 1497873 - RNA, 19 nt, Homo sapiens
  misc_RNA (1)...(19): siRNA sense strand
gauagugaagcggcagauu

SEQ ID NO: 1497874 - RNA, 19 nt, Homo sapiens
  misc_RNA (1)...(19): siRNA sense strand
gggagggcacuuccuguuc

SEQ ID NO: 1497875 - RNA, 19 nt, Homo sapiens
  misc_RNA (1)...(19): siRNA sense strand
guguugaccugggugucua

SEQ ID NO: 1497876 - RNA, 19 nt, Homo sapiens
  misc_RNA (1)...(19): siRNA sense strand
cuucauugcccaugccauu

SEQ ID NO: 1497877 - RNA, 19 nt, Homo sapiens
  misc_RNA (1)...(19): siRNA sense strand
auagugaagcggcagauug

SEQ ID NO: 1497878 - RNA, 19 nt, Homo sapiens
  misc_RNA (1)...(19): siRNA sense strand
cugcauccucuuccuguuu

SEQ ID NO: 1497879 - RNA, 19 nt, Homo sapiens
  misc_RNA (1)...(19): siRNA sense strand
gcucuucuccucccaagcu

SEQ ID NO: 1497880 - RNA, 19 nt, Homo sapiens
  misc_RNA (1)...(19): siRNA sense strand
gcacgguggcugauaguga

SEQ ID NO: 1497881 - RNA, 19 nt, Homo sapiens
  misc_RNA (1)...(19): siRNA sense strand
gccuggcccuugucucuaa

SEQ ID NO: 1497882 - RNA, 19 nt, Homo sapiens
  misc_RNA (1)...(19): siRNA sense strand
uugcuucccuccucaacua

SEQ ID NO: 1497883 - RNA, 19 nt, Homo sapiens
  misc_RNA (1)...(19): siRNA sense strand
gggcuucaccaacuucauu

SEQ ID NO: 1497884 - RNA, 19 nt, Homo sapiens
  misc_RNA (1)...(19): siRNA sense strand
cacgguggcugauagugaa

SEQ ID NO: 1497885 - RNA, 19 nt, Homo sapiens
  misc_RNA (1)...(19): siRNA sense strand
cgucauggcccuccgauuc

SEQ ID NO: 1497886 - RNA, 19 nt, Homo sapiens
  misc_RNA (1)...(19): siRNA sense strand
gcccuccucugcauucuca

SEQ ID NO: 1497887 - RNA, 19 nt, Homo sapiens
  misc_RNA (1)...(19): siRNA sense strand
uggcuggccugguuuguuc

SEQ ID NO: 1497888 - RNA, 19 nt, Homo sapiens
  misc_RNA (1)...(19): siRNA sense strand
aggcugccaucaccacuuu

SEQ ID NO: 1497889 - RNA, 19 nt, Homo sapiens
  misc_RNA (1)...(19): siRNA sense strand
gauccuggcugagcgaaac

SEQ ID NO: 1497890 - RNA, 19 nt, Homo sapiens
  misc_RNA (1)...(19): siRNA sense strand
uagugaagcggcagauuga

SEQ ID NO: 1497891 - RNA, 19 nt, Homo sapiens
  misc_RNA (1)...(19): siRNA sense strand
ccucugcauucucagcauu

SEQ ID NO: 1497892 - RNA, 19 nt, Homo sapiens
  misc_RNA (1)...(19): siRNA sense strand
gauagugaagcggcagauu

SEQ ID NO: 1497893 - RNA, 19 nt, Homo sapiens
  misc_RNA (1)...(19): siRNA sense strand
guguugaccugggugucua

SEQ ID NO: 1497894 - RNA, 19 nt, Homo sapiens
  misc_RNA (1)...(19): siRNA sense strand
gggagggcacuuccuguuc

SEQ ID NO: 1497895 - RNA, 19 nt, Homo sapiens
  misc_RNA (1)...(19): siRNA sense strand
cuucauugcccaugccauu

SEQ ID NO: 1497896 - RNA, 19 nt, Homo sapiens
  misc_RNA (1)...(19): siRNA sense strand
auagugaagcggcagauug

SEQ ID NO: 1497897 - RNA, 19 nt, Homo sapiens
  misc_RNA (1)...(19): siRNA sense strand
cugcauccucuuccuguuu

SEQ ID NO: 1497898 - RNA, 19 nt, Homo sapiens
  misc_RNA (1)...(19): siRNA sense strand
gcucuucuccucccaagcu

SEQ ID NO: 1497899 - RNA, 19 nt, Homo sapiens
  misc_RNA (1)...(19): siRNA sense strand
gcaaacagguagcaggaaa

SEQ ID NO: 1497900 - RNA, 19 nt, Homo sapiens
  misc_RNA (1)...(19): siRNA sense strand
gugaugauaugucugugua

SEQ ID NO: 1497901 - RNA, 19 nt, Homo sapiens
  misc_RNA (1)...(19): siRNA sense strand
caaguucgaugacacuguu

SEQ ID NO: 1497902 - RNA, 19 nt, Homo sapiens
  misc_RNA (1)...(19): siRNA sense strand
ggauggacccggacaaguu

SEQ ID NO: 1497903 - RNA, 19 nt, Homo sapiens
  misc_RNA (1)...(19): siRNA sense strand
ccaacagccuggccaucua

SEQ ID NO: 1497904 - RNA, 19 nt, Homo sapiens
  misc_RNA (1)...(19): siRNA sense strand
ccacgucucuuuccuggau

SEQ ID NO: 1497905 - RNA, 19 nt, Homo sapiens
  misc_RNA (1)...(19): siRNA sense strand
gaccuacugugaugauaug

SEQ ID NO: 1497906 - RNA, 19 nt, Homo sapiens
  misc_RNA (1)...(19): siRNA sense strand
gcucccugcucuucuauga

SEQ ID NO: 1497907 - RNA, 19 nt, Homo sapiens
  misc_RNA (1)...(19): siRNA sense strand
gaggcuggcucaaccacaa

SEQ ID NO: 1497908 - RNA, 19 nt, Homo sapiens
  misc_RNA (1)...(19): siRNA sense strand
caacuggccugagaugaag

SEQ ID NO: 1497909 - RNA, 19 nt, Homo sapiens
  misc_RNA (1)...(19): siRNA sense strand
ggccugagaugaagcucuu

SEQ ID NO: 1497910 - RNA, 19 nt, Homo sapiens
  misc_RNA (1)...(19): siRNA sense strand
gagcugaaucccuccaaga

SEQ ID NO: 1497911 - RNA, 19 nt, Homo sapiens
  misc_RNA (1)...(19): siRNA sense strand
ccaucaggcugcccuacuu

SEQ ID NO: 1497912 - RNA, 19 nt, Homo sapiens
  misc_RNA (1)...(19): siRNA sense strand
uuacuuugguggcauggaa

SEQ ID NO: 1497913 - RNA, 19 nt, Homo sapiens
  misc_RNA (1)...(19): siRNA sense strand
ccacaaggacuggaucuuc

SEQ ID NO: 1497914 - RNA, 19 nt, Homo sapiens
  misc_RNA (1)...(19): siRNA sense strand
gaaagccgggagcgcacua

SEQ ID NO: 1497915 - RNA, 19 nt, Homo sapiens
  misc_RNA (1)...(19): siRNA sense strand
cuacugugaugauaugucu

SEQ ID NO: 1497916 - RNA, 19 nt, Homo sapiens
  misc_RNA (1)...(19): siRNA sense strand
gcucaaccacaaugauuuc

SEQ ID NO: 1497917 - RNA, 19 nt, Homo sapiens
  misc_RNA (1)...(19): siRNA sense strand
acaacuggccugagaugaa

SEQ ID NO: 1497918 - RNA, 19 nt, Homo sapiens
  misc_RNA (1)...(19): siRNA sense strand
aaugauuucugggugaauu

SEQ ID NO: 1497919 - RNA, 19 nt, Homo sapiens
  misc_RNA (1)...(19): siRNA sense strand
ggacaaguucgaugacacu

SEQ ID NO: 1497920 - RNA, 19 nt, Homo sapiens
  misc_RNA (1)...(19): siRNA sense strand
gauggacccggacaaguuc

SEQ ID NO: 1497921 - RNA, 19 nt, Homo sapiens
  misc_RNA (1)...(19): siRNA sense strand
acaaugauuucugggugaa

SEQ ID NO: 1497922 - RNA, 19 nt, Homo sapiens
  misc_RNA (1)...(19): siRNA sense strand
uauccaggcugcuguccau

SEQ ID NO: 1497923 - RNA, 19 nt, Homo sapiens
  misc_RNA (1)...(19): siRNA sense strand
gagcuucuaccgccacauc

SEQ ID NO: 1497924 - RNA, 19 nt, Homo sapiens
  misc_RNA (1)...(19): siRNA sense strand
ugccugaccuacugugaug

SEQ ID NO: 1497925 - RNA, 19 nt, Homo sapiens
  misc_RNA (1)...(19): siRNA sense strand
gcccagcagcaaacaggua

SEQ ID NO: 1497926 - RNA, 19 nt, Homo sapiens
  misc_RNA (1)...(19): siRNA sense strand
ugggagcgguguccuugga

SEQ ID NO: 1497927 - RNA, 19 nt, Homo sapiens
  misc_RNA (1)...(19): siRNA sense strand
ucugaagguucgggaggua

SEQ ID NO: 1497928 - RNA, 19 nt, Homo sapiens
  misc_RNA (1)...(19): siRNA sense strand
ggcucaaccacaaugauuu

SEQ ID NO: 1497929 - RNA, 19 nt, Homo sapiens
  misc_RNA (1)...(19): siRNA sense strand
cuacaacuggccugagaug

SEQ ID NO: 1497930 - RNA, 19 nt, Homo sapiens
  misc_RNA (1)...(19): siRNA sense strand
ugaccuacugugaugauau

SEQ ID NO: 1497931 - RNA, 19 nt, Homo sapiens
  misc_RNA (1)...(19): siRNA sense strand
uggcucaaccacaaugauu

SEQ ID NO: 1497932 - RNA, 19 nt, Homo sapiens
  misc_RNA (1)...(19): siRNA sense strand
gagcugggcacggucaaca

SEQ ID NO: 1497933 - RNA, 19 nt, Homo sapiens
  misc_RNA (1)...(19): siRNA sense strand
cgauggcgcacuaucugaa

SEQ ID NO: 1497934 - RNA, 19 nt, Homo sapiens
  misc_RNA (1)...(19): siRNA sense strand
cccauucccacgucucuuu

SEQ ID NO: 1497935 - RNA, 19 nt, Homo sapiens
  misc_RNA (1)...(19): siRNA sense strand
caacagccuggccaucuac

SEQ ID NO: 1497936 - RNA, 19 nt, Homo sapiens
  misc_RNA (1)...(19): siRNA sense strand
ugcuacaacuggccugaga

SEQ ID NO: 1497937 - RNA, 19 nt, Homo sapiens
  misc_RNA (1)...(19): siRNA sense strand
acaagguguucgcgucaca

SEQ ID NO: 1497938 - RNA, 19 nt, Homo sapiens
  misc_RNA (1)...(19): siRNA sense strand
ggacugcgcucaacuaugu

SEQ ID NO: 1497939 - RNA, 19 nt, Homo sapiens
  misc_RNA (1)...(19): siRNA sense strand
gcagaaggcucaugaguuc

SEQ ID NO: 1497940 - RNA, 19 nt, Homo sapiens
  misc_RNA (1)...(19): siRNA sense strand
gaagcuguaugaacacauu

SEQ ID NO: 1497941 - RNA, 19 nt, Homo sapiens
  misc_RNA (1)...(19): siRNA sense strand
ugcaggcgcuuaaguauuu

SEQ ID NO: 1497942 - RNA, 19 nt, Homo sapiens
  misc_RNA (1)...(19): siRNA sense strand
ggaguccggugucuacuug

SEQ ID NO: 1497943 - RNA, 19 nt, Homo sapiens
  misc_RNA (1)...(19): siRNA sense strand
gggcagaccuaccgagaug

SEQ ID NO: 1497944 - RNA, 19 nt, Homo sapiens
  misc_RNA (1)...(19): siRNA sense strand
ucucacaggucccagauaa

SEQ ID NO: 1497945 - RNA, 19 nt, Homo sapiens
  misc_RNA (1)...(19): siRNA sense strand
gagcaugucuccagaaucc

SEQ ID NO: 1497946 - RNA, 19 nt, Homo sapiens
  misc_RNA (1)...(19): siRNA sense strand
ggauaaguccaccguguuu

SEQ ID NO: 1497947 - RNA, 19 nt, Homo sapiens
  misc_RNA (1)...(19): siRNA sense strand
ccagagauguggcuguuuc

SEQ ID NO: 1497948 - RNA, 19 nt, Homo sapiens
  misc_RNA (1)...(19): siRNA sense strand
ugacgauccugaccuggua

SEQ ID NO: 1497949 - RNA, 19 nt, Homo sapiens
  misc_RNA (1)...(19): siRNA sense strand
gcacuggacgggugauuau

SEQ ID NO: 1497950 - RNA, 19 nt, Homo sapiens
  misc_RNA (1)...(19): siRNA sense strand
ggacaccaagaauuacuuu

SEQ ID NO: 1497951 - RNA, 19 nt, Homo sapiens
  misc_RNA (1)...(19): siRNA sense strand
cuaugugucucucagaauu

SEQ ID NO: 1497952 - RNA, 19 nt, Homo sapiens
  misc_RNA (1)...(19): siRNA sense strand
uggcuguccugaauguuua

SEQ ID NO: 1497953 - RNA, 19 nt, Homo sapiens
  misc_RNA (1)...(19): siRNA sense strand
cagauaacccucccgacua

SEQ ID NO: 1497954 - RNA, 19 nt, Homo sapiens
  misc_RNA (1)...(19): siRNA sense strand
gaaguacuaccgccagaug

SEQ ID NO: 1497955 - RNA, 19 nt, Homo sapiens
  misc_RNA (1)...(19): siRNA sense strand
gacgaccgauucaccaaga

SEQ ID NO: 1497956 - RNA, 19 nt, Homo sapiens
  misc_RNA (1)...(19): siRNA sense strand
ugaacgggaugacauuuua

SEQ ID NO: 1497957 - RNA, 19 nt, Homo sapiens
  misc_RNA (1)...(19): siRNA sense strand
guacgagcccggaacauuc

SEQ ID NO: 1497958 - RNA, 19 nt, Homo sapiens
  misc_RNA (1)...(19): siRNA sense strand
ggcuggacaccaagaauua

SEQ ID NO: 1497959 - RNA, 19 nt, Homo sapiens
  misc_RNA (1)...(19): siRNA sense strand
gcggcuggaucguuucuga

SEQ ID NO: 1497960 - RNA, 19 nt, Homo sapiens
  misc_RNA (1)...(19): siRNA sense strand
ugcagaagcuguaugaaca

SEQ ID NO: 1497961 - RNA, 19 nt, Homo sapiens
  misc_RNA (1)...(19): siRNA sense strand
gaacaugagaaauccagau

SEQ ID NO: 1497962 - RNA, 19 nt, Homo sapiens
  misc_RNA (1)...(19): siRNA sense strand
gaauuacuuuaaggacuug

SEQ ID NO: 1497963 - RNA, 19 nt, Homo sapiens
  misc_RNA (1)...(19): siRNA sense strand
gacugcggcuggaucguuu

SEQ ID NO: 1497964 - RNA, 19 nt, Homo sapiens
  misc_RNA (1)...(19): siRNA sense strand
caccaagaauuacuuuaag

SEQ ID NO: 1497965 - RNA, 19 nt, Homo sapiens
  misc_RNA (1)...(19): siRNA sense strand
gguggcuucuccuucagua

SEQ ID NO: 1497966 - RNA, 19 nt, Homo sapiens
  misc_RNA (1)...(19): siRNA sense strand
gguacgagcccggaacauu

SEQ ID NO: 1497967 - RNA, 19 nt, Homo sapiens
  misc_RNA (1)...(19): siRNA sense strand
gccugcacauugaggauaa

SEQ ID NO: 1497968 - RNA, 19 nt, Homo sapiens
  misc_RNA (1)...(19): siRNA sense strand
gggcuggacaccaagaauu

SEQ ID NO: 1497969 - RNA, 19 nt, Homo sapiens
  misc_RNA (1)...(19): siRNA sense strand
gcuuaaguauuuccacaag

SEQ ID NO: 1497970 - RNA, 19 nt, Homo sapiens
  misc_RNA (1)...(19): siRNA sense strand
gaugcaggcgcuuaaguau

SEQ ID NO: 1497971 - RNA, 19 nt, Homo sapiens
  misc_RNA (1)...(19): siRNA sense strand
ccaagaauuacuuuaagga

SEQ ID NO: 1497972 - RNA, 19 nt, Homo sapiens
  misc_RNA (1)...(19): siRNA sense strand
gcaccacaggcccgaguuu

SEQ ID NO: 1497973 - RNA, 19 nt, Homo sapiens
  misc_RNA (1)...(19): siRNA sense strand
ugaugcaggcgcuuaagua

SEQ ID NO: 1497974 - RNA, 19 nt, Homo sapiens
  misc_RNA (1)...(19): siRNA sense strand
gggacaucaugauugacua

SEQ ID NO: 1497975 - RNA, 19 nt, Homo sapiens
  misc_RNA (1)...(19): siRNA sense strand
ggacugcggcuggaucguu

SEQ ID NO: 1497976 - RNA, 19 nt, Homo sapiens
  misc_RNA (1)...(19): siRNA sense strand
gcgaggagcggcguuaugu

SEQ ID NO: 1497977 - RNA, 19 nt, Homo sapiens
  misc_RNA (1)...(19): siRNA sense strand
gaucugggacaccgcauuc

SEQ ID NO: 1497978 - RNA, 19 nt, Homo sapiens
  misc_RNA (1)...(19): siRNA sense strand
agaaacagcuccccaaugg

SEQ ID NO: 1497979 - RNA, 19 nt, Homo sapiens
  misc_RNA (1)...(19): siRNA sense strand
ggugucuacuugagaaaca

SEQ ID NO: 1497980 - RNA, 19 nt, Homo sapiens
  misc_RNA (1)...(19): siRNA sense strand
gcacggcugaggccuugaa

SEQ ID NO: 1497981 - RNA, 19 nt, Homo sapiens
  misc_RNA (1)...(19): siRNA sense strand
uauaugcgcuccucaaccu

SEQ ID NO: 1497982 - RNA, 19 nt, Homo sapiens
  misc_RNA (1)...(19): siRNA sense strand
ggacuucgccagcauugac

SEQ ID NO: 1497983 - RNA, 19 nt, Homo sapiens
  misc_RNA (1)...(19): siRNA sense strand
uuuaaggacuugcccaaag

SEQ ID NO: 1497984 - RNA, 19 nt, Homo sapiens
  misc_RNA (1)...(19): siRNA sense strand
agauaacccucccgacuac

SEQ ID NO: 1497985 - RNA, 19 nt, Homo sapiens
  misc_RNA (1)...(19): siRNA sense strand
uacacgagcuacaggaaca

SEQ ID NO: 1497986 - RNA, 19 nt, Homo sapiens
  misc_RNA (1)...(19): siRNA sense strand
gcugugcugcugaacauga

SEQ ID NO: 1497987 - RNA, 19 nt, Homo sapiens
  misc_RNA (1)...(19): siRNA sense strand
ccgacuaccagaaguacua

SEQ ID NO: 1497988 - RNA, 19 nt, Homo sapiens
  misc_RNA (1)...(19): siRNA sense strand
gaggguucgccaccuauga

SEQ ID NO: 1497989 - RNA, 19 nt, Homo sapiens
  misc_RNA (1)...(19): siRNA sense strand
gacaccaagaauuacuuua

SEQ ID NO: 1497990 - RNA, 19 nt, Homo sapiens
  misc_RNA (1)...(19): siRNA sense strand
gagaggaguccggugucua

SEQ ID NO: 1497991 - RNA, 19 nt, Homo sapiens
  misc_RNA (1)...(19): siRNA sense strand
ggauacagagaagagauug

SEQ ID NO: 1497992 - RNA, 19 nt, Homo sapiens
  misc_RNA (1)...(19): siRNA sense strand
ggaggacuucgccagcauu

SEQ ID NO: 1497993 - RNA, 19 nt, Homo sapiens
  misc_RNA (1)...(19): siRNA sense strand
gcacaccccuccacacucu

SEQ ID NO: 1497994 - RNA, 19 nt, Homo sapiens
  misc_RNA (1)...(19): siRNA sense strand
caacuaugugucucucaga

SEQ ID NO: 1497995 - RNA, 19 nt, Homo sapiens
  misc_RNA (1)...(19): siRNA sense strand
gcaccaacggcucacagau

SEQ ID NO: 1497996 - RNA, 19 nt, Homo sapiens
  misc_RNA (1)...(19): siRNA sense strand
ucacgcagggcuuagaguu

SEQ ID NO: 1497997 - RNA, 19 nt, Homo sapiens
  misc_RNA (1)...(19): siRNA sense strand
ccagaaucccggacuaucu

SEQ ID NO: 1497998 - RNA, 19 nt, Homo sapiens
  misc_RNA (1)...(19): siRNA sense strand
caugauugacuacaccuau

SEQ ID NO: 1497999 - RNA, 19 nt, Homo sapiens
  misc_RNA (1)...(19): siRNA sense strand
ggcacuggacgggugauua

SEQ ID NO: 1498000 - RNA, 19 nt, Homo sapiens
  misc_RNA (1)...(19): siRNA sense strand
gcucugaacgggaugacau

SEQ ID NO: 1498001 - RNA, 19 nt, Homo sapiens
  misc_RNA (1)...(19): siRNA sense strand
gauaaguccaccguguuug

SEQ ID NO: 1498002 - RNA, 19 nt, Homo sapiens
  misc_RNA (1)...(19): siRNA sense strand
gcccagucccagauccaua

SEQ ID NO: 1498003 - RNA, 19 nt, Homo sapiens
  misc_RNA (1)...(19): siRNA sense strand
ggacaucaugauugacuac

SEQ ID NO: 1498004 - RNA, 19 nt, Homo sapiens
  misc_RNA (1)...(19): siRNA sense strand
gcccggaacauucuucaca

SEQ ID NO: 1498005 - RNA, 19 nt, Homo sapiens
  misc_RNA (1)...(19): siRNA sense strand
caucgaggcccaggagaga

SEQ ID NO: 1498006 - RNA, 19 nt, Homo sapiens
  misc_RNA (1)...(19): siRNA sense strand
uggcugugcugcugaacau

SEQ ID NO: 1498007 - RNA, 19 nt, Homo sapiens
  misc_RNA (1)...(19): siRNA sense strand
cagaagcuguaugaacaca

SEQ ID NO: 1498008 - RNA, 19 nt, Homo sapiens
  misc_RNA (1)...(19): siRNA sense strand
gcuggggccugcacauuga

SEQ ID NO: 1498009 - RNA, 19 nt, Homo sapiens
  misc_RNA (1)...(19): siRNA sense strand
gagcuacaggaacaucuuc

SEQ ID NO: 1498010 - RNA, 19 nt, Homo sapiens
  misc_RNA (1)...(19): siRNA sense strand
gugcagaagcuguaugaac

SEQ ID NO: 1498011 - RNA, 19 nt, Homo sapiens
  misc_RNA (1)...(19): siRNA sense strand
gaggacuucgccagcauug

SEQ ID NO: 1498012 - RNA, 19 nt, Homo sapiens
  misc_RNA (1)...(19): siRNA sense strand
ucccagagauguggcuguu

SEQ ID NO: 1498013 - RNA, 19 nt, Homo sapiens
  misc_RNA (1)...(19): siRNA sense strand
cccggaacauucuucacaa

SEQ ID NO: 1498014 - RNA, 19 nt, Homo sapiens
  misc_RNA (1)...(19): siRNA sense strand
aaacauugcuggggucuuc

SEQ ID NO: 1498015 - RNA, 19 nt, Homo sapiens
  misc_RNA (1)...(19): siRNA sense strand
ggcuggcuguccugaaugu

SEQ ID NO: 1498016 - RNA, 19 nt, Homo sapiens
  misc_RNA (1)...(19): siRNA sense strand
cccagucccagauccauaa

SEQ ID NO: 1498017 - RNA, 19 nt, Homo sapiens
  misc_RNA (1)...(19): siRNA sense strand
cugcugaacaugagaaauc

SEQ ID NO: 1498018 - RNA, 19 nt, Homo sapiens
  misc_RNA (1)...(19): siRNA sense strand
gggccuugacggcaugaaa

SEQ ID NO: 1498019 - RNA, 19 nt, Homo sapiens
  misc_RNA (1)...(19): siRNA sense strand
ucuccagaaucccggacua

SEQ ID NO: 1498020 - RNA, 19 nt, Homo sapiens
  misc_RNA (1)...(19): siRNA sense strand
uuaaggacuugcccaaagc

SEQ ID NO: 1498021 - RNA, 19 nt, Homo sapiens
  misc_RNA (1)...(19): siRNA sense strand
caccaacggcucacagauc

SEQ ID NO: 1498022 - RNA, 19 nt, Homo sapiens
  misc_RNA (1)...(19): siRNA sense strand
ggagaaguguccccauguc

SEQ ID NO: 1498023 - RNA, 19 nt, Homo sapiens
  misc_RNA (1)...(19): siRNA sense strand
ugcagaaggcucaugaguu

SEQ ID NO: 1498024 - RNA, 19 nt, Homo sapiens
  misc_RNA (1)...(19): siRNA sense strand
aacuaugugucucucagaa

SEQ ID NO: 1498025 - RNA, 19 nt, Homo sapiens
  misc_RNA (1)...(19): siRNA sense strand
ggccugcacauugaggaua

SEQ ID NO: 1498026 - RNA, 19 nt, Homo sapiens
  misc_RNA (1)...(19): siRNA sense strand
gcaaagagacaaccauaaa

SEQ ID NO: 1498027 - RNA, 19 nt, Homo sapiens
  misc_RNA (1)...(19): siRNA sense strand
gugagaacuuugacgauua

SEQ ID NO: 1498028 - RNA, 19 nt, Homo sapiens
  misc_RNA (1)...(19): siRNA sense strand
ggaaacuugucucuaguga

SEQ ID NO: 1498029 - RNA, 19 nt, Homo sapiens
  misc_RNA (1)...(19): siRNA sense strand
gaggaucacugaaucaagu

SEQ ID NO: 1498030 - RNA, 19 nt, Homo sapiens
  misc_RNA (1)...(19): siRNA sense strand
gcaccagaaucuaugagaa

SEQ ID NO: 1498031 - RNA, 19 nt, Homo sapiens
  misc_RNA (1)...(19): siRNA sense strand
gaacuuugacgauuacaug

SEQ ID NO: 1498032 - RNA, 19 nt, Homo sapiens
  misc_RNA (1)...(19): siRNA sense strand
agagaaagcuagugaaugg

SEQ ID NO: 1498033 - RNA, 19 nt, Homo sapiens
  misc_RNA (1)...(19): siRNA sense strand
gcagagaggaucacugaau

SEQ ID NO: 1498034 - RNA, 19 nt, Homo sapiens
  misc_RNA (1)...(19): siRNA sense strand
gagaugggauggcaaagag

SEQ ID NO: 1498035 - RNA, 19 nt, Homo sapiens
  misc_RNA (1)...(19): siRNA sense strand
agacaaccauaaagagaaa

SEQ ID NO: 1498036 - RNA, 19 nt, Homo sapiens
  misc_RNA (1)...(19): siRNA sense strand
gcaagaaaggagauauuau

SEQ ID NO: 1498037 - RNA, 19 nt, Homo sapiens
  misc_RNA (1)...(19): siRNA sense strand
aaccacagcugacaauaga

SEQ ID NO: 1498038 - RNA, 19 nt, Homo sapiens
  misc_RNA (1)...(19): siRNA sense strand
ugaaucaagugcagagaug

SEQ ID NO: 1498039 - RNA, 19 nt, Homo sapiens
  misc_RNA (1)...(19): siRNA sense strand
gcagagaugggauggcaaa

SEQ ID NO: 1498040 - RNA, 19 nt, Homo sapiens
  misc_RNA (1)...(19): siRNA sense strand
caagcuaggccaggaauuu

SEQ ID NO: 1498041 - RNA, 19 nt, Homo sapiens
  misc_RNA (1)...(19): siRNA sense strand
gagacaaccauaaagagaa

SEQ ID NO: 1498042 - RNA, 19 nt, Homo sapiens
  misc_RNA (1)...(19): siRNA sense strand
gaagaaaccacagcugaca

SEQ ID NO: 1498043 - RNA, 19 nt, Homo sapiens
  misc_RNA (1)...(19): siRNA sense strand
aaagagacaaccauaaaga

SEQ ID NO: 1498044 - RNA, 19 nt, Homo sapiens
  misc_RNA (1)...(19): siRNA sense strand
gaaaccacagcugacaaua

SEQ ID NO: 1498045 - RNA, 19 nt, Homo sapiens
  misc_RNA (1)...(19): siRNA sense strand
ccuggaaacuugucucuag

SEQ ID NO: 1498046 - RNA, 19 nt, Homo sapiens
  misc_RNA (1)...(19): siRNA sense strand
cagagaggaucacugaauc

SEQ ID NO: 1498047 - RNA, 19 nt, Homo sapiens
  misc_RNA (1)...(19): siRNA sense strand
ggccaggaauuugaagaaa

SEQ ID NO: 1498048 - RNA, 19 nt, Homo sapiens
  misc_RNA (1)...(19): siRNA sense strand
gacaauagaaagaccaaga

SEQ ID NO: 1498049 - RNA, 19 nt, Homo sapiens
  misc_RNA (1)...(19): siRNA sense strand
ccacagcugacaauagaaa

SEQ ID NO: 1498050 - RNA, 19 nt, Homo sapiens
  misc_RNA (1)...(19): siRNA sense strand
ggcaaagagacaaccauaa

SEQ ID NO: 1498051 - RNA, 19 nt, Homo sapiens
  misc_RNA (1)...(19): siRNA sense strand
caaagagacaaccauaaag

SEQ ID NO: 1498052 - RNA, 19 nt, Homo sapiens
  misc_RNA (1)...(19): siRNA sense strand
aaagagaaagcuagugaau

SEQ ID NO: 1498053 - RNA, 19 nt, Homo sapiens
  misc_RNA (1)...(19): siRNA sense strand
agugagaacuuugacgauu

SEQ ID NO: 1498054 - RNA, 19 nt, Homo sapiens
  misc_RNA (1)...(19): siRNA sense strand
auaaagagaaagcuaguga

SEQ ID NO: 1498055 - RNA, 19 nt, Homo sapiens
  misc_RNA (1)...(19): siRNA sense strand
cagcaagaaaggagauauu

SEQ ID NO: 1498056 - RNA, 19 nt, Homo sapiens
  misc_RNA (1)...(19): siRNA sense strand
gagaggaucacugaaucaa

SEQ ID NO: 1498057 - RNA, 19 nt, Homo sapiens
  misc_RNA (1)...(19): siRNA sense strand
ggaaaaugguagcggaaug

SEQ ID NO: 1498058 - RNA, 19 nt, Homo sapiens
  misc_RNA (1)...(19): siRNA sense strand
ugagaacuuugacgauuac

SEQ ID NO: 1498059 - RNA, 19 nt, Homo sapiens
  misc_RNA (1)...(19): siRNA sense strand
uggcaaagagacaaccaua

SEQ ID NO: 1498060 - RNA, 19 nt, Homo sapiens
  misc_RNA (1)...(19): siRNA sense strand
caaacccacugugaucauc

SEQ ID NO: 1498061 - RNA, 19 nt, Homo sapiens
  misc_RNA (1)...(19): siRNA sense strand
aaugguagcggaauguaaa

SEQ ID NO: 1498062 - RNA, 19 nt, Homo sapiens
  misc_RNA (1)...(19): siRNA sense strand
cuuugacgauuacaugaaa

SEQ ID NO: 1498063 - RNA, 19 nt, Homo sapiens
  misc_RNA (1)...(19): siRNA sense strand
caucguaacccugcagaga

SEQ ID NO: 1498064 - RNA, 19 nt, Homo sapiens
  misc_RNA (1)...(19): siRNA sense strand
guagcggaauguaaaauga

SEQ ID NO: 1498065 - RNA, 19 nt, Homo sapiens
  misc_RNA (1)...(19): siRNA sense strand
uaaagagaaagcuagugaa

SEQ ID NO: 1498066 - RNA, 19 nt, Homo sapiens
  misc_RNA (1)...(19): siRNA sense strand
agagacaaccauaaagaga

SEQ ID NO: 1498067 - RNA, 19 nt, Homo sapiens
  misc_RNA (1)...(19): siRNA sense strand
cugcagagaggaucacuga

SEQ ID NO: 1498068 - RNA, 19 nt, Homo sapiens
  misc_RNA (1)...(19): siRNA sense strand
agcaagaaaggagauauua

SEQ ID NO: 1498069 - RNA, 19 nt, Homo sapiens
  misc_RNA (1)...(19): siRNA sense strand
cugggcaccuggaaacuug

SEQ ID NO: 1498070 - RNA, 19 nt, Homo sapiens
  misc_RNA (1)...(19): siRNA sense strand
gccaggaauuugaagaaac

SEQ ID NO: 1498071 - RNA, 19 nt, Homo sapiens
  misc_RNA (1)...(19): siRNA sense strand
ggccaaacccacugugauc

SEQ ID NO: 1498072 - RNA, 19 nt, Homo sapiens
  misc_RNA (1)...(19): siRNA sense strand
gaucaucagcaagaaagga

SEQ ID NO: 1498073 - RNA, 19 nt, Homo sapiens
  misc_RNA (1)...(19): siRNA sense strand
aaaccacagcugacaauag

SEQ ID NO: 1498074 - RNA, 19 nt, Homo sapiens
  misc_RNA (1)...(19): siRNA sense strand
gcuaggccaggaauuugaa

SEQ ID NO: 1498075 - RNA, 19 nt, Homo sapiens
  misc_RNA (1)...(19): siRNA sense strand
ccaggaauuugaagaaacc

SEQ ID NO: 1498076 - RNA, 19 nt, Homo sapiens
  misc_RNA (1)...(19): siRNA sense strand
agaaaccacagcugacaau

SEQ ID NO: 1498077 - RNA, 19 nt, Homo sapiens
  misc_RNA (1)...(19): siRNA sense strand
aaaugguagcggaauguaa

SEQ ID NO: 1498078 - RNA, 19 nt, Homo sapiens
  misc_RNA (1)...(19): siRNA sense strand
auagaaagaccaagagcau

SEQ ID NO: 1498079 - RNA, 19 nt, Homo sapiens
  misc_RNA (1)...(19): siRNA sense strand
gaaaaugguagcggaaugu

SEQ ID NO: 1498080 - RNA, 19 nt, Homo sapiens
  misc_RNA (1)...(19): siRNA sense strand
gggguuagccaccagaaaa

SEQ ID NO: 1498081 - RNA, 19 nt, Homo sapiens
  misc_RNA (1)...(19): siRNA sense strand
cgaaagcaauuccaguuua

SEQ ID NO: 1498082 - RNA, 19 nt, Homo sapiens
  misc_RNA (1)...(19): siRNA sense strand
gaaagucgauugguuguug

SEQ ID NO: 1498083 - RNA, 19 nt, Homo sapiens
  misc_RNA (1)...(19): siRNA sense strand
gaaagcaauuccaguuuac

SEQ ID NO: 1498084 - RNA, 19 nt, Homo sapiens
  misc_RNA (1)...(19): siRNA sense strand
uaaggaaagucgauugguu

SEQ ID NO: 1498085 - RNA, 19 nt, Homo sapiens
  misc_RNA (1)...(19): siRNA sense strand
ucaguuuccucaucuguaa

SEQ ID NO: 1498086 - RNA, 19 nt, Homo sapiens
  misc_RNA (1)...(19): siRNA sense strand
gggagugacugcugaugga

SEQ ID NO: 1498087 - RNA, 19 nt, Homo sapiens
  misc_RNA (1)...(19): siRNA sense strand
cuauaauuccucccaauaa

SEQ ID NO: 1498088 - RNA, 19 nt, Homo sapiens
  misc_RNA (1)...(19): siRNA sense strand
agacagaguuuccuuuuga

SEQ ID NO: 1498089 - RNA, 19 nt, Homo sapiens
  misc_RNA (1)...(19): siRNA sense strand
uauaauuccucccaauaag

SEQ ID NO: 1498090 - RNA, 19 nt, Homo sapiens
  misc_RNA (1)...(19): siRNA sense strand
gagccucaguuuccucauc

SEQ ID NO: 1498091 - RNA, 19 nt, Homo sapiens
  misc_RNA (1)...(19): siRNA sense strand
gcagcagaguaccgacgaa

SEQ ID NO: 1498092 - RNA, 19 nt, Homo sapiens
  misc_RNA (1)...(19): siRNA sense strand
gcugauggagacagaguuu

SEQ ID NO: 1498093 - RNA, 19 nt, Homo sapiens
  misc_RNA (1)...(19): siRNA sense strand
gacuauaauuccucccaau

SEQ ID NO: 1498094 - RNA, 19 nt, Homo sapiens
  misc_RNA (1)...(19): siRNA sense strand
aauaagggcucaaaacguu

SEQ ID NO: 1498095 - RNA, 19 nt, Homo sapiens
  misc_RNA (1)...(19): siRNA sense strand
gauggaugcaaugcucuua

SEQ ID NO: 1498096 - RNA, 19 nt, Homo sapiens
  misc_RNA (1)...(19): siRNA sense strand
gcagaguaccgacgaaagg

SEQ ID NO: 1498097 - RNA, 19 nt, Homo sapiens
  misc_RNA (1)...(19): siRNA sense strand
acgaaaggauggaugcaau

SEQ ID NO: 1498098 - RNA, 19 nt, Homo sapiens
  misc_RNA (1)...(19): siRNA sense strand
ucaaaacguugucuaagga

SEQ ID NO: 1498099 - RNA, 19 nt, Homo sapiens
  misc_RNA (1)...(19): siRNA sense strand
uggaugcaaugcucuuaug

SEQ ID NO: 1498100 - RNA, 19 nt, Homo sapiens
  misc_RNA (1)...(19): siRNA sense strand
acuauaauuccucccaaua

SEQ ID NO: 1498101 - RNA, 19 nt, Homo sapiens
  misc_RNA (1)...(19): siRNA sense strand
ggagacagaguuuccuuuu

SEQ ID NO: 1498102 - RNA, 19 nt, Homo sapiens
  misc_RNA (1)...(19): siRNA sense strand
cacgaaagcaauuccaguu

SEQ ID NO: 1498103 - RNA, 19 nt, Homo sapiens
  misc_RNA (1)...(19): siRNA sense strand
gagacagaguuuccuuuug

SEQ ID NO: 1498104 - RNA, 19 nt, Homo sapiens
  misc_RNA (1)...(19): siRNA sense strand
cgaaaggauggaugcaaug

SEQ ID NO: 1498105 - RNA, 19 nt, Homo sapiens
  misc_RNA (1)...(19): siRNA sense strand
gaaaggauggaugcaaugc

SEQ ID NO: 1498106 - RNA, 19 nt, Homo sapiens
  misc_RNA (1)...(19): siRNA sense strand
ggaaagucgauugguuguu

SEQ ID NO: 1498107 - RNA, 19 nt, Homo sapiens
  misc_RNA (1)...(19): siRNA sense strand
ccacgucccaaacuggauu

SEQ ID NO: 1498108 - RNA, 19 nt, Homo sapiens
  misc_RNA (1)...(19): siRNA sense strand
acgaaagcaauuccaguuu

SEQ ID NO: 1498109 - RNA, 19 nt, Homo sapiens
  misc_RNA (1)...(19): siRNA sense strand
gacgaaaggauggaugcaa

SEQ ID NO: 1498110 - RNA, 19 nt, Homo sapiens
  misc_RNA (1)...(19): siRNA sense strand
uguaacaagggcagaaaug

SEQ ID NO: 1498111 - RNA, 19 nt, Homo sapiens
  misc_RNA (1)...(19): siRNA sense strand
cagcagaguaccgacgaaa

SEQ ID NO: 1498112 - RNA, 19 nt, Homo sapiens
  misc_RNA (1)...(19): siRNA sense strand
ggauggaugcaaugcucuu

SEQ ID NO: 1498113 - RNA, 19 nt, Homo sapiens
  misc_RNA (1)...(19): siRNA sense strand
caacagcagugacgcauuc

SEQ ID NO: 1498114 - RNA, 19 nt, Homo sapiens
  misc_RNA (1)...(19): siRNA sense strand
gagaagaugaacaacauuu

SEQ ID NO: 1498115 - RNA, 19 nt, Homo sapiens
  misc_RNA (1)...(19): siRNA sense strand
gaagaagacucgggagaag

SEQ ID NO: 1498116 - RNA, 19 nt, Homo sapiens
  misc_RNA (1)...(19): siRNA sense strand
aaauacaccugccauguga

SEQ ID NO: 1498117 - RNA, 19 nt, Homo sapiens
  misc_RNA (1)...(19): siRNA sense strand
gaaaggccaccgacaucua

SEQ ID NO: 1498118 - RNA, 19 nt, Homo sapiens
  misc_RNA (1)...(19): siRNA sense strand
ggaaugacaacacggagaa

SEQ ID NO: 1498119 - RNA, 19 nt, Homo sapiens
  misc_RNA (1)...(19): siRNA sense strand
gcaaauacaccugccaugu

SEQ ID NO: 1498120 - RNA, 19 nt, Homo sapiens
  misc_RNA (1)...(19): siRNA sense strand
gaaaccaccuucaaaagug

SEQ ID NO: 1498121 - RNA, 19 nt, Homo sapiens
  misc_RNA (1)...(19): siRNA sense strand
gaaguggacaacacaguga

SEQ ID NO: 1498122 - RNA, 19 nt, Homo sapiens
  misc_RNA (1)...(19): siRNA sense strand
caaauacaccugccaugug

SEQ ID NO: 1498123 - RNA, 19 nt, Homo sapiens
  misc_RNA (1)...(19): siRNA sense strand
cauucaagauucucauaga

SEQ ID NO: 1498124 - RNA, 19 nt, Homo sapiens
  misc_RNA (1)...(19): siRNA sense strand
ggaagaaguggacaacaca

SEQ ID NO: 1498125 - RNA, 19 nt, Homo sapiens
  misc_RNA (1)...(19): siRNA sense strand
ugaagaaugagaagucuga

SEQ ID NO: 1498126 - RNA, 19 nt, Homo sapiens
  misc_RNA (1)...(19): siRNA sense strand
gaggagaaaccaccuucaa

SEQ ID NO: 1498127 - RNA, 19 nt, Homo sapiens
  misc_RNA (1)...(19): siRNA sense strand
ggacugugaagaaugagaa

SEQ ID NO: 1498128 - RNA, 19 nt, Homo sapiens
  misc_RNA (1)...(19): siRNA sense strand
ggagaaaccaccuucaaaa

SEQ ID NO: 1498129 - RNA, 19 nt, Homo sapiens
  misc_RNA (1)...(19): siRNA sense strand
ggaggugucugugggaaag

SEQ ID NO: 1498130 - RNA, 19 nt, Homo sapiens
  misc_RNA (1)...(19): siRNA sense strand
gcaccacgccaccaucuuc

SEQ ID NO: 1498131 - RNA, 19 nt, Homo sapiens
  misc_RNA (1)...(19): siRNA sense strand
cuacuaaggagaagaugaa

SEQ ID NO: 1498132 - RNA, 19 nt, Homo sapiens
  misc_RNA (1)...(19): siRNA sense strand
cuaaggagaagaugaacaa

SEQ ID NO: 1498133 - RNA, 19 nt, Homo sapiens
  misc_RNA (1)...(19): siRNA sense strand
ccaaggugacguugaaaga

SEQ ID NO: 1498134 - RNA, 19 nt, Homo sapiens
  misc_RNA (1)...(19): siRNA sense strand
gaugaacaacauuuccauu

SEQ ID NO: 1498135 - RNA, 19 nt, Homo sapiens
  misc_RNA (1)...(19): siRNA sense strand
gcagugacgcauucaagau

SEQ ID NO: 1498136 - RNA, 19 nt, Homo sapiens
  misc_RNA (1)...(19): siRNA sense strand
gaucaagaaacucaucauc

SEQ ID NO: 1498137 - RNA, 19 nt, Homo sapiens
  misc_RNA (1)...(19): siRNA sense strand
aggagaagaugaacaacau

SEQ ID NO: 1498138 - RNA, 19 nt, Homo sapiens
  misc_RNA (1)...(19): siRNA sense strand
ggagaagaugaacaacauu

SEQ ID NO: 1498139 - RNA, 19 nt, Homo sapiens
  misc_RNA (1)...(19): siRNA sense strand
gggaaaggccaccgacauc

SEQ ID NO: 1498140 - RNA, 19 nt, Homo sapiens
  misc_RNA (1)...(19): siRNA sense strand
ugaagaagacucgggagaa

SEQ ID NO: 1498141 - RNA, 19 nt, Homo sapiens
  misc_RNA (1)...(19): siRNA sense strand
ggaccuacaacagcaguga

SEQ ID NO: 1498142 - RNA, 19 nt, Homo sapiens
  misc_RNA (1)...(19): siRNA sense strand
agaagacucgggagaagaa

SEQ ID NO: 1498143 - RNA, 19 nt, Homo sapiens
  misc_RNA (1)...(19): siRNA sense strand
ugagggaccuggaguucag

SEQ ID NO: 1498144 - RNA, 19 nt, Homo sapiens
  misc_RNA (1)...(19): siRNA sense strand
gaagaugaacaacauuucc

SEQ ID NO: 1498145 - RNA, 19 nt, Homo sapiens
  misc_RNA (1)...(19): siRNA sense strand
gaaacucaucaucuucauc

SEQ ID NO: 1498146 - RNA, 19 nt, Homo sapiens
  misc_RNA (1)...(19): siRNA sense strand
ggaaaggccaccgacaucu

SEQ ID NO: 1498147 - RNA, 19 nt, Homo sapiens
  misc_RNA (1)...(19): siRNA sense strand
cagugacgcauucaagauu

SEQ ID NO: 1498148 - RNA, 19 nt, Homo sapiens
  misc_RNA (1)...(19): siRNA sense strand
ucauccugcugaucaagaa

SEQ ID NO: 1498149 - RNA, 19 nt, Homo sapiens
  misc_RNA (1)...(19): siRNA sense strand
gcauucaagauucucauag

SEQ ID NO: 1498150 - RNA, 19 nt, Homo sapiens
  misc_RNA (1)...(19): siRNA sense strand
ucagcgacacgggcaaaua

SEQ ID NO: 1498151 - RNA, 19 nt, Homo sapiens
  misc_RNA (1)...(19): siRNA sense strand
uugauagacuggaagaagu

SEQ ID NO: 1498152 - RNA, 19 nt, Homo sapiens
  misc_RNA (1)...(19): siRNA sense strand
aggagaaaccaccuucaaa

SEQ ID NO: 1498153 - RNA, 19 nt, Homo sapiens
  misc_RNA (1)...(19): siRNA sense strand
ggucaucgggcuccucauc

SEQ ID NO: 1498154 - RNA, 19 nt, Homo sapiens
  misc_RNA (1)...(19): siRNA sense strand
uggaagaaguggacaacac

SEQ ID NO: 1498155 - RNA, 19 nt, Homo sapiens
  misc_RNA (1)...(19): siRNA sense strand
agaagaagaaggagugucu

SEQ ID NO: 1498156 - RNA, 19 nt, Homo sapiens
  misc_RNA (1)...(19): siRNA sense strand
gcucuacuaaggagaagau

SEQ ID NO: 1498157 - RNA, 19 nt, Homo sapiens
  misc_RNA (1)...(19): siRNA sense strand
acaccugccaugugaagaa

SEQ ID NO: 1498158 - RNA, 19 nt, Homo sapiens
  misc_RNA (1)...(19): siRNA sense strand
gcagaggagaaaccaccuu

SEQ ID NO: 1498159 - RNA, 19 nt, Homo sapiens
  misc_RNA (1)...(19): siRNA sense strand
ugaagaaccccaaggagaa

SEQ ID NO: 1498160 - RNA, 19 nt, Homo sapiens
  misc_RNA (1)...(19): siRNA sense strand
caccuucuccagcugcuuu

SEQ ID NO: 1498161 - RNA, 19 nt, Homo sapiens
  misc_RNA (1)...(19): siRNA sense strand
augaacaacauuuccauug

SEQ ID NO: 1498162 - RNA, 19 nt, Homo sapiens
  misc_RNA (1)...(19): siRNA sense strand
agacucgggagaagaagaa

SEQ ID NO: 1498163 - RNA, 19 nt, Homo sapiens
  misc_RNA (1)...(19): siRNA sense strand
guugauagacuggaagaag

SEQ ID NO: 1498164 - RNA, 19 nt, Homo sapiens
  misc_RNA (1)...(19): siRNA sense strand
agaagaugaacaacauuuc

SEQ ID NO: 1498165 - RNA, 19 nt, Homo sapiens
  misc_RNA (1)...(19): siRNA sense strand
agaaacucaucaucuucau

SEQ ID NO: 1498166 - RNA, 19 nt, Homo sapiens
  misc_RNA (1)...(19): siRNA sense strand
cagcgacacgggcaaauac

SEQ ID NO: 1498167 - RNA, 19 nt, Homo sapiens
  misc_RNA (1)...(19): siRNA sense strand
gcugagggaccuggaguuc

SEQ ID NO: 1498168 - RNA, 19 nt, Homo sapiens
  misc_RNA (1)...(19): siRNA sense strand
gagcaaagcauggacaacu

SEQ ID NO: 1498169 - RNA, 19 nt, Homo sapiens
  misc_RNA (1)...(19): siRNA sense strand
gcaaguggcugugcaauau

SEQ ID NO: 1498170 - RNA, 19 nt, Homo sapiens
  misc_RNA (1)...(19): siRNA sense strand
ucaacaagcucuaugauga

SEQ ID NO: 1498171 - RNA, 19 nt, Homo sapiens
  misc_RNA (1)...(19): siRNA sense strand
gggaugggcuucagaacua

SEQ ID NO: 1498172 - RNA, 19 nt, Homo sapiens
  misc_RNA (1)...(19): siRNA sense strand
ggacaagaaggacuuuaua

SEQ ID NO: 1498173 - RNA, 19 nt, Homo sapiens
  misc_RNA (1)...(19): siRNA sense strand
gaagaaggcagaagugguu

SEQ ID NO: 1498174 - RNA, 19 nt, Homo sapiens
  misc_RNA (1)...(19): siRNA sense strand
caagaugacucaagugaca

SEQ ID NO: 1498175 - RNA, 19 nt, Homo sapiens
  misc_RNA (1)...(19): siRNA sense strand
gcgcugaaccugcucaaua

SEQ ID NO: 1498176 - RNA, 19 nt, Homo sapiens
  misc_RNA (1)...(19): siRNA sense strand
ggcagaagaucuuuaagga

SEQ ID NO: 1498177 - RNA, 19 nt, Homo sapiens
  misc_RNA (1)...(19): siRNA sense strand
ggaaaaggcugccaacaau

SEQ ID NO: 1498178 - RNA, 19 nt, Homo sapiens
  misc_RNA (1)...(19): siRNA sense strand
gcaaacaggagccagauga

SEQ ID NO: 1498179 - RNA, 19 nt, Homo sapiens
  misc_RNA (1)...(19): siRNA sense strand
caagaucugugaggaauau

SEQ ID NO: 1498180 - RNA, 19 nt, Homo sapiens
  misc_RNA (1)...(19): siRNA sense strand
gcggaagggucgacagaaa

SEQ ID NO: 1498181 - RNA, 19 nt, Homo sapiens
  misc_RNA (1)...(19): siRNA sense strand
caacucacguaccaucuau

SEQ ID NO: 1498182 - RNA, 19 nt, Homo sapiens
  misc_RNA (1)...(19): siRNA sense strand
gaaggcagcccacgcucua

SEQ ID NO: 1498183 - RNA, 19 nt, Homo sapiens
  misc_RNA (1)...(19): siRNA sense strand
ggaagauccugaagguugu

SEQ ID NO: 1498184 - RNA, 19 nt, Homo sapiens
  misc_RNA (1)...(19): siRNA sense strand
gaaggacuuuauagacaug

SEQ ID NO: 1498185 - RNA, 19 nt, Homo sapiens
  misc_RNA (1)...(19): siRNA sense strand
guacagaagauguuugaga

SEQ ID NO: 1498186 - RNA, 19 nt, Homo sapiens
  misc_RNA (1)...(19): siRNA sense strand
ucauuaaaccagugucuua

SEQ ID NO: 1498187 - RNA, 19 nt, Homo sapiens
  misc_RNA (1)...(19): siRNA sense strand
ggacaucaaggcucuguau

SEQ ID NO: 1498188 - RNA, 19 nt, Homo sapiens
  misc_RNA (1)...(19): siRNA sense strand
gugcauggauuaugguuuc

SEQ ID NO: 1498189 - RNA, 19 nt, Homo sapiens
  misc_RNA (1)...(19): siRNA sense strand
gagagggccuugccagaca

SEQ ID NO: 1498190 - RNA, 19 nt, Homo sapiens
  misc_RNA (1)...(19): siRNA sense strand
ucaaacagaucuacaagac

SEQ ID NO: 1498191 - RNA, 19 nt, Homo sapiens
  misc_RNA (1)...(19): siRNA sense strand
ccaucuaugugguggauaa

SEQ ID NO: 1498192 - RNA, 19 nt, Homo sapiens
  misc_RNA (1)...(19): siRNA sense strand
agaaggaccugaagcagau

SEQ ID NO: 1498193 - RNA, 19 nt, Homo sapiens
  misc_RNA (1)...(19): siRNA sense strand
ggucauugccuacaaccua

SEQ ID NO: 1498194 - RNA, 19 nt, Homo sapiens
  misc_RNA (1)...(19): siRNA sense strand
gauaauggucugaggaaga

SEQ ID NO: 1498195 - RNA, 19 nt, Homo sapiens
  misc_RNA (1)...(19): siRNA sense strand
aagaaggacuuuauagaca

SEQ ID NO: 1498196 - RNA, 19 nt, Homo sapiens
  misc_RNA (1)...(19): siRNA sense strand
agaacuacauguuugagaa

SEQ ID NO: 1498197 - RNA, 19 nt, Homo sapiens
  misc_RNA (1)...(19): siRNA sense strand
gaacuaugaggcucuccua

SEQ ID NO: 1498198 - RNA, 19 nt, Homo sapiens
  misc_RNA (1)...(19): siRNA sense strand
gaaggcgggugucaucucu

SEQ ID NO: 1498199 - RNA, 19 nt, Homo sapiens
  misc_RNA (1)...(19): siRNA sense strand
agagugagcugcuggagau

SEQ ID NO: 1498200 - RNA, 19 nt, Homo sapiens
  misc_RNA (1)...(19): siRNA sense strand
cgcugaaccugcucaauaa

SEQ ID NO: 1498201 - RNA, 19 nt, Homo sapiens
  misc_RNA (1)...(19): siRNA sense strand
aaacugugccucaagauga

SEQ ID NO: 1498202 - RNA, 19 nt, Homo sapiens
  misc_RNA (1)...(19): siRNA sense strand
ugaaccugcucaauaagaa

SEQ ID NO: 1498203 - RNA, 19 nt, Homo sapiens
  misc_RNA (1)...(19): siRNA sense strand
ucagacagcccgagaaugu

SEQ ID NO: 1498204 - RNA, 19 nt, Homo sapiens
  misc_RNA (1)...(19): siRNA sense strand
gaaacugugccucaagaug

SEQ ID NO: 1498205 - RNA, 19 nt, Homo sapiens
  misc_RNA (1)...(19): siRNA sense strand
gacagcagcacacaagaaa

SEQ ID NO: 1498206 - RNA, 19 nt, Homo sapiens
  misc_RNA (1)...(19): siRNA sense strand
ugaaaggugugauggagau

SEQ ID NO: 1498207 - RNA, 19 nt, Homo sapiens
  misc_RNA (1)...(19): siRNA sense strand
gcuggacgcugaugugaag

SEQ ID NO: 1498208 - RNA, 19 nt, Homo sapiens
  misc_RNA (1)...(19): siRNA sense strand
ucaagugcauggauuaugg

SEQ ID NO: 1498209 - RNA, 19 nt, Homo sapiens
  misc_RNA (1)...(19): siRNA sense strand
guucuuggcugacgggaau

SEQ ID NO: 1498210 - RNA, 19 nt, Homo sapiens
  misc_RNA (1)...(19): siRNA sense strand
gcaacauggugcuccacaa

SEQ ID NO: 1498211 - RNA, 19 nt, Homo sapiens
  misc_RNA (1)...(19): siRNA sense strand
ugccagacaucgagaacua

SEQ ID NO: 1498212 - RNA, 19 nt, Homo sapiens
  misc_RNA (1)...(19): siRNA sense strand
gacaaacuccggcagaaga

SEQ ID NO: 1498213 - RNA, 19 nt, Homo sapiens
  misc_RNA (1)...(19): siRNA sense strand
gaacuacauguuugagaau

SEQ ID NO: 1498214 - RNA, 19 nt, Homo sapiens
  misc_RNA (1)...(19): siRNA sense strand
augcugagcuggccaagaa

SEQ ID NO: 1498215 - RNA, 19 nt, Homo sapiens
  misc_RNA (1)...(19): siRNA sense strand
uacagaagauguuugagau

SEQ ID NO: 1498216 - RNA, 19 nt, Homo sapiens
  misc_RNA (1)...(19): siRNA sense strand
gaugauaaggugcagaaug

SEQ ID NO: 1498217 - RNA, 19 nt, Homo sapiens
  misc_RNA (1)...(19): siRNA sense strand
gcggauagaccgaaucugu

SEQ ID NO: 1498218 - RNA, 19 nt, Homo sapiens
  misc_RNA (1)...(19): siRNA sense strand
ccagagccaucgacaucaa

SEQ ID NO: 1498219 - RNA, 19 nt, Homo sapiens
  misc_RNA (1)...(19): siRNA sense strand
caucgagaacuacauguuu

SEQ ID NO: 1498220 - RNA, 19 nt, Homo sapiens
  misc_RNA (1)...(19): siRNA sense strand
gaucgcugcugucuccaau

SEQ ID NO: 1498221 - RNA, 19 nt, Homo sapiens
  misc_RNA (1)...(19): siRNA sense strand
aagaaacugugccucaaga

SEQ ID NO: 1498222 - RNA, 19 nt, Homo sapiens
  misc_RNA (1)...(19): siRNA sense strand
gaaggaggaggcccugguu

SEQ ID NO: 1498223 - RNA, 19 nt, Homo sapiens
  misc_RNA (1)...(19): siRNA sense strand
ccacaaggagguacaggaa

SEQ ID NO: 1498224 - RNA, 19 nt, Homo sapiens
  misc_RNA (1)...(19): siRNA sense strand
gcaaagaucgcugcugucu

SEQ ID NO: 1498225 - RNA, 19 nt, Homo sapiens
  misc_RNA (1)...(19): siRNA sense strand
ggaggaggcccugguucua

SEQ ID NO: 1498226 - RNA, 19 nt, Homo sapiens
  misc_RNA (1)...(19): siRNA sense strand
gcaagaucugugaggaaua

SEQ ID NO: 1498227 - RNA, 19 nt, Homo sapiens
  misc_RNA (1)...(19): siRNA sense strand
caagaaggacuuuauagac

SEQ ID NO: 1498228 - RNA, 19 nt, Homo sapiens
  misc_RNA (1)...(19): siRNA sense strand
acaagaaggacuuuauaga

SEQ ID NO: 1498229 - RNA, 19 nt, Homo sapiens
  misc_RNA (1)...(19): siRNA sense strand
caacagcuacgaugucaag

SEQ ID NO: 1498230 - RNA, 19 nt, Homo sapiens
  misc_RNA (1)...(19): siRNA sense strand
caucaccaauggaguguca

SEQ ID NO: 1498231 - RNA, 19 nt, Homo sapiens
  misc_RNA (1)...(19): siRNA sense strand
ggauagaccgaaucuguag

SEQ ID NO: 1498232 - RNA, 19 nt, Homo sapiens
  misc_RNA (1)...(19): siRNA sense strand
acaaggagguacaggaaag

SEQ ID NO: 1498233 - RNA, 19 nt, Homo sapiens
  misc_RNA (1)...(19): siRNA sense strand
cccaggacauggacaagaa

SEQ ID NO: 1498234 - RNA, 19 nt, Homo sapiens
  misc_RNA (1)...(19): siRNA sense strand
caugacaacucacguacca

SEQ ID NO: 1498235 - RNA, 19 nt, Homo sapiens
  misc_RNA (1)...(19): siRNA sense strand
gagugcaguucuccacaga

SEQ ID NO: 1498236 - RNA, 19 nt, Homo sapiens
  misc_RNA (1)...(19): siRNA sense strand
cauggauuaugguuucauu

SEQ ID NO: 1498237 - RNA, 19 nt, Homo sapiens
  misc_RNA (1)...(19): siRNA sense strand
gacaagaaggacuuuauag

SEQ ID NO: 1498238 - RNA, 19 nt, Homo sapiens
  misc_RNA (1)...(19): siRNA sense strand
gaauauaucacgggcaagu

SEQ ID NO: 1498239 - RNA, 19 nt, Homo sapiens
  misc_RNA (1)...(19): siRNA sense strand
ccucuauccucaucaacaa

SEQ ID NO: 1498240 - RNA, 19 nt, Homo sapiens
  misc_RNA (1)...(19): siRNA sense strand
acaagaaacugugccucaa

SEQ ID NO: 1498241 - RNA, 19 nt, Homo sapiens
  misc_RNA (1)...(19): siRNA sense strand
ggaaugaccggcugaagcu

SEQ ID NO: 1498242 - RNA, 19 nt, Homo sapiens
  misc_RNA (1)...(19): siRNA sense strand
ucacugaccagaccaagga

SEQ ID NO: 1498243 - RNA, 19 nt, Homo sapiens
  misc_RNA (1)...(19): siRNA sense strand
gcagguaccagugacaaga

SEQ ID NO: 1498244 - RNA, 19 nt, Homo sapiens
  misc_RNA (1)...(19): siRNA sense strand
ugaaugccauccagacagu

SEQ ID NO: 1498245 - RNA, 19 nt, Homo sapiens
  misc_RNA (1)...(19): siRNA sense strand
ggaccaggccuucaaagac

SEQ ID NO: 1498246 - RNA, 19 nt, Homo sapiens
  misc_RNA (1)...(19): siRNA sense strand
gccaaacagugucgcaagu

SEQ ID NO: 1498247 - RNA, 19 nt, Homo sapiens
  misc_RNA (1)...(19): siRNA sense strand
gcaccaacagcuacgaugu

SEQ ID NO: 1498248 - RNA, 19 nt, Homo sapiens
  misc_RNA (1)...(19): siRNA sense strand
gaugaugguggcacuaugu

SEQ ID NO: 1498249 - RNA, 19 nt, Homo sapiens
  misc_RNA (1)...(19): siRNA sense strand
gagaacuacauguuugaga

SEQ ID NO: 1498250 - RNA, 19 nt, Homo sapiens
  misc_RNA (1)...(19): siRNA sense strand
gugacaaacuccggcagaa

SEQ ID NO: 1498251 - RNA, 19 nt, Homo sapiens
  misc_RNA (1)...(19): siRNA sense strand
ccaagaaggaccugaagca

SEQ ID NO: 1498252 - RNA, 19 nt, Homo sapiens
  misc_RNA (1)...(19): siRNA sense strand
agaaggacuuuauagacau

SEQ ID NO: 1498253 - RNA, 19 nt, Homo sapiens
  misc_RNA (1)...(19): siRNA sense strand
gugacaagaccauccugua

SEQ ID NO: 1498254 - RNA, 19 nt, Homo sapiens
  misc_RNA (1)...(19): siRNA sense strand
cccugaagcugaccaagga

SEQ ID NO: 1498255 - RNA, 19 nt, Homo sapiens
  misc_RNA (1)...(19): siRNA sense strand
ggagccagaugagaagaag

SEQ ID NO: 1498256 - RNA, 19 nt, Homo sapiens
  misc_RNA (1)...(19): siRNA sense strand
agaagcugguggagaguga

SEQ ID NO: 1498257 - RNA, 19 nt, Homo sapiens
  misc_RNA (1)...(19): siRNA sense strand
ugacagcagcacacaagaa

SEQ ID NO: 1498258 - RNA, 19 nt, Homo sapiens
  misc_RNA (1)...(19): siRNA sense strand
ggaccgaggcaccauugug

SEQ ID NO: 1498259 - RNA, 19 nt, Homo sapiens
  misc_RNA (1)...(19): siRNA sense strand
ggguacagaagauguuuga

SEQ ID NO: 1498260 - RNA, 19 nt, Homo sapiens
  misc_RNA (1)...(19): siRNA sense strand
ucaucaagugcauggauua

SEQ ID NO: 1498261 - RNA, 19 nt, Homo sapiens
  misc_RNA (1)...(19): siRNA sense strand
gagauccuccagcggcuuu

SEQ ID NO: 1498262 - RNA, 19 nt, Homo sapiens
  misc_RNA (1)...(19): siRNA sense strand
acaccagcauucaggagaa

SEQ ID NO: 1498263 - RNA, 19 nt, Homo sapiens
  misc_RNA (1)...(19): siRNA sense strand
cgcgaucacuuccgcaaga

SEQ ID NO: 1498264 - RNA, 19 nt, Homo sapiens
  misc_RNA (1)...(19): siRNA sense strand
cggauagaccgaaucugua

SEQ ID NO: 1498265 - RNA, 19 nt, Homo sapiens
  misc_RNA (1)...(19): siRNA sense strand
gaaccugcucaauaagaau

SEQ ID NO: 1498266 - RNA, 19 nt, Homo sapiens
  misc_RNA (1)...(19): siRNA sense strand
ggaugggcuucagaacuau

SEQ ID NO: 1498267 - RNA, 19 nt, Homo sapiens
  misc_RNA (1)...(19): siRNA sense strand
gagaugaugguggcacuau

SEQ ID NO: 1498268 - RNA, 19 nt, Homo sapiens
  misc_RNA (1)...(19): siRNA sense strand
cgcaagaucugugaggaau

SEQ ID NO: 1498269 - RNA, 19 nt, Homo sapiens
  misc_RNA (1)...(19): siRNA sense strand
ugaagcaucugaaugaaga

SEQ ID NO: 1498270 - RNA, 19 nt, Homo sapiens
  misc_RNA (1)...(19): siRNA sense strand
ccaguuugcuuccuucauu

SEQ ID NO: 1498271 - RNA, 19 nt, Homo sapiens
  misc_RNA (1)...(19): siRNA sense strand
gaguauaaguccaaguaug

SEQ ID NO: 1498272 - RNA, 19 nt, Homo sapiens
  misc_RNA (1)...(19): siRNA sense strand
gaucagaacccucaacaac

SEQ ID NO: 1498273 - RNA, 19 nt, Homo sapiens
  misc_RNA (1)...(19): siRNA sense strand
ugucaugucuggaggaguu

SEQ ID NO: 1498274 - RNA, 19 nt, Homo sapiens
  misc_RNA (1)...(19): siRNA sense strand
ccacaggcgugccacacuu

SEQ ID NO: 1498275 - RNA, 19 nt, Homo sapiens
  misc_RNA (1)...(19): siRNA sense strand
ucagaacccucaacaacca

SEQ ID NO: 1498276 - RNA, 19 nt, Homo sapiens
  misc_RNA (1)...(19): siRNA sense strand
ugagcaagauggaguugga

SEQ ID NO: 1498277 - RNA, 19 nt, Homo sapiens
  misc_RNA (1)...(19): siRNA sense strand
agacauccaucaccuacug

SEQ ID NO: 1498278 - RNA, 19 nt, Homo sapiens
  misc_RNA (1)...(19): siRNA sense strand
gaaacgaaaguccagaucu

SEQ ID NO: 1498279 - RNA, 19 nt, Homo sapiens
  misc_RNA (1)...(19): siRNA sense strand
acaguugagucgagucuga

SEQ ID NO: 1498280 - RNA, 19 nt, Homo sapiens
  misc_RNA (1)...(19): siRNA sense strand
aaacgaaaguccagaucuc

SEQ ID NO: 1498281 - RNA, 19 nt, Homo sapiens
  misc_RNA (1)...(19): siRNA sense strand
ucucucagcuacaccaaga

SEQ ID NO: 1498282 - RNA, 19 nt, Homo sapiens
  misc_RNA (1)...(19): siRNA sense strand
gaaggacccuguuuuggau

SEQ ID NO: 1498283 - RNA, 19 nt, Homo sapiens
  misc_RNA (1)...(19): siRNA sense strand
gcaccagccaggucacuau

SEQ ID NO: 1498284 - RNA, 19 nt, Homo sapiens
  misc_RNA (1)...(19): siRNA sense strand
acaagguccuggagacgaa

SEQ ID NO: 1498285 - RNA, 19 nt, Homo sapiens
  misc_RNA (1)...(19): siRNA sense strand
aguauaaguccaaguauga

SEQ ID NO: 1498286 - RNA, 19 nt, Homo sapiens
  misc_RNA (1)...(19): siRNA sense strand
ucaggugucugcccagcuu

SEQ ID NO: 1498287 - RNA, 19 nt, Homo sapiens
  misc_RNA (1)...(19): siRNA sense strand
gcagcaggagccuuaauuc

SEQ ID NO: 1498288 - RNA, 19 nt, Homo sapiens
  misc_RNA (1)...(19): siRNA sense strand
gccuggagccugucuuuga

SEQ ID NO: 1498289 - RNA, 19 nt, Homo sapiens
  misc_RNA (1)...(19): siRNA sense strand
gccacaccauccugaagaa

SEQ ID NO: 1498290 - RNA, 19 nt, Homo sapiens
  misc_RNA (1)...(19): siRNA sense strand
gcaucugaaugaagaagag

SEQ ID NO: 1498291 - RNA, 19 nt, Homo sapiens
  misc_RNA (1)...(19): siRNA sense strand
ucuugaagcaucugaauga

SEQ ID NO: 1498292 - RNA, 19 nt, Homo sapiens
  misc_RNA (1)...(19): siRNA sense strand
aggcagcgcugucaugucu

SEQ ID NO: 1498293 - RNA, 19 nt, Homo sapiens
  misc_RNA (1)...(19): siRNA sense strand
uccaagaagugaccaucaa

SEQ ID NO: 1498294 - RNA, 19 nt, Homo sapiens
  misc_RNA (1)...(19): siRNA sense strand
gagaucagaacccucaaca

SEQ ID NO: 1498295 - RNA, 19 nt, Homo sapiens
  misc_RNA (1)...(19): siRNA sense strand
ggaaggacccuguuuugga

SEQ ID NO: 1498296 - RNA, 19 nt, Homo sapiens
  misc_RNA (1)...(19): siRNA sense strand
cgaaaguccagaucucuca

SEQ ID NO: 1498297 - RNA, 19 nt, Homo sapiens
  misc_RNA (1)...(19): siRNA sense strand
ggaaacgaaaguccagauc

SEQ ID NO: 1498298 - RNA, 19 nt, Homo sapiens
  misc_RNA (1)...(19): siRNA sense strand
gugccacacuugagaacga

SEQ ID NO: 1498299 - RNA, 19 nt, Homo sapiens
  misc_RNA (1)...(19): siRNA sense strand
ggaguauaaguccaaguau

SEQ ID NO: 1498300 - RNA, 19 nt, Homo sapiens
  misc_RNA (1)...(19): siRNA sense strand
ggacuucagcagcaucauc

SEQ ID NO: 1498301 - RNA, 19 nt, Homo sapiens
  misc_RNA (1)...(19): siRNA sense strand
ucagcuacaccaagagauu

SEQ ID NO: 1498302 - RNA, 19 nt, Homo sapiens
  misc_RNA (1)...(19): siRNA sense strand
ggcgaggagugcaggaugu

SEQ ID NO: 1498303 - RNA, 19 nt, Homo sapiens
  misc_RNA (1)...(19): siRNA sense strand
aggaguauaaguccaagua

SEQ ID NO: 1498304 - RNA, 19 nt, Homo sapiens
  misc_RNA (1)...(19): siRNA sense strand
ggaggcagcgcugucaugu

SEQ ID NO: 1498305 - RNA, 19 nt, Homo sapiens
  misc_RNA (1)...(19): siRNA sense strand
acaaccaguuugcuuccuu

SEQ ID NO: 1498306 - RNA, 19 nt, Homo sapiens
  misc_RNA (1)...(19): siRNA sense strand
gggacaggaugcaggaaac

SEQ ID NO: 1498307 - RNA, 19 nt, Homo sapiens
  misc_RNA (1)...(19): siRNA sense strand
gggccuggagccugucuuu

SEQ ID NO: 1498308 - RNA, 19 nt, Homo sapiens
  misc_RNA (1)...(19): siRNA sense strand
caguuugcuuccuucauug

SEQ ID NO: 1498309 - RNA, 19 nt, Homo sapiens
  misc_RNA (1)...(19): siRNA sense strand
ugaagacauccaucaccua

SEQ ID NO: 1498310 - RNA, 19 nt, Homo sapiens
  misc_RNA (1)...(19): siRNA sense strand
cacugaagauugagaucga

SEQ ID NO: 1498311 - RNA, 19 nt, Homo sapiens
  misc_RNA (1)...(19): siRNA sense strand
uggaucagcucaggaagca

SEQ ID NO: 1498312 - RNA, 19 nt, Homo sapiens
  misc_RNA (1)...(19): siRNA sense strand
uucagaggcugcagaguca

SEQ ID NO: 1498313 - RNA, 19 nt, Homo sapiens
  misc_RNA (1)...(19): siRNA sense strand
ccagaucucucagcuacac

SEQ ID NO: 1498314 - RNA, 19 nt, Homo sapiens
  misc_RNA (1)...(19): siRNA sense strand
accaggaggaggaguauaa

SEQ ID NO: 1498315 - RNA, 19 nt, Homo sapiens
  misc_RNA (1)...(19): siRNA sense strand
ggaccaggaggaggaguau

SEQ ID NO: 1498316 - RNA, 19 nt, Homo sapiens
  misc_RNA (1)...(19): siRNA sense strand
gggaccaggaggaggagua

SEQ ID NO: 1498317 - RNA, 19 nt, Homo sapiens
  misc_RNA (1)...(19): siRNA sense strand
ugagaucgauccccaguuc

SEQ ID NO: 1498318 - RNA, 19 nt, Homo sapiens
  misc_RNA (1)...(19): siRNA sense strand
gcaggagacccaggagauc

SEQ ID NO: 1498319 - RNA, 19 nt, Homo sapiens
  misc_RNA (1)...(19): siRNA sense strand
ggcucuggaugcugaguug

SEQ ID NO: 1498320 - RNA, 19 nt, Homo sapiens
  misc_RNA (1)...(19): siRNA sense strand
gacuucagcagcaucauca

SEQ ID NO: 1498321 - RNA, 19 nt, Homo sapiens
  misc_RNA (1)...(19): siRNA sense strand
caagcuggaggcucugaga

SEQ ID NO: 1498322 - RNA, 19 nt, Homo sapiens
  misc_RNA (1)...(19): siRNA sense strand
cugacgagcacgaagcuuu

SEQ ID NO: 1498323 - RNA, 19 nt, Homo sapiens
  misc_RNA (1)...(19): siRNA sense strand
ccaggaacuucaggugucu

SEQ ID NO: 1498324 - RNA, 19 nt, Homo sapiens
  misc_RNA (1)...(19): siRNA sense strand
ccagccaggucacuaucuc

SEQ ID NO: 1498325 - RNA, 19 nt, Homo sapiens
  misc_RNA (1)...(19): siRNA sense strand
ugacgagcacgaagcuuuc

SEQ ID NO: 1498326 - RNA, 19 nt, Homo sapiens
  misc_RNA (1)...(19): siRNA sense strand
ggaugcaggaaacgaaagu

SEQ ID NO: 1498327 - RNA, 19 nt, Homo sapiens
  misc_RNA (1)...(19): siRNA sense strand
caggaugcaggaaacgaaa

SEQ ID NO: 1498328 - RNA, 19 nt, Homo sapiens
  misc_RNA (1)...(19): siRNA sense strand
guacugggcugccgagaaa

SEQ ID NO: 1498329 - RNA, 19 nt, Homo sapiens
  misc_RNA (1)...(19): siRNA sense strand
gcacuuacauuucaaucga

SEQ ID NO: 1498330 - RNA, 19 nt, Homo sapiens
  misc_RNA (1)...(19): siRNA sense strand
ugcaagagguuguguauuu

SEQ ID NO: 1498331 - RNA, 19 nt, Homo sapiens
  misc_RNA (1)...(19): siRNA sense strand
ggaagaacauggacaaggu

SEQ ID NO: 1498332 - RNA, 19 nt, Homo sapiens
  misc_RNA (1)...(19): siRNA sense strand
caaagugcauaucugauug

SEQ ID NO: 1498333 - RNA, 19 nt, Homo sapiens
  misc_RNA (1)...(19): siRNA sense strand
gaacauggagugugcauag

SEQ ID NO: 1498334 - RNA, 19 nt, Homo sapiens
  misc_RNA (1)...(19): siRNA sense strand
gcccagagaugaagugcaa

SEQ ID NO: 1498335 - RNA, 19 nt, Homo sapiens
  misc_RNA (1)...(19): siRNA sense strand
uaaagaagccuuagauguc

SEQ ID NO: 1498336 - RNA, 19 nt, Homo sapiens
  misc_RNA (1)...(19): siRNA sense strand
acacggagauuaaguucuu

SEQ ID NO: 1498337 - RNA, 19 nt, Homo sapiens
  misc_RNA (1)...(19): siRNA sense strand
gcaagagguuguguauuuc

SEQ ID NO: 1498338 - RNA, 19 nt, Homo sapiens
  misc_RNA (1)...(19): siRNA sense strand
ggucaggcuugguuuagaa

SEQ ID NO: 1498339 - RNA, 19 nt, Homo sapiens
  misc_RNA (1)...(19): siRNA sense strand
ggagagggcgaguucaauu

SEQ ID NO: 1498340 - RNA, 19 nt, Homo sapiens
  misc_RNA (1)...(19): siRNA sense strand
ugagugcacuuacauuuca

SEQ ID NO: 1498341 - RNA, 19 nt, Homo sapiens
  misc_RNA (1)...(19): siRNA sense strand
ccaaagugcauaucugauu

SEQ ID NO: 1498342 - RNA, 19 nt, Homo sapiens
  misc_RNA (1)...(19): siRNA sense strand
agagccagcugccgagaua

SEQ ID NO: 1498343 - RNA, 19 nt, Homo sapiens
  misc_RNA (1)...(19): siRNA sense strand
gauuguggaucgugaugaa

SEQ ID NO: 1498344 - RNA, 19 nt, Homo sapiens
  misc_RNA (1)...(19): siRNA sense strand
auucaagccuuucaucuuu

SEQ ID NO: 1498345 - RNA, 19 nt, Homo sapiens
  misc_RNA (1)...(19): siRNA sense strand
aaagaagccuuagauguca

SEQ ID NO: 1498346 - RNA, 19 nt, Homo sapiens
  misc_RNA (1)...(19): siRNA sense strand
ggcaugagcuguacaaagc

SEQ ID NO: 1498347 - RNA, 19 nt, Homo sapiens
  misc_RNA (1)...(19): siRNA sense strand
gggaauuacuuugaagaug

SEQ ID NO: 1498348 - RNA, 19 nt, Homo sapiens
  misc_RNA (1)...(19): siRNA sense strand
gcacgugccaucaucgaaa

SEQ ID NO: 1498349 - RNA, 19 nt, Homo sapiens
  misc_RNA (1)...(19): siRNA sense strand
gagagggcgaguucaauuu

SEQ ID NO: 1498350 - RNA, 19 nt, Homo sapiens
  misc_RNA (1)...(19): siRNA sense strand
cugcagcuccuccaaguua

SEQ ID NO: 1498351 - RNA, 19 nt, Homo sapiens
  misc_RNA (1)...(19): siRNA sense strand
gagugugcauagccaauga

SEQ ID NO: 1498352 - RNA, 19 nt, Homo sapiens
  misc_RNA (1)...(19): siRNA sense strand
agacugcggugcuggcaaa

SEQ ID NO: 1498353 - RNA, 19 nt, Homo sapiens
  misc_RNA (1)...(19): siRNA sense strand
gaauuacuuugaagaugca

SEQ ID NO: 1498354 - RNA, 19 nt, Homo sapiens
  misc_RNA (1)...(19): siRNA sense strand
gcaucacagugcagacuau

SEQ ID NO: 1498355 - RNA, 19 nt, Homo sapiens
  misc_RNA (1)...(19): siRNA sense strand
ugccacagcuuccaaagug

SEQ ID NO: 1498356 - RNA, 19 nt, Homo sapiens
  misc_RNA (1)...(19): siRNA sense strand
gcaaagacagcuuagaaaa

SEQ ID NO: 1498357 - RNA, 19 nt, Homo sapiens
  misc_RNA (1)...(19): siRNA sense strand
gaaaugggagccaaugaac

SEQ ID NO: 1498358 - RNA, 19 nt, Homo sapiens
  misc_RNA (1)...(19): siRNA sense strand
uagaagcucuccgugcauu

SEQ ID NO: 1498359 - RNA, 19 nt, Homo sapiens
  misc_RNA (1)...(19): siRNA sense strand
ggcaaagacagcuuagaaa

SEQ ID NO: 1498360 - RNA, 19 nt, Homo sapiens
  misc_RNA (1)...(19): siRNA sense strand
uaaggauggucugguggua

SEQ ID NO: 1498361 - RNA, 19 nt, Homo sapiens
  misc_RNA (1)...(19): siRNA sense strand
gcaagguugagugcacuua

SEQ ID NO: 1498362 - RNA, 19 nt, Homo sapiens
  misc_RNA (1)...(19): siRNA sense strand
gaucuggucaggcuugguu

SEQ ID NO: 1498363 - RNA, 19 nt, Homo sapiens
  misc_RNA (1)...(19): siRNA sense strand
guugagugcacuuacauuu

SEQ ID NO: 1498364 - RNA, 19 nt, Homo sapiens
  misc_RNA (1)...(19): siRNA sense strand
uggcaaagacagcuuagaa

SEQ ID NO: 1498365 - RNA, 19 nt, Homo sapiens
  misc_RNA (1)...(19): siRNA sense strand
agacuaugaugaacaccuu

SEQ ID NO: 1498366 - RNA, 19 nt, Homo sapiens
  misc_RNA (1)...(19): siRNA sense strand
ccaaguuacuguuuuguug

SEQ ID NO: 1498367 - RNA, 19 nt, Homo sapiens
  misc_RNA (1)...(19): siRNA sense strand
uggaagccauggaagaaau

SEQ ID NO: 1498368 - RNA, 19 nt, Homo sapiens
  misc_RNA (1)...(19): siRNA sense strand
ggagaagcaaggccuggaa

SEQ ID NO: 1498369 - RNA, 19 nt, Homo sapiens
  misc_RNA (1)...(19): siRNA sense strand
ggaugacgacccugccaaa

SEQ ID NO: 1498370 - RNA, 19 nt, Homo sapiens
  misc_RNA (1)...(19): siRNA sense strand
gcagaaaugggagccaaug

SEQ ID NO: 1498371 - RNA, 19 nt, Homo sapiens
  misc_RNA (1)...(19): siRNA sense strand
agaaaugggagccaaugaa

SEQ ID NO: 1498372 - RNA, 19 nt, Homo sapiens
  misc_RNA (1)...(19): siRNA sense strand
aggauggucuggugguauu

SEQ ID NO: 1498373 - RNA, 19 nt, Homo sapiens
  misc_RNA (1)...(19): siRNA sense strand
gagggagugaggugcauuu

SEQ ID NO: 1498374 - RNA, 19 nt, Homo sapiens
  misc_RNA (1)...(19): siRNA sense strand
caggcuugguuuagaaaga

SEQ ID NO: 1498375 - RNA, 19 nt, Homo sapiens
  misc_RNA (1)...(19): siRNA sense strand
gggagccaaugaacaugga

SEQ ID NO: 1498376 - RNA, 19 nt, Homo sapiens
  misc_RNA (1)...(19): siRNA sense strand
gaagcucuccgugcauuca

SEQ ID NO: 1498377 - RNA, 19 nt, Homo sapiens
  misc_RNA (1)...(19): siRNA sense strand
gacaaggugggaauuacuu

SEQ ID NO: 1498378 - RNA, 19 nt, Homo sapiens
  misc_RNA (1)...(19): siRNA sense strand
gaacaccuuacgggacaaa

SEQ ID NO: 1498379 - RNA, 19 nt, Homo sapiens
  misc_RNA (1)...(19): siRNA sense strand
ggacaaggugggaauuacu

SEQ ID NO: 1498380 - RNA, 19 nt, Homo sapiens
  misc_RNA (1)...(19): siRNA sense strand
ucaagccuuucaucuuugu

SEQ ID NO: 1498381 - RNA, 19 nt, Homo sapiens
  misc_RNA (1)...(19): siRNA sense strand
gguccauauucaagccuuu

SEQ ID NO: 1498382 - RNA, 19 nt, Homo sapiens
  misc_RNA (1)...(19): siRNA sense strand
agcuuucgcucaccacuaa

SEQ ID NO: 1498383 - RNA, 19 nt, Homo sapiens
  misc_RNA (1)...(19): siRNA sense strand
caaggugggaauuacuuug

SEQ ID NO: 1498384 - RNA, 19 nt, Homo sapiens
  misc_RNA (1)...(19): siRNA sense strand
aaacaagaagaaagcauca

SEQ ID NO: 1498385 - RNA, 19 nt, Homo sapiens
  misc_RNA (1)...(19): siRNA sense strand
ggugggaauuacuuugaag

SEQ ID NO: 1498386 - RNA, 19 nt, Homo sapiens
  misc_RNA (1)...(19): siRNA sense strand
ucacagugcagacuaugau

SEQ ID NO: 1498387 - RNA, 19 nt, Homo sapiens
  misc_RNA (1)...(19): siRNA sense strand
ccagagaugaagugcaaga

SEQ ID NO: 1498388 - RNA, 19 nt, Homo sapiens
  misc_RNA (1)...(19): siRNA sense strand
cagaaaugggagccaauga

SEQ ID NO: 1498389 - RNA, 19 nt, Homo sapiens
  misc_RNA (1)...(19): siRNA sense strand
gugccaucaucgaaaguga

SEQ ID NO: 1498390 - RNA, 19 nt, Homo sapiens
  misc_RNA (1)...(19): siRNA sense strand
gcucaccacuaagauggau

SEQ ID NO: 1498391 - RNA, 19 nt, Homo sapiens
  misc_RNA (1)...(19): siRNA sense strand
ggagugugcauagccaaug

SEQ ID NO: 1498392 - RNA, 19 nt, Homo sapiens
  misc_RNA (1)...(19): siRNA sense strand
ggcugcagcuccuccaagu

SEQ ID NO: 1498393 - RNA, 19 nt, Homo sapiens
  misc_RNA (1)...(19): siRNA sense strand
uagaugucauugucuccuu

SEQ ID NO: 1498394 - RNA, 19 nt, Homo sapiens
  misc_RNA (1)...(19): siRNA sense strand
gaaagaggggaaacagcua

SEQ ID NO: 1498395 - RNA, 19 nt, Homo sapiens
  misc_RNA (1)...(19): siRNA sense strand
gauccuuccagguccauau

SEQ ID NO: 1498396 - RNA, 19 nt, Homo sapiens
  misc_RNA (1)...(19): siRNA sense strand
ucgagaccauagggaagua

SEQ ID NO: 1498397 - RNA, 19 nt, Homo sapiens
  misc_RNA (1)...(19): siRNA sense strand
ggaagccauggaagaaauc

SEQ ID NO: 1498398 - RNA, 19 nt, Homo sapiens
  misc_RNA (1)...(19): siRNA sense strand
ccaaugaagccaucaacac

SEQ ID NO: 1498399 - RNA, 19 nt, Homo sapiens
  misc_RNA (1)...(19): siRNA sense strand
uauucaagccuuucaucuu

SEQ ID NO: 1498400 - RNA, 19 nt, Homo sapiens
  misc_RNA (1)...(19): siRNA sense strand
gagugcacuuacauuucaa

SEQ ID NO: 1498401 - RNA, 19 nt, Homo sapiens
  misc_RNA (1)...(19): siRNA sense strand
agccuuagaugucauuguc

SEQ ID NO: 1498402 - RNA, 19 nt, Homo sapiens
  misc_RNA (1)...(19): siRNA sense strand
guuggaagaacauggacaa

SEQ ID NO: 1498403 - RNA, 19 nt, Homo sapiens
  misc_RNA (1)...(19): siRNA sense strand
ugacacggagauuaaguuc

SEQ ID NO: 1498404 - RNA, 19 nt, Homo sapiens
  misc_RNA (1)...(19): siRNA sense strand
acaagaagaaagcaucaca

SEQ ID NO: 1498405 - RNA, 19 nt, Homo sapiens
  misc_RNA (1)...(19): siRNA sense strand
gcagagcauccggaacuca

SEQ ID NO: 1498406 - RNA, 19 nt, Homo sapiens
  misc_RNA (1)...(19): siRNA sense strand
acaaggugggaauuacuuu

SEQ ID NO: 1498407 - RNA, 19 nt, Homo sapiens
  misc_RNA (1)...(19): siRNA sense strand
caagagguuguguauuucu

SEQ ID NO: 1498408 - RNA, 19 nt, Homo sapiens
  misc_RNA (1)...(19): siRNA sense strand
ccuggaagccauggaagaa

SEQ ID NO: 1498409 - RNA, 19 nt, Homo sapiens
  misc_RNA (1)...(19): siRNA sense strand
cguaaaacuuguccccaaa

SEQ ID NO: 1498410 - RNA, 19 nt, Homo sapiens
  misc_RNA (1)...(19): siRNA sense strand
cagugcagacuaugaugaa

SEQ ID NO: 1498411 - RNA, 19 nt, Homo sapiens
  misc_RNA (1)...(19): siRNA sense strand
caaguuccaaggaccuaug

SEQ ID NO: 1498412 - RNA, 19 nt, Homo sapiens
  misc_RNA (1)...(19): siRNA sense strand
acauuucaaucgaccaagu

SEQ ID NO: 1498413 - RNA, 19 nt, Homo sapiens
  misc_RNA (1)...(19): siRNA sense strand
cgaagucuuuucuccaguu

SEQ ID NO: 1498414 - RNA, 19 nt, Homo sapiens
  misc_RNA (1)...(19): siRNA sense strand
aagaagaaagcaucacagu

SEQ ID NO: 1498415 - RNA, 19 nt, Homo sapiens
  misc_RNA (1)...(19): siRNA sense strand
gaagucuuuucuccaguug

SEQ ID NO: 1498416 - RNA, 19 nt, Homo sapiens
  misc_RNA (1)...(19): siRNA sense strand
gaacauaggacgacaguua

SEQ ID NO: 1498417 - RNA, 19 nt, Homo sapiens
  misc_RNA (1)...(19): siRNA sense strand
guucuuggcucccuuguau

SEQ ID NO: 1498418 - RNA, 19 nt, Homo sapiens
  misc_RNA (1)...(19): siRNA sense strand
ccagauuuccucuauauuc

SEQ ID NO: 1498419 - RNA, 19 nt, Homo sapiens
  misc_RNA (1)...(19): siRNA sense strand
gaaaagccccauagugauu

SEQ ID NO: 1498420 - RNA, 19 nt, Homo sapiens
  misc_RNA (1)...(19): siRNA sense strand
gggagaugaucaacguuuc

SEQ ID NO: 1498421 - RNA, 19 nt, Homo sapiens
  misc_RNA (1)...(19): siRNA sense strand
gauuuccucuauauucguu

SEQ ID NO: 1498422 - RNA, 19 nt, Homo sapiens
  misc_RNA (1)...(19): siRNA sense strand
uuggcucccuuguauauuu

SEQ ID NO: 1498423 - RNA, 19 nt, Homo sapiens
  misc_RNA (1)...(19): siRNA sense strand
cccaacaccuggcaucauc

SEQ ID NO: 1498424 - RNA, 19 nt, Homo sapiens
  misc_RNA (1)...(19): siRNA sense strand
cagauuuccucuauauucg

SEQ ID NO: 1498425 - RNA, 19 nt, Homo sapiens
  misc_RNA (1)...(19): siRNA sense strand
ccagauugcacgaccacuu

SEQ ID NO: 1498426 - RNA, 19 nt, Homo sapiens
  misc_RNA (1)...(19): siRNA sense strand
cugcagauccagaggaaug

SEQ ID NO: 1498427 - RNA, 19 nt, Homo sapiens
  misc_RNA (1)...(19): siRNA sense strand
cugaaaagccccauaguga

SEQ ID NO: 1498428 - RNA, 19 nt, Homo sapiens
  misc_RNA (1)...(19): siRNA sense strand
cagauugcacgaccacuuc

SEQ ID NO: 1498429 - RNA, 19 nt, Homo sapiens
  misc_RNA (1)...(19): siRNA sense strand
gggaacauaggacgacagu

SEQ ID NO: 1498430 - RNA, 19 nt, Homo sapiens
  misc_RNA (1)...(19): siRNA sense strand
gaggaaugucacucucuuc

SEQ ID NO: 1498431 - RNA, 19 nt, Homo sapiens
  misc_RNA (1)...(19): siRNA sense strand
gaacauaggacgacaguua

SEQ ID NO: 1498432 - RNA, 19 nt, Homo sapiens
  misc_RNA (1)...(19): siRNA sense strand
guucuuggcucccuuguau

SEQ ID NO: 1498433 - RNA, 19 nt, Homo sapiens
  misc_RNA (1)...(19): siRNA sense strand
gacuguggauuaugacaaa

SEQ ID NO: 1498434 - RNA, 19 nt, Homo sapiens
  misc_RNA (1)...(19): siRNA sense strand
caaggaagauuuuggaaga

SEQ ID NO: 1498435 - RNA, 19 nt, Homo sapiens
  misc_RNA (1)...(19): siRNA sense strand
ccagauuuccucuauauuc

SEQ ID NO: 1498436 - RNA, 19 nt, Homo sapiens
  misc_RNA (1)...(19): siRNA sense strand
gaaaagccccauagugauu

SEQ ID NO: 1498437 - RNA, 19 nt, Homo sapiens
  misc_RNA (1)...(19): siRNA sense strand
ccauagugauugagucuuc

SEQ ID NO: 1498438 - RNA, 19 nt, Homo sapiens
  misc_RNA (1)...(19): siRNA sense strand
gggagaugaucaacguuuc

SEQ ID NO: 1498439 - RNA, 19 nt, Homo sapiens
  misc_RNA (1)...(19): siRNA sense strand
gauuuccucuauauucguu

SEQ ID NO: 1498440 - RNA, 19 nt, Homo sapiens
  misc_RNA (1)...(19): siRNA sense strand
uuggcucccuuguauauuu

SEQ ID NO: 1498441 - RNA, 19 nt, Homo sapiens
  misc_RNA (1)...(19): siRNA sense strand
cccaacaccuggcaucauc

SEQ ID NO: 1498442 - RNA, 19 nt, Homo sapiens
  misc_RNA (1)...(19): siRNA sense strand
cagauuuccucuauauucg

SEQ ID NO: 1498443 - RNA, 19 nt, Homo sapiens
  misc_RNA (1)...(19): siRNA sense strand
ccagauugcacgaccacuu

SEQ ID NO: 1498444 - RNA, 19 nt, Homo sapiens
  misc_RNA (1)...(19): siRNA sense strand
cugcagauccagaggaaug

SEQ ID NO: 1498445 - RNA, 19 nt, Homo sapiens
  misc_RNA (1)...(19): siRNA sense strand
cugaaaagccccauaguga

SEQ ID NO: 1498446 - RNA, 19 nt, Homo sapiens
  misc_RNA (1)...(19): siRNA sense strand
cagauugcacgaccacuuc

SEQ ID NO: 1498447 - RNA, 19 nt, Homo sapiens
  misc_RNA (1)...(19): siRNA sense strand
gggaacauaggacgacagu

SEQ ID NO: 1498448 - RNA, 19 nt, Homo sapiens
  misc_RNA (1)...(19): siRNA sense strand
cauagugauugagucuuca

SEQ ID NO: 1498449 - RNA, 19 nt, Homo sapiens
  misc_RNA (1)...(19): siRNA sense strand
gaggaaugucacucucuuc

SEQ ID NO: 1498450 - RNA, 19 nt, Homo sapiens
  misc_RNA (1)...(19): siRNA sense strand
guucuuggcucccuuguau

SEQ ID NO: 1498451 - RNA, 19 nt, Homo sapiens
  misc_RNA (1)...(19): siRNA sense strand
ccagauuuccucuauauuc

SEQ ID NO: 1498452 - RNA, 19 nt, Homo sapiens
  misc_RNA (1)...(19): siRNA sense strand
gggagaugaucaacguuuc

SEQ ID NO: 1498453 - RNA, 19 nt, Homo sapiens
  misc_RNA (1)...(19): siRNA sense strand
gauuuccucuauauucguu

SEQ ID NO: 1498454 - RNA, 19 nt, Homo sapiens
  misc_RNA (1)...(19): siRNA sense strand
uuggcucccuuguauauuu

SEQ ID NO: 1498455 - RNA, 19 nt, Homo sapiens
  misc_RNA (1)...(19): siRNA sense strand
cccaacaccuggcaucauc

SEQ ID NO: 1498456 - RNA, 19 nt, Homo sapiens
  misc_RNA (1)...(19): siRNA sense strand
cagauuuccucuauauucg

SEQ ID NO: 1498457 - RNA, 19 nt, Homo sapiens
  misc_RNA (1)...(19): siRNA sense strand
ccagauugcacgaccacuu

SEQ ID NO: 1498458 - RNA, 19 nt, Homo sapiens
  misc_RNA (1)...(19): siRNA sense strand
cugcagauccagaggaaug

SEQ ID NO: 1498459 - RNA, 19 nt, Homo sapiens
  misc_RNA (1)...(19): siRNA sense strand
cagauugcacgaccacuuc

SEQ ID NO: 1498460 - RNA, 19 nt, Homo sapiens
  misc_RNA (1)...(19): siRNA sense strand
gaggaaugucacucucuuc

SEQ ID NO: 1498461 - RNA, 19 nt, Homo sapiens
  misc_RNA (1)...(19): siRNA sense strand
ggacgucgcaggaagauua

SEQ ID NO: 1498462 - RNA, 19 nt, Homo sapiens
  misc_RNA (1)...(19): siRNA sense strand
agaagaagaucaugaauca

SEQ ID NO: 1498463 - RNA, 19 nt, Homo sapiens
  misc_RNA (1)...(19): siRNA sense strand
ggauguaucugcaguuguu

SEQ ID NO: 1498464 - RNA, 19 nt, Homo sapiens
  misc_RNA (1)...(19): siRNA sense strand
uaaacaugcuuccuacaaa

SEQ ID NO: 1498465 - RNA, 19 nt, Homo sapiens
  misc_RNA (1)...(19): siRNA sense strand
uagaggaaauggugaauau

SEQ ID NO: 1498466 - RNA, 19 nt, Homo sapiens
  misc_RNA (1)...(19): siRNA sense strand
gauggacagugcacaguaa

SEQ ID NO: 1498467 - RNA, 19 nt, Homo sapiens
  misc_RNA (1)...(19): siRNA sense strand
gaucaugaaucaccaucuu

SEQ ID NO: 1498468 - RNA, 19 nt, Homo sapiens
  misc_RNA (1)...(19): siRNA sense strand
guaugucgcugaucuugaa

SEQ ID NO: 1498469 - RNA, 19 nt, Homo sapiens
  misc_RNA (1)...(19): siRNA sense strand
gaagauuaagcgagauaua

SEQ ID NO: 1498470 - RNA, 19 nt, Homo sapiens
  misc_RNA (1)...(19): siRNA sense strand
gggaguagcuggacuuagg

SEQ ID NO: 1498471 - RNA, 19 nt, Homo sapiens
  misc_RNA (1)...(19): siRNA sense strand
gaacucaaggcagcaagua

SEQ ID NO: 1498472 - RNA, 19 nt, Homo sapiens
  misc_RNA (1)...(19): siRNA sense strand
caacagagacuuuugguuu

SEQ ID NO: 1498473 - RNA, 19 nt, Homo sapiens
  misc_RNA (1)...(19): siRNA sense strand
ucaauaaacaugcuuccua

SEQ ID NO: 1498474 - RNA, 19 nt, Homo sapiens
  misc_RNA (1)...(19): siRNA sense strand
ccagacaccuccauugaag

SEQ ID NO: 1498475 - RNA, 19 nt, Homo sapiens
  misc_RNA (1)...(19): siRNA sense strand
gaacagugagugucagugu

SEQ ID NO: 1498476 - RNA, 19 nt, Homo sapiens
  misc_RNA (1)...(19): siRNA sense strand
gaggauguaucugcaguug

SEQ ID NO: 1498477 - RNA, 19 nt, Homo sapiens
  misc_RNA (1)...(19): siRNA sense strand
aucaguagauggucaguua

SEQ ID NO: 1498478 - RNA, 19 nt, Homo sapiens
  misc_RNA (1)...(19): siRNA sense strand
ucagaugccaguagugaua

SEQ ID NO: 1498479 - RNA, 19 nt, Homo sapiens
  misc_RNA (1)...(19): siRNA sense strand
aacgaguccuguucuaaua

SEQ ID NO: 1498480 - RNA, 19 nt, Homo sapiens
  misc_RNA (1)...(19): siRNA sense strand
gacuuaggcuagacuguga

SEQ ID NO: 1498481 - RNA, 19 nt, Homo sapiens
  misc_RNA (1)...(19): siRNA sense strand
aaacaugguucaauauagg

SEQ ID NO: 1498482 - RNA, 19 nt, Homo sapiens
  misc_RNA (1)...(19): siRNA sense strand
guggugaaauugaucauuc

SEQ ID NO: 1498483 - RNA, 19 nt, Homo sapiens
  misc_RNA (1)...(19): siRNA sense strand
gagaagaagaucaugaauc

SEQ ID NO: 1498484 - RNA, 19 nt, Homo sapiens
  misc_RNA (1)...(19): siRNA sense strand
ugacggagcggacagugua

SEQ ID NO: 1498485 - RNA, 19 nt, Homo sapiens
  misc_RNA (1)...(19): siRNA sense strand
uaggagaaaugaacaugga

SEQ ID NO: 1498486 - RNA, 19 nt, Homo sapiens
  misc_RNA (1)...(19): siRNA sense strand
gacaguacccgaucgauca

SEQ ID NO: 1498487 - RNA, 19 nt, Homo sapiens
  misc_RNA (1)...(19): siRNA sense strand
guuaauugcuggcuuucug

SEQ ID NO: 1498488 - RNA, 19 nt, Homo sapiens
  misc_RNA (1)...(19): siRNA sense strand
ggagacaacacagcugaaa

SEQ ID NO: 1498489 - RNA, 19 nt, Homo sapiens
  misc_RNA (1)...(19): siRNA sense strand
gaaaugggugguggcagua

SEQ ID NO: 1498490 - RNA, 19 nt, Homo sapiens
  misc_RNA (1)...(19): siRNA sense strand
gaguggagcuucuguucag

SEQ ID NO: 1498491 - RNA, 19 nt, Homo sapiens
  misc_RNA (1)...(19): siRNA sense strand
acacugaaauguuaauugc

SEQ ID NO: 1498492 - RNA, 19 nt, Homo sapiens
  misc_RNA (1)...(19): siRNA sense strand
gcaccagacaccuccauug

SEQ ID NO: 1498493 - RNA, 19 nt, Homo sapiens
  misc_RNA (1)...(19): siRNA sense strand
gcuagacugugaugcuaau

SEQ ID NO: 1498494 - RNA, 19 nt, Homo sapiens
  misc_RNA (1)...(19): siRNA sense strand
ugaaucagaugccaguagu

SEQ ID NO: 1498495 - RNA, 19 nt, Homo sapiens
  misc_RNA (1)...(19): siRNA sense strand
uaauacugcaccuucuuua

SEQ ID NO: 1498496 - RNA, 19 nt, Homo sapiens
  misc_RNA (1)...(19): siRNA sense strand
gaagggaguagcuggacuu

SEQ ID NO: 1498497 - RNA, 19 nt, Homo sapiens
  misc_RNA (1)...(19): siRNA sense strand
aauguuaauugcuggcuuu

SEQ ID NO: 1498498 - RNA, 19 nt, Homo sapiens
  misc_RNA (1)...(19): siRNA sense strand
guagaggaaauggugaaua

SEQ ID NO: 1498499 - RNA, 19 nt, Homo sapiens
  misc_RNA (1)...(19): siRNA sense strand
ugcaagcacuucucuggaa

SEQ ID NO: 1498500 - RNA, 19 nt, Homo sapiens
  misc_RNA (1)...(19): siRNA sense strand
cagucagucugcccuguaa

SEQ ID NO: 1498501 - RNA, 19 nt, Homo sapiens
  misc_RNA (1)...(19): siRNA sense strand
gggagaaggagaagaagau

SEQ ID NO: 1498502 - RNA, 19 nt, Homo sapiens
  misc_RNA (1)...(19): siRNA sense strand
ccguaaaccuagcaagaga

SEQ ID NO: 1498503 - RNA, 19 nt, Homo sapiens
  misc_RNA (1)...(19): siRNA sense strand
gaugagcgcacuaguagag

SEQ ID NO: 1498504 - RNA, 19 nt, Homo sapiens
  misc_RNA (1)...(19): siRNA sense strand
ggagcuucauggcuuggaa

SEQ ID NO: 1498505 - RNA, 19 nt, Homo sapiens
  misc_RNA (1)...(19): siRNA sense strand
aaacaugcuuccuacaaac

SEQ ID NO: 1498506 - RNA, 19 nt, Homo sapiens
  misc_RNA (1)...(19): siRNA sense strand
caccagacaccuccauuga

SEQ ID NO: 1498507 - RNA, 19 nt, Homo sapiens
  misc_RNA (1)...(19): siRNA sense strand
ccuagugucuucuguaagg

SEQ ID NO: 1498508 - RNA, 19 nt, Homo sapiens
  misc_RNA (1)...(19): siRNA sense strand
ggugguggcaguacgauga

SEQ ID NO: 1498509 - RNA, 19 nt, Homo sapiens
  misc_RNA (1)...(19): siRNA sense strand
gacaguguaucagcacaga

SEQ ID NO: 1498510 - RNA, 19 nt, Homo sapiens
  misc_RNA (1)...(19): siRNA sense strand
acaagaaauucccgaggau

SEQ ID NO: 1498511 - RNA, 19 nt, Homo sapiens
  misc_RNA (1)...(19): siRNA sense strand
guagauggucaguuaacaa

SEQ ID NO: 1498512 - RNA, 19 nt, Homo sapiens
  misc_RNA (1)...(19): siRNA sense strand
caauauaggagaaaugaac

SEQ ID NO: 1498513 - RNA, 19 nt, Homo sapiens
  misc_RNA (1)...(19): siRNA sense strand
gaggaaauggugaauaugc

SEQ ID NO: 1498514 - RNA, 19 nt, Homo sapiens
  misc_RNA (1)...(19): siRNA sense strand
ggagaagaagaucaugaau

SEQ ID NO: 1498515 - RNA, 19 nt, Homo sapiens
  misc_RNA (1)...(19): siRNA sense strand
caagaaauucccgaggauu

SEQ ID NO: 1498516 - RNA, 19 nt, Homo sapiens
  misc_RNA (1)...(19): siRNA sense strand
guagugauagugaggaugu

SEQ ID NO: 1498517 - RNA, 19 nt, Homo sapiens
  misc_RNA (1)...(19): siRNA sense strand
cuaauacugcaccuucuuu

SEQ ID NO: 1498518 - RNA, 19 nt, Homo sapiens
  misc_RNA (1)...(19): siRNA sense strand
guaaaccuagcaagagaga

SEQ ID NO: 1498519 - RNA, 19 nt, Homo sapiens
  misc_RNA (1)...(19): siRNA sense strand
ggcuggcuguggugaaauu

SEQ ID NO: 1498520 - RNA, 19 nt, Homo sapiens
  misc_RNA (1)...(19): siRNA sense strand
ucagaucgaucgggaacug

SEQ ID NO: 1498521 - RNA, 19 nt, Homo sapiens
  misc_RNA (1)...(19): siRNA sense strand
uuucugcuaucuaugugua

SEQ ID NO: 1498522 - RNA, 19 nt, Homo sapiens
  misc_RNA (1)...(19): siRNA sense strand
agacaccuccauugaagaa

SEQ ID NO: 1498523 - RNA, 19 nt, Homo sapiens
  misc_RNA (1)...(19): siRNA sense strand
gagaaggagaagaagauca

SEQ ID NO: 1498524 - RNA, 19 nt, Homo sapiens
  misc_RNA (1)...(19): siRNA sense strand
gaagaacucaaggcagcaa

SEQ ID NO: 1498525 - RNA, 19 nt, Homo sapiens
  misc_RNA (1)...(19): siRNA sense strand
ggaaauggugaauaugcau

SEQ ID NO: 1498526 - RNA, 19 nt, Homo sapiens
  misc_RNA (1)...(19): siRNA sense strand
gagugucagugucagaucu

SEQ ID NO: 1498527 - RNA, 19 nt, Homo sapiens
  misc_RNA (1)...(19): siRNA sense strand
auaaacaugcuuccuacaa

SEQ ID NO: 1498528 - RNA, 19 nt, Homo sapiens
  misc_RNA (1)...(19): siRNA sense strand
ggcagcaaguagaggaaau

SEQ ID NO: 1498529 - RNA, 19 nt, Homo sapiens
  misc_RNA (1)...(19): siRNA sense strand
aaucagaugccaguaguga

SEQ ID NO: 1498530 - RNA, 19 nt, Homo sapiens
  misc_RNA (1)...(19): siRNA sense strand
ugcaugguauuaugaagga

SEQ ID NO: 1498531 - RNA, 19 nt, Homo sapiens
  misc_RNA (1)...(19): siRNA sense strand
gcagcaaguagaggaaaug

SEQ ID NO: 1498532 - RNA, 19 nt, Homo sapiens
  misc_RNA (1)...(19): siRNA sense strand
ccagucagucugcccugua

SEQ ID NO: 1498533 - RNA, 19 nt, Homo sapiens
  misc_RNA (1)...(19): siRNA sense strand
uacgaugagcgcacuagua

SEQ ID NO: 1498534 - RNA, 19 nt, Homo sapiens
  misc_RNA (1)...(19): siRNA sense strand
gguauuaugaaggaagaaa

SEQ ID NO: 1498535 - RNA, 19 nt, Homo sapiens
  misc_RNA (1)...(19): siRNA sense strand
uggugaauaugcaugguau

SEQ ID NO: 1498536 - RNA, 19 nt, Homo sapiens
  misc_RNA (1)...(19): siRNA sense strand
aauacugcaccuucuuuaa

SEQ ID NO: 1498537 - RNA, 19 nt, Homo sapiens
  misc_RNA (1)...(19): siRNA sense strand
gagcuucauggcuuggaaa

SEQ ID NO: 1498538 - RNA, 19 nt, Homo sapiens
  misc_RNA (1)...(19): siRNA sense strand
aggcuagacugugaugcua

SEQ ID NO: 1498539 - RNA, 19 nt, Homo sapiens
  misc_RNA (1)...(19): siRNA sense strand
ggaagauuaagcgagauau

SEQ ID NO: 1498540 - RNA, 19 nt, Homo sapiens
  misc_RNA (1)...(19): siRNA sense strand
gucagugucagaucuagaa

SEQ ID NO: 1498541 - RNA, 19 nt, Homo sapiens
  misc_RNA (1)...(19): siRNA sense strand
ugauggacagugcacagua

SEQ ID NO: 1498542 - RNA, 19 nt, Homo sapiens
  misc_RNA (1)...(19): siRNA sense strand
uaccguaaaccuagcaaga

SEQ ID NO: 1498543 - RNA, 19 nt, Homo sapiens
  misc_RNA (1)...(19): siRNA sense strand
gguggaacagugaguguca

SEQ ID NO: 1498544 - RNA, 19 nt, Homo sapiens
  misc_RNA (1)...(19): siRNA sense strand
agacaacacagcugaaagg

SEQ ID NO: 1498545 - RNA, 19 nt, Homo sapiens
  misc_RNA (1)...(19): siRNA sense strand
guuaacaagcccugcaaca

SEQ ID NO: 1498546 - RNA, 19 nt, Homo sapiens
  misc_RNA (1)...(19): siRNA sense strand
uaaugcaaaccagacagua

SEQ ID NO: 1498547 - RNA, 19 nt, Homo sapiens
  misc_RNA (1)...(19): siRNA sense strand
cauugaagaaacugaauca

SEQ ID NO: 1498548 - RNA, 19 nt, Homo sapiens
  misc_RNA (1)...(19): siRNA sense strand
gaaggagaagaagaucaug

SEQ ID NO: 1498549 - RNA, 19 nt, Homo sapiens
  misc_RNA (1)...(19): siRNA sense strand
acgaugagcgcacuaguag

SEQ ID NO: 1498550 - RNA, 19 nt, Homo sapiens
  misc_RNA (1)...(19): siRNA sense strand
gaagaucaugaaucaccau

SEQ ID NO: 1498551 - RNA, 19 nt, Homo sapiens
  misc_RNA (1)...(19): siRNA sense strand
aggagaagaagaucaugaa

SEQ ID NO: 1498552 - RNA, 19 nt, Homo sapiens
  misc_RNA (1)...(19): siRNA sense strand
agaaggagaagaagaucau

SEQ ID NO: 1498553 - RNA, 19 nt, Homo sapiens
  misc_RNA (1)...(19): siRNA sense strand
ggagaaggagaagaagauc

SEQ ID NO: 1498554 - RNA, 19 nt, Homo sapiens
  misc_RNA (1)...(19): siRNA sense strand
gagacaacacagcugaaag

SEQ ID NO: 1498555 - RNA, 19 nt, Homo sapiens
  misc_RNA (1)...(19): siRNA sense strand
uaauugcuggcuuucugua

SEQ ID NO: 1498556 - RNA, 19 nt, Homo sapiens
  misc_RNA (1)...(19): siRNA sense strand
aggaaauggugaauaugca

SEQ ID NO: 1498557 - RNA, 19 nt, Homo sapiens
  misc_RNA (1)...(19): siRNA sense strand
cgaguccuguucuaauacu

SEQ ID NO: 1498558 - RNA, 19 nt, Homo sapiens
  misc_RNA (1)...(19): siRNA sense strand
gugaugcuaauaccguaaa

SEQ ID NO: 1498559 - RNA, 19 nt, Homo sapiens
  misc_RNA (1)...(19): siRNA sense strand
uggcuguggugaaauugau

SEQ ID NO: 1498560 - RNA, 19 nt, Homo sapiens
  misc_RNA (1)...(19): siRNA sense strand
gaacggagacgacgccuuu

SEQ ID NO: 1498561 - RNA, 19 nt, Homo sapiens
  misc_RNA (1)...(19): siRNA sense strand
gcaaggccuucaaugauau

SEQ ID NO: 1498562 - RNA, 19 nt, Homo sapiens
  misc_RNA (1)...(19): siRNA sense strand
gauaaagcaucagagaaga

SEQ ID NO: 1498563 - RNA, 19 nt, Homo sapiens
  misc_RNA (1)...(19): siRNA sense strand
guaauaaacaggccacaga

SEQ ID NO: 1498564 - RNA, 19 nt, Homo sapiens
  misc_RNA (1)...(19): siRNA sense strand
agcaaggccuucaaugaua

SEQ ID NO: 1498565 - RNA, 19 nt, Homo sapiens
  misc_RNA (1)...(19): siRNA sense strand
gcagaggaaggaaaugauu

SEQ ID NO: 1498566 - RNA, 19 nt, Homo sapiens
  misc_RNA (1)...(19): siRNA sense strand
gaugaaauacucggagaaa

SEQ ID NO: 1498567 - RNA, 19 nt, Homo sapiens
  misc_RNA (1)...(19): siRNA sense strand
cgaagaucaugcccaagaa

SEQ ID NO: 1498568 - RNA, 19 nt, Homo sapiens
  misc_RNA (1)...(19): siRNA sense strand
gaaaaucagcuauguguau

SEQ ID NO: 1498569 - RNA, 19 nt, Homo sapiens
  misc_RNA (1)...(19): siRNA sense strand
ucagcuauguguauaugaa

SEQ ID NO: 1498570 - RNA, 19 nt, Homo sapiens
  misc_RNA (1)...(19): siRNA sense strand
gaccguaaccgcaggauuc

SEQ ID NO: 1498571 - RNA, 19 nt, Homo sapiens
  misc_RNA (1)...(19): siRNA sense strand
caaagagacccagggauga

SEQ ID NO: 1498572 - RNA, 19 nt, Homo sapiens
  misc_RNA (1)...(19): siRNA sense strand
ccaccuuucauguguaaua

SEQ ID NO: 1498573 - RNA, 19 nt, Homo sapiens
  misc_RNA (1)...(19): siRNA sense strand
gaaaagcaaauacuucuga

SEQ ID NO: 1498574 - RNA, 19 nt, Homo sapiens
  misc_RNA (1)...(19): siRNA sense strand
caagaagccagcagaggaa

SEQ ID NO: 1498575 - RNA, 19 nt, Homo sapiens
  misc_RNA (1)...(19): siRNA sense strand
gaagggagugucagaagca

SEQ ID NO: 1498576 - RNA, 19 nt, Homo sapiens
  misc_RNA (1)...(19): siRNA sense strand
gccacauacuucucuaaga

SEQ ID NO: 1498577 - RNA, 19 nt, Homo sapiens
  misc_RNA (1)...(19): siRNA sense strand
gguugaacguccucagaug

SEQ ID NO: 1498578 - RNA, 19 nt, Homo sapiens
  misc_RNA (1)...(19): siRNA sense strand
ggccaugacuaaacuaggu

SEQ ID NO: 1498579 - RNA, 19 nt, Homo sapiens
  misc_RNA (1)...(19): siRNA sense strand
acuaugaggccaugacuaa

SEQ ID NO: 1498580 - RNA, 19 nt, Homo sapiens
  misc_RNA (1)...(19): siRNA sense strand
gggaaaagaugaaauacuc

SEQ ID NO: 1498581 - RNA, 19 nt, Homo sapiens
  misc_RNA (1)...(19): siRNA sense strand
acccagggaugaugauaaa

SEQ ID NO: 1498582 - RNA, 19 nt, Homo sapiens
  misc_RNA (1)...(19): siRNA sense strand
cagagaaucaucccgaaga

SEQ ID NO: 1498583 - RNA, 19 nt, Homo sapiens
  misc_RNA (1)...(19): siRNA sense strand
gagacgacgccuuugcaaa

SEQ ID NO: 1498584 - RNA, 19 nt, Homo sapiens
  misc_RNA (1)...(19): siRNA sense strand
caccuuucauguguaauaa

SEQ ID NO: 1498585 - RNA, 19 nt, Homo sapiens
  misc_RNA (1)...(19): siRNA sense strand
uaaacaggccacagacuuc

SEQ ID NO: 1498586 - RNA, 19 nt, Homo sapiens
  misc_RNA (1)...(19): siRNA sense strand
agaaucaucccgaagauca

SEQ ID NO: 1498587 - RNA, 19 nt, Homo sapiens
  misc_RNA (1)...(19): siRNA sense strand
ccgaagaucaugcccaaga

SEQ ID NO: 1498588 - RNA, 19 nt, Homo sapiens
  misc_RNA (1)...(19): siRNA sense strand
gacccagggaugaugauaa

SEQ ID NO: 1498589 - RNA, 19 nt, Homo sapiens
  misc_RNA (1)...(19): siRNA sense strand
gagaaaaucagcuaugugu

SEQ ID NO: 1498590 - RNA, 19 nt, Homo sapiens
  misc_RNA (1)...(19): siRNA sense strand
cagcagaggaaggaaauga

SEQ ID NO: 1498591 - RNA, 19 nt, Homo sapiens
  misc_RNA (1)...(19): siRNA sense strand
aaucagcuauguguauaug

SEQ ID NO: 1498592 - RNA, 19 nt, Homo sapiens
  misc_RNA (1)...(19): siRNA sense strand
aagcaaggccuucaaugau

SEQ ID NO: 1498593 - RNA, 19 nt, Homo sapiens
  misc_RNA (1)...(19): siRNA sense strand
gaagccagcagaggaagga

SEQ ID NO: 1498594 - RNA, 19 nt, Homo sapiens
  misc_RNA (1)...(19): siRNA sense strand
gaacguccucagaugacuu

SEQ ID NO: 1498595 - RNA, 19 nt, Homo sapiens
  misc_RNA (1)...(19): siRNA sense strand
uaaagcaucagagaagaga

SEQ ID NO: 1498596 - RNA, 19 nt, Homo sapiens
  misc_RNA (1)...(19): siRNA sense strand
gaagaucaugcccaagaag

SEQ ID NO: 1498597 - RNA, 19 nt, Homo sapiens
  misc_RNA (1)...(19): siRNA sense strand
ggagacgacgccuuugcaa

SEQ ID NO: 1498598 - RNA, 19 nt, Homo sapiens
  misc_RNA (1)...(19): siRNA sense strand
ccucccaccuuucaugugu

SEQ ID NO: 1498599 - RNA, 19 nt, Homo sapiens
  misc_RNA (1)...(19): siRNA sense strand
guugaacguccucagauga

SEQ ID NO: 1498600 - RNA, 19 nt, Homo sapiens
  misc_RNA (1)...(19): siRNA sense strand
gauauugccacauacuucu

SEQ ID NO: 1498601 - RNA, 19 nt, Homo sapiens
  misc_RNA (1)...(19): siRNA sense strand
cagggaugaugauaaagca

SEQ ID NO: 1498602 - RNA, 19 nt, Homo sapiens
  misc_RNA (1)...(19): siRNA sense strand
agagaaucaucccgaagau

SEQ ID NO: 1498603 - RNA, 19 nt, Homo sapiens
  misc_RNA (1)...(19): siRNA sense strand
caucagagaagagaagcaa

SEQ ID NO: 1498604 - RNA, 19 nt, Homo sapiens
  misc_RNA (1)...(19): siRNA sense strand
gaaacuaugaggccaugac

SEQ ID NO: 1498605 - RNA, 19 nt, Homo sapiens
  misc_RNA (1)...(19): siRNA sense strand
ucccaccuuucauguguaa

SEQ ID NO: 1498606 - RNA, 19 nt, Homo sapiens
  misc_RNA (1)...(19): siRNA sense strand
auaaacaggccacagacuu

SEQ ID NO: 1498607 - RNA, 19 nt, Homo sapiens
  misc_RNA (1)...(19): siRNA sense strand
gaaagagugggaaaagaug

SEQ ID NO: 1498608 - RNA, 19 nt, Homo sapiens
  misc_RNA (1)...(19): siRNA sense strand
caggggaauuauuuugaua

SEQ ID NO: 1498609 - RNA, 19 nt, Homo sapiens
  misc_RNA (1)...(19): siRNA sense strand
gaaauacucggagaaaauc

SEQ ID NO: 1498610 - RNA, 19 nt, Homo sapiens
  misc_RNA (1)...(19): siRNA sense strand
ggcaggcuccagagaauca

SEQ ID NO: 1498611 - RNA, 19 nt, Homo sapiens
  misc_RNA (1)...(19): siRNA sense strand
ugauauugccacauacuuc

SEQ ID NO: 1498612 - RNA, 19 nt, Homo sapiens
  misc_RNA (1)...(19): siRNA sense strand
cagaggaaggaaaugauuc

SEQ ID NO: 1498613 - RNA, 19 nt, Homo sapiens
  misc_RNA (1)...(19): siRNA sense strand
gggagugucagaagcaucu

SEQ ID NO: 1498614 - RNA, 19 nt, Homo sapiens
  misc_RNA (1)...(19): siRNA sense strand
acagaacgaugggaaacag

SEQ ID NO: 1498615 - RNA, 19 nt, Homo sapiens
  misc_RNA (1)...(19): siRNA sense strand
ugaaauacucggagaaaau

SEQ ID NO: 1498616 - RNA, 19 nt, Homo sapiens
  misc_RNA (1)...(19): siRNA sense strand
gagaaucaucccgaagauc

SEQ ID NO: 1498617 - RNA, 19 nt, Homo sapiens
  misc_RNA (1)...(19): siRNA sense strand
gaaagcagcuggugauuua

SEQ ID NO: 1498618 - RNA, 19 nt, Homo sapiens
  misc_RNA (1)...(19): siRNA sense strand
gaacggagacgaugccuuu

SEQ ID NO: 1498619 - RNA, 19 nt, Homo sapiens
  misc_RNA (1)...(19): siRNA sense strand
ugaagaagacgacgaguaa

SEQ ID NO: 1498620 - RNA, 19 nt, Homo sapiens
  misc_RNA (1)...(19): siRNA sense strand
caaggcaucuggacccaaa

SEQ ID NO: 1498621 - RNA, 19 nt, Homo sapiens
  misc_RNA (1)...(19): siRNA sense strand
gccaaauacuucucuaaga

SEQ ID NO: 1498622 - RNA, 19 nt, Homo sapiens
  misc_RNA (1)...(19): siRNA sense strand
cagcagagguaggaaauga

SEQ ID NO: 1498623 - RNA, 19 nt, Homo sapiens
  misc_RNA (1)...(19): siRNA sense strand
caaaaggccuucgaugaua

SEQ ID NO: 1498624 - RNA, 19 nt, Homo sapiens
  misc_RNA (1)...(19): siRNA sense strand
gaugaaauccucggagaaa

SEQ ID NO: 1498625 - RNA, 19 nt, Homo sapiens
  misc_RNA (1)...(19): siRNA sense strand
gaaaugauucgaaggaagu

SEQ ID NO: 1498626 - RNA, 19 nt, Homo sapiens
  misc_RNA (1)...(19): siRNA sense strand
caagaagccagcagaggua

SEQ ID NO: 1498627 - RNA, 19 nt, Homo sapiens
  misc_RNA (1)...(19): siRNA sense strand
ccaacuaccucugagaaga

SEQ ID NO: 1498628 - RNA, 19 nt, Homo sapiens
  misc_RNA (1)...(19): siRNA sense strand
guugaacguucucagauga

SEQ ID NO: 1498629 - RNA, 19 nt, Homo sapiens
  misc_RNA (1)...(19): siRNA sense strand
gcagagguaggaaaugauu

SEQ ID NO: 1498630 - RNA, 19 nt, Homo sapiens
  misc_RNA (1)...(19): siRNA sense strand
cgaagaucaugcccaagaa

SEQ ID NO: 1498631 - RNA, 19 nt, Homo sapiens
  misc_RNA (1)...(19): siRNA sense strand
ccacaggaaucagguugaa

SEQ ID NO: 1498632 - RNA, 19 nt, Homo sapiens
  misc_RNA (1)...(19): siRNA sense strand
ccaccuuucauguguaaua

SEQ ID NO: 1498633 - RNA, 19 nt, Homo sapiens
  misc_RNA (1)...(19): siRNA sense strand
gguugaacguucucagaug

SEQ ID NO: 1498634 - RNA, 19 nt, Homo sapiens
  misc_RNA (1)...(19): siRNA sense strand
uagggcugguucucaaaua

SEQ ID NO: 1498635 - RNA, 19 nt, Homo sapiens
  misc_RNA (1)...(19): siRNA sense strand
gaaggaagugccagaagca

SEQ ID NO: 1498636 - RNA, 19 nt, Homo sapiens
  misc_RNA (1)...(19): siRNA sense strand
aguaugaggccaugacuaa

SEQ ID NO: 1498637 - RNA, 19 nt, Homo sapiens
  misc_RNA (1)...(19): siRNA sense strand
ggccaugacuaaacuaggu

SEQ ID NO: 1498638 - RNA, 19 nt, Homo sapiens
  misc_RNA (1)...(19): siRNA sense strand
ggugauuuaugaagagauc

SEQ ID NO: 1498639 - RNA, 19 nt, Homo sapiens
  misc_RNA (1)...(19): siRNA sense strand
ggaagugccagaagcaucu

SEQ ID NO: 1498640 - RNA, 19 nt, Homo sapiens
  misc_RNA (1)...(19): siRNA sense strand
gaaaaccaacuaccucuga

SEQ ID NO: 1498641 - RNA, 19 nt, Homo sapiens
  misc_RNA (1)...(19): siRNA sense strand
gagaaaaucaucuaugugu

SEQ ID NO: 1498642 - RNA, 19 nt, Homo sapiens
  misc_RNA (1)...(19): siRNA sense strand
gaaaguaugaggccaugac

SEQ ID NO: 1498643 - RNA, 19 nt, Homo sapiens
  misc_RNA (1)...(19): siRNA sense strand
ccgaagaucaugcccaaga

SEQ ID NO: 1498644 - RNA, 19 nt, Homo sapiens
  misc_RNA (1)...(19): siRNA sense strand
aggcuacccucccaccuuu

SEQ ID NO: 1498645 - RNA, 19 nt, Homo sapiens
  misc_RNA (1)...(19): siRNA sense strand
gaaucagguugaacguucu

SEQ ID NO: 1498646 - RNA, 19 nt, Homo sapiens
  misc_RNA (1)...(19): siRNA sense strand
ccucugagaagauuaacaa

SEQ ID NO: 1498647 - RNA, 19 nt, Homo sapiens
  misc_RNA (1)...(19): siRNA sense strand
caacuaccucugagaagau

SEQ ID NO: 1498648 - RNA, 19 nt, Homo sapiens
  misc_RNA (1)...(19): siRNA sense strand
ucaaauaccagagaagauc

SEQ ID NO: 1498649 - RNA, 19 nt, Homo sapiens
  misc_RNA (1)...(19): siRNA sense strand
gaagccagcagagguagga

SEQ ID NO: 1498650 - RNA, 19 nt, Homo sapiens
  misc_RNA (1)...(19): siRNA sense strand
cagcgacccugaagaagac

SEQ ID NO: 1498651 - RNA, 19 nt, Homo sapiens
  misc_RNA (1)...(19): siRNA sense strand
agaaagcagcuggugauuu

SEQ ID NO: 1498652 - RNA, 19 nt, Homo sapiens
  misc_RNA (1)...(19): siRNA sense strand
gagaaagcagcuggugauu

SEQ ID NO: 1498653 - RNA, 19 nt, Homo sapiens
  misc_RNA (1)...(19): siRNA sense strand
ccucccaccuuucaugugu

SEQ ID NO: 1498654 - RNA, 19 nt, Homo sapiens
  misc_RNA (1)...(19): siRNA sense strand
ccacagacugcgugagaga

SEQ ID NO: 1498655 - RNA, 19 nt, Homo sapiens
  misc_RNA (1)...(19): siRNA sense strand
gaagaucaugcccaagaag

SEQ ID NO: 1498656 - RNA, 19 nt, Homo sapiens
  misc_RNA (1)...(19): siRNA sense strand
gaccguaaccacaggaauc

SEQ ID NO: 1498657 - RNA, 19 nt, Homo sapiens
  misc_RNA (1)...(19): siRNA sense strand
gcuggugauuuaugaagag

SEQ ID NO: 1498658 - RNA, 19 nt, Homo sapiens
  misc_RNA (1)...(19): siRNA sense strand
uaggaaaugauucgaagga

SEQ ID NO: 1498659 - RNA, 19 nt, Homo sapiens
  misc_RNA (1)...(19): siRNA sense strand
cugaagaagacgacgagua

SEQ ID NO: 1498660 - RNA, 19 nt, Homo sapiens
  misc_RNA (1)...(19): siRNA sense strand
agagaaagcagcuggugau

SEQ ID NO: 1498661 - RNA, 19 nt, Homo sapiens
  misc_RNA (1)...(19): siRNA sense strand
cggagaaaaucaucuaugu

SEQ ID NO: 1498662 - RNA, 19 nt, Homo sapiens
  misc_RNA (1)...(19): siRNA sense strand
ucccaccuuucauguguaa

SEQ ID NO: 1498663 - RNA, 19 nt, Homo sapiens
  misc_RNA (1)...(19): siRNA sense strand
cuaccucugagaagauuaa

SEQ ID NO: 1498664 - RNA, 19 nt, Homo sapiens
  misc_RNA (1)...(19): siRNA sense strand
cggagacgaugccuuugca

SEQ ID NO: 1498665 - RNA, 19 nt, Homo sapiens
  misc_RNA (1)...(19): siRNA sense strand
gaacguucucagaugacuu

SEQ ID NO: 1498666 - RNA, 19 nt, Homo sapiens
  misc_RNA (1)...(19): siRNA sense strand
gaaagagugggaaaagaug

SEQ ID NO: 1498667 - RNA, 19 nt, Homo sapiens
  misc_RNA (1)...(19): siRNA sense strand
ccaaaaggccuucgaugau

SEQ ID NO: 1498668 - RNA, 19 nt, Homo sapiens
  misc_RNA (1)...(19): siRNA sense strand
ggggaaugauuuugauaau

SEQ ID NO: 1498669 - RNA, 19 nt, Homo sapiens
  misc_RNA (1)...(19): siRNA sense strand
gggaaugauuuugauaaug

SEQ ID NO: 1498670 - RNA, 19 nt, Homo sapiens
  misc_RNA (1)...(19): siRNA sense strand
aggaaaugauucgaaggaa

SEQ ID NO: 1498671 - RNA, 19 nt, Homo sapiens
  misc_RNA (1)...(19): siRNA sense strand
guaugaggccaugacuaaa

SEQ ID NO: 1498672 - RNA, 19 nt, Homo sapiens
  misc_RNA (1)...(19): siRNA sense strand
acagaacgaugggaaacag

SEQ ID NO: 1498673 - RNA, 19 nt, Homo sapiens
  misc_RNA (1)...(19): siRNA sense strand
cuucgaugauauugccaaa

SEQ ID NO: 1498674 - RNA, 19 nt, Homo sapiens
  misc_RNA (1)...(19): siRNA sense strand
acagacugcgugagagaaa

SEQ ID NO: 1498675 - RNA, 19 nt, Homo sapiens
  misc_RNA (1)...(19): siRNA sense strand
aaaaggccuucgaugauau

SEQ ID NO: 1498676 - RNA, 19 nt, Homo sapiens
  misc_RNA (1)...(19): siRNA sense strand
cagguugaacguucucaga

SEQ ID NO: 1498677 - RNA, 19 nt, Homo sapiens
  misc_RNA (1)...(19): siRNA sense strand
gaccuagggcugguucuca

SEQ ID NO: 1498678 - RNA, 19 nt, Homo sapiens
  misc_RNA (1)...(19): siRNA sense strand
ggacgaccguguauaguuu

SEQ ID NO: 1498679 - RNA, 19 nt, Homo sapiens
  misc_RNA (1)...(19): siRNA sense strand
cagagaagaugacauuaaa

SEQ ID NO: 1498680 - RNA, 19 nt, Homo sapiens
  misc_RNA (1)...(19): siRNA sense strand
ggaauauucuucugugugu

SEQ ID NO: 1498681 - RNA, 19 nt, Homo sapiens
  misc_RNA (1)...(19): siRNA sense strand
gcagagaagaugacauuaa

SEQ ID NO: 1498682 - RNA, 19 nt, Homo sapiens
  misc_RNA (1)...(19): siRNA sense strand
guagacaacggaaauauuu

SEQ ID NO: 1498683 - RNA, 19 nt, Homo sapiens
  misc_RNA (1)...(19): siRNA sense strand
caacggaaauauuuaugug

SEQ ID NO: 1498684 - RNA, 19 nt, Homo sapiens
  misc_RNA (1)...(19): siRNA sense strand
gagaauaucaugcuaugga

SEQ ID NO: 1498685 - RNA, 19 nt, Homo sapiens
  misc_RNA (1)...(19): siRNA sense strand
gggagaauaucaugcuaug

SEQ ID NO: 1498686 - RNA, 19 nt, Homo sapiens
  misc_RNA (1)...(19): siRNA sense strand
gggcagagaagaugacauu

SEQ ID NO: 1498687 - RNA, 19 nt, Homo sapiens
  misc_RNA (1)...(19): siRNA sense strand
gaaggucuguaccagucua

SEQ ID NO: 1498688 - RNA, 19 nt, Homo sapiens
  misc_RNA (1)...(19): siRNA sense strand
gaaagaaugacagcuguug

SEQ ID NO: 1498689 - RNA, 19 nt, Homo sapiens
  misc_RNA (1)...(19): siRNA sense strand
aggaggaccuuuacauuug

SEQ ID NO: 1498690 - RNA, 19 nt, Homo sapiens
  misc_RNA (1)...(19): siRNA sense strand
caggaggaccuuuacauuu

SEQ ID NO: 1498691 - RNA, 19 nt, Homo sapiens
  misc_RNA (1)...(19): siRNA sense strand
cuauggauauucgcuguua

SEQ ID NO: 1498692 - RNA, 19 nt, Homo sapiens
  misc_RNA (1)...(19): siRNA sense strand
cuaaagauccaucagcaaa

SEQ ID NO: 1498693 - RNA, 19 nt, Homo sapiens
  misc_RNA (1)...(19): siRNA sense strand
ccacucaggaggaccuuua

SEQ ID NO: 1498694 - RNA, 19 nt, Homo sapiens
  misc_RNA (1)...(19): siRNA sense strand
ugggagauauagaggauuu

SEQ ID NO: 1498695 - RNA, 19 nt, Homo sapiens
  misc_RNA (1)...(19): siRNA sense strand
ccaaaggaauaaagcaaag

SEQ ID NO: 1498696 - RNA, 19 nt, Homo sapiens
  misc_RNA (1)...(19): siRNA sense strand
ggucuguaccagucuauaa

SEQ ID NO: 1498697 - RNA, 19 nt, Homo sapiens
  misc_RNA (1)...(19): siRNA sense strand
ggaggaccuuuacauuugg

SEQ ID NO: 1498698 - RNA, 19 nt, Homo sapiens
  misc_RNA (1)...(19): siRNA sense strand
gauggacgaccguguauag

SEQ ID NO: 1498699 - RNA, 19 nt, Homo sapiens
  misc_RNA (1)...(19): siRNA sense strand
ucaggaggaccuuuacauu

SEQ ID NO: 1498700 - RNA, 19 nt, Homo sapiens
  misc_RNA (1)...(19): siRNA sense strand
gacaguagacaacggaaau

SEQ ID NO: 1498701 - RNA, 19 nt, Homo sapiens
  misc_RNA (1)...(19): siRNA sense strand
gauagagaaguggucauuu

SEQ ID NO: 1498702 - RNA, 19 nt, Homo sapiens
  misc_RNA (1)...(19): siRNA sense strand
ugauggcucugcacaagau

SEQ ID NO: 1498703 - RNA, 19 nt, Homo sapiens
  misc_RNA (1)...(19): siRNA sense strand
ucuauaaacccuaaagauc

SEQ ID NO: 1498704 - RNA, 19 nt, Homo sapiens
  misc_RNA (1)...(19): siRNA sense strand
caaguggugcuccaaagga

SEQ ID NO: 1498705 - RNA, 19 nt, Homo sapiens
  misc_RNA (1)...(19): siRNA sense strand
uauaaacccuaaagaucca

SEQ ID NO: 1498706 - RNA, 19 nt, Homo sapiens
  misc_RNA (1)...(19): siRNA sense strand
auagagaaguggucauuuu

SEQ ID NO: 1498707 - RNA, 19 nt, Homo sapiens
  misc_RNA (1)...(19): siRNA sense strand
guggugcuccaaaggaaua

SEQ ID NO: 1498708 - RNA, 19 nt, Homo sapiens
  misc_RNA (1)...(19): siRNA sense strand
uuaagugugacucugauuu

SEQ ID NO: 1498709 - RNA, 19 nt, Homo sapiens
  misc_RNA (1)...(19): siRNA sense strand
cagcuguuguccaugauag

SEQ ID NO: 1498710 - RNA, 19 nt, Homo sapiens
  misc_RNA (1)...(19): siRNA sense strand
ccacaagggagaauaucau

SEQ ID NO: 1498711 - RNA, 19 nt, Homo sapiens
  misc_RNA (1)...(19): siRNA sense strand
augugacucuuucuaauga

SEQ ID NO: 1498712 - RNA, 19 nt, Homo sapiens
  misc_RNA (1)...(19): siRNA sense strand
agaauaucaugcuauggau

SEQ ID NO: 1498713 - RNA, 19 nt, Homo sapiens
  misc_RNA (1)...(19): siRNA sense strand
ugauagagaaguggucauu

SEQ ID NO: 1498714 - RNA, 19 nt, Homo sapiens
  misc_RNA (1)...(19): siRNA sense strand
uaugugacucuuucuaaug

SEQ ID NO: 1498715 - RNA, 19 nt, Homo sapiens
  misc_RNA (1)...(19): siRNA sense strand
gacaacggaaauauuuaug

SEQ ID NO: 1498716 - RNA, 19 nt, Homo sapiens
  misc_RNA (1)...(19): siRNA sense strand
cuaaugaaccuuuuaagug

SEQ ID NO: 1498717 - RNA, 19 nt, Homo sapiens
  misc_RNA (1)...(19): siRNA sense strand
aagggagaauaucaugcua

SEQ ID NO: 1498718 - RNA, 19 nt, Homo sapiens
  misc_RNA (1)...(19): siRNA sense strand
agcaaaggauucacacagu

SEQ ID NO: 1498719 - RNA, 19 nt, Homo sapiens
  misc_RNA (1)...(19): siRNA sense strand
aggaauaaagcaaaggauu

SEQ ID NO: 1498720 - RNA, 19 nt, Homo sapiens
  misc_RNA (1)...(19): siRNA sense strand
aaaggaauaaagcaaagga

SEQ ID NO: 1498721 - RNA, 19 nt, Homo sapiens
  misc_RNA (1)...(19): siRNA sense strand
caagggagaauaucaugcu

SEQ ID NO: 1498722 - RNA, 19 nt, Homo sapiens
  misc_RNA (1)...(19): siRNA sense strand
aaguggugcuccaaaggaa

SEQ ID NO: 1498723 - RNA, 19 nt, Homo sapiens
  misc_RNA (1)...(19): siRNA sense strand
acaguagacaacggaaaua

SEQ ID NO: 1498724 - RNA, 19 nt, Homo sapiens
  misc_RNA (1)...(19): siRNA sense strand
uauagaggauuuugaugga

SEQ ID NO: 1498725 - RNA, 19 nt, Homo sapiens
  misc_RNA (1)...(19): siRNA sense strand
uuaugccacuggagacuuc

SEQ ID NO: 1498726 - RNA, 19 nt, Homo sapiens
  misc_RNA (1)...(19): siRNA sense strand
ugacaguagacaacggaaa

SEQ ID NO: 1498727 - RNA, 19 nt, Homo sapiens
  misc_RNA (1)...(19): siRNA sense strand
uggacgaccguguauaguu

SEQ ID NO: 1498728 - RNA, 19 nt, Homo sapiens
  misc_RNA (1)...(19): siRNA sense strand
ccuuuacauuugggagaua

SEQ ID NO: 1498729 - RNA, 19 nt, Homo sapiens
  misc_RNA (1)...(19): siRNA sense strand
ugaaagaaugacagcuguu

SEQ ID NO: 1498730 - RNA, 19 nt, Homo sapiens
  misc_RNA (1)...(19): siRNA sense strand
aguagacaacggaaauauu

SEQ ID NO: 1498731 - RNA, 19 nt, Homo sapiens
  misc_RNA (1)...(19): siRNA sense strand
uccaaaggaauaaagcaaa

SEQ ID NO: 1498732 - RNA, 19 nt, Homo sapiens
  misc_RNA (1)...(19): siRNA sense strand
uguuguccaugauagagaa

SEQ ID NO: 1498733 - RNA, 19 nt, Homo sapiens
  misc_RNA (1)...(19): siRNA sense strand
cuaccacaagggagaauau

SEQ ID NO: 1498734 - RNA, 19 nt, Homo sapiens
  misc_RNA (1)...(19): siRNA sense strand
ggcuacagcuuugguggua

SEQ ID NO: 1498735 - RNA, 19 nt, Homo sapiens
  misc_RNA (1)...(19): siRNA sense strand
caggauacccuauucuaug

SEQ ID NO: 1498736 - RNA, 19 nt, Homo sapiens
  misc_RNA (1)...(19): siRNA sense strand
ccaggauacccuauucuau

SEQ ID NO: 1498737 - RNA, 19 nt, Homo sapiens
  misc_RNA (1)...(19): siRNA sense strand
aggauacccuauucuaugg

SEQ ID NO: 1498738 - RNA, 19 nt, Homo sapiens
  misc_RNA (1)...(19): siRNA sense strand
ucccugggcuacagcuuug

SEQ ID NO: 1498739 - RNA, 19 nt, Homo sapiens
  misc_RNA (1)...(19): siRNA sense strand
cccaggauacccuauucua

SEQ ID NO: 1498740 - RNA, 19 nt, Homo sapiens
  misc_RNA (1)...(19): siRNA sense strand
gaagauguauuucccaauc

SEQ ID NO: 1498741 - RNA, 19 nt, Homo sapiens
  misc_RNA (1)...(19): siRNA sense strand
caaucaaccugguggaaua

SEQ ID NO: 1498742 - RNA, 19 nt, Homo sapiens
  misc_RNA (1)...(19): siRNA sense strand
cagaugaggauccaaauua

SEQ ID NO: 1498743 - RNA, 19 nt, Homo sapiens
  misc_RNA (1)...(19): siRNA sense strand
caauaaugcucgucuaugu

SEQ ID NO: 1498744 - RNA, 19 nt, Homo sapiens
  misc_RNA (1)...(19): siRNA sense strand
gacagcagacuuuguauuu

SEQ ID NO: 1498745 - RNA, 19 nt, Homo sapiens
  misc_RNA (1)...(19): siRNA sense strand
cagcagacuuuguauuuau

SEQ ID NO: 1498746 - RNA, 19 nt, Homo sapiens
  misc_RNA (1)...(19): siRNA sense strand
ggagauuaaucaccaacuu

SEQ ID NO: 1498747 - RNA, 19 nt, Homo sapiens
  misc_RNA (1)...(19): siRNA sense strand
gaucacaccuuuucaguug

SEQ ID NO: 1498748 - RNA, 19 nt, Homo sapiens
  misc_RNA (1)...(19): siRNA sense strand
acagcagacuuuguauuua

SEQ ID NO: 1498749 - RNA, 19 nt, Homo sapiens
  misc_RNA (1)...(19): siRNA sense strand
gcaguuggacacauauauu

SEQ ID NO: 1498750 - RNA, 19 nt, Homo sapiens
  misc_RNA (1)...(19): siRNA sense strand
ggacagcagacuuuguauu

SEQ ID NO: 1498751 - RNA, 19 nt, Homo sapiens
  misc_RNA (1)...(19): siRNA sense strand
uggaauugaucacaccuuu

SEQ ID NO: 1498752 - RNA, 19 nt, Homo sapiens
  misc_RNA (1)...(19): siRNA sense strand
gccagcggcuuggagguua

SEQ ID NO: 1498753 - RNA, 19 nt, Homo sapiens
  misc_RNA (1)...(19): siRNA sense strand
uuugguggauucuuaauga

SEQ ID NO: 1498754 - RNA, 19 nt, Homo sapiens
  misc_RNA (1)...(19): siRNA sense strand
uauugcaguuggacacaua

SEQ ID NO: 1498755 - RNA, 19 nt, Homo sapiens
  misc_RNA (1)...(19): siRNA sense strand
uuacaauaaugcucgucua

SEQ ID NO: 1498756 - RNA, 19 nt, Homo sapiens
  misc_RNA (1)...(19): siRNA sense strand
gagauuaaucaccaacuuc

SEQ ID NO: 1498757 - RNA, 19 nt, Homo sapiens
  misc_RNA (1)...(19): siRNA sense strand
caguuggacacauauauuu

SEQ ID NO: 1498758 - RNA, 19 nt, Homo sapiens
  misc_RNA (1)...(19): siRNA sense strand
caaccugguggaauaagaa

SEQ ID NO: 1498759 - RNA, 19 nt, Homo sapiens
  misc_RNA (1)...(19): siRNA sense strand
ucaaccugguggaauaaga

SEQ ID NO: 1498760 - RNA, 19 nt, Homo sapiens
  misc_RNA (1)...(19): siRNA sense strand
ccagaugaggauccaaauu

SEQ ID NO: 1498761 - RNA, 19 nt, Homo sapiens
  misc_RNA (1)...(19): siRNA sense strand
ucggacagcagacuuugua

SEQ ID NO: 1498762 - RNA, 19 nt, Homo sapiens
  misc_RNA (1)...(19): siRNA sense strand
cuauaucguuacugucgaa

SEQ ID NO: 1498763 - RNA, 19 nt, Homo sapiens
  misc_RNA (1)...(19): siRNA sense strand
ccugggugcucaugggauu

SEQ ID NO: 1498764 - RNA, 19 nt, Homo sapiens
  misc_RNA (1)...(19): siRNA sense strand
gccaggccuuuacaauaau

SEQ ID NO: 1498765 - RNA, 19 nt, Homo sapiens
  misc_RNA (1)...(19): siRNA sense strand
uaucguuacugucgaaugc

SEQ ID NO: 1498766 - RNA, 19 nt, Homo sapiens
  misc_RNA (1)...(19): siRNA sense strand
gaugaggauccaaauuaca

SEQ ID NO: 1498767 - RNA, 19 nt, Homo sapiens
  misc_RNA (1)...(19): siRNA sense strand
ccagcggcuuggagguuaa

SEQ ID NO: 1498768 - RNA, 19 nt, Homo sapiens
  misc_RNA (1)...(19): siRNA sense strand
gaauugaucacaccuuuuc

SEQ ID NO: 1498769 - RNA, 19 nt, Homo sapiens
  misc_RNA (1)...(19): siRNA sense strand
agaugaggauccaaauuac

SEQ ID NO: 1498770 - RNA, 19 nt, Homo sapiens
  misc_RNA (1)...(19): siRNA sense strand
ccaggccuuuacaauaaug

SEQ ID NO: 1498771 - RNA, 19 nt, Homo sapiens
  misc_RNA (1)...(19): siRNA sense strand
agauguauuucccaaucaa

SEQ ID NO: 1498772 - RNA, 19 nt, Homo sapiens
  misc_RNA (1)...(19): siRNA sense strand
gaacuucuucggccuucuc

SEQ ID NO: 1498773 - RNA, 19 nt, Homo sapiens
  misc_RNA (1)...(19): siRNA sense strand
caccagaugaggauccaaa

SEQ ID NO: 1498774 - RNA, 19 nt, Homo sapiens
  misc_RNA (1)...(19): siRNA sense strand
aagauguauuucccaauca

SEQ ID NO: 1498775 - RNA, 19 nt, Homo sapiens
  misc_RNA (1)...(19): siRNA sense strand
gccgugcaguuggaauuga

SEQ ID NO: 1498776 - RNA, 19 nt, Homo sapiens
  misc_RNA (1)...(19): siRNA sense strand
gcaguuggaauugaucaca

SEQ ID NO: 1498777 - RNA, 19 nt, Homo sapiens
  misc_RNA (1)...(19): siRNA sense strand
gcagacuuuguauuuaugu

SEQ ID NO: 1498778 - RNA, 19 nt, Homo sapiens
  misc_RNA (1)...(19): siRNA sense strand
ggccaguuggauucaauuu

SEQ ID NO: 1498779 - RNA, 19 nt, Homo sapiens
  misc_RNA (1)...(19): siRNA sense strand
cugaaaacaccaucuauuu

SEQ ID NO: 1498780 - RNA, 19 nt, Homo sapiens
  misc_RNA (1)...(19): siRNA sense strand
ccaaucaaccugguggaau

SEQ ID NO: 1498781 - RNA, 19 nt, Homo sapiens
  misc_RNA (1)...(19): siRNA sense strand
ucacaccuuuucaguugua

SEQ ID NO: 1498782 - RNA, 19 nt, Homo sapiens
  misc_RNA (1)...(19): siRNA sense strand
uacaauaaugcucgucuau

SEQ ID NO: 1498783 - RNA, 19 nt, Homo sapiens
  misc_RNA (1)...(19): siRNA sense strand
gaggauccaaauuacaauc

SEQ ID NO: 1498784 - RNA, 19 nt, Homo sapiens
  misc_RNA (1)...(19): siRNA sense strand
gauuaaucaccaacuucuu

SEQ ID NO: 1498785 - RNA, 19 nt, Homo sapiens
  misc_RNA (1)...(19): siRNA sense strand
ccaaauuacaauccacuac

SEQ ID NO: 1498786 - RNA, 19 nt, Homo sapiens
  misc_RNA (1)...(19): siRNA sense strand
ucguuacugucgaaugcua

SEQ ID NO: 1498787 - RNA, 19 nt, Homo sapiens
  misc_RNA (1)...(19): siRNA sense strand
ccacugaccuugccuauua

SEQ ID NO: 1498788 - RNA, 19 nt, Homo sapiens
  misc_RNA (1)...(19): siRNA sense strand
gagcagaacucaacuuugg

SEQ ID NO: 1498789 - RNA, 19 nt, Homo sapiens
  misc_RNA (1)...(19): siRNA sense strand
aaacugaacuccaaugaug

SEQ ID NO: 1498790 - RNA, 19 nt, Homo sapiens
  misc_RNA (1)...(19): siRNA sense strand
caaggaagcuguguuugaa

SEQ ID NO: 1498791 - RNA, 19 nt, Homo sapiens
  misc_RNA (1)...(19): siRNA sense strand
ggacaaggaagcuguguuu

SEQ ID NO: 1498792 - RNA, 19 nt, Homo sapiens
  misc_RNA (1)...(19): siRNA sense strand
cagggcaccuucaaacuga

SEQ ID NO: 1498793 - RNA, 19 nt, Homo sapiens
  misc_RNA (1)...(19): siRNA sense strand
cgggaaagcuguguucaug

SEQ ID NO: 1498794 - RNA, 19 nt, Homo sapiens
  misc_RNA (1)...(19): siRNA sense strand
ucucuacgcugcagauuca

SEQ ID NO: 1498795 - RNA, 19 nt, Homo sapiens
  misc_RNA (1)...(19): siRNA sense strand
gaagcuguguuugaagugu

SEQ ID NO: 1498796 - RNA, 19 nt, Homo sapiens
  misc_RNA (1)...(19): siRNA sense strand
acaaggaagcuguguuuga

SEQ ID NO: 1498797 - RNA, 19 nt, Homo sapiens
  misc_RNA (1)...(19): siRNA sense strand
ccacuggcgucaucucuac

SEQ ID NO: 1498798 - RNA, 19 nt, Homo sapiens
  misc_RNA (1)...(19): siRNA sense strand
gcaccuacaacaaagacuu

SEQ ID NO: 1498799 - RNA, 19 nt, Homo sapiens
  misc_RNA (1)...(19): siRNA sense strand
gaaguucaacgcguccauu

SEQ ID NO: 1498800 - RNA, 19 nt, Homo sapiens
  misc_RNA (1)...(19): siRNA sense strand
aggcagggcuccucaccaa

SEQ ID NO: 1498801 - RNA, 19 nt, Homo sapiens
  misc_RNA (1)...(19): siRNA sense strand
ggacauccacacagccaau

SEQ ID NO: 1498802 - RNA, 19 nt, Homo sapiens
  misc_RNA (1)...(19): siRNA sense strand
caccuacaacaaagacuua

SEQ ID NO: 1498803 - RNA, 19 nt, Homo sapiens
  misc_RNA (1)...(19): siRNA sense strand
uggagccacuggauucuga

SEQ ID NO: 1498804 - RNA, 19 nt, Homo sapiens
  misc_RNA (1)...(19): siRNA sense strand
ucaaacugaacuccaauga

SEQ ID NO: 1498805 - RNA, 19 nt, Homo sapiens
  misc_RNA (1)...(19): siRNA sense strand
gcaccaaggaauucagcuu

SEQ ID NO: 1498806 - RNA, 19 nt, Homo sapiens
  misc_RNA (1)...(19): siRNA sense strand
ccgacaugcuggccacuga

SEQ ID NO: 1498807 - RNA, 19 nt, Homo sapiens
  misc_RNA (1)...(19): siRNA sense strand
cuagugagcgggacuuugu

SEQ ID NO: 1498808 - RNA, 19 nt, Homo sapiens
  misc_RNA (1)...(19): siRNA sense strand
ggacuucccagcaccuaca

SEQ ID NO: 1498809 - RNA, 19 nt, Homo sapiens
  misc_RNA (1)...(19): siRNA sense strand
ccgagcagaacucaacuuu

SEQ ID NO: 1498810 - RNA, 19 nt, Homo sapiens
  misc_RNA (1)...(19): siRNA sense strand
gauacuccauggccuagac

SEQ ID NO: 1498811 - RNA, 19 nt, Homo sapiens
  misc_RNA (1)...(19): siRNA sense strand
caaacugaacuccaaugau

SEQ ID NO: 1498812 - RNA, 19 nt, Homo sapiens
  misc_RNA (1)...(19): siRNA sense strand
ucccagcaccuacaacaaa

SEQ ID NO: 1498813 - RNA, 19 nt, Homo sapiens
  misc_RNA (1)...(19): siRNA sense strand
ucaccaaggccgagaugga

SEQ ID NO: 1498814 - RNA, 19 nt, Homo sapiens
  misc_RNA (1)...(19): siRNA sense strand
gugcggaagcggaucaaug

SEQ ID NO: 1498815 - RNA, 19 nt, Homo sapiens
  misc_RNA (1)...(19): siRNA sense strand
ccagggcaccuucaaacug

SEQ ID NO: 1498816 - RNA, 19 nt, Homo sapiens
  misc_RNA (1)...(19): siRNA sense strand
ggacuuuguggccgaguuc

SEQ ID NO: 1498817 - RNA, 19 nt, Homo sapiens
  misc_RNA (1)...(19): siRNA sense strand
aggaagcuguguuugaagu

SEQ ID NO: 1498818 - RNA, 19 nt, Homo sapiens
  misc_RNA (1)...(19): siRNA sense strand
gggcuucgcugugcaugac

SEQ ID NO: 1498819 - RNA, 19 nt, Homo sapiens
  misc_RNA (1)...(19): siRNA sense strand
gcagaggcggaacgugaug

SEQ ID NO: 1498820 - RNA, 19 nt, Homo sapiens
  misc_RNA (1)...(19): siRNA sense strand
gggacuuuguggccgaguu

SEQ ID NO: 1498821 - RNA, 19 nt, Homo sapiens
  misc_RNA (1)...(19): siRNA sense strand
uuugggagguggauguuca

SEQ ID NO: 1498822 - RNA, 19 nt, Homo sapiens
  misc_RNA (1)...(19): siRNA sense strand
gcagauucaccaagagaac

SEQ ID NO: 1498823 - RNA, 19 nt, Homo sapiens
  misc_RNA (1)...(19): siRNA sense strand
caaggcugggcguguguuu

SEQ ID NO: 1498824 - RNA, 19 nt, Homo sapiens
  misc_RNA (1)...(19): siRNA sense strand
ugacccaucucagcaggau

SEQ ID NO: 1498825 - RNA, 19 nt, Homo sapiens
  misc_RNA (1)...(19): siRNA sense strand
ccaucacucucaacagcau

SEQ ID NO: 1498826 - RNA, 19 nt, Homo sapiens
  misc_RNA (1)...(19): siRNA sense strand
ggaagcuguguuugaagug

SEQ ID NO: 1498827 - RNA, 19 nt, Homo sapiens
  misc_RNA (1)...(19): siRNA sense strand
ucaacaagcugcugaguga

SEQ ID NO: 1498828 - RNA, 19 nt, Homo sapiens
  misc_RNA (1)...(19): siRNA sense strand
gcacguggcucaccagcaa

SEQ ID NO: 1498829 - RNA, 19 nt, Homo sapiens
  misc_RNA (1)...(19): siRNA sense strand
gaugagaaaucuuccuuca

SEQ ID NO: 1498830 - RNA, 19 nt, Homo sapiens
  misc_RNA (1)...(19): siRNA sense strand
ugagaaaucuuccuucauc

SEQ ID NO: 1498831 - RNA, 19 nt, Homo sapiens
  misc_RNA (1)...(19): siRNA sense strand
gcacaagguccacaucuca

SEQ ID NO: 1498832 - RNA, 19 nt, Homo sapiens
  misc_RNA (1)...(19): siRNA sense strand
gaacuggacagguuuguac

SEQ ID NO: 1498833 - RNA, 19 nt, Homo sapiens
  misc_RNA (1)...(19): siRNA sense strand
agaaugagaucaacaagcu

SEQ ID NO: 1498834 - RNA, 19 nt, Homo sapiens
  misc_RNA (1)...(19): siRNA sense strand
caacagcguuugcuaugac

SEQ ID NO: 1498835 - RNA, 19 nt, Homo sapiens
  misc_RNA (1)...(19): siRNA sense strand
gaauacaagcagaaugaga

SEQ ID NO: 1498836 - RNA, 19 nt, Homo sapiens
  misc_RNA (1)...(19): siRNA sense strand
ggugguggcugcagagagu

SEQ ID NO: 1498837 - RNA, 19 nt, Homo sapiens
  misc_RNA (1)...(19): siRNA sense strand
gaguauggcucucggucau

SEQ ID NO: 1498838 - RNA, 19 nt, Homo sapiens
  misc_RNA (1)...(19): siRNA sense strand
gagaaaucuuccuucaucu

SEQ ID NO: 1498839 - RNA, 19 nt, Homo sapiens
  misc_RNA (1)...(19): siRNA sense strand
gggcugggcuggcugaaaa

SEQ ID NO: 1498840 - RNA, 19 nt, Homo sapiens
  misc_RNA (1)...(19): siRNA sense strand
ccucucaccugaauacaag

SEQ ID NO: 1498841 - RNA, 19 nt, Homo sapiens
  misc_RNA (1)...(19): siRNA sense strand
cugaauacaagcagaauga

SEQ ID NO: 1498842 - RNA, 19 nt, Homo sapiens
  misc_RNA (1)...(19): siRNA sense strand
ggcgugaaccggcauucua

SEQ ID NO: 1498843 - RNA, 19 nt, Homo sapiens
  misc_RNA (1)...(19): siRNA sense strand
gaggccgucuucauguaug

SEQ ID NO: 1498844 - RNA, 19 nt, Homo sapiens
  misc_RNA (1)...(19): siRNA sense strand
cugcagcucauccuaguuu

SEQ ID NO: 1498845 - RNA, 19 nt, Homo sapiens
  misc_RNA (1)...(19): siRNA sense strand
acacugugguggaccuaug

SEQ ID NO: 1498846 - RNA, 19 nt, Homo sapiens
  misc_RNA (1)...(19): siRNA sense strand
gcaucugcaucauccucaa

SEQ ID NO: 1498847 - RNA, 19 nt, Homo sapiens
  misc_RNA (1)...(19): siRNA sense strand
uugaggccgucuucaugua

SEQ ID NO: 1498848 - RNA, 19 nt, Homo sapiens
  misc_RNA (1)...(19): siRNA sense strand
ucggucaucuucaucuuca

SEQ ID NO: 1498849 - RNA, 19 nt, Homo sapiens
  misc_RNA (1)...(19): siRNA sense strand
cguuugcuaugaccaauuc

SEQ ID NO: 1498850 - RNA, 19 nt, Homo sapiens
  misc_RNA (1)...(19): siRNA sense strand
ggucaucuucaucuucaga

SEQ ID NO: 1498851 - RNA, 19 nt, Homo sapiens
  misc_RNA (1)...(19): siRNA sense strand
caccgccucucaccugaau

SEQ ID NO: 1498852 - RNA, 19 nt, Homo sapiens
  misc_RNA (1)...(19): siRNA sense strand
cgucuucaccgucuucaug

SEQ ID NO: 1498853 - RNA, 19 nt, Homo sapiens
  misc_RNA (1)...(19): siRNA sense strand
cagcaacacauagagaaga

SEQ ID NO: 1498854 - RNA, 19 nt, Homo sapiens
  misc_RNA (1)...(19): siRNA sense strand
agcaacacauagagaagaa

SEQ ID NO: 1498855 - RNA, 19 nt, Homo sapiens
  misc_RNA (1)...(19): siRNA sense strand
ggucaagugcgacgucuac

SEQ ID NO: 1498856 - RNA, 19 nt, Homo sapiens
  misc_RNA (1)...(19): siRNA sense strand
ggcacaagguccacaucuc

SEQ ID NO: 1498857 - RNA, 19 nt, Homo sapiens
  misc_RNA (1)...(19): siRNA sense strand
aaucuuccuucaucugcaa

SEQ ID NO: 1498858 - RNA, 19 nt, Homo sapiens
  misc_RNA (1)...(19): siRNA sense strand
gcagaaugagaucaacaag

SEQ ID NO: 1498859 - RNA, 19 nt, Homo sapiens
  misc_RNA (1)...(19): siRNA sense strand
aauacaagcagaaugagau

SEQ ID NO: 1498860 - RNA, 19 nt, Homo sapiens
  misc_RNA (1)...(19): siRNA sense strand
guauggcucucggucaucu

SEQ ID NO: 1498861 - RNA, 19 nt, Homo sapiens
  misc_RNA (1)...(19): siRNA sense strand
gcaacacauagagaagaaa

SEQ ID NO: 1498862 - RNA, 19 nt, Homo sapiens
  misc_RNA (1)...(19): siRNA sense strand
acaagcagaaugagaucaa

SEQ ID NO: 1498863 - RNA, 19 nt, Homo sapiens
  misc_RNA (1)...(19): siRNA sense strand
gugaugagaaaucuuccuu

SEQ ID NO: 1498864 - RNA, 19 nt, Homo sapiens
  misc_RNA (1)...(19): siRNA sense strand
guuugaggccgucuucaug

SEQ ID NO: 1498865 - RNA, 19 nt, Homo sapiens
  misc_RNA (1)...(19): siRNA sense strand
caacacauagagaagaaaa

SEQ ID NO: 1498866 - RNA, 19 nt, Homo sapiens
  misc_RNA (1)...(19): siRNA sense strand
cgucuucauguaugucuuu

SEQ ID NO: 1498867 - RNA, 19 nt, Homo sapiens
  misc_RNA (1)...(19): siRNA sense strand
uguuccggcuguuguuuga

SEQ ID NO: 1498868 - RNA, 19 nt, Homo sapiens
  misc_RNA (1)...(19): siRNA sense strand
gaacggaaaucugcaguau

SEQ ID NO: 1498869 - RNA, 19 nt, Homo sapiens
  misc_RNA (1)...(19): siRNA sense strand
gaaaggagguguggcauca

SEQ ID NO: 1498870 - RNA, 19 nt, Homo sapiens
  misc_RNA (1)...(19): siRNA sense strand
aaacagaucuggagaaucg

SEQ ID NO: 1498871 - RNA, 19 nt, Homo sapiens
  misc_RNA (1)...(19): siRNA sense strand
ggaagcccaugaucaucua

SEQ ID NO: 1498872 - RNA, 19 nt, Homo sapiens
  misc_RNA (1)...(19): siRNA sense strand
acggaaaucugcaguauga

SEQ ID NO: 1498873 - RNA, 19 nt, Homo sapiens
  misc_RNA (1)...(19): siRNA sense strand
ugggagagcuucaacaaug

SEQ ID NO: 1498874 - RNA, 19 nt, Homo sapiens
  misc_RNA (1)...(19): siRNA sense strand
caacagcaaucgguaugaa

SEQ ID NO: 1498875 - RNA, 19 nt, Homo sapiens
  misc_RNA (1)...(19): siRNA sense strand
gaaaaucuuugucuggaaa

SEQ ID NO: 1498876 - RNA, 19 nt, Homo sapiens
  misc_RNA (1)...(19): siRNA sense strand
gaacuccaacgaugccuuu

SEQ ID NO: 1498877 - RNA, 19 nt, Homo sapiens
  misc_RNA (1)...(19): siRNA sense strand
ggcgacagcuacaucauuc

SEQ ID NO: 1498878 - RNA, 19 nt, Homo sapiens
  misc_RNA (1)...(19): siRNA sense strand
ggaaaggcaagcaggcaaa

SEQ ID NO: 1498879 - RNA, 19 nt, Homo sapiens
  misc_RNA (1)...(19): siRNA sense strand
gcacaggccagaaacagau

SEQ ID NO: 1498880 - RNA, 19 nt, Homo sapiens
  misc_RNA (1)...(19): siRNA sense strand
agaaacagaucuggagaau

SEQ ID NO: 1498881 - RNA, 19 nt, Homo sapiens
  misc_RNA (1)...(19): siRNA sense strand
caaccuuuauggagacuuc

SEQ ID NO: 1498882 - RNA, 19 nt, Homo sapiens
  misc_RNA (1)...(19): siRNA sense strand
caacaagauuggacguuuu

SEQ ID NO: 1498883 - RNA, 19 nt, Homo sapiens
  misc_RNA (1)...(19): siRNA sense strand
gaaggcagcgagccagaug

SEQ ID NO: 1498884 - RNA, 19 nt, Homo sapiens
  misc_RNA (1)...(19): siRNA sense strand
aaucgaagguuccaacaag

SEQ ID NO: 1498885 - RNA, 19 nt, Homo sapiens
  misc_RNA (1)...(19): siRNA sense strand
ggaacggaaaucugcagua

SEQ ID NO: 1498886 - RNA, 19 nt, Homo sapiens
  misc_RNA (1)...(19): siRNA sense strand
caaaacagccucugacuuc

SEQ ID NO: 1498887 - RNA, 19 nt, Homo sapiens
  misc_RNA (1)...(19): siRNA sense strand
ccacauauggacaguucua

SEQ ID NO: 1498888 - RNA, 19 nt, Homo sapiens
  misc_RNA (1)...(19): siRNA sense strand
ucaagucuggccugaagua

SEQ ID NO: 1498889 - RNA, 19 nt, Homo sapiens
  misc_RNA (1)...(19): siRNA sense strand
caacgaugccuuuguucug

SEQ ID NO: 1498890 - RNA, 19 nt, Homo sapiens
  misc_RNA (1)...(19): siRNA sense strand
ccgugcagcuggaugacua

SEQ ID NO: 1498891 - RNA, 19 nt, Homo sapiens
  misc_RNA (1)...(19): siRNA sense strand
uggccaagcucuacaaggu

SEQ ID NO: 1498892 - RNA, 19 nt, Homo sapiens
  misc_RNA (1)...(19): siRNA sense strand
gggagagcuucaacaaugg

SEQ ID NO: 1498893 - RNA, 19 nt, Homo sapiens
  misc_RNA (1)...(19): siRNA sense strand
ucuacaaggucuccaaugg

SEQ ID NO: 1498894 - RNA, 19 nt, Homo sapiens
  misc_RNA (1)...(19): siRNA sense strand
ugacugcucagcuggauga

SEQ ID NO: 1498895 - RNA, 19 nt, Homo sapiens
  misc_RNA (1)...(19): siRNA sense strand
gaaucgaagguuccaacaa

SEQ ID NO: 1498896 - RNA, 19 nt, Homo sapiens
  misc_RNA (1)...(19): siRNA sense strand
agucuggccugaaguacaa

SEQ ID NO: 1498897 - RNA, 19 nt, Homo sapiens
  misc_RNA (1)...(19): siRNA sense strand
ccucguggcugaugagaac

SEQ ID NO: 1498898 - RNA, 19 nt, Homo sapiens
  misc_RNA (1)...(19): siRNA sense strand
ggaaaaucuuugucuggaa

SEQ ID NO: 1498899 - RNA, 19 nt, Homo sapiens
  misc_RNA (1)...(19): siRNA sense strand
ggccugaaguacaagaaag

SEQ ID NO: 1498900 - RNA, 19 nt, Homo sapiens
  misc_RNA (1)...(19): siRNA sense strand
gcuuugagccucccuccuu

SEQ ID NO: 1498901 - RNA, 19 nt, Homo sapiens
  misc_RNA (1)...(19): siRNA sense strand
cuccaacgaugccuuuguu

SEQ ID NO: 1498902 - RNA, 19 nt, Homo sapiens
  misc_RNA (1)...(19): siRNA sense strand
gaugaggagcugggaggua

SEQ ID NO: 1498903 - RNA, 19 nt, Homo sapiens
  misc_RNA (1)...(19): siRNA sense strand
acaucauucuguacaacua

SEQ ID NO: 1498904 - RNA, 19 nt, Homo sapiens
  misc_RNA (1)...(19): siRNA sense strand
ccucugacuucaucaccaa

SEQ ID NO: 1498905 - RNA, 19 nt, Homo sapiens
  misc_RNA (1)...(19): siRNA sense strand
caaacacggaggagaggaa

SEQ ID NO: 1498906 - RNA, 19 nt, Homo sapiens
  misc_RNA (1)...(19): siRNA sense strand
acuacuggcugggcaauga

SEQ ID NO: 1498907 - RNA, 19 nt, Homo sapiens
  misc_RNA (1)...(19): siRNA sense strand
guugagguauugccuaagg

SEQ ID NO: 1498908 - RNA, 19 nt, Homo sapiens
  misc_RNA (1)...(19): siRNA sense strand
gagccuggccugcagaucu

SEQ ID NO: 1498909 - RNA, 19 nt, Homo sapiens
  misc_RNA (1)...(19): siRNA sense strand
aacgaugccuuuguucuga

SEQ ID NO: 1498910 - RNA, 19 nt, Homo sapiens
  misc_RNA (1)...(19): siRNA sense strand
gaucuggcguguggagaag

SEQ ID NO: 1498911 - RNA, 19 nt, Homo sapiens
  misc_RNA (1)...(19): siRNA sense strand
agacagugcagcugaggaa

SEQ ID NO: 1498912 - RNA, 19 nt, Homo sapiens
  misc_RNA (1)...(19): siRNA sense strand
uggcugggaugaugauuac

SEQ ID NO: 1498913 - RNA, 19 nt, Homo sapiens
  misc_RNA (1)...(19): siRNA sense strand
cgaugccuuuguucugaaa

SEQ ID NO: 1498914 - RNA, 19 nt, Homo sapiens
  misc_RNA (1)...(19): siRNA sense strand
cuguugagguauugccuaa

SEQ ID NO: 1498915 - RNA, 19 nt, Homo sapiens
  misc_RNA (1)...(19): siRNA sense strand
gggaagcccaugaucaucu

SEQ ID NO: 1498916 - RNA, 19 nt, Homo sapiens
  misc_RNA (1)...(19): siRNA sense strand
guacaacuaccgccauggu

SEQ ID NO: 1498917 - RNA, 19 nt, Homo sapiens
  misc_RNA (1)...(19): siRNA sense strand
ggaggcgacagcuacauca

SEQ ID NO: 1498918 - RNA, 19 nt, Homo sapiens
  misc_RNA (1)...(19): siRNA sense strand
ugccacauauggacaguuc

SEQ ID NO: 1498919 - RNA, 19 nt, Homo sapiens
  misc_RNA (1)...(19): siRNA sense strand
ggaccugggcaacaacauc

SEQ ID NO: 1498920 - RNA, 19 nt, Homo sapiens
  misc_RNA (1)...(19): siRNA sense strand
ugaaggacaagaagaugga

SEQ ID NO: 1498921 - RNA, 19 nt, Homo sapiens
  misc_RNA (1)...(19): siRNA sense strand
gcaguaugaccuccacuac

SEQ ID NO: 1498922 - RNA, 19 nt, Homo sapiens
  misc_RNA (1)...(19): siRNA sense strand
ccaagggcauccgggacaa

SEQ ID NO: 1498923 - RNA, 19 nt, Homo sapiens
  misc_RNA (1)...(19): siRNA sense strand
ccagagccgugugguccaa

SEQ ID NO: 1498924 - RNA, 19 nt, Homo sapiens
  misc_RNA (1)...(19): siRNA sense strand
ggacaccgccaaggaggau

SEQ ID NO: 1498925 - RNA, 19 nt, Homo sapiens
  misc_RNA (1)...(19): siRNA sense strand
gguguggcaucaggauuca

SEQ ID NO: 1498926 - RNA, 19 nt, Homo sapiens
  misc_RNA (1)...(19): siRNA sense strand
ccacggcaaagaugggaaa

SEQ ID NO: 1498927 - RNA, 19 nt, Homo sapiens
  misc_RNA (1)...(19): siRNA sense strand
caauggcgacugcuucauc

SEQ ID NO: 1498928 - RNA, 19 nt, Homo sapiens
  misc_RNA (1)...(19): siRNA sense strand
cagcaaucgguaugaaaga

SEQ ID NO: 1498929 - RNA, 19 nt, Homo sapiens
  misc_RNA (1)...(19): siRNA sense strand
cgagucggccaccuuccua

SEQ ID NO: 1498930 - RNA, 19 nt, Homo sapiens
  misc_RNA (1)...(19): siRNA sense strand
cuuugagccucccuccuuu

SEQ ID NO: 1498931 - RNA, 19 nt, Homo sapiens
  misc_RNA (1)...(19): siRNA sense strand
ccauccuccucgccucuuu

SEQ ID NO: 1498932 - RNA, 19 nt, Homo sapiens
  misc_RNA (1)...(19): siRNA sense strand
gaaacagaucuggagaauc

SEQ ID NO: 1498933 - RNA, 19 nt, Homo sapiens
  misc_RNA (1)...(19): siRNA sense strand
cauccuggaccacggcaaa

SEQ ID NO: 1498934 - RNA, 19 nt, Homo sapiens
  misc_RNA (1)...(19): siRNA sense strand
ugucuggguuggaaaggau

SEQ ID NO: 1498935 - RNA, 19 nt, Homo sapiens
  misc_RNA (1)...(19): siRNA sense strand
cuggugcacugaacuccaa

SEQ ID NO: 1498936 - RNA, 19 nt, Homo sapiens
  misc_RNA (1)...(19): siRNA sense strand
cgacagcuacaucauucug

SEQ ID NO: 1498937 - RNA, 19 nt, Homo sapiens
  misc_RNA (1)...(19): siRNA sense strand
ggacccagaccagacagau

SEQ ID NO: 1498938 - RNA, 19 nt, Homo sapiens
  misc_RNA (1)...(19): siRNA sense strand
ggagguguggcaucaggau

SEQ ID NO: 1498939 - RNA, 19 nt, Homo sapiens
  misc_RNA (1)...(19): siRNA sense strand
gcugggaugaugauuacug

SEQ ID NO: 1498940 - RNA, 19 nt, Homo sapiens
  misc_RNA (1)...(19): siRNA sense strand
gaaaagacagaagccuuga

SEQ ID NO: 1498941 - RNA, 19 nt, Homo sapiens
  misc_RNA (1)...(19): siRNA sense strand
caacagcauggugguggaa

SEQ ID NO: 1498942 - RNA, 19 nt, Homo sapiens
  misc_RNA (1)...(19): siRNA sense strand
cagauggccugggcuuguc

SEQ ID NO: 1498943 - RNA, 19 nt, Homo sapiens
  misc_RNA (1)...(19): siRNA sense strand
cggcaaagaugggaaaauc

SEQ ID NO: 1498944 - RNA, 19 nt, Homo sapiens
  misc_RNA (1)...(19): siRNA sense strand
gaacggaaaucugcaguau

SEQ ID NO: 1498945 - RNA, 19 nt, Homo sapiens
  misc_RNA (1)...(19): siRNA sense strand
gaaaggagguguggcauca

SEQ ID NO: 1498946 - RNA, 19 nt, Homo sapiens
  misc_RNA (1)...(19): siRNA sense strand
aaacagaucuggagaaucg

SEQ ID NO: 1498947 - RNA, 19 nt, Homo sapiens
  misc_RNA (1)...(19): siRNA sense strand
ggaagcccaugaucaucua

SEQ ID NO: 1498948 - RNA, 19 nt, Homo sapiens
  misc_RNA (1)...(19): siRNA sense strand
acggaaaucugcaguauga

SEQ ID NO: 1498949 - RNA, 19 nt, Homo sapiens
  misc_RNA (1)...(19): siRNA sense strand
ugggagagcuucaacaaug

SEQ ID NO: 1498950 - RNA, 19 nt, Homo sapiens
  misc_RNA (1)...(19): siRNA sense strand
caacagcaaucgguaugaa

SEQ ID NO: 1498951 - RNA, 19 nt, Homo sapiens
  misc_RNA (1)...(19): siRNA sense strand
gaaaaucuuugucuggaaa

SEQ ID NO: 1498952 - RNA, 19 nt, Homo sapiens
  misc_RNA (1)...(19): siRNA sense strand
gaacuccaacgaugccuuu

SEQ ID NO: 1498953 - RNA, 19 nt, Homo sapiens
  misc_RNA (1)...(19): siRNA sense strand
ggcgacagcuacaucauuc

SEQ ID NO: 1498954 - RNA, 19 nt, Homo sapiens
  misc_RNA (1)...(19): siRNA sense strand
ggaaaggcaagcaggcaaa

SEQ ID NO: 1498955 - RNA, 19 nt, Homo sapiens
  misc_RNA (1)...(19): siRNA sense strand
gcacaggccagaaacagau

SEQ ID NO: 1498956 - RNA, 19 nt, Homo sapiens
  misc_RNA (1)...(19): siRNA sense strand
agaaacagaucuggagaau

SEQ ID NO: 1498957 - RNA, 19 nt, Homo sapiens
  misc_RNA (1)...(19): siRNA sense strand
caaccuuuauggagacuuc

SEQ ID NO: 1498958 - RNA, 19 nt, Homo sapiens
  misc_RNA (1)...(19): siRNA sense strand
caacaagauuggacguuuu

SEQ ID NO: 1498959 - RNA, 19 nt, Homo sapiens
  misc_RNA (1)...(19): siRNA sense strand
gaaggcagcgagccagaug

SEQ ID NO: 1498960 - RNA, 19 nt, Homo sapiens
  misc_RNA (1)...(19): siRNA sense strand
aaucgaagguuccaacaag

SEQ ID NO: 1498961 - RNA, 19 nt, Homo sapiens
  misc_RNA (1)...(19): siRNA sense strand
ggaacggaaaucugcagua

SEQ ID NO: 1498962 - RNA, 19 nt, Homo sapiens
  misc_RNA (1)...(19): siRNA sense strand
caaaacagccucugacuuc

SEQ ID NO: 1498963 - RNA, 19 nt, Homo sapiens
  misc_RNA (1)...(19): siRNA sense strand
ccacauauggacaguucua

SEQ ID NO: 1498964 - RNA, 19 nt, Homo sapiens
  misc_RNA (1)...(19): siRNA sense strand
ucaagucuggccugaagua

SEQ ID NO: 1498965 - RNA, 19 nt, Homo sapiens
  misc_RNA (1)...(19): siRNA sense strand
caacgaugccuuuguucug

SEQ ID NO: 1498966 - RNA, 19 nt, Homo sapiens
  misc_RNA (1)...(19): siRNA sense strand
ccgugcagcuggaugacua

SEQ ID NO: 1498967 - RNA, 19 nt, Homo sapiens
  misc_RNA (1)...(19): siRNA sense strand
uggccaagcucuacaaggu

SEQ ID NO: 1498968 - RNA, 19 nt, Homo sapiens
  misc_RNA (1)...(19): siRNA sense strand
gggagagcuucaacaaugg

SEQ ID NO: 1498969 - RNA, 19 nt, Homo sapiens
  misc_RNA (1)...(19): siRNA sense strand
ucuacaaggucuccaaugg

SEQ ID NO: 1498970 - RNA, 19 nt, Homo sapiens
  misc_RNA (1)...(19): siRNA sense strand
ugacugcucagcuggauga

SEQ ID NO: 1498971 - RNA, 19 nt, Homo sapiens
  misc_RNA (1)...(19): siRNA sense strand
gaaucgaagguuccaacaa

SEQ ID NO: 1498972 - RNA, 19 nt, Homo sapiens
  misc_RNA (1)...(19): siRNA sense strand
agucuggccugaaguacaa

SEQ ID NO: 1498973 - RNA, 19 nt, Homo sapiens
  misc_RNA (1)...(19): siRNA sense strand
ccucguggcugaugagaac

SEQ ID NO: 1498974 - RNA, 19 nt, Homo sapiens
  misc_RNA (1)...(19): siRNA sense strand
ggaaaaucuuugucuggaa

SEQ ID NO: 1498975 - RNA, 19 nt, Homo sapiens
  misc_RNA (1)...(19): siRNA sense strand
ggccugaaguacaagaaag

SEQ ID NO: 1498976 - RNA, 19 nt, Homo sapiens
  misc_RNA (1)...(19): siRNA sense strand
gcuuugagccucccuccuu

SEQ ID NO: 1498977 - RNA, 19 nt, Homo sapiens
  misc_RNA (1)...(19): siRNA sense strand
cuccaacgaugccuuuguu

SEQ ID NO: 1498978 - RNA, 19 nt, Homo sapiens
  misc_RNA (1)...(19): siRNA sense strand
gaugaggagcugggaggua

SEQ ID NO: 1498979 - RNA, 19 nt, Homo sapiens
  misc_RNA (1)...(19): siRNA sense strand
acaucauucuguacaacua

SEQ ID NO: 1498980 - RNA, 19 nt, Homo sapiens
  misc_RNA (1)...(19): siRNA sense strand
ccucugacuucaucaccaa

SEQ ID NO: 1498981 - RNA, 19 nt, Homo sapiens
  misc_RNA (1)...(19): siRNA sense strand
caaacacggaggagaggaa

SEQ ID NO: 1498982 - RNA, 19 nt, Homo sapiens
  misc_RNA (1)...(19): siRNA sense strand
acuacuggcugggcaauga

SEQ ID NO: 1498983 - RNA, 19 nt, Homo sapiens
  misc_RNA (1)...(19): siRNA sense strand
guugagguauugccuaagg

SEQ ID NO: 1498984 - RNA, 19 nt, Homo sapiens
  misc_RNA (1)...(19): siRNA sense strand
gaucuggcguguggagaag

SEQ ID NO: 1498985 - RNA, 19 nt, Homo sapiens
  misc_RNA (1)...(19): siRNA sense strand
aacgaugccuuuguucuga

SEQ ID NO: 1498986 - RNA, 19 nt, Homo sapiens
  misc_RNA (1)...(19): siRNA sense strand
gagccuggccugcagaucu

SEQ ID NO: 1498987 - RNA, 19 nt, Homo sapiens
  misc_RNA (1)...(19): siRNA sense strand
ugccacauauggacaguuc

SEQ ID NO: 1498988 - RNA, 19 nt, Homo sapiens
  misc_RNA (1)...(19): siRNA sense strand
uggcugggaugaugauuac

SEQ ID NO: 1498989 - RNA, 19 nt, Homo sapiens
  misc_RNA (1)...(19): siRNA sense strand
cgaugccuuuguucugaaa

SEQ ID NO: 1498990 - RNA, 19 nt, Homo sapiens
  misc_RNA (1)...(19): siRNA sense strand
cuguugagguauugccuaa

SEQ ID NO: 1498991 - RNA, 19 nt, Homo sapiens
  misc_RNA (1)...(19): siRNA sense strand
gggaagcccaugaucaucu

SEQ ID NO: 1498992 - RNA, 19 nt, Homo sapiens
  misc_RNA (1)...(19): siRNA sense strand
guacaacuaccgccauggu

SEQ ID NO: 1498993 - RNA, 19 nt, Homo sapiens
  misc_RNA (1)...(19): siRNA sense strand
agacagugcagcugaggaa

SEQ ID NO: 1498994 - RNA, 19 nt, Homo sapiens
  misc_RNA (1)...(19): siRNA sense strand
ggaggcgacagcuacauca

SEQ ID NO: 1498995 - RNA, 19 nt, Homo sapiens
  misc_RNA (1)...(19): siRNA sense strand
ggaccugggcaacaacauc

SEQ ID NO: 1498996 - RNA, 19 nt, Homo sapiens
  misc_RNA (1)...(19): siRNA sense strand
ugaaggacaagaagaugga

SEQ ID NO: 1498997 - RNA, 19 nt, Homo sapiens
  misc_RNA (1)...(19): siRNA sense strand
gcaguaugaccuccacuac

SEQ ID NO: 1498998 - RNA, 19 nt, Homo sapiens
  misc_RNA (1)...(19): siRNA sense strand
ccaagggcauccgggacaa

SEQ ID NO: 1498999 - RNA, 19 nt, Homo sapiens
  misc_RNA (1)...(19): siRNA sense strand
ccagagccgugugguccaa

SEQ ID NO: 1499000 - RNA, 19 nt, Homo sapiens
  misc_RNA (1)...(19): siRNA sense strand
ggacaccgccaaggaggau

SEQ ID NO: 1499001 - RNA, 19 nt, Homo sapiens
  misc_RNA (1)...(19): siRNA sense strand
gguguggcaucaggauuca

SEQ ID NO: 1499002 - RNA, 19 nt, Homo sapiens
  misc_RNA (1)...(19): siRNA sense strand
ccacggcaaagaugggaaa

SEQ ID NO: 1499003 - RNA, 19 nt, Homo sapiens
  misc_RNA (1)...(19): siRNA sense strand
caauggcgacugcuucauc

SEQ ID NO: 1499004 - RNA, 19 nt, Homo sapiens
  misc_RNA (1)...(19): siRNA sense strand
cagcaaucgguaugaaaga

SEQ ID NO: 1499005 - RNA, 19 nt, Homo sapiens
  misc_RNA (1)...(19): siRNA sense strand
cgagucggccaccuuccua

SEQ ID NO: 1499006 - RNA, 19 nt, Homo sapiens
  misc_RNA (1)...(19): siRNA sense strand
cuuugagccucccuccuuu

SEQ ID NO: 1499007 - RNA, 19 nt, Homo sapiens
  misc_RNA (1)...(19): siRNA sense strand
ccauccuccucgccucuuu

SEQ ID NO: 1499008 - RNA, 19 nt, Homo sapiens
  misc_RNA (1)...(19): siRNA sense strand
gaaacagaucuggagaauc

SEQ ID NO: 1499009 - RNA, 19 nt, Homo sapiens
  misc_RNA (1)...(19): siRNA sense strand
cauccuggaccacggcaaa

SEQ ID NO: 1499010 - RNA, 19 nt, Homo sapiens
  misc_RNA (1)...(19): siRNA sense strand
ugucuggguuggaaaggau

SEQ ID NO: 1499011 - RNA, 19 nt, Homo sapiens
  misc_RNA (1)...(19): siRNA sense strand
cuggugcacugaacuccaa

SEQ ID NO: 1499012 - RNA, 19 nt, Homo sapiens
  misc_RNA (1)...(19): siRNA sense strand
cgacagcuacaucauucug

SEQ ID NO: 1499013 - RNA, 19 nt, Homo sapiens
  misc_RNA (1)...(19): siRNA sense strand
ggacccagaccagacagau

SEQ ID NO: 1499014 - RNA, 19 nt, Homo sapiens
  misc_RNA (1)...(19): siRNA sense strand
ggagguguggcaucaggau

SEQ ID NO: 1499015 - RNA, 19 nt, Homo sapiens
  misc_RNA (1)...(19): siRNA sense strand
gcugggaugaugauuacug

SEQ ID NO: 1499016 - RNA, 19 nt, Homo sapiens
  misc_RNA (1)...(19): siRNA sense strand
gaaaagacagaagccuuga

SEQ ID NO: 1499017 - RNA, 19 nt, Homo sapiens
  misc_RNA (1)...(19): siRNA sense strand
cagauggccugggcuuguc

SEQ ID NO: 1499018 - RNA, 19 nt, Homo sapiens
  misc_RNA (1)...(19): siRNA sense strand
cggcaaagaugggaaaauc

SEQ ID NO: 1499019 - RNA, 19 nt, Homo sapiens
  misc_RNA (1)...(19): siRNA sense strand
gcaaggagacggccaagaa

SEQ ID NO: 1499020 - RNA, 19 nt, Homo sapiens
  misc_RNA (1)...(19): siRNA sense strand
gcauggaggugaauuucuu

SEQ ID NO: 1499021 - RNA, 19 nt, Homo sapiens
  misc_RNA (1)...(19): siRNA sense strand
gaccaaaccaggagacauu

SEQ ID NO: 1499022 - RNA, 19 nt, Homo sapiens
  misc_RNA (1)...(19): siRNA sense strand
caacaacgcaggccacaau

SEQ ID NO: 1499023 - RNA, 19 nt, Homo sapiens
  misc_RNA (1)...(19): siRNA sense strand
caacgcaggccacaaugaa

SEQ ID NO: 1499024 - RNA, 19 nt, Homo sapiens
  misc_RNA (1)...(19): siRNA sense strand
gcacuugcaugggcaguuc

SEQ ID NO: 1499025 - RNA, 19 nt, Homo sapiens
  misc_RNA (1)...(19): siRNA sense strand
caagacagagucagugaga

SEQ ID NO: 1499026 - RNA, 19 nt, Homo sapiens
  misc_RNA (1)...(19): siRNA sense strand
gcagauggaccugaccaaa

SEQ ID NO: 1499027 - RNA, 19 nt, Homo sapiens
  misc_RNA (1)...(19): siRNA sense strand
caaggagacggccaagaaa

SEQ ID NO: 1499028 - RNA, 19 nt, Homo sapiens
  misc_RNA (1)...(19): siRNA sense strand
agacagagucagugagaaa

SEQ ID NO: 1499029 - RNA, 19 nt, Homo sapiens
  misc_RNA (1)...(19): siRNA sense strand
cugcaggccuucuucauca

SEQ ID NO: 1499030 - RNA, 19 nt, Homo sapiens
  misc_RNA (1)...(19): siRNA sense strand
ucauguacuucauccacua

SEQ ID NO: 1499031 - RNA, 19 nt, Homo sapiens
  misc_RNA (1)...(19): siRNA sense strand
gggaaaagcgcaagcaauu

SEQ ID NO: 1499032 - RNA, 19 nt, Homo sapiens
  misc_RNA (1)...(19): siRNA sense strand
uggccaaccugccucaaga

SEQ ID NO: 1499033 - RNA, 19 nt, Homo sapiens
  misc_RNA (1)...(19): siRNA sense strand
guagcugcauggaggugaa

SEQ ID NO: 1499034 - RNA, 19 nt, Homo sapiens
  misc_RNA (1)...(19): siRNA sense strand
ggacuacaucgagcacuug

SEQ ID NO: 1499035 - RNA, 19 nt, Homo sapiens
  misc_RNA (1)...(19): siRNA sense strand
ggagacggccaagaaacug

SEQ ID NO: 1499036 - RNA, 19 nt, Homo sapiens
  misc_RNA (1)...(19): siRNA sense strand
guacuucauccacuacuac

SEQ ID NO: 1499037 - RNA, 19 nt, Homo sapiens
  misc_RNA (1)...(19): siRNA sense strand
uguacuucauccacuacua

SEQ ID NO: 1499038 - RNA, 19 nt, Homo sapiens
  misc_RNA (1)...(19): siRNA sense strand
ccaccguauuggaguugaa

SEQ ID NO: 1499039 - RNA, 19 nt, Homo sapiens
  misc_RNA (1)...(19): siRNA sense strand
aggccacaaugaaguaguu

SEQ ID NO: 1499040 - RNA, 19 nt, Homo sapiens
  misc_RNA (1)...(19): siRNA sense strand
gcugcauggaggugaauuu

SEQ ID NO: 1499041 - RNA, 19 nt, Homo sapiens
  misc_RNA (1)...(19): siRNA sense strand
ggucaaggucagcaucauc

SEQ ID NO: 1499042 - RNA, 19 nt, Homo sapiens
  misc_RNA (1)...(19): siRNA sense strand
cauggaggugaauuucuuu

SEQ ID NO: 1499043 - RNA, 19 nt, Homo sapiens
  misc_RNA (1)...(19): siRNA sense strand
gaacagaucagugccaaua

SEQ ID NO: 1499044 - RNA, 19 nt, Homo sapiens
  misc_RNA (1)...(19): siRNA sense strand
ucaagaaucuggugguuaa

SEQ ID NO: 1499045 - RNA, 19 nt, Homo sapiens
  misc_RNA (1)...(19): siRNA sense strand
gcucuaaacuugggacuaa

SEQ ID NO: 1499046 - RNA, 19 nt, Homo sapiens
  misc_RNA (1)...(19): siRNA sense strand
gggcggaucuuugccaaua

SEQ ID NO: 1499047 - RNA, 19 nt, Homo sapiens
  misc_RNA (1)...(19): siRNA sense strand
gcaggaagcaguuugauga

SEQ ID NO: 1499048 - RNA, 19 nt, Homo sapiens
  misc_RNA (1)...(19): siRNA sense strand
caaagccauugcugucuua

SEQ ID NO: 1499049 - RNA, 19 nt, Homo sapiens
  misc_RNA (1)...(19): siRNA sense strand
ggagugacuuguugaguga

SEQ ID NO: 1499050 - RNA, 19 nt, Homo sapiens
  misc_RNA (1)...(19): siRNA sense strand
guagugagccucucuggua

SEQ ID NO: 1499051 - RNA, 19 nt, Homo sapiens
  misc_RNA (1)...(19): siRNA sense strand
acacagcacucaauacuau

SEQ ID NO: 1499052 - RNA, 19 nt, Homo sapiens
  misc_RNA (1)...(19): siRNA sense strand
cagguaagaucacagauga

SEQ ID NO: 1499053 - RNA, 19 nt, Homo sapiens
  misc_RNA (1)...(19): siRNA sense strand
gcuguucgcuccacuguga

SEQ ID NO: 1499054 - RNA, 19 nt, Homo sapiens
  misc_RNA (1)...(19): siRNA sense strand
ccagaggacauuuguguua

SEQ ID NO: 1499055 - RNA, 19 nt, Homo sapiens
  misc_RNA (1)...(19): siRNA sense strand
gaggagcccuucaccauuc

SEQ ID NO: 1499056 - RNA, 19 nt, Homo sapiens
  misc_RNA (1)...(19): siRNA sense strand
gaagagcuuugaacagauc

SEQ ID NO: 1499057 - RNA, 19 nt, Homo sapiens
  misc_RNA (1)...(19): siRNA sense strand
acagaucagugccaauaua

SEQ ID NO: 1499058 - RNA, 19 nt, Homo sapiens
  misc_RNA (1)...(19): siRNA sense strand
cagaagacaucaagaaucu

SEQ ID NO: 1499059 - RNA, 19 nt, Homo sapiens
  misc_RNA (1)...(19): siRNA sense strand
gaacagugguggcugaaac

SEQ ID NO: 1499060 - RNA, 19 nt, Homo sapiens
  misc_RNA (1)...(19): siRNA sense strand
aagaagagcuuugaacaga

SEQ ID NO: 1499061 - RNA, 19 nt, Homo sapiens
  misc_RNA (1)...(19): siRNA sense strand
ggacauuuguguuagaagu

SEQ ID NO: 1499062 - RNA, 19 nt, Homo sapiens
  misc_RNA (1)...(19): siRNA sense strand
gaaagcagguaagaucaca

SEQ ID NO: 1499063 - RNA, 19 nt, Homo sapiens
  misc_RNA (1)...(19): siRNA sense strand
ggccggagcuucaugaaca

SEQ ID NO: 1499064 - RNA, 19 nt, Homo sapiens
  misc_RNA (1)...(19): siRNA sense strand
ggauaugacacccggguua

SEQ ID NO: 1499065 - RNA, 19 nt, Homo sapiens
  misc_RNA (1)...(19): siRNA sense strand
gcaccgauaugaccauugg

SEQ ID NO: 1499066 - RNA, 19 nt, Homo sapiens
  misc_RNA (1)...(19): siRNA sense strand
ugaaggaccagacagauuu

SEQ ID NO: 1499067 - RNA, 19 nt, Homo sapiens
  misc_RNA (1)...(19): siRNA sense strand
gaaaaggggcuugguguua

SEQ ID NO: 1499068 - RNA, 19 nt, Homo sapiens
  misc_RNA (1)...(19): siRNA sense strand
gcuucuagcucaugucaga

SEQ ID NO: 1499069 - RNA, 19 nt, Homo sapiens
  misc_RNA (1)...(19): siRNA sense strand
ccagcuaccugaacauugu

SEQ ID NO: 1499070 - RNA, 19 nt, Homo sapiens
  misc_RNA (1)...(19): siRNA sense strand
ggagagcguuucgaugaug

SEQ ID NO: 1499071 - RNA, 19 nt, Homo sapiens
  misc_RNA (1)...(19): siRNA sense strand
gagauugacuuggacacuu

SEQ ID NO: 1499072 - RNA, 19 nt, Homo sapiens
  misc_RNA (1)...(19): siRNA sense strand
gcuacagucuccaacaaug

SEQ ID NO: 1499073 - RNA, 19 nt, Homo sapiens
  misc_RNA (1)...(19): siRNA sense strand
aaaggacucuacccaagaa

SEQ ID NO: 1499074 - RNA, 19 nt, Homo sapiens
  misc_RNA (1)...(19): siRNA sense strand
ccaaggccauggaugagaa

SEQ ID NO: 1499075 - RNA, 19 nt, Homo sapiens
  misc_RNA (1)...(19): siRNA sense strand
ggccauggaugagaagaaa

SEQ ID NO: 1499076 - RNA, 19 nt, Homo sapiens
  misc_RNA (1)...(19): siRNA sense strand
gaacuauaccacugacuuc

SEQ ID NO: 1499077 - RNA, 19 nt, Homo sapiens
  misc_RNA (1)...(19): siRNA sense strand
ccagaaagcagguaagauc

SEQ ID NO: 1499078 - RNA, 19 nt, Homo sapiens
  misc_RNA (1)...(19): siRNA sense strand
ggccgaugcugccuacauu

SEQ ID NO: 1499079 - RNA, 19 nt, Homo sapiens
  misc_RNA (1)...(19): siRNA sense strand
gaaaaccaaucaccucaga

SEQ ID NO: 1499080 - RNA, 19 nt, Homo sapiens
  misc_RNA (1)...(19): siRNA sense strand
gcaauugacaagaauggaa

SEQ ID NO: 1499081 - RNA, 19 nt, Homo sapiens
  misc_RNA (1)...(19): siRNA sense strand
gaggacauuuguguuagaa

SEQ ID NO: 1499082 - RNA, 19 nt, Homo sapiens
  misc_RNA (1)...(19): siRNA sense strand
ggagaugcccaagguauga

SEQ ID NO: 1499083 - RNA, 19 nt, Homo sapiens
  misc_RNA (1)...(19): siRNA sense strand
gaaaacaacugugaaaagg

SEQ ID NO: 1499084 - RNA, 19 nt, Homo sapiens
  misc_RNA (1)...(19): siRNA sense strand
ugaguggagugacuuguug

SEQ ID NO: 1499085 - RNA, 19 nt, Homo sapiens
  misc_RNA (1)...(19): siRNA sense strand
cuauaccacugacuucauu

SEQ ID NO: 1499086 - RNA, 19 nt, Homo sapiens
  misc_RNA (1)...(19): siRNA sense strand
guggauaccuggcccuugu

SEQ ID NO: 1499087 - RNA, 19 nt, Homo sapiens
  misc_RNA (1)...(19): siRNA sense strand
ccaaggcuaugaacuggau

SEQ ID NO: 1499088 - RNA, 19 nt, Homo sapiens
  misc_RNA (1)...(19): siRNA sense strand
gcagguaagaucacagaug

SEQ ID NO: 1499089 - RNA, 19 nt, Homo sapiens
  misc_RNA (1)...(19): siRNA sense strand
cgucggguguuuaucauug

SEQ ID NO: 1499090 - RNA, 19 nt, Homo sapiens
  misc_RNA (1)...(19): siRNA sense strand
cagaucagugccaauauaa

SEQ ID NO: 1499091 - RNA, 19 nt, Homo sapiens
  misc_RNA (1)...(19): siRNA sense strand
ccaaucaccucagaagaca

SEQ ID NO: 1499092 - RNA, 19 nt, Homo sapiens
  misc_RNA (1)...(19): siRNA sense strand
gaucauggaaauuguagau

SEQ ID NO: 1499093 - RNA, 19 nt, Homo sapiens
  misc_RNA (1)...(19): siRNA sense strand
gaacauugugggccugguu

SEQ ID NO: 1499094 - RNA, 19 nt, Homo sapiens
  misc_RNA (1)...(19): siRNA sense strand
gcugacaccuuccguucug

SEQ ID NO: 1499095 - RNA, 19 nt, Homo sapiens
  misc_RNA (1)...(19): siRNA sense strand
gaacuggaugucugggaaa

SEQ ID NO: 1499096 - RNA, 19 nt, Homo sapiens
  misc_RNA (1)...(19): siRNA sense strand
gacuauggguggcuacugu

SEQ ID NO: 1499097 - RNA, 19 nt, Homo sapiens
  misc_RNA (1)...(19): siRNA sense strand
ugaccaaggccauggauga

SEQ ID NO: 1499098 - RNA, 19 nt, Homo sapiens
  misc_RNA (1)...(19): siRNA sense strand
caucagccuuugacagaau

SEQ ID NO: 1499099 - RNA, 19 nt, Homo sapiens
  misc_RNA (1)...(19): siRNA sense strand
caucaagaaucuggugguu

SEQ ID NO: 1499100 - RNA, 19 nt, Homo sapiens
  misc_RNA (1)...(19): siRNA sense strand
ccaagaagagcuuugaaca

SEQ ID NO: 1499101 - RNA, 19 nt, Homo sapiens
  misc_RNA (1)...(19): siRNA sense strand
ugagugaccuccagaaagc

SEQ ID NO: 1499102 - RNA, 19 nt, Homo sapiens
  misc_RNA (1)...(19): siRNA sense strand
gccaucagccuuugacaga

SEQ ID NO: 1499103 - RNA, 19 nt, Homo sapiens
  misc_RNA (1)...(19): siRNA sense strand
uuaagcgucugggauauga

SEQ ID NO: 1499104 - RNA, 19 nt, Homo sapiens
  misc_RNA (1)...(19): siRNA sense strand
caucggaucauggaaauug

SEQ ID NO: 1499105 - RNA, 19 nt, Homo sapiens
  misc_RNA (1)...(19): siRNA sense strand
aaagugcaaugagaacuau

SEQ ID NO: 1499106 - RNA, 19 nt, Homo sapiens
  misc_RNA (1)...(19): siRNA sense strand
gaucagugccaauauaacu

SEQ ID NO: 1499107 - RNA, 19 nt, Homo sapiens
  misc_RNA (1)...(19): siRNA sense strand
uagugagccucucugguaa

SEQ ID NO: 1499108 - RNA, 19 nt, Homo sapiens
  misc_RNA (1)...(19): siRNA sense strand
gaacaucuggugcaaaaga

SEQ ID NO: 1499109 - RNA, 19 nt, Homo sapiens
  misc_RNA (1)...(19): siRNA sense strand
ugggagagcguuucgauga

SEQ ID NO: 1499110 - RNA, 19 nt, Homo sapiens
  misc_RNA (1)...(19): siRNA sense strand
ucaaaauccuagccaagua

SEQ ID NO: 1499111 - RNA, 19 nt, Homo sapiens
  misc_RNA (1)...(19): siRNA sense strand
gggagagcguuucgaugau

SEQ ID NO: 1499112 - RNA, 19 nt, Homo sapiens
  misc_RNA (1)...(19): siRNA sense strand
gacauuuguguuagaagua

SEQ ID NO: 1499113 - RNA, 19 nt, Homo sapiens
  misc_RNA (1)...(19): siRNA sense strand
ucagggccuugucaucauu

SEQ ID NO: 1499114 - RNA, 19 nt, Homo sapiens
  misc_RNA (1)...(19): siRNA sense strand
uggaugagaagaaauuuga

SEQ ID NO: 1499115 - RNA, 19 nt, Homo sapiens
  misc_RNA (1)...(19): siRNA sense strand
ccauggaugagaagaaauu

SEQ ID NO: 1499116 - RNA, 19 nt, Homo sapiens
  misc_RNA (1)...(19): siRNA sense strand
ccucagaagacaucaagaa

SEQ ID NO: 1499117 - RNA, 19 nt, Homo sapiens
  misc_RNA (1)...(19): siRNA sense strand
caauugacaagaauggaaa

SEQ ID NO: 1499118 - RNA, 19 nt, Homo sapiens
  misc_RNA (1)...(19): siRNA sense strand
aaaaggggcuugguguuaa

SEQ ID NO: 1499119 - RNA, 19 nt, Homo sapiens
  misc_RNA (1)...(19): siRNA sense strand
gcguuucgaugaugcuuca

SEQ ID NO: 1499120 - RNA, 19 nt, Homo sapiens
  misc_RNA (1)...(19): siRNA sense strand
guggagaucacaucaagga

SEQ ID NO: 1499121 - RNA, 19 nt, Homo sapiens
  misc_RNA (1)...(19): siRNA sense strand
ucagugccaauauaacuaa

SEQ ID NO: 1499122 - RNA, 19 nt, Homo sapiens
  misc_RNA (1)...(19): siRNA sense strand
gagacaaggacccgugguu

SEQ ID NO: 1499123 - RNA, 19 nt, Homo sapiens
  misc_RNA (1)...(19): siRNA sense strand
gguucgaguugguaucuuc

SEQ ID NO: 1499124 - RNA, 19 nt, Homo sapiens
  misc_RNA (1)...(19): siRNA sense strand
cggggaagcugccgucuaa

SEQ ID NO: 1499125 - RNA, 19 nt, Homo sapiens
  misc_RNA (1)...(19): siRNA sense strand
gacacagcacucaauacua

SEQ ID NO: 1499126 - RNA, 19 nt, Homo sapiens
  misc_RNA (1)...(19): siRNA sense strand
cagaggacauuuguguuag

SEQ ID NO: 1499127 - RNA, 19 nt, Homo sapiens
  misc_RNA (1)...(19): siRNA sense strand
cagaugaggaggcuacgaa

SEQ ID NO: 1499128 - RNA, 19 nt, Homo sapiens
  misc_RNA (1)...(19): siRNA sense strand
cgacucagcgagacaagga

SEQ ID NO: 1499129 - RNA, 19 nt, Homo sapiens
  misc_RNA (1)...(19): siRNA sense strand
gagcucugcaucccauuug

SEQ ID NO: 1499130 - RNA, 19 nt, Homo sapiens
  misc_RNA (1)...(19): siRNA sense strand
ggagcuucaugaacaacug

SEQ ID NO: 1499131 - RNA, 19 nt, Homo sapiens
  misc_RNA (1)...(19): siRNA sense strand
gaagugcccggugcaagga

SEQ ID NO: 1499132 - RNA, 19 nt, Homo sapiens
  misc_RNA (1)...(19): siRNA sense strand
guaaugggcggaucuuugc

SEQ ID NO: 1499133 - RNA, 19 nt, Homo sapiens
  misc_RNA (1)...(19): siRNA sense strand
cguaaugggcggaucuuug

SEQ ID NO: 1499134 - RNA, 19 nt, Homo sapiens
  misc_RNA (1)...(19): siRNA sense strand
ccaagguggcucuaaacuu

SEQ ID NO: 1499135 - RNA, 19 nt, Homo sapiens
  misc_RNA (1)...(19): siRNA sense strand
gaacaacugggagguguac

SEQ ID NO: 1499136 - RNA, 19 nt, Homo sapiens
  misc_RNA (1)...(19): siRNA sense strand
caccagaggacauuugugu

SEQ ID NO: 1499137 - RNA, 19 nt, Homo sapiens
  misc_RNA (1)...(19): siRNA sense strand
ggaaaaucaaagagaguua

SEQ ID NO: 1499138 - RNA, 19 nt, Homo sapiens
  misc_RNA (1)...(19): siRNA sense strand
ugacacagcacucaauacu

SEQ ID NO: 1499139 - RNA, 19 nt, Homo sapiens
  misc_RNA (1)...(19): siRNA sense strand
uaagagugguucgcacaca

SEQ ID NO: 1499140 - RNA, 19 nt, Homo sapiens
  misc_RNA (1)...(19): siRNA sense strand
gguuaagcgucugggauau

SEQ ID NO: 1499141 - RNA, 19 nt, Homo sapiens
  misc_RNA (1)...(19): siRNA sense strand
agaggacauuuguguuaga

SEQ ID NO: 1499142 - RNA, 19 nt, Homo sapiens
  misc_RNA (1)...(19): siRNA sense strand
aguacgagauugacuugga

SEQ ID NO: 1499143 - RNA, 19 nt, Homo sapiens
  misc_RNA (1)...(19): siRNA sense strand
agacagagcuaaccaauaa

SEQ ID NO: 1499144 - RNA, 19 nt, Homo sapiens
  misc_RNA (1)...(19): siRNA sense strand
gcaguaagcgagcuaguua

SEQ ID NO: 1499145 - RNA, 19 nt, Homo sapiens
  misc_RNA (1)...(19): siRNA sense strand
uaagcgagcuaguuaugua

SEQ ID NO: 1499146 - RNA, 19 nt, Homo sapiens
  misc_RNA (1)...(19): siRNA sense strand
gagaagggaugcgccagua

SEQ ID NO: 1499147 - RNA, 19 nt, Homo sapiens
  misc_RNA (1)...(19): siRNA sense strand
aaaggaagcugauagaaag

SEQ ID NO: 1499148 - RNA, 19 nt, Homo sapiens
  misc_RNA (1)...(19): siRNA sense strand
gaacuuguagcagaaauaa

SEQ ID NO: 1499149 - RNA, 19 nt, Homo sapiens
  misc_RNA (1)...(19): siRNA sense strand
gcauagaggccguugcuuu

SEQ ID NO: 1499150 - RNA, 19 nt, Homo sapiens
  misc_RNA (1)...(19): siRNA sense strand
gcaagaugcagaauagaaa

SEQ ID NO: 1499151 - RNA, 19 nt, Homo sapiens
  misc_RNA (1)...(19): siRNA sense strand
ggaaggaugugaaguuggu

SEQ ID NO: 1499152 - RNA, 19 nt, Homo sapiens
  misc_RNA (1)...(19): siRNA sense strand
aaacugugauucuugcuuu

SEQ ID NO: 1499153 - RNA, 19 nt, Homo sapiens
  misc_RNA (1)...(19): siRNA sense strand
gaugugaaguuggucauug

SEQ ID NO: 1499154 - RNA, 19 nt, Homo sapiens
  misc_RNA (1)...(19): siRNA sense strand
gauaugaacagaugugcaa

SEQ ID NO: 1499155 - RNA, 19 nt, Homo sapiens
  misc_RNA (1)...(19): siRNA sense strand
gcacauguggauuuaaaug

SEQ ID NO: 1499156 - RNA, 19 nt, Homo sapiens
  misc_RNA (1)...(19): siRNA sense strand
gaagaaaccauggaaugug

SEQ ID NO: 1499157 - RNA, 19 nt, Homo sapiens
  misc_RNA (1)...(19): siRNA sense strand
ucgcacauguggauuuaaa

SEQ ID NO: 1499158 - RNA, 19 nt, Homo sapiens
  misc_RNA (1)...(19): siRNA sense strand
gaaaccagaacacggcaaa

SEQ ID NO: 1499159 - RNA, 19 nt, Homo sapiens
  misc_RNA (1)...(19): siRNA sense strand
ggaacuuguagcagaaaua

SEQ ID NO: 1499160 - RNA, 19 nt, Homo sapiens
  misc_RNA (1)...(19): siRNA sense strand
gaagggaugcgccaguaug

SEQ ID NO: 1499161 - RNA, 19 nt, Homo sapiens
  misc_RNA (1)...(19): siRNA sense strand
uccaggagaugcaagauga

SEQ ID NO: 1499162 - RNA, 19 nt, Homo sapiens
  misc_RNA (1)...(19): siRNA sense strand
gaugcaagaugacaaugag

SEQ ID NO: 1499163 - RNA, 19 nt, Homo sapiens
  misc_RNA (1)...(19): siRNA sense strand
gaacaccaaaggcgaagga

SEQ ID NO: 1499164 - RNA, 19 nt, Homo sapiens
  misc_RNA (1)...(19): siRNA sense strand
cagaaauaaucgcacaugu

SEQ ID NO: 1499165 - RNA, 19 nt, Homo sapiens
  misc_RNA (1)...(19): siRNA sense strand
cauagaggccguugcuuug

SEQ ID NO: 1499166 - RNA, 19 nt, Homo sapiens
  misc_RNA (1)...(19): siRNA sense strand
ggagaagaggaacaagaaa

SEQ ID NO: 1499167 - RNA, 19 nt, Homo sapiens
  misc_RNA (1)...(19): siRNA sense strand
guggaaggaugugaaguug

SEQ ID NO: 1499168 - RNA, 19 nt, Homo sapiens
  misc_RNA (1)...(19): siRNA sense strand
aagaaaccauggaaugugu

SEQ ID NO: 1499169 - RNA, 19 nt, Homo sapiens
  misc_RNA (1)...(19): siRNA sense strand
uagaagaaaccauggaaug

SEQ ID NO: 1499170 - RNA, 19 nt, Homo sapiens
  misc_RNA (1)...(19): siRNA sense strand
gcaacacagcgucuuccua

SEQ ID NO: 1499171 - RNA, 19 nt, Homo sapiens
  misc_RNA (1)...(19): siRNA sense strand
gcagaaauaaucgcacaug

SEQ ID NO: 1499172 - RNA, 19 nt, Homo sapiens
  misc_RNA (1)...(19): siRNA sense strand
caccaaaggcgaaggagaa

SEQ ID NO: 1499173 - RNA, 19 nt, Homo sapiens
  misc_RNA (1)...(19): siRNA sense strand
ggagaugcaagaugacaau

SEQ ID NO: 1499174 - RNA, 19 nt, Homo sapiens
  misc_RNA (1)...(19): siRNA sense strand
auucugaacugcauggauu

SEQ ID NO: 1499175 - RNA, 19 nt, Homo sapiens
  misc_RNA (1)...(19): siRNA sense strand
gagcuaguuauguaucaaa

SEQ ID NO: 1499176 - RNA, 19 nt, Homo sapiens
  misc_RNA (1)...(19): siRNA sense strand
gcgagcuaguuauguauca

SEQ ID NO: 1499177 - RNA, 19 nt, Homo sapiens
  misc_RNA (1)...(19): siRNA sense strand
gggaagagaacaccaaagg

SEQ ID NO: 1499178 - RNA, 19 nt, Homo sapiens
  misc_RNA (1)...(19): siRNA sense strand
cacagcgucuuccuagcua

SEQ ID NO: 1499179 - RNA, 19 nt, Homo sapiens
  misc_RNA (1)...(19): siRNA sense strand
cuuccuagcuacagacaga

SEQ ID NO: 1499180 - RNA, 19 nt, Homo sapiens
  misc_RNA (1)...(19): siRNA sense strand
cagacagagcuaaccaaua

SEQ ID NO: 1499181 - RNA, 19 nt, Homo sapiens
  misc_RNA (1)...(19): siRNA sense strand
ccagaacacggcaaauugu

SEQ ID NO: 1499182 - RNA, 19 nt, Homo sapiens
  misc_RNA (1)...(19): siRNA sense strand
gagggaagagaacaccaaa

SEQ ID NO: 1499183 - RNA, 19 nt, Homo sapiens
  misc_RNA (1)...(19): siRNA sense strand
ggagggaagagaacaccaa

SEQ ID NO: 1499184 - RNA, 19 nt, Homo sapiens
  misc_RNA (1)...(19): siRNA sense strand
cauggaauguguggaagga

SEQ ID NO: 1499185 - RNA, 19 nt, Homo sapiens
  misc_RNA (1)...(19): siRNA sense strand
gccagugaaagacacaaua

SEQ ID NO: 1499186 - RNA, 19 nt, Homo sapiens
  misc_RNA (1)...(19): siRNA sense strand
ggccguugcuuugaugaau

SEQ ID NO: 1499187 - RNA, 19 nt, Homo sapiens
  misc_RNA (1)...(19): siRNA sense strand
gagaagaggaacaagaaaa

SEQ ID NO: 1499188 - RNA, 19 nt, Homo sapiens
  misc_RNA (1)...(19): siRNA sense strand
cgaaggagaagaggaacaa

SEQ ID NO: 1499189 - RNA, 19 nt, Homo sapiens
  misc_RNA (1)...(19): siRNA sense strand
gaauccaggagaugcaaga

SEQ ID NO: 1499190 - RNA, 19 nt, Homo sapiens
  misc_RNA (1)...(19): siRNA sense strand
guccaaccauugcugaauc

SEQ ID NO: 1499191 - RNA, 19 nt, Homo sapiens
  misc_RNA (1)...(19): siRNA sense strand
agaaauaaucgcacaugug

SEQ ID NO: 1499192 - RNA, 19 nt, Homo sapiens
  misc_RNA (1)...(19): siRNA sense strand
caaaggcgaaggagaagag

SEQ ID NO: 1499193 - RNA, 19 nt, Homo sapiens
  misc_RNA (1)...(19): siRNA sense strand
uguagccgaugucaacaga

SEQ ID NO: 1499194 - RNA, 19 nt, Homo sapiens
  misc_RNA (1)...(19): siRNA sense strand
uauggagagugccugcauu

SEQ ID NO: 1499195 - RNA, 19 nt, Homo sapiens
  misc_RNA (1)...(19): siRNA sense strand
caauggguguagccgaugu

SEQ ID NO: 1499196 - RNA, 19 nt, Homo sapiens
  misc_RNA (1)...(19): siRNA sense strand
agaagaaaccauggaaugu

SEQ ID NO: 1499197 - RNA, 19 nt, Homo sapiens
  misc_RNA (1)...(19): siRNA sense strand
uagccgaugucaacagaag

SEQ ID NO: 1499198 - RNA, 19 nt, Homo sapiens
  misc_RNA (1)...(19): siRNA sense strand
gaaaaggaagcugauagaa

SEQ ID NO: 1499199 - RNA, 19 nt, Homo sapiens
  misc_RNA (1)...(19): siRNA sense strand
aauaaucgcacauguggau

SEQ ID NO: 1499200 - RNA, 19 nt, Homo sapiens
  misc_RNA (1)...(19): siRNA sense strand
ggaauguguggaaggaugu

SEQ ID NO: 1499201 - RNA, 19 nt, Homo sapiens
  misc_RNA (1)...(19): siRNA sense strand
ggacaccgagccccagaua

SEQ ID NO: 1499202 - RNA, 19 nt, Homo sapiens
  misc_RNA (1)...(19): siRNA sense strand
caaaggacaauggguguag

SEQ ID NO: 1499203 - RNA, 19 nt, Homo sapiens
  misc_RNA (1)...(19): siRNA sense strand
uugcaaggguuguuugucu

SEQ ID NO: 1499204 - RNA, 19 nt, Homo sapiens
  misc_RNA (1)...(19): siRNA sense strand
ggagcaacacagcgucuuc

SEQ ID NO: 1499205 - RNA, 19 nt, Homo sapiens
  misc_RNA (1)...(19): siRNA sense strand
aaaaggaagcugauagaaa

SEQ ID NO: 1499206 - RNA, 19 nt, Homo sapiens
  misc_RNA (1)...(19): siRNA sense strand
acaauaccguguccaacca

SEQ ID NO: 1499207 - RNA, 19 nt, Homo sapiens
  misc_RNA (1)...(19): siRNA sense strand
gggaacuuguagcagaaau

SEQ ID NO: 1499208 - RNA, 19 nt, Homo sapiens
  misc_RNA (1)...(19): siRNA sense strand
uagaggccguugcuuugau

SEQ ID NO: 1499209 - RNA, 19 nt, Homo sapiens
  misc_RNA (1)...(19): siRNA sense strand
ugaugaauguccagauggu

SEQ ID NO: 1499210 - RNA, 19 nt, Homo sapiens
  misc_RNA (1)...(19): siRNA sense strand
cuaguuauguaucaaaucc

SEQ ID NO: 1499211 - RNA, 19 nt, Homo sapiens
  misc_RNA (1)...(19): siRNA sense strand
aggagaagaggaacaagaa

SEQ ID NO: 1499212 - RNA, 19 nt, Homo sapiens
  misc_RNA (1)...(19): siRNA sense strand
gccguugcuuugaugaaug

SEQ ID NO: 1499213 - RNA, 19 nt, Homo sapiens
  misc_RNA (1)...(19): siRNA sense strand
agaaagggcccaggagcaa

SEQ ID NO: 1499214 - RNA, 19 nt, Homo sapiens
  misc_RNA (1)...(19): siRNA sense strand
uuugaugaauguccagaug

SEQ ID NO: 1499215 - RNA, 19 nt, Homo sapiens
  misc_RNA (1)...(19): siRNA sense strand
ugaacugcauggauuacag

SEQ ID NO: 1499216 - RNA, 19 nt, Homo sapiens
  misc_RNA (1)...(19): siRNA sense strand
aaccagaacacggcaaauu

SEQ ID NO: 1499217 - RNA, 19 nt, Homo sapiens
  misc_RNA (1)...(19): siRNA sense strand
ccagauaugaacagaugug

SEQ ID NO: 1499218 - RNA, 19 nt, Homo sapiens
  misc_RNA (1)...(19): siRNA sense strand
ucaaaggacaaugggugua

SEQ ID NO: 1499219 - RNA, 19 nt, Homo sapiens
  misc_RNA (1)...(19): siRNA sense strand
guaagcgagcuaguuaugu

SEQ ID NO: 1499220 - RNA, 19 nt, Homo sapiens
  misc_RNA (1)...(19): siRNA sense strand
ggguguagccgaugucaac

SEQ ID NO: 1499221 - RNA, 19 nt, Homo sapiens
  misc_RNA (1)...(19): siRNA sense strand
cgagcuaguuauguaucaa

SEQ ID NO: 1499222 - RNA, 19 nt, Homo sapiens
  misc_RNA (1)...(19): siRNA sense strand
uguggaaggaugugaaguu

SEQ ID NO: 1499223 - RNA, 19 nt, Homo sapiens
  misc_RNA (1)...(19): siRNA sense strand
aacugugauucuugcuuua

SEQ ID NO: 1499224 - RNA, 19 nt, Homo sapiens
  misc_RNA (1)...(19): siRNA sense strand
gccgaugucaacagaaguu

SEQ ID NO: 1499225 - RNA, 19 nt, Homo sapiens
  misc_RNA (1)...(19): siRNA sense strand
gguuguuugucuuguucaa

SEQ ID NO: 1499226 - RNA, 19 nt, Homo sapiens
  misc_RNA (1)...(19): siRNA sense strand
agaggccguugcuuugaug

SEQ ID NO: 1499227 - RNA, 19 nt, Homo sapiens
  misc_RNA (1)...(19): siRNA sense strand
uguaccaagugcaaaguag

SEQ ID NO: 1499228 - RNA, 19 nt, Homo sapiens
  misc_RNA (1)...(19): siRNA sense strand
ggaugugaaguuggucauu

SEQ ID NO: 1499229 - RNA, 19 nt, Homo sapiens
  misc_RNA (1)...(19): siRNA sense strand
ggagagugccugcauuccu

SEQ ID NO: 1499230 - RNA, 19 nt, Homo sapiens
  misc_RNA (1)...(19): siRNA sense strand
ccagugaaagacacaauac

SEQ ID NO: 1499231 - RNA, 19 nt, Homo sapiens
  misc_RNA (1)...(19): siRNA sense strand
gcaacaaacucgugcuuau

SEQ ID NO: 1499232 - RNA, 19 nt, Homo sapiens
  misc_RNA (1)...(19): siRNA sense strand
gccaauaacuacccaauca

SEQ ID NO: 1499233 - RNA, 19 nt, Homo sapiens
  misc_RNA (1)...(19): siRNA sense strand
gaccuucucugaucaguug

SEQ ID NO: 1499234 - RNA, 19 nt, Homo sapiens
  misc_RNA (1)...(19): siRNA sense strand
gcacugcgaccuucucuga

SEQ ID NO: 1499235 - RNA, 19 nt, Homo sapiens
  misc_RNA (1)...(19): siRNA sense strand
uggaggaccuggccacaua

SEQ ID NO: 1499236 - RNA, 19 nt, Homo sapiens
  misc_RNA (1)...(19): siRNA sense strand
gaacugcuuuguaaaucau

SEQ ID NO: 1499237 - RNA, 19 nt, Homo sapiens
  misc_RNA (1)...(19): siRNA sense strand
ccaaagaacuggacuucag

SEQ ID NO: 1499238 - RNA, 19 nt, Homo sapiens
  misc_RNA (1)...(19): siRNA sense strand
ggacacugaucgccucuuc

SEQ ID NO: 1499239 - RNA, 19 nt, Homo sapiens
  misc_RNA (1)...(19): siRNA sense strand
cgaccaugcugcccucauu

SEQ ID NO: 1499240 - RNA, 19 nt, Homo sapiens
  misc_RNA (1)...(19): siRNA sense strand
uaugauggguuuacugaug

SEQ ID NO: 1499241 - RNA, 19 nt, Homo sapiens
  misc_RNA (1)...(19): siRNA sense strand
caacaaacucgugcuuauu

SEQ ID NO: 1499242 - RNA, 19 nt, Homo sapiens
  misc_RNA (1)...(19): siRNA sense strand
ggauuuacugccuguuaua

SEQ ID NO: 1499243 - RNA, 19 nt, Homo sapiens
  misc_RNA (1)...(19): siRNA sense strand
ggaccuggccacauaugaa

SEQ ID NO: 1499244 - RNA, 19 nt, Homo sapiens
  misc_RNA (1)...(19): siRNA sense strand
ccucugcccuggacacuga

SEQ ID NO: 1499245 - RNA, 19 nt, Homo sapiens
  misc_RNA (1)...(19): siRNA sense strand
gaacagcugacuccaagca

SEQ ID NO: 1499246 - RNA, 19 nt, Homo sapiens
  misc_RNA (1)...(19): siRNA sense strand
cuaaagaccuggcucuacu

SEQ ID NO: 1499247 - RNA, 19 nt, Homo sapiens
  misc_RNA (1)...(19): siRNA sense strand
ggcaggaaaucccguguuc

SEQ ID NO: 1499248 - RNA, 19 nt, Homo sapiens
  misc_RNA (1)...(19): siRNA sense strand
cauaugaaaccgccuuuga

SEQ ID NO: 1499249 - RNA, 19 nt, Homo sapiens
  misc_RNA (1)...(19): siRNA sense strand
ggaagagacgcccguggaa

SEQ ID NO: 1499250 - RNA, 19 nt, Homo sapiens
  misc_RNA (1)...(19): siRNA sense strand
uaaucuaccugggcuuuga

SEQ ID NO: 1499251 - RNA, 19 nt, Homo sapiens
  misc_RNA (1)...(19): siRNA sense strand
cagcaucuacgacaucauu

SEQ ID NO: 1499252 - RNA, 19 nt, Homo sapiens
  misc_RNA (1)...(19): siRNA sense strand
cgucucauccagcagauua

SEQ ID NO: 1499253 - RNA, 19 nt, Homo sapiens
  misc_RNA (1)...(19): siRNA sense strand
ugaacugcuuuguaaauca

SEQ ID NO: 1499254 - RNA, 19 nt, Homo sapiens
  misc_RNA (1)...(19): siRNA sense strand
gaaauugcucuaccugucu

SEQ ID NO: 1499255 - RNA, 19 nt, Homo sapiens
  misc_RNA (1)...(19): siRNA sense strand
aagcagaacuaagcaagga

SEQ ID NO: 1499256 - RNA, 19 nt, Homo sapiens
  misc_RNA (1)...(19): siRNA sense strand
ccgagaguguccuaaucua

SEQ ID NO: 1499257 - RNA, 19 nt, Homo sapiens
  misc_RNA (1)...(19): siRNA sense strand
gaccuggccacauaugaaa

SEQ ID NO: 1499258 - RNA, 19 nt, Homo sapiens
  misc_RNA (1)...(19): siRNA sense strand
ccaacccuaccaagacuua

SEQ ID NO: 1499259 - RNA, 19 nt, Homo sapiens
  misc_RNA (1)...(19): siRNA sense strand
ccagagugcaggcaacaaa

SEQ ID NO: 1499260 - RNA, 19 nt, Homo sapiens
  misc_RNA (1)...(19): siRNA sense strand
ugaaaccgccuuugagaca

SEQ ID NO: 1499261 - RNA, 19 nt, Homo sapiens
  misc_RNA (1)...(19): siRNA sense strand
aaaccucggucagaagcua

SEQ ID NO: 1499262 - RNA, 19 nt, Homo sapiens
  misc_RNA (1)...(19): siRNA sense strand
gugaacugcuuuguaaauc

SEQ ID NO: 1499263 - RNA, 19 nt, Homo sapiens
  misc_RNA (1)...(19): siRNA sense strand
ccugaggccucuccaguca

SEQ ID NO: 1499264 - RNA, 19 nt, Homo sapiens
  misc_RNA (1)...(19): siRNA sense strand
caagaacagcugacuccaa

SEQ ID NO: 1499265 - RNA, 19 nt, Homo sapiens
  misc_RNA (1)...(19): siRNA sense strand
gaccugaaacccuggaaau

SEQ ID NO: 1499266 - RNA, 19 nt, Homo sapiens
  misc_RNA (1)...(19): siRNA sense strand
aaauugcucuaccugucua

SEQ ID NO: 1499267 - RNA, 19 nt, Homo sapiens
  misc_RNA (1)...(19): siRNA sense strand
uaugaaaccgccuuugaga

SEQ ID NO: 1499268 - RNA, 19 nt, Homo sapiens
  misc_RNA (1)...(19): siRNA sense strand
cccaaucagugacauggaa

SEQ ID NO: 1499269 - RNA, 19 nt, Homo sapiens
  misc_RNA (1)...(19): siRNA sense strand
gacagcaucuacgacauca

SEQ ID NO: 1499270 - RNA, 19 nt, Homo sapiens
  misc_RNA (1)...(19): siRNA sense strand
ggcaacaaacucgugcuua

SEQ ID NO: 1499271 - RNA, 19 nt, Homo sapiens
  misc_RNA (1)...(19): siRNA sense strand
gaagcuaugaagaccaguu

SEQ ID NO: 1499272 - RNA, 19 nt, Homo sapiens
  misc_RNA (1)...(19): siRNA sense strand
gcaucuacgacaucauuga

SEQ ID NO: 1499273 - RNA, 19 nt, Homo sapiens
  misc_RNA (1)...(19): siRNA sense strand
cagcacagcauuccaagca

SEQ ID NO: 1499274 - RNA, 19 nt, Homo sapiens
  misc_RNA (1)...(19): siRNA sense strand
ggucagaagcuaugaagac

SEQ ID NO: 1499275 - RNA, 19 nt, Homo sapiens
  misc_RNA (1)...(19): siRNA sense strand
ccauuacugccaauaacua

SEQ ID NO: 1499276 - RNA, 19 nt, Homo sapiens
  misc_RNA (1)...(19): siRNA sense strand
ggacaucguagcggcacua

SEQ ID NO: 1499277 - RNA, 19 nt, Homo sapiens
  misc_RNA (1)...(19): siRNA sense strand
gaagacacccaggcagcuu

SEQ ID NO: 1499278 - RNA, 19 nt, Homo sapiens
  misc_RNA (1)...(19): siRNA sense strand
ccagagggacccauuacug

SEQ ID NO: 1499279 - RNA, 19 nt, Homo sapiens
  misc_RNA (1)...(19): siRNA sense strand
ucaagacagcuuccaugaa

SEQ ID NO: 1499280 - RNA, 19 nt, Homo sapiens
  misc_RNA (1)...(19): siRNA sense strand
gagccucgccugcaucuac

SEQ ID NO: 1499281 - RNA, 19 nt, Homo sapiens
  misc_RNA (1)...(19): siRNA sense strand
ggcugacccugauaacaug

SEQ ID NO: 1499282 - RNA, 19 nt, Homo sapiens
  misc_RNA (1)...(19): siRNA sense strand
gacccauuacugccaauaa

SEQ ID NO: 1499283 - RNA, 19 nt, Homo sapiens
  misc_RNA (1)...(19): siRNA sense strand
uggauuuacugccuguuau

SEQ ID NO: 1499284 - RNA, 19 nt, Homo sapiens
  misc_RNA (1)...(19): siRNA sense strand
uggguuuacugaugaguug

SEQ ID NO: 1499285 - RNA, 19 nt, Homo sapiens
  misc_RNA (1)...(19): siRNA sense strand
ccuaugauggguuuacuga

SEQ ID NO: 1499286 - RNA, 19 nt, Homo sapiens
  misc_RNA (1)...(19): siRNA sense strand
ccagcagauuagccaauug

SEQ ID NO: 1499287 - RNA, 19 nt, Homo sapiens
  misc_RNA (1)...(19): siRNA sense strand
gaaaaggagcagaaugaga

SEQ ID NO: 1499288 - RNA, 19 nt, Homo sapiens
  misc_RNA (1)...(19): siRNA sense strand
ccagagccgccaugcuaaa

SEQ ID NO: 1499289 - RNA, 19 nt, Homo sapiens
  misc_RNA (1)...(19): siRNA sense strand
ggaccugaaacccuggaaa

SEQ ID NO: 1499290 - RNA, 19 nt, Homo sapiens
  misc_RNA (1)...(19): siRNA sense strand
caauaacuacccaaucagu

SEQ ID NO: 1499291 - RNA, 19 nt, Homo sapiens
  misc_RNA (1)...(19): siRNA sense strand
ggcccacgcuucugcucaa

SEQ ID NO: 1499292 - RNA, 19 nt, Homo sapiens
  misc_RNA (1)...(19): siRNA sense strand
cagcugaccaccucacugu

SEQ ID NO: 1499293 - RNA, 19 nt, Homo sapiens
  misc_RNA (1)...(19): siRNA sense strand
ugaacugaguguugucucu

SEQ ID NO: 1499294 - RNA, 19 nt, Homo sapiens
  misc_RNA (1)...(19): siRNA sense strand
ggaggcugggcauggauuu

SEQ ID NO: 1499295 - RNA, 19 nt, Homo sapiens
  misc_RNA (1)...(19): siRNA sense strand
ggagauauucaggcagaga

SEQ ID NO: 1499296 - RNA, 19 nt, Homo sapiens
  misc_RNA (1)...(19): siRNA sense strand
ggcugagaguggagauauu

SEQ ID NO: 1499297 - RNA, 19 nt, Homo sapiens
  misc_RNA (1)...(19): siRNA sense strand
gaggcugggcauggauuua

SEQ ID NO: 1499298 - RNA, 19 nt, Homo sapiens
  misc_RNA (1)...(19): siRNA sense strand
aagagacgcccguggaaga

SEQ ID NO: 1499299 - RNA, 19 nt, Homo sapiens
  misc_RNA (1)...(19): siRNA sense strand
aaaggagcagaaugagaua

SEQ ID NO: 1499300 - RNA, 19 nt, Homo sapiens
  misc_RNA (1)...(19): siRNA sense strand
gggaugcaguuuucucuau

SEQ ID NO: 1499301 - RNA, 19 nt, Homo sapiens
  misc_RNA (1)...(19): siRNA sense strand
gcacuaacccacucuucac

SEQ ID NO: 1499302 - RNA, 19 nt, Homo sapiens
  misc_RNA (1)...(19): siRNA sense strand
gagccgccaugcuaaagac

SEQ ID NO: 1499303 - RNA, 19 nt, Homo sapiens
  misc_RNA (1)...(19): siRNA sense strand
augauggguuuacugauga

SEQ ID NO: 1499304 - RNA, 19 nt, Homo sapiens
  misc_RNA (1)...(19): siRNA sense strand
gcuccugaacugaguguug

SEQ ID NO: 1499305 - RNA, 19 nt, Homo sapiens
  misc_RNA (1)...(19): siRNA sense strand
auaacuacccaaucaguga

SEQ ID NO: 1499306 - RNA, 19 nt, Homo sapiens
  misc_RNA (1)...(19): siRNA sense strand
gcugagaguggagauauuc

SEQ ID NO: 1499307 - RNA, 19 nt, Homo sapiens
  misc_RNA (1)...(19): siRNA sense strand
aacaaacucgugcuuauuc

SEQ ID NO: 1499308 - RNA, 19 nt, Homo sapiens
  misc_RNA (1)...(19): siRNA sense strand
cucgagagcuugaggacau

SEQ ID NO: 1499309 - RNA, 19 nt, Homo sapiens
  misc_RNA (1)...(19): siRNA sense strand
ggacccauuacugccaaua

SEQ ID NO: 1499310 - RNA, 19 nt, Homo sapiens
  misc_RNA (1)...(19): siRNA sense strand
uuccagagccgccaugcua

SEQ ID NO: 1499311 - RNA, 19 nt, Homo sapiens
  misc_RNA (1)...(19): siRNA sense strand
gcuaaagaccuggcucuac

SEQ ID NO: 1499312 - RNA, 19 nt, Homo sapiens
  misc_RNA (1)...(19): siRNA sense strand
ugaggccucuccagucaag

SEQ ID NO: 1499313 - RNA, 19 nt, Homo sapiens
  misc_RNA (1)...(19): siRNA sense strand
gagauauucaggcagagau

SEQ ID NO: 1499314 - RNA, 19 nt, Homo sapiens
  misc_RNA (1)...(19): siRNA sense strand
uccagcagauuagccaauu

SEQ ID NO: 1499315 - RNA, 19 nt, Homo sapiens
  misc_RNA (1)...(19): siRNA sense strand
ccuagcagcccugguaaug

SEQ ID NO: 1499316 - RNA, 19 nt, Homo sapiens
  misc_RNA (1)...(19): siRNA sense strand
uaccugacauucccuucug

SEQ ID NO: 1499317 - RNA, 19 nt, Homo sapiens
  misc_RNA (1)...(19): siRNA sense strand
uguccuaccugcacaucau

SEQ ID NO: 1499318 - RNA, 19 nt, Homo sapiens
  misc_RNA (1)...(19): siRNA sense strand
ggaggaccuggccacauau

SEQ ID NO: 1499319 - RNA, 19 nt, Homo sapiens
  misc_RNA (1)...(19): siRNA sense strand
gaugcaguuuucucuauga

SEQ ID NO: 1499320 - RNA, 19 nt, Homo sapiens
  misc_RNA (1)...(19): siRNA sense strand
gccugagccuucucuccaa

SEQ ID NO: 1499321 - RNA, 19 nt, Homo sapiens
  misc_RNA (1)...(19): siRNA sense strand
ucgcaagggcgucuucuuc

SEQ ID NO: 1499322 - RNA, 19 nt, Homo sapiens
  misc_RNA (1)...(19): siRNA sense strand
ugacagcaucuacgacauc

SEQ ID NO: 1499323 - RNA, 19 nt, Homo sapiens
  misc_RNA (1)...(19): siRNA sense strand
uggcugacccugauaacau

SEQ ID NO: 1499324 - RNA, 19 nt, Homo sapiens
  misc_RNA (1)...(19): siRNA sense strand
ggagcagaaugagauagac

SEQ ID NO: 1499325 - RNA, 19 nt, Homo sapiens
  misc_RNA (1)...(19): siRNA sense strand
cagaguuucuuccacuacu

SEQ ID NO: 1499326 - RNA, 19 nt, Homo sapiens
  misc_RNA (1)...(19): siRNA sense strand
aguccuagcagcccuggua

SEQ ID NO: 1499327 - RNA, 19 nt, Homo sapiens
  misc_RNA (1)...(19): siRNA sense strand
ggcugugccuuccucuuca

SEQ ID NO: 1499328 - RNA, 19 nt, Homo sapiens
  misc_RNA (1)...(19): siRNA sense strand
cuaccaagacuuacuuugc

SEQ ID NO: 1499329 - RNA, 19 nt, Homo sapiens
  misc_RNA (1)...(19): siRNA sense strand
gcagaguuucuuccacuac

SEQ ID NO: 1499330 - RNA, 19 nt, Homo sapiens
  misc_RNA (1)...(19): siRNA sense strand
caggagggaugcaguuuuc

SEQ ID NO: 1499331 - RNA, 19 nt, Homo sapiens
  misc_RNA (1)...(19): siRNA sense strand
gaaggaacaucacagaaua

SEQ ID NO: 1499332 - RNA, 19 nt, Homo sapiens
  misc_RNA (1)...(19): siRNA sense strand
gaucaacucucucaacuuc

SEQ ID NO: 1499333 - RNA, 19 nt, Homo sapiens
  misc_RNA (1)...(19): siRNA sense strand
uagcaucguuccaucauua

SEQ ID NO: 1499334 - RNA, 19 nt, Homo sapiens
  misc_RNA (1)...(19): siRNA sense strand
caucagacauuccuguuaa

SEQ ID NO: 1499335 - RNA, 19 nt, Homo sapiens
  misc_RNA (1)...(19): siRNA sense strand
cauuauggcuucuugaauu

SEQ ID NO: 1499336 - RNA, 19 nt, Homo sapiens
  misc_RNA (1)...(19): siRNA sense strand
ggacuggucuuccuuaacg

SEQ ID NO: 1499337 - RNA, 19 nt, Homo sapiens
  misc_RNA (1)...(19): siRNA sense strand
ugagaaaguuuggacauug

SEQ ID NO: 1499338 - RNA, 19 nt, Homo sapiens
  misc_RNA (1)...(19): siRNA sense strand
caagugagacccuagaaga

SEQ ID NO: 1499339 - RNA, 19 nt, Homo sapiens
  misc_RNA (1)...(19): siRNA sense strand
ugaccgaggugaagaagga

SEQ ID NO: 1499340 - RNA, 19 nt, Homo sapiens
  misc_RNA (1)...(19): siRNA sense strand
gagaaaguuuggacauugg

SEQ ID NO: 1499341 - RNA, 19 nt, Homo sapiens
  misc_RNA (1)...(19): siRNA sense strand
gugagaaaguuuggacauu

SEQ ID NO: 1499342 - RNA, 19 nt, Homo sapiens
  misc_RNA (1)...(19): siRNA sense strand
guggcaacuuguucuauuu

SEQ ID NO: 1499343 - RNA, 19 nt, Homo sapiens
  misc_RNA (1)...(19): siRNA sense strand
ucaacucucucaacuucuu

SEQ ID NO: 1499344 - RNA, 19 nt, Homo sapiens
  misc_RNA (1)...(19): siRNA sense strand
ucucucaacuucuucuuau

SEQ ID NO: 1499345 - RNA, 19 nt, Homo sapiens
  misc_RNA (1)...(19): siRNA sense strand
caguagagcugaugaucuc

SEQ ID NO: 1499346 - RNA, 19 nt, Homo sapiens
  misc_RNA (1)...(19): siRNA sense strand
caacuucuucuuauguuug

SEQ ID NO: 1499347 - RNA, 19 nt, Homo sapiens
  misc_RNA (1)...(19): siRNA sense strand
agacugcgcucacccucaa

SEQ ID NO: 1499348 - RNA, 19 nt, Homo sapiens
  misc_RNA (1)...(19): siRNA sense strand
cggcugacauacuggaauu

SEQ ID NO: 1499349 - RNA, 19 nt, Homo sapiens
  misc_RNA (1)...(19): siRNA sense strand
ugaaggaacaucacagaau

SEQ ID NO: 1499350 - RNA, 19 nt, Homo sapiens
  misc_RNA (1)...(19): siRNA sense strand
gagacccaguauugcagua

SEQ ID NO: 1499351 - RNA, 19 nt, Homo sapiens
  misc_RNA (1)...(19): siRNA sense strand
uauccaggcugaaggaaca

SEQ ID NO: 1499352 - RNA, 19 nt, Homo sapiens
  misc_RNA (1)...(19): siRNA sense strand
gagggacuggucuuccuua

SEQ ID NO: 1499353 - RNA, 19 nt, Homo sapiens
  misc_RNA (1)...(19): siRNA sense strand
uacaguaugugagaaaguu

SEQ ID NO: 1499354 - RNA, 19 nt, Homo sapiens
  misc_RNA (1)...(19): siRNA sense strand
ccaaugaacaaaccaguag

SEQ ID NO: 1499355 - RNA, 19 nt, Homo sapiens
  misc_RNA (1)...(19): siRNA sense strand
ccaucagacauuccuguua

SEQ ID NO: 1499356 - RNA, 19 nt, Homo sapiens
  misc_RNA (1)...(19): siRNA sense strand
auacuggaauucacaagug

SEQ ID NO: 1499357 - RNA, 19 nt, Homo sapiens
  misc_RNA (1)...(19): siRNA sense strand
cggcagaggcuacaaaugg

SEQ ID NO: 1499358 - RNA, 19 nt, Homo sapiens
  misc_RNA (1)...(19): siRNA sense strand
gcugaaggaacaucacaga

SEQ ID NO: 1499359 - RNA, 19 nt, Homo sapiens
  misc_RNA (1)...(19): siRNA sense strand
gcaacuuguucuauuuuga

SEQ ID NO: 1499360 - RNA, 19 nt, Homo sapiens
  misc_RNA (1)...(19): siRNA sense strand
gugagacccuagaagaaca

SEQ ID NO: 1499361 - RNA, 19 nt, Homo sapiens
  misc_RNA (1)...(19): siRNA sense strand
ggacauugggacuccauca

SEQ ID NO: 1499362 - RNA, 19 nt, Homo sapiens
  misc_RNA (1)...(19): siRNA sense strand
gcagaggcuacaaaugguu

SEQ ID NO: 1499363 - RNA, 19 nt, Homo sapiens
  misc_RNA (1)...(19): siRNA sense strand
ucacagaauaccagcagaa

SEQ ID NO: 1499364 - RNA, 19 nt, Homo sapiens
  misc_RNA (1)...(19): siRNA sense strand
ggcagaggcuacaaauggu

SEQ ID NO: 1499365 - RNA, 19 nt, Homo sapiens
  misc_RNA (1)...(19): siRNA sense strand
aguggcaacuuguucuauu

SEQ ID NO: 1499366 - RNA, 19 nt, Homo sapiens
  misc_RNA (1)...(19): siRNA sense strand
gcgcucacccucaaguuca

SEQ ID NO: 1499367 - RNA, 19 nt, Homo sapiens
  misc_RNA (1)...(19): siRNA sense strand
gugaggcucuguuggaaaa

SEQ ID NO: 1499368 - RNA, 19 nt, Homo sapiens
  misc_RNA (1)...(19): siRNA sense strand
ugacauacuggaauucaca

SEQ ID NO: 1499369 - RNA, 19 nt, Homo sapiens
  misc_RNA (1)...(19): siRNA sense strand
accaugagacccaguauug

SEQ ID NO: 1499370 - RNA, 19 nt, Homo sapiens
  misc_RNA (1)...(19): siRNA sense strand
auuauggcuucuugaauug

SEQ ID NO: 1499371 - RNA, 19 nt, Homo sapiens
  misc_RNA (1)...(19): siRNA sense strand
cagaggcuacaaaugguuu

SEQ ID NO: 1499372 - RNA, 19 nt, Homo sapiens
  misc_RNA (1)...(19): siRNA sense strand
ucauugagacggccaaagu

SEQ ID NO: 1499373 - RNA, 19 nt, Homo sapiens
  misc_RNA (1)...(19): siRNA sense strand
gacccaguauugcaguauc

SEQ ID NO: 1499374 - RNA, 19 nt, Homo sapiens
  misc_RNA (1)...(19): siRNA sense strand
gggacuccaucagacauuc

SEQ ID NO: 1499375 - RNA, 19 nt, Homo sapiens
  misc_RNA (1)...(19): siRNA sense strand
gauuagcaucguuccauca

SEQ ID NO: 1499376 - RNA, 19 nt, Homo sapiens
  misc_RNA (1)...(19): siRNA sense strand
uaucuacaguaugugagaa

SEQ ID NO: 1499377 - RNA, 19 nt, Homo sapiens
  misc_RNA (1)...(19): siRNA sense strand
ggagggacuggucuuccuu

SEQ ID NO: 1499378 - RNA, 19 nt, Homo sapiens
  misc_RNA (1)...(19): siRNA sense strand
caugagacccaguauugca

SEQ ID NO: 1499379 - RNA, 19 nt, Homo sapiens
  misc_RNA (1)...(19): siRNA sense strand
ucucaacuucuucuuaugu

SEQ ID NO: 1499380 - RNA, 19 nt, Homo sapiens
  misc_RNA (1)...(19): siRNA sense strand
cacagaauaccagcagaaa

SEQ ID NO: 1499381 - RNA, 19 nt, Homo sapiens
  misc_RNA (1)...(19): siRNA sense strand
cucaacuucuucuuauguu

SEQ ID NO: 1499382 - RNA, 19 nt, Homo sapiens
  misc_RNA (1)...(19): siRNA sense strand
gcaccaugagacccaguau

SEQ ID NO: 1499383 - RNA, 19 nt, Homo sapiens
  misc_RNA (1)...(19): siRNA sense strand
gcugacauacuggaauuca

SEQ ID NO: 1499384 - RNA, 19 nt, Homo sapiens
  misc_RNA (1)...(19): siRNA sense strand
uuagcaucguuccaucauu

SEQ ID NO: 1499385 - RNA, 19 nt, Homo sapiens
  misc_RNA (1)...(19): siRNA sense strand
gaccagaaguuucccaaga

SEQ ID NO: 1499386 - RNA, 19 nt, Homo sapiens
  misc_RNA (1)...(19): siRNA sense strand
ggacgaugaugaacaggaa

SEQ ID NO: 1499387 - RNA, 19 nt, Homo sapiens
  misc_RNA (1)...(19): siRNA sense strand
aaagugauguuccacaguu

SEQ ID NO: 1499388 - RNA, 19 nt, Homo sapiens
  misc_RNA (1)...(19): siRNA sense strand
agaagaagcugcggcugaa

SEQ ID NO: 1499389 - RNA, 19 nt, Homo sapiens
  misc_RNA (1)...(19): siRNA sense strand
guaagaagaacucgcugaa

SEQ ID NO: 1499390 - RNA, 19 nt, Homo sapiens
  misc_RNA (1)...(19): siRNA sense strand
ggaguugggugaggacgau

SEQ ID NO: 1499391 - RNA, 19 nt, Homo sapiens
  misc_RNA (1)...(19): siRNA sense strand
cacuauagcaucaaaguug

SEQ ID NO: 1499392 - RNA, 19 nt, Homo sapiens
  misc_RNA (1)...(19): siRNA sense strand
ggucacacacuuucugauc

SEQ ID NO: 1499393 - RNA, 19 nt, Homo sapiens
  misc_RNA (1)...(19): siRNA sense strand
ugaggacgaugaugaacag

SEQ ID NO: 1499394 - RNA, 19 nt, Homo sapiens
  misc_RNA (1)...(19): siRNA sense strand
ccucugggaucccuucaag

SEQ ID NO: 1499395 - RNA, 19 nt, Homo sapiens
  misc_RNA (1)...(19): siRNA sense strand
gaacaggaagaugaugaca

SEQ ID NO: 1499396 - RNA, 19 nt, Homo sapiens
  misc_RNA (1)...(19): siRNA sense strand
gaaccugaacaccaucaag

SEQ ID NO: 1499397 - RNA, 19 nt, Homo sapiens
  misc_RNA (1)...(19): siRNA sense strand
cggaagcggugggaaaugg

SEQ ID NO: 1499398 - RNA, 19 nt, Homo sapiens
  misc_RNA (1)...(19): siRNA sense strand
gcaaaacagagaccaaugu

SEQ ID NO: 1499399 - RNA, 19 nt, Homo sapiens
  misc_RNA (1)...(19): siRNA sense strand
gagaaguuccccaacauga

SEQ ID NO: 1499400 - RNA, 19 nt, Homo sapiens
  misc_RNA (1)...(19): siRNA sense strand
ccacuauagcaucaaaguu

SEQ ID NO: 1499401 - RNA, 19 nt, Homo sapiens
  misc_RNA (1)...(19): siRNA sense strand
agaagaacucgcugaagga

SEQ ID NO: 1499402 - RNA, 19 nt, Homo sapiens
  misc_RNA (1)...(19): siRNA sense strand
ugacggcgaccacaacauc

SEQ ID NO: 1499403 - RNA, 19 nt, Homo sapiens
  misc_RNA (1)...(19): siRNA sense strand
ccaucaacgugcacaaggu

SEQ ID NO: 1499404 - RNA, 19 nt, Homo sapiens
  misc_RNA (1)...(19): siRNA sense strand
cacugcagcucaucaaggu

SEQ ID NO: 1499405 - RNA, 19 nt, Homo sapiens
  misc_RNA (1)...(19): siRNA sense strand
ccgccacuauagcaucaaa

SEQ ID NO: 1499406 - RNA, 19 nt, Homo sapiens
  misc_RNA (1)...(19): siRNA sense strand
acuauagcaucaaaguugu

SEQ ID NO: 1499407 - RNA, 19 nt, Homo sapiens
  misc_RNA (1)...(19): siRNA sense strand
gaccaaugucuacuuuaag

SEQ ID NO: 1499408 - RNA, 19 nt, Homo sapiens
  misc_RNA (1)...(19): siRNA sense strand
gggaggcccacagaaagaa

SEQ ID NO: 1499409 - RNA, 19 nt, Homo sapiens
  misc_RNA (1)...(19): siRNA sense strand
gcugccuccucaucgacua

SEQ ID NO: 1499410 - RNA, 19 nt, Homo sapiens
  misc_RNA (1)...(19): siRNA sense strand
ggaagcggugggaaaugga

SEQ ID NO: 1499411 - RNA, 19 nt, Homo sapiens
  misc_RNA (1)...(19): siRNA sense strand
gggugaggacgaugaugaa

SEQ ID NO: 1499412 - RNA, 19 nt, Homo sapiens
  misc_RNA (1)...(19): siRNA sense strand
aagugauguuccacaguuu

SEQ ID NO: 1499413 - RNA, 19 nt, Homo sapiens
  misc_RNA (1)...(19): siRNA sense strand
ggacuuccgccacuauagc

SEQ ID NO: 1499414 - RNA, 19 nt, Homo sapiens
  misc_RNA (1)...(19): siRNA sense strand
guaugcaugugaagcucau

SEQ ID NO: 1499415 - RNA, 19 nt, Homo sapiens
  misc_RNA (1)...(19): siRNA sense strand
gaagcggugggaaauggau

SEQ ID NO: 1499416 - RNA, 19 nt, Homo sapiens
  misc_RNA (1)...(19): siRNA sense strand
augaugaacaggaagauga

SEQ ID NO: 1499417 - RNA, 19 nt, Homo sapiens
  misc_RNA (1)...(19): siRNA sense strand
gaugaugaacaggaagaug

SEQ ID NO: 1499418 - RNA, 19 nt, Homo sapiens
  misc_RNA (1)...(19): siRNA sense strand
caaagugauguuccacagu

SEQ ID NO: 1499419 - RNA, 19 nt, Homo sapiens
  misc_RNA (1)...(19): siRNA sense strand
ugacacugcagcucaucaa

SEQ ID NO: 1499420 - RNA, 19 nt, Homo sapiens
  misc_RNA (1)...(19): siRNA sense strand
agaaguuucccaagaccaa

SEQ ID NO: 1499421 - RNA, 19 nt, Homo sapiens
  misc_RNA (1)...(19): siRNA sense strand
gcacagacaccaacuuuga

SEQ ID NO: 1499422 - RNA, 19 nt, Homo sapiens
  misc_RNA (1)...(19): siRNA sense strand
ccacauuccucauugacua

SEQ ID NO: 1499423 - RNA, 19 nt, Homo sapiens
  misc_RNA (1)...(19): siRNA sense strand
ggagccacauuccucauug

SEQ ID NO: 1499424 - RNA, 19 nt, Homo sapiens
  misc_RNA (1)...(19): siRNA sense strand
ccucugccgucaccaguua

SEQ ID NO: 1499425 - RNA, 19 nt, Homo sapiens
  misc_RNA (1)...(19): siRNA sense strand
gagccacauuccucauuga

SEQ ID NO: 1499426 - RNA, 19 nt, Homo sapiens
  misc_RNA (1)...(19): siRNA sense strand
ggagaccuguaaucgguau

SEQ ID NO: 1499427 - RNA, 19 nt, Homo sapiens
  misc_RNA (1)...(19): siRNA sense strand
gacuacauguucuuugaga

SEQ ID NO: 1499428 - RNA, 19 nt, Homo sapiens
  misc_RNA (1)...(19): siRNA sense strand
ggugaagacucgggaugaa

SEQ ID NO: 1499429 - RNA, 19 nt, Homo sapiens
  misc_RNA (1)...(19): siRNA sense strand
cgagaagcccucacagaug

SEQ ID NO: 1499430 - RNA, 19 nt, Homo sapiens
  misc_RNA (1)...(19): siRNA sense strand
ccaccucccuacccuguca

SEQ ID NO: 1499431 - RNA, 19 nt, Homo sapiens
  misc_RNA (1)...(19): siRNA sense strand
gcagauugaucagauuuug

SEQ ID NO: 1499432 - RNA, 19 nt, Homo sapiens
  misc_RNA (1)...(19): siRNA sense strand
uugacuacauguucuuuga

SEQ ID NO: 1499433 - RNA, 19 nt, Homo sapiens
  misc_RNA (1)...(19): siRNA sense strand
ccaccaggcaccaccauug

SEQ ID NO: 1499434 - RNA, 19 nt, Homo sapiens
  misc_RNA (1)...(19): siRNA sense strand
ggugcagauugaucagauu

SEQ ID NO: 1499435 - RNA, 19 nt, Homo sapiens
  misc_RNA (1)...(19): siRNA sense strand
ggaugccgaucgccagaca

SEQ ID NO: 1499436 - RNA, 19 nt, Homo sapiens
  misc_RNA (1)...(19): siRNA sense strand
ucacagaugcagaugacuu

SEQ ID NO: 1499437 - RNA, 19 nt, Homo sapiens
  misc_RNA (1)...(19): siRNA sense strand
gugcagauugaucagauuu

SEQ ID NO: 1499438 - RNA, 19 nt, Homo sapiens
  misc_RNA (1)...(19): siRNA sense strand
ccgagaagcccucacagau

SEQ ID NO: 1499439 - RNA, 19 nt, Homo sapiens
  misc_RNA (1)...(19): siRNA sense strand
uggcacagacaccaacuuu

SEQ ID NO: 1499440 - RNA, 19 nt, Homo sapiens
  misc_RNA (1)...(19): siRNA sense strand
cacagaugcagaugacuuu

SEQ ID NO: 1499441 - RNA, 19 nt, Homo sapiens
  misc_RNA (1)...(19): siRNA sense strand
gaauuccuggugcagauug

SEQ ID NO: 1499442 - RNA, 19 nt, Homo sapiens
  misc_RNA (1)...(19): siRNA sense strand
gggagccacauuccucauu

SEQ ID NO: 1499443 - RNA, 19 nt, Homo sapiens
  misc_RNA (1)...(19): siRNA sense strand
gaccuguaaucgguaugaa

SEQ ID NO: 1499444 - RNA, 19 nt, Homo sapiens
  misc_RNA (1)...(19): siRNA sense strand
ccucacagaugcagaugac

SEQ ID NO: 1499445 - RNA, 19 nt, Homo sapiens
  misc_RNA (1)...(19): siRNA sense strand
ucgaauuccuggugcagau

SEQ ID NO: 1499446 - RNA, 19 nt, Homo sapiens
  misc_RNA (1)...(19): siRNA sense strand
accgugaggugcugcguuu

SEQ ID NO: 1499447 - RNA, 19 nt, Homo sapiens
  misc_RNA (1)...(19): siRNA sense strand
ccucauugacuacauguuc

SEQ ID NO: 1499448 - RNA, 19 nt, Homo sapiens
  misc_RNA (1)...(19): siRNA sense strand
ugacuuuggccuacaguuc

SEQ ID NO: 1499449 - RNA, 19 nt, Homo sapiens
  misc_RNA (1)...(19): siRNA sense strand
ugaagacucgggaugaauc

SEQ ID NO: 1499450 - RNA, 19 nt, Homo sapiens
  misc_RNA (1)...(19): siRNA sense strand
gaaggcugagcgaguggaa

SEQ ID NO: 1499451 - RNA, 19 nt, Homo sapiens
  misc_RNA (1)...(19): siRNA sense strand
caccauuggccacgugcua

SEQ ID NO: 1499452 - RNA, 19 nt, Homo sapiens
  misc_RNA (1)...(19): siRNA sense strand
gcagggagcuugauuucua

SEQ ID NO: 1499453 - RNA, 19 nt, Homo sapiens
  misc_RNA (1)...(19): siRNA sense strand
gaggagaugugcaauguuu

SEQ ID NO: 1499454 - RNA, 19 nt, Homo sapiens
  misc_RNA (1)...(19): siRNA sense strand
caaagcagcucauuaugga

SEQ ID NO: 1499455 - RNA, 19 nt, Homo sapiens
  misc_RNA (1)...(19): siRNA sense strand
cagcauaucuguuuguuau

SEQ ID NO: 1499456 - RNA, 19 nt, Homo sapiens
  misc_RNA (1)...(19): siRNA sense strand
gaacagaagauaagaacuu

SEQ ID NO: 1499457 - RNA, 19 nt, Homo sapiens
  misc_RNA (1)...(19): siRNA sense strand
gagcuugauuucuacauuu

SEQ ID NO: 1499458 - RNA, 19 nt, Homo sapiens
  misc_RNA (1)...(19): siRNA sense strand
gaaaauggcuguugguaug

SEQ ID NO: 1499459 - RNA, 19 nt, Homo sapiens
  misc_RNA (1)...(19): siRNA sense strand
gagaggagaugugcaaugu

SEQ ID NO: 1499460 - RNA, 19 nt, Homo sapiens
  misc_RNA (1)...(19): siRNA sense strand
aaauguaucugguuugcua

SEQ ID NO: 1499461 - RNA, 19 nt, Homo sapiens
  misc_RNA (1)...(19): siRNA sense strand
acagauaccucucucaaug

SEQ ID NO: 1499462 - RNA, 19 nt, Homo sapiens
  misc_RNA (1)...(19): siRNA sense strand
ggaauuaacuucucaucac

SEQ ID NO: 1499463 - RNA, 19 nt, Homo sapiens
  misc_RNA (1)...(19): siRNA sense strand
ggagaagacugcuaugcau

SEQ ID NO: 1499464 - RNA, 19 nt, Homo sapiens
  misc_RNA (1)...(19): siRNA sense strand
ugucacaggucuugaguuu

SEQ ID NO: 1499465 - RNA, 19 nt, Homo sapiens
  misc_RNA (1)...(19): siRNA sense strand
acaauucucuguugauaga

SEQ ID NO: 1499466 - RNA, 19 nt, Homo sapiens
  misc_RNA (1)...(19): siRNA sense strand
gaaagcagaacaaccaaug

SEQ ID NO: 1499467 - RNA, 19 nt, Homo sapiens
  misc_RNA (1)...(19): siRNA sense strand
ggaacggacuagauacuuc

SEQ ID NO: 1499468 - RNA, 19 nt, Homo sapiens
  misc_RNA (1)...(19): siRNA sense strand
gucaacaucucccugagua

SEQ ID NO: 1499469 - RNA, 19 nt, Homo sapiens
  misc_RNA (1)...(19): siRNA sense strand
ggagcuugauuucuacauu

SEQ ID NO: 1499470 - RNA, 19 nt, Homo sapiens
  misc_RNA (1)...(19): siRNA sense strand
ccaggcagcuuggcuauug

SEQ ID NO: 1499471 - RNA, 19 nt, Homo sapiens
  misc_RNA (1)...(19): siRNA sense strand
ccaccuagcccuccaaaga

SEQ ID NO: 1499472 - RNA, 19 nt, Homo sapiens
  misc_RNA (1)...(19): siRNA sense strand
ggaacaugaucaaacuaga

SEQ ID NO: 1499473 - RNA, 19 nt, Homo sapiens
  misc_RNA (1)...(19): siRNA sense strand
ggagaccaguuugaagaaa

SEQ ID NO: 1499474 - RNA, 19 nt, Homo sapiens
  misc_RNA (1)...(19): siRNA sense strand
ccaggguacuauuccuuua

SEQ ID NO: 1499475 - RNA, 19 nt, Homo sapiens
  misc_RNA (1)...(19): siRNA sense strand
cagaggaacggacuagaua

SEQ ID NO: 1499476 - RNA, 19 nt, Homo sapiens
  misc_RNA (1)...(19): siRNA sense strand
aacaguaucuccagcauga

SEQ ID NO: 1499477 - RNA, 19 nt, Homo sapiens
  misc_RNA (1)...(19): siRNA sense strand
cuacuacuauguuccugua

SEQ ID NO: 1499478 - RNA, 19 nt, Homo sapiens
  misc_RNA (1)...(19): siRNA sense strand
aaacauaguggcucaaguu

SEQ ID NO: 1499479 - RNA, 19 nt, Homo sapiens
  misc_RNA (1)...(19): siRNA sense strand
ugacaguggugggaaauga

SEQ ID NO: 1499480 - RNA, 19 nt, Homo sapiens
  misc_RNA (1)...(19): siRNA sense strand
ggacugcucaugguaauug

SEQ ID NO: 1499481 - RNA, 19 nt, Homo sapiens
  misc_RNA (1)...(19): siRNA sense strand
ucaagacaaucaucuaucu

SEQ ID NO: 1499482 - RNA, 19 nt, Homo sapiens
  misc_RNA (1)...(19): siRNA sense strand
ggaauaucaucgugcuugu

SEQ ID NO: 1499483 - RNA, 19 nt, Homo sapiens
  misc_RNA (1)...(19): siRNA sense strand
gaggucauguucucuguca

SEQ ID NO: 1499484 - RNA, 19 nt, Homo sapiens
  misc_RNA (1)...(19): siRNA sense strand
caauguuggugaagacuau

SEQ ID NO: 1499485 - RNA, 19 nt, Homo sapiens
  misc_RNA (1)...(19): siRNA sense strand
gaauuaacuucucaucacu

SEQ ID NO: 1499486 - RNA, 19 nt, Homo sapiens
  misc_RNA (1)...(19): siRNA sense strand
uaauugcacuuguuguguu

SEQ ID NO: 1499487 - RNA, 19 nt, Homo sapiens
  misc_RNA (1)...(19): siRNA sense strand
gagcauugccuucauugug

SEQ ID NO: 1499488 - RNA, 19 nt, Homo sapiens
  misc_RNA (1)...(19): siRNA sense strand
uuauagaacugugcaaaga

SEQ ID NO: 1499489 - RNA, 19 nt, Homo sapiens
  misc_RNA (1)...(19): siRNA sense strand
ugagguuuguuaacacuuu

SEQ ID NO: 1499490 - RNA, 19 nt, Homo sapiens
  misc_RNA (1)...(19): siRNA sense strand
caccugaaauaucacaauu

SEQ ID NO: 1499491 - RNA, 19 nt, Homo sapiens
  misc_RNA (1)...(19): siRNA sense strand
ucagcagccucuguuauuu

SEQ ID NO: 1499492 - RNA, 19 nt, Homo sapiens
  misc_RNA (1)...(19): siRNA sense strand
caucaugggcuacuacuau

SEQ ID NO: 1499493 - RNA, 19 nt, Homo sapiens
  misc_RNA (1)...(19): siRNA sense strand
gcacugaccaggguacuau

SEQ ID NO: 1499494 - RNA, 19 nt, Homo sapiens
  misc_RNA (1)...(19): siRNA sense strand
cgacagcacuggcuagacu

SEQ ID NO: 1499495 - RNA, 19 nt, Homo sapiens
  misc_RNA (1)...(19): siRNA sense strand
gaaacauaguggcucaagu

SEQ ID NO: 1499496 - RNA, 19 nt, Homo sapiens
  misc_RNA (1)...(19): siRNA sense strand
guacagauaccucucucaa

SEQ ID NO: 1499497 - RNA, 19 nt, Homo sapiens
  misc_RNA (1)...(19): siRNA sense strand
gaacuuuucucugaauuug

SEQ ID NO: 1499498 - RNA, 19 nt, Homo sapiens
  misc_RNA (1)...(19): siRNA sense strand
gaagccaucuccgacaauc

SEQ ID NO: 1499499 - RNA, 19 nt, Homo sapiens
  misc_RNA (1)...(19): siRNA sense strand
ugcggcagcuguagagaua

SEQ ID NO: 1499500 - RNA, 19 nt, Homo sapiens
  misc_RNA (1)...(19): siRNA sense strand
gauaagcacauuccucaca

SEQ ID NO: 1499501 - RNA, 19 nt, Homo sapiens
  misc_RNA (1)...(19): siRNA sense strand
caauugcaguugggaauau

SEQ ID NO: 1499502 - RNA, 19 nt, Homo sapiens
  misc_RNA (1)...(19): siRNA sense strand
gagaagacugcuaugcauu

SEQ ID NO: 1499503 - RNA, 19 nt, Homo sapiens
  misc_RNA (1)...(19): siRNA sense strand
agacuuuggugcagcauau

SEQ ID NO: 1499504 - RNA, 19 nt, Homo sapiens
  misc_RNA (1)...(19): siRNA sense strand
acuauggugugucugcuua

SEQ ID NO: 1499505 - RNA, 19 nt, Homo sapiens
  misc_RNA (1)...(19): siRNA sense strand
gguaaaggauacagaaagc

SEQ ID NO: 1499506 - RNA, 19 nt, Homo sapiens
  misc_RNA (1)...(19): siRNA sense strand
aaugaaagcugugcugauc

SEQ ID NO: 1499507 - RNA, 19 nt, Homo sapiens
  misc_RNA (1)...(19): siRNA sense strand
gaacaugaucaaacuagag

SEQ ID NO: 1499508 - RNA, 19 nt, Homo sapiens
  misc_RNA (1)...(19): siRNA sense strand
gcagaggaacggacuagau

SEQ ID NO: 1499509 - RNA, 19 nt, Homo sapiens
  misc_RNA (1)...(19): siRNA sense strand
aagcugugcugauccugua

SEQ ID NO: 1499510 - RNA, 19 nt, Homo sapiens
  misc_RNA (1)...(19): siRNA sense strand
caugguaauugcacuuguu

SEQ ID NO: 1499511 - RNA, 19 nt, Homo sapiens
  misc_RNA (1)...(19): siRNA sense strand
ggaacaguaucuccagcau

SEQ ID NO: 1499512 - RNA, 19 nt, Homo sapiens
  misc_RNA (1)...(19): siRNA sense strand
caauuugucucucuacacu

SEQ ID NO: 1499513 - RNA, 19 nt, Homo sapiens
  misc_RNA (1)...(19): siRNA sense strand
gaagacugcuaugcauugg

SEQ ID NO: 1499514 - RNA, 19 nt, Homo sapiens
  misc_RNA (1)...(19): siRNA sense strand
acaguucaguggccuggua

SEQ ID NO: 1499515 - RNA, 19 nt, Homo sapiens
  misc_RNA (1)...(19): siRNA sense strand
gcagcauaucuguuuguua

SEQ ID NO: 1499516 - RNA, 19 nt, Homo sapiens
  misc_RNA (1)...(19): siRNA sense strand
gaugguaaaggauacagaa

SEQ ID NO: 1499517 - RNA, 19 nt, Homo sapiens
  misc_RNA (1)...(19): siRNA sense strand
acacacaguccuaucauug

SEQ ID NO: 1499518 - RNA, 19 nt, Homo sapiens
  misc_RNA (1)...(19): siRNA sense strand
acagugggccgaauucauu

SEQ ID NO: 1499519 - RNA, 19 nt, Homo sapiens
  misc_RNA (1)...(19): siRNA sense strand
cggcagcuguagagauaaa

SEQ ID NO: 1499520 - RNA, 19 nt, Homo sapiens
  misc_RNA (1)...(19): siRNA sense strand
cagcaggguucacgaugga

SEQ ID NO: 1499521 - RNA, 19 nt, Homo sapiens
  misc_RNA (1)...(19): siRNA sense strand
aggguacuauuccuuuaua

SEQ ID NO: 1499522 - RNA, 19 nt, Homo sapiens
  misc_RNA (1)...(19): siRNA sense strand
ccaaagcagcucauuaugg

SEQ ID NO: 1499523 - RNA, 19 nt, Homo sapiens
  misc_RNA (1)...(19): siRNA sense strand
gcucaaguuuucaaaugua

SEQ ID NO: 1499524 - RNA, 19 nt, Homo sapiens
  misc_RNA (1)...(19): siRNA sense strand
ucaccugucuccauugaag

SEQ ID NO: 1499525 - RNA, 19 nt, Homo sapiens
  misc_RNA (1)...(19): siRNA sense strand
ucacaggucuugaguuuuc

SEQ ID NO: 1499526 - RNA, 19 nt, Homo sapiens
  misc_RNA (1)...(19): siRNA sense strand
gaccagaugcagguucuaa

SEQ ID NO: 1499527 - RNA, 19 nt, Homo sapiens
  misc_RNA (1)...(19): siRNA sense strand
uauccaaagcagcucauua

SEQ ID NO: 1499528 - RNA, 19 nt, Homo sapiens
  misc_RNA (1)...(19): siRNA sense strand
gcugagaaauauccaaagc

SEQ ID NO: 1499529 - RNA, 19 nt, Homo sapiens
  misc_RNA (1)...(19): siRNA sense strand
uauggugugucugcuuaua

SEQ ID NO: 1499530 - RNA, 19 nt, Homo sapiens
  misc_RNA (1)...(19): siRNA sense strand
agauaccucucucaauguu

SEQ ID NO: 1499531 - RNA, 19 nt, Homo sapiens
  misc_RNA (1)...(19): siRNA sense strand
gugaagaugggaacaguau

SEQ ID NO: 1499532 - RNA, 19 nt, Homo sapiens
  misc_RNA (1)...(19): siRNA sense strand
gaucggccugagucuaaua

SEQ ID NO: 1499533 - RNA, 19 nt, Homo sapiens
  misc_RNA (1)...(19): siRNA sense strand
guagaacagaagauaagaa

SEQ ID NO: 1499534 - RNA, 19 nt, Homo sapiens
  misc_RNA (1)...(19): siRNA sense strand
gaaugaaagcugugcugau

SEQ ID NO: 1499535 - RNA, 19 nt, Homo sapiens
  misc_RNA (1)...(19): siRNA sense strand
uagaguccaucaaauccuu

SEQ ID NO: 1499536 - RNA, 19 nt, Homo sapiens
  misc_RNA (1)...(19): siRNA sense strand
gcacuggaaugaagauacc

SEQ ID NO: 1499537 - RNA, 19 nt, Homo sapiens
  misc_RNA (1)...(19): siRNA sense strand
gaauaggaauuugggguuu

SEQ ID NO: 1499538 - RNA, 19 nt, Homo sapiens
  misc_RNA (1)...(19): siRNA sense strand
cauaguggcucaaguuuuc

SEQ ID NO: 1499539 - RNA, 19 nt, Homo sapiens
  misc_RNA (1)...(19): siRNA sense strand
cuagauacuucucagucuu

SEQ ID NO: 1499540 - RNA, 19 nt, Homo sapiens
  misc_RNA (1)...(19): siRNA sense strand
gguaauugcacuuguugug

SEQ ID NO: 1499541 - RNA, 19 nt, Homo sapiens
  misc_RNA (1)...(19): siRNA sense strand
ggucuugaguuuucuuauu

SEQ ID NO: 1499542 - RNA, 19 nt, Homo sapiens
  misc_RNA (1)...(19): siRNA sense strand
ggugaagacuauggugugu

SEQ ID NO: 1499543 - RNA, 19 nt, Homo sapiens
  misc_RNA (1)...(19): siRNA sense strand
gagguuuguuaacacuuug

SEQ ID NO: 1499544 - RNA, 19 nt, Homo sapiens
  misc_RNA (1)...(19): siRNA sense strand
guaucugguuugcuauuuc

SEQ ID NO: 1499545 - RNA, 19 nt, Homo sapiens
  misc_RNA (1)...(19): siRNA sense strand
gcaaugggaagcaaaauau

SEQ ID NO: 1499546 - RNA, 19 nt, Homo sapiens
  misc_RNA (1)...(19): siRNA sense strand
gacaagugguacacacagu

SEQ ID NO: 1499547 - RNA, 19 nt, Homo sapiens
  misc_RNA (1)...(19): siRNA sense strand
ccagcaugaugguaaagga

SEQ ID NO: 1499548 - RNA, 19 nt, Homo sapiens
  misc_RNA (1)...(19): siRNA sense strand
gaacggacuagauacuucu

SEQ ID NO: 1499549 - RNA, 19 nt, Homo sapiens
  misc_RNA (1)...(19): siRNA sense strand
guggagaccaguuugaaga

SEQ ID NO: 1499550 - RNA, 19 nt, Homo sapiens
  misc_RNA (1)...(19): siRNA sense strand
gccugagucuaauagcuuu

SEQ ID NO: 1499551 - RNA, 19 nt, Homo sapiens
  misc_RNA (1)...(19): siRNA sense strand
aagaagccaucuccgacaa

SEQ ID NO: 1499552 - RNA, 19 nt, Homo sapiens
  misc_RNA (1)...(19): siRNA sense strand
gggcaucaguagaagaaua

SEQ ID NO: 1499553 - RNA, 19 nt, Homo sapiens
  misc_RNA (1)...(19): siRNA sense strand
gaagagcaccauauccuuu

SEQ ID NO: 1499554 - RNA, 19 nt, Homo sapiens
  misc_RNA (1)...(19): siRNA sense strand
gagaauaaauugggugauc

SEQ ID NO: 1499555 - RNA, 19 nt, Homo sapiens
  misc_RNA (1)...(19): siRNA sense strand
caucucaacuccaaacugu

SEQ ID NO: 1499556 - RNA, 19 nt, Homo sapiens
  misc_RNA (1)...(19): siRNA sense strand
ggauauagaagcagcagaa

SEQ ID NO: 1499557 - RNA, 19 nt, Homo sapiens
  misc_RNA (1)...(19): siRNA sense strand
gcagaaaagucacuacaga

SEQ ID NO: 1499558 - RNA, 19 nt, Homo sapiens
  misc_RNA (1)...(19): siRNA sense strand
aaaggcaucucaacuccaa

SEQ ID NO: 1499559 - RNA, 19 nt, Homo sapiens
  misc_RNA (1)...(19): siRNA sense strand
uaaauugggugaucaacac

SEQ ID NO: 1499560 - RNA, 19 nt, Homo sapiens
  misc_RNA (1)...(19): siRNA sense strand
gaauaaauugggugaucaa

SEQ ID NO: 1499561 - RNA, 19 nt, Homo sapiens
  misc_RNA (1)...(19): siRNA sense strand
ggaagagcaccauauccuu

SEQ ID NO: 1499562 - RNA, 19 nt, Homo sapiens
  misc_RNA (1)...(19): siRNA sense strand
ggccugaggugguuucucu

SEQ ID NO: 1499563 - RNA, 19 nt, Homo sapiens
  misc_RNA (1)...(19): siRNA sense strand
gcucaagaaauucgccuuu

SEQ ID NO: 1499564 - RNA, 19 nt, Homo sapiens
  misc_RNA (1)...(19): siRNA sense strand
gaccaggauucacccacuu

SEQ ID NO: 1499565 - RNA, 19 nt, Homo sapiens
  misc_RNA (1)...(19): siRNA sense strand
agaauaaauugggugauca

SEQ ID NO: 1499566 - RNA, 19 nt, Homo sapiens
  misc_RNA (1)...(19): siRNA sense strand
ggugaucaacacacagaaa

SEQ ID NO: 1499567 - RNA, 19 nt, Homo sapiens
  misc_RNA (1)...(19): siRNA sense strand
gauauagaagcagcagaaa

SEQ ID NO: 1499568 - RNA, 19 nt, Homo sapiens
  misc_RNA (1)...(19): siRNA sense strand
ggcaucaguagaagaauau

SEQ ID NO: 1499569 - RNA, 19 nt, Homo sapiens
  misc_RNA (1)...(19): siRNA sense strand
gcagaaaauaccauucaaa

SEQ ID NO: 1499570 - RNA, 19 nt, Homo sapiens
  misc_RNA (1)...(19): siRNA sense strand
caaaugggaacaguuucuu

SEQ ID NO: 1499571 - RNA, 19 nt, Homo sapiens
  misc_RNA (1)...(19): siRNA sense strand
ggaacaguuucuuuuagga

SEQ ID NO: 1499572 - RNA, 19 nt, Homo sapiens
  misc_RNA (1)...(19): siRNA sense strand
aaaugaggcacagcgauaa

SEQ ID NO: 1499573 - RNA, 19 nt, Homo sapiens
  misc_RNA (1)...(19): siRNA sense strand
gaacaguuucuuuuaggaa

SEQ ID NO: 1499574 - RNA, 19 nt, Homo sapiens
  misc_RNA (1)...(19): siRNA sense strand
aaaugggaacaguuucuuu

SEQ ID NO: 1499575 - RNA, 19 nt, Homo sapiens
  misc_RNA (1)...(19): siRNA sense strand
caaauggagaauaaauugg

SEQ ID NO: 1499576 - RNA, 19 nt, Homo sapiens
  misc_RNA (1)...(19): siRNA sense strand
aaaaugaggcacagcgaua

SEQ ID NO: 1499577 - RNA, 19 nt, Homo sapiens
  misc_RNA (1)...(19): siRNA sense strand
ccaaaugggaacaguuucu

SEQ ID NO: 1499578 - RNA, 19 nt, Homo sapiens
  misc_RNA (1)...(19): siRNA sense strand
cugaggugguuucucuuga

SEQ ID NO: 1499579 - RNA, 19 nt, Homo sapiens
  misc_RNA (1)...(19): siRNA sense strand
aaacuguugagacugcuuu

SEQ ID NO: 1499580 - RNA, 19 nt, Homo sapiens
  misc_RNA (1)...(19): siRNA sense strand
ugaggugguuucucuugag

SEQ ID NO: 1499581 - RNA, 19 nt, Homo sapiens
  misc_RNA (1)...(19): siRNA sense strand
ucacuacagaccaggauuc

SEQ ID NO: 1499582 - RNA, 19 nt, Homo sapiens
  misc_RNA (1)...(19): siRNA sense strand
acuccaaacuguugagacu

SEQ ID NO: 1499583 - RNA, 19 nt, Homo sapiens
  misc_RNA (1)...(19): siRNA sense strand
gaacuacgccaaccauuua

SEQ ID NO: 1499584 - RNA, 19 nt, Homo sapiens
  misc_RNA (1)...(19): siRNA sense strand
gaucagaaccaguuuauuu

SEQ ID NO: 1499585 - RNA, 19 nt, Homo sapiens
  misc_RNA (1)...(19): siRNA sense strand
agauggaacugguaaauua

SEQ ID NO: 1499586 - RNA, 19 nt, Homo sapiens
  misc_RNA (1)...(19): siRNA sense strand
ggacagugauauucagauu

SEQ ID NO: 1499587 - RNA, 19 nt, Homo sapiens
  misc_RNA (1)...(19): siRNA sense strand
uaucagagguuagaaguaa

SEQ ID NO: 1499588 - RNA, 19 nt, Homo sapiens
  misc_RNA (1)...(19): siRNA sense strand
cagaguaagugaaauagaa

SEQ ID NO: 1499589 - RNA, 19 nt, Homo sapiens
  misc_RNA (1)...(19): siRNA sense strand
gaaaugauaguacuugugu

SEQ ID NO: 1499590 - RNA, 19 nt, Homo sapiens
  misc_RNA (1)...(19): siRNA sense strand
ggacucaccuuguauucau

SEQ ID NO: 1499591 - RNA, 19 nt, Homo sapiens
  misc_RNA (1)...(19): siRNA sense strand
acaauuaugcccuuucuua

SEQ ID NO: 1499592 - RNA, 19 nt, Homo sapiens
  misc_RNA (1)...(19): siRNA sense strand
gcaagacuuucacucagaa

SEQ ID NO: 1499593 - RNA, 19 nt, Homo sapiens
  misc_RNA (1)...(19): siRNA sense strand
guccugaacuuaagaaaug

SEQ ID NO: 1499594 - RNA, 19 nt, Homo sapiens
  misc_RNA (1)...(19): siRNA sense strand
gauaguacuugugugaauu

SEQ ID NO: 1499595 - RNA, 19 nt, Homo sapiens
  misc_RNA (1)...(19): siRNA sense strand
aagcaggacucaccuugua

SEQ ID NO: 1499596 - RNA, 19 nt, Homo sapiens
  misc_RNA (1)...(19): siRNA sense strand
aaaaccaucuccacaauua

SEQ ID NO: 1499597 - RNA, 19 nt, Homo sapiens
  misc_RNA (1)...(19): siRNA sense strand
ggaaguuuauaaagccaaa

SEQ ID NO: 1499598 - RNA, 19 nt, Homo sapiens
  misc_RNA (1)...(19): siRNA sense strand
ggagacaauugcucuuauc

SEQ ID NO: 1499599 - RNA, 19 nt, Homo sapiens
  misc_RNA (1)...(19): siRNA sense strand
caauugcucuuauccuguu

SEQ ID NO: 1499600 - RNA, 19 nt, Homo sapiens
  misc_RNA (1)...(19): siRNA sense strand
gaaaacagaguaagugaaa

SEQ ID NO: 1499601 - RNA, 19 nt, Homo sapiens
  misc_RNA (1)...(19): siRNA sense strand
cauagaugauauugaggua

SEQ ID NO: 1499602 - RNA, 19 nt, Homo sapiens
  misc_RNA (1)...(19): siRNA sense strand
ggcaagacuuucacucaga

SEQ ID NO: 1499603 - RNA, 19 nt, Homo sapiens
  misc_RNA (1)...(19): siRNA sense strand
gggagacaauugcucuuau

SEQ ID NO: 1499604 - RNA, 19 nt, Homo sapiens
  misc_RNA (1)...(19): siRNA sense strand
gagauaagccccauaaaug

SEQ ID NO: 1499605 - RNA, 19 nt, Homo sapiens
  misc_RNA (1)...(19): siRNA sense strand
gcucuuauccuguuauagu

SEQ ID NO: 1499606 - RNA, 19 nt, Homo sapiens
  misc_RNA (1)...(19): siRNA sense strand
uuaaaccuuuccaguguaa

SEQ ID NO: 1499607 - RNA, 19 nt, Homo sapiens
  misc_RNA (1)...(19): siRNA sense strand
aauuaaaccuuuccagugu

SEQ ID NO: 1499608 - RNA, 19 nt, Homo sapiens
  misc_RNA (1)...(19): siRNA sense strand
acagugauauucagauugu

SEQ ID NO: 1499609 - RNA, 19 nt, Homo sapiens
  misc_RNA (1)...(19): siRNA sense strand
gaacaaauuaagagaagag

SEQ ID NO: 1499610 - RNA, 19 nt, Homo sapiens
  misc_RNA (1)...(19): siRNA sense strand
ugagagaaauguacaagac

SEQ ID NO: 1499611 - RNA, 19 nt, Homo sapiens
  misc_RNA (1)...(19): siRNA sense strand
caagcuguccugaacuuaa

SEQ ID NO: 1499612 - RNA, 19 nt, Homo sapiens
  misc_RNA (1)...(19): siRNA sense strand
ggagauucaauguuacaaa

SEQ ID NO: 1499613 - RNA, 19 nt, Homo sapiens
  misc_RNA (1)...(19): siRNA sense strand
gagauggaacugguaaauu

SEQ ID NO: 1499614 - RNA, 19 nt, Homo sapiens
  misc_RNA (1)...(19): siRNA sense strand
gcaggacucaccuuguauu

SEQ ID NO: 1499615 - RNA, 19 nt, Homo sapiens
  misc_RNA (1)...(19): siRNA sense strand
ggugaaaaucuccauauua

SEQ ID NO: 1499616 - RNA, 19 nt, Homo sapiens
  misc_RNA (1)...(19): siRNA sense strand
gauauggaggacagugaua

SEQ ID NO: 1499617 - RNA, 19 nt, Homo sapiens
  misc_RNA (1)...(19): siRNA sense strand
aacaaccaauggauaguaa

SEQ ID NO: 1499618 - RNA, 19 nt, Homo sapiens
  misc_RNA (1)...(19): siRNA sense strand
cagaugagccacauuguag

SEQ ID NO: 1499619 - RNA, 19 nt, Homo sapiens
  misc_RNA (1)...(19): siRNA sense strand
uagaugauauugagguaca

SEQ ID NO: 1499620 - RNA, 19 nt, Homo sapiens
  misc_RNA (1)...(19): siRNA sense strand
ugauaguacuugugugaau

SEQ ID NO: 1499621 - RNA, 19 nt, Homo sapiens
  misc_RNA (1)...(19): siRNA sense strand
uauucgagguguagacaaa

SEQ ID NO: 1499622 - RNA, 19 nt, Homo sapiens
  misc_RNA (1)...(19): siRNA sense strand
aaacaaccaauggauagua

SEQ ID NO: 1499623 - RNA, 19 nt, Homo sapiens
  misc_RNA (1)...(19): siRNA sense strand
ucagaugagccacauugua

SEQ ID NO: 1499624 - RNA, 19 nt, Homo sapiens
  misc_RNA (1)...(19): siRNA sense strand
gaugagccacauuguagaa

SEQ ID NO: 1499625 - RNA, 19 nt, Homo sapiens
  misc_RNA (1)...(19): siRNA sense strand
caaccuucaucgacacaug

SEQ ID NO: 1499626 - RNA, 19 nt, Homo sapiens
  misc_RNA (1)...(19): siRNA sense strand
ccacaauuaugcccuuucu

SEQ ID NO: 1499627 - RNA, 19 nt, Homo sapiens
  misc_RNA (1)...(19): siRNA sense strand
gaacccacugcuuuacauu

SEQ ID NO: 1499628 - RNA, 19 nt, Homo sapiens
  misc_RNA (1)...(19): siRNA sense strand
gugcuggaauucccugaga

SEQ ID NO: 1499629 - RNA, 19 nt, Homo sapiens
  misc_RNA (1)...(19): siRNA sense strand
agaacuacgccaaccauuu

SEQ ID NO: 1499630 - RNA, 19 nt, Homo sapiens
  misc_RNA (1)...(19): siRNA sense strand
caauuaugcccuuucuuau

SEQ ID NO: 1499631 - RNA, 19 nt, Homo sapiens
  misc_RNA (1)...(19): siRNA sense strand
gauaaauucaacuguggaa

SEQ ID NO: 1499632 - RNA, 19 nt, Homo sapiens
  misc_RNA (1)...(19): siRNA sense strand
gaaccaguuuauuucuucu

SEQ ID NO: 1499633 - RNA, 19 nt, Homo sapiens
  misc_RNA (1)...(19): siRNA sense strand
gauguuacaguucucauag

SEQ ID NO: 1499634 - RNA, 19 nt, Homo sapiens
  misc_RNA (1)...(19): siRNA sense strand
cagcacucccugauaaauu

SEQ ID NO: 1499635 - RNA, 19 nt, Homo sapiens
  misc_RNA (1)...(19): siRNA sense strand
aaagaucagaaccaguuua

SEQ ID NO: 1499636 - RNA, 19 nt, Homo sapiens
  misc_RNA (1)...(19): siRNA sense strand
ggaggacagugauauucag

SEQ ID NO: 1499637 - RNA, 19 nt, Homo sapiens
  misc_RNA (1)...(19): siRNA sense strand
gugaaaaucuccauauuac

SEQ ID NO: 1499638 - RNA, 19 nt, Homo sapiens
  misc_RNA (1)...(19): siRNA sense strand
ugaggaaacaccuuaaaca

SEQ ID NO: 1499639 - RNA, 19 nt, Homo sapiens
  misc_RNA (1)...(19): siRNA sense strand
gaggaaacaccuuaaacag

SEQ ID NO: 1499640 - RNA, 19 nt, Homo sapiens
  misc_RNA (1)...(19): siRNA sense strand
gaagacaguauggauaugg

SEQ ID NO: 1499641 - RNA, 19 nt, Homo sapiens
  misc_RNA (1)...(19): siRNA sense strand
ggcccaagcuguccugaac

SEQ ID NO: 1499642 - RNA, 19 nt, Homo sapiens
  misc_RNA (1)...(19): siRNA sense strand
uaaagggugucagccacaa

SEQ ID NO: 1499643 - RNA, 19 nt, Homo sapiens
  misc_RNA (1)...(19): siRNA sense strand
gcuuugauaaugccaauga

SEQ ID NO: 1499644 - RNA, 19 nt, Homo sapiens
  misc_RNA (1)...(19): siRNA sense strand
gauaagccccauaaaugua

SEQ ID NO: 1499645 - RNA, 19 nt, Homo sapiens
  misc_RNA (1)...(19): siRNA sense strand
ggagauaagccccauaaau

SEQ ID NO: 1499646 - RNA, 19 nt, Homo sapiens
  misc_RNA (1)...(19): siRNA sense strand
cuucuuaagagaccaauuu

SEQ ID NO: 1499647 - RNA, 19 nt, Homo sapiens
  misc_RNA (1)...(19): siRNA sense strand
caucaccagugcccaaagu

SEQ ID NO: 1499648 - RNA, 19 nt, Homo sapiens
  misc_RNA (1)...(19): siRNA sense strand
guacagggacauaaaauug

SEQ ID NO: 1499649 - RNA, 19 nt, Homo sapiens
  misc_RNA (1)...(19): siRNA sense strand
ucagaucuccuucacuuca

SEQ ID NO: 1499650 - RNA, 19 nt, Homo sapiens
  misc_RNA (1)...(19): siRNA sense strand
cuucugaacccacugcuuu

SEQ ID NO: 1499651 - RNA, 19 nt, Homo sapiens
  misc_RNA (1)...(19): siRNA sense strand
ggauguaucagagguuaga

SEQ ID NO: 1499652 - RNA, 19 nt, Homo sapiens
  misc_RNA (1)...(19): siRNA sense strand
gauaaugccaaugagagaa

SEQ ID NO: 1499653 - RNA, 19 nt, Homo sapiens
  misc_RNA (1)...(19): siRNA sense strand
ucagaaguguuccuuacag

SEQ ID NO: 1499654 - RNA, 19 nt, Homo sapiens
  misc_RNA (1)...(19): siRNA sense strand
ucucagaaguguuccuuac

SEQ ID NO: 1499655 - RNA, 19 nt, Homo sapiens
  misc_RNA (1)...(19): siRNA sense strand
gcgugugcaugccggaauu

SEQ ID NO: 1499656 - RNA, 19 nt, Homo sapiens
  misc_RNA (1)...(19): siRNA sense strand
caccagugcccaaagugua

SEQ ID NO: 1499657 - RNA, 19 nt, Homo sapiens
  misc_RNA (1)...(19): siRNA sense strand
aggaucaucuuaaccuuca

SEQ ID NO: 1499658 - RNA, 19 nt, Homo sapiens
  misc_RNA (1)...(19): siRNA sense strand
ugagguacagggacauaaa

SEQ ID NO: 1499659 - RNA, 19 nt, Homo sapiens
  misc_RNA (1)...(19): siRNA sense strand
ccacugcuuuacauucauc

SEQ ID NO: 1499660 - RNA, 19 nt, Homo sapiens
  misc_RNA (1)...(19): siRNA sense strand
auaguggugugcuggaauu

SEQ ID NO: 1499661 - RNA, 19 nt, Homo sapiens
  misc_RNA (1)...(19): siRNA sense strand
ccaaaacaaccaauggaua

SEQ ID NO: 1499662 - RNA, 19 nt, Homo sapiens
  misc_RNA (1)...(19): siRNA sense strand
aaugauaguacuuguguga

SEQ ID NO: 1499663 - RNA, 19 nt, Homo sapiens
  misc_RNA (1)...(19): siRNA sense strand
cccaagcuguccugaacuu

SEQ ID NO: 1499664 - RNA, 19 nt, Homo sapiens
  misc_RNA (1)...(19): siRNA sense strand
uguaaaaucugugggaaaa

SEQ ID NO: 1499665 - RNA, 19 nt, Homo sapiens
  misc_RNA (1)...(19): siRNA sense strand
ggagaacuacgccaaccau

SEQ ID NO: 1499666 - RNA, 19 nt, Homo sapiens
  misc_RNA (1)...(19): siRNA sense strand
ugaacccacugcuuuacau

SEQ ID NO: 1499667 - RNA, 19 nt, Homo sapiens
  misc_RNA (1)...(19): siRNA sense strand
cagaucuccuucacuucaa

SEQ ID NO: 1499668 - RNA, 19 nt, Homo sapiens
  misc_RNA (1)...(19): siRNA sense strand
gcggcaagacuuucacuca

SEQ ID NO: 1499669 - RNA, 19 nt, Homo sapiens
  misc_RNA (1)...(19): siRNA sense strand
gagaacuacgccaaccauu

SEQ ID NO: 1499670 - RNA, 19 nt, Homo sapiens
  misc_RNA (1)...(19): siRNA sense strand
gaaaaucuccauauuacag

SEQ ID NO: 1499671 - RNA, 19 nt, Homo sapiens
  misc_RNA (1)...(19): siRNA sense strand
ucugaagacaguauggaua

SEQ ID NO: 1499672 - RNA, 19 nt, Homo sapiens
  misc_RNA (1)...(19): siRNA sense strand
ugaagacaguauggauaug

SEQ ID NO: 1499673 - RNA, 19 nt, Homo sapiens
  misc_RNA (1)...(19): siRNA sense strand
auuaugcccuuucuuauac

SEQ ID NO: 1499674 - RNA, 19 nt, Homo sapiens
  misc_RNA (1)...(19): siRNA sense strand
ccaguuuauuucuucugaa

SEQ ID NO: 1499675 - RNA, 19 nt, Homo sapiens
  misc_RNA (1)...(19): siRNA sense strand
caaccaauggauaguaaag

SEQ ID NO: 1499676 - RNA, 19 nt, Homo sapiens
  misc_RNA (1)...(19): siRNA sense strand
ccaaugagagaaauguaca

SEQ ID NO: 1499677 - RNA, 19 nt, Homo sapiens
  misc_RNA (1)...(19): siRNA sense strand
cagcuuugauaaugccaau

SEQ ID NO: 1499678 - RNA, 19 nt, Homo sapiens
  misc_RNA (1)...(19): siRNA sense strand
ucagauuguuaagguagaa

SEQ ID NO: 1499679 - RNA, 19 nt, Homo sapiens
  misc_RNA (1)...(19): siRNA sense strand
ugauguuacaguucucaua

SEQ ID NO: 1499680 - RNA, 19 nt, Homo sapiens
  misc_RNA (1)...(19): siRNA sense strand
guaucagagguuagaagua

SEQ ID NO: 1499681 - RNA, 19 nt, Homo sapiens
  misc_RNA (1)...(19): siRNA sense strand
gaggacagugauauucaga

SEQ ID NO: 1499682 - RNA, 19 nt, Homo sapiens
  misc_RNA (1)...(19): siRNA sense strand
caaacucuuuaugugucua

SEQ ID NO: 1499683 - RNA, 19 nt, Homo sapiens
  misc_RNA (1)...(19): siRNA sense strand
guacggaccugcaucauga

SEQ ID NO: 1499684 - RNA, 19 nt, Homo sapiens
  misc_RNA (1)...(19): siRNA sense strand
gcaaagaccuucgggagaa

SEQ ID NO: 1499685 - RNA, 19 nt, Homo sapiens
  misc_RNA (1)...(19): siRNA sense strand
ggaauggccuggaagagaa

SEQ ID NO: 1499686 - RNA, 19 nt, Homo sapiens
  misc_RNA (1)...(19): siRNA sense strand
gcugugaccucuuccagaa

SEQ ID NO: 1499687 - RNA, 19 nt, Homo sapiens
  misc_RNA (1)...(19): siRNA sense strand
ggaccugcaucaugaacaa

SEQ ID NO: 1499688 - RNA, 19 nt, Homo sapiens
  misc_RNA (1)...(19): siRNA sense strand
gcuucugacucaaugcuua

SEQ ID NO: 1499689 - RNA, 19 nt, Homo sapiens
  misc_RNA (1)...(19): siRNA sense strand
gccacaaguucccgaauga

SEQ ID NO: 1499690 - RNA, 19 nt, Homo sapiens
  misc_RNA (1)...(19): siRNA sense strand
cgacaacuauugccggaau

SEQ ID NO: 1499691 - RNA, 19 nt, Homo sapiens
  misc_RNA (1)...(19): siRNA sense strand
cagaccaggugcaguuuga

SEQ ID NO: 1499692 - RNA, 19 nt, Homo sapiens
  misc_RNA (1)...(19): siRNA sense strand
gcagaucgagcgagaguuc

SEQ ID NO: 1499693 - RNA, 19 nt, Homo sapiens
  misc_RNA (1)...(19): siRNA sense strand
guaaugacacaguccuaaa

SEQ ID NO: 1499694 - RNA, 19 nt, Homo sapiens
  misc_RNA (1)...(19): siRNA sense strand
uaccagauccggcguugua

SEQ ID NO: 1499695 - RNA, 19 nt, Homo sapiens
  misc_RNA (1)...(19): siRNA sense strand
ggcagaugcugaagagugu

SEQ ID NO: 1499696 - RNA, 19 nt, Homo sapiens
  misc_RNA (1)...(19): siRNA sense strand
ccaaagguacggguaauga

SEQ ID NO: 1499697 - RNA, 19 nt, Homo sapiens
  misc_RNA (1)...(19): siRNA sense strand
acagucagcuugcggaauc

SEQ ID NO: 1499698 - RNA, 19 nt, Homo sapiens
  misc_RNA (1)...(19): siRNA sense strand
caagaggccacaacuguca

SEQ ID NO: 1499699 - RNA, 19 nt, Homo sapiens
  misc_RNA (1)...(19): siRNA sense strand
gaccaaagguacggguaau

SEQ ID NO: 1499700 - RNA, 19 nt, Homo sapiens
  misc_RNA (1)...(19): siRNA sense strand
gcaggaggauguggcagau

SEQ ID NO: 1499701 - RNA, 19 nt, Homo sapiens
  misc_RNA (1)...(19): siRNA sense strand
gccaagaggccacaacugu

SEQ ID NO: 1499702 - RNA, 19 nt, Homo sapiens
  misc_RNA (1)...(19): siRNA sense strand
ccagaagaaagacuacgua

SEQ ID NO: 1499703 - RNA, 19 nt, Homo sapiens
  misc_RNA (1)...(19): siRNA sense strand
gguaaugacacaguccuaa

SEQ ID NO: 1499704 - RNA, 19 nt, Homo sapiens
  misc_RNA (1)...(19): siRNA sense strand
ucucuaaccaggaguguaa

SEQ ID NO: 1499705 - RNA, 19 nt, Homo sapiens
  misc_RNA (1)...(19): siRNA sense strand
gcgugugucuggugcaaug

SEQ ID NO: 1499706 - RNA, 19 nt, Homo sapiens
  misc_RNA (1)...(19): siRNA sense strand
aagccgcaguucacguuua

SEQ ID NO: 1499707 - RNA, 19 nt, Homo sapiens
  misc_RNA (1)...(19): siRNA sense strand
ccucaucagcaccgauuua

SEQ ID NO: 1499708 - RNA, 19 nt, Homo sapiens
  misc_RNA (1)...(19): siRNA sense strand
ccacaacugucagcugcuu

SEQ ID NO: 1499709 - RNA, 19 nt, Homo sapiens
  misc_RNA (1)...(19): siRNA sense strand
ccagagcugcggcaucaaa

SEQ ID NO: 1499710 - RNA, 19 nt, Homo sapiens
  misc_RNA (1)...(19): siRNA sense strand
gagcggccauggugcuaca

SEQ ID NO: 1499711 - RNA, 19 nt, Homo sapiens
  misc_RNA (1)...(19): siRNA sense strand
agagaucugugacccugaa

SEQ ID NO: 1499712 - RNA, 19 nt, Homo sapiens
  misc_RNA (1)...(19): siRNA sense strand
gcaccgauuuacgccagaa

SEQ ID NO: 1499713 - RNA, 19 nt, Homo sapiens
  misc_RNA (1)...(19): siRNA sense strand
aauguggccuugcugaaug

SEQ ID NO: 1499714 - RNA, 19 nt, Homo sapiens
  misc_RNA (1)...(19): siRNA sense strand
ggauguggcagaugcugaa

SEQ ID NO: 1499715 - RNA, 19 nt, Homo sapiens
  misc_RNA (1)...(19): siRNA sense strand
gcugugggcccuuaaugga

SEQ ID NO: 1499716 - RNA, 19 nt, Homo sapiens
  misc_RNA (1)...(19): siRNA sense strand
augcacaacuggaggagaa

SEQ ID NO: 1499717 - RNA, 19 nt, Homo sapiens
  misc_RNA (1)...(19): siRNA sense strand
ggagguccuuggugcuaca

SEQ ID NO: 1499718 - RNA, 19 nt, Homo sapiens
  misc_RNA (1)...(19): siRNA sense strand
aaccaggaguguaacauca

SEQ ID NO: 1499719 - RNA, 19 nt, Homo sapiens
  misc_RNA (1)...(19): siRNA sense strand
ugcugaaugucaucucuaa

SEQ ID NO: 1499720 - RNA, 19 nt, Homo sapiens
  misc_RNA (1)...(19): siRNA sense strand
uaaugacacaguccuaaau

SEQ ID NO: 1499721 - RNA, 19 nt, Homo sapiens
  misc_RNA (1)...(19): siRNA sense strand
gggaccaagugugagauug

SEQ ID NO: 1499722 - RNA, 19 nt, Homo sapiens
  misc_RNA (1)...(19): siRNA sense strand
ggugcaauggcgaggaaua

SEQ ID NO: 1499723 - RNA, 19 nt, Homo sapiens
  misc_RNA (1)...(19): siRNA sense strand
caacugcuggguccuggaa

SEQ ID NO: 1499724 - RNA, 19 nt, Homo sapiens
  misc_RNA (1)...(19): siRNA sense strand
gggcccacuugccugcuuu

SEQ ID NO: 1499725 - RNA, 19 nt, Homo sapiens
  misc_RNA (1)...(19): siRNA sense strand
uaaauguggccuugcugaa

SEQ ID NO: 1499726 - RNA, 19 nt, Homo sapiens
  misc_RNA (1)...(19): siRNA sense strand
gguccuuggugcuacacaa

SEQ ID NO: 1499727 - RNA, 19 nt, Homo sapiens
  misc_RNA (1)...(19): siRNA sense strand
gaccaagugugagauugca

SEQ ID NO: 1499728 - RNA, 19 nt, Homo sapiens
  misc_RNA (1)...(19): siRNA sense strand
ccacuccugcugcuucuga

SEQ ID NO: 1499729 - RNA, 19 nt, Homo sapiens
  misc_RNA (1)...(19): siRNA sense strand
ucacgcgugucucuguguu

SEQ ID NO: 1499730 - RNA, 19 nt, Homo sapiens
  misc_RNA (1)...(19): siRNA sense strand
gaggguggaucggcuggau

SEQ ID NO: 1499731 - RNA, 19 nt, Homo sapiens
  misc_RNA (1)...(19): siRNA sense strand
cgaaugaucacaaguacac

SEQ ID NO: 1499732 - RNA, 19 nt, Homo sapiens
  misc_RNA (1)...(19): siRNA sense strand
ccaggaguguaacaucaag

SEQ ID NO: 1499733 - RNA, 19 nt, Homo sapiens
  misc_RNA (1)...(19): siRNA sense strand
ugaaugucaucucuaacca

SEQ ID NO: 1499734 - RNA, 19 nt, Homo sapiens
  misc_RNA (1)...(19): siRNA sense strand
gaccaggugcaguuugaga

SEQ ID NO: 1499735 - RNA, 19 nt, Homo sapiens
  misc_RNA (1)...(19): siRNA sense strand
cggaauggccuggaagaga

SEQ ID NO: 1499736 - RNA, 19 nt, Homo sapiens
  misc_RNA (1)...(19): siRNA sense strand
uuccagagcugcggcauca

SEQ ID NO: 1499737 - RNA, 19 nt, Homo sapiens
  misc_RNA (1)...(19): siRNA sense strand
gcagcgcucgccauugaau

SEQ ID NO: 1499738 - RNA, 19 nt, Homo sapiens
  misc_RNA (1)...(19): siRNA sense strand
ggucuggacgacaacuauu

SEQ ID NO: 1499739 - RNA, 19 nt, Homo sapiens
  misc_RNA (1)...(19): siRNA sense strand
ccagggaccaagugugaga

SEQ ID NO: 1499740 - RNA, 19 nt, Homo sapiens
  misc_RNA (1)...(19): siRNA sense strand
acaaguucccgaaugauca

SEQ ID NO: 1499741 - RNA, 19 nt, Homo sapiens
  misc_RNA (1)...(19): siRNA sense strand
uaaccaggaguguaacauc

SEQ ID NO: 1499742 - RNA, 19 nt, Homo sapiens
  misc_RNA (1)...(19): siRNA sense strand
caugggcccuggugcuaca

SEQ ID NO: 1499743 - RNA, 19 nt, Homo sapiens
  misc_RNA (1)...(19): siRNA sense strand
accaaggucuggacgacaa

SEQ ID NO: 1499744 - RNA, 19 nt, Homo sapiens
  misc_RNA (1)...(19): siRNA sense strand
ggaccaagugugagauugc

SEQ ID NO: 1499745 - RNA, 19 nt, Homo sapiens
  misc_RNA (1)...(19): siRNA sense strand
agaccaaagguacggguaa

SEQ ID NO: 1499746 - RNA, 19 nt, Homo sapiens
  misc_RNA (1)...(19): siRNA sense strand
ucccgaaugaucacaagua

SEQ ID NO: 1499747 - RNA, 19 nt, Homo sapiens
  misc_RNA (1)...(19): siRNA sense strand
gacgugugcgggagaguga

SEQ ID NO: 1499748 - RNA, 19 nt, Homo sapiens
  misc_RNA (1)...(19): siRNA sense strand
gcaacucacccuggacagu

SEQ ID NO: 1499749 - RNA, 19 nt, Homo sapiens
  misc_RNA (1)...(19): siRNA sense strand
cgaaccgcaugcacaacug

SEQ ID NO: 1499750 - RNA, 19 nt, Homo sapiens
  misc_RNA (1)...(19): siRNA sense strand
ggccuuggcaggaggaugu

SEQ ID NO: 1499751 - RNA, 19 nt, Homo sapiens
  misc_RNA (1)...(19): siRNA sense strand
cggccauggugcuacacua

SEQ ID NO: 1499752 - RNA, 19 nt, Homo sapiens
  misc_RNA (1)...(19): siRNA sense strand
acaagccgcaguucacguu

SEQ ID NO: 1499753 - RNA, 19 nt, Homo sapiens
  misc_RNA (1)...(19): siRNA sense strand
gcgugucucuguguuugug

SEQ ID NO: 1499754 - RNA, 19 nt, Homo sapiens
  misc_RNA (1)...(19): siRNA sense strand
guacggguaaugacacagu

SEQ ID NO: 1499755 - RNA, 19 nt, Homo sapiens
  misc_RNA (1)...(19): siRNA sense strand
gggcaaguuccucgaccaa

SEQ ID NO: 1499756 - RNA, 19 nt, Homo sapiens
  misc_RNA (1)...(19): siRNA sense strand
aaagguacggguaaugaca

SEQ ID NO: 1499757 - RNA, 19 nt, Homo sapiens
  misc_RNA (1)...(19): siRNA sense strand
gaucugugacccugaacca

SEQ ID NO: 1499758 - RNA, 19 nt, Homo sapiens
  misc_RNA (1)...(19): siRNA sense strand
caaagaccuucgggagaac

SEQ ID NO: 1499759 - RNA, 19 nt, Homo sapiens
  misc_RNA (1)...(19): siRNA sense strand
acgcgcaaaucccucauca

SEQ ID NO: 1499760 - RNA, 19 nt, Homo sapiens
  misc_RNA (1)...(19): siRNA sense strand
gacaacuauugccggaauc

SEQ ID NO: 1499761 - RNA, 19 nt, Homo sapiens
  misc_RNA (1)...(19): siRNA sense strand
uuugagaaguguggcaaga

SEQ ID NO: 1499762 - RNA, 19 nt, Homo sapiens
  misc_RNA (1)...(19): siRNA sense strand
uggacuggauucacaaggu

SEQ ID NO: 1499763 - RNA, 19 nt, Homo sapiens
  misc_RNA (1)...(19): siRNA sense strand
agccacaaguucccgaaug

SEQ ID NO: 1499764 - RNA, 19 nt, Homo sapiens
  misc_RNA (1)...(19): siRNA sense strand
ggaugucgcugucaacuuc

SEQ ID NO: 1499765 - RNA, 19 nt, Homo sapiens
  misc_RNA (1)...(19): siRNA sense strand
ucacccagcugcagcacaa

SEQ ID NO: 1499766 - RNA, 19 nt, Homo sapiens
  misc_RNA (1)...(19): siRNA sense strand
agaaggaugugaaggucuu

SEQ ID NO: 1499767 - RNA, 19 nt, Homo sapiens
  misc_RNA (1)...(19): siRNA sense strand
ggagcaagguguggacagu

SEQ ID NO: 1499768 - RNA, 19 nt, Homo sapiens
  misc_RNA (1)...(19): siRNA sense strand
guuccaggcccucugcuuu

SEQ ID NO: 1499769 - RNA, 19 nt, Homo sapiens
  misc_RNA (1)...(19): siRNA sense strand
ucaagaaggaugugaaggu

SEQ ID NO: 1499770 - RNA, 19 nt, Homo sapiens
  misc_RNA (1)...(19): siRNA sense strand
uggagcaucugcacaugga

SEQ ID NO: 1499771 - RNA, 19 nt, Homo sapiens
  misc_RNA (1)...(19): siRNA sense strand
uggccaagcuccggcagaa

SEQ ID NO: 1499772 - RNA, 19 nt, Homo sapiens
  misc_RNA (1)...(19): siRNA sense strand
gagcaagguguggacaguu

SEQ ID NO: 1499773 - RNA, 19 nt, Homo sapiens
  misc_RNA (1)...(19): siRNA sense strand
caggcccucugcuuuguca

SEQ ID NO: 1499774 - RNA, 19 nt, Homo sapiens
  misc_RNA (1)...(19): siRNA sense strand
gcccacgcccuacaagugu

SEQ ID NO: 1499775 - RNA, 19 nt, Homo sapiens
  misc_RNA (1)...(19): siRNA sense strand
agcaagguguggacaguuc

SEQ ID NO: 1499776 - RNA, 19 nt, Homo sapiens
  misc_RNA (1)...(19): siRNA sense strand
gaaccucaaugaagaugau

SEQ ID NO: 1499777 - RNA, 19 nt, Homo sapiens
  misc_RNA (1)...(19): siRNA sense strand
aagagaagguggagaggaa

SEQ ID NO: 1499778 - RNA, 19 nt, Homo sapiens
  misc_RNA (1)...(19): siRNA sense strand
caagggauauaacaaguac

SEQ ID NO: 1499779 - RNA, 19 nt, Homo sapiens
  misc_RNA (1)...(19): siRNA sense strand
gcucccagcucuacuccuu

SEQ ID NO: 1499780 - RNA, 19 nt, Homo sapiens
  misc_RNA (1)...(19): siRNA sense strand
gcauguacaagggauauaa

SEQ ID NO: 1499781 - RNA, 19 nt, Homo sapiens
  misc_RNA (1)...(19): siRNA sense strand
ugcagaaccucaaugaaga

SEQ ID NO: 1499782 - RNA, 19 nt, Homo sapiens
  misc_RNA (1)...(19): siRNA sense strand
guacaagggauauaacaag

SEQ ID NO: 1499783 - RNA, 19 nt, Homo sapiens
  misc_RNA (1)...(19): siRNA sense strand
ggaccugguuaggguguau

SEQ ID NO: 1499784 - RNA, 19 nt, Homo sapiens
  misc_RNA (1)...(19): siRNA sense strand
uacaagggauauaacaagu

SEQ ID NO: 1499785 - RNA, 19 nt, Homo sapiens
  misc_RNA (1)...(19): siRNA sense strand
ccaaggaggaccacacauc

SEQ ID NO: 1499786 - RNA, 19 nt, Homo sapiens
  misc_RNA (1)...(19): siRNA sense strand
ccaugcagaaccucaauga

SEQ ID NO: 1499787 - RNA, 19 nt, Homo sapiens
  misc_RNA (1)...(19): siRNA sense strand
gcucagcagcccucacuuc

SEQ ID NO: 1499788 - RNA, 19 nt, Homo sapiens
  misc_RNA (1)...(19): siRNA sense strand
gagcauguacaagggauau

SEQ ID NO: 1499789 - RNA, 19 nt, Homo sapiens
  misc_RNA (1)...(19): siRNA sense strand
gggcuccuccuggaagaua

SEQ ID NO: 1499790 - RNA, 19 nt, Homo sapiens
  misc_RNA (1)...(19): siRNA sense strand
gcagaaccucaaugaagau

SEQ ID NO: 1499791 - RNA, 19 nt, Homo sapiens
  misc_RNA (1)...(19): siRNA sense strand
acaagggauauaacaagua

SEQ ID NO: 1499792 - RNA, 19 nt, Homo sapiens
  misc_RNA (1)...(19): siRNA sense strand
caguguggguccuggauuc

SEQ ID NO: 1499793 - RNA, 19 nt, Homo sapiens
  misc_RNA (1)...(19): siRNA sense strand
caugcugggugcugucuuc

SEQ ID NO: 1499794 - RNA, 19 nt, Homo sapiens
  misc_RNA (1)...(19): siRNA sense strand
gacaguacgacacgucaug

SEQ ID NO: 1499795 - RNA, 19 nt, Homo sapiens
  misc_RNA (1)...(19): siRNA sense strand
uacgacacgucaugugaga

SEQ ID NO: 1499796 - RNA, 19 nt, Homo sapiens
  misc_RNA (1)...(19): siRNA sense strand
gagaagguggagaggaaug

SEQ ID NO: 1499797 - RNA, 19 nt, Homo sapiens
  misc_RNA (1)...(19): siRNA sense strand
agccacaccucccaucuuc

SEQ ID NO: 1499798 - RNA, 19 nt, Homo sapiens
  misc_RNA (1)...(19): siRNA sense strand
gaccaagggagaagagaag

SEQ ID NO: 1499799 - RNA, 19 nt, Homo sapiens
  misc_RNA (1)...(19): siRNA sense strand
cugguuaggguguauguuu

SEQ ID NO: 1499800 - RNA, 19 nt, Homo sapiens
  misc_RNA (1)...(19): siRNA sense strand
acaguguggugucaguaug

SEQ ID NO: 1499801 - RNA, 19 nt, Homo sapiens
  misc_RNA (1)...(19): siRNA sense strand
gcaauuacaaccccaagga

SEQ ID NO: 1499802 - RNA, 19 nt, Homo sapiens
  misc_RNA (1)...(19): siRNA sense strand
ggugaacccugggcgaaac

SEQ ID NO: 1499803 - RNA, 19 nt, Homo sapiens
  misc_RNA (1)...(19): siRNA sense strand
aguaugagagcauguacaa

SEQ ID NO: 1499804 - RNA, 19 nt, Homo sapiens
  misc_RNA (1)...(19): siRNA sense strand
ggaucuuacuggugcaaaa

SEQ ID NO: 1499805 - RNA, 19 nt, Homo sapiens
  misc_RNA (1)...(19): siRNA sense strand
gcaagcggguuguuauuga

SEQ ID NO: 1499806 - RNA, 19 nt, Homo sapiens
  misc_RNA (1)...(19): siRNA sense strand
ggagcaagcggguuguuau

SEQ ID NO: 1499807 - RNA, 19 nt, Homo sapiens
  misc_RNA (1)...(19): siRNA sense strand
caagcggguuguuauugaa

SEQ ID NO: 1499808 - RNA, 19 nt, Homo sapiens
  misc_RNA (1)...(19): siRNA sense strand
gaagaugauaggauugaug

SEQ ID NO: 1499809 - RNA, 19 nt, Homo sapiens
  misc_RNA (1)...(19): siRNA sense strand
gagcaagcggguuguuauu

SEQ ID NO: 1499810 - RNA, 19 nt, Homo sapiens
  misc_RNA (1)...(19): siRNA sense strand
gcaggacaccaacaacuuc

SEQ ID NO: 1499811 - RNA, 19 nt, Homo sapiens
  misc_RNA (1)...(19): siRNA sense strand
ggacaccaacaacuucuuc

SEQ ID NO: 1499812 - RNA, 19 nt, Homo sapiens
  misc_RNA (1)...(19): siRNA sense strand
ggguuguuauugaagauga

SEQ ID NO: 1499813 - RNA, 19 nt, Homo sapiens
  misc_RNA (1)...(19): siRNA sense strand
aagaugauaggauugauga

SEQ ID NO: 1499814 - RNA, 19 nt, Homo sapiens
  misc_RNA (1)...(19): siRNA sense strand
ggauugaugacgugcugaa

SEQ ID NO: 1499815 - RNA, 19 nt, Homo sapiens
  misc_RNA (1)...(19): siRNA sense strand
cggagcaagcggguuguua

SEQ ID NO: 1499816 - RNA, 19 nt, Homo sapiens
  misc_RNA (1)...(19): siRNA sense strand
cgacgugggccagaucuuc

SEQ ID NO: 1499817 - RNA, 19 nt, Homo sapiens
  misc_RNA (1)...(19): siRNA sense strand
gcggguuguuauugaagau

SEQ ID NO: 1499818 - RNA, 19 nt, Homo sapiens
  misc_RNA (1)...(19): siRNA sense strand
ugaagaugauaggauugau

SEQ ID NO: 1499819 - RNA, 19 nt, Homo sapiens
  misc_RNA (1)...(19): siRNA sense strand
gaagagaaagcuaauaaga

SEQ ID NO: 1499820 - RNA, 19 nt, Homo sapiens
  misc_RNA (1)...(19): siRNA sense strand
agagaaagcuaauaagaag

SEQ ID NO: 1499821 - RNA, 19 nt, Homo sapiens
  misc_RNA (1)...(19): siRNA sense strand
gcugcuggaucaaguauca

SEQ ID NO: 1499822 - RNA, 19 nt, Homo sapiens
  misc_RNA (1)...(19): siRNA sense strand
cugaagagaaagcuaauaa

SEQ ID NO: 1499823 - RNA, 19 nt, Homo sapiens
  misc_RNA (1)...(19): siRNA sense strand
gagagaagaggaagagucu

SEQ ID NO: 1499824 - RNA, 19 nt, Homo sapiens
  misc_RNA (1)...(19): siRNA sense strand
gucuuggucuuuggaaaua

SEQ ID NO: 1499825 - RNA, 19 nt, Homo sapiens
  misc_RNA (1)...(19): siRNA sense strand
uaagaaggcagagagaaga

SEQ ID NO: 1499826 - RNA, 19 nt, Homo sapiens
  misc_RNA (1)...(19): siRNA sense strand
gcagagagaagaggaagag

SEQ ID NO: 1499827 - RNA, 19 nt, Homo sapiens
  misc_RNA (1)...(19): siRNA sense strand
gagucuuggucuuuggaaa

SEQ ID NO: 1499828 - RNA, 19 nt, Homo sapiens
  misc_RNA (1)...(19): siRNA sense strand
ggucuuuggaaauaucuuu

SEQ ID NO: 1499829 - RNA, 19 nt, Homo sapiens
  misc_RNA (1)...(19): siRNA sense strand
ggagcugcuggaucaagua

SEQ ID NO: 1499830 - RNA, 19 nt, Homo sapiens
  misc_RNA (1)...(19): siRNA sense strand
uaauaagaaggcagagaga

SEQ ID NO: 1499831 - RNA, 19 nt, Homo sapiens
  misc_RNA (1)...(19): siRNA sense strand
gagcugcuggaucaaguau

SEQ ID NO: 1499832 - RNA, 19 nt, Homo sapiens
  misc_RNA (1)...(19): siRNA sense strand
gcuaauaagaaggcagaga

SEQ ID NO: 1499833 - RNA, 19 nt, Homo sapiens
  misc_RNA (1)...(19): siRNA sense strand
gaagagaaagcuaauaaga

SEQ ID NO: 1499834 - RNA, 19 nt, Homo sapiens
  misc_RNA (1)...(19): siRNA sense strand
agagaaagcuaauaagaag

SEQ ID NO: 1499835 - RNA, 19 nt, Homo sapiens
  misc_RNA (1)...(19): siRNA sense strand
gcugcuggaucaaguauca

SEQ ID NO: 1499836 - RNA, 19 nt, Homo sapiens
  misc_RNA (1)...(19): siRNA sense strand
cugaagagaaagcuaauaa

SEQ ID NO: 1499837 - RNA, 19 nt, Homo sapiens
  misc_RNA (1)...(19): siRNA sense strand
gagagaagaggaagagucu

SEQ ID NO: 1499838 - RNA, 19 nt, Homo sapiens
  misc_RNA (1)...(19): siRNA sense strand
gucuuggucuuuggaaaua

SEQ ID NO: 1499839 - RNA, 19 nt, Homo sapiens
  misc_RNA (1)...(19): siRNA sense strand
uaagaaggcagagagaaga

SEQ ID NO: 1499840 - RNA, 19 nt, Homo sapiens
  misc_RNA (1)...(19): siRNA sense strand
gcagagagaagaggaagag

SEQ ID NO: 1499841 - RNA, 19 nt, Homo sapiens
  misc_RNA (1)...(19): siRNA sense strand
gagucuuggucuuuggaaa

SEQ ID NO: 1499842 - RNA, 19 nt, Homo sapiens
  misc_RNA (1)...(19): siRNA sense strand
ggucuuuggaaauaucuuu

SEQ ID NO: 1499843 - RNA, 19 nt, Homo sapiens
  misc_RNA (1)...(19): siRNA sense strand
ggagcugcuggaucaagua

SEQ ID NO: 1499844 - RNA, 19 nt, Homo sapiens
  misc_RNA (1)...(19): siRNA sense strand
uaauaagaaggcagagaga

SEQ ID NO: 1499845 - RNA, 19 nt, Homo sapiens
  misc_RNA (1)...(19): siRNA sense strand
gagcugcuggaucaaguau

SEQ ID NO: 1499846 - RNA, 19 nt, Homo sapiens
  misc_RNA (1)...(19): siRNA sense strand
gcuaauaagaaggcagaga

SEQ ID NO: 1499847 - RNA, 19 nt, Homo sapiens
  misc_RNA (1)...(19): siRNA sense strand
uggaacagcugcagccauu

SEQ ID NO: 1499848 - RNA, 19 nt, Homo sapiens
  misc_RNA (1)...(19): siRNA sense strand
ccucaccuuucuacaagua

SEQ ID NO: 1499849 - RNA, 19 nt, Homo sapiens
  misc_RNA (1)...(19): siRNA sense strand
ggaaaccugggacaucuga

SEQ ID NO: 1499850 - RNA, 19 nt, Homo sapiens
  misc_RNA (1)...(19): siRNA sense strand
gaacagcugcagccauuuu

SEQ ID NO: 1499851 - RNA, 19 nt, Homo sapiens
  misc_RNA (1)...(19): siRNA sense strand
gaugugaggucuggaacag

SEQ ID NO: 1499852 - RNA, 19 nt, Homo sapiens
  misc_RNA (1)...(19): siRNA sense strand
ccugggacaucugaacuga

SEQ ID NO: 1499853 - RNA, 19 nt, Homo sapiens
  misc_RNA (1)...(19): siRNA sense strand
acucuucccucaccuuucu

SEQ ID NO: 1499854 - RNA, 19 nt, Homo sapiens
  misc_RNA (1)...(19): siRNA sense strand
ugggaaaccugggacaucu

SEQ ID NO: 1499855 - RNA, 19 nt, Homo sapiens
  misc_RNA (1)...(19): siRNA sense strand
ucccucaccuuucuacaag

SEQ ID NO: 1499856 - RNA, 19 nt, Homo sapiens
  misc_RNA (1)...(19): siRNA sense strand
cuacucuucccucaccuuu

SEQ ID NO: 1499857 - RNA, 19 nt, Homo sapiens
  misc_RNA (1)...(19): siRNA sense strand
ggaacagcugcagccauuu

SEQ ID NO: 1499858 - RNA, 19 nt, Homo sapiens
  misc_RNA (1)...(19): siRNA sense strand
uggaacagcugcagccauu

SEQ ID NO: 1499859 - RNA, 19 nt, Homo sapiens
  misc_RNA (1)...(19): siRNA sense strand
ccucaccuuucuacaagua

SEQ ID NO: 1499860 - RNA, 19 nt, Homo sapiens
  misc_RNA (1)...(19): siRNA sense strand
ggaaaccugggacaucuga

SEQ ID NO: 1499861 - RNA, 19 nt, Homo sapiens
  misc_RNA (1)...(19): siRNA sense strand
gaacagcugcagccauuuu

SEQ ID NO: 1499862 - RNA, 19 nt, Homo sapiens
  misc_RNA (1)...(19): siRNA sense strand
gaugugaggucuggaacag

SEQ ID NO: 1499863 - RNA, 19 nt, Homo sapiens
  misc_RNA (1)...(19): siRNA sense strand
ccugggacaucugaacuga

SEQ ID NO: 1499864 - RNA, 19 nt, Homo sapiens
  misc_RNA (1)...(19): siRNA sense strand
acucuucccucaccuuucu

SEQ ID NO: 1499865 - RNA, 19 nt, Homo sapiens
  misc_RNA (1)...(19): siRNA sense strand
ugggaaaccugggacaucu

SEQ ID NO: 1499866 - RNA, 19 nt, Homo sapiens
  misc_RNA (1)...(19): siRNA sense strand
ucccucaccuuucuacaag

SEQ ID NO: 1499867 - RNA, 19 nt, Homo sapiens
  misc_RNA (1)...(19): siRNA sense strand
cuacucuucccucaccuuu

SEQ ID NO: 1499868 - RNA, 19 nt, Homo sapiens
  misc_RNA (1)...(19): siRNA sense strand
ggaacagcugcagccauuu

SEQ ID NO: 1499869 - RNA, 19 nt, Homo sapiens
  misc_RNA (1)...(19): siRNA sense strand
guagacaccuuugcuuucu

SEQ ID NO: 1499870 - RNA, 19 nt, Homo sapiens
  misc_RNA (1)...(19): siRNA sense strand
ggaugccacugcuggaugu

SEQ ID NO: 1499871 - RNA, 19 nt, Homo sapiens
  misc_RNA (1)...(19): siRNA sense strand
gguagacaccuuugcuuuc

SEQ ID NO: 1499872 - RNA, 19 nt, Homo sapiens
  misc_RNA (1)...(19): siRNA sense strand
ggugcugggucuccauuuc

SEQ ID NO: 1499873 - RNA, 19 nt, Homo sapiens
  misc_RNA (1)...(19): siRNA sense strand
ugacccagcugaggaacug

SEQ ID NO: 1499874 - RNA, 19 nt, Homo sapiens
  misc_RNA (1)...(19): siRNA sense strand
cagcugaggaacugcauga

SEQ ID NO: 1499875 - RNA, 19 nt, Homo sapiens
  misc_RNA (1)...(19): siRNA sense strand
agacaccuuugcuuucucu

SEQ ID NO: 1499876 - RNA, 19 nt, Homo sapiens
  misc_RNA (1)...(19): siRNA sense strand
ugguagacaccuuugcuuu

SEQ ID NO: 1499877 - RNA, 19 nt, Homo sapiens
  misc_RNA (1)...(19): siRNA sense strand
gaaaggaagugaaucguau

SEQ ID NO: 1499878 - RNA, 19 nt, Homo sapiens
  misc_RNA (1)...(19): siRNA sense strand
gaacaaagaacuaauccua

SEQ ID NO: 1499879 - RNA, 19 nt, Homo sapiens
  misc_RNA (1)...(19): siRNA sense strand
ggaagugaaucguauuaaa

SEQ ID NO: 1499880 - RNA, 19 nt, Homo sapiens
  misc_RNA (1)...(19): siRNA sense strand
gaagagccauuacauacaa

SEQ ID NO: 1499881 - RNA, 19 nt, Homo sapiens
  misc_RNA (1)...(19): siRNA sense strand
aaacuaugauccugcuuua

SEQ ID NO: 1499882 - RNA, 19 nt, Homo sapiens
  misc_RNA (1)...(19): siRNA sense strand
gaucaucacuggaaagaag

SEQ ID NO: 1499883 - RNA, 19 nt, Homo sapiens
  misc_RNA (1)...(19): siRNA sense strand
gagaauauguaagagcuuu

SEQ ID NO: 1499884 - RNA, 19 nt, Homo sapiens
  misc_RNA (1)...(19): siRNA sense strand
ggaagcgacugcacagcua

SEQ ID NO: 1499885 - RNA, 19 nt, Homo sapiens
  misc_RNA (1)...(19): siRNA sense strand
gcaagcuacuccuuugaaa

SEQ ID NO: 1499886 - RNA, 19 nt, Homo sapiens
  misc_RNA (1)...(19): siRNA sense strand
cagagaagcuggcuacugu

SEQ ID NO: 1499887 - RNA, 19 nt, Homo sapiens
  misc_RNA (1)...(19): siRNA sense strand
ggagaaauuucagcauuau

SEQ ID NO: 1499888 - RNA, 19 nt, Homo sapiens
  misc_RNA (1)...(19): siRNA sense strand
gaacagcgcaucaugaaag

SEQ ID NO: 1499889 - RNA, 19 nt, Homo sapiens
  misc_RNA (1)...(19): siRNA sense strand
caaccgagaugaaggugaa

SEQ ID NO: 1499890 - RNA, 19 nt, Homo sapiens
  misc_RNA (1)...(19): siRNA sense strand
caaagagaaugcaacaugu

SEQ ID NO: 1499891 - RNA, 19 nt, Homo sapiens
  misc_RNA (1)...(19): siRNA sense strand
gacaguauaaguaguguua

SEQ ID NO: 1499892 - RNA, 19 nt, Homo sapiens
  misc_RNA (1)...(19): siRNA sense strand
gagaacaaauacaaucugu

SEQ ID NO: 1499893 - RNA, 19 nt, Homo sapiens
  misc_RNA (1)...(19): siRNA sense strand
gcacuggacacuccuguaa

SEQ ID NO: 1499894 - RNA, 19 nt, Homo sapiens
  misc_RNA (1)...(19): siRNA sense strand
gaaacuaugauccugcuuu

SEQ ID NO: 1499895 - RNA, 19 nt, Homo sapiens
  misc_RNA (1)...(19): siRNA sense strand
guaagagcuuuaaaugcua

SEQ ID NO: 1499896 - RNA, 19 nt, Homo sapiens
  misc_RNA (1)...(19): siRNA sense strand
gaggaagagccauuacaua

SEQ ID NO: 1499897 - RNA, 19 nt, Homo sapiens
  misc_RNA (1)...(19): siRNA sense strand
gugcuuacaucacgagaaa

SEQ ID NO: 1499898 - RNA, 19 nt, Homo sapiens
  misc_RNA (1)...(19): siRNA sense strand
ggauuugacaguauaagua

SEQ ID NO: 1499899 - RNA, 19 nt, Homo sapiens
  misc_RNA (1)...(19): siRNA sense strand
gaagcuggcuacuguccuu

SEQ ID NO: 1499900 - RNA, 19 nt, Homo sapiens
  misc_RNA (1)...(19): siRNA sense strand
gaagagcaaccgagaugaa

SEQ ID NO: 1499901 - RNA, 19 nt, Homo sapiens
  misc_RNA (1)...(19): siRNA sense strand
caaauacaaucuguuggaa

SEQ ID NO: 1499902 - RNA, 19 nt, Homo sapiens
  misc_RNA (1)...(19): siRNA sense strand
gaggcaagcuacuccuuug

SEQ ID NO: 1499903 - RNA, 19 nt, Homo sapiens
  misc_RNA (1)...(19): siRNA sense strand
caaacuggaacgaguauuu

SEQ ID NO: 1499904 - RNA, 19 nt, Homo sapiens
  misc_RNA (1)...(19): siRNA sense strand
uaacucagcggaauuguau

SEQ ID NO: 1499905 - RNA, 19 nt, Homo sapiens
  misc_RNA (1)...(19): siRNA sense strand
aggagaaauuucagcauua

SEQ ID NO: 1499906 - RNA, 19 nt, Homo sapiens
  misc_RNA (1)...(19): siRNA sense strand
cgauaaaucuauucgaauc

SEQ ID NO: 1499907 - RNA, 19 nt, Homo sapiens
  misc_RNA (1)...(19): siRNA sense strand
ggaacccuauggaagcuuu

SEQ ID NO: 1499908 - RNA, 19 nt, Homo sapiens
  misc_RNA (1)...(19): siRNA sense strand
caacauguuaucuguguaa

SEQ ID NO: 1499909 - RNA, 19 nt, Homo sapiens
  misc_RNA (1)...(19): siRNA sense strand
cagcagcaaaugaagauua

SEQ ID NO: 1499910 - RNA, 19 nt, Homo sapiens
  misc_RNA (1)...(19): siRNA sense strand
ccauauggaucauguaucu

SEQ ID NO: 1499911 - RNA, 19 nt, Homo sapiens
  misc_RNA (1)...(19): siRNA sense strand
ggacagcaaguagacauuu

SEQ ID NO: 1499912 - RNA, 19 nt, Homo sapiens
  misc_RNA (1)...(19): siRNA sense strand
gaagaagaaacacguagug

SEQ ID NO: 1499913 - RNA, 19 nt, Homo sapiens
  misc_RNA (1)...(19): siRNA sense strand
guguggaucugaugaaaug

SEQ ID NO: 1499914 - RNA, 19 nt, Homo sapiens
  misc_RNA (1)...(19): siRNA sense strand
gacagcaaguauauuaugu

SEQ ID NO: 1499915 - RNA, 19 nt, Homo sapiens
  misc_RNA (1)...(19): siRNA sense strand
uguaagagcuuuaaaugcu

SEQ ID NO: 1499916 - RNA, 19 nt, Homo sapiens
  misc_RNA (1)...(19): siRNA sense strand
aaggagaaauuucagcauu

SEQ ID NO: 1499917 - RNA, 19 nt, Homo sapiens
  misc_RNA (1)...(19): siRNA sense strand
ucugacagcaaguauauua

SEQ ID NO: 1499918 - RNA, 19 nt, Homo sapiens
  misc_RNA (1)...(19): siRNA sense strand
uuacagagaguuccaagaa

SEQ ID NO: 1499919 - RNA, 19 nt, Homo sapiens
  misc_RNA (1)...(19): siRNA sense strand
gaagugaaucguauuaaac

SEQ ID NO: 1499920 - RNA, 19 nt, Homo sapiens
  misc_RNA (1)...(19): siRNA sense strand
cgaaaggaagugaaucgua

SEQ ID NO: 1499921 - RNA, 19 nt, Homo sapiens
  misc_RNA (1)...(19): siRNA sense strand
gagcgaagccggagacucu

SEQ ID NO: 1499922 - RNA, 19 nt, Homo sapiens
  misc_RNA (1)...(19): siRNA sense strand
gaaucuaacucagcggaau

SEQ ID NO: 1499923 - RNA, 19 nt, Homo sapiens
  misc_RNA (1)...(19): siRNA sense strand
gauggagagguuagaauuu

SEQ ID NO: 1499924 - RNA, 19 nt, Homo sapiens
  misc_RNA (1)...(19): siRNA sense strand
gaauuuggaaucuaacuca

SEQ ID NO: 1499925 - RNA, 19 nt, Homo sapiens
  misc_RNA (1)...(19): siRNA sense strand
caaggauuauaaccagaaa

SEQ ID NO: 1499926 - RNA, 19 nt, Homo sapiens
  misc_RNA (1)...(19): siRNA sense strand
cagcaaguauauuaugugu

SEQ ID NO: 1499927 - RNA, 19 nt, Homo sapiens
  misc_RNA (1)...(19): siRNA sense strand
gacagcaaguagacauuug

SEQ ID NO: 1499928 - RNA, 19 nt, Homo sapiens
  misc_RNA (1)...(19): siRNA sense strand
gcaacauguuaucugugua

SEQ ID NO: 1499929 - RNA, 19 nt, Homo sapiens
  misc_RNA (1)...(19): siRNA sense strand
ggaagagccauuacauaca

SEQ ID NO: 1499930 - RNA, 19 nt, Homo sapiens
  misc_RNA (1)...(19): siRNA sense strand
ggaauccggacaauuaugu

SEQ ID NO: 1499931 - RNA, 19 nt, Homo sapiens
  misc_RNA (1)...(19): siRNA sense strand
acaaagagaaugcaacaug

SEQ ID NO: 1499932 - RNA, 19 nt, Homo sapiens
  misc_RNA (1)...(19): siRNA sense strand
aaucuuuccuguagacaaa

SEQ ID NO: 1499933 - RNA, 19 nt, Homo sapiens
  misc_RNA (1)...(19): siRNA sense strand
ucauguaucugcagugcuu

SEQ ID NO: 1499934 - RNA, 19 nt, Homo sapiens
  misc_RNA (1)...(19): siRNA sense strand
gaagcagggagguauauca

SEQ ID NO: 1499935 - RNA, 19 nt, Homo sapiens
  misc_RNA (1)...(19): siRNA sense strand
aagagaaugcaacauguua

SEQ ID NO: 1499936 - RNA, 19 nt, Homo sapiens
  misc_RNA (1)...(19): siRNA sense strand
aggaauauguacucgcuuu

SEQ ID NO: 1499937 - RNA, 19 nt, Homo sapiens
  misc_RNA (1)...(19): siRNA sense strand
cgacugcacagcuaaagaa

SEQ ID NO: 1499938 - RNA, 19 nt, Homo sapiens
  misc_RNA (1)...(19): siRNA sense strand
ugacaggaauauaguacug

SEQ ID NO: 1499939 - RNA, 19 nt, Homo sapiens
  misc_RNA (1)...(19): siRNA sense strand
uaacccaauugagacauuu

SEQ ID NO: 1499940 - RNA, 19 nt, Homo sapiens
  misc_RNA (1)...(19): siRNA sense strand
ucagcauuauccucauaua

SEQ ID NO: 1499941 - RNA, 19 nt, Homo sapiens
  misc_RNA (1)...(19): siRNA sense strand
gagguuagaauuuggaauc

SEQ ID NO: 1499942 - RNA, 19 nt, Homo sapiens
  misc_RNA (1)...(19): siRNA sense strand
ccacuugugucagagaaga

SEQ ID NO: 1499943 - RNA, 19 nt, Homo sapiens
  misc_RNA (1)...(19): siRNA sense strand
gaacauucgccuguggaaa

SEQ ID NO: 1499944 - RNA, 19 nt, Homo sapiens
  misc_RNA (1)...(19): siRNA sense strand
guacaauacaagcacauga

SEQ ID NO: 1499945 - RNA, 19 nt, Homo sapiens
  misc_RNA (1)...(19): siRNA sense strand
uggcaaagcauccagagaa

SEQ ID NO: 1499946 - RNA, 19 nt, Homo sapiens
  misc_RNA (1)...(19): siRNA sense strand
uacagagaguuccaagaaa

SEQ ID NO: 1499947 - RNA, 19 nt, Homo sapiens
  misc_RNA (1)...(19): siRNA sense strand
gggaugaacaaagaacuaa

SEQ ID NO: 1499948 - RNA, 19 nt, Homo sapiens
  misc_RNA (1)...(19): siRNA sense strand
gcacaugaaggcuuuguac

SEQ ID NO: 1499949 - RNA, 19 nt, Homo sapiens
  misc_RNA (1)...(19): siRNA sense strand
gaugaacaaagaacuaauc

SEQ ID NO: 1499950 - RNA, 19 nt, Homo sapiens
  misc_RNA (1)...(19): siRNA sense strand
gaagcgacugcacagcuaa

SEQ ID NO: 1499951 - RNA, 19 nt, Homo sapiens
  misc_RNA (1)...(19): siRNA sense strand
uaucugcagugcuugaugu

SEQ ID NO: 1499952 - RNA, 19 nt, Homo sapiens
  misc_RNA (1)...(19): siRNA sense strand
ggaacagcgcaucaugaaa

SEQ ID NO: 1499953 - RNA, 19 nt, Homo sapiens
  misc_RNA (1)...(19): siRNA sense strand
aagcagccaaggauuauaa

SEQ ID NO: 1499954 - RNA, 19 nt, Homo sapiens
  misc_RNA (1)...(19): siRNA sense strand
gagaaugcaacauguuauc

SEQ ID NO: 1499955 - RNA, 19 nt, Homo sapiens
  misc_RNA (1)...(19): siRNA sense strand
acagagaguuccaagaaac

SEQ ID NO: 1499956 - RNA, 19 nt, Homo sapiens
  misc_RNA (1)...(19): siRNA sense strand
gugauggagucaauugcuu

SEQ ID NO: 1499957 - RNA, 19 nt, Homo sapiens
  misc_RNA (1)...(19): siRNA sense strand
ugacagcaaguauauuaug

SEQ ID NO: 1499958 - RNA, 19 nt, Homo sapiens
  misc_RNA (1)...(19): siRNA sense strand
auucgaaucuuuccuguag

SEQ ID NO: 1499959 - RNA, 19 nt, Homo sapiens
  misc_RNA (1)...(19): siRNA sense strand
gaguuugugucugcuaguu

SEQ ID NO: 1499960 - RNA, 19 nt, Homo sapiens
  misc_RNA (1)...(19): siRNA sense strand
gauccugcuuuacauccuu

SEQ ID NO: 1499961 - RNA, 19 nt, Homo sapiens
  misc_RNA (1)...(19): siRNA sense strand
ggcaaagcauccagagaag

SEQ ID NO: 1499962 - RNA, 19 nt, Homo sapiens
  misc_RNA (1)...(19): siRNA sense strand
gaagccggagacucuagua

SEQ ID NO: 1499963 - RNA, 19 nt, Homo sapiens
  misc_RNA (1)...(19): siRNA sense strand
acaaauacaaucuguugga

SEQ ID NO: 1499964 - RNA, 19 nt, Homo sapiens
  misc_RNA (1)...(19): siRNA sense strand
acacguaguggcaguugua

SEQ ID NO: 1499965 - RNA, 19 nt, Homo sapiens
  misc_RNA (1)...(19): siRNA sense strand
ccaaggauuauaaccagaa

SEQ ID NO: 1499966 - RNA, 19 nt, Homo sapiens
  misc_RNA (1)...(19): siRNA sense strand
gaaugcaacauguuaucug

SEQ ID NO: 1499967 - RNA, 19 nt, Homo sapiens
  misc_RNA (1)...(19): siRNA sense strand
ugauggagagguuagaauu

SEQ ID NO: 1499968 - RNA, 19 nt, Homo sapiens
  misc_RNA (1)...(19): siRNA sense strand
uuucagcauuauccucaua

SEQ ID NO: 1499969 - RNA, 19 nt, Homo sapiens
  misc_RNA (1)...(19): siRNA sense strand
ggaagagcaaccgagauga

SEQ ID NO: 1499970 - RNA, 19 nt, Homo sapiens
  misc_RNA (1)...(19): siRNA sense strand
ugucagagaagaagaaaca

SEQ ID NO: 1499971 - RNA, 19 nt, Homo sapiens
  misc_RNA (1)...(19): siRNA sense strand
aaggaagugaaucguauua

SEQ ID NO: 1499972 - RNA, 19 nt, Homo sapiens
  misc_RNA (1)...(19): siRNA sense strand
acuggacacuccuguaaug

SEQ ID NO: 1499973 - RNA, 19 nt, Homo sapiens
  misc_RNA (1)...(19): siRNA sense strand
acauuucucuugggaaguu

SEQ ID NO: 1499974 - RNA, 19 nt, Homo sapiens
  misc_RNA (1)...(19): siRNA sense strand
agacgaggaagagccauua

SEQ ID NO: 1499975 - RNA, 19 nt, Homo sapiens
  misc_RNA (1)...(19): siRNA sense strand
ugaggucccacgagaauau

SEQ ID NO: 1499976 - RNA, 19 nt, Homo sapiens
  misc_RNA (1)...(19): siRNA sense strand
aaagagaaugcaacauguu

SEQ ID NO: 1499977 - RNA, 19 nt, Homo sapiens
  misc_RNA (1)...(19): siRNA sense strand
ggaaggcuccaauggcuuu

SEQ ID NO: 1499978 - RNA, 19 nt, Homo sapiens
  misc_RNA (1)...(19): siRNA sense strand
gcggaggacuuuagagaca

SEQ ID NO: 1499979 - RNA, 19 nt, Homo sapiens
  misc_RNA (1)...(19): siRNA sense strand
gagacaagcuggacaaaag

SEQ ID NO: 1499980 - RNA, 19 nt, Homo sapiens
  misc_RNA (1)...(19): siRNA sense strand
ggauguucccgucgccuua

SEQ ID NO: 1499981 - RNA, 19 nt, Homo sapiens
  misc_RNA (1)...(19): siRNA sense strand
uaccagaaccgcaggacua

SEQ ID NO: 1499982 - RNA, 19 nt, Homo sapiens
  misc_RNA (1)...(19): siRNA sense strand
gggaucgacuccauucucu

SEQ ID NO: 1499983 - RNA, 19 nt, Homo sapiens
  misc_RNA (1)...(19): siRNA sense strand
ggaggcaggcaauuacuca

SEQ ID NO: 1499984 - RNA, 19 nt, Homo sapiens
  misc_RNA (1)...(19): siRNA sense strand
cagaaccgcaggacuaaau

SEQ ID NO: 1499985 - RNA, 19 nt, Homo sapiens
  misc_RNA (1)...(19): siRNA sense strand
ggaggacuuuagagacaag

SEQ ID NO: 1499986 - RNA, 19 nt, Homo sapiens
  misc_RNA (1)...(19): siRNA sense strand
uggcggaggcaggcaauua

SEQ ID NO: 1499987 - RNA, 19 nt, Homo sapiens
  misc_RNA (1)...(19): siRNA sense strand
caccgucaccuccuccuuu

SEQ ID NO: 1499988 - RNA, 19 nt, Homo sapiens
  misc_RNA (1)...(19): siRNA sense strand
gaaccgcaggacuaaaugg

SEQ ID NO: 1499989 - RNA, 19 nt, Homo sapiens
  misc_RNA (1)...(19): siRNA sense strand
ucccgucgccuuauuucua

SEQ ID NO: 1499990 - RNA, 19 nt, Homo sapiens
  misc_RNA (1)...(19): siRNA sense strand
ccgcggaggacuuuagaga

SEQ ID NO: 1499991 - RNA, 19 nt, Homo sapiens
  misc_RNA (1)...(19): siRNA sense strand
ucgccagccucuccaggaa

SEQ ID NO: 1499992 - RNA, 19 nt, Homo sapiens
  misc_RNA (1)...(19): siRNA sense strand
gcuuugggaucgacuccau

SEQ ID NO: 1499993 - RNA, 19 nt, Homo sapiens
  misc_RNA (1)...(19): siRNA sense strand
caacauagcuaauacagaa

SEQ ID NO: 1499994 - RNA, 19 nt, Homo sapiens
  misc_RNA (1)...(19): siRNA sense strand
gaagugauuuguccaauau

SEQ ID NO: 1499995 - RNA, 19 nt, Homo sapiens
  misc_RNA (1)...(19): siRNA sense strand
gcuaugggcuguguagaua

SEQ ID NO: 1499996 - RNA, 19 nt, Homo sapiens
  misc_RNA (1)...(19): siRNA sense strand
caacaaggcauacaacuga

SEQ ID NO: 1499997 - RNA, 19 nt, Homo sapiens
  misc_RNA (1)...(19): siRNA sense strand
gcagaaacaucaacagaag

SEQ ID NO: 1499998 - RNA, 19 nt, Homo sapiens
  misc_RNA (1)...(19): siRNA sense strand
gaucaaacaugcacuuuac

SEQ ID NO: 1499999 - RNA, 19 nt, Homo sapiens
  misc_RNA (1)...(19): siRNA sense strand
gccuuuagauguugcuuua

SEQ ID NO: 1500000 - RNA, 19 nt, Homo sapiens
  misc_RNA (1)...(19): siRNA sense strand
cagcugugaugcauguuua

SEQ ID NO: 1500001 - RNA, 19 nt, Homo sapiens
  misc_RNA (1)...(19): siRNA sense strand
cagcucaucuuacacuuga

SEQ ID NO: 1500002 - RNA, 19 nt, Homo sapiens
  misc_RNA (1)...(19): siRNA sense strand
gauauuaugccuuuagaug

SEQ ID NO: 1500003 - RNA, 19 nt, Homo sapiens
  misc_RNA (1)...(19): siRNA sense strand
agaagugauuuguccaaua

SEQ ID NO: 1500004 - RNA, 19 nt, Homo sapiens
  misc_RNA (1)...(19): siRNA sense strand
uccaauaugugcagcguua

SEQ ID NO: 1500005 - RNA, 19 nt, Homo sapiens
  misc_RNA (1)...(19): siRNA sense strand
caacaaccaacauagcuaa

SEQ ID NO: 1500006 - RNA, 19 nt, Homo sapiens
  misc_RNA (1)...(19): siRNA sense strand
guguagauauuaugccuuu

SEQ ID NO: 1500007 - RNA, 19 nt, Homo sapiens
  misc_RNA (1)...(19): siRNA sense strand
gcaacaacaacaaggcaua

SEQ ID NO: 1500008 - RNA, 19 nt, Homo sapiens
  misc_RNA (1)...(19): siRNA sense strand
caaccaacauagcuaauac

SEQ ID NO: 1500009 - RNA, 19 nt, Homo sapiens
  misc_RNA (1)...(19): siRNA sense strand
gaaaguggugcaacaacaa

SEQ ID NO: 1500010 - RNA, 19 nt, Homo sapiens
  misc_RNA (1)...(19): siRNA sense strand
gcaggaggacagcuuaauu

SEQ ID NO: 1500011 - RNA, 19 nt, Homo sapiens
  misc_RNA (1)...(19): siRNA sense strand
gggaagccauggauccuau

SEQ ID NO: 1500012 - RNA, 19 nt, Homo sapiens
  misc_RNA (1)...(19): siRNA sense strand
ggacuuucuucuucucaga

SEQ ID NO: 1500013 - RNA, 19 nt, Homo sapiens
  misc_RNA (1)...(19): siRNA sense strand
ccacuacaaucacacaauc

SEQ ID NO: 1500014 - RNA, 19 nt, Homo sapiens
  misc_RNA (1)...(19): siRNA sense strand
ucgcagauauaaguguuua

SEQ ID NO: 1500015 - RNA, 19 nt, Homo sapiens
  misc_RNA (1)...(19): siRNA sense strand
gaaggugucagcugugaug

SEQ ID NO: 1500016 - RNA, 19 nt, Homo sapiens
  misc_RNA (1)...(19): siRNA sense strand
gcaacaaccaacauagcua

SEQ ID NO: 1500017 - RNA, 19 nt, Homo sapiens
  misc_RNA (1)...(19): siRNA sense strand
uaacaaggguagauuuuga

SEQ ID NO: 1500018 - RNA, 19 nt, Homo sapiens
  misc_RNA (1)...(19): siRNA sense strand
cuacagaauucccaguuuc

SEQ ID NO: 1500019 - RNA, 19 nt, Homo sapiens
  misc_RNA (1)...(19): siRNA sense strand
ugaaaguggugcaacaaca

SEQ ID NO: 1500020 - RNA, 19 nt, Homo sapiens
  misc_RNA (1)...(19): siRNA sense strand
uuaacaagguugaaugauc

SEQ ID NO: 1500021 - RNA, 19 nt, Homo sapiens
  misc_RNA (1)...(19): siRNA sense strand
gaacaugcagaaacaucaa

SEQ ID NO: 1500022 - RNA, 19 nt, Homo sapiens
  misc_RNA (1)...(19): siRNA sense strand
ggucgcagauauaaguguu

SEQ ID NO: 1500023 - RNA, 19 nt, Homo sapiens
  misc_RNA (1)...(19): siRNA sense strand
aaggacauguuacuucuga

SEQ ID NO: 1500024 - RNA, 19 nt, Homo sapiens
  misc_RNA (1)...(19): siRNA sense strand
ucaaacaugcacuuuacua

SEQ ID NO: 1500025 - RNA, 19 nt, Homo sapiens
  misc_RNA (1)...(19): siRNA sense strand
gggaagcuuucucuguaga

SEQ ID NO: 1500026 - RNA, 19 nt, Homo sapiens
  misc_RNA (1)...(19): siRNA sense strand
gagcgccaguccauggaaa

SEQ ID NO: 1500027 - RNA, 19 nt, Homo sapiens
  misc_RNA (1)...(19): siRNA sense strand
ucaaggacauguuacuucu

SEQ ID NO: 1500028 - RNA, 19 nt, Homo sapiens
  misc_RNA (1)...(19): siRNA sense strand
cagcagacucuacagaauu

SEQ ID NO: 1500029 - RNA, 19 nt, Homo sapiens
  misc_RNA (1)...(19): siRNA sense strand
gcacuuuacuagcaguucu

SEQ ID NO: 1500030 - RNA, 19 nt, Homo sapiens
  misc_RNA (1)...(19): siRNA sense strand
gcagaccgcagccuguuug

SEQ ID NO: 1500031 - RNA, 19 nt, Homo sapiens
  misc_RNA (1)...(19): siRNA sense strand
uagagcagccacagucuuu

SEQ ID NO: 1500032 - RNA, 19 nt, Homo sapiens
  misc_RNA (1)...(19): siRNA sense strand
cccuagagauuuagaugaa

SEQ ID NO: 1500033 - RNA, 19 nt, Homo sapiens
  misc_RNA (1)...(19): siRNA sense strand
gaggcgauccuaaucaugu

SEQ ID NO: 1500034 - RNA, 19 nt, Homo sapiens
  misc_RNA (1)...(19): siRNA sense strand
uaugggcuguguagauauu

SEQ ID NO: 1500035 - RNA, 19 nt, Homo sapiens
  misc_RNA (1)...(19): siRNA sense strand
gagugguguucgacaugua

SEQ ID NO: 1500036 - RNA, 19 nt, Homo sapiens
  misc_RNA (1)...(19): siRNA sense strand
ucagcagacucuacagaau

SEQ ID NO: 1500037 - RNA, 19 nt, Homo sapiens
  misc_RNA (1)...(19): siRNA sense strand
cccuuccgcuucucaguua

SEQ ID NO: 1500038 - RNA, 19 nt, Homo sapiens
  misc_RNA (1)...(19): siRNA sense strand
ucuacagaauucccaguuu

SEQ ID NO: 1500039 - RNA, 19 nt, Homo sapiens
  misc_RNA (1)...(19): siRNA sense strand
caacugaccacccaaugca

SEQ ID NO: 1500040 - RNA, 19 nt, Homo sapiens
  misc_RNA (1)...(19): siRNA sense strand
caagguugaaugauccuaa

SEQ ID NO: 1500041 - RNA, 19 nt, Homo sapiens
  misc_RNA (1)...(19): siRNA sense strand
ucaguuaucaggagugaga

SEQ ID NO: 1500042 - RNA, 19 nt, Homo sapiens
  misc_RNA (1)...(19): siRNA sense strand
guagauauuaugccuuuag

SEQ ID NO: 1500043 - RNA, 19 nt, Homo sapiens
  misc_RNA (1)...(19): siRNA sense strand
caaacaugcacuuuacuag

SEQ ID NO: 1500044 - RNA, 19 nt, Homo sapiens
  misc_RNA (1)...(19): siRNA sense strand
ugucagcugugaugcaugu

SEQ ID NO: 1500045 - RNA, 19 nt, Homo sapiens
  misc_RNA (1)...(19): siRNA sense strand
cuuuagauguugcuuuaga

SEQ ID NO: 1500046 - RNA, 19 nt, Homo sapiens
  misc_RNA (1)...(19): siRNA sense strand
cgaggucgcagauauaagu

SEQ ID NO: 1500047 - RNA, 19 nt, Homo sapiens
  misc_RNA (1)...(19): siRNA sense strand
ggaagccauggauccuaua

SEQ ID NO: 1500048 - RNA, 19 nt, Homo sapiens
  misc_RNA (1)...(19): siRNA sense strand
caggaggacagcuuaauuc

SEQ ID NO: 1500049 - RNA, 19 nt, Homo sapiens
  misc_RNA (1)...(19): siRNA sense strand
ucucuucaaggacauguua

SEQ ID NO: 1500050 - RNA, 19 nt, Homo sapiens
  misc_RNA (1)...(19): siRNA sense strand
aagguugaaugauccuaaa

SEQ ID NO: 1500051 - RNA, 19 nt, Homo sapiens
  misc_RNA (1)...(19): siRNA sense strand
acaaccaacauagcuaaua

SEQ ID NO: 1500052 - RNA, 19 nt, Homo sapiens
  misc_RNA (1)...(19): siRNA sense strand
ucucagaguucauauucuc

SEQ ID NO: 1500053 - RNA, 19 nt, Homo sapiens
  misc_RNA (1)...(19): siRNA sense strand
agaucaaacaugcacuuua

SEQ ID NO: 1500054 - RNA, 19 nt, Homo sapiens
  misc_RNA (1)...(19): siRNA sense strand
gagcagccacagucuuuua

SEQ ID NO: 1500055 - RNA, 19 nt, Homo sapiens
  misc_RNA (1)...(19): siRNA sense strand
gcaauagggaagccaugga

SEQ ID NO: 1500056 - RNA, 19 nt, Homo sapiens
  misc_RNA (1)...(19): siRNA sense strand
gacuuugcagcucaucuua

SEQ ID NO: 1500057 - RNA, 19 nt, Homo sapiens
  misc_RNA (1)...(19): siRNA sense strand
cagaagugauuuguccaau

SEQ ID NO: 1500058 - RNA, 19 nt, Homo sapiens
  misc_RNA (1)...(19): siRNA sense strand
gcagcucaucuuacacuug

SEQ ID NO: 1500059 - RNA, 19 nt, Homo sapiens
  misc_RNA (1)...(19): siRNA sense strand
guucauauucuccaagcaa

SEQ ID NO: 1500060 - RNA, 19 nt, Homo sapiens
  misc_RNA (1)...(19): siRNA sense strand
aacaugcacuuuacuagca

SEQ ID NO: 1500061 - RNA, 19 nt, Homo sapiens
  misc_RNA (1)...(19): siRNA sense strand
caacaacaaggcauacaac

SEQ ID NO: 1500062 - RNA, 19 nt, Homo sapiens
  misc_RNA (1)...(19): siRNA sense strand
aaacggagcgccaguccau

SEQ ID NO: 1500063 - RNA, 19 nt, Homo sapiens
  misc_RNA (1)...(19): siRNA sense strand
ggugucagcugugaugcau

SEQ ID NO: 1500064 - RNA, 19 nt, Homo sapiens
  misc_RNA (1)...(19): siRNA sense strand
guagaucaaacaugcacuu

SEQ ID NO: 1500065 - RNA, 19 nt, Homo sapiens
  misc_RNA (1)...(19): siRNA sense strand
agaaacaucaacagaagug

SEQ ID NO: 1500066 - RNA, 19 nt, Homo sapiens
  misc_RNA (1)...(19): siRNA sense strand
cugguggacuuucuucuuc

SEQ ID NO: 1500067 - RNA, 19 nt, Homo sapiens
  misc_RNA (1)...(19): siRNA sense strand
cagagccccuagagauuua

SEQ ID NO: 1500068 - RNA, 19 nt, Homo sapiens
  misc_RNA (1)...(19): siRNA sense strand
gaaacaucaacagaaguga

SEQ ID NO: 1500069 - RNA, 19 nt, Homo sapiens
  misc_RNA (1)...(19): siRNA sense strand
gcagccuguuuguccaaga

SEQ ID NO: 1500070 - RNA, 19 nt, Homo sapiens
  misc_RNA (1)...(19): siRNA sense strand
cacagcaacaaccaacaua

SEQ ID NO: 1500071 - RNA, 19 nt, Homo sapiens
  misc_RNA (1)...(19): siRNA sense strand
ggacauguuacuucugaac

SEQ ID NO: 1500072 - RNA, 19 nt, Homo sapiens
  misc_RNA (1)...(19): siRNA sense strand
uuaugaaaguggugcaaca

SEQ ID NO: 1500073 - RNA, 19 nt, Homo sapiens
  misc_RNA (1)...(19): siRNA sense strand
cgagugguguucgacaugu

SEQ ID NO: 1500074 - RNA, 19 nt, Homo sapiens
  misc_RNA (1)...(19): siRNA sense strand
uggggaagcuuucucugua

SEQ ID NO: 1500075 - RNA, 19 nt, Homo sapiens
  misc_RNA (1)...(19): siRNA sense strand
gaucuuugugcaucuuguu

SEQ ID NO: 1500076 - RNA, 19 nt, Homo sapiens
  misc_RNA (1)...(19): siRNA sense strand
gaagccauggauccuauag

SEQ ID NO: 1500077 - RNA, 19 nt, Homo sapiens
  misc_RNA (1)...(19): siRNA sense strand
uugcuacgauuacgaucuu

SEQ ID NO: 1500078 - RNA, 19 nt, Homo sapiens
  misc_RNA (1)...(19): siRNA sense strand
gcuuuuaucucaguuauca

SEQ ID NO: 1500079 - RNA, 19 nt, Homo sapiens
  misc_RNA (1)...(19): siRNA sense strand
uccaccaccuccucuuuga

SEQ ID NO: 1500080 - RNA, 19 nt, Homo sapiens
  misc_RNA (1)...(19): siRNA sense strand
gaauucccaguuucuuuua

SEQ ID NO: 1500081 - RNA, 19 nt, Homo sapiens
  misc_RNA (1)...(19): siRNA sense strand
agugauuuguccaauaugu

SEQ ID NO: 1500082 - RNA, 19 nt, Homo sapiens
  misc_RNA (1)...(19): siRNA sense strand
gagaguaauaaaggaaaug

SEQ ID NO: 1500083 - RNA, 19 nt, Homo sapiens
  misc_RNA (1)...(19): siRNA sense strand
agcagacucuacagaauuc

SEQ ID NO: 1500084 - RNA, 19 nt, Homo sapiens
  misc_RNA (1)...(19): siRNA sense strand
ugucaccacuacaaucaca

SEQ ID NO: 1500085 - RNA, 19 nt, Homo sapiens
  misc_RNA (1)...(19): siRNA sense strand
caauagggaagccauggau

SEQ ID NO: 1500086 - RNA, 19 nt, Homo sapiens
  misc_RNA (1)...(19): siRNA sense strand
guguuuaauuugcuacgau

SEQ ID NO: 1500087 - RNA, 19 nt, Homo sapiens
  misc_RNA (1)...(19): siRNA sense strand
guugaaugauccuaaaaug

SEQ ID NO: 1500088 - RNA, 19 nt, Homo sapiens
  misc_RNA (1)...(19): siRNA sense strand
ccacagcaacaaccaacau

SEQ ID NO: 1500089 - RNA, 19 nt, Homo sapiens
  misc_RNA (1)...(19): siRNA sense strand
guagagcagccacagucuu

SEQ ID NO: 1500090 - RNA, 19 nt, Homo sapiens
  misc_RNA (1)...(19): siRNA sense strand
ucucaguuaucaggaguga

SEQ ID NO: 1500091 - RNA, 19 nt, Homo sapiens
  misc_RNA (1)...(19): siRNA sense strand
gagcuuuuaucucaguuau

SEQ ID NO: 1500092 - RNA, 19 nt, Homo sapiens
  misc_RNA (1)...(19): siRNA sense strand
cagaguucauauucuccaa

SEQ ID NO: 1500093 - RNA, 19 nt, Homo sapiens
  misc_RNA (1)...(19): siRNA sense strand
gaacuguccuggauuguga

SEQ ID NO: 1500094 - RNA, 19 nt, Homo sapiens
  misc_RNA (1)...(19): siRNA sense strand
gauguucucuuuaauguug

SEQ ID NO: 1500095 - RNA, 19 nt, Homo sapiens
  misc_RNA (1)...(19): siRNA sense strand
ugaugaaucugcuuaugua

SEQ ID NO: 1500096 - RNA, 19 nt, Homo sapiens
  misc_RNA (1)...(19): siRNA sense strand
guauuuggcuucugaugaa

SEQ ID NO: 1500097 - RNA, 19 nt, Homo sapiens
  misc_RNA (1)...(19): siRNA sense strand
gaagaggcacggaaugauu

SEQ ID NO: 1500098 - RNA, 19 nt, Homo sapiens
  misc_RNA (1)...(19): siRNA sense strand
gacuugauguucucuuuaa

SEQ ID NO: 1500099 - RNA, 19 nt, Homo sapiens
  misc_RNA (1)...(19): siRNA sense strand
caaaggaguugugaacaga

SEQ ID NO: 1500100 - RNA, 19 nt, Homo sapiens
  misc_RNA (1)...(19): siRNA sense strand
gauggaggcuggagcuugu

SEQ ID NO: 1500101 - RNA, 19 nt, Homo sapiens
  misc_RNA (1)...(19): siRNA sense strand
ggagaaagacugggacuuc

SEQ ID NO: 1500102 - RNA, 19 nt, Homo sapiens
  misc_RNA (1)...(19): siRNA sense strand
gcaauauuaucaacauguc

SEQ ID NO: 1500103 - RNA, 19 nt, Homo sapiens
  misc_RNA (1)...(19): siRNA sense strand
guaacccugucaucauuga

SEQ ID NO: 1500104 - RNA, 19 nt, Homo sapiens
  misc_RNA (1)...(19): siRNA sense strand
gacugggacuucucgauga

SEQ ID NO: 1500105 - RNA, 19 nt, Homo sapiens
  misc_RNA (1)...(19): siRNA sense strand
aagagaaggugccaaaguc

SEQ ID NO: 1500106 - RNA, 19 nt, Homo sapiens
  misc_RNA (1)...(19): siRNA sense strand
gcguguauuuggcuucuga

SEQ ID NO: 1500107 - RNA, 19 nt, Homo sapiens
  misc_RNA (1)...(19): siRNA sense strand
ccaaagucauagccacaga

SEQ ID NO: 1500108 - RNA, 19 nt, Homo sapiens
  misc_RNA (1)...(19): siRNA sense strand
ugaaucugcuuauguaacu

SEQ ID NO: 1500109 - RNA, 19 nt, Homo sapiens
  misc_RNA (1)...(19): siRNA sense strand
ucaaaggaguugugaacag

SEQ ID NO: 1500110 - RNA, 19 nt, Homo sapiens
  misc_RNA (1)...(19): siRNA sense strand
agucauagccacagacauu

SEQ ID NO: 1500111 - RNA, 19 nt, Homo sapiens
  misc_RNA (1)...(19): siRNA sense strand
caagagaaggugccaaagu

SEQ ID NO: 1500112 - RNA, 19 nt, Homo sapiens
  misc_RNA (1)...(19): siRNA sense strand
agaaggugccaaagucaua

SEQ ID NO: 1500113 - RNA, 19 nt, Homo sapiens
  misc_RNA (1)...(19): siRNA sense strand
uaaaaugcuugcucagaaa

SEQ ID NO: 1500114 - RNA, 19 nt, Homo sapiens
  misc_RNA (1)...(19): siRNA sense strand
ucauggaacuguccuggau

SEQ ID NO: 1500115 - RNA, 19 nt, Homo sapiens
  misc_RNA (1)...(19): siRNA sense strand
aaacucguguccuugaugu

SEQ ID NO: 1500116 - RNA, 19 nt, Homo sapiens
  misc_RNA (1)...(19): siRNA sense strand
ugguaacccugucaucauu

SEQ ID NO: 1500117 - RNA, 19 nt, Homo sapiens
  misc_RNA (1)...(19): siRNA sense strand
cugcuuauguaacugguaa

SEQ ID NO: 1500118 - RNA, 19 nt, Homo sapiens
  misc_RNA (1)...(19): siRNA sense strand
gauacgccaucucuacaag

SEQ ID NO: 1500119 - RNA, 19 nt, Homo sapiens
  misc_RNA (1)...(19): siRNA sense strand
gaauacaagccagaggaaa

SEQ ID NO: 1500120 - RNA, 19 nt, Homo sapiens
  misc_RNA (1)...(19): siRNA sense strand
ucuuuaauguugcugguuu

SEQ ID NO: 1500121 - RNA, 19 nt, Homo sapiens
  misc_RNA (1)...(19): siRNA sense strand
cuaaaaugcuugcucagaa

SEQ ID NO: 1500122 - RNA, 19 nt, Homo sapiens
  misc_RNA (1)...(19): siRNA sense strand
gaaaucuggcaauauuauc

SEQ ID NO: 1500123 - RNA, 19 nt, Homo sapiens
  misc_RNA (1)...(19): siRNA sense strand
gaagaaacaaauugaucag

SEQ ID NO: 1500124 - RNA, 19 nt, Homo sapiens
  misc_RNA (1)...(19): siRNA sense strand
gaugaaucugcuuauguaa

SEQ ID NO: 1500125 - RNA, 19 nt, Homo sapiens
  misc_RNA (1)...(19): siRNA sense strand
gccaugcucugcguguauu

SEQ ID NO: 1500126 - RNA, 19 nt, Homo sapiens
  misc_RNA (1)...(19): siRNA sense strand
agacauuaaugaguccaaa

SEQ ID NO: 1500127 - RNA, 19 nt, Homo sapiens
  misc_RNA (1)...(19): siRNA sense strand
auucgcaacugcagaagaa

SEQ ID NO: 1500128 - RNA, 19 nt, Homo sapiens
  misc_RNA (1)...(19): siRNA sense strand
uggccaagcagcugccuua

SEQ ID NO: 1500129 - RNA, 19 nt, Homo sapiens
  misc_RNA (1)...(19): siRNA sense strand
agacuugauguucucuuua

SEQ ID NO: 1500130 - RNA, 19 nt, Homo sapiens
  misc_RNA (1)...(19): siRNA sense strand
aagaggcacggaaugauuu

SEQ ID NO: 1500131 - RNA, 19 nt, Homo sapiens
  misc_RNA (1)...(19): siRNA sense strand
gugaacagauguguguaca

SEQ ID NO: 1500132 - RNA, 19 nt, Homo sapiens
  misc_RNA (1)...(19): siRNA sense strand
uacgccaucucuacaagaa

SEQ ID NO: 1500133 - RNA, 19 nt, Homo sapiens
  misc_RNA (1)...(19): siRNA sense strand
cgcaacugcagaagaaaua

SEQ ID NO: 1500134 - RNA, 19 nt, Homo sapiens
  misc_RNA (1)...(19): siRNA sense strand
uauucaaacucguguccuu

SEQ ID NO: 1500135 - RNA, 19 nt, Homo sapiens
  misc_RNA (1)...(19): siRNA sense strand
cagaagaaauagccaugcu

SEQ ID NO: 1500136 - RNA, 19 nt, Homo sapiens
  misc_RNA (1)...(19): siRNA sense strand
auuaaugaguccaaacuuc

SEQ ID NO: 1500137 - RNA, 19 nt, Homo sapiens
  misc_RNA (1)...(19): siRNA sense strand
guugagagacuugauguuc

SEQ ID NO: 1500138 - RNA, 19 nt, Homo sapiens
  misc_RNA (1)...(19): siRNA sense strand
ggcaauauuaucaacaugu

SEQ ID NO: 1500139 - RNA, 19 nt, Homo sapiens
  misc_RNA (1)...(19): siRNA sense strand
uuaaugaguccaaacuuca

SEQ ID NO: 1500140 - RNA, 19 nt, Homo sapiens
  misc_RNA (1)...(19): siRNA sense strand
ggaacuguccuggauugug

SEQ ID NO: 1500141 - RNA, 19 nt, Homo sapiens
  misc_RNA (1)...(19): siRNA sense strand
ucauagccacagacauuaa

SEQ ID NO: 1500142 - RNA, 19 nt, Homo sapiens
  misc_RNA (1)...(19): siRNA sense strand
gucauagccacagacauua

SEQ ID NO: 1500143 - RNA, 19 nt, Homo sapiens
  misc_RNA (1)...(19): siRNA sense strand
caaacucguguccuugaug

SEQ ID NO: 1500144 - RNA, 19 nt, Homo sapiens
  misc_RNA (1)...(19): siRNA sense strand
cgccaucucuacaagaaag

SEQ ID NO: 1500145 - RNA, 19 nt, Homo sapiens
  misc_RNA (1)...(19): siRNA sense strand
guugugaacagaugugugu

SEQ ID NO: 1500146 - RNA, 19 nt, Homo sapiens
  misc_RNA (1)...(19): siRNA sense strand
gaaggugccaaagucauag

SEQ ID NO: 1500147 - RNA, 19 nt, Homo sapiens
  misc_RNA (1)...(19): siRNA sense strand
uccuugaugucacaaagaa

SEQ ID NO: 1500148 - RNA, 19 nt, Homo sapiens
  misc_RNA (1)...(19): siRNA sense strand
aauacaagccagaggaaau

SEQ ID NO: 1500149 - RNA, 19 nt, Homo sapiens
  misc_RNA (1)...(19): siRNA sense strand
aaccaaggcagccgugauu

SEQ ID NO: 1500150 - RNA, 19 nt, Homo sapiens
  misc_RNA (1)...(19): siRNA sense strand
uuaucaacaugucuucugu

SEQ ID NO: 1500151 - RNA, 19 nt, Homo sapiens
  misc_RNA (1)...(19): siRNA sense strand
gagaaggugccaaagucau

SEQ ID NO: 1500152 - RNA, 19 nt, Homo sapiens
  misc_RNA (1)...(19): siRNA sense strand
ucaaugugcgcagcaugua

SEQ ID NO: 1500153 - RNA, 19 nt, Homo sapiens
  misc_RNA (1)...(19): siRNA sense strand
ugccuuagcuuuugcaaga

SEQ ID NO: 1500154 - RNA, 19 nt, Homo sapiens
  misc_RNA (1)...(19): siRNA sense strand
gggcaucaggugcaacugu

SEQ ID NO: 1500155 - RNA, 19 nt, Homo sapiens
  misc_RNA (1)...(19): siRNA sense strand
gggucgacuugaugggaaa

SEQ ID NO: 1500156 - RNA, 19 nt, Homo sapiens
  misc_RNA (1)...(19): siRNA sense strand
uagccaugcucugcgugua

SEQ ID NO: 1500157 - RNA, 19 nt, Homo sapiens
  misc_RNA (1)...(19): siRNA sense strand
gacaaaagacgggaagauu

SEQ ID NO: 1500158 - RNA, 19 nt, Homo sapiens
  misc_RNA (1)...(19): siRNA sense strand
cuacaagaaagaauacaag

SEQ ID NO: 1500159 - RNA, 19 nt, Homo sapiens
  misc_RNA (1)...(19): siRNA sense strand
uucaggaacuggaaaagua

SEQ ID NO: 1500160 - RNA, 19 nt, Homo sapiens
  misc_RNA (1)...(19): siRNA sense strand
aaggaguugugaacagaug

SEQ ID NO: 1500161 - RNA, 19 nt, Homo sapiens
  misc_RNA (1)...(19): siRNA sense strand
cgcagcauguaccugauga

SEQ ID NO: 1500162 - RNA, 19 nt, Homo sapiens
  misc_RNA (1)...(19): siRNA sense strand
cuucugaugaaucugcuua

SEQ ID NO: 1500163 - RNA, 19 nt, Homo sapiens
  misc_RNA (1)...(19): siRNA sense strand
uguauuuggcuucugauga

SEQ ID NO: 1500164 - RNA, 19 nt, Homo sapiens
  misc_RNA (1)...(19): siRNA sense strand
guugauacgccaucucuac

SEQ ID NO: 1500165 - RNA, 19 nt, Homo sapiens
  misc_RNA (1)...(19): siRNA sense strand
cugaagaggcacggaauga

SEQ ID NO: 1500166 - RNA, 19 nt, Homo sapiens
  misc_RNA (1)...(19): siRNA sense strand
gguaacccugucaucauug

SEQ ID NO: 1500167 - RNA, 19 nt, Homo sapiens
  misc_RNA (1)...(19): siRNA sense strand
ucugaugaaucugcuuaug

SEQ ID NO: 1500168 - RNA, 19 nt, Homo sapiens
  misc_RNA (1)...(19): siRNA sense strand
auggaacuguccuggauug

SEQ ID NO: 1500169 - RNA, 19 nt, Homo sapiens
  misc_RNA (1)...(19): siRNA sense strand
ugcaagagaaggugccaaa

SEQ ID NO: 1500170 - RNA, 19 nt, Homo sapiens
  misc_RNA (1)...(19): siRNA sense strand
uagccacagacauuaauga

SEQ ID NO: 1500171 - RNA, 19 nt, Homo sapiens
  misc_RNA (1)...(19): siRNA sense strand
caaccaaggcagccgugau

SEQ ID NO: 1500172 - RNA, 19 nt, Homo sapiens
  misc_RNA (1)...(19): siRNA sense strand
aaacuucaggaacuggaaa

SEQ ID NO: 1500173 - RNA, 19 nt, Homo sapiens
  misc_RNA (1)...(19): siRNA sense strand
guccaaacuucaggaacug

SEQ ID NO: 1500174 - RNA, 19 nt, Homo sapiens
  misc_RNA (1)...(19): siRNA sense strand
aguccaaacuucaggaacu

SEQ ID NO: 1500175 - RNA, 19 nt, Homo sapiens
  misc_RNA (1)...(19): siRNA sense strand
agaauacaagccagaggaa

SEQ ID NO: 1500176 - RNA, 19 nt, Homo sapiens
  misc_RNA (1)...(19): siRNA sense strand
cgucaaaggaguugugaac

SEQ ID NO: 1500177 - RNA, 19 nt, Homo sapiens
  misc_RNA (1)...(19): siRNA sense strand
cauagccacagacauuaau

SEQ ID NO: 1500178 - RNA, 19 nt, Homo sapiens
  misc_RNA (1)...(19): siRNA sense strand
aaacagcacugccaaauag

SEQ ID NO: 1500179 - RNA, 19 nt, Homo sapiens
  misc_RNA (1)...(19): siRNA sense strand
ccaaauagcagaagaauac

SEQ ID NO: 1500180 - RNA, 19 nt, Homo sapiens
  misc_RNA (1)...(19): siRNA sense strand
ggagcucauugccaaguua

SEQ ID NO: 1500181 - RNA, 19 nt, Homo sapiens
  misc_RNA (1)...(19): siRNA sense strand
gauugcaccuuuagaaguu

SEQ ID NO: 1500182 - RNA, 19 nt, Homo sapiens
  misc_RNA (1)...(19): siRNA sense strand
caaguuagaucaggcagaa

SEQ ID NO: 1500183 - RNA, 19 nt, Homo sapiens
  misc_RNA (1)...(19): siRNA sense strand
ggaaugcagugguggaauc

SEQ ID NO: 1500184 - RNA, 19 nt, Homo sapiens
  misc_RNA (1)...(19): siRNA sense strand
caaacagcacugccaaaua

SEQ ID NO: 1500185 - RNA, 19 nt, Homo sapiens
  misc_RNA (1)...(19): siRNA sense strand
gaacgaggcagcagaucuu

SEQ ID NO: 1500186 - RNA, 19 nt, Homo sapiens
  misc_RNA (1)...(19): siRNA sense strand
ggagaaacuucgaauacag

SEQ ID NO: 1500187 - RNA, 19 nt, Homo sapiens
  misc_RNA (1)...(19): siRNA sense strand
gugcuuggauuacaguauu

SEQ ID NO: 1500188 - RNA, 19 nt, Homo sapiens
  misc_RNA (1)...(19): siRNA sense strand
gcaacaaguuuggccaugu

SEQ ID NO: 1500189 - RNA, 19 nt, Homo sapiens
  misc_RNA (1)...(19): siRNA sense strand
gaacaacuggagaaacuuc

SEQ ID NO: 1500190 - RNA, 19 nt, Homo sapiens
  misc_RNA (1)...(19): siRNA sense strand
ggauuacaguauuucaguu

SEQ ID NO: 1500191 - RNA, 19 nt, Homo sapiens
  misc_RNA (1)...(19): siRNA sense strand
gauggagucucgcuauuuu

SEQ ID NO: 1500192 - RNA, 19 nt, Homo sapiens
  misc_RNA (1)...(19): siRNA sense strand
gcgauuggaugcucacucu

SEQ ID NO: 1500193 - RNA, 19 nt, Homo sapiens
  misc_RNA (1)...(19): siRNA sense strand
gcugauugcaccuuuagaa

SEQ ID NO: 1500194 - RNA, 19 nt, Homo sapiens
  misc_RNA (1)...(19): siRNA sense strand
gauuggaugcucacucuga

SEQ ID NO: 1500195 - RNA, 19 nt, Homo sapiens
  misc_RNA (1)...(19): siRNA sense strand
ggaagaaggagcucauugc

SEQ ID NO: 1500196 - RNA, 19 nt, Homo sapiens
  misc_RNA (1)...(19): siRNA sense strand
agaauaccaugaggucaaa

SEQ ID NO: 1500197 - RNA, 19 nt, Homo sapiens
  misc_RNA (1)...(19): siRNA sense strand
ucagcugauugcaccuuua

SEQ ID NO: 1500198 - RNA, 19 nt, Homo sapiens
  misc_RNA (1)...(19): siRNA sense strand
uuuggucuuuccagaauua

SEQ ID NO: 1500199 - RNA, 19 nt, Homo sapiens
  misc_RNA (1)...(19): siRNA sense strand
ccugaagacuccauuccuu

SEQ ID NO: 1500200 - RNA, 19 nt, Homo sapiens
  misc_RNA (1)...(19): siRNA sense strand
gaggagaaucggacguuga

SEQ ID NO: 1500201 - RNA, 19 nt, Homo sapiens
  misc_RNA (1)...(19): siRNA sense strand
uggaacaacuggagaaacu

SEQ ID NO: 1500202 - RNA, 19 nt, Homo sapiens
  misc_RNA (1)...(19): siRNA sense strand
cuuuagaaguuauguggaa

SEQ ID NO: 1500203 - RNA, 19 nt, Homo sapiens
  misc_RNA (1)...(19): siRNA sense strand
gagaaacuucgaauacagu

SEQ ID NO: 1500204 - RNA, 19 nt, Homo sapiens
  misc_RNA (1)...(19): siRNA sense strand
ggaaaucacccugcuugag

SEQ ID NO: 1500205 - RNA, 19 nt, Homo sapiens
  misc_RNA (1)...(19): siRNA sense strand
agaauuagaccagcagcua

SEQ ID NO: 1500206 - RNA, 19 nt, Homo sapiens
  misc_RNA (1)...(19): siRNA sense strand
uggagaaacuucgaauaca

SEQ ID NO: 1500207 - RNA, 19 nt, Homo sapiens
  misc_RNA (1)...(19): siRNA sense strand
guggaaucauggcucacua

SEQ ID NO: 1500208 - RNA, 19 nt, Homo sapiens
  misc_RNA (1)...(19): siRNA sense strand
ucaaacagcacugccaaau

SEQ ID NO: 1500209 - RNA, 19 nt, Homo sapiens
  misc_RNA (1)...(19): siRNA sense strand
ugaagacuccauuccuuug

SEQ ID NO: 1500210 - RNA, 19 nt, Homo sapiens
  misc_RNA (1)...(19): siRNA sense strand
gccaaauagcagaagaaua

SEQ ID NO: 1500211 - RNA, 19 nt, Homo sapiens
  misc_RNA (1)...(19): siRNA sense strand
uagcagaagaauaccauga

SEQ ID NO: 1500212 - RNA, 19 nt, Homo sapiens
  misc_RNA (1)...(19): siRNA sense strand
ggaacgaggcagcagaucu

SEQ ID NO: 1500213 - RNA, 19 nt, Homo sapiens
  misc_RNA (1)...(19): siRNA sense strand
ggaugcugcugagcugguu

SEQ ID NO: 1500214 - RNA, 19 nt, Homo sapiens
  misc_RNA (1)...(19): siRNA sense strand
gaagacuccauuccuuugg

SEQ ID NO: 1500215 - RNA, 19 nt, Homo sapiens
  misc_RNA (1)...(19): siRNA sense strand
caacuggagaaacuucgaa

SEQ ID NO: 1500216 - RNA, 19 nt, Homo sapiens
  misc_RNA (1)...(19): siRNA sense strand
ccuuuggucuuuccagaau

SEQ ID NO: 1500217 - RNA, 19 nt, Homo sapiens
  misc_RNA (1)...(19): siRNA sense strand
ggaaucauggcucacuaca

SEQ ID NO: 1500218 - RNA, 19 nt, Homo sapiens
  misc_RNA (1)...(19): siRNA sense strand
gaagugcuuggauuacagu

SEQ ID NO: 1500219 - RNA, 19 nt, Homo sapiens
  misc_RNA (1)...(19): siRNA sense strand
caaguuuggccauguugga

SEQ ID NO: 1500220 - RNA, 19 nt, Homo sapiens
  misc_RNA (1)...(19): siRNA sense strand
uuuaugcucugcaacaagu

SEQ ID NO: 1500221 - RNA, 19 nt, Homo sapiens
  misc_RNA (1)...(19): siRNA sense strand
aagaauaccaugaggucaa

SEQ ID NO: 1500222 - RNA, 19 nt, Homo sapiens
  misc_RNA (1)...(19): siRNA sense strand
cugaagacuccauuccuuu

SEQ ID NO: 1500223 - RNA, 19 nt, Homo sapiens
  misc_RNA (1)...(19): siRNA sense strand
ucuugaagugcuuggauua

SEQ ID NO: 1500224 - RNA, 19 nt, Homo sapiens
  misc_RNA (1)...(19): siRNA sense strand
cgaggcagcagaucuuaag

SEQ ID NO: 1500225 - RNA, 19 nt, Homo sapiens
  misc_RNA (1)...(19): siRNA sense strand
aggaauccauggagguguu

SEQ ID NO: 1500226 - RNA, 19 nt, Homo sapiens
  misc_RNA (1)...(19): siRNA sense strand
ugucaugacuccgaggaau

SEQ ID NO: 1500227 - RNA, 19 nt, Homo sapiens
  misc_RNA (1)...(19): siRNA sense strand
cuccauuccuuuggucuuu

SEQ ID NO: 1500228 - RNA, 19 nt, Homo sapiens
  misc_RNA (1)...(19): siRNA sense strand
auccaaaggucagcaaguu

SEQ ID NO: 1500229 - RNA, 19 nt, Homo sapiens
  misc_RNA (1)...(19): siRNA sense strand
ugaagugcuuggauuacag

SEQ ID NO: 1500230 - RNA, 19 nt, Homo sapiens
  misc_RNA (1)...(19): siRNA sense strand
gcucauugccaaguuagau

SEQ ID NO: 1500231 - RNA, 19 nt, Homo sapiens
  misc_RNA (1)...(19): siRNA sense strand
gaaugcagugguggaauca

SEQ ID NO: 1500232 - RNA, 19 nt, Homo sapiens
  misc_RNA (1)...(19): siRNA sense strand
agauggagucucgcuauuu

SEQ ID NO: 1500233 - RNA, 19 nt, Homo sapiens
  misc_RNA (1)...(19): siRNA sense strand
uuacugugcccguggaaau

SEQ ID NO: 1500234 - RNA, 19 nt, Homo sapiens
  misc_RNA (1)...(19): siRNA sense strand
agaaacuucgaauacagua

SEQ ID NO: 1500235 - RNA, 19 nt, Homo sapiens
  misc_RNA (1)...(19): siRNA sense strand
ggaacaacuggagaaacuu

SEQ ID NO: 1500236 - RNA, 19 nt, Homo sapiens
  misc_RNA (1)...(19): siRNA sense strand
agaaucggacguugagguu

SEQ ID NO: 1500237 - RNA, 19 nt, Homo sapiens
  misc_RNA (1)...(19): siRNA sense strand
uagaaguuauguggaacga

SEQ ID NO: 1500238 - RNA, 19 nt, Homo sapiens
  misc_RNA (1)...(19): siRNA sense strand
gagguuggcccagucucaa

SEQ ID NO: 1500239 - RNA, 19 nt, Homo sapiens
  misc_RNA (1)...(19): siRNA sense strand
ugagcugguucgggaauuc

SEQ ID NO: 1500240 - RNA, 19 nt, Homo sapiens
  misc_RNA (1)...(19): siRNA sense strand
ugaagaagcuggcugaaau

SEQ ID NO: 1500241 - RNA, 19 nt, Homo sapiens
  misc_RNA (1)...(19): siRNA sense strand
gcacaaaucuacgcacaga

SEQ ID NO: 1500242 - RNA, 19 nt, Homo sapiens
  misc_RNA (1)...(19): siRNA sense strand
gacaaagccuccuauguug

SEQ ID NO: 1500243 - RNA, 19 nt, Homo sapiens
  misc_RNA (1)...(19): siRNA sense strand
gauaguuucuccacauuug

SEQ ID NO: 1500244 - RNA, 19 nt, Homo sapiens
  misc_RNA (1)...(19): siRNA sense strand
ugacaaagccuccuauguu

SEQ ID NO: 1500245 - RNA, 19 nt, Homo sapiens
  misc_RNA (1)...(19): siRNA sense strand
gaagaagcuggcugaaaua

SEQ ID NO: 1500246 - RNA, 19 nt, Homo sapiens
  misc_RNA (1)...(19): siRNA sense strand
ucagauuucuuccaucaaa

SEQ ID NO: 1500247 - RNA, 19 nt, Homo sapiens
  misc_RNA (1)...(19): siRNA sense strand
cagcauauaucucauugga

SEQ ID NO: 1500248 - RNA, 19 nt, Homo sapiens
  misc_RNA (1)...(19): siRNA sense strand
agaggaugcugggaaauua

SEQ ID NO: 1500249 - RNA, 19 nt, Homo sapiens
  misc_RNA (1)...(19): siRNA sense strand
gcugggaaauuauauaaca

SEQ ID NO: 1500250 - RNA, 19 nt, Homo sapiens
  misc_RNA (1)...(19): siRNA sense strand
ugaagaggaugcugggaaa

SEQ ID NO: 1500251 - RNA, 19 nt, Homo sapiens
  misc_RNA (1)...(19): siRNA sense strand
aaucguguauucagacaua

SEQ ID NO: 1500252 - RNA, 19 nt, Homo sapiens
  misc_RNA (1)...(19): siRNA sense strand
gaagcgaucagaccucuau

SEQ ID NO: 1500253 - RNA, 19 nt, Homo sapiens
  misc_RNA (1)...(19): siRNA sense strand
uaacgucacucgcgcuugu

SEQ ID NO: 1500254 - RNA, 19 nt, Homo sapiens
  misc_RNA (1)...(19): siRNA sense strand
gaagcuuucugaaguagca

SEQ ID NO: 1500255 - RNA, 19 nt, Homo sapiens
  misc_RNA (1)...(19): siRNA sense strand
gauggaacuuuacuagcaa

SEQ ID NO: 1500256 - RNA, 19 nt, Homo sapiens
  misc_RNA (1)...(19): siRNA sense strand
aagaagcaaucguguauuc

SEQ ID NO: 1500257 - RNA, 19 nt, Homo sapiens
  misc_RNA (1)...(19): siRNA sense strand
gcaaggagccaaaauaguu

SEQ ID NO: 1500258 - RNA, 19 nt, Homo sapiens
  misc_RNA (1)...(19): siRNA sense strand
gaaauacgccagcaaaucc

SEQ ID NO: 1500259 - RNA, 19 nt, Homo sapiens
  misc_RNA (1)...(19): siRNA sense strand
caaaucagauaacgucacu

SEQ ID NO: 1500260 - RNA, 19 nt, Homo sapiens
  misc_RNA (1)...(19): siRNA sense strand
ugauggaacuuuacuagca

SEQ ID NO: 1500261 - RNA, 19 nt, Homo sapiens
  misc_RNA (1)...(19): siRNA sense strand
ggugauaguuucuccacau

SEQ ID NO: 1500262 - RNA, 19 nt, Homo sapiens
  misc_RNA (1)...(19): siRNA sense strand
ccacauuugauacuccuua

SEQ ID NO: 1500263 - RNA, 19 nt, Homo sapiens
  misc_RNA (1)...(19): siRNA sense strand
gcaaucguguauucagaca

SEQ ID NO: 1500264 - RNA, 19 nt, Homo sapiens
  misc_RNA (1)...(19): siRNA sense strand
gugauaguuucuccacauu

SEQ ID NO: 1500265 - RNA, 19 nt, Homo sapiens
  misc_RNA (1)...(19): siRNA sense strand
agaagaagcaaucguguau

SEQ ID NO: 1500266 - RNA, 19 nt, Homo sapiens
  misc_RNA (1)...(19): siRNA sense strand
gagccaaaauaguuucuuu

SEQ ID NO: 1500267 - RNA, 19 nt, Homo sapiens
  misc_RNA (1)...(19): siRNA sense strand
ucauccagcuucagauuuc

SEQ ID NO: 1500268 - RNA, 19 nt, Homo sapiens
  misc_RNA (1)...(19): siRNA sense strand
cuagcaaaguauagaaaga

SEQ ID NO: 1500269 - RNA, 19 nt, Homo sapiens
  misc_RNA (1)...(19): siRNA sense strand
cagaagaagcaaucgugua

SEQ ID NO: 1500270 - RNA, 19 nt, Homo sapiens
  misc_RNA (1)...(19): siRNA sense strand
gaagaagcaaucguguauu

SEQ ID NO: 1500271 - RNA, 19 nt, Homo sapiens
  misc_RNA (1)...(19): siRNA sense strand
gaggcucuaucccugaaga

SEQ ID NO: 1500272 - RNA, 19 nt, Homo sapiens
  misc_RNA (1)...(19): siRNA sense strand
cuucagauuucuuccauca

SEQ ID NO: 1500273 - RNA, 19 nt, Homo sapiens
  misc_RNA (1)...(19): siRNA sense strand
gaugcugggaaauuauaua

SEQ ID NO: 1500274 - RNA, 19 nt, Homo sapiens
  misc_RNA (1)...(19): siRNA sense strand
acauagaccugaagaagcu

SEQ ID NO: 1500275 - RNA, 19 nt, Homo sapiens
  misc_RNA (1)...(19): siRNA sense strand
gggcaucugcuacgacaug

SEQ ID NO: 1500276 - RNA, 19 nt, Homo sapiens
  misc_RNA (1)...(19): siRNA sense strand
ugaaauacgccagcaaauc

SEQ ID NO: 1500277 - RNA, 19 nt, Homo sapiens
  misc_RNA (1)...(19): siRNA sense strand
aagcaaucguguauucaga

SEQ ID NO: 1500278 - RNA, 19 nt, Homo sapiens
  misc_RNA (1)...(19): siRNA sense strand
acaaaucuacgcacagaga

SEQ ID NO: 1500279 - RNA, 19 nt, Homo sapiens
  misc_RNA (1)...(19): siRNA sense strand
ccaaagcuggcacagaaga

SEQ ID NO: 1500280 - RNA, 19 nt, Homo sapiens
  misc_RNA (1)...(19): siRNA sense strand
gaagcaaucguguauucag

SEQ ID NO: 1500281 - RNA, 19 nt, Homo sapiens
  misc_RNA (1)...(19): siRNA sense strand
ucuaugcuguggagaugaa

SEQ ID NO: 1500282 - RNA, 19 nt, Homo sapiens
  misc_RNA (1)...(19): siRNA sense strand
gaauccacacagaagcuuu

SEQ ID NO: 1500283 - RNA, 19 nt, Homo sapiens
  misc_RNA (1)...(19): siRNA sense strand
gaggaugcugggaaauuau

SEQ ID NO: 1500284 - RNA, 19 nt, Homo sapiens
  misc_RNA (1)...(19): siRNA sense strand
agacauagaccugaagaag

SEQ ID NO: 1500285 - RNA, 19 nt, Homo sapiens
  misc_RNA (1)...(19): siRNA sense strand
uuucuuccaucaaaucaga

SEQ ID NO: 1500286 - RNA, 19 nt, Homo sapiens
  misc_RNA (1)...(19): siRNA sense strand
gcagagcuugcacaaaucu

SEQ ID NO: 1500287 - RNA, 19 nt, Homo sapiens
  misc_RNA (1)...(19): siRNA sense strand
ccucuaugcuguggagaug

SEQ ID NO: 1500288 - RNA, 19 nt, Homo sapiens
  misc_RNA (1)...(19): siRNA sense strand
caaagcuggcacagaagaa

SEQ ID NO: 1500289 - RNA, 19 nt, Homo sapiens
  misc_RNA (1)...(19): siRNA sense strand
uugccggaaugcuuuaauu

SEQ ID NO: 1500290 - RNA, 19 nt, Homo sapiens
  misc_RNA (1)...(19): siRNA sense strand
ccuggugaauccacacaga

SEQ ID NO: 1500291 - RNA, 19 nt, Homo sapiens
  misc_RNA (1)...(19): siRNA sense strand
uuucugaaguagcaaagga

SEQ ID NO: 1500292 - RNA, 19 nt, Homo sapiens
  misc_RNA (1)...(19): siRNA sense strand
gcacagaagaagcaaucgu

SEQ ID NO: 1500293 - RNA, 19 nt, Homo sapiens
  misc_RNA (1)...(19): siRNA sense strand
gaugacaaagccuccuaug

SEQ ID NO: 1500294 - RNA, 19 nt, Homo sapiens
  misc_RNA (1)...(19): siRNA sense strand
uccugaauaugcagagaaa

SEQ ID NO: 1500295 - RNA, 19 nt, Homo sapiens
  misc_RNA (1)...(19): siRNA sense strand
gggaugacaaagccuccua

SEQ ID NO: 1500296 - RNA, 19 nt, Homo sapiens
  misc_RNA (1)...(19): siRNA sense strand
ugaguccgggugauaguuu

SEQ ID NO: 1500297 - RNA, 19 nt, Homo sapiens
  misc_RNA (1)...(19): siRNA sense strand
gaagaggaugcugggaaau

SEQ ID NO: 1500298 - RNA, 19 nt, Homo sapiens
  misc_RNA (1)...(19): siRNA sense strand
ccucauccagcuucagauu

SEQ ID NO: 1500299 - RNA, 19 nt, Homo sapiens
  misc_RNA (1)...(19): siRNA sense strand
aagaggaugcugggaaauu

SEQ ID NO: 1500300 - RNA, 19 nt, Homo sapiens
  misc_RNA (1)...(19): siRNA sense strand
ugcagcauauaucucauug

SEQ ID NO: 1500301 - RNA, 19 nt, Homo sapiens
  misc_RNA (1)...(19): siRNA sense strand
caaaguauagaaagaucca

SEQ ID NO: 1500302 - RNA, 19 nt, Homo sapiens
  misc_RNA (1)...(19): siRNA sense strand
uggaggcucuaucccugaa

SEQ ID NO: 1500303 - RNA, 19 nt, Homo sapiens
  misc_RNA (1)...(19): siRNA sense strand
ggaggcagcaacgcaagga

SEQ ID NO: 1500304 - RNA, 19 nt, Homo sapiens
  misc_RNA (1)...(19): siRNA sense strand
gaguccgggugauaguuuc

SEQ ID NO: 1500305 - RNA, 19 nt, Homo sapiens
  misc_RNA (1)...(19): siRNA sense strand
ggaugacaaagccuccuau

SEQ ID NO: 1500306 - RNA, 19 nt, Homo sapiens
  misc_RNA (1)...(19): siRNA sense strand
ugauaguuucuccacauuu

SEQ ID NO: 1500307 - RNA, 19 nt, Homo sapiens
  misc_RNA (1)...(19): siRNA sense strand
ugaaguagcaaaggaaugc

SEQ ID NO: 1500308 - RNA, 19 nt, Homo sapiens
  misc_RNA (1)...(19): siRNA sense strand
ccaggagcuuuuaaucuga

SEQ ID NO: 1500309 - RNA, 19 nt, Homo sapiens
  misc_RNA (1)...(19): siRNA sense strand
gcuuuaauucuccauaugg

SEQ ID NO: 1500310 - RNA, 19 nt, Homo sapiens
  misc_RNA (1)...(19): siRNA sense strand
aggaugcugggaaauuaua

SEQ ID NO: 1500311 - RNA, 19 nt, Homo sapiens
  misc_RNA (1)...(19): siRNA sense strand
gcccucauccagcuucaga

SEQ ID NO: 1500312 - RNA, 19 nt, Homo sapiens
  misc_RNA (1)...(19): siRNA sense strand
caagaagccuguccuggaa

SEQ ID NO: 1500313 - RNA, 19 nt, Homo sapiens
  misc_RNA (1)...(19): siRNA sense strand
gaccacaagucaacaagga

SEQ ID NO: 1500314 - RNA, 19 nt, Homo sapiens
  misc_RNA (1)...(19): siRNA sense strand
gaccugggcugcuccacuu

SEQ ID NO: 1500315 - RNA, 19 nt, Homo sapiens
  misc_RNA (1)...(19): siRNA sense strand
gagaagucauggcugugaa

SEQ ID NO: 1500316 - RNA, 19 nt, Homo sapiens
  misc_RNA (1)...(19): siRNA sense strand
ccacaagucaacaaggaaa

SEQ ID NO: 1500317 - RNA, 19 nt, Homo sapiens
  misc_RNA (1)...(19): siRNA sense strand
gagcuugagcguugcaaug

SEQ ID NO: 1500318 - RNA, 19 nt, Homo sapiens
  misc_RNA (1)...(19): siRNA sense strand
uggcguggauccuacaguu

SEQ ID NO: 1500319 - RNA, 19 nt, Homo sapiens
  misc_RNA (1)...(19): siRNA sense strand
gauccuacaguuucucaug

SEQ ID NO: 1500320 - RNA, 19 nt, Homo sapiens
  misc_RNA (1)...(19): siRNA sense strand
uggcguggauccuacaguu

SEQ ID NO: 1500321 - RNA, 19 nt, Homo sapiens
  misc_RNA (1)...(19): siRNA sense strand
cagcuucucuacugaaagg

SEQ ID NO: 1500322 - RNA, 19 nt, Homo sapiens
  misc_RNA (1)...(19): siRNA sense strand
cagcuucucuacugaaagg

SEQ ID NO: 1500323 - RNA, 19 nt, Homo sapiens
  misc_RNA (1)...(19): siRNA sense strand
cagcuucucuacugaaagg

SEQ ID NO: 1500324 - RNA, 19 nt, Homo sapiens
  misc_RNA (1)...(19): siRNA sense strand
gaaaggcgguguggauccu

SEQ ID NO: 1500325 - RNA, 19 nt, Homo sapiens
  misc_RNA (1)...(19): siRNA sense strand
gaaaggcgguguggauccu

SEQ ID NO: 1500326 - RNA, 19 nt, Homo sapiens
  misc_RNA (1)...(19): siRNA sense strand
acugaaagguggcguggau

SEQ ID NO: 1500327 - RNA, 19 nt, Homo sapiens
  misc_RNA (1)...(19): siRNA sense strand
cggcguggauccucagcuu

SEQ ID NO: 1500328 - RNA, 19 nt, Homo sapiens
  misc_RNA (1)...(19): siRNA sense strand
acugaaagguggcguggau

SEQ ID NO: 1500329 - RNA, 19 nt, Homo sapiens
  misc_RNA (1)...(19): siRNA sense strand
uacagcuucucuacugaaa

SEQ ID NO: 1500330 - RNA, 19 nt, Homo sapiens
  misc_RNA (1)...(19): siRNA sense strand
acugaaagguggcguggau

SEQ ID NO: 1500331 - RNA, 19 nt, Homo sapiens
  misc_RNA (1)...(19): siRNA sense strand
uacagcuucucuacugaaa

SEQ ID NO: 1500332 - RNA, 19 nt, Homo sapiens
  misc_RNA (1)...(19): siRNA sense strand
acugaaagguggcguggau

SEQ ID NO: 1500333 - RNA, 19 nt, Homo sapiens
  misc_RNA (1)...(19): siRNA sense strand
uacagcuucucuacugaaa

SEQ ID NO: 1500334 - RNA, 19 nt, Homo sapiens
  misc_RNA (1)...(19): siRNA sense strand
gcguggagcagcacaagga

SEQ ID NO: 1500335 - RNA, 19 nt, Homo sapiens
  misc_RNA (1)...(19): siRNA sense strand
auccucagcuucucgugua

SEQ ID NO: 1500336 - RNA, 19 nt, Homo sapiens
  misc_RNA (1)...(19): siRNA sense strand
cuugagcguugcaaugaga

SEQ ID NO: 1500337 - RNA, 19 nt, Homo sapiens
  misc_RNA (1)...(19): siRNA sense strand
gcguggauccuacaguuuc

SEQ ID NO: 1500338 - RNA, 19 nt, Homo sapiens
  misc_RNA (1)...(19): siRNA sense strand
gcguggauccuacaguuuc

SEQ ID NO: 1500339 - RNA, 19 nt, Homo sapiens
  misc_RNA (1)...(19): siRNA sense strand
ccuacagcuucucuacuga

SEQ ID NO: 1500340 - RNA, 19 nt, Homo sapiens
  misc_RNA (1)...(19): siRNA sense strand
ccuacagcuucucuacuga

SEQ ID NO: 1500341 - RNA, 19 nt, Homo sapiens
  misc_RNA (1)...(19): siRNA sense strand
ccuacagcuucucuacuga

SEQ ID NO: 1500342 - RNA, 19 nt, Homo sapiens
  misc_RNA (1)...(19): siRNA sense strand
caagucaacaaggaaaguu

SEQ ID NO: 1500343 - RNA, 19 nt, Homo sapiens
  misc_RNA (1)...(19): siRNA sense strand
ugagaagucauggcuguga

SEQ ID NO: 1500344 - RNA, 19 nt, Homo sapiens
  misc_RNA (1)...(19): siRNA sense strand
gauccuacagcuucucuac

SEQ ID NO: 1500345 - RNA, 19 nt, Homo sapiens
  misc_RNA (1)...(19): siRNA sense strand
uccuacagcuucucuacug

SEQ ID NO: 1500346 - RNA, 19 nt, Homo sapiens
  misc_RNA (1)...(19): siRNA sense strand
gauccuacagcuucucuac

SEQ ID NO: 1500347 - RNA, 19 nt, Homo sapiens
  misc_RNA (1)...(19): siRNA sense strand
uccuacagcuucucuacug

SEQ ID NO: 1500348 - RNA, 19 nt, Homo sapiens
  misc_RNA (1)...(19): siRNA sense strand
gauccuacagcuucucuac

SEQ ID NO: 1500349 - RNA, 19 nt, Homo sapiens
  misc_RNA (1)...(19): siRNA sense strand
uccuacagcuucucuacug

SEQ ID NO: 1500350 - RNA, 19 nt, Homo sapiens
  misc_RNA (1)...(19): siRNA sense strand
aaagguggcguggauccua

SEQ ID NO: 1500351 - RNA, 19 nt, Homo sapiens
  misc_RNA (1)...(19): siRNA sense strand
gaagucauggcugugaauc

SEQ ID NO: 1500352 - RNA, 19 nt, Homo sapiens
  misc_RNA (1)...(19): siRNA sense strand
aaagguggcguggauccua

SEQ ID NO: 1500353 - RNA, 19 nt, Homo sapiens
  misc_RNA (1)...(19): siRNA sense strand
aaagguggcguggauccua

SEQ ID NO: 1500354 - RNA, 19 nt, Homo sapiens
  misc_RNA (1)...(19): siRNA sense strand
aaagguggcguggauccua

SEQ ID NO: 1500355 - RNA, 19 nt, Homo sapiens
  misc_RNA (1)...(19): siRNA sense strand
cuacagcuucucuacugaa

SEQ ID NO: 1500356 - RNA, 19 nt, Homo sapiens
  misc_RNA (1)...(19): siRNA sense strand
cuacagcuucucuacugaa

SEQ ID NO: 1500357 - RNA, 19 nt, Homo sapiens
  misc_RNA (1)...(19): siRNA sense strand
cuacagcuucucuacugaa

SEQ ID NO: 1500358 - RNA, 19 nt, Homo sapiens
  misc_RNA (1)...(19): siRNA sense strand
gggcugcuccacuuucaca

SEQ ID NO: 1500359 - RNA, 19 nt, Homo sapiens
  misc_RNA (1)...(19): siRNA sense strand
agaagccuguccuggaaag

SEQ ID NO: 1500360 - RNA, 19 nt, Homo sapiens
  misc_RNA (1)...(19): siRNA sense strand
gcguugcaaugagaaguca

SEQ ID NO: 1500361 - RNA, 19 nt, Homo sapiens
  misc_RNA (1)...(19): siRNA sense strand
gaugagaccuauugcauug

SEQ ID NO: 1500362 - RNA, 19 nt, Homo sapiens
  misc_RNA (1)...(19): siRNA sense strand
ggaaugggcacucuccuua

SEQ ID NO: 1500363 - RNA, 19 nt, Homo sapiens
  misc_RNA (1)...(19): siRNA sense strand
gcgccgagcugguugauuc

SEQ ID NO: 1500364 - RNA, 19 nt, Homo sapiens
  misc_RNA (1)...(19): siRNA sense strand
gaacagcagcuacuuugug

SEQ ID NO: 1500365 - RNA, 19 nt, Homo sapiens
  misc_RNA (1)...(19): siRNA sense strand
ccagaucggugccaaguuc

SEQ ID NO: 1500366 - RNA, 19 nt, Homo sapiens
  misc_RNA (1)...(19): siRNA sense strand
ccacgucuccauuucuuua

SEQ ID NO: 1500367 - RNA, 19 nt, Homo sapiens
  misc_RNA (1)...(19): siRNA sense strand
gcacucuccuuaucagcaa

SEQ ID NO: 1500368 - RNA, 19 nt, Homo sapiens
  misc_RNA (1)...(19): siRNA sense strand
gcagcuacuuuguggaaug

SEQ ID NO: 1500369 - RNA, 19 nt, Homo sapiens
  misc_RNA (1)...(19): siRNA sense strand
gcaagauccgagaagaaua

SEQ ID NO: 1500370 - RNA, 19 nt, Homo sapiens
  misc_RNA (1)...(19): siRNA sense strand
ggaggucgaugagcagaug

SEQ ID NO: 1500371 - RNA, 19 nt, Homo sapiens
  misc_RNA (1)...(19): siRNA sense strand
caagaacagcagcuacuuu

SEQ ID NO: 1500372 - RNA, 19 nt, Homo sapiens
  misc_RNA (1)...(19): siRNA sense strand
ucugggaggugaucaguga

SEQ ID NO: 1500373 - RNA, 19 nt, Homo sapiens
  misc_RNA (1)...(19): siRNA sense strand
caccguggcugcugucuuc

SEQ ID NO: 1500374 - RNA, 19 nt, Homo sapiens
  misc_RNA (1)...(19): siRNA sense strand
gguaacaacugggccaaag

SEQ ID NO: 1500375 - RNA, 19 nt, Homo sapiens
  misc_RNA (1)...(19): siRNA sense strand
gaauacugaugagaccuau

SEQ ID NO: 1500376 - RNA, 19 nt, Homo sapiens
  misc_RNA (1)...(19): siRNA sense strand
ccaaaggccacuacacaga

SEQ ID NO: 1500377 - RNA, 19 nt, Homo sapiens
  misc_RNA (1)...(19): siRNA sense strand
gggcacaggcucuggaaug

SEQ ID NO: 1500378 - RNA, 19 nt, Homo sapiens
  misc_RNA (1)...(19): siRNA sense strand
gaucugaaccaccuugucu

SEQ ID NO: 1500379 - RNA, 19 nt, Homo sapiens
  misc_RNA (1)...(19): siRNA sense strand
cgagaagaauacccugauc

SEQ ID NO: 1500380 - RNA, 19 nt, Homo sapiens
  misc_RNA (1)...(19): siRNA sense strand
gaaugggcacucuccuuau

SEQ ID NO: 1500381 - RNA, 19 nt, Homo sapiens
  misc_RNA (1)...(19): siRNA sense strand
ucagcaagauccgagaaga

SEQ ID NO: 1500382 - RNA, 19 nt, Homo sapiens
  misc_RNA (1)...(19): siRNA sense strand
aagaacagcagcuacuuug

SEQ ID NO: 1500383 - RNA, 19 nt, Homo sapiens
  misc_RNA (1)...(19): siRNA sense strand
cagcagcuacuuuguggaa

SEQ ID NO: 1500384 - RNA, 19 nt, Homo sapiens
  misc_RNA (1)...(19): siRNA sense strand
caagauccgagaagaauac

SEQ ID NO: 1500385 - RNA, 19 nt, Homo sapiens
  misc_RNA (1)...(19): siRNA sense strand
ccuauugcauugacaacga

SEQ ID NO: 1500386 - RNA, 19 nt, Homo sapiens
  misc_RNA (1)...(19): siRNA sense strand
ccaugaaggaggucgauga

SEQ ID NO: 1500387 - RNA, 19 nt, Homo sapiens
  misc_RNA (1)...(19): siRNA sense strand
cagcaagauccgagaagaa

SEQ ID NO: 1500388 - RNA, 19 nt, Homo sapiens
  misc_RNA (1)...(19): siRNA sense strand
gaauggauccccaacaaug

SEQ ID NO: 1500389 - RNA, 19 nt, Homo sapiens
  misc_RNA (1)...(19): siRNA sense strand
auacugaugagaccuauug

SEQ ID NO: 1500390 - RNA, 19 nt, Homo sapiens
  misc_RNA (1)...(19): siRNA sense strand
ccgcaucucuguguacuac

SEQ ID NO: 1500391 - RNA, 19 nt, Homo sapiens
  misc_RNA (1)...(19): siRNA sense strand
gauggcagucaccuucauu

SEQ ID NO: 1500392 - RNA, 19 nt, Homo sapiens
  misc_RNA (1)...(19): siRNA sense strand
guggucggauguccaugaa

SEQ ID NO: 1500393 - RNA, 19 nt, Homo sapiens
  misc_RNA (1)...(19): siRNA sense strand
cuuuagaccagacaacuuu

SEQ ID NO: 1500394 - RNA, 19 nt, Homo sapiens
  misc_RNA (1)...(19): siRNA sense strand
ugaugagaccuauugcauu

SEQ ID NO: 1500395 - RNA, 19 nt, Homo sapiens
  misc_RNA (1)...(19): siRNA sense strand
gguagagaauacugaugag

SEQ ID NO: 1500396 - RNA, 19 nt, Homo sapiens
  misc_RNA (1)...(19): siRNA sense strand
aaugggcacucuccuuauc

SEQ ID NO: 1500397 - RNA, 19 nt, Homo sapiens
  misc_RNA (1)...(19): siRNA sense strand
ggcacaggcucuggaaugg

SEQ ID NO: 1500398 - RNA, 19 nt, Homo sapiens
  misc_RNA (1)...(19): siRNA sense strand
cgaccucgucucugaguau

SEQ ID NO: 1500399 - RNA, 19 nt, Homo sapiens
  misc_RNA (1)...(19): siRNA sense strand
guccaucaguugguagaga

SEQ ID NO: 1500400 - RNA, 19 nt, Homo sapiens
  misc_RNA (1)...(19): siRNA sense strand
ugguagagaauacugauga

SEQ ID NO: 1500401 - RNA, 19 nt, Homo sapiens
  misc_RNA (1)...(19): siRNA sense strand
guagagaauacugaugaga

SEQ ID NO: 1500402 - RNA, 19 nt, Homo sapiens
  misc_RNA (1)...(19): siRNA sense strand
uccaucaguugguagagaa

SEQ ID NO: 1500403 - RNA, 19 nt, Homo sapiens
  misc_RNA (1)...(19): siRNA sense strand
agaauacugaugagaccua

SEQ ID NO: 1500404 - RNA, 19 nt, Homo sapiens
  misc_RNA (1)...(19): siRNA sense strand
gguugauucuguccuggau

SEQ ID NO: 1500405 - RNA, 19 nt, Homo sapiens
  misc_RNA (1)...(19): siRNA sense strand
gcuacuuuguggaauggau

SEQ ID NO: 1500406 - RNA, 19 nt, Homo sapiens
  misc_RNA (1)...(19): siRNA sense strand
augcugaccuccgcaaguu

SEQ ID NO: 1500407 - RNA, 19 nt, Homo sapiens
  misc_RNA (1)...(19): siRNA sense strand
caucaguugguagagaaua

SEQ ID NO: 1500408 - RNA, 19 nt, Homo sapiens
  misc_RNA (1)...(19): siRNA sense strand
gggaaaucgugcacaucca

SEQ ID NO: 1500409 - RNA, 19 nt, Homo sapiens
  misc_RNA (1)...(19): siRNA sense strand
gcagcuggaccgcaucucu

SEQ ID NO: 1500410 - RNA, 19 nt, Homo sapiens
  misc_RNA (1)...(19): siRNA sense strand
ucccacgucuccauuucuu

SEQ ID NO: 1500411 - RNA, 19 nt, Homo sapiens
  misc_RNA (1)...(19): siRNA sense strand
gcucuggaaugggcacucu

SEQ ID NO: 1500412 - RNA, 19 nt, Homo sapiens
  misc_RNA (1)...(19): siRNA sense strand
gaccucgucucugaguauc

SEQ ID NO: 1500413 - RNA, 19 nt, Homo sapiens
  misc_RNA (1)...(19): siRNA sense strand
uuaacgugcagaacaagaa

SEQ ID NO: 1500414 - RNA, 19 nt, Homo sapiens
  misc_RNA (1)...(19): siRNA sense strand
gaucgcaucaugaauaccu

SEQ ID NO: 1500415 - RNA, 19 nt, Homo sapiens
  misc_RNA (1)...(19): siRNA sense strand
uugauucuguccuggaugu

SEQ ID NO: 1500416 - RNA, 19 nt, Homo sapiens
  misc_RNA (1)...(19): siRNA sense strand
acagguggcaaauauguuc

SEQ ID NO: 1500417 - RNA, 19 nt, Homo sapiens
  misc_RNA (1)...(19): siRNA sense strand
cagcuacuuuguggaaugg

SEQ ID NO: 1500418 - RNA, 19 nt, Homo sapiens
  misc_RNA (1)...(19): siRNA sense strand
gaaauuccuugagcucaua

SEQ ID NO: 1500419 - RNA, 19 nt, Homo sapiens
  misc_RNA (1)...(19): siRNA sense strand
gaggagauccaccacuuua

SEQ ID NO: 1500420 - RNA, 19 nt, Homo sapiens
  misc_RNA (1)...(19): siRNA sense strand
gcacaaggaccaacgugua

SEQ ID NO: 1500421 - RNA, 19 nt, Homo sapiens
  misc_RNA (1)...(19): siRNA sense strand
gccagugucugaccuauga

SEQ ID NO: 1500422 - RNA, 19 nt, Homo sapiens
  misc_RNA (1)...(19): siRNA sense strand
cagagugccugaaggagua

SEQ ID NO: 1500423 - RNA, 19 nt, Homo sapiens
  misc_RNA (1)...(19): siRNA sense strand
gcauccacauugcacauaa

SEQ ID NO: 1500424 - RNA, 19 nt, Homo sapiens
  misc_RNA (1)...(19): siRNA sense strand
gcacauaaaguugguauca

SEQ ID NO: 1500425 - RNA, 19 nt, Homo sapiens
  misc_RNA (1)...(19): siRNA sense strand
gcugacgucuugacuguga

SEQ ID NO: 1500426 - RNA, 19 nt, Homo sapiens
  misc_RNA (1)...(19): siRNA sense strand
caagccugaugcuauauuu

SEQ ID NO: 1500427 - RNA, 19 nt, Homo sapiens
  misc_RNA (1)...(19): siRNA sense strand
gcaacgugcugcuggacaa

SEQ ID NO: 1500428 - RNA, 19 nt, Homo sapiens
  misc_RNA (1)...(19): siRNA sense strand
ccacauugcacauaaaguu

SEQ ID NO: 1500429 - RNA, 19 nt, Homo sapiens
  misc_RNA (1)...(19): siRNA sense strand
ccacaagcgcuauuugaaa

SEQ ID NO: 1500430 - RNA, 19 nt, Homo sapiens
  misc_RNA (1)...(19): siRNA sense strand
ugaagacaguccaugagaa

SEQ ID NO: 1500431 - RNA, 19 nt, Homo sapiens
  misc_RNA (1)...(19): siRNA sense strand
ucaaauaccuagccacacu

SEQ ID NO: 1500432 - RNA, 19 nt, Homo sapiens
  misc_RNA (1)...(19): siRNA sense strand
gcaccgccauggacaagug

SEQ ID NO: 1500433 - RNA, 19 nt, Homo sapiens
  misc_RNA (1)...(19): siRNA sense strand
ucagcuaccuggagaacaa

SEQ ID NO: 1500434 - RNA, 19 nt, Homo sapiens
  misc_RNA (1)...(19): siRNA sense strand
gaugcaagccugaugcuau

SEQ ID NO: 1500435 - RNA, 19 nt, Homo sapiens
  misc_RNA (1)...(19): siRNA sense strand
gcuggaagcaggagauuga

SEQ ID NO: 1500436 - RNA, 19 nt, Homo sapiens
  misc_RNA (1)...(19): siRNA sense strand
caaucuugcugacgucuug

SEQ ID NO: 1500437 - RNA, 19 nt, Homo sapiens
  misc_RNA (1)...(19): siRNA sense strand
gcccauggcuuggaagaug

SEQ ID NO: 1500438 - RNA, 19 nt, Homo sapiens
  misc_RNA (1)...(19): siRNA sense strand
uggaggagguggccaagaa

SEQ ID NO: 1500439 - RNA, 19 nt, Homo sapiens
  misc_RNA (1)...(19): siRNA sense strand
gaagacaguccaugagaag

SEQ ID NO: 1500440 - RNA, 19 nt, Homo sapiens
  misc_RNA (1)...(19): siRNA sense strand
gaagucugcauccacauug

SEQ ID NO: 1500441 - RNA, 19 nt, Homo sapiens
  misc_RNA (1)...(19): siRNA sense strand
ggaagucugcauccacauu

SEQ ID NO: 1500442 - RNA, 19 nt, Homo sapiens
  misc_RNA (1)...(19): siRNA sense strand
caaaccacauccuagagau

SEQ ID NO: 1500443 - RNA, 19 nt, Homo sapiens
  misc_RNA (1)...(19): siRNA sense strand
augcaagccugaugcuaua

SEQ ID NO: 1500444 - RNA, 19 nt, Homo sapiens
  misc_RNA (1)...(19): siRNA sense strand
ucacccagcugucccacuu

SEQ ID NO: 1500445 - RNA, 19 nt, Homo sapiens
  misc_RNA (1)...(19): siRNA sense strand
gcagggcaagcaugaguuu

SEQ ID NO: 1500446 - RNA, 19 nt, Homo sapiens
  misc_RNA (1)...(19): siRNA sense strand
agcaugaguuugugaauga

SEQ ID NO: 1500447 - RNA, 19 nt, Homo sapiens
  misc_RNA (1)...(19): siRNA sense strand
acgagcacaucaucaagua

SEQ ID NO: 1500448 - RNA, 19 nt, Homo sapiens
  misc_RNA (1)...(19): siRNA sense strand
ggaggagauccaccacuuu

SEQ ID NO: 1500449 - RNA, 19 nt, Homo sapiens
  misc_RNA (1)...(19): siRNA sense strand
gagauccaccacuuuaaga

SEQ ID NO: 1500450 - RNA, 19 nt, Homo sapiens
  misc_RNA (1)...(19): siRNA sense strand
gaaggaguauaaguucuac

SEQ ID NO: 1500451 - RNA, 19 nt, Homo sapiens
  misc_RNA (1)...(19): siRNA sense strand
ugaaggaguauaaguucua

SEQ ID NO: 1500452 - RNA, 19 nt, Homo sapiens
  misc_RNA (1)...(19): siRNA sense strand
agauggucauggucaaaua

SEQ ID NO: 1500453 - RNA, 19 nt, Homo sapiens
  misc_RNA (1)...(19): siRNA sense strand
agacaguccaugagaagua

SEQ ID NO: 1500454 - RNA, 19 nt, Homo sapiens
  misc_RNA (1)...(19): siRNA sense strand
gagaaccucauacccauuc

SEQ ID NO: 1500455 - RNA, 19 nt, Homo sapiens
  misc_RNA (1)...(19): siRNA sense strand
cgaaauuccuugagcucau

SEQ ID NO: 1500456 - RNA, 19 nt, Homo sapiens
  misc_RNA (1)...(19): siRNA sense strand
gaagcaggagauugacauu

SEQ ID NO: 1500457 - RNA, 19 nt, Homo sapiens
  misc_RNA (1)...(19): siRNA sense strand
caaggaccaacguguauga

SEQ ID NO: 1500458 - RNA, 19 nt, Homo sapiens
  misc_RNA (1)...(19): siRNA sense strand
aggaggaggugaacaagga

SEQ ID NO: 1500459 - RNA, 19 nt, Homo sapiens
  misc_RNA (1)...(19): siRNA sense strand
gcaagccugaugcuauauu

SEQ ID NO: 1500460 - RNA, 19 nt, Homo sapiens
  misc_RNA (1)...(19): siRNA sense strand
ggagauccaccacuuuaag

SEQ ID NO: 1500461 - RNA, 19 nt, Homo sapiens
  misc_RNA (1)...(19): siRNA sense strand
gcaagcaugaguuugugaa

SEQ ID NO: 1500462 - RNA, 19 nt, Homo sapiens
  misc_RNA (1)...(19): siRNA sense strand
ggagacagaggcguccuuu

SEQ ID NO: 1500463 - RNA, 19 nt, Homo sapiens
  misc_RNA (1)...(19): siRNA sense strand
gagcacaucaucaaguaca

SEQ ID NO: 1500464 - RNA, 19 nt, Homo sapiens
  misc_RNA (1)...(19): siRNA sense strand
gcaggagauugacauucug

SEQ ID NO: 1500465 - RNA, 19 nt, Homo sapiens
  misc_RNA (1)...(19): siRNA sense strand
ugaaugacguggcaucacu

SEQ ID NO: 1500466 - RNA, 19 nt, Homo sapiens
  misc_RNA (1)...(19): siRNA sense strand
ggucauggucaaauaccua

SEQ ID NO: 1500467 - RNA, 19 nt, Homo sapiens
  misc_RNA (1)...(19): siRNA sense strand
cauccacauugcacauaaa

SEQ ID NO: 1500468 - RNA, 19 nt, Homo sapiens
  misc_RNA (1)...(19): siRNA sense strand
caacccagaggccaucauu

SEQ ID NO: 1500469 - RNA, 19 nt, Homo sapiens
  misc_RNA (1)...(19): siRNA sense strand
ccaaaccacauccuagaga

SEQ ID NO: 1500470 - RNA, 19 nt, Homo sapiens
  misc_RNA (1)...(19): siRNA sense strand
gcgagggcauggccuaucu

SEQ ID NO: 1500471 - RNA, 19 nt, Homo sapiens
  misc_RNA (1)...(19): siRNA sense strand
cgagacagccagccucaug

SEQ ID NO: 1500472 - RNA, 19 nt, Homo sapiens
  misc_RNA (1)...(19): siRNA sense strand
gggcaagcaugaguuugug

SEQ ID NO: 1500473 - RNA, 19 nt, Homo sapiens
  misc_RNA (1)...(19): siRNA sense strand
ccugugaggucuaucaucu

SEQ ID NO: 1500474 - RNA, 19 nt, Homo sapiens
  misc_RNA (1)...(19): siRNA sense strand
cacaagcgcuauuugaaaa

SEQ ID NO: 1500475 - RNA, 19 nt, Homo sapiens
  misc_RNA (1)...(19): siRNA sense strand
gagacagccagccucauga

SEQ ID NO: 1500476 - RNA, 19 nt, Homo sapiens
  misc_RNA (1)...(19): siRNA sense strand
gagcagggcaagcaugagu

SEQ ID NO: 1500477 - RNA, 19 nt, Homo sapiens
  misc_RNA (1)...(19): siRNA sense strand
gaagaacugcugggagaca

SEQ ID NO: 1500478 - RNA, 19 nt, Homo sapiens
  misc_RNA (1)...(19): siRNA sense strand
cuacauccaccgagaccua

SEQ ID NO: 1500479 - RNA, 19 nt, Homo sapiens
  misc_RNA (1)...(19): siRNA sense strand
ggaagcaggagauugacau

SEQ ID NO: 1500480 - RNA, 19 nt, Homo sapiens
  misc_RNA (1)...(19): siRNA sense strand
gcgagaugguggcggugaa

SEQ ID NO: 1500481 - RNA, 19 nt, Homo sapiens
  misc_RNA (1)...(19): siRNA sense strand
ggacggccuguaccucauu

SEQ ID NO: 1500482 - RNA, 19 nt, Homo sapiens
  misc_RNA (1)...(19): siRNA sense strand
gcagauggucauggucaaa

SEQ ID NO: 1500483 - RNA, 19 nt, Homo sapiens
  misc_RNA (1)...(19): siRNA sense strand
aggaggagauccaccacuu

SEQ ID NO: 1500484 - RNA, 19 nt, Homo sapiens
  misc_RNA (1)...(19): siRNA sense strand
ccuccaaucucaucaucau

SEQ ID NO: 1500485 - RNA, 19 nt, Homo sapiens
  misc_RNA (1)...(19): siRNA sense strand
gauccaccacuuuaagaau

SEQ ID NO: 1500486 - RNA, 19 nt, Homo sapiens
  misc_RNA (1)...(19): siRNA sense strand
aagcaugaguuugugaaug

SEQ ID NO: 1500487 - RNA, 19 nt, Homo sapiens
  misc_RNA (1)...(19): siRNA sense strand
acauaaaguugguaucacu

SEQ ID NO: 1500488 - RNA, 19 nt, Homo sapiens
  misc_RNA (1)...(19): siRNA sense strand
ccgaaggccacgaguacua

SEQ ID NO: 1500489 - RNA, 19 nt, Homo sapiens
  misc_RNA (1)...(19): siRNA sense strand
gcuacgauccgaccaacga

SEQ ID NO: 1500490 - RNA, 19 nt, Homo sapiens
  misc_RNA (1)...(19): siRNA sense strand
gcuugcggcuccgaaaguu

SEQ ID NO: 1500491 - RNA, 19 nt, Homo sapiens
  misc_RNA (1)...(19): siRNA sense strand
uagaggaggaggugaacaa

SEQ ID NO: 1500492 - RNA, 19 nt, Homo sapiens
  misc_RNA (1)...(19): siRNA sense strand
gaggagguggccaagaaga

SEQ ID NO: 1500493 - RNA, 19 nt, Homo sapiens
  misc_RNA (1)...(19): siRNA sense strand
cacaaggaccaacguguau

SEQ ID NO: 1500494 - RNA, 19 nt, Homo sapiens
  misc_RNA (1)...(19): siRNA sense strand
gcugguggacggcuauuuc

SEQ ID NO: 1500495 - RNA, 19 nt, Homo sapiens
  misc_RNA (1)...(19): siRNA sense strand
ccucauacccauucugaag

SEQ ID NO: 1500496 - RNA, 19 nt, Homo sapiens
  misc_RNA (1)...(19): siRNA sense strand
acgacaggcuggucaagau

SEQ ID NO: 1500497 - RNA, 19 nt, Homo sapiens
  misc_RNA (1)...(19): siRNA sense strand
ucauuugaguaccucuuug

SEQ ID NO: 1500498 - RNA, 19 nt, Homo sapiens
  misc_RNA (1)...(19): siRNA sense strand
gacaguccaugagaaguac

SEQ ID NO: 1500499 - RNA, 19 nt, Homo sapiens
  misc_RNA (1)...(19): siRNA sense strand
caaucucuuugcccucuuc

SEQ ID NO: 1500500 - RNA, 19 nt, Homo sapiens
  misc_RNA (1)...(19): siRNA sense strand
uugcugacgucuugacugu

SEQ ID NO: 1500501 - RNA, 19 nt, Homo sapiens
  misc_RNA (1)...(19): siRNA sense strand
ccacagcuggccacacuca

SEQ ID NO: 1500502 - RNA, 19 nt, Homo sapiens
  misc_RNA (1)...(19): siRNA sense strand
ccaccggguugaccagaag

SEQ ID NO: 1500503 - RNA, 19 nt, Homo sapiens
  misc_RNA (1)...(19): siRNA sense strand
agacagaggcguccuuucg

SEQ ID NO: 1500504 - RNA, 19 nt, Homo sapiens
  misc_RNA (1)...(19): siRNA sense strand
gccugaaggaguauaaguu

SEQ ID NO: 1500505 - RNA, 19 nt, Homo sapiens
  misc_RNA (1)...(19): siRNA sense strand
agcaggagauugacauucu

SEQ ID NO: 1500506 - RNA, 19 nt, Homo sapiens
  misc_RNA (1)...(19): siRNA sense strand
ccuccuugcuucaaucucu

SEQ ID NO: 1500507 - RNA, 19 nt, Homo sapiens
  misc_RNA (1)...(19): siRNA sense strand
gcucuucgcccagcagauc

SEQ ID NO: 1500508 - RNA, 19 nt, Homo sapiens
  misc_RNA (1)...(19): siRNA sense strand
cauuugaguaccucuuuga

SEQ ID NO: 1500509 - RNA, 19 nt, Homo sapiens
  misc_RNA (1)...(19): siRNA sense strand
ccugaaggaguauaaguuc

SEQ ID NO: 1500510 - RNA, 19 nt, Homo sapiens
  misc_RNA (1)...(19): siRNA sense strand
acaucgcccuggccuucua

SEQ ID NO: 1500511 - RNA, 19 nt, Homo sapiens
  misc_RNA (1)...(19): siRNA sense strand
gcuggacccuagucaccau

SEQ ID NO: 1500512 - RNA, 19 nt, Homo sapiens
  misc_RNA (1)...(19): siRNA sense strand
cagacggcaugcagagcuu

SEQ ID NO: 1500513 - RNA, 19 nt, Homo sapiens
  misc_RNA (1)...(19): siRNA sense strand
uccaccacuuuaagaauga

SEQ ID NO: 1500514 - RNA, 19 nt, Homo sapiens
  misc_RNA (1)...(19): siRNA sense strand
uacgaguggugcucaaagu

SEQ ID NO: 1500515 - RNA, 19 nt, Homo sapiens
  misc_RNA (1)...(19): siRNA sense strand
gaaaccuccaaucucauca

SEQ ID NO: 1500516 - RNA, 19 nt, Homo sapiens
  misc_RNA (1)...(19): siRNA sense strand
acacgcaccuggccuucgu

SEQ ID NO: 1500517 - RNA, 19 nt, Homo sapiens
  misc_RNA (1)...(19): siRNA sense strand
guucuacuaugcgucagau

SEQ ID NO: 1500518 - RNA, 19 nt, Homo sapiens
  misc_RNA (1)...(19): siRNA sense strand
ccacagacgugaccgagua

SEQ ID NO: 1500519 - RNA, 19 nt, Homo sapiens
  misc_RNA (1)...(19): siRNA sense strand
ggucaugucuucccacuuc

SEQ ID NO: 1500520 - RNA, 19 nt, Homo sapiens
  misc_RNA (1)...(19): siRNA sense strand
gagcugugcuuaccucuuc

SEQ ID NO: 1500521 - RNA, 19 nt, Homo sapiens
  misc_RNA (1)...(19): siRNA sense strand
gcaccugucuguaaugauc

SEQ ID NO: 1500522 - RNA, 19 nt, Homo sapiens
  misc_RNA (1)...(19): siRNA sense strand
gugcuuaccucuucuguca

SEQ ID NO: 1500523 - RNA, 19 nt, Homo sapiens
  misc_RNA (1)...(19): siRNA sense strand
gcaucgaggucaugucuuc

SEQ ID NO: 1500524 - RNA, 19 nt, Homo sapiens
  misc_RNA (1)...(19): siRNA sense strand
gcaccaucauugucaagaa

SEQ ID NO: 1500525 - RNA, 19 nt, Homo sapiens
  misc_RNA (1)...(19): siRNA sense strand
ccaaacugcuggcuacuag

SEQ ID NO: 1500526 - RNA, 19 nt, Homo sapiens
  misc_RNA (1)...(19): siRNA sense strand
ucaagaagcugccauaccu

SEQ ID NO: 1500527 - RNA, 19 nt, Homo sapiens
  misc_RNA (1)...(19): siRNA sense strand
gcacaccaguggcuguaca

SEQ ID NO: 1500528 - RNA, 19 nt, Homo sapiens
  misc_RNA (1)...(19): siRNA sense strand
gggcguggccacagucuuu

SEQ ID NO: 1500529 - RNA, 19 nt, Homo sapiens
  misc_RNA (1)...(19): siRNA sense strand
gagaugaagaaagcaauuu

SEQ ID NO: 1500530 - RNA, 19 nt, Homo sapiens
  misc_RNA (1)...(19): siRNA sense strand
ggagaugaagaaagcaauu

SEQ ID NO: 1500531 - RNA, 19 nt, Homo sapiens
  misc_RNA (1)...(19): siRNA sense strand
gagaacaagagcaagcaaa

SEQ ID NO: 1500532 - RNA, 19 nt, Homo sapiens
  misc_RNA (1)...(19): siRNA sense strand
ucaccacacuggccaagga

SEQ ID NO: 1500533 - RNA, 19 nt, Homo sapiens
  misc_RNA (1)...(19): siRNA sense strand
gagcugaccggccagauag

SEQ ID NO: 1500534 - RNA, 19 nt, Homo sapiens
  misc_RNA (1)...(19): siRNA sense strand
caaauccgccagcuccaaa

SEQ ID NO: 1500535 - RNA, 19 nt, Homo sapiens
  misc_RNA (1)...(19): siRNA sense strand
uggaguggcuaaagcagaa

SEQ ID NO: 1500536 - RNA, 19 nt, Homo sapiens
  misc_RNA (1)...(19): siRNA sense strand
ccagugacccugacgcuau

SEQ ID NO: 1500537 - RNA, 19 nt, Homo sapiens
  misc_RNA (1)...(19): siRNA sense strand
gacugguacuuccugauga

SEQ ID NO: 1500538 - RNA, 19 nt, Homo sapiens
  misc_RNA (1)...(19): siRNA sense strand
guacuucaugcccaucuuu

SEQ ID NO: 1500539 - RNA, 19 nt, Homo sapiens
  misc_RNA (1)...(19): siRNA sense strand
gugcaccugucuguaauga

SEQ ID NO: 1500540 - RNA, 19 nt, Homo sapiens
  misc_RNA (1)...(19): siRNA sense strand
ucauggcccuggucagcua

SEQ ID NO: 1500541 - RNA, 19 nt, Homo sapiens
  misc_RNA (1)...(19): siRNA sense strand
caacaucggcucccaccau

SEQ ID NO: 1500542 - RNA, 19 nt, Homo sapiens
  misc_RNA (1)...(19): siRNA sense strand
caccugcuccgguaucuuu

SEQ ID NO: 1500543 - RNA, 19 nt, Homo sapiens
  misc_RNA (1)...(19): siRNA sense strand
gagcacagagucccagauc

SEQ ID NO: 1500544 - RNA, 19 nt, Homo sapiens
  misc_RNA (1)...(19): siRNA sense strand
uaucuuuccuggacugugu

SEQ ID NO: 1500545 - RNA, 19 nt, Homo sapiens
  misc_RNA (1)...(19): siRNA sense strand
cgaccugccugagaucuuc

SEQ ID NO: 1500546 - RNA, 19 nt, Homo sapiens
  misc_RNA (1)...(19): siRNA sense strand
gcacaaaaccucuuuaagc

SEQ ID NO: 1500547 - RNA, 19 nt, Homo sapiens
  misc_RNA (1)...(19): siRNA sense strand
gagcacaccaguggcugua

SEQ ID NO: 1500548 - RNA, 19 nt, Homo sapiens
  misc_RNA (1)...(19): siRNA sense strand
gaaccuuccucagcuucau

SEQ ID NO: 1500549 - RNA, 19 nt, Homo sapiens
  misc_RNA (1)...(19): siRNA sense strand
gaccaucaccucccucuac

SEQ ID NO: 1500550 - RNA, 19 nt, Homo sapiens
  misc_RNA (1)...(19): siRNA sense strand
cagugacccugacgcuauu

SEQ ID NO: 1500551 - RNA, 19 nt, Homo sapiens
  misc_RNA (1)...(19): siRNA sense strand
uuccucagcuucaucaaga

SEQ ID NO: 1500552 - RNA, 19 nt, Homo sapiens
  misc_RNA (1)...(19): siRNA sense strand
ggguggagaugaagaaagc

SEQ ID NO: 1500553 - RNA, 19 nt, Homo sapiens
  misc_RNA (1)...(19): siRNA sense strand
uggaggagguggucaaggu

SEQ ID NO: 1500554 - RNA, 19 nt, Homo sapiens
  misc_RNA (1)...(19): siRNA sense strand
ggguggagcacuucaugaa

SEQ ID NO: 1500555 - RNA, 19 nt, Homo sapiens
  misc_RNA (1)...(19): siRNA sense strand
ugagcugaccggccagaua

SEQ ID NO: 1500556 - RNA, 19 nt, Homo sapiens
  misc_RNA (1)...(19): siRNA sense strand
cuucucggcuguccaugaa

SEQ ID NO: 1500557 - RNA, 19 nt, Homo sapiens
  misc_RNA (1)...(19): siRNA sense strand
gguuaccaaucccaucaug

SEQ ID NO: 1500558 - RNA, 19 nt, Homo sapiens
  misc_RNA (1)...(19): siRNA sense strand
uuggaggacuaccuggaua

SEQ ID NO: 1500559 - RNA, 19 nt, Homo sapiens
  misc_RNA (1)...(19): siRNA sense strand
gggcgcugaugacccagaa

SEQ ID NO: 1500560 - RNA, 19 nt, Homo sapiens
  misc_RNA (1)...(19): siRNA sense strand
uggacucgcuguucgacaa

SEQ ID NO: 1500561 - RNA, 19 nt, Homo sapiens
  misc_RNA (1)...(19): siRNA sense strand
aggacuaccuggauaucaa

SEQ ID NO: 1500562 - RNA, 19 nt, Homo sapiens
  misc_RNA (1)...(19): siRNA sense strand
gcacagagucccagauccu

SEQ ID NO: 1500563 - RNA, 19 nt, Homo sapiens
  misc_RNA (1)...(19): siRNA sense strand
caauuuccaaccugacaaa

SEQ ID NO: 1500564 - RNA, 19 nt, Homo sapiens
  misc_RNA (1)...(19): siRNA sense strand
ucaccucccucuacaagac

SEQ ID NO: 1500565 - RNA, 19 nt, Homo sapiens
  misc_RNA (1)...(19): siRNA sense strand
ggaggagguggucaagguu

SEQ ID NO: 1500566 - RNA, 19 nt, Homo sapiens
  misc_RNA (1)...(19): siRNA sense strand
gaaguucuggaugcugauu

SEQ ID NO: 1500567 - RNA, 19 nt, Homo sapiens
  misc_RNA (1)...(19): siRNA sense strand
gcaauuuccaaccugacaa

SEQ ID NO: 1500568 - RNA, 19 nt, Homo sapiens
  misc_RNA (1)...(19): siRNA sense strand
gaggguggagcacuucaug

SEQ ID NO: 1500569 - RNA, 19 nt, Homo sapiens
  misc_RNA (1)...(19): siRNA sense strand
caccaucauugucaagaag

SEQ ID NO: 1500570 - RNA, 19 nt, Homo sapiens
  misc_RNA (1)...(19): siRNA sense strand
ggcuaaagcagaagguguu

SEQ ID NO: 1500571 - RNA, 19 nt, Homo sapiens
  misc_RNA (1)...(19): siRNA sense strand
ugccagcccuccuucuaug

SEQ ID NO: 1500572 - RNA, 19 nt, Homo sapiens
  misc_RNA (1)...(19): siRNA sense strand
cuguggcccucgucucuuu

SEQ ID NO: 1500573 - RNA, 19 nt, Homo sapiens
  misc_RNA (1)...(19): siRNA sense strand
uguccuggguggagaugaa

SEQ ID NO: 1500574 - RNA, 19 nt, Homo sapiens
  misc_RNA (1)...(19): siRNA sense strand
gaaccuucagucccucuuc

SEQ ID NO: 1500575 - RNA, 19 nt, Homo sapiens
  misc_RNA (1)...(19): siRNA sense strand
gcccaucuuuauccuugga

SEQ ID NO: 1500576 - RNA, 19 nt, Homo sapiens
  misc_RNA (1)...(19): siRNA sense strand
ggacuaccuggauaucaag

SEQ ID NO: 1500577 - RNA, 19 nt, Homo sapiens
  misc_RNA (1)...(19): siRNA sense strand
uccgccagcuccaaaguga

SEQ ID NO: 1500578 - RNA, 19 nt, Homo sapiens
  misc_RNA (1)...(19): siRNA sense strand
agacugguacuuccugaug

SEQ ID NO: 1500579 - RNA, 19 nt, Homo sapiens
  misc_RNA (1)...(19): siRNA sense strand
caucaccucccucuacaag

SEQ ID NO: 1500580 - RNA, 19 nt, Homo sapiens
  misc_RNA (1)...(19): siRNA sense strand
ucuuuaagcuguugaaccu

SEQ ID NO: 1500581 - RNA, 19 nt, Homo sapiens
  misc_RNA (1)...(19): siRNA sense strand
gguacuucaugcccaucuu

SEQ ID NO: 1500582 - RNA, 19 nt, Homo sapiens
  misc_RNA (1)...(19): siRNA sense strand
ccaaucgguucagcuccaa

SEQ ID NO: 1500583 - RNA, 19 nt, Homo sapiens
  misc_RNA (1)...(19): siRNA sense strand
ggguggacguucccuucga

SEQ ID NO: 1500584 - RNA, 19 nt, Homo sapiens
  misc_RNA (1)...(19): siRNA sense strand
gaggacuaccuggauauca

SEQ ID NO: 1500585 - RNA, 19 nt, Homo sapiens
  misc_RNA (1)...(19): siRNA sense strand
cacaaaaccucuuuaagcu

SEQ ID NO: 1500586 - RNA, 19 nt, Homo sapiens
  misc_RNA (1)...(19): siRNA sense strand
caucggcucccaccaugug

SEQ ID NO: 1500587 - RNA, 19 nt, Homo sapiens
  misc_RNA (1)...(19): siRNA sense strand
cagcccuccuucuaugaug

SEQ ID NO: 1500588 - RNA, 19 nt, Homo sapiens
  misc_RNA (1)...(19): siRNA sense strand
cagcaucgaggucaugucu

SEQ ID NO: 1500589 - RNA, 19 nt, Homo sapiens
  misc_RNA (1)...(19): siRNA sense strand
aaaccucuuuaagcuguug

SEQ ID NO: 1500590 - RNA, 19 nt, Homo sapiens
  misc_RNA (1)...(19): siRNA sense strand
gacccugacgcuauucuca

SEQ ID NO: 1500591 - RNA, 19 nt, Homo sapiens
  misc_RNA (1)...(19): siRNA sense strand
cuagcaagccuguguacuc

SEQ ID NO: 1500592 - RNA, 19 nt, Homo sapiens
  misc_RNA (1)...(19): siRNA sense strand
cuacuagcaagccugugua

SEQ ID NO: 1500593 - RNA, 19 nt, Homo sapiens
  misc_RNA (1)...(19): siRNA sense strand
cuaccuggauaucaagaac

SEQ ID NO: 1500594 - RNA, 19 nt, Homo sapiens
  misc_RNA (1)...(19): siRNA sense strand
guuggcgggugugaucuug

SEQ ID NO: 1500595 - RNA, 19 nt, Homo sapiens
  misc_RNA (1)...(19): siRNA sense strand
gaacacgccuuugagaaga

SEQ ID NO: 1500596 - RNA, 19 nt, Homo sapiens
  misc_RNA (1)...(19): siRNA sense strand
ggcagaagcuggaggaaga

SEQ ID NO: 1500597 - RNA, 19 nt, Homo sapiens
  misc_RNA (1)...(19): siRNA sense strand
aaagggacgcaccauauua

SEQ ID NO: 1500598 - RNA, 19 nt, Homo sapiens
  misc_RNA (1)...(19): siRNA sense strand
gacgugaccucagaugauu

SEQ ID NO: 1500599 - RNA, 19 nt, Homo sapiens
  misc_RNA (1)...(19): siRNA sense strand
aaauagacgugaccucaga

SEQ ID NO: 1500600 - RNA, 19 nt, Homo sapiens
  misc_RNA (1)...(19): siRNA sense strand
cauauuaaccgguggagaa

SEQ ID NO: 1500601 - RNA, 19 nt, Homo sapiens
  misc_RNA (1)...(19): siRNA sense strand
gcacucagcuacgcuaacu

SEQ ID NO: 1500602 - RNA, 19 nt, Homo sapiens
  misc_RNA (1)...(19): siRNA sense strand
ggaacacgccuuugagaag

SEQ ID NO: 1500603 - RNA, 19 nt, Homo sapiens
  misc_RNA (1)...(19): siRNA sense strand
ggaagaaggcucagauucg

SEQ ID NO: 1500604 - RNA, 19 nt, Homo sapiens
  misc_RNA (1)...(19): siRNA sense strand
guaaaaguaugguuucaga

SEQ ID NO: 1500605 - RNA, 19 nt, Homo sapiens
  misc_RNA (1)...(19): siRNA sense strand
acaacgcgcuggcccgaaa

SEQ ID NO: 1500606 - RNA, 19 nt, Homo sapiens
  misc_RNA (1)...(19): siRNA sense strand
ucacggaaacucagguaaa

SEQ ID NO: 1500607 - RNA, 19 nt, Homo sapiens
  misc_RNA (1)...(19): siRNA sense strand
ggaggaagaaggcucagau

SEQ ID NO: 1500608 - RNA, 19 nt, Homo sapiens
  misc_RNA (1)...(19): siRNA sense strand
gaggaagaaggcucagauu

SEQ ID NO: 1500609 - RNA, 19 nt, Homo sapiens
  misc_RNA (1)...(19): siRNA sense strand
ccauaaauccguuccucaa

SEQ ID NO: 1500610 - RNA, 19 nt, Homo sapiens
  misc_RNA (1)...(19): siRNA sense strand
uuucagaaccgaagaacaa

SEQ ID NO: 1500611 - RNA, 19 nt, Homo sapiens
  misc_RNA (1)...(19): siRNA sense strand
aagggacgcaccauauuaa

SEQ ID NO: 1500612 - RNA, 19 nt, Homo sapiens
  misc_RNA (1)...(19): siRNA sense strand
cgugaccucagaugauuaa

SEQ ID NO: 1500613 - RNA, 19 nt, Homo sapiens
  misc_RNA (1)...(19): siRNA sense strand
ggagaaucgccaccaagca

SEQ ID NO: 1500614 - RNA, 19 nt, Homo sapiens
  misc_RNA (1)...(19): siRNA sense strand
gcagaagcuggaggaagaa

SEQ ID NO: 1500615 - RNA, 19 nt, Homo sapiens
  misc_RNA (1)...(19): siRNA sense strand
gaaacucagguaaaaguau

SEQ ID NO: 1500616 - RNA, 19 nt, Homo sapiens
  misc_RNA (1)...(19): siRNA sense strand
agacgugaccucagaugau

SEQ ID NO: 1500617 - RNA, 19 nt, Homo sapiens
  misc_RNA (1)...(19): siRNA sense strand
cagaaccgaagaacaaagu

SEQ ID NO: 1500618 - RNA, 19 nt, Homo sapiens
  misc_RNA (1)...(19): siRNA sense strand
ggaaacucagguaaaagua

SEQ ID NO: 1500619 - RNA, 19 nt, Homo sapiens
  misc_RNA (1)...(19): siRNA sense strand
gcucagauucgcaacaaaa

SEQ ID NO: 1500620 - RNA, 19 nt, Homo sapiens
  misc_RNA (1)...(19): siRNA sense strand
aaacucagguaaaaguaug

SEQ ID NO: 1500621 - RNA, 19 nt, Homo sapiens
  misc_RNA (1)...(19): siRNA sense strand
uggaacacgccuuugagaa

SEQ ID NO: 1500622 - RNA, 19 nt, Homo sapiens
  misc_RNA (1)...(19): siRNA sense strand
gggauccguccaccuucua

SEQ ID NO: 1500623 - RNA, 19 nt, Homo sapiens
  misc_RNA (1)...(19): siRNA sense strand
cacggaaacucagguaaaa

SEQ ID NO: 1500624 - RNA, 19 nt, Homo sapiens
  misc_RNA (1)...(19): siRNA sense strand
ccuuugagaagaaucacua

SEQ ID NO: 1500625 - RNA, 19 nt, Homo sapiens
  misc_RNA (1)...(19): siRNA sense strand
aggcucagauucgcaacaa

SEQ ID NO: 1500626 - RNA, 19 nt, Homo sapiens
  misc_RNA (1)...(19): siRNA sense strand
ggacacaauugauuucuua

SEQ ID NO: 1500627 - RNA, 19 nt, Homo sapiens
  misc_RNA (1)...(19): siRNA sense strand
agaaugaacuggagaauuu

SEQ ID NO: 1500628 - RNA, 19 nt, Homo sapiens
  misc_RNA (1)...(19): siRNA sense strand
aaacacaacccaagaaaua

SEQ ID NO: 1500629 - RNA, 19 nt, Homo sapiens
  misc_RNA (1)...(19): siRNA sense strand
ggaacaagaucuuuaucaa

SEQ ID NO: 1500630 - RNA, 19 nt, Homo sapiens
  misc_RNA (1)...(19): siRNA sense strand
gcaaagagccaacccagaa

SEQ ID NO: 1500631 - RNA, 19 nt, Homo sapiens
  misc_RNA (1)...(19): siRNA sense strand
gcaaauauaacacgucaaa

SEQ ID NO: 1500632 - RNA, 19 nt, Homo sapiens
  misc_RNA (1)...(19): siRNA sense strand
gaacaaaggaagaauuaug

SEQ ID NO: 1500633 - RNA, 19 nt, Homo sapiens
  misc_RNA (1)...(19): siRNA sense strand
aaacugaagucucauauuc

SEQ ID NO: 1500634 - RNA, 19 nt, Homo sapiens
  misc_RNA (1)...(19): siRNA sense strand
gaacucauccacagacuga

SEQ ID NO: 1500635 - RNA, 19 nt, Homo sapiens
  misc_RNA (1)...(19): siRNA sense strand
gaagaaacaccugagauga

SEQ ID NO: 1500636 - RNA, 19 nt, Homo sapiens
  misc_RNA (1)...(19): siRNA sense strand
gggaggaacuuggaugaaa

SEQ ID NO: 1500637 - RNA, 19 nt, Homo sapiens
  misc_RNA (1)...(19): siRNA sense strand
gugaugagguuaaggcaaa

SEQ ID NO: 1500638 - RNA, 19 nt, Homo sapiens
  misc_RNA (1)...(19): siRNA sense strand
ggaagaaacaccugagaug

SEQ ID NO: 1500639 - RNA, 19 nt, Homo sapiens
  misc_RNA (1)...(19): siRNA sense strand
ggucauauuucuaaucauc

SEQ ID NO: 1500640 - RNA, 19 nt, Homo sapiens
  misc_RNA (1)...(19): siRNA sense strand
ugacagagaugugcaaauc

SEQ ID NO: 1500641 - RNA, 19 nt, Homo sapiens
  misc_RNA (1)...(19): siRNA sense strand
gcugugagccugauugauu

SEQ ID NO: 1500642 - RNA, 19 nt, Homo sapiens
  misc_RNA (1)...(19): siRNA sense strand
caagaaauaugccaaaucc

SEQ ID NO: 1500643 - RNA, 19 nt, Homo sapiens
  misc_RNA (1)...(19): siRNA sense strand
gaacgugccaguuaucaau

SEQ ID NO: 1500644 - RNA, 19 nt, Homo sapiens
  misc_RNA (1)...(19): siRNA sense strand
ucaaaggucccagcaaaua

SEQ ID NO: 1500645 - RNA, 19 nt, Homo sapiens
  misc_RNA (1)...(19): siRNA sense strand
ccacagagcauuccagugu

SEQ ID NO: 1500646 - RNA, 19 nt, Homo sapiens
  misc_RNA (1)...(19): siRNA sense strand
ugucaaaggucccagcaaa

SEQ ID NO: 1500647 - RNA, 19 nt, Homo sapiens
  misc_RNA (1)...(19): siRNA sense strand
caacuuuucucucucaaua

SEQ ID NO: 1500648 - RNA, 19 nt, Homo sapiens
  misc_RNA (1)...(19): siRNA sense strand
aggcaaaccuaauuaguga

SEQ ID NO: 1500649 - RNA, 19 nt, Homo sapiens
  misc_RNA (1)...(19): siRNA sense strand
caccauauguuccacgauu

SEQ ID NO: 1500650 - RNA, 19 nt, Homo sapiens
  misc_RNA (1)...(19): siRNA sense strand
ugaauaaggacacaauuga

SEQ ID NO: 1500651 - RNA, 19 nt, Homo sapiens
  misc_RNA (1)...(19): siRNA sense strand
gagccugauugauuuagaa

SEQ ID NO: 1500652 - RNA, 19 nt, Homo sapiens
  misc_RNA (1)...(19): siRNA sense strand
gcgagagucuauagccaaa

SEQ ID NO: 1500653 - RNA, 19 nt, Homo sapiens
  misc_RNA (1)...(19): siRNA sense strand
gauccaccuuauacucaua

SEQ ID NO: 1500654 - RNA, 19 nt, Homo sapiens
  misc_RNA (1)...(19): siRNA sense strand
caauggaacaagaucuuua

SEQ ID NO: 1500655 - RNA, 19 nt, Homo sapiens
  misc_RNA (1)...(19): siRNA sense strand
gaacaagccagaucuucau

SEQ ID NO: 1500656 - RNA, 19 nt, Homo sapiens
  misc_RNA (1)...(19): siRNA sense strand
ggaggaacuuggaugaaag

SEQ ID NO: 1500657 - RNA, 19 nt, Homo sapiens
  misc_RNA (1)...(19): siRNA sense strand
caagaaagguaaaaggaaa

SEQ ID NO: 1500658 - RNA, 19 nt, Homo sapiens
  misc_RNA (1)...(19): siRNA sense strand
gagagucuauagccaaauc

SEQ ID NO: 1500659 - RNA, 19 nt, Homo sapiens
  misc_RNA (1)...(19): siRNA sense strand
gagccacaauggaacaaga

SEQ ID NO: 1500660 - RNA, 19 nt, Homo sapiens
  misc_RNA (1)...(19): siRNA sense strand
ggaauguacccaucucaga

SEQ ID NO: 1500661 - RNA, 19 nt, Homo sapiens
  misc_RNA (1)...(19): siRNA sense strand
gauggaauaaggaaauuga

SEQ ID NO: 1500662 - RNA, 19 nt, Homo sapiens
  misc_RNA (1)...(19): siRNA sense strand
gauggaguauggcccaaga

SEQ ID NO: 1500663 - RNA, 19 nt, Homo sapiens
  misc_RNA (1)...(19): siRNA sense strand
gaacaagaucuuuaucaac

SEQ ID NO: 1500664 - RNA, 19 nt, Homo sapiens
  misc_RNA (1)...(19): siRNA sense strand
gaacggcagcuguggaugu

SEQ ID NO: 1500665 - RNA, 19 nt, Homo sapiens
  misc_RNA (1)...(19): siRNA sense strand
agaaacaccugagaugaug

SEQ ID NO: 1500666 - RNA, 19 nt, Homo sapiens
  misc_RNA (1)...(19): siRNA sense strand
guuaaggcaaaccuaauua

SEQ ID NO: 1500667 - RNA, 19 nt, Homo sapiens
  misc_RNA (1)...(19): siRNA sense strand
gaaagaugcuaugaucacu

SEQ ID NO: 1500668 - RNA, 19 nt, Homo sapiens
  misc_RNA (1)...(19): siRNA sense strand
gugaagacgugguuacagu

SEQ ID NO: 1500669 - RNA, 19 nt, Homo sapiens
  misc_RNA (1)...(19): siRNA sense strand
caaugcagacccuaguaua

SEQ ID NO: 1500670 - RNA, 19 nt, Homo sapiens
  misc_RNA (1)...(19): siRNA sense strand
uggaggaagugcaagauga

SEQ ID NO: 1500671 - RNA, 19 nt, Homo sapiens
  misc_RNA (1)...(19): siRNA sense strand
gccaagcugugaugcauuc

SEQ ID NO: 1500672 - RNA, 19 nt, Homo sapiens
  misc_RNA (1)...(19): siRNA sense strand
aaaggucccagcaaauaua

SEQ ID NO: 1500673 - RNA, 19 nt, Homo sapiens
  misc_RNA (1)...(19): siRNA sense strand
uagcaacauuuacacaaga

SEQ ID NO: 1500674 - RNA, 19 nt, Homo sapiens
  misc_RNA (1)...(19): siRNA sense strand
guagcaacauuuacacaag

SEQ ID NO: 1500675 - RNA, 19 nt, Homo sapiens
  misc_RNA (1)...(19): siRNA sense strand
gaugauggaauaaggaaau

SEQ ID NO: 1500676 - RNA, 19 nt, Homo sapiens
  misc_RNA (1)...(19): siRNA sense strand
ugaaggaagcagucacuaa

SEQ ID NO: 1500677 - RNA, 19 nt, Homo sapiens
  misc_RNA (1)...(19): siRNA sense strand
gaaauuaugaaccacucaa

SEQ ID NO: 1500678 - RNA, 19 nt, Homo sapiens
  misc_RNA (1)...(19): siRNA sense strand
gaauaaggacacaauugau

SEQ ID NO: 1500679 - RNA, 19 nt, Homo sapiens
  misc_RNA (1)...(19): siRNA sense strand
gcaaaucuuaaaccacauu

SEQ ID NO: 1500680 - RNA, 19 nt, Homo sapiens
  misc_RNA (1)...(19): siRNA sense strand
gaugauggcagcccgcauu

SEQ ID NO: 1500681 - RNA, 19 nt, Homo sapiens
  misc_RNA (1)...(19): siRNA sense strand
ccagguggauguuagaagu

SEQ ID NO: 1500682 - RNA, 19 nt, Homo sapiens
  misc_RNA (1)...(19): siRNA sense strand
ucggaaagaugcuaugauc

SEQ ID NO: 1500683 - RNA, 19 nt, Homo sapiens
  misc_RNA (1)...(19): siRNA sense strand
ggaggaagugcaagaugaa

SEQ ID NO: 1500684 - RNA, 19 nt, Homo sapiens
  misc_RNA (1)...(19): siRNA sense strand
caaaggucccagcaaauau

SEQ ID NO: 1500685 - RNA, 19 nt, Homo sapiens
  misc_RNA (1)...(19): siRNA sense strand
ugugagaccuccagaaucu

SEQ ID NO: 1500686 - RNA, 19 nt, Homo sapiens
  misc_RNA (1)...(19): siRNA sense strand
gaaagugcaaucagugaca

SEQ ID NO: 1500687 - RNA, 19 nt, Homo sapiens
  misc_RNA (1)...(19): siRNA sense strand
gaagauauugaaagugcaa

SEQ ID NO: 1500688 - RNA, 19 nt, Homo sapiens
  misc_RNA (1)...(19): siRNA sense strand
guaaaggagggaaacagaa

SEQ ID NO: 1500689 - RNA, 19 nt, Homo sapiens
  misc_RNA (1)...(19): siRNA sense strand
ggagugccgcucagaagaa

SEQ ID NO: 1500690 - RNA, 19 nt, Homo sapiens
  misc_RNA (1)...(19): siRNA sense strand
agaaauaugccaaauccaa

SEQ ID NO: 1500691 - RNA, 19 nt, Homo sapiens
  misc_RNA (1)...(19): siRNA sense strand
ugucaauagucuuggagua

SEQ ID NO: 1500692 - RNA, 19 nt, Homo sapiens
  misc_RNA (1)...(19): siRNA sense strand
caaagaaugaacuggagaa

SEQ ID NO: 1500693 - RNA, 19 nt, Homo sapiens
  misc_RNA (1)...(19): siRNA sense strand
agacgugguuacagucaaa

SEQ ID NO: 1500694 - RNA, 19 nt, Homo sapiens
  misc_RNA (1)...(19): siRNA sense strand
gagugccgcucagaagaaa

SEQ ID NO: 1500695 - RNA, 19 nt, Homo sapiens
  misc_RNA (1)...(19): siRNA sense strand
acagugagcucucgguucu

SEQ ID NO: 1500696 - RNA, 19 nt, Homo sapiens
  misc_RNA (1)...(19): siRNA sense strand
ggaaagaugcuaugaucac

SEQ ID NO: 1500697 - RNA, 19 nt, Homo sapiens
  misc_RNA (1)...(19): siRNA sense strand
gcuccgaguuacaagaaau

SEQ ID NO: 1500698 - RNA, 19 nt, Homo sapiens
  misc_RNA (1)...(19): siRNA sense strand
gcacaacuuuucucucuca

SEQ ID NO: 1500699 - RNA, 19 nt, Homo sapiens
  misc_RNA (1)...(19): siRNA sense strand
cuaaucaucccaguaguuu

SEQ ID NO: 1500700 - RNA, 19 nt, Homo sapiens
  misc_RNA (1)...(19): siRNA sense strand
gcaaaguguggacucaaga

SEQ ID NO: 1500701 - RNA, 19 nt, Homo sapiens
  misc_RNA (1)...(19): siRNA sense strand
uuaaauggugcacaacuuu

SEQ ID NO: 1500702 - RNA, 19 nt, Homo sapiens
  misc_RNA (1)...(19): siRNA sense strand
gaagacgugguuacaguca

SEQ ID NO: 1500703 - RNA, 19 nt, Homo sapiens
  misc_RNA (1)...(19): siRNA sense strand
agaaacaaaggauggagua

SEQ ID NO: 1500704 - RNA, 19 nt, Homo sapiens
  misc_RNA (1)...(19): siRNA sense strand
aagcaaugguggaaaguuc

SEQ ID NO: 1500705 - RNA, 19 nt, Homo sapiens
  misc_RNA (1)...(19): siRNA sense strand
caaacugaagucucauauu

SEQ ID NO: 1500706 - RNA, 19 nt, Homo sapiens
  misc_RNA (1)...(19): siRNA sense strand
uggccaaacugaagucuca

SEQ ID NO: 1500707 - RNA, 19 nt, Homo sapiens
  misc_RNA (1)...(19): siRNA sense strand
uuucuugacuguuuccaaa

SEQ ID NO: 1500708 - RNA, 19 nt, Homo sapiens
  misc_RNA (1)...(19): siRNA sense strand
gaauggcuacggaucauca

SEQ ID NO: 1500709 - RNA, 19 nt, Homo sapiens
  misc_RNA (1)...(19): siRNA sense strand
cagcuaugauucaguucuu

SEQ ID NO: 1500710 - RNA, 19 nt, Homo sapiens
  misc_RNA (1)...(19): siRNA sense strand
gaggaugauuuccaaugca

SEQ ID NO: 1500711 - RNA, 19 nt, Homo sapiens
  misc_RNA (1)...(19): siRNA sense strand
aacaaaggauggaguaugg

SEQ ID NO: 1500712 - RNA, 19 nt, Homo sapiens
  misc_RNA (1)...(19): siRNA sense strand
guggaaaguucgaaaugca

SEQ ID NO: 1500713 - RNA, 19 nt, Homo sapiens
  misc_RNA (1)...(19): siRNA sense strand
acagagcauuccaguguau

SEQ ID NO: 1500714 - RNA, 19 nt, Homo sapiens
  misc_RNA (1)...(19): siRNA sense strand
cacagagcauuccagugua

SEQ ID NO: 1500715 - RNA, 19 nt, Homo sapiens
  misc_RNA (1)...(19): siRNA sense strand
cuagccaguucaguacuua

SEQ ID NO: 1500716 - RNA, 19 nt, Homo sapiens
  misc_RNA (1)...(19): siRNA sense strand
uagcaaggaacaacaguga

SEQ ID NO: 1500717 - RNA, 19 nt, Homo sapiens
  misc_RNA (1)...(19): siRNA sense strand
ccagagacacaaacaacuu

SEQ ID NO: 1500718 - RNA, 19 nt, Homo sapiens
  misc_RNA (1)...(19): siRNA sense strand
caccuuauacucauacuau

SEQ ID NO: 1500719 - RNA, 19 nt, Homo sapiens
  misc_RNA (1)...(19): siRNA sense strand
gaagcaaugguggaaaguu

SEQ ID NO: 1500720 - RNA, 19 nt, Homo sapiens
  misc_RNA (1)...(19): siRNA sense strand
guuccacgauuccgcaaug

SEQ ID NO: 1500721 - RNA, 19 nt, Homo sapiens
  misc_RNA (1)...(19): siRNA sense strand
cgaguuacaagaaauuaug

SEQ ID NO: 1500722 - RNA, 19 nt, Homo sapiens
  misc_RNA (1)...(19): siRNA sense strand
gaugaauggcuacggauca

SEQ ID NO: 1500723 - RNA, 19 nt, Homo sapiens
  misc_RNA (1)...(19): siRNA sense strand
aguauuaaauggugcacaa

SEQ ID NO: 1500724 - RNA, 19 nt, Homo sapiens
  misc_RNA (1)...(19): siRNA sense strand
cacuguugaugauggaaua

SEQ ID NO: 1500725 - RNA, 19 nt, Homo sapiens
  misc_RNA (1)...(19): siRNA sense strand
ggcaaaguguggacucaag

SEQ ID NO: 1500726 - RNA, 19 nt, Homo sapiens
  misc_RNA (1)...(19): siRNA sense strand
gcgaggaguucaugaauuu

SEQ ID NO: 1500727 - RNA, 19 nt, Homo sapiens
  misc_RNA (1)...(19): siRNA sense strand
gcggaaaccuggaguggaa

SEQ ID NO: 1500728 - RNA, 19 nt, Homo sapiens
  misc_RNA (1)...(19): siRNA sense strand
gagcucaccuuccugcuau

SEQ ID NO: 1500729 - RNA, 19 nt, Homo sapiens
  misc_RNA (1)...(19): siRNA sense strand
cgucaucggugucuugcua

SEQ ID NO: 1500730 - RNA, 19 nt, Homo sapiens
  misc_RNA (1)...(19): siRNA sense strand
gaacugggcccugacaaca

SEQ ID NO: 1500731 - RNA, 19 nt, Homo sapiens
  misc_RNA (1)...(19): siRNA sense strand
ggagcucuguuguggagaa

SEQ ID NO: 1500732 - RNA, 19 nt, Homo sapiens
  misc_RNA (1)...(19): siRNA sense strand
ggcgaggaguucaugaauu

SEQ ID NO: 1500733 - RNA, 19 nt, Homo sapiens
  misc_RNA (1)...(19): siRNA sense strand
gaaagagaccacagaucug

SEQ ID NO: 1500734 - RNA, 19 nt, Homo sapiens
  misc_RNA (1)...(19): siRNA sense strand
ccaggaugcugauuugaag

SEQ ID NO: 1500735 - RNA, 19 nt, Homo sapiens
  misc_RNA (1)...(19): siRNA sense strand
ggagaaagagaccacagau

SEQ ID NO: 1500736 - RNA, 19 nt, Homo sapiens
  misc_RNA (1)...(19): siRNA sense strand
ggagcucaccuuccugcua

SEQ ID NO: 1500737 - RNA, 19 nt, Homo sapiens
  misc_RNA (1)...(19): siRNA sense strand
gaucaaggagaagcucuuu

SEQ ID NO: 1500738 - RNA, 19 nt, Homo sapiens
  misc_RNA (1)...(19): siRNA sense strand
agaaagagaccacagaucu

SEQ ID NO: 1500739 - RNA, 19 nt, Homo sapiens
  misc_RNA (1)...(19): siRNA sense strand
ggcccaggaugcugauuug

SEQ ID NO: 1500740 - RNA, 19 nt, Homo sapiens
  misc_RNA (1)...(19): siRNA sense strand
gcgaugagcaccacuacug

SEQ ID NO: 1500741 - RNA, 19 nt, Homo sapiens
  misc_RNA (1)...(19): siRNA sense strand
aaagagaccacagaucuga

SEQ ID NO: 1500742 - RNA, 19 nt, Homo sapiens
  misc_RNA (1)...(19): siRNA sense strand
ugaaggauguaaaugugau

SEQ ID NO: 1500743 - RNA, 19 nt, Homo sapiens
  misc_RNA (1)...(19): siRNA sense strand
gcagcgccuucuccuucua

SEQ ID NO: 1500744 - RNA, 19 nt, Homo sapiens
  misc_RNA (1)...(19): siRNA sense strand
gcaccacuacugcugcauu

SEQ ID NO: 1500745 - RNA, 19 nt, Homo sapiens
  misc_RNA (1)...(19): siRNA sense strand
gcucuguuguggagaagga

SEQ ID NO: 1500746 - RNA, 19 nt, Homo sapiens
  misc_RNA (1)...(19): siRNA sense strand
gaaaaggucccuacacucu

SEQ ID NO: 1500747 - RNA, 19 nt, Homo sapiens
  misc_RNA (1)...(19): siRNA sense strand
caccacuacugcugcauug

SEQ ID NO: 1500748 - RNA, 19 nt, Homo sapiens
  misc_RNA (1)...(19): siRNA sense strand
gaaggauguaaaugugauu

SEQ ID NO: 1500749 - RNA, 19 nt, Homo sapiens
  misc_RNA (1)...(19): siRNA sense strand
gagaaagagaccacagauc

SEQ ID NO: 1500750 - RNA, 19 nt, Homo sapiens
  misc_RNA (1)...(19): siRNA sense strand
gggagaaagagaccacaga

SEQ ID NO: 1500751 - RNA, 19 nt, Homo sapiens
  misc_RNA (1)...(19): siRNA sense strand
ggauguaaaugugauucca

SEQ ID NO: 1500752 - RNA, 19 nt, Homo sapiens
  misc_RNA (1)...(19): siRNA sense strand
uuugaaggauguaaaugug

SEQ ID NO: 1500753 - RNA, 19 nt, Homo sapiens
  misc_RNA (1)...(19): siRNA sense strand
gagcuugggucugggaaaa

SEQ ID NO: 1500754 - RNA, 19 nt, Homo sapiens
  misc_RNA (1)...(19): siRNA sense strand
ccacuacugcugcauugug

SEQ ID NO: 1500755 - RNA, 19 nt, Homo sapiens
  misc_RNA (1)...(19): siRNA sense strand
cgucgucacuaacagucaa

SEQ ID NO: 1500756 - RNA, 19 nt, Homo sapiens
  misc_RNA (1)...(19): siRNA sense strand
uguaggaggagcucuguug

SEQ ID NO: 1500757 - RNA, 19 nt, Homo sapiens
  misc_RNA (1)...(19): siRNA sense strand
ucaugaauuucgaccucaa

SEQ ID NO: 1500758 - RNA, 19 nt, Homo sapiens
  misc_RNA (1)...(19): siRNA sense strand
guccugguauugggagaaa

SEQ ID NO: 1500759 - RNA, 19 nt, Homo sapiens
  misc_RNA (1)...(19): siRNA sense strand
ccgccaaguucgcccugaa

SEQ ID NO: 1500760 - RNA, 19 nt, Homo sapiens
  misc_RNA (1)...(19): siRNA sense strand
gguggcagcagcaggacaa

SEQ ID NO: 1500761 - RNA, 19 nt, Homo sapiens
  misc_RNA (1)...(19): siRNA sense strand
agcaguaccugagcuacaa

SEQ ID NO: 1500762 - RNA, 19 nt, Homo sapiens
  misc_RNA (1)...(19): siRNA sense strand
guaggaggagcucuguugu

SEQ ID NO: 1500763 - RNA, 19 nt, Homo sapiens
  misc_RNA (1)...(19): siRNA sense strand
ggaucaaggagaagcucuu

SEQ ID NO: 1500764 - RNA, 19 nt, Homo sapiens
  misc_RNA (1)...(19): siRNA sense strand
gcagguauguuaagaaguu

SEQ ID NO: 1500765 - RNA, 19 nt, Homo sapiens
  misc_RNA (1)...(19): siRNA sense strand
gaaaucuggcugagaaaua

SEQ ID NO: 1500766 - RNA, 19 nt, Homo sapiens
  misc_RNA (1)...(19): siRNA sense strand
ucaaagccaucauauauca

SEQ ID NO: 1500767 - RNA, 19 nt, Homo sapiens
  misc_RNA (1)...(19): siRNA sense strand
ggaagagauuuaucauaga

SEQ ID NO: 1500768 - RNA, 19 nt, Homo sapiens
  misc_RNA (1)...(19): siRNA sense strand
uuagaaaucuggcugagaa

SEQ ID NO: 1500769 - RNA, 19 nt, Homo sapiens
  misc_RNA (1)...(19): siRNA sense strand
uggaagagauuuaucauag

SEQ ID NO: 1500770 - RNA, 19 nt, Homo sapiens
  misc_RNA (1)...(19): siRNA sense strand
ggacaaguacugccacuau

SEQ ID NO: 1500771 - RNA, 19 nt, Homo sapiens
  misc_RNA (1)...(19): siRNA sense strand
gagcagguauguuaagaag

SEQ ID NO: 1500772 - RNA, 19 nt, Homo sapiens
  misc_RNA (1)...(19): siRNA sense strand
ggaaggugaugcccaagau

SEQ ID NO: 1500773 - RNA, 19 nt, Homo sapiens
  misc_RNA (1)...(19): siRNA sense strand
gaacaggagugggacaagu

SEQ ID NO: 1500774 - RNA, 19 nt, Homo sapiens
  misc_RNA (1)...(19): siRNA sense strand
gcauugggauggcagaguu

SEQ ID NO: 1500775 - RNA, 19 nt, Homo sapiens
  misc_RNA (1)...(19): siRNA sense strand
ugucaaagccaucauauau

SEQ ID NO: 1500776 - RNA, 19 nt, Homo sapiens
  misc_RNA (1)...(19): siRNA sense strand
gaaauaccaaacagugauu

SEQ ID NO: 1500777 - RNA, 19 nt, Homo sapiens
  misc_RNA (1)...(19): siRNA sense strand
guguuuaacuucugugcua

SEQ ID NO: 1500778 - RNA, 19 nt, Homo sapiens
  misc_RNA (1)...(19): siRNA sense strand
ccacuuuggcugccuguua

SEQ ID NO: 1500779 - RNA, 19 nt, Homo sapiens
  misc_RNA (1)...(19): siRNA sense strand
ccaacgaucucccuugagu

SEQ ID NO: 1500780 - RNA, 19 nt, Homo sapiens
  misc_RNA (1)...(19): siRNA sense strand
gugccugaaugaacuuaua

SEQ ID NO: 1500781 - RNA, 19 nt, Homo sapiens
  misc_RNA (1)...(19): siRNA sense strand
gagaaauaccaaacaguga

SEQ ID NO: 1500782 - RNA, 19 nt, Homo sapiens
  misc_RNA (1)...(19): siRNA sense strand
guuuggagcagguauguua

SEQ ID NO: 1500783 - RNA, 19 nt, Homo sapiens
  misc_RNA (1)...(19): siRNA sense strand
uuacacaacuuucacucuu

SEQ ID NO: 1500784 - RNA, 19 nt, Homo sapiens
  misc_RNA (1)...(19): siRNA sense strand
gacaaguacugccacuaug

SEQ ID NO: 1500785 - RNA, 19 nt, Homo sapiens
  misc_RNA (1)...(19): siRNA sense strand
gcaaggaggaagagaguuc

SEQ ID NO: 1500786 - RNA, 19 nt, Homo sapiens
  misc_RNA (1)...(19): siRNA sense strand
agacccaucuucuagcaaa

SEQ ID NO: 1500787 - RNA, 19 nt, Homo sapiens
  misc_RNA (1)...(19): siRNA sense strand
caauaugccagcugucaaa

SEQ ID NO: 1500788 - RNA, 19 nt, Homo sapiens
  misc_RNA (1)...(19): siRNA sense strand
ccagguaacagaagacuau

SEQ ID NO: 1500789 - RNA, 19 nt, Homo sapiens
  misc_RNA (1)...(19): siRNA sense strand
gcagaaucuucccaacugu

SEQ ID NO: 1500790 - RNA, 19 nt, Homo sapiens
  misc_RNA (1)...(19): siRNA sense strand
gaacgugccaacucuaugg

SEQ ID NO: 1500791 - RNA, 19 nt, Homo sapiens
  misc_RNA (1)...(19): siRNA sense strand
gccacucucucccagguaa

SEQ ID NO: 1500792 - RNA, 19 nt, Homo sapiens
  misc_RNA (1)...(19): siRNA sense strand
ccaucuaccugucguuugu

SEQ ID NO: 1500793 - RNA, 19 nt, Homo sapiens
  misc_RNA (1)...(19): siRNA sense strand
auaagcaugugaccucuga

SEQ ID NO: 1500794 - RNA, 19 nt, Homo sapiens
  misc_RNA (1)...(19): siRNA sense strand
ggcaguaccuggccacucu

SEQ ID NO: 1500795 - RNA, 19 nt, Homo sapiens
  misc_RNA (1)...(19): siRNA sense strand
uugcuaagccggagaauau

SEQ ID NO: 1500796 - RNA, 19 nt, Homo sapiens
  misc_RNA (1)...(19): siRNA sense strand
aaagaaggucccgcuguua

SEQ ID NO: 1500797 - RNA, 19 nt, Homo sapiens
  misc_RNA (1)...(19): siRNA sense strand
uuggcugccuguuauaaua

SEQ ID NO: 1500798 - RNA, 19 nt, Homo sapiens
  misc_RNA (1)...(19): siRNA sense strand
aaacagugauugccgacau

SEQ ID NO: 1500799 - RNA, 19 nt, Homo sapiens
  misc_RNA (1)...(19): siRNA sense strand
uacacaacuuucacucuuu

SEQ ID NO: 1500800 - RNA, 19 nt, Homo sapiens
  misc_RNA (1)...(19): siRNA sense strand
acacaacuuucacucuuuc

SEQ ID NO: 1500801 - RNA, 19 nt, Homo sapiens
  misc_RNA (1)...(19): siRNA sense strand
uaacuucugugcuauucca

SEQ ID NO: 1500802 - RNA, 19 nt, Homo sapiens
  misc_RNA (1)...(19): siRNA sense strand
ucaccuaccuuucgagacu

SEQ ID NO: 1500803 - RNA, 19 nt, Homo sapiens
  misc_RNA (1)...(19): siRNA sense strand
uggacacacuggaagauga

SEQ ID NO: 1500804 - RNA, 19 nt, Homo sapiens
  misc_RNA (1)...(19): siRNA sense strand
caucauccgugacuaucug

SEQ ID NO: 1500805 - RNA, 19 nt, Homo sapiens
  misc_RNA (1)...(19): siRNA sense strand
aaacaucauccgugacuau

SEQ ID NO: 1500806 - RNA, 19 nt, Homo sapiens
  misc_RNA (1)...(19): siRNA sense strand
gcugagaaauaccaaacag

SEQ ID NO: 1500807 - RNA, 19 nt, Homo sapiens
  misc_RNA (1)...(19): siRNA sense strand
cgcagaaucuucccaacug

SEQ ID NO: 1500808 - RNA, 19 nt, Homo sapiens
  misc_RNA (1)...(19): siRNA sense strand
caaguacugccacuauguu

SEQ ID NO: 1500809 - RNA, 19 nt, Homo sapiens
  misc_RNA (1)...(19): siRNA sense strand
gcagcagccugaaaacuug

SEQ ID NO: 1500810 - RNA, 19 nt, Homo sapiens
  misc_RNA (1)...(19): siRNA sense strand
uuucucagccucagaguuu

SEQ ID NO: 1500811 - RNA, 19 nt, Homo sapiens
  misc_RNA (1)...(19): siRNA sense strand
acagaagacuauguucaga

SEQ ID NO: 1500812 - RNA, 19 nt, Homo sapiens
  misc_RNA (1)...(19): siRNA sense strand
gcuaagccggagaauauug

SEQ ID NO: 1500813 - RNA, 19 nt, Homo sapiens
  misc_RNA (1)...(19): siRNA sense strand
ucccaacgaucucccuuga

SEQ ID NO: 1500814 - RNA, 19 nt, Homo sapiens
  misc_RNA (1)...(19): siRNA sense strand
cgaucucccuugaguuuag

SEQ ID NO: 1500815 - RNA, 19 nt, Homo sapiens
  misc_RNA (1)...(19): siRNA sense strand
gcagugaagauucggaaag

SEQ ID NO: 1500816 - RNA, 19 nt, Homo sapiens
  misc_RNA (1)...(19): siRNA sense strand
cagguauguuaagaaguua

SEQ ID NO: 1500817 - RNA, 19 nt, Homo sapiens
  misc_RNA (1)...(19): siRNA sense strand
ggagcagguauguuaagaa

SEQ ID NO: 1500818 - RNA, 19 nt, Homo sapiens
  misc_RNA (1)...(19): siRNA sense strand
caaacaucauccgugacua

SEQ ID NO: 1500819 - RNA, 19 nt, Homo sapiens
  misc_RNA (1)...(19): siRNA sense strand
aaucagaccagucgcaguu

SEQ ID NO: 1500820 - RNA, 19 nt, Homo sapiens
  misc_RNA (1)...(19): siRNA sense strand
ugauggaugccaccaauau

SEQ ID NO: 1500821 - RNA, 19 nt, Homo sapiens
  misc_RNA (1)...(19): siRNA sense strand
cacuuuggcugccuguuau

SEQ ID NO: 1500822 - RNA, 19 nt, Homo sapiens
  misc_RNA (1)...(19): siRNA sense strand
aaaagaaggucccgcuguu

SEQ ID NO: 1500823 - RNA, 19 nt, Homo sapiens
  misc_RNA (1)...(19): siRNA sense strand
cagaguguguuuaacuucu

SEQ ID NO: 1500824 - RNA, 19 nt, Homo sapiens
  misc_RNA (1)...(19): siRNA sense strand
caacuuucacucuuuccuu

SEQ ID NO: 1500825 - RNA, 19 nt, Homo sapiens
  misc_RNA (1)...(19): siRNA sense strand
gaaggugaugcccaagaug

SEQ ID NO: 1500826 - RNA, 19 nt, Homo sapiens
  misc_RNA (1)...(19): siRNA sense strand
gccggagaauauugacuug

SEQ ID NO: 1500827 - RNA, 19 nt, Homo sapiens
  misc_RNA (1)...(19): siRNA sense strand
aacuuucacucuuuccuuu

SEQ ID NO: 1500828 - RNA, 19 nt, Homo sapiens
  misc_RNA (1)...(19): siRNA sense strand
aacgaucucccuugaguuu

SEQ ID NO: 1500829 - RNA, 19 nt, Homo sapiens
  misc_RNA (1)...(19): siRNA sense strand
ucagacccaucuucuagca

SEQ ID NO: 1500830 - RNA, 19 nt, Homo sapiens
  misc_RNA (1)...(19): siRNA sense strand
gauggaugccaccaauaug

SEQ ID NO: 1500831 - RNA, 19 nt, Homo sapiens
  misc_RNA (1)...(19): siRNA sense strand
aaaucuggcugagaaauac

SEQ ID NO: 1500832 - RNA, 19 nt, Homo sapiens
  misc_RNA (1)...(19): siRNA sense strand
gaucucccuugaguuuaga

SEQ ID NO: 1500833 - RNA, 19 nt, Homo sapiens
  misc_RNA (1)...(19): siRNA sense strand
gugcauauuuuaucugguu

SEQ ID NO: 1500834 - RNA, 19 nt, Homo sapiens
  misc_RNA (1)...(19): siRNA sense strand
agaagacuauguucagacu

SEQ ID NO: 1500835 - RNA, 19 nt, Homo sapiens
  misc_RNA (1)...(19): siRNA sense strand
ccgaagaguucuacaaccu

SEQ ID NO: 1500836 - RNA, 19 nt, Homo sapiens
  misc_RNA (1)...(19): siRNA sense strand
gccgacauuugccggagaa

SEQ ID NO: 1500837 - RNA, 19 nt, Homo sapiens
  misc_RNA (1)...(19): siRNA sense strand
agagaguucuggccucaag

SEQ ID NO: 1500838 - RNA, 19 nt, Homo sapiens
  misc_RNA (1)...(19): siRNA sense strand
ucagaccagucgcaguuuc

SEQ ID NO: 1500839 - RNA, 19 nt, Homo sapiens
  misc_RNA (1)...(19): siRNA sense strand
cagaacgugccaacucuau

SEQ ID NO: 1500840 - RNA, 19 nt, Homo sapiens
  misc_RNA (1)...(19): siRNA sense strand
ccaacugucagcugauuuc

SEQ ID NO: 1500841 - RNA, 19 nt, Homo sapiens
  misc_RNA (1)...(19): siRNA sense strand
gaguguguuuaacuucugu

SEQ ID NO: 1500842 - RNA, 19 nt, Homo sapiens
  misc_RNA (1)...(19): siRNA sense strand
cuggaggacuucccaacga

SEQ ID NO: 1500843 - RNA, 19 nt, Homo sapiens
  misc_RNA (1)...(19): siRNA sense strand
gccgugcagugccugaaug

SEQ ID NO: 1500844 - RNA, 19 nt, Homo sapiens
  misc_RNA (1)...(19): siRNA sense strand
cuaagccggagaauauuga

SEQ ID NO: 1500845 - RNA, 19 nt, Homo sapiens
  misc_RNA (1)...(19): siRNA sense strand
uggagcagguauguuaaga

SEQ ID NO: 1500846 - RNA, 19 nt, Homo sapiens
  misc_RNA (1)...(19): siRNA sense strand
agaaauaccaaacagugau

SEQ ID NO: 1500847 - RNA, 19 nt, Homo sapiens
  misc_RNA (1)...(19): siRNA sense strand
ucccuugaguuuagaaauc

SEQ ID NO: 1500848 - RNA, 19 nt, Homo sapiens
  misc_RNA (1)...(19): siRNA sense strand
gcaugugaccucugaacag

SEQ ID NO: 1500849 - RNA, 19 nt, Homo sapiens
  misc_RNA (1)...(19): siRNA sense strand
ucauggagagcaaggagaa

SEQ ID NO: 1500850 - RNA, 19 nt, Homo sapiens
  misc_RNA (1)...(19): siRNA sense strand
cgacucagacccaucuucu

SEQ ID NO: 1500851 - RNA, 19 nt, Homo sapiens
  misc_RNA (1)...(19): siRNA sense strand
gcugucaaagccaucauau

SEQ ID NO: 1500852 - RNA, 19 nt, Homo sapiens
  misc_RNA (1)...(19): siRNA sense strand
auaauaaccagcagguguu

SEQ ID NO: 1500853 - RNA, 19 nt, Homo sapiens
  misc_RNA (1)...(19): siRNA sense strand
ucagaaaccagaguguguu

SEQ ID NO: 1500854 - RNA, 19 nt, Homo sapiens
  misc_RNA (1)...(19): siRNA sense strand
gaagaccagcaaggaggaa

SEQ ID NO: 1500855 - RNA, 19 nt, Homo sapiens
  misc_RNA (1)...(19): siRNA sense strand
uugcugggcuggucggaau

SEQ ID NO: 1500856 - RNA, 19 nt, Homo sapiens
  misc_RNA (1)...(19): siRNA sense strand
caacgaucucccuugaguu

SEQ ID NO: 1500857 - RNA, 19 nt, Homo sapiens
  misc_RNA (1)...(19): siRNA sense strand
aacaggagugggacaagua

SEQ ID NO: 1500858 - RNA, 19 nt, Homo sapiens
  misc_RNA (1)...(19): siRNA sense strand
cagugaagauucggaaagg

SEQ ID NO: 1500859 - RNA, 19 nt, Homo sapiens
  misc_RNA (1)...(19): siRNA sense strand
ccacaggugauggccauug

SEQ ID NO: 1500860 - RNA, 19 nt, Homo sapiens
  misc_RNA (1)...(19): siRNA sense strand
ucuccgagcucuggacaca

SEQ ID NO: 1500861 - RNA, 19 nt, Homo sapiens
  misc_RNA (1)...(19): siRNA sense strand
cagcaaggaggaagagagu

SEQ ID NO: 1500862 - RNA, 19 nt, Homo sapiens
  misc_RNA (1)...(19): siRNA sense strand
gcagaaaacaaacaucauc

SEQ ID NO: 1500863 - RNA, 19 nt, Homo sapiens
  misc_RNA (1)...(19): siRNA sense strand
acaaguacugccacuaugu

SEQ ID NO: 1500864 - RNA, 19 nt, Homo sapiens
  misc_RNA (1)...(19): siRNA sense strand
gaagaugguuggcugauca

SEQ ID NO: 1500865 - RNA, 19 nt, Homo sapiens
  misc_RNA (1)...(19): siRNA sense strand
uagaugaacuuaugaguga

SEQ ID NO: 1500866 - RNA, 19 nt, Homo sapiens
  misc_RNA (1)...(19): siRNA sense strand
uaaugaagcucuugcagaa

SEQ ID NO: 1500867 - RNA, 19 nt, Homo sapiens
  misc_RNA (1)...(19): siRNA sense strand
ggagaaguaacugaaauua

SEQ ID NO: 1500868 - RNA, 19 nt, Homo sapiens
  misc_RNA (1)...(19): siRNA sense strand
ugaagaagcauaugagaaa

SEQ ID NO: 1500869 - RNA, 19 nt, Homo sapiens
  misc_RNA (1)...(19): siRNA sense strand
ugaacucuauucuccuuua

SEQ ID NO: 1500870 - RNA, 19 nt, Homo sapiens
  misc_RNA (1)...(19): siRNA sense strand
guugggagauguuguuuau

SEQ ID NO: 1500871 - RNA, 19 nt, Homo sapiens
  misc_RNA (1)...(19): siRNA sense strand
ugggagauguuguuuauug

SEQ ID NO: 1500872 - RNA, 19 nt, Homo sapiens
  misc_RNA (1)...(19): siRNA sense strand
gaagaagcauaugagaaau

SEQ ID NO: 1500873 - RNA, 19 nt, Homo sapiens
  misc_RNA (1)...(19): siRNA sense strand
gaacucuauucuccuuuau

SEQ ID NO: 1500874 - RNA, 19 nt, Homo sapiens
  misc_RNA (1)...(19): siRNA sense strand
ggacaaaauugaacaaaca

SEQ ID NO: 1500875 - RNA, 19 nt, Homo sapiens
  misc_RNA (1)...(19): siRNA sense strand
gugcguaaauucacagaga

SEQ ID NO: 1500876 - RNA, 19 nt, Homo sapiens
  misc_RNA (1)...(19): siRNA sense strand
gagauguuguuuauuguag

SEQ ID NO: 1500877 - RNA, 19 nt, Homo sapiens
  misc_RNA (1)...(19): siRNA sense strand
gagaaacacgaauggguaa

SEQ ID NO: 1500878 - RNA, 19 nt, Homo sapiens
  misc_RNA (1)...(19): siRNA sense strand
ggagauguuguuuauugua

SEQ ID NO: 1500879 - RNA, 19 nt, Homo sapiens
  misc_RNA (1)...(19): siRNA sense strand
gaaagcugcuagugaacuc

SEQ ID NO: 1500880 - RNA, 19 nt, Homo sapiens
  misc_RNA (1)...(19): siRNA sense strand
gaaaauccaggacuuguaa

SEQ ID NO: 1500881 - RNA, 19 nt, Homo sapiens
  misc_RNA (1)...(19): siRNA sense strand
caggagaaguaacugaaau

SEQ ID NO: 1500882 - RNA, 19 nt, Homo sapiens
  misc_RNA (1)...(19): siRNA sense strand
gaauggguaacaacagaaa

SEQ ID NO: 1500883 - RNA, 19 nt, Homo sapiens
  misc_RNA (1)...(19): siRNA sense strand
caagaugaguuuggugcuu

SEQ ID NO: 1500884 - RNA, 19 nt, Homo sapiens
  misc_RNA (1)...(19): siRNA sense strand
gaaauuaaugaagcucuug

SEQ ID NO: 1500885 - RNA, 19 nt, Homo sapiens
  misc_RNA (1)...(19): siRNA sense strand
gggagauguuguuuauugu

SEQ ID NO: 1500886 - RNA, 19 nt, Homo sapiens
  misc_RNA (1)...(19): siRNA sense strand
gaacuuaugagugaagaag

SEQ ID NO: 1500887 - RNA, 19 nt, Homo sapiens
  misc_RNA (1)...(19): siRNA sense strand
aagaugaguuuggugcuuu

SEQ ID NO: 1500888 - RNA, 19 nt, Homo sapiens
  misc_RNA (1)...(19): siRNA sense strand
ugaguuuggugcuuuggaa

SEQ ID NO: 1500889 - RNA, 19 nt, Homo sapiens
  misc_RNA (1)...(19): siRNA sense strand
aaacacgaauggguaacaa

SEQ ID NO: 1500890 - RNA, 19 nt, Homo sapiens
  misc_RNA (1)...(19): siRNA sense strand
ucacagagaaacacgaaug

SEQ ID NO: 1500891 - RNA, 19 nt, Homo sapiens
  misc_RNA (1)...(19): siRNA sense strand
acucuauucuccuuuauca

SEQ ID NO: 1500892 - RNA, 19 nt, Homo sapiens
  misc_RNA (1)...(19): siRNA sense strand
gugaagaagcauaugagaa

SEQ ID NO: 1500893 - RNA, 19 nt, Homo sapiens
  misc_RNA (1)...(19): siRNA sense strand
ucaagaugacacugaguaa

SEQ ID NO: 1500894 - RNA, 19 nt, Homo sapiens
  misc_RNA (1)...(19): siRNA sense strand
gaaacacgaauggguaaca

SEQ ID NO: 1500895 - RNA, 19 nt, Homo sapiens
  misc_RNA (1)...(19): siRNA sense strand
acgaauggguaacaacaga

SEQ ID NO: 1500896 - RNA, 19 nt, Homo sapiens
  misc_RNA (1)...(19): siRNA sense strand
gauguuguuuauuguaguc

SEQ ID NO: 1500897 - RNA, 19 nt, Homo sapiens
  misc_RNA (1)...(19): siRNA sense strand
gaaguugggacaaaauuga

SEQ ID NO: 1500898 - RNA, 19 nt, Homo sapiens
  misc_RNA (1)...(19): siRNA sense strand
guaaauucacagagaaaca

SEQ ID NO: 1500899 - RNA, 19 nt, Homo sapiens
  misc_RNA (1)...(19): siRNA sense strand
agaagcauaugagaaauac

SEQ ID NO: 1500900 - RNA, 19 nt, Homo sapiens
  misc_RNA (1)...(19): siRNA sense strand
ugagugaagaagcauauga

SEQ ID NO: 1500901 - RNA, 19 nt, Homo sapiens
  misc_RNA (1)...(19): siRNA sense strand
gaugguuggcugaucaaga

SEQ ID NO: 1500902 - RNA, 19 nt, Homo sapiens
  misc_RNA (1)...(19): siRNA sense strand
ugaacaaacaagaugaguu

SEQ ID NO: 1500903 - RNA, 19 nt, Homo sapiens
  misc_RNA (1)...(19): siRNA sense strand
gcguaaauucacagagaaa

SEQ ID NO: 1500904 - RNA, 19 nt, Homo sapiens
  misc_RNA (1)...(19): siRNA sense strand
caggaagcguugggagaug

SEQ ID NO: 1500905 - RNA, 19 nt, Homo sapiens
  misc_RNA (1)...(19): siRNA sense strand
agugaacucuauucuccuu

SEQ ID NO: 1500906 - RNA, 19 nt, Homo sapiens
  misc_RNA (1)...(19): siRNA sense strand
augguuggcugaucaagau

SEQ ID NO: 1500907 - RNA, 19 nt, Homo sapiens
  misc_RNA (1)...(19): siRNA sense strand
ugaagaugguuggcugauc

SEQ ID NO: 1500908 - RNA, 19 nt, Homo sapiens
  misc_RNA (1)...(19): siRNA sense strand
gacacugaguaacccuuca

SEQ ID NO: 1500909 - RNA, 19 nt, Homo sapiens
  misc_RNA (1)...(19): siRNA sense strand
cgaauggguaacaacagaa

SEQ ID NO: 1500910 - RNA, 19 nt, Homo sapiens
  misc_RNA (1)...(19): siRNA sense strand
ugcguaaauucacagagaa

SEQ ID NO: 1500911 - RNA, 19 nt, Homo sapiens
  misc_RNA (1)...(19): siRNA sense strand
acacgaauggguaacaaca

SEQ ID NO: 1500912 - RNA, 19 nt, Homo sapiens
  misc_RNA (1)...(19): siRNA sense strand
ggaagcguugggagauguu

SEQ ID NO: 1500913 - RNA, 19 nt, Homo sapiens
  misc_RNA (1)...(19): siRNA sense strand
gaguuuggugcuuuggaaa

SEQ ID NO: 1500914 - RNA, 19 nt, Homo sapiens
  misc_RNA (1)...(19): siRNA sense strand
gagugaagaagcauaugag

SEQ ID NO: 1500915 - RNA, 19 nt, Homo sapiens
  misc_RNA (1)...(19): siRNA sense strand
gaugaacuuaugagugaag

SEQ ID NO: 1500916 - RNA, 19 nt, Homo sapiens
  misc_RNA (1)...(19): siRNA sense strand
gcaaauaucucacuugaau

SEQ ID NO: 1500917 - RNA, 19 nt, Homo sapiens
  misc_RNA (1)...(19): siRNA sense strand
gcagaaagccgaauucaga

SEQ ID NO: 1500918 - RNA, 19 nt, Homo sapiens
  misc_RNA (1)...(19): siRNA sense strand
caccaaagaugaaucaguu

SEQ ID NO: 1500919 - RNA, 19 nt, Homo sapiens
  misc_RNA (1)...(19): siRNA sense strand
ggagggaucuggugauagg

SEQ ID NO: 1500920 - RNA, 19 nt, Homo sapiens
  misc_RNA (1)...(19): siRNA sense strand
cggcaaauaucucacuuga

SEQ ID NO: 1500921 - RNA, 19 nt, Homo sapiens
  misc_RNA (1)...(19): siRNA sense strand
caagagagcagcaucaaca

SEQ ID NO: 1500922 - RNA, 19 nt, Homo sapiens
  misc_RNA (1)...(19): siRNA sense strand
ugaaucaguuucucuacaa

SEQ ID NO: 1500923 - RNA, 19 nt, Homo sapiens
  misc_RNA (1)...(19): siRNA sense strand
gauaacaacaucguaaaga

SEQ ID NO: 1500924 - RNA, 19 nt, Homo sapiens
  misc_RNA (1)...(19): siRNA sense strand
gagagcagcaucaacauca

SEQ ID NO: 1500925 - RNA, 19 nt, Homo sapiens
  misc_RNA (1)...(19): siRNA sense strand
gagcaucguuguggaguuc

SEQ ID NO: 1500926 - RNA, 19 nt, Homo sapiens
  misc_RNA (1)...(19): siRNA sense strand
gagugguucucggcaaaua

SEQ ID NO: 1500927 - RNA, 19 nt, Homo sapiens
  misc_RNA (1)...(19): siRNA sense strand
gaggcuaucccaccaaaga

SEQ ID NO: 1500928 - RNA, 19 nt, Homo sapiens
  misc_RNA (1)...(19): siRNA sense strand
ucuacaaccucaaagagaa

SEQ ID NO: 1500929 - RNA, 19 nt, Homo sapiens
  misc_RNA (1)...(19): siRNA sense strand
gaaagccgaauucagaaca

SEQ ID NO: 1500930 - RNA, 19 nt, Homo sapiens
  misc_RNA (1)...(19): siRNA sense strand
gcaucaacaucaccaacau

SEQ ID NO: 1500931 - RNA, 19 nt, Homo sapiens
  misc_RNA (1)...(19): siRNA sense strand
ccagauaucauuccauaag

SEQ ID NO: 1500932 - RNA, 19 nt, Homo sapiens
  misc_RNA (1)...(19): siRNA sense strand
ccggagggaucuggugaua

SEQ ID NO: 1500933 - RNA, 19 nt, Homo sapiens
  misc_RNA (1)...(19): siRNA sense strand
auccagauaucauuccaua

SEQ ID NO: 1500934 - RNA, 19 nt, Homo sapiens
  misc_RNA (1)...(19): siRNA sense strand
gaccguccuucgauaacaa

SEQ ID NO: 1500935 - RNA, 19 nt, Homo sapiens
  misc_RNA (1)...(19): siRNA sense strand
caacgcagaaagccgaauu

SEQ ID NO: 1500936 - RNA, 19 nt, Homo sapiens
  misc_RNA (1)...(19): siRNA sense strand
gaauucagaacauccacuu

SEQ ID NO: 1500937 - RNA, 19 nt, Homo sapiens
  misc_RNA (1)...(19): siRNA sense strand
gcuaaucagcggcaggaaa

SEQ ID NO: 1500938 - RNA, 19 nt, Homo sapiens
  misc_RNA (1)...(19): siRNA sense strand
gcucagggccucauaaagc

SEQ ID NO: 1500939 - RNA, 19 nt, Homo sapiens
  misc_RNA (1)...(19): siRNA sense strand
cuggugggcuggcuaauca

SEQ ID NO: 1500940 - RNA, 19 nt, Homo sapiens
  misc_RNA (1)...(19): siRNA sense strand
ccacagagacaacaaaucc

SEQ ID NO: 1500941 - RNA, 19 nt, Homo sapiens
  misc_RNA (1)...(19): siRNA sense strand
ccaaagaugaaucaguuuc

SEQ ID NO: 1500942 - RNA, 19 nt, Homo sapiens
  misc_RNA (1)...(19): siRNA sense strand
gcccagcaguguccaugug

SEQ ID NO: 1500943 - RNA, 19 nt, Homo sapiens
  misc_RNA (1)...(19): siRNA sense strand
agauaucauuccauaagga

SEQ ID NO: 1500944 - RNA, 19 nt, Homo sapiens
  misc_RNA (1)...(19): siRNA sense strand
ucaaagagaaucugcaaaa

SEQ ID NO: 1500945 - RNA, 19 nt, Homo sapiens
  misc_RNA (1)...(19): siRNA sense strand
ugagaccguccuucgauaa

SEQ ID NO: 1500946 - RNA, 19 nt, Homo sapiens
  misc_RNA (1)...(19): siRNA sense strand
caacaucaccaacauucag

SEQ ID NO: 1500947 - RNA, 19 nt, Homo sapiens
  misc_RNA (1)...(19): siRNA sense strand
cagaaagccgaauucagaa

SEQ ID NO: 1500948 - RNA, 19 nt, Homo sapiens
  misc_RNA (1)...(19): siRNA sense strand
gcuaucccaccaaagauga

SEQ ID NO: 1500949 - RNA, 19 nt, Homo sapiens
  misc_RNA (1)...(19): siRNA sense strand
guggugggauccagauauc

SEQ ID NO: 1500950 - RNA, 19 nt, Homo sapiens
  misc_RNA (1)...(19): siRNA sense strand
gaaugccucagcacaagug

SEQ ID NO: 1500951 - RNA, 19 nt, Homo sapiens
  misc_RNA (1)...(19): siRNA sense strand
gaaucaguuucucuacaac

SEQ ID NO: 1500952 - RNA, 19 nt, Homo sapiens
  misc_RNA (1)...(19): siRNA sense strand
uugagaccguccuucgaua

SEQ ID NO: 1500953 - RNA, 19 nt, Homo sapiens
  misc_RNA (1)...(19): siRNA sense strand
aauccacccuggcaagaau

SEQ ID NO: 1500954 - RNA, 19 nt, Homo sapiens
  misc_RNA (1)...(19): siRNA sense strand
caaauccacccuggcaaga

SEQ ID NO: 1500955 - RNA, 19 nt, Homo sapiens
  misc_RNA (1)...(19): siRNA sense strand
gcuggagaaagacgaguuu

SEQ ID NO: 1500956 - RNA, 19 nt, Homo sapiens
  misc_RNA (1)...(19): siRNA sense strand
cagauaucauuccauaagg

SEQ ID NO: 1500957 - RNA, 19 nt, Homo sapiens
  misc_RNA (1)...(19): siRNA sense strand
cauaaagcacaacgcagaa

SEQ ID NO: 1500958 - RNA, 19 nt, Homo sapiens
  misc_RNA (1)...(19): siRNA sense strand
caaagaugaaucaguuucu

SEQ ID NO: 1500959 - RNA, 19 nt, Homo sapiens
  misc_RNA (1)...(19): siRNA sense strand
caucaacaucaccaacauu

SEQ ID NO: 1500960 - RNA, 19 nt, Homo sapiens
  misc_RNA (1)...(19): siRNA sense strand
guccuucgauaacaacauc

SEQ ID NO: 1500961 - RNA, 19 nt, Homo sapiens
  misc_RNA (1)...(19): siRNA sense strand
cacuugaauuugaccuuga

SEQ ID NO: 1500962 - RNA, 19 nt, Homo sapiens
  misc_RNA (1)...(19): siRNA sense strand
cugaggcuaucccaccaaa

SEQ ID NO: 1500963 - RNA, 19 nt, Homo sapiens
  misc_RNA (1)...(19): siRNA sense strand
ccucaaagagaaucugcaa

SEQ ID NO: 1500964 - RNA, 19 nt, Homo sapiens
  misc_RNA (1)...(19): siRNA sense strand
aaagaugaaucaguuucuc

SEQ ID NO: 1500965 - RNA, 19 nt, Homo sapiens
  misc_RNA (1)...(19): siRNA sense strand
agaugaaucaguuucucua

SEQ ID NO: 1500966 - RNA, 19 nt, Homo sapiens
  misc_RNA (1)...(19): siRNA sense strand
ggauccagauaucauucca

SEQ ID NO: 1500967 - RNA, 19 nt, Homo sapiens
  misc_RNA (1)...(19): siRNA sense strand
aggagugguucucggcaaa

SEQ ID NO: 1500968 - RNA, 19 nt, Homo sapiens
  misc_RNA (1)...(19): siRNA sense strand
cagcaagagagcagcauca

SEQ ID NO: 1500969 - RNA, 19 nt, Homo sapiens
  misc_RNA (1)...(19): siRNA sense strand
uaaagcacaacgcagaaag

SEQ ID NO: 1500970 - RNA, 19 nt, Homo sapiens
  misc_RNA (1)...(19): siRNA sense strand
gcaagagagcagcaucaac

SEQ ID NO: 1500971 - RNA, 19 nt, Homo sapiens
  misc_RNA (1)...(19): siRNA sense strand
ccaccaaagaugaaucagu

SEQ ID NO: 1500972 - RNA, 19 nt, Homo sapiens
  misc_RNA (1)...(19): siRNA sense strand
auucagaacauccacuuug

SEQ ID NO: 1500973 - RNA, 19 nt, Homo sapiens
  misc_RNA (1)...(19): siRNA sense strand
gaaccuuggugcccuaauu

SEQ ID NO: 1500974 - RNA, 19 nt, Homo sapiens
  misc_RNA (1)...(19): siRNA sense strand
gaucagcccucgagaugaa

SEQ ID NO: 1500975 - RNA, 19 nt, Homo sapiens
  misc_RNA (1)...(19): siRNA sense strand
cgacaggguugcccagauu

SEQ ID NO: 1500976 - RNA, 19 nt, Homo sapiens
  misc_RNA (1)...(19): siRNA sense strand
ucugcuaccugaugaauuu

SEQ ID NO: 1500977 - RNA, 19 nt, Homo sapiens
  misc_RNA (1)...(19): siRNA sense strand
uaggacagguugcaaauuc

SEQ ID NO: 1500978 - RNA, 19 nt, Homo sapiens
  misc_RNA (1)...(19): siRNA sense strand
agaacaaggugauagugaa

SEQ ID NO: 1500979 - RNA, 19 nt, Homo sapiens
  misc_RNA (1)...(19): siRNA sense strand
caaauucaaguuccgcuuu

SEQ ID NO: 1500980 - RNA, 19 nt, Homo sapiens
  misc_RNA (1)...(19): siRNA sense strand
gaacaaggugauagugaag

SEQ ID NO: 1500981 - RNA, 19 nt, Homo sapiens
  misc_RNA (1)...(19): siRNA sense strand
ggagcuucaucauccagaa

SEQ ID NO: 1500982 - RNA, 19 nt, Homo sapiens
  misc_RNA (1)...(19): siRNA sense strand
ccgcagcucucagccauga

SEQ ID NO: 1500983 - RNA, 19 nt, Homo sapiens
  misc_RNA (1)...(19): siRNA sense strand
cggaggagguggagaagca

SEQ ID NO: 1500984 - RNA, 19 nt, Homo sapiens
  misc_RNA (1)...(19): siRNA sense strand
augaagacaugcucugcua

SEQ ID NO: 1500985 - RNA, 19 nt, Homo sapiens
  misc_RNA (1)...(19): siRNA sense strand
ggacagguugcaaauucaa

SEQ ID NO: 1500986 - RNA, 19 nt, Homo sapiens
  misc_RNA (1)...(19): siRNA sense strand
cagaacaaggugauaguga

SEQ ID NO: 1500987 - RNA, 19 nt, Homo sapiens
  misc_RNA (1)...(19): siRNA sense strand
gagcucaggcacucuagga

SEQ ID NO: 1500988 - RNA, 19 nt, Homo sapiens
  misc_RNA (1)...(19): siRNA sense strand
gacaggguugcccagauua

SEQ ID NO: 1500989 - RNA, 19 nt, Homo sapiens
  misc_RNA (1)...(19): siRNA sense strand
uugcccagauuauuaaaga

SEQ ID NO: 1500990 - RNA, 19 nt, Homo sapiens
  misc_RNA (1)...(19): siRNA sense strand
acaaggugauagugaagga

SEQ ID NO: 1500991 - RNA, 19 nt, Homo sapiens
  misc_RNA (1)...(19): siRNA sense strand
ggguugcccagauuauuaa

SEQ ID NO: 1500992 - RNA, 19 nt, Homo sapiens
  misc_RNA (1)...(19): siRNA sense strand
cccagauuauuaaagauga

SEQ ID NO: 1500993 - RNA, 19 nt, Homo sapiens
  misc_RNA (1)...(19): siRNA sense strand
aggguugcccagauuauua

SEQ ID NO: 1500994 - RNA, 19 nt, Homo sapiens
  misc_RNA (1)...(19): siRNA sense strand
gcccagauuauuaaagaug

SEQ ID NO: 1500995 - RNA, 19 nt, Homo sapiens
  misc_RNA (1)...(19): siRNA sense strand
gaaccacccgcagcucuca

SEQ ID NO: 1500996 - RNA, 19 nt, Homo sapiens
  misc_RNA (1)...(19): siRNA sense strand
cagcggaggagguggagaa

SEQ ID NO: 1500997 - RNA, 19 nt, Homo sapiens
  misc_RNA (1)...(19): siRNA sense strand
gcuucaucauccagaauau

SEQ ID NO: 1500998 - RNA, 19 nt, Homo sapiens
  misc_RNA (1)...(19): siRNA sense strand
ugauagugaaggaguauga

SEQ ID NO: 1500999 - RNA, 19 nt, Homo sapiens
  misc_RNA (1)...(19): siRNA sense strand
gcccguaggagcuucauca

SEQ ID NO: 1501000 - RNA, 19 nt, Homo sapiens
  misc_RNA (1)...(19): siRNA sense strand
gcuaccugaugaauuugga

SEQ ID NO: 1501001 - RNA, 19 nt, Homo sapiens
  misc_RNA (1)...(19): siRNA sense strand
ggucaccgccuuccugaac

SEQ ID NO: 1501002 - RNA, 19 nt, Homo sapiens
  misc_RNA (1)...(19): siRNA sense strand
gauagugaaggaguaugaa

SEQ ID NO: 1501003 - RNA, 19 nt, Homo sapiens
  misc_RNA (1)...(19): siRNA sense strand
gcagcucucagccaugauc

SEQ ID NO: 1501004 - RNA, 19 nt, Homo sapiens
  misc_RNA (1)...(19): siRNA sense strand
ggccgaguggugucuauug

SEQ ID NO: 1501005 - RNA, 19 nt, Homo sapiens
  misc_RNA (1)...(19): siRNA sense strand
gagcuucaucauccagaau

SEQ ID NO: 1501006 - RNA, 19 nt, Homo sapiens
  misc_RNA (1)...(19): siRNA sense strand
guaggagcuucaucaucca

SEQ ID NO: 1501007 - RNA, 19 nt, Homo sapiens
  misc_RNA (1)...(19): siRNA sense strand
ccgaggacgcgaacaagga

SEQ ID NO: 1501008 - RNA, 19 nt, Homo sapiens
  misc_RNA (1)...(19): siRNA sense strand
ggacagagaccaccacuac

SEQ ID NO: 1501009 - RNA, 19 nt, Homo sapiens
  misc_RNA (1)...(19): siRNA sense strand
caaggccacucaccacauc

SEQ ID NO: 1501010 - RNA, 19 nt, Homo sapiens
  misc_RNA (1)...(19): siRNA sense strand
gcccgcugcuccuugcuuu

SEQ ID NO: 1501011 - RNA, 19 nt, Homo sapiens
  misc_RNA (1)...(19): siRNA sense strand
cacccacacuggacagaga

SEQ ID NO: 1501012 - RNA, 19 nt, Homo sapiens
  misc_RNA (1)...(19): siRNA sense strand
caccacuucuugcccaaau

SEQ ID NO: 1501013 - RNA, 19 nt, Homo sapiens
  misc_RNA (1)...(19): siRNA sense strand
ccacucaucaaacccucua

SEQ ID NO: 1501014 - RNA, 19 nt, Homo sapiens
  misc_RNA (1)...(19): siRNA sense strand
gaauacagcaguccaguua

SEQ ID NO: 1501015 - RNA, 19 nt, Homo sapiens
  misc_RNA (1)...(19): siRNA sense strand
guucugggcuauuugauua

SEQ ID NO: 1501016 - RNA, 19 nt, Homo sapiens
  misc_RNA (1)...(19): siRNA sense strand
ccgaauauguugucaauga

SEQ ID NO: 1501017 - RNA, 19 nt, Homo sapiens
  misc_RNA (1)...(19): siRNA sense strand
gaagacuguucaggugaua

SEQ ID NO: 1501018 - RNA, 19 nt, Homo sapiens
  misc_RNA (1)...(19): siRNA sense strand
ggacaaucccgaauauguu

SEQ ID NO: 1501019 - RNA, 19 nt, Homo sapiens
  misc_RNA (1)...(19): siRNA sense strand
uauguuagcuugaccuaug

SEQ ID NO: 1501020 - RNA, 19 nt, Homo sapiens
  misc_RNA (1)...(19): siRNA sense strand
uagcuggacuaacagauuu

SEQ ID NO: 1501021 - RNA, 19 nt, Homo sapiens
  misc_RNA (1)...(19): siRNA sense strand
ggaagacuguucaggugau

SEQ ID NO: 1501022 - RNA, 19 nt, Homo sapiens
  misc_RNA (1)...(19): siRNA sense strand
aaacugggccaaucaaaga

SEQ ID NO: 1501023 - RNA, 19 nt, Homo sapiens
  misc_RNA (1)...(19): siRNA sense strand
ccacuuacuuacaugauca

SEQ ID NO: 1501024 - RNA, 19 nt, Homo sapiens
  misc_RNA (1)...(19): siRNA sense strand
cgagagauguaauguugau

SEQ ID NO: 1501025 - RNA, 19 nt, Homo sapiens
  misc_RNA (1)...(19): siRNA sense strand
cauggacaaucccgaauau

SEQ ID NO: 1501026 - RNA, 19 nt, Homo sapiens
  misc_RNA (1)...(19): siRNA sense strand
gaaacugggccaaucaaag

SEQ ID NO: 1501027 - RNA, 19 nt, Homo sapiens
  misc_RNA (1)...(19): siRNA sense strand
guauuucaauccuugcuau

SEQ ID NO: 1501028 - RNA, 19 nt, Homo sapiens
  misc_RNA (1)...(19): siRNA sense strand
cagauacuaugguguuuua

SEQ ID NO: 1501029 - RNA, 19 nt, Homo sapiens
  misc_RNA (1)...(19): siRNA sense strand
gcucgaaacugggccaauc

SEQ ID NO: 1501030 - RNA, 19 nt, Homo sapiens
  misc_RNA (1)...(19): siRNA sense strand
gaucauuucgagagaugua

SEQ ID NO: 1501031 - RNA, 19 nt, Homo sapiens
  misc_RNA (1)...(19): siRNA sense strand
cuaugccacugcuagguua

SEQ ID NO: 1501032 - RNA, 19 nt, Homo sapiens
  misc_RNA (1)...(19): siRNA sense strand
cugcaucagcuuauaguua

SEQ ID NO: 1501033 - RNA, 19 nt, Homo sapiens
  misc_RNA (1)...(19): siRNA sense strand
gggaagugcucuugaucca

SEQ ID NO: 1501034 - RNA, 19 nt, Homo sapiens
  misc_RNA (1)...(19): siRNA sense strand
gacaaucccgaauauguug

SEQ ID NO: 1501035 - RNA, 19 nt, Homo sapiens
  misc_RNA (1)...(19): siRNA sense strand
gaccuaugcagaucuuauu

SEQ ID NO: 1501036 - RNA, 19 nt, Homo sapiens
  misc_RNA (1)...(19): siRNA sense strand
uucgagagauguaauguug

SEQ ID NO: 1501037 - RNA, 19 nt, Homo sapiens
  misc_RNA (1)...(19): siRNA sense strand
uugauccacuugcugauaa

SEQ ID NO: 1501038 - RNA, 19 nt, Homo sapiens
  misc_RNA (1)...(19): siRNA sense strand
auacagcaguccaguuaau

SEQ ID NO: 1501039 - RNA, 19 nt, Homo sapiens
  misc_RNA (1)...(19): siRNA sense strand
cagauuuguuggauggauu

SEQ ID NO: 1501040 - RNA, 19 nt, Homo sapiens
  misc_RNA (1)...(19): siRNA sense strand
caacauucaucagcaaggu

SEQ ID NO: 1501041 - RNA, 19 nt, Homo sapiens
  misc_RNA (1)...(19): siRNA sense strand
gacagcauuuaucuucaga

SEQ ID NO: 1501042 - RNA, 19 nt, Homo sapiens
  misc_RNA (1)...(19): siRNA sense strand
gagauguaauguugauugc

SEQ ID NO: 1501043 - RNA, 19 nt, Homo sapiens
  misc_RNA (1)...(19): siRNA sense strand
auaccgaacucuuccaaca

SEQ ID NO: 1501044 - RNA, 19 nt, Homo sapiens
  misc_RNA (1)...(19): siRNA sense strand
ccauggacaaucccgaaua

SEQ ID NO: 1501045 - RNA, 19 nt, Homo sapiens
  misc_RNA (1)...(19): siRNA sense strand
gcagaucuuauuccaguuc

SEQ ID NO: 1501046 - RNA, 19 nt, Homo sapiens
  misc_RNA (1)...(19): siRNA sense strand
uaauauugcacuaggaguu

SEQ ID NO: 1501047 - RNA, 19 nt, Homo sapiens
  misc_RNA (1)...(19): siRNA sense strand
ucccgaauauguugucaau

SEQ ID NO: 1501048 - RNA, 19 nt, Homo sapiens
  misc_RNA (1)...(19): siRNA sense strand
aagaucagcuuugggaagu

SEQ ID NO: 1501049 - RNA, 19 nt, Homo sapiens
  misc_RNA (1)...(19): siRNA sense strand
cgaaacugggccaaucaaa

SEQ ID NO: 1501050 - RNA, 19 nt, Homo sapiens
  misc_RNA (1)...(19): siRNA sense strand
gcuaugccacugcuagguu

SEQ ID NO: 1501051 - RNA, 19 nt, Homo sapiens
  misc_RNA (1)...(19): siRNA sense strand
ccaacaccacgaacacuug

SEQ ID NO: 1501052 - RNA, 19 nt, Homo sapiens
  misc_RNA (1)...(19): siRNA sense strand
agagauguaauguugauug

SEQ ID NO: 1501053 - RNA, 19 nt, Homo sapiens
  misc_RNA (1)...(19): siRNA sense strand
ugggcuauuugauuauuga

SEQ ID NO: 1501054 - RNA, 19 nt, Homo sapiens
  misc_RNA (1)...(19): siRNA sense strand
ugcaucagcuuauaguuac

SEQ ID NO: 1501055 - RNA, 19 nt, Homo sapiens
  misc_RNA (1)...(19): siRNA sense strand
ugacagcauuuaucuucag

SEQ ID NO: 1501056 - RNA, 19 nt, Homo sapiens
  misc_RNA (1)...(19): siRNA sense strand
cuuauuccaguuccacuua

SEQ ID NO: 1501057 - RNA, 19 nt, Homo sapiens
  misc_RNA (1)...(19): siRNA sense strand
uggacaaucccgaauaugu

SEQ ID NO: 1501058 - RNA, 19 nt, Homo sapiens
  misc_RNA (1)...(19): siRNA sense strand
gccaaguauuucaauccuu

SEQ ID NO: 1501059 - RNA, 19 nt, Homo sapiens
  misc_RNA (1)...(19): siRNA sense strand
gaaaacccauggacaaucc

SEQ ID NO: 1501060 - RNA, 19 nt, Homo sapiens
  misc_RNA (1)...(19): siRNA sense strand
agacuguucaggugauaaa

SEQ ID NO: 1501061 - RNA, 19 nt, Homo sapiens
  misc_RNA (1)...(19): siRNA sense strand
cuucagauacuaugguguu

SEQ ID NO: 1501062 - RNA, 19 nt, Homo sapiens
  misc_RNA (1)...(19): siRNA sense strand
ugauccacuugcugauaaa

SEQ ID NO: 1501063 - RNA, 19 nt, Homo sapiens
  misc_RNA (1)...(19): siRNA sense strand
caguuccacuuacuuacau

SEQ ID NO: 1501064 - RNA, 19 nt, Homo sapiens
  misc_RNA (1)...(19): siRNA sense strand
uagcuugaccuaugcagau

SEQ ID NO: 1501065 - RNA, 19 nt, Homo sapiens
  misc_RNA (1)...(19): siRNA sense strand
ccaguuccacuuacuuaca

SEQ ID NO: 1501066 - RNA, 19 nt, Homo sapiens
  misc_RNA (1)...(19): siRNA sense strand
ugaauacagcaguccaguu

SEQ ID NO: 1501067 - RNA, 19 nt, Homo sapiens
  misc_RNA (1)...(19): siRNA sense strand
ucugggcuauuugauuauu

SEQ ID NO: 1501068 - RNA, 19 nt, Homo sapiens
  misc_RNA (1)...(19): siRNA sense strand
ugaccuaugcagaucuuau

SEQ ID NO: 1501069 - RNA, 19 nt, Homo sapiens
  misc_RNA (1)...(19): siRNA sense strand
aaccaacauucaucagcaa

SEQ ID NO: 1501070 - RNA, 19 nt, Homo sapiens
  misc_RNA (1)...(19): siRNA sense strand
aauauugcacuaggaguuu

SEQ ID NO: 1501071 - RNA, 19 nt, Homo sapiens
  misc_RNA (1)...(19): siRNA sense strand
uccacuugcugauaaaaua

SEQ ID NO: 1501072 - RNA, 19 nt, Homo sapiens
  misc_RNA (1)...(19): siRNA sense strand
cuaugcagaucuuauucca

SEQ ID NO: 1501073 - RNA, 19 nt, Homo sapiens
  misc_RNA (1)...(19): siRNA sense strand
cagcaguccaguuaaucuu

SEQ ID NO: 1501074 - RNA, 19 nt, Homo sapiens
  misc_RNA (1)...(19): siRNA sense strand
ggauuuauugcucgaaacu

SEQ ID NO: 1501075 - RNA, 19 nt, Homo sapiens
  misc_RNA (1)...(19): siRNA sense strand
acaugaucauuucgagaga

SEQ ID NO: 1501076 - RNA, 19 nt, Homo sapiens
  misc_RNA (1)...(19): siRNA sense strand
gaaaucaaccagacuauua

SEQ ID NO: 1501077 - RNA, 19 nt, Homo sapiens
  misc_RNA (1)...(19): siRNA sense strand
gaaaugaguuuguucagaa

SEQ ID NO: 1501078 - RNA, 19 nt, Homo sapiens
  misc_RNA (1)...(19): siRNA sense strand
gaacaaaacugaagaauca

SEQ ID NO: 1501079 - RNA, 19 nt, Homo sapiens
  misc_RNA (1)...(19): siRNA sense strand
ugaagaagaugcugcuuua

SEQ ID NO: 1501080 - RNA, 19 nt, Homo sapiens
  misc_RNA (1)...(19): siRNA sense strand
gaaacugccuucuaaagug

SEQ ID NO: 1501081 - RNA, 19 nt, Homo sapiens
  misc_RNA (1)...(19): siRNA sense strand
ggacuauccugauuauuau

SEQ ID NO: 1501082 - RNA, 19 nt, Homo sapiens
  misc_RNA (1)...(19): siRNA sense strand
ugacauggcuucucccaaa

SEQ ID NO: 1501083 - RNA, 19 nt, Homo sapiens
  misc_RNA (1)...(19): siRNA sense strand
gaaacuaaaugaggucuau

SEQ ID NO: 1501084 - RNA, 19 nt, Homo sapiens
  misc_RNA (1)...(19): siRNA sense strand
caacaaaguuccaguuagu

SEQ ID NO: 1501085 - RNA, 19 nt, Homo sapiens
  misc_RNA (1)...(19): siRNA sense strand
gagcauauguuugaaguau

SEQ ID NO: 1501086 - RNA, 19 nt, Homo sapiens
  misc_RNA (1)...(19): siRNA sense strand
ggaagaguaugaugauguu

SEQ ID NO: 1501087 - RNA, 19 nt, Homo sapiens
  misc_RNA (1)...(19): siRNA sense strand
ggacagauucagaaauaua

SEQ ID NO: 1501088 - RNA, 19 nt, Homo sapiens
  misc_RNA (1)...(19): siRNA sense strand
ggagugugaucugaauuua

SEQ ID NO: 1501089 - RNA, 19 nt, Homo sapiens
  misc_RNA (1)...(19): siRNA sense strand
caagaaagcagaauaugaa

SEQ ID NO: 1501090 - RNA, 19 nt, Homo sapiens
  misc_RNA (1)...(19): siRNA sense strand
gaagaaaccugccccauga

SEQ ID NO: 1501091 - RNA, 19 nt, Homo sapiens
  misc_RNA (1)...(19): siRNA sense strand
gcacucagcuauaccacaa

SEQ ID NO: 1501092 - RNA, 19 nt, Homo sapiens
  misc_RNA (1)...(19): siRNA sense strand
gaucugaguugccugacua

SEQ ID NO: 1501093 - RNA, 19 nt, Homo sapiens
  misc_RNA (1)...(19): siRNA sense strand
ugacgaagaugaugaugaa

SEQ ID NO: 1501094 - RNA, 19 nt, Homo sapiens
  misc_RNA (1)...(19): siRNA sense strand
ccacauaucgucuguauug

SEQ ID NO: 1501095 - RNA, 19 nt, Homo sapiens
  misc_RNA (1)...(19): siRNA sense strand
gcauauguuugaaguauug

SEQ ID NO: 1501096 - RNA, 19 nt, Homo sapiens
  misc_RNA (1)...(19): siRNA sense strand
acaagcagaugaagaaauu

SEQ ID NO: 1501097 - RNA, 19 nt, Homo sapiens
  misc_RNA (1)...(19): siRNA sense strand
gaagaaaucaaccagacua

SEQ ID NO: 1501098 - RNA, 19 nt, Homo sapiens
  misc_RNA (1)...(19): siRNA sense strand
gagcuuauccacaaucuuu

SEQ ID NO: 1501099 - RNA, 19 nt, Homo sapiens
  misc_RNA (1)...(19): siRNA sense strand
gcuauaaugugcccaauuc

SEQ ID NO: 1501100 - RNA, 19 nt, Homo sapiens
  misc_RNA (1)...(19): siRNA sense strand
guuaggaguugucggaaua

SEQ ID NO: 1501101 - RNA, 19 nt, Homo sapiens
  misc_RNA (1)...(19): siRNA sense strand
acaaggaggucguuuauca

SEQ ID NO: 1501102 - RNA, 19 nt, Homo sapiens
  misc_RNA (1)...(19): siRNA sense strand
gcaaguguguggucauguu

SEQ ID NO: 1501103 - RNA, 19 nt, Homo sapiens
  misc_RNA (1)...(19): siRNA sense strand
gcucccagguuuauaauga

SEQ ID NO: 1501104 - RNA, 19 nt, Homo sapiens
  misc_RNA (1)...(19): siRNA sense strand
ucggacagauucagaaaua

SEQ ID NO: 1501105 - RNA, 19 nt, Homo sapiens
  misc_RNA (1)...(19): siRNA sense strand
ggaagaugcuacagcgauu

SEQ ID NO: 1501106 - RNA, 19 nt, Homo sapiens
  misc_RNA (1)...(19): siRNA sense strand
ggaggagacuuuccaaucu

SEQ ID NO: 1501107 - RNA, 19 nt, Homo sapiens
  misc_RNA (1)...(19): siRNA sense strand
ugacaaauaugcuggugaa

SEQ ID NO: 1501108 - RNA, 19 nt, Homo sapiens
  misc_RNA (1)...(19): siRNA sense strand
gaagaaauucaaaggauug

SEQ ID NO: 1501109 - RNA, 19 nt, Homo sapiens
  misc_RNA (1)...(19): siRNA sense strand
caacaaguaccaagauauu

SEQ ID NO: 1501110 - RNA, 19 nt, Homo sapiens
  misc_RNA (1)...(19): siRNA sense strand
gccaugaacucuauaauac

SEQ ID NO: 1501111 - RNA, 19 nt, Homo sapiens
  misc_RNA (1)...(19): siRNA sense strand
ccaauggacuugaaaauaa

SEQ ID NO: 1501112 - RNA, 19 nt, Homo sapiens
  misc_RNA (1)...(19): siRNA sense strand
caaauaugcuggugaagag

SEQ ID NO: 1501113 - RNA, 19 nt, Homo sapiens
  misc_RNA (1)...(19): siRNA sense strand
caacaugaguggcuacauc

SEQ ID NO: 1501114 - RNA, 19 nt, Homo sapiens
  misc_RNA (1)...(19): siRNA sense strand
gaaagacugugggaggauu

SEQ ID NO: 1501115 - RNA, 19 nt, Homo sapiens
  misc_RNA (1)...(19): siRNA sense strand
gaacagggcagacuucucu

SEQ ID NO: 1501116 - RNA, 19 nt, Homo sapiens
  misc_RNA (1)...(19): siRNA sense strand
ugacauguauucucggaaa

SEQ ID NO: 1501117 - RNA, 19 nt, Homo sapiens
  misc_RNA (1)...(19): siRNA sense strand
gagauggagcugcauauuu

SEQ ID NO: 1501118 - RNA, 19 nt, Homo sapiens
  misc_RNA (1)...(19): siRNA sense strand
ugacuuugcugauucaaga

SEQ ID NO: 1501119 - RNA, 19 nt, Homo sapiens
  misc_RNA (1)...(19): siRNA sense strand
ggucguuuaucagcaauua

SEQ ID NO: 1501120 - RNA, 19 nt, Homo sapiens
  misc_RNA (1)...(19): siRNA sense strand
gagaugagggcugugauua

SEQ ID NO: 1501121 - RNA, 19 nt, Homo sapiens
  misc_RNA (1)...(19): siRNA sense strand
cauaucgucuguauugaaa

SEQ ID NO: 1501122 - RNA, 19 nt, Homo sapiens
  misc_RNA (1)...(19): siRNA sense strand
gaucccaacuuuccuaaca

SEQ ID NO: 1501123 - RNA, 19 nt, Homo sapiens
  misc_RNA (1)...(19): siRNA sense strand
caauauggcucagaaagug

SEQ ID NO: 1501124 - RNA, 19 nt, Homo sapiens
  misc_RNA (1)...(19): siRNA sense strand
cagaagacuuugugaccua

SEQ ID NO: 1501125 - RNA, 19 nt, Homo sapiens
  misc_RNA (1)...(19): siRNA sense strand
gagcauaacauccgcaaug

SEQ ID NO: 1501126 - RNA, 19 nt, Homo sapiens
  misc_RNA (1)...(19): siRNA sense strand
gccaacaaguaccaagaua

SEQ ID NO: 1501127 - RNA, 19 nt, Homo sapiens
  misc_RNA (1)...(19): siRNA sense strand
gaacgagcaagaaggauga

SEQ ID NO: 1501128 - RNA, 19 nt, Homo sapiens
  misc_RNA (1)...(19): siRNA sense strand
gagagccgcuacaaugaga

SEQ ID NO: 1501129 - RNA, 19 nt, Homo sapiens
  misc_RNA (1)...(19): siRNA sense strand
gagugacuauuacaacaaa

SEQ ID NO: 1501130 - RNA, 19 nt, Homo sapiens
  misc_RNA (1)...(19): siRNA sense strand
ugaguugccugacuacuau

SEQ ID NO: 1501131 - RNA, 19 nt, Homo sapiens
  misc_RNA (1)...(19): siRNA sense strand
ggaaauguccaauggugaa

SEQ ID NO: 1501132 - RNA, 19 nt, Homo sapiens
  misc_RNA (1)...(19): siRNA sense strand
gaagaugucccuguggaaa

SEQ ID NO: 1501133 - RNA, 19 nt, Homo sapiens
  misc_RNA (1)...(19): siRNA sense strand
auaaugauguggagaaaga

SEQ ID NO: 1501134 - RNA, 19 nt, Homo sapiens
  misc_RNA (1)...(19): siRNA sense strand
gcaaaguccuauuauaagc

SEQ ID NO: 1501135 - RNA, 19 nt, Homo sapiens
  misc_RNA (1)...(19): siRNA sense strand
ccaagaaagcagaauauga

SEQ ID NO: 1501136 - RNA, 19 nt, Homo sapiens
  misc_RNA (1)...(19): siRNA sense strand
agugguagaugaugaaauu

SEQ ID NO: 1501137 - RNA, 19 nt, Homo sapiens
  misc_RNA (1)...(19): siRNA sense strand
ggagaaagagagaaaggaa

SEQ ID NO: 1501138 - RNA, 19 nt, Homo sapiens
  misc_RNA (1)...(19): siRNA sense strand
gcauaaugauguggagaaa

SEQ ID NO: 1501139 - RNA, 19 nt, Homo sapiens
  misc_RNA (1)...(19): siRNA sense strand
cuacagcgauucuuuagca

SEQ ID NO: 1501140 - RNA, 19 nt, Homo sapiens
  misc_RNA (1)...(19): siRNA sense strand
gaggagacuuuccaaucuu

SEQ ID NO: 1501141 - RNA, 19 nt, Homo sapiens
  misc_RNA (1)...(19): siRNA sense strand
gcacauauccuggagaagu

SEQ ID NO: 1501142 - RNA, 19 nt, Homo sapiens
  misc_RNA (1)...(19): siRNA sense strand
aagcaucacuuccuuuaug

SEQ ID NO: 1501143 - RNA, 19 nt, Homo sapiens
  misc_RNA (1)...(19): siRNA sense strand
caauggcacuucaauaugg

SEQ ID NO: 1501144 - RNA, 19 nt, Homo sapiens
  misc_RNA (1)...(19): siRNA sense strand
ggaggucguuuaucagcaa

SEQ ID NO: 1501145 - RNA, 19 nt, Homo sapiens
  misc_RNA (1)...(19): siRNA sense strand
ggucauguuugucaaggaa

SEQ ID NO: 1501146 - RNA, 19 nt, Homo sapiens
  misc_RNA (1)...(19): siRNA sense strand
gaugagggcugugauuaag

SEQ ID NO: 1501147 - RNA, 19 nt, Homo sapiens
  misc_RNA (1)...(19): siRNA sense strand
cgaagaugaugaugaagau

SEQ ID NO: 1501148 - RNA, 19 nt, Homo sapiens
  misc_RNA (1)...(19): siRNA sense strand
gaagaauacagacaacuca

SEQ ID NO: 1501149 - RNA, 19 nt, Homo sapiens
  misc_RNA (1)...(19): siRNA sense strand
guacaaggaggucguuuau

SEQ ID NO: 1501150 - RNA, 19 nt, Homo sapiens
  misc_RNA (1)...(19): siRNA sense strand
uaagucaagucuucgaaug

SEQ ID NO: 1501151 - RNA, 19 nt, Homo sapiens
  misc_RNA (1)...(19): siRNA sense strand
acaaugcaaaguccuauua

SEQ ID NO: 1501152 - RNA, 19 nt, Homo sapiens
  misc_RNA (1)...(19): siRNA sense strand
caaaggcagugcaaagaag

SEQ ID NO: 1501153 - RNA, 19 nt, Homo sapiens
  misc_RNA (1)...(19): siRNA sense strand
cuaaagugguagaugauga

SEQ ID NO: 1501154 - RNA, 19 nt, Homo sapiens
  misc_RNA (1)...(19): siRNA sense strand
gaagagggaaugauagaag

SEQ ID NO: 1501155 - RNA, 19 nt, Homo sapiens
  misc_RNA (1)...(19): siRNA sense strand
gagaugaugauauugaaga

SEQ ID NO: 1501156 - RNA, 19 nt, Homo sapiens
  misc_RNA (1)...(19): siRNA sense strand
guuagaagguggagaugau

SEQ ID NO: 1501157 - RNA, 19 nt, Homo sapiens
  misc_RNA (1)...(19): siRNA sense strand
guaccaagauauugacucu

SEQ ID NO: 1501158 - RNA, 19 nt, Homo sapiens
  misc_RNA (1)...(19): siRNA sense strand
ucugugagcucuucauuag

SEQ ID NO: 1501159 - RNA, 19 nt, Homo sapiens
  misc_RNA (1)...(19): siRNA sense strand
gcgacaagcagaugaagaa

SEQ ID NO: 1501160 - RNA, 19 nt, Homo sapiens
  misc_RNA (1)...(19): siRNA sense strand
caaaagaaauagaggaaga

SEQ ID NO: 1501161 - RNA, 19 nt, Homo sapiens
  misc_RNA (1)...(19): siRNA sense strand
gcaccaaagcgaagaaauc

SEQ ID NO: 1501162 - RNA, 19 nt, Homo sapiens
  misc_RNA (1)...(19): siRNA sense strand
ggaaggcuccaaacggaaa

SEQ ID NO: 1501163 - RNA, 19 nt, Homo sapiens
  misc_RNA (1)...(19): siRNA sense strand
ugaguaaucuggaagaaac

SEQ ID NO: 1501164 - RNA, 19 nt, Homo sapiens
  misc_RNA (1)...(19): siRNA sense strand
agccaggacuguagcuuua

SEQ ID NO: 1501165 - RNA, 19 nt, Homo sapiens
  misc_RNA (1)...(19): siRNA sense strand
caaaauacaugacuccaau

SEQ ID NO: 1501166 - RNA, 19 nt, Homo sapiens
  misc_RNA (1)...(19): siRNA sense strand
cauccgcaaugacaaauau

SEQ ID NO: 1501167 - RNA, 19 nt, Homo sapiens
  misc_RNA (1)...(19): siRNA sense strand
uaagaaagcagcgaaugaa

SEQ ID NO: 1501168 - RNA, 19 nt, Homo sapiens
  misc_RNA (1)...(19): siRNA sense strand
uaaccaagggcagcuaaua

SEQ ID NO: 1501169 - RNA, 19 nt, Homo sapiens
  misc_RNA (1)...(19): siRNA sense strand
agaagcagaugacgaagau

SEQ ID NO: 1501170 - RNA, 19 nt, Homo sapiens
  misc_RNA (1)...(19): siRNA sense strand
caaccagacuauuaugaag

SEQ ID NO: 1501171 - RNA, 19 nt, Homo sapiens
  misc_RNA (1)...(19): siRNA sense strand
guugaggacuuugucauga

SEQ ID NO: 1501172 - RNA, 19 nt, Homo sapiens
  misc_RNA (1)...(19): siRNA sense strand
caacugaaauaccagaaaa

SEQ ID NO: 1501173 - RNA, 19 nt, Homo sapiens
  misc_RNA (1)...(19): siRNA sense strand
cggaaagugugcuguguug

SEQ ID NO: 1501174 - RNA, 19 nt, Homo sapiens
  misc_RNA (1)...(19): siRNA sense strand
uaaaggugaugaugagaag

SEQ ID NO: 1501175 - RNA, 19 nt, Homo sapiens
  misc_RNA (1)...(19): siRNA sense strand
ggagggagaugaggacucu

SEQ ID NO: 1501176 - RNA, 19 nt, Homo sapiens
  misc_RNA (1)...(19): siRNA sense strand
gaaaucaaccagacuauua

SEQ ID NO: 1501177 - RNA, 19 nt, Homo sapiens
  misc_RNA (1)...(19): siRNA sense strand
gaaaugaguuuguucagaa

SEQ ID NO: 1501178 - RNA, 19 nt, Homo sapiens
  misc_RNA (1)...(19): siRNA sense strand
gaacaaaacugaagaauca

SEQ ID NO: 1501179 - RNA, 19 nt, Homo sapiens
  misc_RNA (1)...(19): siRNA sense strand
ugaagaagaugcugcuuua

SEQ ID NO: 1501180 - RNA, 19 nt, Homo sapiens
  misc_RNA (1)...(19): siRNA sense strand
gaaacugccuucuaaagug

SEQ ID NO: 1501181 - RNA, 19 nt, Homo sapiens
  misc_RNA (1)...(19): siRNA sense strand
ggacuauccugauuauuau

SEQ ID NO: 1501182 - RNA, 19 nt, Homo sapiens
  misc_RNA (1)...(19): siRNA sense strand
ugacauggcuucucccaaa

SEQ ID NO: 1501183 - RNA, 19 nt, Homo sapiens
  misc_RNA (1)...(19): siRNA sense strand
gaaacuaaaugaggucuau

SEQ ID NO: 1501184 - RNA, 19 nt, Homo sapiens
  misc_RNA (1)...(19): siRNA sense strand
caacaaaguuccaguuagu

SEQ ID NO: 1501185 - RNA, 19 nt, Homo sapiens
  misc_RNA (1)...(19): siRNA sense strand
gagcauauguuugaaguau

SEQ ID NO: 1501186 - RNA, 19 nt, Homo sapiens
  misc_RNA (1)...(19): siRNA sense strand
ggaagaguaugaugauguu

SEQ ID NO: 1501187 - RNA, 19 nt, Homo sapiens
  misc_RNA (1)...(19): siRNA sense strand
ggacagauucagaaauaua

SEQ ID NO: 1501188 - RNA, 19 nt, Homo sapiens
  misc_RNA (1)...(19): siRNA sense strand
ggagugugaucugaauuua

SEQ ID NO: 1501189 - RNA, 19 nt, Homo sapiens
  misc_RNA (1)...(19): siRNA sense strand
caagaaagcagaauaugaa

SEQ ID NO: 1501190 - RNA, 19 nt, Homo sapiens
  misc_RNA (1)...(19): siRNA sense strand
gaagaaaccugccccauga

SEQ ID NO: 1501191 - RNA, 19 nt, Homo sapiens
  misc_RNA (1)...(19): siRNA sense strand
gcacucagcuauaccacaa

SEQ ID NO: 1501192 - RNA, 19 nt, Homo sapiens
  misc_RNA (1)...(19): siRNA sense strand
gaucugaguugccugacua

SEQ ID NO: 1501193 - RNA, 19 nt, Homo sapiens
  misc_RNA (1)...(19): siRNA sense strand
ugacgaagaugaugaugaa

SEQ ID NO: 1501194 - RNA, 19 nt, Homo sapiens
  misc_RNA (1)...(19): siRNA sense strand
ccacauaucgucuguauug

SEQ ID NO: 1501195 - RNA, 19 nt, Homo sapiens
  misc_RNA (1)...(19): siRNA sense strand
gcauauguuugaaguauug

SEQ ID NO: 1501196 - RNA, 19 nt, Homo sapiens
  misc_RNA (1)...(19): siRNA sense strand
acaagcagaugaagaaauu

SEQ ID NO: 1501197 - RNA, 19 nt, Homo sapiens
  misc_RNA (1)...(19): siRNA sense strand
gaagaaaucaaccagacua

SEQ ID NO: 1501198 - RNA, 19 nt, Homo sapiens
  misc_RNA (1)...(19): siRNA sense strand
gagcuuauccacaaucuuu

SEQ ID NO: 1501199 - RNA, 19 nt, Homo sapiens
  misc_RNA (1)...(19): siRNA sense strand
gcuauaaugugcccaauuc

SEQ ID NO: 1501200 - RNA, 19 nt, Homo sapiens
  misc_RNA (1)...(19): siRNA sense strand
guuaggaguugucggaaua

SEQ ID NO: 1501201 - RNA, 19 nt, Homo sapiens
  misc_RNA (1)...(19): siRNA sense strand
acaaggaggucguuuauca

SEQ ID NO: 1501202 - RNA, 19 nt, Homo sapiens
  misc_RNA (1)...(19): siRNA sense strand
gcaaguguguggucauguu

SEQ ID NO: 1501203 - RNA, 19 nt, Homo sapiens
  misc_RNA (1)...(19): siRNA sense strand
gcucccagguuuauaauga

SEQ ID NO: 1501204 - RNA, 19 nt, Homo sapiens
  misc_RNA (1)...(19): siRNA sense strand
ucggacagauucagaaaua

SEQ ID NO: 1501205 - RNA, 19 nt, Homo sapiens
  misc_RNA (1)...(19): siRNA sense strand
ggaagaugcuacagcgauu

SEQ ID NO: 1501206 - RNA, 19 nt, Homo sapiens
  misc_RNA (1)...(19): siRNA sense strand
ggaggagacuuuccaaucu

SEQ ID NO: 1501207 - RNA, 19 nt, Homo sapiens
  misc_RNA (1)...(19): siRNA sense strand
ugacaaauaugcuggugaa

SEQ ID NO: 1501208 - RNA, 19 nt, Homo sapiens
  misc_RNA (1)...(19): siRNA sense strand
gaagaaauucaaaggauug

SEQ ID NO: 1501209 - RNA, 19 nt, Homo sapiens
  misc_RNA (1)...(19): siRNA sense strand
caacaaguaccaagauauu

SEQ ID NO: 1501210 - RNA, 19 nt, Homo sapiens
  misc_RNA (1)...(19): siRNA sense strand
gccaugaacucuauaauac

SEQ ID NO: 1501211 - RNA, 19 nt, Homo sapiens
  misc_RNA (1)...(19): siRNA sense strand
ccaauggacuugaaaauaa

SEQ ID NO: 1501212 - RNA, 19 nt, Homo sapiens
  misc_RNA (1)...(19): siRNA sense strand
caaauaugcuggugaagag

SEQ ID NO: 1501213 - RNA, 19 nt, Homo sapiens
  misc_RNA (1)...(19): siRNA sense strand
caacaugaguggcuacauc

SEQ ID NO: 1501214 - RNA, 19 nt, Homo sapiens
  misc_RNA (1)...(19): siRNA sense strand
gaaagacugugggaggauu

SEQ ID NO: 1501215 - RNA, 19 nt, Homo sapiens
  misc_RNA (1)...(19): siRNA sense strand
gaacagggcagacuucucu

SEQ ID NO: 1501216 - RNA, 19 nt, Homo sapiens
  misc_RNA (1)...(19): siRNA sense strand
ugacauguauucucggaaa

SEQ ID NO: 1501217 - RNA, 19 nt, Homo sapiens
  misc_RNA (1)...(19): siRNA sense strand
gagauggagcugcauauuu

SEQ ID NO: 1501218 - RNA, 19 nt, Homo sapiens
  misc_RNA (1)...(19): siRNA sense strand
ugacuuugcugauucaaga

SEQ ID NO: 1501219 - RNA, 19 nt, Homo sapiens
  misc_RNA (1)...(19): siRNA sense strand
ggucguuuaucagcaauua

SEQ ID NO: 1501220 - RNA, 19 nt, Homo sapiens
  misc_RNA (1)...(19): siRNA sense strand
gagaugagggcugugauua

SEQ ID NO: 1501221 - RNA, 19 nt, Homo sapiens
  misc_RNA (1)...(19): siRNA sense strand
cauaucgucuguauugaaa

SEQ ID NO: 1501222 - RNA, 19 nt, Homo sapiens
  misc_RNA (1)...(19): siRNA sense strand
gaucccaacuuuccuaaca

SEQ ID NO: 1501223 - RNA, 19 nt, Homo sapiens
  misc_RNA (1)...(19): siRNA sense strand
caauauggcucagaaagug

SEQ ID NO: 1501224 - RNA, 19 nt, Homo sapiens
  misc_RNA (1)...(19): siRNA sense strand
cagaagacuuugugaccua

SEQ ID NO: 1501225 - RNA, 19 nt, Homo sapiens
  misc_RNA (1)...(19): siRNA sense strand
gagcauaacauccgcaaug

SEQ ID NO: 1501226 - RNA, 19 nt, Homo sapiens
  misc_RNA (1)...(19): siRNA sense strand
gccaacaaguaccaagaua

SEQ ID NO: 1501227 - RNA, 19 nt, Homo sapiens
  misc_RNA (1)...(19): siRNA sense strand
gaacgagcaagaaggauga

SEQ ID NO: 1501228 - RNA, 19 nt, Homo sapiens
  misc_RNA (1)...(19): siRNA sense strand
gagagccgcuacaaugaga

SEQ ID NO: 1501229 - RNA, 19 nt, Homo sapiens
  misc_RNA (1)...(19): siRNA sense strand
gagugacuauuacaacaaa

SEQ ID NO: 1501230 - RNA, 19 nt, Homo sapiens
  misc_RNA (1)...(19): siRNA sense strand
ugaguugccugacuacuau

SEQ ID NO: 1501231 - RNA, 19 nt, Homo sapiens
  misc_RNA (1)...(19): siRNA sense strand
ggaaauguccaauggugaa

SEQ ID NO: 1501232 - RNA, 19 nt, Homo sapiens
  misc_RNA (1)...(19): siRNA sense strand
gaagaugucccuguggaaa

SEQ ID NO: 1501233 - RNA, 19 nt, Homo sapiens
  misc_RNA (1)...(19): siRNA sense strand
auaaugauguggagaaaga

SEQ ID NO: 1501234 - RNA, 19 nt, Homo sapiens
  misc_RNA (1)...(19): siRNA sense strand
gcaaaguccuauuauaagc

SEQ ID NO: 1501235 - RNA, 19 nt, Homo sapiens
  misc_RNA (1)...(19): siRNA sense strand
ccaagaaagcagaauauga

SEQ ID NO: 1501236 - RNA, 19 nt, Homo sapiens
  misc_RNA (1)...(19): siRNA sense strand
agugguagaugaugaaauu

SEQ ID NO: 1501237 - RNA, 19 nt, Homo sapiens
  misc_RNA (1)...(19): siRNA sense strand
ggagaaagagagaaaggaa

SEQ ID NO: 1501238 - RNA, 19 nt, Homo sapiens
  misc_RNA (1)...(19): siRNA sense strand
gcauaaugauguggagaaa

SEQ ID NO: 1501239 - RNA, 19 nt, Homo sapiens
  misc_RNA (1)...(19): siRNA sense strand
cuacagcgauucuuuagca

SEQ ID NO: 1501240 - RNA, 19 nt, Homo sapiens
  misc_RNA (1)...(19): siRNA sense strand
gaggagacuuuccaaucuu

SEQ ID NO: 1501241 - RNA, 19 nt, Homo sapiens
  misc_RNA (1)...(19): siRNA sense strand
gcacauauccuggagaagu

SEQ ID NO: 1501242 - RNA, 19 nt, Homo sapiens
  misc_RNA (1)...(19): siRNA sense strand
aagcaucacuuccuuuaug

SEQ ID NO: 1501243 - RNA, 19 nt, Homo sapiens
  misc_RNA (1)...(19): siRNA sense strand
caauggcacuucaauaugg

SEQ ID NO: 1501244 - RNA, 19 nt, Homo sapiens
  misc_RNA (1)...(19): siRNA sense strand
ggaggucguuuaucagcaa

SEQ ID NO: 1501245 - RNA, 19 nt, Homo sapiens
  misc_RNA (1)...(19): siRNA sense strand
ggucauguuugucaaggaa

SEQ ID NO: 1501246 - RNA, 19 nt, Homo sapiens
  misc_RNA (1)...(19): siRNA sense strand
gaugagggcugugauuaag

SEQ ID NO: 1501247 - RNA, 19 nt, Homo sapiens
  misc_RNA (1)...(19): siRNA sense strand
cgaagaugaugaugaagau

SEQ ID NO: 1501248 - RNA, 19 nt, Homo sapiens
  misc_RNA (1)...(19): siRNA sense strand
gaagaauacagacaacuca

SEQ ID NO: 1501249 - RNA, 19 nt, Homo sapiens
  misc_RNA (1)...(19): siRNA sense strand
guacaaggaggucguuuau

SEQ ID NO: 1501250 - RNA, 19 nt, Homo sapiens
  misc_RNA (1)...(19): siRNA sense strand
uaagucaagucuucgaaug

SEQ ID NO: 1501251 - RNA, 19 nt, Homo sapiens
  misc_RNA (1)...(19): siRNA sense strand
acaaugcaaaguccuauua

SEQ ID NO: 1501252 - RNA, 19 nt, Homo sapiens
  misc_RNA (1)...(19): siRNA sense strand
caaaggcagugcaaagaag

SEQ ID NO: 1501253 - RNA, 19 nt, Homo sapiens
  misc_RNA (1)...(19): siRNA sense strand
cuaaagugguagaugauga

SEQ ID NO: 1501254 - RNA, 19 nt, Homo sapiens
  misc_RNA (1)...(19): siRNA sense strand
gaagagggaaugauagaag

SEQ ID NO: 1501255 - RNA, 19 nt, Homo sapiens
  misc_RNA (1)...(19): siRNA sense strand
gagaugaugauauugaaga

SEQ ID NO: 1501256 - RNA, 19 nt, Homo sapiens
  misc_RNA (1)...(19): siRNA sense strand
guuagaagguggagaugau

SEQ ID NO: 1501257 - RNA, 19 nt, Homo sapiens
  misc_RNA (1)...(19): siRNA sense strand
guaccaagauauugacucu

SEQ ID NO: 1501258 - RNA, 19 nt, Homo sapiens
  misc_RNA (1)...(19): siRNA sense strand
ucugugagcucuucauuag

SEQ ID NO: 1501259 - RNA, 19 nt, Homo sapiens
  misc_RNA (1)...(19): siRNA sense strand
gcgacaagcagaugaagaa

SEQ ID NO: 1501260 - RNA, 19 nt, Homo sapiens
  misc_RNA (1)...(19): siRNA sense strand
caaaagaaauagaggaaga

SEQ ID NO: 1501261 - RNA, 19 nt, Homo sapiens
  misc_RNA (1)...(19): siRNA sense strand
gcaccaaagcgaagaaauc

SEQ ID NO: 1501262 - RNA, 19 nt, Homo sapiens
  misc_RNA (1)...(19): siRNA sense strand
ggaaggcuccaaacggaaa

SEQ ID NO: 1501263 - RNA, 19 nt, Homo sapiens
  misc_RNA (1)...(19): siRNA sense strand
ugaguaaucuggaagaaac

SEQ ID NO: 1501264 - RNA, 19 nt, Homo sapiens
  misc_RNA (1)...(19): siRNA sense strand
agccaggacuguagcuuua

SEQ ID NO: 1501265 - RNA, 19 nt, Homo sapiens
  misc_RNA (1)...(19): siRNA sense strand
caaaauacaugacuccaau

SEQ ID NO: 1501266 - RNA, 19 nt, Homo sapiens
  misc_RNA (1)...(19): siRNA sense strand
cauccgcaaugacaaauau

SEQ ID NO: 1501267 - RNA, 19 nt, Homo sapiens
  misc_RNA (1)...(19): siRNA sense strand
uaagaaagcagcgaaugaa

SEQ ID NO: 1501268 - RNA, 19 nt, Homo sapiens
  misc_RNA (1)...(19): siRNA sense strand
uaaccaagggcagcuaaua

SEQ ID NO: 1501269 - RNA, 19 nt, Homo sapiens
  misc_RNA (1)...(19): siRNA sense strand
agaagcagaugacgaagau

SEQ ID NO: 1501270 - RNA, 19 nt, Homo sapiens
  misc_RNA (1)...(19): siRNA sense strand
caaccagacuauuaugaag

SEQ ID NO: 1501271 - RNA, 19 nt, Homo sapiens
  misc_RNA (1)...(19): siRNA sense strand
guugaggacuuugucauga

SEQ ID NO: 1501272 - RNA, 19 nt, Homo sapiens
  misc_RNA (1)...(19): siRNA sense strand
caacugaaauaccagaaaa

SEQ ID NO: 1501273 - RNA, 19 nt, Homo sapiens
  misc_RNA (1)...(19): siRNA sense strand
cggaaagugugcuguguug

SEQ ID NO: 1501274 - RNA, 19 nt, Homo sapiens
  misc_RNA (1)...(19): siRNA sense strand
uaaaggugaugaugagaag

SEQ ID NO: 1501275 - RNA, 19 nt, Homo sapiens
  misc_RNA (1)...(19): siRNA sense strand
ggagggagaugaggacucu

SEQ ID NO: 1501276 - RNA, 19 nt, Homo sapiens
  misc_RNA (1)...(19): siRNA sense strand
caauggaaauucagaagua

SEQ ID NO: 1501277 - RNA, 19 nt, Homo sapiens
  misc_RNA (1)...(19): siRNA sense strand
gaagaugaauguguguuaa

SEQ ID NO: 1501278 - RNA, 19 nt, Homo sapiens
  misc_RNA (1)...(19): siRNA sense strand
gaacagaacacuggaauau

SEQ ID NO: 1501279 - RNA, 19 nt, Homo sapiens
  misc_RNA (1)...(19): siRNA sense strand
gaaaggaucucaucgucau

SEQ ID NO: 1501280 - RNA, 19 nt, Homo sapiens
  misc_RNA (1)...(19): siRNA sense strand
uggaagaacugcccucaua

SEQ ID NO: 1501281 - RNA, 19 nt, Homo sapiens
  misc_RNA (1)...(19): siRNA sense strand
ggaagaaauugccgugcua

SEQ ID NO: 1501282 - RNA, 19 nt, Homo sapiens
  misc_RNA (1)...(19): siRNA sense strand
aagaugagauucugacuaa

SEQ ID NO: 1501283 - RNA, 19 nt, Homo sapiens
  misc_RNA (1)...(19): siRNA sense strand
gaugagauucugacuaaua

SEQ ID NO: 1501284 - RNA, 19 nt, Homo sapiens
  misc_RNA (1)...(19): siRNA sense strand
caauggugaugauggauua

SEQ ID NO: 1501285 - RNA, 19 nt, Homo sapiens
  misc_RNA (1)...(19): siRNA sense strand
agaaguggcugaacagaaa

SEQ ID NO: 1501286 - RNA, 19 nt, Homo sapiens
  misc_RNA (1)...(19): siRNA sense strand
gagaagaucuggacaagcu

SEQ ID NO: 1501287 - RNA, 19 nt, Homo sapiens
  misc_RNA (1)...(19): siRNA sense strand
ggaagaugaauguguguua

SEQ ID NO: 1501288 - RNA, 19 nt, Homo sapiens
  misc_RNA (1)...(19): siRNA sense strand
gaaauauuccagaugagua

SEQ ID NO: 1501289 - RNA, 19 nt, Homo sapiens
  misc_RNA (1)...(19): siRNA sense strand
gcaauugaaugaagaagca

SEQ ID NO: 1501290 - RNA, 19 nt, Homo sapiens
  misc_RNA (1)...(19): siRNA sense strand
uaaagaagcauggaaguaa

SEQ ID NO: 1501291 - RNA, 19 nt, Homo sapiens
  misc_RNA (1)...(19): siRNA sense strand
gaaauaccgcucuacacua

SEQ ID NO: 1501292 - RNA, 19 nt, Homo sapiens
  misc_RNA (1)...(19): siRNA sense strand
ggaacuagaugaaacaaaa

SEQ ID NO: 1501293 - RNA, 19 nt, Homo sapiens
  misc_RNA (1)...(19): siRNA sense strand
gaggacugcucuacauuug

SEQ ID NO: 1501294 - RNA, 19 nt, Homo sapiens
  misc_RNA (1)...(19): siRNA sense strand
gaagaagcauuaacgaaaa

SEQ ID NO: 1501295 - RNA, 19 nt, Homo sapiens
  misc_RNA (1)...(19): siRNA sense strand
acagaacacuggaauauca

SEQ ID NO: 1501296 - RNA, 19 nt, Homo sapiens
  misc_RNA (1)...(19): siRNA sense strand
aaacagcaauccagaacaa

SEQ ID NO: 1501297 - RNA, 19 nt, Homo sapiens
  misc_RNA (1)...(19): siRNA sense strand
gaacauggcgcugaucgaa

SEQ ID NO: 1501298 - RNA, 19 nt, Homo sapiens
  misc_RNA (1)...(19): siRNA sense strand
gugaauuacuuucugacua

SEQ ID NO: 1501299 - RNA, 19 nt, Homo sapiens
  misc_RNA (1)...(19): siRNA sense strand
ucacaaaggcuuaaaguca

SEQ ID NO: 1501300 - RNA, 19 nt, Homo sapiens
  misc_RNA (1)...(19): siRNA sense strand
gaacaagagggacaaggaa

SEQ ID NO: 1501301 - RNA, 19 nt, Homo sapiens
  misc_RNA (1)...(19): siRNA sense strand
ugaagaagcauuaacgaaa

SEQ ID NO: 1501302 - RNA, 19 nt, Homo sapiens
  misc_RNA (1)...(19): siRNA sense strand
gaaauaaagaagcauggaa

SEQ ID NO: 1501303 - RNA, 19 nt, Homo sapiens
  misc_RNA (1)...(19): siRNA sense strand
ccagaugaguauggaaaua

SEQ ID NO: 1501304 - RNA, 19 nt, Homo sapiens
  misc_RNA (1)...(19): siRNA sense strand
aaauaccgcucuacacuau

SEQ ID NO: 1501305 - RNA, 19 nt, Homo sapiens
  misc_RNA (1)...(19): siRNA sense strand
gcaaguauagucaaucuuc

SEQ ID NO: 1501306 - RNA, 19 nt, Homo sapiens
  misc_RNA (1)...(19): siRNA sense strand
gaagagucacaaaggcuua

SEQ ID NO: 1501307 - RNA, 19 nt, Homo sapiens
  misc_RNA (1)...(19): siRNA sense strand
gaaaaugaauucugagcuu

SEQ ID NO: 1501308 - RNA, 19 nt, Homo sapiens
  misc_RNA (1)...(19): siRNA sense strand
gaaaaugucucaagaacca

SEQ ID NO: 1501309 - RNA, 19 nt, Homo sapiens
  misc_RNA (1)...(19): siRNA sense strand
gaaaauagccagccagaga

SEQ ID NO: 1501310 - RNA, 19 nt, Homo sapiens
  misc_RNA (1)...(19): siRNA sense strand
ggacugugauagagagguu

SEQ ID NO: 1501311 - RNA, 19 nt, Homo sapiens
  misc_RNA (1)...(19): siRNA sense strand
auagagagguugaagaaga

SEQ ID NO: 1501312 - RNA, 19 nt, Homo sapiens
  misc_RNA (1)...(19): siRNA sense strand
uaagggcuaugcaauugaa

SEQ ID NO: 1501313 - RNA, 19 nt, Homo sapiens
  misc_RNA (1)...(19): siRNA sense strand
ggaaauaccgcucuacacu

SEQ ID NO: 1501314 - RNA, 19 nt, Homo sapiens
  misc_RNA (1)...(19): siRNA sense strand
ggaaauugaaagugugaaa

SEQ ID NO: 1501315 - RNA, 19 nt, Homo sapiens
  misc_RNA (1)...(19): siRNA sense strand
gcagaaaaccugaaaauca

SEQ ID NO: 1501316 - RNA, 19 nt, Homo sapiens
  misc_RNA (1)...(19): siRNA sense strand
gauaaaggccauacaaugc

SEQ ID NO: 1501317 - RNA, 19 nt, Homo sapiens
  misc_RNA (1)...(19): siRNA sense strand
ccacaaaggaggagcagaa

SEQ ID NO: 1501318 - RNA, 19 nt, Homo sapiens
  misc_RNA (1)...(19): siRNA sense strand
ggagcaagaugggcaagug

SEQ ID NO: 1501319 - RNA, 19 nt, Homo sapiens
  misc_RNA (1)...(19): siRNA sense strand
uagagagguugaagaagaa

SEQ ID NO: 1501320 - RNA, 19 nt, Homo sapiens
  misc_RNA (1)...(19): siRNA sense strand
gagaguaugcuguuucuag

SEQ ID NO: 1501321 - RNA, 19 nt, Homo sapiens
  misc_RNA (1)...(19): siRNA sense strand
ggagcaagaugggcaagug

SEQ ID NO: 1501322 - RNA, 19 nt, Homo sapiens
  misc_RNA (1)...(19): siRNA sense strand
ggagcaagaugggcaagug

SEQ ID NO: 1501323 - RNA, 19 nt, Homo sapiens
  misc_RNA (1)...(19): siRNA sense strand
cacgacgacuccuuuauga

SEQ ID NO: 1501324 - RNA, 19 nt, Homo sapiens
  misc_RNA (1)...(19): siRNA sense strand
ucuaagggcuaugcaauug

SEQ ID NO: 1501325 - RNA, 19 nt, Homo sapiens
  misc_RNA (1)...(19): siRNA sense strand
acacugagaaugaagagua

SEQ ID NO: 1501326 - RNA, 19 nt, Homo sapiens
  misc_RNA (1)...(19): siRNA sense strand
gaagaaauugccgugcuaa

SEQ ID NO: 1501327 - RNA, 19 nt, Homo sapiens
  misc_RNA (1)...(19): siRNA sense strand
gcucuuauauggugcugau

SEQ ID NO: 1501328 - RNA, 19 nt, Homo sapiens
  misc_RNA (1)...(19): siRNA sense strand
gcuaugcaauugaaugaag

SEQ ID NO: 1501329 - RNA, 19 nt, Homo sapiens
  misc_RNA (1)...(19): siRNA sense strand
gaaugaagaguaucacagu

SEQ ID NO: 1501330 - RNA, 19 nt, Homo sapiens
  misc_RNA (1)...(19): siRNA sense strand
aaagaagcauggaaguaau

SEQ ID NO: 1501331 - RNA, 19 nt, Homo sapiens
  misc_RNA (1)...(19): siRNA sense strand
acuaugcuaucuacaauga

SEQ ID NO: 1501332 - RNA, 19 nt, Homo sapiens
  misc_RNA (1)...(19): siRNA sense strand
cagacgaugucaacuuaau

SEQ ID NO: 1501333 - RNA, 19 nt, Homo sapiens
  misc_RNA (1)...(19): siRNA sense strand
caauccagaacaagacuua

SEQ ID NO: 1501334 - RNA, 19 nt, Homo sapiens
  misc_RNA (1)...(19): siRNA sense strand
acacugacaugaacaagag

SEQ ID NO: 1501335 - RNA, 19 nt, Homo sapiens
  misc_RNA (1)...(19): siRNA sense strand
gaaauugccgugcuaagac

SEQ ID NO: 1501336 - RNA, 19 nt, Homo sapiens
  misc_RNA (1)...(19): siRNA sense strand
caagaugagauucugacua

SEQ ID NO: 1501337 - RNA, 19 nt, Homo sapiens
  misc_RNA (1)...(19): siRNA sense strand
gcaauggugaugauggauu

SEQ ID NO: 1501338 - RNA, 19 nt, Homo sapiens
  misc_RNA (1)...(19): siRNA sense strand
ccugugggauuaccagaaa

SEQ ID NO: 1501339 - RNA, 19 nt, Homo sapiens
  misc_RNA (1)...(19): siRNA sense strand
acacuaugcuaucuacaau

SEQ ID NO: 1501340 - RNA, 19 nt, Homo sapiens
  misc_RNA (1)...(19): siRNA sense strand
ugauaaaggccauacaaug

SEQ ID NO: 1501341 - RNA, 19 nt, Homo sapiens
  misc_RNA (1)...(19): siRNA sense strand
gaagaacagaacacuggaa

SEQ ID NO: 1501342 - RNA, 19 nt, Homo sapiens
  misc_RNA (1)...(19): siRNA sense strand
cagaaaaccugacuaaugg

SEQ ID NO: 1501343 - RNA, 19 nt, Homo sapiens
  misc_RNA (1)...(19): siRNA sense strand
cagcaaguauagucaaucu

SEQ ID NO: 1501344 - RNA, 19 nt, Homo sapiens
  misc_RNA (1)...(19): siRNA sense strand
uggaggaaauugaaagugu

SEQ ID NO: 1501345 - RNA, 19 nt, Homo sapiens
  misc_RNA (1)...(19): siRNA sense strand
gagcuuucucuuagucaua

SEQ ID NO: 1501346 - RNA, 19 nt, Homo sapiens
  misc_RNA (1)...(19): siRNA sense strand
ugauagagagguugaagaa

SEQ ID NO: 1501347 - RNA, 19 nt, Homo sapiens
  misc_RNA (1)...(19): siRNA sense strand
ugaagaagccauuugaucu

SEQ ID NO: 1501348 - RNA, 19 nt, Homo sapiens
  misc_RNA (1)...(19): siRNA sense strand
gaagaagccauuugaucuc

SEQ ID NO: 1501349 - RNA, 19 nt, Homo sapiens
  misc_RNA (1)...(19): siRNA sense strand
gacgacuccuuuaugaaga

SEQ ID NO: 1501350 - RNA, 19 nt, Homo sapiens
  misc_RNA (1)...(19): siRNA sense strand
ggacagacggccagagagu

SEQ ID NO: 1501351 - RNA, 19 nt, Homo sapiens
  misc_RNA (1)...(19): siRNA sense strand
ggauuaauuccacaaagga

SEQ ID NO: 1501352 - RNA, 19 nt, Homo sapiens
  misc_RNA (1)...(19): siRNA sense strand
gcagauagaaguggcugaa

SEQ ID NO: 1501353 - RNA, 19 nt, Homo sapiens
  misc_RNA (1)...(19): siRNA sense strand
ccacgacgacuccuuuaug

SEQ ID NO: 1501354 - RNA, 19 nt, Homo sapiens
  misc_RNA (1)...(19): siRNA sense strand
acauggcgcugaucgaaau

SEQ ID NO: 1501355 - RNA, 19 nt, Homo sapiens
  misc_RNA (1)...(19): siRNA sense strand
gaauaucacaagaugagau

SEQ ID NO: 1501356 - RNA, 19 nt, Homo sapiens
  misc_RNA (1)...(19): siRNA sense strand
aacagcaaguggugaaauu

SEQ ID NO: 1501357 - RNA, 19 nt, Homo sapiens
  misc_RNA (1)...(19): siRNA sense strand
gaucgaaauauuccagaug

SEQ ID NO: 1501358 - RNA, 19 nt, Homo sapiens
  misc_RNA (1)...(19): siRNA sense strand
gggcuaugcaauugaauga

SEQ ID NO: 1501359 - RNA, 19 nt, Homo sapiens
  misc_RNA (1)...(19): siRNA sense strand
auucugagcuuucucuuag

SEQ ID NO: 1501360 - RNA, 19 nt, Homo sapiens
  misc_RNA (1)...(19): siRNA sense strand
acacuggaauaucacaaga

SEQ ID NO: 1501361 - RNA, 19 nt, Homo sapiens
  misc_RNA (1)...(19): siRNA sense strand
aaauaaggacugugauaga

SEQ ID NO: 1501362 - RNA, 19 nt, Homo sapiens
  misc_RNA (1)...(19): siRNA sense strand
uaaauaaggacugugauag

SEQ ID NO: 1501363 - RNA, 19 nt, Homo sapiens
  misc_RNA (1)...(19): siRNA sense strand
gaaccagaaauaaauaagg

SEQ ID NO: 1501364 - RNA, 19 nt, Homo sapiens
  misc_RNA (1)...(19): siRNA sense strand
gcaaaauguugauguaucu

SEQ ID NO: 1501365 - RNA, 19 nt, Homo sapiens
  misc_RNA (1)...(19): siRNA sense strand
gaagaacugcccucauacu

SEQ ID NO: 1501366 - RNA, 19 nt, Homo sapiens
  misc_RNA (1)...(19): siRNA sense strand
ugauagauauggaagaacu

SEQ ID NO: 1501367 - RNA, 19 nt, Homo sapiens
  misc_RNA (1)...(19): siRNA sense strand
gcacuucuggagaccauga

SEQ ID NO: 1501368 - RNA, 19 nt, Homo sapiens
  misc_RNA (1)...(19): siRNA sense strand
gaggaaauugaaaguguga

SEQ ID NO: 1501369 - RNA, 19 nt, Homo sapiens
  misc_RNA (1)...(19): siRNA sense strand
aaggacagcucugauaaag

SEQ ID NO: 1501370 - RNA, 19 nt, Homo sapiens
  misc_RNA (1)...(19): siRNA sense strand
agauagaaguggcugaaca

SEQ ID NO: 1501371 - RNA, 19 nt, Homo sapiens
  misc_RNA (1)...(19): siRNA sense strand
cgacgacuccuuuaugaag

SEQ ID NO: 1501372 - RNA, 19 nt, Homo sapiens
  misc_RNA (1)...(19): siRNA sense strand
cuugauagauauggaagaa

SEQ ID NO: 1501373 - RNA, 19 nt, Homo sapiens
  misc_RNA (1)...(19): siRNA sense strand
gcucuacacuaugcuaucu

SEQ ID NO: 1501374 - RNA, 19 nt, Homo sapiens
  misc_RNA (1)...(19): siRNA sense strand
gaccacgacgacuccuuua

SEQ ID NO: 1501375 - RNA, 19 nt, Homo sapiens
  misc_RNA (1)...(19): siRNA sense strand
ccagaaaaccugacuaaug

SEQ ID NO: 1501376 - RNA, 19 nt, Homo sapiens
  misc_RNA (1)...(19): siRNA sense strand
ccaggaaggucacaaagug

SEQ ID NO: 1501377 - RNA, 19 nt, Homo sapiens
  misc_RNA (1)...(19): siRNA sense strand
acacugaccuacagagaaa

SEQ ID NO: 1501378 - RNA, 19 nt, Homo sapiens
  misc_RNA (1)...(19): siRNA sense strand
ggaaucagaggacaaguuc

SEQ ID NO: 1501379 - RNA, 19 nt, Homo sapiens
  misc_RNA (1)...(19): siRNA sense strand
gaaaauggacuacuucugu

SEQ ID NO: 1501380 - RNA, 19 nt, Homo sapiens
  misc_RNA (1)...(19): siRNA sense strand
gcacccagcuguggucaag

SEQ ID NO: 1501381 - RNA, 19 nt, Homo sapiens
  misc_RNA (1)...(19): siRNA sense strand
ggacacugaccuacagaga

SEQ ID NO: 1501382 - RNA, 19 nt, Homo sapiens
  misc_RNA (1)...(19): siRNA sense strand
caaagugccucaguuccau

SEQ ID NO: 1501383 - RNA, 19 nt, Homo sapiens
  misc_RNA (1)...(19): siRNA sense strand
ucagcuuucuggaagauga

SEQ ID NO: 1501384 - RNA, 19 nt, Homo sapiens
  misc_RNA (1)...(19): siRNA sense strand
gccuguaccugcugaagga

SEQ ID NO: 1501385 - RNA, 19 nt, Homo sapiens
  misc_RNA (1)...(19): siRNA sense strand
ucacaaagugccucaguuc

SEQ ID NO: 1501386 - RNA, 19 nt, Homo sapiens
  misc_RNA (1)...(19): siRNA sense strand
gaaggaaucagaggacaag

SEQ ID NO: 1501387 - RNA, 19 nt, Homo sapiens
  misc_RNA (1)...(19): siRNA sense strand
gccguggccucguuucuca

SEQ ID NO: 1501388 - RNA, 19 nt, Homo sapiens
  misc_RNA (1)...(19): siRNA sense strand
gacacugaccuacagagaa

SEQ ID NO: 1501389 - RNA, 19 nt, Homo sapiens
  misc_RNA (1)...(19): siRNA sense strand
gucacaaagugccucaguu

SEQ ID NO: 1501390 - RNA, 19 nt, Homo sapiens
  misc_RNA (1)...(19): siRNA sense strand
gggacgacuguaaguauga

SEQ ID NO: 1501391 - RNA, 19 nt, Homo sapiens
  misc_RNA (1)...(19): siRNA sense strand
aaucagaggacaaguucaa

SEQ ID NO: 1501392 - RNA, 19 nt, Homo sapiens
  misc_RNA (1)...(19): siRNA sense strand
cagagaaaauggacuacuu

SEQ ID NO: 1501393 - RNA, 19 nt, Homo sapiens
  misc_RNA (1)...(19): siRNA sense strand
ggacgacuguaaguaugag

SEQ ID NO: 1501394 - RNA, 19 nt, Homo sapiens
  misc_RNA (1)...(19): siRNA sense strand
cgggacgacuguaaguaug

SEQ ID NO: 1501395 - RNA, 19 nt, Homo sapiens
  misc_RNA (1)...(19): siRNA sense strand
gacuguaaguaugagugua

SEQ ID NO: 1501396 - RNA, 19 nt, Homo sapiens
  misc_RNA (1)...(19): siRNA sense strand
guaaguaugaguguaugug

SEQ ID NO: 1501397 - RNA, 19 nt, Homo sapiens
  misc_RNA (1)...(19): siRNA sense strand
ccucauccgcuucgacuau

SEQ ID NO: 1501398 - RNA, 19 nt, Homo sapiens
  misc_RNA (1)...(19): siRNA sense strand
cagggacacugaccuacag

SEQ ID NO: 1501399 - RNA, 19 nt, Homo sapiens
  misc_RNA (1)...(19): siRNA sense strand
caaguucaagcuggacuga

SEQ ID NO: 1501400 - RNA, 19 nt, Homo sapiens
  misc_RNA (1)...(19): siRNA sense strand
caccagggacacugaccua

SEQ ID NO: 1501401 - RNA, 19 nt, Homo sapiens
  misc_RNA (1)...(19): siRNA sense strand
ggucacaaagugccucagu

SEQ ID NO: 1501402 - RNA, 19 nt, Homo sapiens
  misc_RNA (1)...(19): siRNA sense strand
guucugguccacagucuuc

SEQ ID NO: 1501403 - RNA, 19 nt, Homo sapiens
  misc_RNA (1)...(19): siRNA sense strand
gaacgacucuagacccaau

SEQ ID NO: 1501404 - RNA, 19 nt, Homo sapiens
  misc_RNA (1)...(19): siRNA sense strand
agacacagcugcccacuuc

SEQ ID NO: 1501405 - RNA, 19 nt, Homo sapiens
  misc_RNA (1)...(19): siRNA sense strand
aaacagcgcugcuauuugc

SEQ ID NO: 1501406 - RNA, 19 nt, Homo sapiens
  misc_RNA (1)...(19): siRNA sense strand
gaagccgccugccucauug

SEQ ID NO: 1501407 - RNA, 19 nt, Homo sapiens
  misc_RNA (1)...(19): siRNA sense strand
ggaagccgccugccucauu

SEQ ID NO: 1501408 - RNA, 19 nt, Homo sapiens
  misc_RNA (1)...(19): siRNA sense strand
ccgaucagauggagaaaug

SEQ ID NO: 1501409 - RNA, 19 nt, Homo sapiens
  misc_RNA (1)...(19): siRNA sense strand
gcacugcuccagcgguauu

SEQ ID NO: 1501410 - RNA, 19 nt, Homo sapiens
  misc_RNA (1)...(19): siRNA sense strand
aagaguaccuagcggaaga

SEQ ID NO: 1501411 - RNA, 19 nt, Homo sapiens
  misc_RNA (1)...(19): siRNA sense strand
ccaaugcgacuccagaaga

SEQ ID NO: 1501412 - RNA, 19 nt, Homo sapiens
  misc_RNA (1)...(19): siRNA sense strand
caaugcgacuccagaagau

SEQ ID NO: 1501413 - RNA, 19 nt, Homo sapiens
  misc_RNA (1)...(19): siRNA sense strand
ccucauugccuuacuucua

SEQ ID NO: 1501414 - RNA, 19 nt, Homo sapiens
  misc_RNA (1)...(19): siRNA sense strand
gugggugacuuuccgauca

SEQ ID NO: 1501415 - RNA, 19 nt, Homo sapiens
  misc_RNA (1)...(19): siRNA sense strand
ucagauggagaaaugauga

SEQ ID NO: 1501416 - RNA, 19 nt, Homo sapiens
  misc_RNA (1)...(19): siRNA sense strand
ggaccggaacgacucuaga

SEQ ID NO: 1501417 - RNA, 19 nt, Homo sapiens
  misc_RNA (1)...(19): siRNA sense strand
ucgacggccuagaagagua

SEQ ID NO: 1501418 - RNA, 19 nt, Homo sapiens
  misc_RNA (1)...(19): siRNA sense strand
ccaaggcccaguccucuuc

SEQ ID NO: 1501419 - RNA, 19 nt, Homo sapiens
  misc_RNA (1)...(19): siRNA sense strand
cagaguggugggugacuuu

SEQ ID NO: 1501420 - RNA, 19 nt, Homo sapiens
  misc_RNA (1)...(19): siRNA sense strand
cucauugccuuacuucuag

SEQ ID NO: 1501421 - RNA, 19 nt, Homo sapiens
  misc_RNA (1)...(19): siRNA sense strand
gcucgacggccuagaagag

SEQ ID NO: 1501422 - RNA, 19 nt, Homo sapiens
  misc_RNA (1)...(19): siRNA sense strand
gcugcucgacggccuagaa

SEQ ID NO: 1501423 - RNA, 19 nt, Homo sapiens
  misc_RNA (1)...(19): siRNA sense strand
gccagaagcucuuugugua

SEQ ID NO: 1501424 - RNA, 19 nt, Homo sapiens
  misc_RNA (1)...(19): siRNA sense strand
gaacccaucuucucuucuu

SEQ ID NO: 1501425 - RNA, 19 nt, Homo sapiens
  misc_RNA (1)...(19): siRNA sense strand
ccugagagcuucaaacaau

SEQ ID NO: 1501426 - RNA, 19 nt, Homo sapiens
  misc_RNA (1)...(19): siRNA sense strand
gaggaaugaucaauuggaa

SEQ ID NO: 1501427 - RNA, 19 nt, Homo sapiens
  misc_RNA (1)...(19): siRNA sense strand
gacaaacacacacugauga

SEQ ID NO: 1501428 - RNA, 19 nt, Homo sapiens
  misc_RNA (1)...(19): siRNA sense strand
ggaaugaucaauuggaauc

SEQ ID NO: 1501429 - RNA, 19 nt, Homo sapiens
  misc_RNA (1)...(19): siRNA sense strand
gcacaagggaggcgacaga

SEQ ID NO: 1501430 - RNA, 19 nt, Homo sapiens
  misc_RNA (1)...(19): siRNA sense strand
caucuggauuguagccaua

SEQ ID NO: 1501431 - RNA, 19 nt, Homo sapiens
  misc_RNA (1)...(19): siRNA sense strand
ggagggaaguuaggaaguc

SEQ ID NO: 1501432 - RNA, 19 nt, Homo sapiens
  misc_RNA (1)...(19): siRNA sense strand
cagaagcucuuuguguaug

SEQ ID NO: 1501433 - RNA, 19 nt, Homo sapiens
  misc_RNA (1)...(19): siRNA sense strand
caaacaaugaccucaaugu

SEQ ID NO: 1501434 - RNA, 19 nt, Homo sapiens
  misc_RNA (1)...(19): siRNA sense strand
cagaggugaugcuuuggaa

SEQ ID NO: 1501435 - RNA, 19 nt, Homo sapiens
  misc_RNA (1)...(19): siRNA sense strand
gacaaaacguaaacuauca

SEQ ID NO: 1501436 - RNA, 19 nt, Homo sapiens
  misc_RNA (1)...(19): siRNA sense strand
ggaggaaugaucaauugga

SEQ ID NO: 1501437 - RNA, 19 nt, Homo sapiens
  misc_RNA (1)...(19): siRNA sense strand
gcaccuguguuugcucugu

SEQ ID NO: 1501438 - RNA, 19 nt, Homo sapiens
  misc_RNA (1)...(19): siRNA sense strand
agggaggaaugaucaauug

SEQ ID NO: 1501439 - RNA, 19 nt, Homo sapiens
  misc_RNA (1)...(19): siRNA sense strand
acaaggcgccucugucgaa

SEQ ID NO: 1501440 - RNA, 19 nt, Homo sapiens
  misc_RNA (1)...(19): siRNA sense strand
gauguucucucaguuugca

SEQ ID NO: 1501441 - RNA, 19 nt, Homo sapiens
  misc_RNA (1)...(19): siRNA sense strand
gaugagagugcuuucaagu

SEQ ID NO: 1501442 - RNA, 19 nt, Homo sapiens
  misc_RNA (1)...(19): siRNA sense strand
uuccagaggugaugcuuug

SEQ ID NO: 1501443 - RNA, 19 nt, Homo sapiens
  misc_RNA (1)...(19): siRNA sense strand
ucacaaacaagacauugau

SEQ ID NO: 1501444 - RNA, 19 nt, Homo sapiens
  misc_RNA (1)...(19): siRNA sense strand
agacaaacacacacugaug

SEQ ID NO: 1501445 - RNA, 19 nt, Homo sapiens
  misc_RNA (1)...(19): siRNA sense strand
cagccuggcaccuguguuu

SEQ ID NO: 1501446 - RNA, 19 nt, Homo sapiens
  misc_RNA (1)...(19): siRNA sense strand
gcugcuggauguugcuguu

SEQ ID NO: 1501447 - RNA, 19 nt, Homo sapiens
  misc_RNA (1)...(19): siRNA sense strand
caaugucgccaccaacuuc

SEQ ID NO: 1501448 - RNA, 19 nt, Homo sapiens
  misc_RNA (1)...(19): siRNA sense strand
ccaaguggcacaaauucug

SEQ ID NO: 1501449 - RNA, 19 nt, Homo sapiens
  misc_RNA (1)...(19): siRNA sense strand
ccagaagcucuuuguguau

SEQ ID NO: 1501450 - RNA, 19 nt, Homo sapiens
  misc_RNA (1)...(19): siRNA sense strand
uguguuugcucuguuugua

SEQ ID NO: 1501451 - RNA, 19 nt, Homo sapiens
  misc_RNA (1)...(19): siRNA sense strand
agaagcucuuuguguauga

SEQ ID NO: 1501452 - RNA, 19 nt, Homo sapiens
  misc_RNA (1)...(19): siRNA sense strand
gcucauggagaugggauuu

SEQ ID NO: 1501453 - RNA, 19 nt, Homo sapiens
  misc_RNA (1)...(19): siRNA sense strand
cagcagggaggaaugauca

SEQ ID NO: 1501454 - RNA, 19 nt, Homo sapiens
  misc_RNA (1)...(19): siRNA sense strand
ugagagcuucaaacaauga

SEQ ID NO: 1501455 - RNA, 19 nt, Homo sapiens
  misc_RNA (1)...(19): siRNA sense strand
gcccugagagcuucaaaca

SEQ ID NO: 1501456 - RNA, 19 nt, Homo sapiens
  misc_RNA (1)...(19): siRNA sense strand
gaguccaaguggcacaaau

SEQ ID NO: 1501457 - RNA, 19 nt, Homo sapiens
  misc_RNA (1)...(19): siRNA sense strand
aaacaaugaccucaauguc

SEQ ID NO: 1501458 - RNA, 19 nt, Homo sapiens
  misc_RNA (1)...(19): siRNA sense strand
ccagcuggauggcaaaauu

SEQ ID NO: 1501459 - RNA, 19 nt, Homo sapiens
  misc_RNA (1)...(19): siRNA sense strand
caccagcgaagccagaauu

SEQ ID NO: 1501460 - RNA, 19 nt, Homo sapiens
  misc_RNA (1)...(19): siRNA sense strand
cagggaggaaugaucaauu

SEQ ID NO: 1501461 - RNA, 19 nt, Homo sapiens
  misc_RNA (1)...(19): siRNA sense strand
caaauucuggguccguugu

SEQ ID NO: 1501462 - RNA, 19 nt, Homo sapiens
  misc_RNA (1)...(19): siRNA sense strand
caaacacacacugaugaga

SEQ ID NO: 1501463 - RNA, 19 nt, Homo sapiens
  misc_RNA (1)...(19): siRNA sense strand
guuccuacaucuggauugu

SEQ ID NO: 1501464 - RNA, 19 nt, Homo sapiens
  misc_RNA (1)...(19): siRNA sense strand
ggcagcugauguucucuca

SEQ ID NO: 1501465 - RNA, 19 nt, Homo sapiens
  misc_RNA (1)...(19): siRNA sense strand
gcagggaggaaugaucaau

SEQ ID NO: 1501466 - RNA, 19 nt, Homo sapiens
  misc_RNA (1)...(19): siRNA sense strand
ugaugagagugcuuucaag

SEQ ID NO: 1501467 - RNA, 19 nt, Homo sapiens
  misc_RNA (1)...(19): siRNA sense strand
caucacaaacaagacauug

SEQ ID NO: 1501468 - RNA, 19 nt, Homo sapiens
  misc_RNA (1)...(19): siRNA sense strand
uuacugcuccauaccaaga

SEQ ID NO: 1501469 - RNA, 19 nt, Homo sapiens
  misc_RNA (1)...(19): siRNA sense strand
uuagacaaacacacacuga

SEQ ID NO: 1501470 - RNA, 19 nt, Homo sapiens
  misc_RNA (1)...(19): siRNA sense strand
uucaaacaaugaccucaau

SEQ ID NO: 1501471 - RNA, 19 nt, Homo sapiens
  misc_RNA (1)...(19): siRNA sense strand
cacaaacaagacauugauu

SEQ ID NO: 1501472 - RNA, 19 nt, Homo sapiens
  misc_RNA (1)...(19): siRNA sense strand
ccagagacagcagagaaug

SEQ ID NO: 1501473 - RNA, 19 nt, Homo sapiens
  misc_RNA (1)...(19): siRNA sense strand
ucaaguggagggaaguuag

SEQ ID NO: 1501474 - RNA, 19 nt, Homo sapiens
  misc_RNA (1)...(19): siRNA sense strand
cugagagcuucaaacaaug

SEQ ID NO: 1501475 - RNA, 19 nt, Homo sapiens
  misc_RNA (1)...(19): siRNA sense strand
gcagcagggaggaaugauc

SEQ ID NO: 1501476 - RNA, 19 nt, Homo sapiens
  misc_RNA (1)...(19): siRNA sense strand
cagcagcagggaggaauga

SEQ ID NO: 1501477 - RNA, 19 nt, Homo sapiens
  misc_RNA (1)...(19): siRNA sense strand
uugaacccaucuucucuuc

SEQ ID NO: 1501478 - RNA, 19 nt, Homo sapiens
  misc_RNA (1)...(19): siRNA sense strand
cgacaaaacguaaacuauc

SEQ ID NO: 1501479 - RNA, 19 nt, Homo sapiens
  misc_RNA (1)...(19): siRNA sense strand
gaacagaagucaaagcaau

SEQ ID NO: 1501480 - RNA, 19 nt, Homo sapiens
  misc_RNA (1)...(19): siRNA sense strand
gaagagaacccggaaguuu

SEQ ID NO: 1501481 - RNA, 19 nt, Homo sapiens
  misc_RNA (1)...(19): siRNA sense strand
caaugcaggucuauaauga

SEQ ID NO: 1501482 - RNA, 19 nt, Homo sapiens
  misc_RNA (1)...(19): siRNA sense strand
gaaaguacuuagcauugau

SEQ ID NO: 1501483 - RNA, 19 nt, Homo sapiens
  misc_RNA (1)...(19): siRNA sense strand
caauggccauguuugguua

SEQ ID NO: 1501484 - RNA, 19 nt, Homo sapiens
  misc_RNA (1)...(19): siRNA sense strand
uacagcagauguccaguua

SEQ ID NO: 1501485 - RNA, 19 nt, Homo sapiens
  misc_RNA (1)...(19): siRNA sense strand
guacuuagcauugaucaaa

SEQ ID NO: 1501486 - RNA, 19 nt, Homo sapiens
  misc_RNA (1)...(19): siRNA sense strand
aggaagauguuagagauua

SEQ ID NO: 1501487 - RNA, 19 nt, Homo sapiens
  misc_RNA (1)...(19): siRNA sense strand
gagauuacaauuugacuga

SEQ ID NO: 1501488 - RNA, 19 nt, Homo sapiens
  misc_RNA (1)...(19): siRNA sense strand
ccaaggagaugacuuacag

SEQ ID NO: 1501489 - RNA, 19 nt, Homo sapiens
  misc_RNA (1)...(19): siRNA sense strand
ugaaaguacuuagcauuga

SEQ ID NO: 1501490 - RNA, 19 nt, Homo sapiens
  misc_RNA (1)...(19): siRNA sense strand
cagcaaugcaggucuauaa

SEQ ID NO: 1501491 - RNA, 19 nt, Homo sapiens
  misc_RNA (1)...(19): siRNA sense strand
cagcagauguccaguuaca

SEQ ID NO: 1501492 - RNA, 19 nt, Homo sapiens
  misc_RNA (1)...(19): siRNA sense strand
gcaauggccauguuugguu

SEQ ID NO: 1501493 - RNA, 19 nt, Homo sapiens
  misc_RNA (1)...(19): siRNA sense strand
gcaaugcaggucuauaaug

SEQ ID NO: 1501494 - RNA, 19 nt, Homo sapiens
  misc_RNA (1)...(19): siRNA sense strand
ggaaguacgaguauuugga

SEQ ID NO: 1501495 - RNA, 19 nt, Homo sapiens
  misc_RNA (1)...(19): siRNA sense strand
agaggaagauguuagagau

SEQ ID NO: 1501496 - RNA, 19 nt, Homo sapiens
  misc_RNA (1)...(19): siRNA sense strand
gaaguacgaguauuuggau

SEQ ID NO: 1501497 - RNA, 19 nt, Homo sapiens
  misc_RNA (1)...(19): siRNA sense strand
ugaauggcuuuauaaguuc

SEQ ID NO: 1501498 - RNA, 19 nt, Homo sapiens
  misc_RNA (1)...(19): siRNA sense strand
ccaaacaguagaaguagaa

SEQ ID NO: 1501499 - RNA, 19 nt, Homo sapiens
  misc_RNA (1)...(19): siRNA sense strand
ucaauaggaaguacgagua

SEQ ID NO: 1501500 - RNA, 19 nt, Homo sapiens
  misc_RNA (1)...(19): siRNA sense strand
ggagaagaauuuucauugu

SEQ ID NO: 1501501 - RNA, 19 nt, Homo sapiens
  misc_RNA (1)...(19): siRNA sense strand
gcaggucuauaaugaagag

SEQ ID NO: 1501502 - RNA, 19 nt, Homo sapiens
  misc_RNA (1)...(19): siRNA sense strand
caauuugacugaagaacag

SEQ ID NO: 1501503 - RNA, 19 nt, Homo sapiens
  misc_RNA (1)...(19): siRNA sense strand
uuggaugaauggcuuuaua

SEQ ID NO: 1501504 - RNA, 19 nt, Homo sapiens
  misc_RNA (1)...(19): siRNA sense strand
ggaagauguuagagauuac

SEQ ID NO: 1501505 - RNA, 19 nt, Homo sapiens
  misc_RNA (1)...(19): siRNA sense strand
ucagggaacagaagucaaa

SEQ ID NO: 1501506 - RNA, 19 nt, Homo sapiens
  misc_RNA (1)...(19): siRNA sense strand
gugaaaguacuuagcauug

SEQ ID NO: 1501507 - RNA, 19 nt, Homo sapiens
  misc_RNA (1)...(19): siRNA sense strand
gaugaauggcuuuauaagu

SEQ ID NO: 1501508 - RNA, 19 nt, Homo sapiens
  misc_RNA (1)...(19): siRNA sense strand
gaauggcuuuauaaguuca

SEQ ID NO: 1501509 - RNA, 19 nt, Homo sapiens
  misc_RNA (1)...(19): siRNA sense strand
ccaaguauccgccagucaa

SEQ ID NO: 1501510 - RNA, 19 nt, Homo sapiens
  misc_RNA (1)...(19): siRNA sense strand
gaagucaaagcaauaacau

SEQ ID NO: 1501511 - RNA, 19 nt, Homo sapiens
  misc_RNA (1)...(19): siRNA sense strand
ccuccaaacaguagaagua

SEQ ID NO: 1501512 - RNA, 19 nt, Homo sapiens
  misc_RNA (1)...(19): siRNA sense strand
gauuacaauuugacugaag

SEQ ID NO: 1501513 - RNA, 19 nt, Homo sapiens
  misc_RNA (1)...(19): siRNA sense strand
guagaaacccaaggagaug

SEQ ID NO: 1501514 - RNA, 19 nt, Homo sapiens
  misc_RNA (1)...(19): siRNA sense strand
gaggaagauguuagagauu

SEQ ID NO: 1501515 - RNA, 19 nt, Homo sapiens
  misc_RNA (1)...(19): siRNA sense strand
caauaggaaguacgaguau

SEQ ID NO: 1501516 - RNA, 19 nt, Homo sapiens
  misc_RNA (1)...(19): siRNA sense strand
gggagauacucuggaggaa

SEQ ID NO: 1501517 - RNA, 19 nt, Homo sapiens
  misc_RNA (1)...(19): siRNA sense strand
gagaagaauuuucauuguc

SEQ ID NO: 1501518 - RNA, 19 nt, Homo sapiens
  misc_RNA (1)...(19): siRNA sense strand
gggcggaaguagagugucu

SEQ ID NO: 1501519 - RNA, 19 nt, Homo sapiens
  misc_RNA (1)...(19): siRNA sense strand
guacgaguauuuggaucau

SEQ ID NO: 1501520 - RNA, 19 nt, Homo sapiens
  misc_RNA (1)...(19): siRNA sense strand
gggaacagaagucaaagca

SEQ ID NO: 1501521 - RNA, 19 nt, Homo sapiens
  misc_RNA (1)...(19): siRNA sense strand
auaggaaguacgaguauuu

SEQ ID NO: 1501522 - RNA, 19 nt, Homo sapiens
  misc_RNA (1)...(19): siRNA sense strand
uggaugaauggcuuuauaa

SEQ ID NO: 1501523 - RNA, 19 nt, Homo sapiens
  misc_RNA (1)...(19): siRNA sense strand
aacccaaggagaugacuua

SEQ ID NO: 1501524 - RNA, 19 nt, Homo sapiens
  misc_RNA (1)...(19): siRNA sense strand
uaacauauucagcaaugca

SEQ ID NO: 1501525 - RNA, 19 nt, Homo sapiens
  misc_RNA (1)...(19): siRNA sense strand
acagaagucaaagcaauaa

SEQ ID NO: 1501526 - RNA, 19 nt, Homo sapiens
  misc_RNA (1)...(19): siRNA sense strand
ggaacagaagucaaagcaa

SEQ ID NO: 1501527 - RNA, 19 nt, Homo sapiens
  misc_RNA (1)...(19): siRNA sense strand
ggaugaauggcuuuauaag

SEQ ID NO: 1501528 - RNA, 19 nt, Homo sapiens
  misc_RNA (1)...(19): siRNA sense strand
aacagaagucaaagcaaua

SEQ ID NO: 1501529 - RNA, 19 nt, Homo sapiens
  misc_RNA (1)...(19): siRNA sense strand
ggucuauaaugaagagaac

SEQ ID NO: 1501530 - RNA, 19 nt, Homo sapiens
  misc_RNA (1)...(19): siRNA sense strand
agaaguagaaacccaagga

SEQ ID NO: 1501531 - RNA, 19 nt, Homo sapiens
  misc_RNA (1)...(19): siRNA sense strand
gaagauguuagagauuaca

SEQ ID NO: 1501532 - RNA, 19 nt, Homo sapiens
  misc_RNA (1)...(19): siRNA sense strand
aaugugcaauggccauguu

SEQ ID NO: 1501533 - RNA, 19 nt, Homo sapiens
  misc_RNA (1)...(19): siRNA sense strand
gggagaagaauuuucauug

SEQ ID NO: 1501534 - RNA, 19 nt, Homo sapiens
  misc_RNA (1)...(19): siRNA sense strand
gaagaacagaaggcgauca

SEQ ID NO: 1501535 - RNA, 19 nt, Homo sapiens
  misc_RNA (1)...(19): siRNA sense strand
caaguauccgccagucaau

SEQ ID NO: 1501536 - RNA, 19 nt, Homo sapiens
  misc_RNA (1)...(19): siRNA sense strand
acaauuugacugaagaaca

SEQ ID NO: 1501537 - RNA, 19 nt, Homo sapiens
  misc_RNA (1)...(19): siRNA sense strand
ugaagagaacccggaaguu

SEQ ID NO: 1501538 - RNA, 19 nt, Homo sapiens
  misc_RNA (1)...(19): siRNA sense strand
auucagcaaugcaggucua

SEQ ID NO: 1501539 - RNA, 19 nt, Homo sapiens
  misc_RNA (1)...(19): siRNA sense strand
agaagucaaagcaauaaca

SEQ ID NO: 1501540 - RNA, 19 nt, Homo sapiens
  misc_RNA (1)...(19): siRNA sense strand
acuuagcauugaucaaaga

SEQ ID NO: 1501541 - RNA, 19 nt, Homo sapiens
  misc_RNA (1)...(19): siRNA sense strand
gucuaauccugcagucaug

SEQ ID NO: 1501542 - RNA, 19 nt, Homo sapiens
  misc_RNA (1)...(19): siRNA sense strand
aguagaaacccaaggagau

SEQ ID NO: 1501543 - RNA, 19 nt, Homo sapiens
  misc_RNA (1)...(19): siRNA sense strand
uacgaguauuuggaucaua

SEQ ID NO: 1501544 - RNA, 19 nt, Homo sapiens
  misc_RNA (1)...(19): siRNA sense strand
caccaauccuugcaaauua

SEQ ID NO: 1501545 - RNA, 19 nt, Homo sapiens
  misc_RNA (1)...(19): siRNA sense strand
ccaagauggugccuucuaa

SEQ ID NO: 1501546 - RNA, 19 nt, Homo sapiens
  misc_RNA (1)...(19): siRNA sense strand
gcaugggcgucauccuuua

SEQ ID NO: 1501547 - RNA, 19 nt, Homo sapiens
  misc_RNA (1)...(19): siRNA sense strand
gauaucagacuuuggcuuu

SEQ ID NO: 1501548 - RNA, 19 nt, Homo sapiens
  misc_RNA (1)...(19): siRNA sense strand
gcaccaauccuugcaaauu

SEQ ID NO: 1501549 - RNA, 19 nt, Homo sapiens
  misc_RNA (1)...(19): siRNA sense strand
uaagagagacucagaagga

SEQ ID NO: 1501550 - RNA, 19 nt, Homo sapiens
  misc_RNA (1)...(19): siRNA sense strand
gggagaaugugaagauauc

SEQ ID NO: 1501551 - RNA, 19 nt, Homo sapiens
  misc_RNA (1)...(19): siRNA sense strand
gugaagauaucagacuuug

SEQ ID NO: 1501552 - RNA, 19 nt, Homo sapiens
  misc_RNA (1)...(19): siRNA sense strand
cuacaacccuuuccugucu

SEQ ID NO: 1501553 - RNA, 19 nt, Homo sapiens
  misc_RNA (1)...(19): siRNA sense strand
gagcaacccacccaugaga

SEQ ID NO: 1501554 - RNA, 19 nt, Homo sapiens
  misc_RNA (1)...(19): siRNA sense strand
gagcaugggcgucauccuu

SEQ ID NO: 1501555 - RNA, 19 nt, Homo sapiens
  misc_RNA (1)...(19): siRNA sense strand
gaggucacuuucccagcua

SEQ ID NO: 1501556 - RNA, 19 nt, Homo sapiens
  misc_RNA (1)...(19): siRNA sense strand
cagcaccaauccuugcaaa

SEQ ID NO: 1501557 - RNA, 19 nt, Homo sapiens
  misc_RNA (1)...(19): siRNA sense strand
ccacuaaacagcaccaauc

SEQ ID NO: 1501558 - RNA, 19 nt, Homo sapiens
  misc_RNA (1)...(19): siRNA sense strand
cuaaacagcaccaauccuu

SEQ ID NO: 1501559 - RNA, 19 nt, Homo sapiens
  misc_RNA (1)...(19): siRNA sense strand
gugggagaaugugaagaua

SEQ ID NO: 1501560 - RNA, 19 nt, Homo sapiens
  misc_RNA (1)...(19): siRNA sense strand
uuacgaggcuugcccuaca

SEQ ID NO: 1501561 - RNA, 19 nt, Homo sapiens
  misc_RNA (1)...(19): siRNA sense strand
gacuuacuguggcagcuuu

SEQ ID NO: 1501562 - RNA, 19 nt, Homo sapiens
  misc_RNA (1)...(19): siRNA sense strand
gaaccugauccuccagaug

SEQ ID NO: 1501563 - RNA, 19 nt, Homo sapiens
  misc_RNA (1)...(19): siRNA sense strand
cgucauccuuuacacucua

SEQ ID NO: 1501564 - RNA, 19 nt, Homo sapiens
  misc_RNA (1)...(19): siRNA sense strand
ccacuaagcgugccaccau

SEQ ID NO: 1501565 - RNA, 19 nt, Homo sapiens
  misc_RNA (1)...(19): siRNA sense strand
ccucaucuuuacccucuga

SEQ ID NO: 1501566 - RNA, 19 nt, Homo sapiens
  misc_RNA (1)...(19): siRNA sense strand
gccaagauggugccuucua

SEQ ID NO: 1501567 - RNA, 19 nt, Homo sapiens
  misc_RNA (1)...(19): siRNA sense strand
ucgcccaucugcccuuuga

SEQ ID NO: 1501568 - RNA, 19 nt, Homo sapiens
  misc_RNA (1)...(19): siRNA sense strand
gcuaagagagacucagaag

SEQ ID NO: 1501569 - RNA, 19 nt, Homo sapiens
  misc_RNA (1)...(19): siRNA sense strand
gauaccauccucugucucu

SEQ ID NO: 1501570 - RNA, 19 nt, Homo sapiens
  misc_RNA (1)...(19): siRNA sense strand
gcccuuugaugacaccaau

SEQ ID NO: 1501571 - RNA, 19 nt, Homo sapiens
  misc_RNA (1)...(19): siRNA sense strand
gcaacccacccaugagauc

SEQ ID NO: 1501572 - RNA, 19 nt, Homo sapiens
  misc_RNA (1)...(19): siRNA sense strand
ucccggugguccucagaua

SEQ ID NO: 1501573 - RNA, 19 nt, Homo sapiens
  misc_RNA (1)...(19): siRNA sense strand
ccacaacaccacuaaacag

SEQ ID NO: 1501574 - RNA, 19 nt, Homo sapiens
  misc_RNA (1)...(19): siRNA sense strand
ggacaagugggagaaugug

SEQ ID NO: 1501575 - RNA, 19 nt, Homo sapiens
  misc_RNA (1)...(19): siRNA sense strand
gacaagugggagaauguga

SEQ ID NO: 1501576 - RNA, 19 nt, Homo sapiens
  misc_RNA (1)...(19): siRNA sense strand
ccaccauucuggacaucau

SEQ ID NO: 1501577 - RNA, 19 nt, Homo sapiens
  misc_RNA (1)...(19): siRNA sense strand
uggcuuuccuuccucucua

SEQ ID NO: 1501578 - RNA, 19 nt, Homo sapiens
  misc_RNA (1)...(19): siRNA sense strand
ggucgcccaucugcccuuu

SEQ ID NO: 1501579 - RNA, 19 nt, Homo sapiens
  misc_RNA (1)...(19): siRNA sense strand
ccucuguccucaucuuuac

SEQ ID NO: 1501580 - RNA, 19 nt, Homo sapiens
  misc_RNA (1)...(19): siRNA sense strand
ugaugacaccaaucucaaa

SEQ ID NO: 1501581 - RNA, 19 nt, Homo sapiens
  misc_RNA (1)...(19): siRNA sense strand
uaaaguuggagaaccuguu

SEQ ID NO: 1501582 - RNA, 19 nt, Homo sapiens
  misc_RNA (1)...(19): siRNA sense strand
aaaguuggagaaccuguug

SEQ ID NO: 1501583 - RNA, 19 nt, Homo sapiens
  misc_RNA (1)...(19): siRNA sense strand
ucagaaggaggucacuuuc

SEQ ID NO: 1501584 - RNA, 19 nt, Homo sapiens
  misc_RNA (1)...(19): siRNA sense strand
cacuaagcgugccaccauu

SEQ ID NO: 1501585 - RNA, 19 nt, Homo sapiens
  misc_RNA (1)...(19): siRNA sense strand
cugucucucucccuacuuu

SEQ ID NO: 1501586 - RNA, 19 nt, Homo sapiens
  misc_RNA (1)...(19): siRNA sense strand
agaaugugaagauaucaga

SEQ ID NO: 1501587 - RNA, 19 nt, Homo sapiens
  misc_RNA (1)...(19): siRNA sense strand
acaacccuuuccugucuga

SEQ ID NO: 1501588 - RNA, 19 nt, Homo sapiens
  misc_RNA (1)...(19): siRNA sense strand
cccuucagcucccagucua

SEQ ID NO: 1501589 - RNA, 19 nt, Homo sapiens
  misc_RNA (1)...(19): siRNA sense strand
cugagcaacccacccauga

SEQ ID NO: 1501590 - RNA, 19 nt, Homo sapiens
  misc_RNA (1)...(19): siRNA sense strand
cucagaaggaggucacuuu

SEQ ID NO: 1501591 - RNA, 19 nt, Homo sapiens
  misc_RNA (1)...(19): siRNA sense strand
acaagugggagaaugugaa

SEQ ID NO: 1501592 - RNA, 19 nt, Homo sapiens
  misc_RNA (1)...(19): siRNA sense strand
uaucagacuuuggcuuugc

SEQ ID NO: 1501593 - RNA, 19 nt, Homo sapiens
  misc_RNA (1)...(19): siRNA sense strand
caaguuccagccugagcaa

SEQ ID NO: 1501594 - RNA, 19 nt, Homo sapiens
  misc_RNA (1)...(19): siRNA sense strand
uggguuguagcccuucuua

SEQ ID NO: 1501595 - RNA, 19 nt, Homo sapiens
  misc_RNA (1)...(19): siRNA sense strand
gggaauggcugcagagguu

SEQ ID NO: 1501596 - RNA, 19 nt, Homo sapiens
  misc_RNA (1)...(19): siRNA sense strand
gcaacaagcuguggagucu

SEQ ID NO: 1501597 - RNA, 19 nt, Homo sapiens
  misc_RNA (1)...(19): siRNA sense strand
cgaacaacaucaccuacau

SEQ ID NO: 1501598 - RNA, 19 nt, Homo sapiens
  misc_RNA (1)...(19): siRNA sense strand
gaacaacaucaccuacauc

SEQ ID NO: 1501599 - RNA, 19 nt, Homo sapiens
  misc_RNA (1)...(19): siRNA sense strand
caaccucagccaccuguuu

SEQ ID NO: 1501600 - RNA, 19 nt, Homo sapiens
  misc_RNA (1)...(19): siRNA sense strand
caaagggugcuguguggaa

SEQ ID NO: 1501601 - RNA, 19 nt, Homo sapiens
  misc_RNA (1)...(19): siRNA sense strand
gaaccgcaaucagaucucu

SEQ ID NO: 1501602 - RNA, 19 nt, Homo sapiens
  misc_RNA (1)...(19): siRNA sense strand
uggaauugcugcugcuguu

SEQ ID NO: 1501603 - RNA, 19 nt, Homo sapiens
  misc_RNA (1)...(19): siRNA sense strand
ggacaaccacaucgaguac

SEQ ID NO: 1501604 - RNA, 19 nt, Homo sapiens
  misc_RNA (1)...(19): siRNA sense strand
cagacuaccagcacaaguu

SEQ ID NO: 1501605 - RNA, 19 nt, Homo sapiens
  misc_RNA (1)...(19): siRNA sense strand
ugaccacccucuuccucuu

SEQ ID NO: 1501606 - RNA, 19 nt, Homo sapiens
  misc_RNA (1)...(19): siRNA sense strand
cagcacaaguucaguuuug

SEQ ID NO: 1501607 - RNA, 19 nt, Homo sapiens
  misc_RNA (1)...(19): siRNA sense strand
gaaccuggaccgucuuuug

SEQ ID NO: 1501608 - RNA, 19 nt, Homo sapiens
  misc_RNA (1)...(19): siRNA sense strand
gaucuacucgaacaacauc

SEQ ID NO: 1501609 - RNA, 19 nt, Homo sapiens
  misc_RNA (1)...(19): siRNA sense strand
caagaggaagggcaagugu

SEQ ID NO: 1501610 - RNA, 19 nt, Homo sapiens
  misc_RNA (1)...(19): siRNA sense strand
ccaggaaccgcaaucagau

SEQ ID NO: 1501611 - RNA, 19 nt, Homo sapiens
  misc_RNA (1)...(19): siRNA sense strand
aaagggugcuguguggaau

SEQ ID NO: 1501612 - RNA, 19 nt, Homo sapiens
  misc_RNA (1)...(19): siRNA sense strand
gccgaggacuuccggaacu

SEQ ID NO: 1501613 - RNA, 19 nt, Homo sapiens
  misc_RNA (1)...(19): siRNA sense strand
ggaauugcugcugcuguug

SEQ ID NO: 1501614 - RNA, 19 nt, Homo sapiens
  misc_RNA (1)...(19): siRNA sense strand
caaguucaguuuugacauc

SEQ ID NO: 1501615 - RNA, 19 nt, Homo sapiens
  misc_RNA (1)...(19): siRNA sense strand
cccaggaaccgcaaucaga

SEQ ID NO: 1501616 - RNA, 19 nt, Homo sapiens
  misc_RNA (1)...(19): siRNA sense strand
gcgucuuccugcagaacaa

SEQ ID NO: 1501617 - RNA, 19 nt, Homo sapiens
  misc_RNA (1)...(19): siRNA sense strand
ccgcaaggaacaccacuca

SEQ ID NO: 1501618 - RNA, 19 nt, Homo sapiens
  misc_RNA (1)...(19): siRNA sense strand
gaacagugguggacaauau

SEQ ID NO: 1501619 - RNA, 19 nt, Homo sapiens
  misc_RNA (1)...(19): siRNA sense strand
ggaguaauuuguucugaua

SEQ ID NO: 1501620 - RNA, 19 nt, Homo sapiens
  misc_RNA (1)...(19): siRNA sense strand
gaaagaacauuacacaucu

SEQ ID NO: 1501621 - RNA, 19 nt, Homo sapiens
  misc_RNA (1)...(19): siRNA sense strand
ggagugaucuguucugaug

SEQ ID NO: 1501622 - RNA, 19 nt, Homo sapiens
  misc_RNA (1)...(19): siRNA sense strand
gaagagaccuggaucacau

SEQ ID NO: 1501623 - RNA, 19 nt, Homo sapiens
  misc_RNA (1)...(19): siRNA sense strand
ggaaaugagucaaauaucu

SEQ ID NO: 1501624 - RNA, 19 nt, Homo sapiens
  misc_RNA (1)...(19): siRNA sense strand
gaacaucaccacagccaua

SEQ ID NO: 1501625 - RNA, 19 nt, Homo sapiens
  misc_RNA (1)...(19): siRNA sense strand
gaugacggcuggaacagua

SEQ ID NO: 1501626 - RNA, 19 nt, Homo sapiens
  misc_RNA (1)...(19): siRNA sense strand
gaacaaugcugcagcugau

SEQ ID NO: 1501627 - RNA, 19 nt, Homo sapiens
  misc_RNA (1)...(19): siRNA sense strand
gaaugcagcuguugugugu

SEQ ID NO: 1501628 - RNA, 19 nt, Homo sapiens
  misc_RNA (1)...(19): siRNA sense strand
gaggugaaauuccaagaaa

SEQ ID NO: 1501629 - RNA, 19 nt, Homo sapiens
  misc_RNA (1)...(19): siRNA sense strand
gaacagauuuggaguugag

SEQ ID NO: 1501630 - RNA, 19 nt, Homo sapiens
  misc_RNA (1)...(19): siRNA sense strand
gaauuaaacuguggagaug

SEQ ID NO: 1501631 - RNA, 19 nt, Homo sapiens
  misc_RNA (1)...(19): siRNA sense strand
gaugauggguggaacacua

SEQ ID NO: 1501632 - RNA, 19 nt, Homo sapiens
  misc_RNA (1)...(19): siRNA sense strand
gaugauggguggaacuuga

SEQ ID NO: 1501633 - RNA, 19 nt, Homo sapiens
  misc_RNA (1)...(19): siRNA sense strand
cuggauaacugucaaauga

SEQ ID NO: 1501634 - RNA, 19 nt, Homo sapiens
  misc_RNA (1)...(19): siRNA sense strand
ggacaagaaccucagauga

SEQ ID NO: 1501635 - RNA, 19 nt, Homo sapiens
  misc_RNA (1)...(19): siRNA sense strand
gaaauacugucucugugau

SEQ ID NO: 1501636 - RNA, 19 nt, Homo sapiens
  misc_RNA (1)...(19): siRNA sense strand
aaacucaccuugcauuaug

SEQ ID NO: 1501637 - RNA, 19 nt, Homo sapiens
  misc_RNA (1)...(19): siRNA sense strand
ggagauuggaggugaaaua

SEQ ID NO: 1501638 - RNA, 19 nt, Homo sapiens
  misc_RNA (1)...(19): siRNA sense strand
aaauguaucugacccauau

SEQ ID NO: 1501639 - RNA, 19 nt, Homo sapiens
  misc_RNA (1)...(19): siRNA sense strand
acacagguuucauugcuua

SEQ ID NO: 1501640 - RNA, 19 nt, Homo sapiens
  misc_RNA (1)...(19): siRNA sense strand
ggaauucugugugcuaaug

SEQ ID NO: 1501641 - RNA, 19 nt, Homo sapiens
  misc_RNA (1)...(19): siRNA sense strand
gaaagccuaugcauguguu

SEQ ID NO: 1501642 - RNA, 19 nt, Homo sapiens
  misc_RNA (1)...(19): siRNA sense strand
ggaaacagacugcguguca

SEQ ID NO: 1501643 - RNA, 19 nt, Homo sapiens
  misc_RNA (1)...(19): siRNA sense strand
gcagauggaaguaacaauu

SEQ ID NO: 1501644 - RNA, 19 nt, Homo sapiens
  misc_RNA (1)...(19): siRNA sense strand
ggaaauacugucucuguga

SEQ ID NO: 1501645 - RNA, 19 nt, Homo sapiens
  misc_RNA (1)...(19): siRNA sense strand
uugaugauguuuccuguua

SEQ ID NO: 1501646 - RNA, 19 nt, Homo sapiens
  misc_RNA (1)...(19): siRNA sense strand
ggaacuauaugugaugaug

SEQ ID NO: 1501647 - RNA, 19 nt, Homo sapiens
  misc_RNA (1)...(19): siRNA sense strand
gagaagauguuggugugaa

SEQ ID NO: 1501648 - RNA, 19 nt, Homo sapiens
  misc_RNA (1)...(19): siRNA sense strand
gcacuuauuuuauccagua

SEQ ID NO: 1501649 - RNA, 19 nt, Homo sapiens
  misc_RNA (1)...(19): siRNA sense strand
ggacacagguuucauugcu

SEQ ID NO: 1501650 - RNA, 19 nt, Homo sapiens
  misc_RNA (1)...(19): siRNA sense strand
gaaagaaguguucgugugu

SEQ ID NO: 1501651 - RNA, 19 nt, Homo sapiens
  misc_RNA (1)...(19): siRNA sense strand
gggaaagcauaauugugua

SEQ ID NO: 1501652 - RNA, 19 nt, Homo sapiens
  misc_RNA (1)...(19): siRNA sense strand
gaaugugggucugcaauca

SEQ ID NO: 1501653 - RNA, 19 nt, Homo sapiens
  misc_RNA (1)...(19): siRNA sense strand
ggacaguggaggugaaauu

SEQ ID NO: 1501654 - RNA, 19 nt, Homo sapiens
  misc_RNA (1)...(19): siRNA sense strand
gaagaugcccguguucuau

SEQ ID NO: 1501655 - RNA, 19 nt, Homo sapiens
  misc_RNA (1)...(19): siRNA sense strand
aaauuuggcuugaugaugu

SEQ ID NO: 1501656 - RNA, 19 nt, Homo sapiens
  misc_RNA (1)...(19): siRNA sense strand
gacaggcucugguuucaug

SEQ ID NO: 1501657 - RNA, 19 nt, Homo sapiens
  misc_RNA (1)...(19): siRNA sense strand
ggaauggagucccacuugu

SEQ ID NO: 1501658 - RNA, 19 nt, Homo sapiens
  misc_RNA (1)...(19): siRNA sense strand
gacaugcggugcaaaggaa

SEQ ID NO: 1501659 - RNA, 19 nt, Homo sapiens
  misc_RNA (1)...(19): siRNA sense strand
gaacacuacugccucaacu

SEQ ID NO: 1501660 - RNA, 19 nt, Homo sapiens
  misc_RNA (1)...(19): siRNA sense strand
gcagagaaguuggaguugu

SEQ ID NO: 1501661 - RNA, 19 nt, Homo sapiens
  misc_RNA (1)...(19): siRNA sense strand
gaguagaggugagaauuca

SEQ ID NO: 1501662 - RNA, 19 nt, Homo sapiens
  misc_RNA (1)...(19): siRNA sense strand
caccauaaguggaacaaug

SEQ ID NO: 1501663 - RNA, 19 nt, Homo sapiens
  misc_RNA (1)...(19): siRNA sense strand
ggaacuaaccgcuguaugg

SEQ ID NO: 1501664 - RNA, 19 nt, Homo sapiens
  misc_RNA (1)...(19): siRNA sense strand
gaugauguuuccuguuaug

SEQ ID NO: 1501665 - RNA, 19 nt, Homo sapiens
  misc_RNA (1)...(19): siRNA sense strand
gauguuguauggcuugaug

SEQ ID NO: 1501666 - RNA, 19 nt, Homo sapiens
  misc_RNA (1)...(19): siRNA sense strand
gagcugugcugggagauug

SEQ ID NO: 1501667 - RNA, 19 nt, Homo sapiens
  misc_RNA (1)...(19): siRNA sense strand
aaauuuggcucgaugaugu

SEQ ID NO: 1501668 - RNA, 19 nt, Homo sapiens
  misc_RNA (1)...(19): siRNA sense strand
ggaugacguuucuugcauu

SEQ ID NO: 1501669 - RNA, 19 nt, Homo sapiens
  misc_RNA (1)...(19): siRNA sense strand
aagaucagaugcuggagua

SEQ ID NO: 1501670 - RNA, 19 nt, Homo sapiens
  misc_RNA (1)...(19): siRNA sense strand
cuagagacauuuggauaaa

SEQ ID NO: 1501671 - RNA, 19 nt, Homo sapiens
  misc_RNA (1)...(19): siRNA sense strand
gcuagagacauuuggauaa

SEQ ID NO: 1501672 - RNA, 19 nt, Homo sapiens
  misc_RNA (1)...(19): siRNA sense strand
gacaauaugugaccagaac

SEQ ID NO: 1501673 - RNA, 19 nt, Homo sapiens
  misc_RNA (1)...(19): siRNA sense strand
gaaacucaccuugcauuau

SEQ ID NO: 1501674 - RNA, 19 nt, Homo sapiens
  misc_RNA (1)...(19): siRNA sense strand
gaugauguuuccugugaug

SEQ ID NO: 1501675 - RNA, 19 nt, Homo sapiens
  misc_RNA (1)...(19): siRNA sense strand
gaaacgcuucuacaggaua

SEQ ID NO: 1501676 - RNA, 19 nt, Homo sapiens
  misc_RNA (1)...(19): siRNA sense strand
gaaaugagucaaauaucug

SEQ ID NO: 1501677 - RNA, 19 nt, Homo sapiens
  misc_RNA (1)...(19): siRNA sense strand
cagagaggaugugauugua

SEQ ID NO: 1501678 - RNA, 19 nt, Homo sapiens
  misc_RNA (1)...(19): siRNA sense strand
ucaggucguuuagcacuua

SEQ ID NO: 1501679 - RNA, 19 nt, Homo sapiens
  misc_RNA (1)...(19): siRNA sense strand
ggaaaugagucagcucucu

SEQ ID NO: 1501680 - RNA, 19 nt, Homo sapiens
  misc_RNA (1)...(19): siRNA sense strand
guuaauagcccugcuguau

SEQ ID NO: 1501681 - RNA, 19 nt, Homo sapiens
  misc_RNA (1)...(19): siRNA sense strand
ggagaguggaggugaaauu

SEQ ID NO: 1501682 - RNA, 19 nt, Homo sapiens
  misc_RNA (1)...(19): siRNA sense strand
gacagucgcugaaaucacu

SEQ ID NO: 1501683 - RNA, 19 nt, Homo sapiens
  misc_RNA (1)...(19): siRNA sense strand
cagacugcgugucauuuaa

SEQ ID NO: 1501684 - RNA, 19 nt, Homo sapiens
  misc_RNA (1)...(19): siRNA sense strand
ucgaugauguuuccuguga

SEQ ID NO: 1501685 - RNA, 19 nt, Homo sapiens
  misc_RNA (1)...(19): siRNA sense strand
gaugacguuucuugcauug

SEQ ID NO: 1501686 - RNA, 19 nt, Homo sapiens
  misc_RNA (1)...(19): siRNA sense strand
cagcugaugucguaugcaa

SEQ ID NO: 1501687 - RNA, 19 nt, Homo sapiens
  misc_RNA (1)...(19): siRNA sense strand
gcuccugaauuccugcuuu

SEQ ID NO: 1501688 - RNA, 19 nt, Homo sapiens
  misc_RNA (1)...(19): siRNA sense strand
ggaaacgcuucuacaggau

SEQ ID NO: 1501689 - RNA, 19 nt, Homo sapiens
  misc_RNA (1)...(19): siRNA sense strand
gacuggagguguacuuuca

SEQ ID NO: 1501690 - RNA, 19 nt, Homo sapiens
  misc_RNA (1)...(19): siRNA sense strand
gagaggaugugauuguaac

SEQ ID NO: 1501691 - RNA, 19 nt, Homo sapiens
  misc_RNA (1)...(19): siRNA sense strand
guggaaagccuaugcaugu

SEQ ID NO: 1501692 - RNA, 19 nt, Homo sapiens
  misc_RNA (1)...(19): siRNA sense strand
gauuggaggugaaauacca

SEQ ID NO: 1501693 - RNA, 19 nt, Homo sapiens
  misc_RNA (1)...(19): siRNA sense strand
gugcuaaaccuaguaauga

SEQ ID NO: 1501694 - RNA, 19 nt, Homo sapiens
  misc_RNA (1)...(19): siRNA sense strand
caagaaagguggggaacua

SEQ ID NO: 1501695 - RNA, 19 nt, Homo sapiens
  misc_RNA (1)...(19): siRNA sense strand
cacggucucugcucacuuu

SEQ ID NO: 1501696 - RNA, 19 nt, Homo sapiens
  misc_RNA (1)...(19): siRNA sense strand
cagagagccucauuucaca

SEQ ID NO: 1501697 - RNA, 19 nt, Homo sapiens
  misc_RNA (1)...(19): siRNA sense strand
caugacagauggagcacaa

SEQ ID NO: 1501698 - RNA, 19 nt, Homo sapiens
  misc_RNA (1)...(19): siRNA sense strand
ggguggaacuugaauacug

SEQ ID NO: 1501699 - RNA, 19 nt, Homo sapiens
  misc_RNA (1)...(19): siRNA sense strand
gacaagccgugacuagaca

SEQ ID NO: 1501700 - RNA, 19 nt, Homo sapiens
  misc_RNA (1)...(19): siRNA sense strand
ccaaugugcugugcagaga

SEQ ID NO: 1501701 - RNA, 19 nt, Homo sapiens
  misc_RNA (1)...(19): siRNA sense strand
gcuaauggcuggggaauga

SEQ ID NO: 1501702 - RNA, 19 nt, Homo sapiens
  misc_RNA (1)...(19): siRNA sense strand
uaaggcagaucuggaccua

SEQ ID NO: 1501703 - RNA, 19 nt, Homo sapiens
  misc_RNA (1)...(19): siRNA sense strand
ggacugcacauaugaugga

SEQ ID NO: 1501704 - RNA, 19 nt, Homo sapiens
  misc_RNA (1)...(19): siRNA sense strand
gaacuggaagaaugaacaa

SEQ ID NO: 1501705 - RNA, 19 nt, Homo sapiens
  misc_RNA (1)...(19): siRNA sense strand
ccucaaaacucguggcaua

SEQ ID NO: 1501706 - RNA, 19 nt, Homo sapiens
  misc_RNA (1)...(19): siRNA sense strand
gagaguagaggugagaauu

SEQ ID NO: 1501707 - RNA, 19 nt, Homo sapiens
  misc_RNA (1)...(19): siRNA sense strand
cgggaagacuggaggugua

SEQ ID NO: 1501708 - RNA, 19 nt, Homo sapiens
  misc_RNA (1)...(19): siRNA sense strand
agaaagaacauuacacauc

SEQ ID NO: 1501709 - RNA, 19 nt, Homo sapiens
  misc_RNA (1)...(19): siRNA sense strand
ugaaacucaccuugcauua

SEQ ID NO: 1501710 - RNA, 19 nt, Homo sapiens
  misc_RNA (1)...(19): siRNA sense strand
gcuaguggauggaaacaac

SEQ ID NO: 1501711 - RNA, 19 nt, Homo sapiens
  misc_RNA (1)...(19): siRNA sense strand
acaagaaccucagaugaca

SEQ ID NO: 1501712 - RNA, 19 nt, Homo sapiens
  misc_RNA (1)...(19): siRNA sense strand
ccuugaggcucuacaguga

SEQ ID NO: 1501713 - RNA, 19 nt, Homo sapiens
  misc_RNA (1)...(19): siRNA sense strand
augagucacuucuggauaa

SEQ ID NO: 1501714 - RNA, 19 nt, Homo sapiens
  misc_RNA (1)...(19): siRNA sense strand
cagcagagaaguuggaguu

SEQ ID NO: 1501715 - RNA, 19 nt, Homo sapiens
  misc_RNA (1)...(19): siRNA sense strand
ggagguguacuuucaagga

SEQ ID NO: 1501716 - RNA, 19 nt, Homo sapiens
  misc_RNA (1)...(19): siRNA sense strand
ugacguuucuugcauugga

SEQ ID NO: 1501717 - RNA, 19 nt, Homo sapiens
  misc_RNA (1)...(19): siRNA sense strand
ggaggugaaauuccaagaa

SEQ ID NO: 1501718 - RNA, 19 nt, Homo sapiens
  misc_RNA (1)...(19): siRNA sense strand
gaaagaagcuaugaaagua

SEQ ID NO: 1501719 - RNA, 19 nt, Homo sapiens
  misc_RNA (1)...(19): siRNA sense strand
ggaauaugguuucuaguuu

SEQ ID NO: 1501720 - RNA, 19 nt, Homo sapiens
  misc_RNA (1)...(19): siRNA sense strand
gaagaaagaagcuaugaaa

SEQ ID NO: 1501721 - RNA, 19 nt, Homo sapiens
  misc_RNA (1)...(19): siRNA sense strand
ugaaggacuuucugauuua

SEQ ID NO: 1501722 - RNA, 19 nt, Homo sapiens
  misc_RNA (1)...(19): siRNA sense strand
ggaagacccuccugccaaa

SEQ ID NO: 1501723 - RNA, 19 nt, Homo sapiens
  misc_RNA (1)...(19): siRNA sense strand
ggacgccccuugaauauua

SEQ ID NO: 1501724 - RNA, 19 nt, Homo sapiens
  misc_RNA (1)...(19): siRNA sense strand
ggaaaugcaucuuuauguc

SEQ ID NO: 1501725 - RNA, 19 nt, Homo sapiens
  misc_RNA (1)...(19): siRNA sense strand
ccagagcacuaauuaaaga

SEQ ID NO: 1501726 - RNA, 19 nt, Homo sapiens
  misc_RNA (1)...(19): siRNA sense strand
uaucagccaucuucuguaa

SEQ ID NO: 1501727 - RNA, 19 nt, Homo sapiens
  misc_RNA (1)...(19): siRNA sense strand
ugagggcgcugcauuuauu

SEQ ID NO: 1501728 - RNA, 19 nt, Homo sapiens
  misc_RNA (1)...(19): siRNA sense strand
ucaacaaguuagagagaua

SEQ ID NO: 1501729 - RNA, 19 nt, Homo sapiens
  misc_RNA (1)...(19): siRNA sense strand
guucaagcguccucaguaa

SEQ ID NO: 1501730 - RNA, 19 nt, Homo sapiens
  misc_RNA (1)...(19): siRNA sense strand
caucagaaauugggaagaa

SEQ ID NO: 1501731 - RNA, 19 nt, Homo sapiens
  misc_RNA (1)...(19): siRNA sense strand
gcccugcgguucagauuaa

SEQ ID NO: 1501732 - RNA, 19 nt, Homo sapiens
  misc_RNA (1)...(19): siRNA sense strand
caaugacuguucugaugua

SEQ ID NO: 1501733 - RNA, 19 nt, Homo sapiens
  misc_RNA (1)...(19): siRNA sense strand
uugaaggacuuucugauuu

SEQ ID NO: 1501734 - RNA, 19 nt, Homo sapiens
  misc_RNA (1)...(19): siRNA sense strand
ucaagcaugucaucagauu

SEQ ID NO: 1501735 - RNA, 19 nt, Homo sapiens
  misc_RNA (1)...(19): siRNA sense strand
gaauuacucuaugucugua

SEQ ID NO: 1501736 - RNA, 19 nt, Homo sapiens
  misc_RNA (1)...(19): siRNA sense strand
gggaagaauuacucuaugu

SEQ ID NO: 1501737 - RNA, 19 nt, Homo sapiens
  misc_RNA (1)...(19): siRNA sense strand
gaugagggcgcugcauuua

SEQ ID NO: 1501738 - RNA, 19 nt, Homo sapiens
  misc_RNA (1)...(19): siRNA sense strand
gaaggacuuucugauuuau

SEQ ID NO: 1501739 - RNA, 19 nt, Homo sapiens
  misc_RNA (1)...(19): siRNA sense strand
gaaaugcaucuuuauguca

SEQ ID NO: 1501740 - RNA, 19 nt, Homo sapiens
  misc_RNA (1)...(19): siRNA sense strand
acaaucaaaucaucgguuu

SEQ ID NO: 1501741 - RNA, 19 nt, Homo sapiens
  misc_RNA (1)...(19): siRNA sense strand
gcagugacuuguacacauc

SEQ ID NO: 1501742 - RNA, 19 nt, Homo sapiens
  misc_RNA (1)...(19): siRNA sense strand
gagaucaaauuccaagaag

SEQ ID NO: 1501743 - RNA, 19 nt, Homo sapiens
  misc_RNA (1)...(19): siRNA sense strand
auacuaagcccacauuuga

SEQ ID NO: 1501744 - RNA, 19 nt, Homo sapiens
  misc_RNA (1)...(19): siRNA sense strand
gaucaaauuccaagaagau

SEQ ID NO: 1501745 - RNA, 19 nt, Homo sapiens
  misc_RNA (1)...(19): siRNA sense strand
gcaagaagaaaguagaugu

SEQ ID NO: 1501746 - RNA, 19 nt, Homo sapiens
  misc_RNA (1)...(19): siRNA sense strand
ucaguaccauuccaccaua

SEQ ID NO: 1501747 - RNA, 19 nt, Homo sapiens
  misc_RNA (1)...(19): siRNA sense strand
uaucaagcaugucaucaga

SEQ ID NO: 1501748 - RNA, 19 nt, Homo sapiens
  misc_RNA (1)...(19): siRNA sense strand
ugaggaauaugguuucuag

SEQ ID NO: 1501749 - RNA, 19 nt, Homo sapiens
  misc_RNA (1)...(19): siRNA sense strand
ggauuuguccuguguguga

SEQ ID NO: 1501750 - RNA, 19 nt, Homo sapiens
  misc_RNA (1)...(19): siRNA sense strand
ccaaagggguucucaugua

SEQ ID NO: 1501751 - RNA, 19 nt, Homo sapiens
  misc_RNA (1)...(19): siRNA sense strand
caaagcagcccaaccaaag

SEQ ID NO: 1501752 - RNA, 19 nt, Homo sapiens
  misc_RNA (1)...(19): siRNA sense strand
guucugugcugcuucaaga

SEQ ID NO: 1501753 - RNA, 19 nt, Homo sapiens
  misc_RNA (1)...(19): siRNA sense strand
caucagccauguuauuaca

SEQ ID NO: 1501754 - RNA, 19 nt, Homo sapiens
  misc_RNA (1)...(19): siRNA sense strand
gauacuaagcccacauuug

SEQ ID NO: 1501755 - RNA, 19 nt, Homo sapiens
  misc_RNA (1)...(19): siRNA sense strand
ugacuguucugauguagau

SEQ ID NO: 1501756 - RNA, 19 nt, Homo sapiens
  misc_RNA (1)...(19): siRNA sense strand
gcuauuccgccuucauuaa

SEQ ID NO: 1501757 - RNA, 19 nt, Homo sapiens
  misc_RNA (1)...(19): siRNA sense strand
ucgaagaguugaggaauau

SEQ ID NO: 1501758 - RNA, 19 nt, Homo sapiens
  misc_RNA (1)...(19): siRNA sense strand
caaguugcccucaagaaga

SEQ ID NO: 1501759 - RNA, 19 nt, Homo sapiens
  misc_RNA (1)...(19): siRNA sense strand
gcgcugcauuuauugaaga

SEQ ID NO: 1501760 - RNA, 19 nt, Homo sapiens
  misc_RNA (1)...(19): siRNA sense strand
caaugagaccgaagaaaga

SEQ ID NO: 1501761 - RNA, 19 nt, Homo sapiens
  misc_RNA (1)...(19): siRNA sense strand
gagacaaguugcccucaag

SEQ ID NO: 1501762 - RNA, 19 nt, Homo sapiens
  misc_RNA (1)...(19): siRNA sense strand
agaaagaagcuaugaaagu

SEQ ID NO: 1501763 - RNA, 19 nt, Homo sapiens
  misc_RNA (1)...(19): siRNA sense strand
uuagaaacccugaucauuc

SEQ ID NO: 1501764 - RNA, 19 nt, Homo sapiens
  misc_RNA (1)...(19): siRNA sense strand
ccaaugagaccgaagaaag

SEQ ID NO: 1501765 - RNA, 19 nt, Homo sapiens
  misc_RNA (1)...(19): siRNA sense strand
ucaucaagcccacgaguuu

SEQ ID NO: 1501766 - RNA, 19 nt, Homo sapiens
  misc_RNA (1)...(19): siRNA sense strand
uagaugagaucaaauucca

SEQ ID NO: 1501767 - RNA, 19 nt, Homo sapiens
  misc_RNA (1)...(19): siRNA sense strand
cugcagauccugauaguga

SEQ ID NO: 1501768 - RNA, 19 nt, Homo sapiens
  misc_RNA (1)...(19): siRNA sense strand
gaagaauuacucuaugucu

SEQ ID NO: 1501769 - RNA, 19 nt, Homo sapiens
  misc_RNA (1)...(19): siRNA sense strand
caacuagccuucggguauc

SEQ ID NO: 1501770 - RNA, 19 nt, Homo sapiens
  misc_RNA (1)...(19): siRNA sense strand
caagaagaaaguagauguu

SEQ ID NO: 1501771 - RNA, 19 nt, Homo sapiens
  misc_RNA (1)...(19): siRNA sense strand
gaugugcccuuuaggaaaa

SEQ ID NO: 1501772 - RNA, 19 nt, Homo sapiens
  misc_RNA (1)...(19): siRNA sense strand
gaucauuccagagcacuaa

SEQ ID NO: 1501773 - RNA, 19 nt, Homo sapiens
  misc_RNA (1)...(19): siRNA sense strand
guaagggugcccaguguga

SEQ ID NO: 1501774 - RNA, 19 nt, Homo sapiens
  misc_RNA (1)...(19): siRNA sense strand
aaucaucgguuuucaguuu

SEQ ID NO: 1501775 - RNA, 19 nt, Homo sapiens
  misc_RNA (1)...(19): siRNA sense strand
ucaccauccucuccuguug

SEQ ID NO: 1501776 - RNA, 19 nt, Homo sapiens
  misc_RNA (1)...(19): siRNA sense strand
ggugguaggagagauuaua

SEQ ID NO: 1501777 - RNA, 19 nt, Homo sapiens
  misc_RNA (1)...(19): siRNA sense strand
aagcaugaccuccugauga

SEQ ID NO: 1501778 - RNA, 19 nt, Homo sapiens
  misc_RNA (1)...(19): siRNA sense strand
acaacuagccuucggguau

SEQ ID NO: 1501779 - RNA, 19 nt, Homo sapiens
  misc_RNA (1)...(19): siRNA sense strand
uaucuuguacggcagcuua

SEQ ID NO: 1501780 - RNA, 19 nt, Homo sapiens
  misc_RNA (1)...(19): siRNA sense strand
gauuauacaguccaaguuc

SEQ ID NO: 1501781 - RNA, 19 nt, Homo sapiens
  misc_RNA (1)...(19): siRNA sense strand
caaagggguucucauguau

SEQ ID NO: 1501782 - RNA, 19 nt, Homo sapiens
  misc_RNA (1)...(19): siRNA sense strand
gaaauucucaaugacuguu

SEQ ID NO: 1501783 - RNA, 19 nt, Homo sapiens
  misc_RNA (1)...(19): siRNA sense strand
aaaaugggauugaacagaa

SEQ ID NO: 1501784 - RNA, 19 nt, Homo sapiens
  misc_RNA (1)...(19): siRNA sense strand
caucaagcccacgaguuua

SEQ ID NO: 1501785 - RNA, 19 nt, Homo sapiens
  misc_RNA (1)...(19): siRNA sense strand
gaagaguugaggaauaugg

SEQ ID NO: 1501786 - RNA, 19 nt, Homo sapiens
  misc_RNA (1)...(19): siRNA sense strand
cucaaugacuguucugaug

SEQ ID NO: 1501787 - RNA, 19 nt, Homo sapiens
  misc_RNA (1)...(19): siRNA sense strand
gagagauuauacaguccaa

SEQ ID NO: 1501788 - RNA, 19 nt, Homo sapiens
  misc_RNA (1)...(19): siRNA sense strand
aaagcaguauucagcgauu

SEQ ID NO: 1501789 - RNA, 19 nt, Homo sapiens
  misc_RNA (1)...(19): siRNA sense strand
auucagcgauuucaagaga

SEQ ID NO: 1501790 - RNA, 19 nt, Homo sapiens
  misc_RNA (1)...(19): siRNA sense strand
guucugauguagaugagau

SEQ ID NO: 1501791 - RNA, 19 nt, Homo sapiens
  misc_RNA (1)...(19): siRNA sense strand
ucagccauguuauuacaga

SEQ ID NO: 1501792 - RNA, 19 nt, Homo sapiens
  misc_RNA (1)...(19): siRNA sense strand
gagauuauacaguccaagu

SEQ ID NO: 1501793 - RNA, 19 nt, Homo sapiens
  misc_RNA (1)...(19): siRNA sense strand
gcuaugcaccaccgccuaa

SEQ ID NO: 1501794 - RNA, 19 nt, Homo sapiens
  misc_RNA (1)...(19): siRNA sense strand
caagcaagaagaaaguaga

SEQ ID NO: 1501795 - RNA, 19 nt, Homo sapiens
  misc_RNA (1)...(19): siRNA sense strand
gaguugaggaauaugguuu

SEQ ID NO: 1501796 - RNA, 19 nt, Homo sapiens
  misc_RNA (1)...(19): siRNA sense strand
ugagaucaaauuccaagaa

SEQ ID NO: 1501797 - RNA, 19 nt, Homo sapiens
  misc_RNA (1)...(19): siRNA sense strand
uuuaugauguccuugaugu

SEQ ID NO: 1501798 - RNA, 19 nt, Homo sapiens
  misc_RNA (1)...(19): siRNA sense strand
aagcaugucaucagauuug

SEQ ID NO: 1501799 - RNA, 19 nt, Homo sapiens
  misc_RNA (1)...(19): siRNA sense strand
gccaauaucaagcauguca

SEQ ID NO: 1501800 - RNA, 19 nt, Homo sapiens
  misc_RNA (1)...(19): siRNA sense strand
uaggguuucugaacuacaa

SEQ ID NO: 1501801 - RNA, 19 nt, Homo sapiens
  misc_RNA (1)...(19): siRNA sense strand
aagaagcuaugaaaguauc

SEQ ID NO: 1501802 - RNA, 19 nt, Homo sapiens
  misc_RNA (1)...(19): siRNA sense strand
cauuccagagcacuaauua

SEQ ID NO: 1501803 - RNA, 19 nt, Homo sapiens
  misc_RNA (1)...(19): siRNA sense strand
ggaagaauuacucuauguc

SEQ ID NO: 1501804 - RNA, 19 nt, Homo sapiens
  misc_RNA (1)...(19): siRNA sense strand
gacaaguugcccucaagaa

SEQ ID NO: 1501805 - RNA, 19 nt, Homo sapiens
  misc_RNA (1)...(19): siRNA sense strand
acacaaagcagcccaacca

SEQ ID NO: 1501806 - RNA, 19 nt, Homo sapiens
  misc_RNA (1)...(19): siRNA sense strand
aguaagccuuguucaguga

SEQ ID NO: 1501807 - RNA, 19 nt, Homo sapiens
  misc_RNA (1)...(19): siRNA sense strand
aaaguggacgcaagcauga

SEQ ID NO: 1501808 - RNA, 19 nt, Homo sapiens
  misc_RNA (1)...(19): siRNA sense strand
gcagauccugauagugaaa

SEQ ID NO: 1501809 - RNA, 19 nt, Homo sapiens
  misc_RNA (1)...(19): siRNA sense strand
uuccagagcacuaauuaaa

SEQ ID NO: 1501810 - RNA, 19 nt, Homo sapiens
  misc_RNA (1)...(19): siRNA sense strand
uagaaacccugaucauucc

SEQ ID NO: 1501811 - RNA, 19 nt, Homo sapiens
  misc_RNA (1)...(19): siRNA sense strand
gcccacgaguuuaguucaa

SEQ ID NO: 1501812 - RNA, 19 nt, Homo sapiens
  misc_RNA (1)...(19): siRNA sense strand
cgaagaaagaagcuaugaa

SEQ ID NO: 1501813 - RNA, 19 nt, Homo sapiens
  misc_RNA (1)...(19): siRNA sense strand
cgauauccacgaacucuug

SEQ ID NO: 1501814 - RNA, 19 nt, Homo sapiens
  misc_RNA (1)...(19): siRNA sense strand
uuaguuagguuaucuucag

SEQ ID NO: 1501815 - RNA, 19 nt, Homo sapiens
  misc_RNA (1)...(19): siRNA sense strand
gcaagcaagaagaaaguag

SEQ ID NO: 1501816 - RNA, 19 nt, Homo sapiens
  misc_RNA (1)...(19): siRNA sense strand
gguugauccugcugcuauu

SEQ ID NO: 1501817 - RNA, 19 nt, Homo sapiens
  misc_RNA (1)...(19): siRNA sense strand
acaaagcagcccaaccaaa

SEQ ID NO: 1501818 - RNA, 19 nt, Homo sapiens
  misc_RNA (1)...(19): siRNA sense strand
gaaagaagcuaugaaagua

SEQ ID NO: 1501819 - RNA, 19 nt, Homo sapiens
  misc_RNA (1)...(19): siRNA sense strand
ggaauaugguuucuaguuu

SEQ ID NO: 1501820 - RNA, 19 nt, Homo sapiens
  misc_RNA (1)...(19): siRNA sense strand
gaagaaagaagcuaugaaa

SEQ ID NO: 1501821 - RNA, 19 nt, Homo sapiens
  misc_RNA (1)...(19): siRNA sense strand
ugaaggacuuucugauuua

SEQ ID NO: 1501822 - RNA, 19 nt, Homo sapiens
  misc_RNA (1)...(19): siRNA sense strand
ggaagacccuccugccaaa

SEQ ID NO: 1501823 - RNA, 19 nt, Homo sapiens
  misc_RNA (1)...(19): siRNA sense strand
ggacgccccuugaauauua

SEQ ID NO: 1501824 - RNA, 19 nt, Homo sapiens
  misc_RNA (1)...(19): siRNA sense strand
ggaaaugcaucuuuauguc

SEQ ID NO: 1501825 - RNA, 19 nt, Homo sapiens
  misc_RNA (1)...(19): siRNA sense strand
ccagagcacuaauuaaaga

SEQ ID NO: 1501826 - RNA, 19 nt, Homo sapiens
  misc_RNA (1)...(19): siRNA sense strand
uaucagccaucuucuguaa

SEQ ID NO: 1501827 - RNA, 19 nt, Homo sapiens
  misc_RNA (1)...(19): siRNA sense strand
ugagggcgcugcauuuauu

SEQ ID NO: 1501828 - RNA, 19 nt, Homo sapiens
  misc_RNA (1)...(19): siRNA sense strand
ucaacaaguuagagagaua

SEQ ID NO: 1501829 - RNA, 19 nt, Homo sapiens
  misc_RNA (1)...(19): siRNA sense strand
guucaagcguccucaguaa

SEQ ID NO: 1501830 - RNA, 19 nt, Homo sapiens
  misc_RNA (1)...(19): siRNA sense strand
caucagaaauugggaagaa

SEQ ID NO: 1501831 - RNA, 19 nt, Homo sapiens
  misc_RNA (1)...(19): siRNA sense strand
gcccugcgguucagauuaa

SEQ ID NO: 1501832 - RNA, 19 nt, Homo sapiens
  misc_RNA (1)...(19): siRNA sense strand
caaugacuguucugaugua

SEQ ID NO: 1501833 - RNA, 19 nt, Homo sapiens
  misc_RNA (1)...(19): siRNA sense strand
uugaaggacuuucugauuu

SEQ ID NO: 1501834 - RNA, 19 nt, Homo sapiens
  misc_RNA (1)...(19): siRNA sense strand
ucaagcaugucaucagauu

SEQ ID NO: 1501835 - RNA, 19 nt, Homo sapiens
  misc_RNA (1)...(19): siRNA sense strand
gaauuacucuaugucugua

SEQ ID NO: 1501836 - RNA, 19 nt, Homo sapiens
  misc_RNA (1)...(19): siRNA sense strand
gggaagaauuacucuaugu

SEQ ID NO: 1501837 - RNA, 19 nt, Homo sapiens
  misc_RNA (1)...(19): siRNA sense strand
gaugagggcgcugcauuua

SEQ ID NO: 1501838 - RNA, 19 nt, Homo sapiens
  misc_RNA (1)...(19): siRNA sense strand
gaaggacuuucugauuuau

SEQ ID NO: 1501839 - RNA, 19 nt, Homo sapiens
  misc_RNA (1)...(19): siRNA sense strand
gaaaugcaucuuuauguca

SEQ ID NO: 1501840 - RNA, 19 nt, Homo sapiens
  misc_RNA (1)...(19): siRNA sense strand
acaaucaaaucaucgguuu

SEQ ID NO: 1501841 - RNA, 19 nt, Homo sapiens
  misc_RNA (1)...(19): siRNA sense strand
gcagugacuuguacacauc

SEQ ID NO: 1501842 - RNA, 19 nt, Homo sapiens
  misc_RNA (1)...(19): siRNA sense strand
gagaucaaauuccaagaag

SEQ ID NO: 1501843 - RNA, 19 nt, Homo sapiens
  misc_RNA (1)...(19): siRNA sense strand
auacuaagcccacauuuga

SEQ ID NO: 1501844 - RNA, 19 nt, Homo sapiens
  misc_RNA (1)...(19): siRNA sense strand
gaucaaauuccaagaagau

SEQ ID NO: 1501845 - RNA, 19 nt, Homo sapiens
  misc_RNA (1)...(19): siRNA sense strand
gcaagaagaaaguagaugu

SEQ ID NO: 1501846 - RNA, 19 nt, Homo sapiens
  misc_RNA (1)...(19): siRNA sense strand
ucaguaccauuccaccaua

SEQ ID NO: 1501847 - RNA, 19 nt, Homo sapiens
  misc_RNA (1)...(19): siRNA sense strand
uaucaagcaugucaucaga

SEQ ID NO: 1501848 - RNA, 19 nt, Homo sapiens
  misc_RNA (1)...(19): siRNA sense strand
ugaggaauaugguuucuag

SEQ ID NO: 1501849 - RNA, 19 nt, Homo sapiens
  misc_RNA (1)...(19): siRNA sense strand
ggauuuguccuguguguga

SEQ ID NO: 1501850 - RNA, 19 nt, Homo sapiens
  misc_RNA (1)...(19): siRNA sense strand
ccaaagggguucucaugua

SEQ ID NO: 1501851 - RNA, 19 nt, Homo sapiens
  misc_RNA (1)...(19): siRNA sense strand
caaagcagcccaaccaaag

SEQ ID NO: 1501852 - RNA, 19 nt, Homo sapiens
  misc_RNA (1)...(19): siRNA sense strand
guucugugcugcuucaaga

SEQ ID NO: 1501853 - RNA, 19 nt, Homo sapiens
  misc_RNA (1)...(19): siRNA sense strand
caucagccauguuauuaca

SEQ ID NO: 1501854 - RNA, 19 nt, Homo sapiens
  misc_RNA (1)...(19): siRNA sense strand
gauacuaagcccacauuug

SEQ ID NO: 1501855 - RNA, 19 nt, Homo sapiens
  misc_RNA (1)...(19): siRNA sense strand
ugacuguucugauguagau

SEQ ID NO: 1501856 - RNA, 19 nt, Homo sapiens
  misc_RNA (1)...(19): siRNA sense strand
gcuauuccgccuucauuaa

SEQ ID NO: 1501857 - RNA, 19 nt, Homo sapiens
  misc_RNA (1)...(19): siRNA sense strand
ucgaagaguugaggaauau

SEQ ID NO: 1501858 - RNA, 19 nt, Homo sapiens
  misc_RNA (1)...(19): siRNA sense strand
caaguugcccucaagaaga

SEQ ID NO: 1501859 - RNA, 19 nt, Homo sapiens
  misc_RNA (1)...(19): siRNA sense strand
gcgcugcauuuauugaaga

SEQ ID NO: 1501860 - RNA, 19 nt, Homo sapiens
  misc_RNA (1)...(19): siRNA sense strand
caaugagaccgaagaaaga

SEQ ID NO: 1501861 - RNA, 19 nt, Homo sapiens
  misc_RNA (1)...(19): siRNA sense strand
gagacaaguugcccucaag

SEQ ID NO: 1501862 - RNA, 19 nt, Homo sapiens
  misc_RNA (1)...(19): siRNA sense strand
agaaagaagcuaugaaagu

SEQ ID NO: 1501863 - RNA, 19 nt, Homo sapiens
  misc_RNA (1)...(19): siRNA sense strand
uuagaaacccugaucauuc

SEQ ID NO: 1501864 - RNA, 19 nt, Homo sapiens
  misc_RNA (1)...(19): siRNA sense strand
ccaaugagaccgaagaaag

SEQ ID NO: 1501865 - RNA, 19 nt, Homo sapiens
  misc_RNA (1)...(19): siRNA sense strand
ucaucaagcccacgaguuu

SEQ ID NO: 1501866 - RNA, 19 nt, Homo sapiens
  misc_RNA (1)...(19): siRNA sense strand
uagaugagaucaaauucca

SEQ ID NO: 1501867 - RNA, 19 nt, Homo sapiens
  misc_RNA (1)...(19): siRNA sense strand
cugcagauccugauaguga

SEQ ID NO: 1501868 - RNA, 19 nt, Homo sapiens
  misc_RNA (1)...(19): siRNA sense strand
gaagaauuacucuaugucu

SEQ ID NO: 1501869 - RNA, 19 nt, Homo sapiens
  misc_RNA (1)...(19): siRNA sense strand
caacuagccuucggguauc

SEQ ID NO: 1501870 - RNA, 19 nt, Homo sapiens
  misc_RNA (1)...(19): siRNA sense strand
caagaagaaaguagauguu

SEQ ID NO: 1501871 - RNA, 19 nt, Homo sapiens
  misc_RNA (1)...(19): siRNA sense strand
gaugugcccuuuaggaaaa

SEQ ID NO: 1501872 - RNA, 19 nt, Homo sapiens
  misc_RNA (1)...(19): siRNA sense strand
gaucauuccagagcacuaa

SEQ ID NO: 1501873 - RNA, 19 nt, Homo sapiens
  misc_RNA (1)...(19): siRNA sense strand
guaagggugcccaguguga

SEQ ID NO: 1501874 - RNA, 19 nt, Homo sapiens
  misc_RNA (1)...(19): siRNA sense strand
aaucaucgguuuucaguuu

SEQ ID NO: 1501875 - RNA, 19 nt, Homo sapiens
  misc_RNA (1)...(19): siRNA sense strand
ucaccauccucuccuguug

SEQ ID NO: 1501876 - RNA, 19 nt, Homo sapiens
  misc_RNA (1)...(19): siRNA sense strand
ggugguaggagagauuaua

SEQ ID NO: 1501877 - RNA, 19 nt, Homo sapiens
  misc_RNA (1)...(19): siRNA sense strand
aagcaugaccuccugauga

SEQ ID NO: 1501878 - RNA, 19 nt, Homo sapiens
  misc_RNA (1)...(19): siRNA sense strand
acaacuagccuucggguau

SEQ ID NO: 1501879 - RNA, 19 nt, Homo sapiens
  misc_RNA (1)...(19): siRNA sense strand
uaucuuguacggcagcuua

SEQ ID NO: 1501880 - RNA, 19 nt, Homo sapiens
  misc_RNA (1)...(19): siRNA sense strand
gauuauacaguccaaguuc

SEQ ID NO: 1501881 - RNA, 19 nt, Homo sapiens
  misc_RNA (1)...(19): siRNA sense strand
caaagggguucucauguau

SEQ ID NO: 1501882 - RNA, 19 nt, Homo sapiens
  misc_RNA (1)...(19): siRNA sense strand
gaaauucucaaugacuguu

SEQ ID NO: 1501883 - RNA, 19 nt, Homo sapiens
  misc_RNA (1)...(19): siRNA sense strand
aaaaugggauugaacagaa

SEQ ID NO: 1501884 - RNA, 19 nt, Homo sapiens
  misc_RNA (1)...(19): siRNA sense strand
caucaagcccacgaguuua

SEQ ID NO: 1501885 - RNA, 19 nt, Homo sapiens
  misc_RNA (1)...(19): siRNA sense strand
gaagaguugaggaauaugg

SEQ ID NO: 1501886 - RNA, 19 nt, Homo sapiens
  misc_RNA (1)...(19): siRNA sense strand
cucaaugacuguucugaug

SEQ ID NO: 1501887 - RNA, 19 nt, Homo sapiens
  misc_RNA (1)...(19): siRNA sense strand
gagagauuauacaguccaa

SEQ ID NO: 1501888 - RNA, 19 nt, Homo sapiens
  misc_RNA (1)...(19): siRNA sense strand
aaagcaguauucagcgauu

SEQ ID NO: 1501889 - RNA, 19 nt, Homo sapiens
  misc_RNA (1)...(19): siRNA sense strand
auucagcgauuucaagaga

SEQ ID NO: 1501890 - RNA, 19 nt, Homo sapiens
  misc_RNA (1)...(19): siRNA sense strand
guucugauguagaugagau

SEQ ID NO: 1501891 - RNA, 19 nt, Homo sapiens
  misc_RNA (1)...(19): siRNA sense strand
ucagccauguuauuacaga

SEQ ID NO: 1501892 - RNA, 19 nt, Homo sapiens
  misc_RNA (1)...(19): siRNA sense strand
gagauuauacaguccaagu

SEQ ID NO: 1501893 - RNA, 19 nt, Homo sapiens
  misc_RNA (1)...(19): siRNA sense strand
gcuaugcaccaccgccuaa

SEQ ID NO: 1501894 - RNA, 19 nt, Homo sapiens
  misc_RNA (1)...(19): siRNA sense strand
caagcaagaagaaaguaga

SEQ ID NO: 1501895 - RNA, 19 nt, Homo sapiens
  misc_RNA (1)...(19): siRNA sense strand
gaguugaggaauaugguuu

SEQ ID NO: 1501896 - RNA, 19 nt, Homo sapiens
  misc_RNA (1)...(19): siRNA sense strand
ugagaucaaauuccaagaa

SEQ ID NO: 1501897 - RNA, 19 nt, Homo sapiens
  misc_RNA (1)...(19): siRNA sense strand
uuuaugauguccuugaugu

SEQ ID NO: 1501898 - RNA, 19 nt, Homo sapiens
  misc_RNA (1)...(19): siRNA sense strand
aagcaugucaucagauuug

SEQ ID NO: 1501899 - RNA, 19 nt, Homo sapiens
  misc_RNA (1)...(19): siRNA sense strand
gccaauaucaagcauguca

SEQ ID NO: 1501900 - RNA, 19 nt, Homo sapiens
  misc_RNA (1)...(19): siRNA sense strand
uaggguuucugaacuacaa

SEQ ID NO: 1501901 - RNA, 19 nt, Homo sapiens
  misc_RNA (1)...(19): siRNA sense strand
aagaagcuaugaaaguauc

SEQ ID NO: 1501902 - RNA, 19 nt, Homo sapiens
  misc_RNA (1)...(19): siRNA sense strand
cauuccagagcacuaauua

SEQ ID NO: 1501903 - RNA, 19 nt, Homo sapiens
  misc_RNA (1)...(19): siRNA sense strand
ggaagaauuacucuauguc

SEQ ID NO: 1501904 - RNA, 19 nt, Homo sapiens
  misc_RNA (1)...(19): siRNA sense strand
gacaaguugcccucaagaa

SEQ ID NO: 1501905 - RNA, 19 nt, Homo sapiens
  misc_RNA (1)...(19): siRNA sense strand
acacaaagcagcccaacca

SEQ ID NO: 1501906 - RNA, 19 nt, Homo sapiens
  misc_RNA (1)...(19): siRNA sense strand
aguaagccuuguucaguga

SEQ ID NO: 1501907 - RNA, 19 nt, Homo sapiens
  misc_RNA (1)...(19): siRNA sense strand
aaaguggacgcaagcauga

SEQ ID NO: 1501908 - RNA, 19 nt, Homo sapiens
  misc_RNA (1)...(19): siRNA sense strand
gcagauccugauagugaaa

SEQ ID NO: 1501909 - RNA, 19 nt, Homo sapiens
  misc_RNA (1)...(19): siRNA sense strand
uuccagagcacuaauuaaa

SEQ ID NO: 1501910 - RNA, 19 nt, Homo sapiens
  misc_RNA (1)...(19): siRNA sense strand
uagaaacccugaucauucc

SEQ ID NO: 1501911 - RNA, 19 nt, Homo sapiens
  misc_RNA (1)...(19): siRNA sense strand
gcccacgaguuuaguucaa

SEQ ID NO: 1501912 - RNA, 19 nt, Homo sapiens
  misc_RNA (1)...(19): siRNA sense strand
cgaagaaagaagcuaugaa

SEQ ID NO: 1501913 - RNA, 19 nt, Homo sapiens
  misc_RNA (1)...(19): siRNA sense strand
cgauauccacgaacucuug

SEQ ID NO: 1501914 - RNA, 19 nt, Homo sapiens
  misc_RNA (1)...(19): siRNA sense strand
uuaguuagguuaucuucag

SEQ ID NO: 1501915 - RNA, 19 nt, Homo sapiens
  misc_RNA (1)...(19): siRNA sense strand
gcaagcaagaagaaaguag

SEQ ID NO: 1501916 - RNA, 19 nt, Homo sapiens
  misc_RNA (1)...(19): siRNA sense strand
gguugauccugcugcuauu

SEQ ID NO: 1501917 - RNA, 19 nt, Homo sapiens
  misc_RNA (1)...(19): siRNA sense strand
acaaagcagcccaaccaaa

SEQ ID NO: 1501918 - RNA, 19 nt, Homo sapiens
  misc_RNA (1)...(19): siRNA sense strand
gcagauauuugaacaguuu

SEQ ID NO: 1501919 - RNA, 19 nt, Homo sapiens
  misc_RNA (1)...(19): siRNA sense strand
gaucagagguuccgacuug

SEQ ID NO: 1501920 - RNA, 19 nt, Homo sapiens
  misc_RNA (1)...(19): siRNA sense strand
gaaaggaccaggagcauuu

SEQ ID NO: 1501921 - RNA, 19 nt, Homo sapiens
  misc_RNA (1)...(19): siRNA sense strand
gaaagcagauauuugaaca

SEQ ID NO: 1501922 - RNA, 19 nt, Homo sapiens
  misc_RNA (1)...(19): siRNA sense strand
ggagaaagaauuacacaaa

SEQ ID NO: 1501923 - RNA, 19 nt, Homo sapiens
  misc_RNA (1)...(19): siRNA sense strand
gaacgaaagcagauauuug

SEQ ID NO: 1501924 - RNA, 19 nt, Homo sapiens
  misc_RNA (1)...(19): siRNA sense strand
gagccgggauggagacaaa

SEQ ID NO: 1501925 - RNA, 19 nt, Homo sapiens
  misc_RNA (1)...(19): siRNA sense strand
ggaccacguuuaaggaguu

SEQ ID NO: 1501926 - RNA, 19 nt, Homo sapiens
  misc_RNA (1)...(19): siRNA sense strand
gcggagaccucaacaggau

SEQ ID NO: 1501927 - RNA, 19 nt, Homo sapiens
  misc_RNA (1)...(19): siRNA sense strand
ccacaucucugcccuucug

SEQ ID NO: 1501928 - RNA, 19 nt, Homo sapiens
  misc_RNA (1)...(19): siRNA sense strand
uuaaggaguuugcagagaa

SEQ ID NO: 1501929 - RNA, 19 nt, Homo sapiens
  misc_RNA (1)...(19): siRNA sense strand
ggaacgaaagcagauauuu

SEQ ID NO: 1501930 - RNA, 19 nt, Homo sapiens
  misc_RNA (1)...(19): siRNA sense strand
ggaagaccaagaugugaaa

SEQ ID NO: 1501931 - RNA, 19 nt, Homo sapiens
  misc_RNA (1)...(19): siRNA sense strand
uaaggaguuugcagagaaa

SEQ ID NO: 1501932 - RNA, 19 nt, Homo sapiens
  misc_RNA (1)...(19): siRNA sense strand
ccaaagaagaauucaagaa

SEQ ID NO: 1501933 - RNA, 19 nt, Homo sapiens
  misc_RNA (1)...(19): siRNA sense strand
agagaaaucuaaagugucu

SEQ ID NO: 1501934 - RNA, 19 nt, Homo sapiens
  misc_RNA (1)...(19): siRNA sense strand
caacagggaagaccaagau

SEQ ID NO: 1501935 - RNA, 19 nt, Homo sapiens
  misc_RNA (1)...(19): siRNA sense strand
gaccuuggcacccaucaaa

SEQ ID NO: 1501936 - RNA, 19 nt, Homo sapiens
  misc_RNA (1)...(19): siRNA sense strand
uaagaaacgggacaaggaa

SEQ ID NO: 1501937 - RNA, 19 nt, Homo sapiens
  misc_RNA (1)...(19): siRNA sense strand
gacgggcgaugaccgaguu

SEQ ID NO: 1501938 - RNA, 19 nt, Homo sapiens
  misc_RNA (1)...(19): siRNA sense strand
gcugcuagccaaagaagaa

SEQ ID NO: 1501939 - RNA, 19 nt, Homo sapiens
  misc_RNA (1)...(19): siRNA sense strand
gaccucaacaggaucauug

SEQ ID NO: 1501940 - RNA, 19 nt, Homo sapiens
  misc_RNA (1)...(19): siRNA sense strand
aacgaaagcagauauuuga

SEQ ID NO: 1501941 - RNA, 19 nt, Homo sapiens
  misc_RNA (1)...(19): siRNA sense strand
gcaaaucaaguagcugugu

SEQ ID NO: 1501942 - RNA, 19 nt, Homo sapiens
  misc_RNA (1)...(19): siRNA sense strand
gaggaacgaaagcagauau

SEQ ID NO: 1501943 - RNA, 19 nt, Homo sapiens
  misc_RNA (1)...(19): siRNA sense strand
gggaagaccaagaugugaa

SEQ ID NO: 1501944 - RNA, 19 nt, Homo sapiens
  misc_RNA (1)...(19): siRNA sense strand
caacgaugcaccugucugu

SEQ ID NO: 1501945 - RNA, 19 nt, Homo sapiens
  misc_RNA (1)...(19): siRNA sense strand
gcaaagagagaggacaaag

SEQ ID NO: 1501946 - RNA, 19 nt, Homo sapiens
  misc_RNA (1)...(19): siRNA sense strand
uaccugggagaaagaauua

SEQ ID NO: 1501947 - RNA, 19 nt, Homo sapiens
  misc_RNA (1)...(19): siRNA sense strand
gggaaaaguuggauagaca

SEQ ID NO: 1501948 - RNA, 19 nt, Homo sapiens
  misc_RNA (1)...(19): siRNA sense strand
uuaagaaacgggacaagga

SEQ ID NO: 1501949 - RNA, 19 nt, Homo sapiens
  misc_RNA (1)...(19): siRNA sense strand
aagcagauauuugaacagu

SEQ ID NO: 1501950 - RNA, 19 nt, Homo sapiens
  misc_RNA (1)...(19): siRNA sense strand
cagaggaggcaaagagaga

SEQ ID NO: 1501951 - RNA, 19 nt, Homo sapiens
  misc_RNA (1)...(19): siRNA sense strand
gaggacaaaggcacaagga

SEQ ID NO: 1501952 - RNA, 19 nt, Homo sapiens
  misc_RNA (1)...(19): siRNA sense strand
gaccacguuuaaggaguuu

SEQ ID NO: 1501953 - RNA, 19 nt, Homo sapiens
  misc_RNA (1)...(19): siRNA sense strand
ggacucaacguggauacau

SEQ ID NO: 1501954 - RNA, 19 nt, Homo sapiens
  misc_RNA (1)...(19): siRNA sense strand
ggagaccucaacaggauca

SEQ ID NO: 1501955 - RNA, 19 nt, Homo sapiens
  misc_RNA (1)...(19): siRNA sense strand
cagggaagaccaagaugug

SEQ ID NO: 1501956 - RNA, 19 nt, Homo sapiens
  misc_RNA (1)...(19): siRNA sense strand
ggaguuugcagagaaauac

SEQ ID NO: 1501957 - RNA, 19 nt, Homo sapiens
  misc_RNA (1)...(19): siRNA sense strand
uaaauugcugcuagccaaa

SEQ ID NO: 1501958 - RNA, 19 nt, Homo sapiens
  misc_RNA (1)...(19): siRNA sense strand
gagacaaagaagacaagga

SEQ ID NO: 1501959 - RNA, 19 nt, Homo sapiens
  misc_RNA (1)...(19): siRNA sense strand
ggacaaggaaaacagacua

SEQ ID NO: 1501960 - RNA, 19 nt, Homo sapiens
  misc_RNA (1)...(19): siRNA sense strand
ccaggaccacguuuaagga

SEQ ID NO: 1501961 - RNA, 19 nt, Homo sapiens
  misc_RNA (1)...(19): siRNA sense strand
gacucaacguggauacauc

SEQ ID NO: 1501962 - RNA, 19 nt, Homo sapiens
  misc_RNA (1)...(19): siRNA sense strand
gcuguuugguggccauucu

SEQ ID NO: 1501963 - RNA, 19 nt, Homo sapiens
  misc_RNA (1)...(19): siRNA sense strand
caaagagagaggacaaagg

SEQ ID NO: 1501964 - RNA, 19 nt, Homo sapiens
  misc_RNA (1)...(19): siRNA sense strand
ggauggagacaaagaagac

SEQ ID NO: 1501965 - RNA, 19 nt, Homo sapiens
  misc_RNA (1)...(19): siRNA sense strand
gggauggagacaaagaaga

SEQ ID NO: 1501966 - RNA, 19 nt, Homo sapiens
  misc_RNA (1)...(19): siRNA sense strand
gcuggcaaaucaaguagcu

SEQ ID NO: 1501967 - RNA, 19 nt, Homo sapiens
  misc_RNA (1)...(19): siRNA sense strand
cuaccugggagaaagaauu

SEQ ID NO: 1501968 - RNA, 19 nt, Homo sapiens
  misc_RNA (1)...(19): siRNA sense strand
ucucugcccuucugcucuu

SEQ ID NO: 1501969 - RNA, 19 nt, Homo sapiens
  misc_RNA (1)...(19): siRNA sense strand
cgaaagcagauauuugaac

SEQ ID NO: 1501970 - RNA, 19 nt, Homo sapiens
  misc_RNA (1)...(19): siRNA sense strand
gcuaucuccugcucaacuc

SEQ ID NO: 1501971 - RNA, 19 nt, Homo sapiens
  misc_RNA (1)...(19): siRNA sense strand
gggagaaagaauuacacaa

SEQ ID NO: 1501972 - RNA, 19 nt, Homo sapiens
  misc_RNA (1)...(19): siRNA sense strand
agaagcccauggaccugaa

SEQ ID NO: 1501973 - RNA, 19 nt, Homo sapiens
  misc_RNA (1)...(19): siRNA sense strand
gaaaaguuggauagacaaa

SEQ ID NO: 1501974 - RNA, 19 nt, Homo sapiens
  misc_RNA (1)...(19): siRNA sense strand
gcuagccaaagaagaauuc

SEQ ID NO: 1501975 - RNA, 19 nt, Homo sapiens
  misc_RNA (1)...(19): siRNA sense strand
cacgcuaucuccugcucaa

SEQ ID NO: 1501976 - RNA, 19 nt, Homo sapiens
  misc_RNA (1)...(19): siRNA sense strand
cagagguuccgacuuguuc

SEQ ID NO: 1501977 - RNA, 19 nt, Homo sapiens
  misc_RNA (1)...(19): siRNA sense strand
auuccuaacuguaagaucu

SEQ ID NO: 1501978 - RNA, 19 nt, Homo sapiens
  misc_RNA (1)...(19): siRNA sense strand
guccaguucugaagacaac

SEQ ID NO: 1501979 - RNA, 19 nt, Homo sapiens
  misc_RNA (1)...(19): siRNA sense strand
gcgauggguccaguucuga

SEQ ID NO: 1501980 - RNA, 19 nt, Homo sapiens
  misc_RNA (1)...(19): siRNA sense strand
ugaccgaguuuucuucuuc

SEQ ID NO: 1501981 - RNA, 19 nt, Homo sapiens
  misc_RNA (1)...(19): siRNA sense strand
gccaaagaagaauucaaga

SEQ ID NO: 1501982 - RNA, 19 nt, Homo sapiens
  misc_RNA (1)...(19): siRNA sense strand
uuuaaggaguuugcagaga

SEQ ID NO: 1501983 - RNA, 19 nt, Homo sapiens
  misc_RNA (1)...(19): siRNA sense strand
gccagaggaggcaaagaga

SEQ ID NO: 1501984 - RNA, 19 nt, Homo sapiens
  misc_RNA (1)...(19): siRNA sense strand
agacuaaggcugcggaaaa

SEQ ID NO: 1501985 - RNA, 19 nt, Homo sapiens
  misc_RNA (1)...(19): siRNA sense strand
ucagagguuccgacuuguu

SEQ ID NO: 1501986 - RNA, 19 nt, Homo sapiens
  misc_RNA (1)...(19): siRNA sense strand
cauagaaacugccaauuua

SEQ ID NO: 1501987 - RNA, 19 nt, Homo sapiens
  misc_RNA (1)...(19): siRNA sense strand
ugacaaaguucgacaguua

SEQ ID NO: 1501988 - RNA, 19 nt, Homo sapiens
  misc_RNA (1)...(19): siRNA sense strand
gcaauacacucaugaaugu

SEQ ID NO: 1501989 - RNA, 19 nt, Homo sapiens
  misc_RNA (1)...(19): siRNA sense strand
ggauuugacucuauagaua

SEQ ID NO: 1501990 - RNA, 19 nt, Homo sapiens
  misc_RNA (1)...(19): siRNA sense strand
ggaccaggcugcucucuuu

SEQ ID NO: 1501991 - RNA, 19 nt, Homo sapiens
  misc_RNA (1)...(19): siRNA sense strand
uaacaucucuccagaauca

SEQ ID NO: 1501992 - RNA, 19 nt, Homo sapiens
  misc_RNA (1)...(19): siRNA sense strand
gaacaagcgugcauacaug

SEQ ID NO: 1501993 - RNA, 19 nt, Homo sapiens
  misc_RNA (1)...(19): siRNA sense strand
gaaguucgguggucauuug

SEQ ID NO: 1501994 - RNA, 19 nt, Homo sapiens
  misc_RNA (1)...(19): siRNA sense strand
gcaauacaguuacuaaaug

SEQ ID NO: 1501995 - RNA, 19 nt, Homo sapiens
  misc_RNA (1)...(19): siRNA sense strand
gaacaucaacggacuaauu

SEQ ID NO: 1501996 - RNA, 19 nt, Homo sapiens
  misc_RNA (1)...(19): siRNA sense strand
gcagaagaaugucaguuaa

SEQ ID NO: 1501997 - RNA, 19 nt, Homo sapiens
  misc_RNA (1)...(19): siRNA sense strand
ugaagaagauuaccaaaga

SEQ ID NO: 1501998 - RNA, 19 nt, Homo sapiens
  misc_RNA (1)...(19): siRNA sense strand
caucaaagauuggagcuua

SEQ ID NO: 1501999 - RNA, 19 nt, Homo sapiens
  misc_RNA (1)...(19): siRNA sense strand
gaagaacgauaccaagaug

SEQ ID NO: 1502000 - RNA, 19 nt, Homo sapiens
  misc_RNA (1)...(19): siRNA sense strand
caacguggcugaucaagau

SEQ ID NO: 1502001 - RNA, 19 nt, Homo sapiens
  misc_RNA (1)...(19): siRNA sense strand
guaauuaacccaucaaaga

SEQ ID NO: 1502002 - RNA, 19 nt, Homo sapiens
  misc_RNA (1)...(19): siRNA sense strand
gaaugucaguuaauuguga

SEQ ID NO: 1502003 - RNA, 19 nt, Homo sapiens
  misc_RNA (1)...(19): siRNA sense strand
ccacagggcuauacaaugu

SEQ ID NO: 1502004 - RNA, 19 nt, Homo sapiens
  misc_RNA (1)...(19): siRNA sense strand
gaagaaaccacaaguuaau

SEQ ID NO: 1502005 - RNA, 19 nt, Homo sapiens
  misc_RNA (1)...(19): siRNA sense strand
gcacuucccucucuucuag

SEQ ID NO: 1502006 - RNA, 19 nt, Homo sapiens
  misc_RNA (1)...(19): siRNA sense strand
gauaauuauuggcugguua

SEQ ID NO: 1502007 - RNA, 19 nt, Homo sapiens
  misc_RNA (1)...(19): siRNA sense strand
gaacaaacaggagacauuu

SEQ ID NO: 1502008 - RNA, 19 nt, Homo sapiens
  misc_RNA (1)...(19): siRNA sense strand
gcacaauccuucucuaugg

SEQ ID NO: 1502009 - RNA, 19 nt, Homo sapiens
  misc_RNA (1)...(19): siRNA sense strand
gacaagcgaucagaaagua

SEQ ID NO: 1502010 - RNA, 19 nt, Homo sapiens
  misc_RNA (1)...(19): siRNA sense strand
gaacacggcuuucaaucag

SEQ ID NO: 1502011 - RNA, 19 nt, Homo sapiens
  misc_RNA (1)...(19): siRNA sense strand
gcagagagauguggugaau

SEQ ID NO: 1502012 - RNA, 19 nt, Homo sapiens
  misc_RNA (1)...(19): siRNA sense strand
gaaggaagcgcaagacgaa

SEQ ID NO: 1502013 - RNA, 19 nt, Homo sapiens
  misc_RNA (1)...(19): siRNA sense strand
agaauacgcuagauaugua

SEQ ID NO: 1502014 - RNA, 19 nt, Homo sapiens
  misc_RNA (1)...(19): siRNA sense strand
ggacacagaugccuuugca

SEQ ID NO: 1502015 - RNA, 19 nt, Homo sapiens
  misc_RNA (1)...(19): siRNA sense strand
ggagaccucuucaguagug

SEQ ID NO: 1502016 - RNA, 19 nt, Homo sapiens
  misc_RNA (1)...(19): siRNA sense strand
aaucagaagucuuagauga

SEQ ID NO: 1502017 - RNA, 19 nt, Homo sapiens
  misc_RNA (1)...(19): siRNA sense strand
gaaagauuauguacagaca

SEQ ID NO: 1502018 - RNA, 19 nt, Homo sapiens
  misc_RNA (1)...(19): siRNA sense strand
aaacaaagauaaccaagag

SEQ ID NO: 1502019 - RNA, 19 nt, Homo sapiens
  misc_RNA (1)...(19): siRNA sense strand
gcacacuaacaaugaauua

SEQ ID NO: 1502020 - RNA, 19 nt, Homo sapiens
  misc_RNA (1)...(19): siRNA sense strand
ugaaguagaacaacagaua

SEQ ID NO: 1502021 - RNA, 19 nt, Homo sapiens
  misc_RNA (1)...(19): siRNA sense strand
aaaucuagcucaagaguug

SEQ ID NO: 1502022 - RNA, 19 nt, Homo sapiens
  misc_RNA (1)...(19): siRNA sense strand
gacgaaaucuagcucaaga

SEQ ID NO: 1502023 - RNA, 19 nt, Homo sapiens
  misc_RNA (1)...(19): siRNA sense strand
ggaaagggacagacagaaa

SEQ ID NO: 1502024 - RNA, 19 nt, Homo sapiens
  misc_RNA (1)...(19): siRNA sense strand
gaagaggcaagcagaaauu

SEQ ID NO: 1502025 - RNA, 19 nt, Homo sapiens
  misc_RNA (1)...(19): siRNA sense strand
gcugagaaacugaagcuua

SEQ ID NO: 1502026 - RNA, 19 nt, Homo sapiens
  misc_RNA (1)...(19): siRNA sense strand
gaaagacucagacagauuc

SEQ ID NO: 1502027 - RNA, 19 nt, Homo sapiens
  misc_RNA (1)...(19): siRNA sense strand
ggacagcacuuggguucuu

SEQ ID NO: 1502028 - RNA, 19 nt, Homo sapiens
  misc_RNA (1)...(19): siRNA sense strand
gaagaagauuaccaaagau

SEQ ID NO: 1502029 - RNA, 19 nt, Homo sapiens
  misc_RNA (1)...(19): siRNA sense strand
gaaguagaacaacagauaa

SEQ ID NO: 1502030 - RNA, 19 nt, Homo sapiens
  misc_RNA (1)...(19): siRNA sense strand
ggcaaggauuuaugaagua

SEQ ID NO: 1502031 - RNA, 19 nt, Homo sapiens
  misc_RNA (1)...(19): siRNA sense strand
ggaugaugaucuucuuaaa

SEQ ID NO: 1502032 - RNA, 19 nt, Homo sapiens
  misc_RNA (1)...(19): siRNA sense strand
aagaagaaaccacaaguua

SEQ ID NO: 1502033 - RNA, 19 nt, Homo sapiens
  misc_RNA (1)...(19): siRNA sense strand
ccaaacaacucgaguaucg

SEQ ID NO: 1502034 - RNA, 19 nt, Homo sapiens
  misc_RNA (1)...(19): siRNA sense strand
gaaggaggaugaacuuacu

SEQ ID NO: 1502035 - RNA, 19 nt, Homo sapiens
  misc_RNA (1)...(19): siRNA sense strand
uaaaugaacugaguguugu

SEQ ID NO: 1502036 - RNA, 19 nt, Homo sapiens
  misc_RNA (1)...(19): siRNA sense strand
gggcaaggauuuaugaagu

SEQ ID NO: 1502037 - RNA, 19 nt, Homo sapiens
  misc_RNA (1)...(19): siRNA sense strand
gagauguggugaaucagaa

SEQ ID NO: 1502038 - RNA, 19 nt, Homo sapiens
  misc_RNA (1)...(19): siRNA sense strand
ggacagacagaaacagaaa

SEQ ID NO: 1502039 - RNA, 19 nt, Homo sapiens
  misc_RNA (1)...(19): siRNA sense strand
ccauagaaacugccaauuu

SEQ ID NO: 1502040 - RNA, 19 nt, Homo sapiens
  misc_RNA (1)...(19): siRNA sense strand
uaccaaagauauccugaaa

SEQ ID NO: 1502041 - RNA, 19 nt, Homo sapiens
  misc_RNA (1)...(19): siRNA sense strand
cugagaaacugaagcuuaa

SEQ ID NO: 1502042 - RNA, 19 nt, Homo sapiens
  misc_RNA (1)...(19): siRNA sense strand
gagcccacaucuccaguuu

SEQ ID NO: 1502043 - RNA, 19 nt, Homo sapiens
  misc_RNA (1)...(19): siRNA sense strand
uacugcagcuuaucuguua

SEQ ID NO: 1502044 - RNA, 19 nt, Homo sapiens
  misc_RNA (1)...(19): siRNA sense strand
ugacuucgcaauacaguua

SEQ ID NO: 1502045 - RNA, 19 nt, Homo sapiens
  misc_RNA (1)...(19): siRNA sense strand
ggcagaagaaugucaguua

SEQ ID NO: 1502046 - RNA, 19 nt, Homo sapiens
  misc_RNA (1)...(19): siRNA sense strand
cauauuagcugagaaacug

SEQ ID NO: 1502047 - RNA, 19 nt, Homo sapiens
  misc_RNA (1)...(19): siRNA sense strand
agagagauguggugaauca

SEQ ID NO: 1502048 - RNA, 19 nt, Homo sapiens
  misc_RNA (1)...(19): siRNA sense strand
cagcuggccuucucagauu

SEQ ID NO: 1502049 - RNA, 19 nt, Homo sapiens
  misc_RNA (1)...(19): siRNA sense strand
ggaaagacucagacagauu

SEQ ID NO: 1502050 - RNA, 19 nt, Homo sapiens
  misc_RNA (1)...(19): siRNA sense strand
gaaguccgcugagcuguca

SEQ ID NO: 1502051 - RNA, 19 nt, Homo sapiens
  misc_RNA (1)...(19): siRNA sense strand
gaaccugaaagauuaugua

SEQ ID NO: 1502052 - RNA, 19 nt, Homo sapiens
  misc_RNA (1)...(19): siRNA sense strand
gcacuguucuuaguucaga

SEQ ID NO: 1502053 - RNA, 19 nt, Homo sapiens
  misc_RNA (1)...(19): siRNA sense strand
gaagaaugucaguuaauug

SEQ ID NO: 1502054 - RNA, 19 nt, Homo sapiens
  misc_RNA (1)...(19): siRNA sense strand
gaugagaaggagucuauuu

SEQ ID NO: 1502055 - RNA, 19 nt, Homo sapiens
  misc_RNA (1)...(19): siRNA sense strand
gaagaacccagcuccuuug

SEQ ID NO: 1502056 - RNA, 19 nt, Homo sapiens
  misc_RNA (1)...(19): siRNA sense strand
cagaaaguauugacaaagu

SEQ ID NO: 1502057 - RNA, 19 nt, Homo sapiens
  misc_RNA (1)...(19): siRNA sense strand
ggagacaagcgaucagaaa

SEQ ID NO: 1502058 - RNA, 19 nt, Homo sapiens
  misc_RNA (1)...(19): siRNA sense strand
gggaaggccuccuaacauc

SEQ ID NO: 1502059 - RNA, 19 nt, Homo sapiens
  misc_RNA (1)...(19): siRNA sense strand
ggcaucagcugaagaagau

SEQ ID NO: 1502060 - RNA, 19 nt, Homo sapiens
  misc_RNA (1)...(19): siRNA sense strand
ggccaagauuucugacuuu

SEQ ID NO: 1502061 - RNA, 19 nt, Homo sapiens
  misc_RNA (1)...(19): siRNA sense strand
gaaacaaaauugcuggauu

SEQ ID NO: 1502062 - RNA, 19 nt, Homo sapiens
  misc_RNA (1)...(19): siRNA sense strand
gugcauacaugaauuuagu

SEQ ID NO: 1502063 - RNA, 19 nt, Homo sapiens
  misc_RNA (1)...(19): siRNA sense strand
cugcagaccuaaauaauuc

SEQ ID NO: 1502064 - RNA, 19 nt, Homo sapiens
  misc_RNA (1)...(19): siRNA sense strand
aaugaugacuucaccauga

SEQ ID NO: 1502065 - RNA, 19 nt, Homo sapiens
  misc_RNA (1)...(19): siRNA sense strand
gccaaucgcuacagcuuug

SEQ ID NO: 1502066 - RNA, 19 nt, Homo sapiens
  misc_RNA (1)...(19): siRNA sense strand
ucacaguugucuaaucuug

SEQ ID NO: 1502067 - RNA, 19 nt, Homo sapiens
  misc_RNA (1)...(19): siRNA sense strand
acauucagcucaucuuuga

SEQ ID NO: 1502068 - RNA, 19 nt, Homo sapiens
  misc_RNA (1)...(19): siRNA sense strand
agaaugugcuguuaagguu

SEQ ID NO: 1502069 - RNA, 19 nt, Homo sapiens
  misc_RNA (1)...(19): siRNA sense strand
cuucagaaccaaucucuua

SEQ ID NO: 1502070 - RNA, 19 nt, Homo sapiens
  misc_RNA (1)...(19): siRNA sense strand
aacugaagcuuaacacuuu

SEQ ID NO: 1502071 - RNA, 19 nt, Homo sapiens
  misc_RNA (1)...(19): siRNA sense strand
gagaagaacgauaccaaga

SEQ ID NO: 1502072 - RNA, 19 nt, Homo sapiens
  misc_RNA (1)...(19): siRNA sense strand
uaaagacauuccuaaguuc

SEQ ID NO: 1502073 - RNA, 19 nt, Homo sapiens
  misc_RNA (1)...(19): siRNA sense strand
aagcugaacugcuccuaaa

SEQ ID NO: 1502074 - RNA, 19 nt, Homo sapiens
  misc_RNA (1)...(19): siRNA sense strand
gaacugauuccagcaauuc

SEQ ID NO: 1502075 - RNA, 19 nt, Homo sapiens
  misc_RNA (1)...(19): siRNA sense strand
caaacaagcucugucaaac

SEQ ID NO: 1502076 - RNA, 19 nt, Homo sapiens
  misc_RNA (1)...(19): siRNA sense strand
gaaagaagaaaccacaagu

SEQ ID NO: 1502077 - RNA, 19 nt, Homo sapiens
  misc_RNA (1)...(19): siRNA sense strand
ccuaacaucucuccagaau

SEQ ID NO: 1502078 - RNA, 19 nt, Homo sapiens
  misc_RNA (1)...(19): siRNA sense strand
gggacaaucugcaaagaca

SEQ ID NO: 1502079 - RNA, 19 nt, Homo sapiens
  misc_RNA (1)...(19): siRNA sense strand
uaagagaauacgcuagaua

SEQ ID NO: 1502080 - RNA, 19 nt, Homo sapiens
  misc_RNA (1)...(19): siRNA sense strand
uuaacgacauagccaauuu

SEQ ID NO: 1502081 - RNA, 19 nt, Homo sapiens
  misc_RNA (1)...(19): siRNA sense strand
gcgaugggauccagacuuc

SEQ ID NO: 1502082 - RNA, 19 nt, Homo sapiens
  misc_RNA (1)...(19): siRNA sense strand
caaagagcgugaugaagca

SEQ ID NO: 1502083 - RNA, 19 nt, Homo sapiens
  misc_RNA (1)...(19): siRNA sense strand
ggagaauccugugagaaug

SEQ ID NO: 1502084 - RNA, 19 nt, Homo sapiens
  misc_RNA (1)...(19): siRNA sense strand
aaaggaccaugaugugaaa

SEQ ID NO: 1502085 - RNA, 19 nt, Homo sapiens
  misc_RNA (1)...(19): siRNA sense strand
ggauccaguuugccuguuu

SEQ ID NO: 1502086 - RNA, 19 nt, Homo sapiens
  misc_RNA (1)...(19): siRNA sense strand
gcaauagacuggauggaaa

SEQ ID NO: 1502087 - RNA, 19 nt, Homo sapiens
  misc_RNA (1)...(19): siRNA sense strand
gagaaaggagggaagauaa

SEQ ID NO: 1502088 - RNA, 19 nt, Homo sapiens
  misc_RNA (1)...(19): siRNA sense strand
ggagaaaggagggaagaua

SEQ ID NO: 1502089 - RNA, 19 nt, Homo sapiens
  misc_RNA (1)...(19): siRNA sense strand
gaaaggagggaagauaauu

SEQ ID NO: 1502090 - RNA, 19 nt, Homo sapiens
  misc_RNA (1)...(19): siRNA sense strand
gaccaacucagccgacuua

SEQ ID NO: 1502091 - RNA, 19 nt, Homo sapiens
  misc_RNA (1)...(19): siRNA sense strand
aaucaagccuggagauauu

SEQ ID NO: 1502092 - RNA, 19 nt, Homo sapiens
  misc_RNA (1)...(19): siRNA sense strand
caaagaacccgaaagacaa

SEQ ID NO: 1502093 - RNA, 19 nt, Homo sapiens
  misc_RNA (1)...(19): siRNA sense strand
caacucagccgacuuaaca

SEQ ID NO: 1502094 - RNA, 19 nt, Homo sapiens
  misc_RNA (1)...(19): siRNA sense strand
aaagacaaguccagcauga

SEQ ID NO: 1502095 - RNA, 19 nt, Homo sapiens
  misc_RNA (1)...(19): siRNA sense strand
gccaucaacuauaaugaaa

SEQ ID NO: 1502096 - RNA, 19 nt, Homo sapiens
  misc_RNA (1)...(19): siRNA sense strand
ggucagauguggagaaagg

SEQ ID NO: 1502097 - RNA, 19 nt, Homo sapiens
  misc_RNA (1)...(19): siRNA sense strand
cuacaaagaacccgaaaga

SEQ ID NO: 1502098 - RNA, 19 nt, Homo sapiens
  misc_RNA (1)...(19): siRNA sense strand
aaaggagggaagauaauua

SEQ ID NO: 1502099 - RNA, 19 nt, Homo sapiens
  misc_RNA (1)...(19): siRNA sense strand
ggacagucauugcguaaaa

SEQ ID NO: 1502100 - RNA, 19 nt, Homo sapiens
  misc_RNA (1)...(19): siRNA sense strand
uguucaaacugaccaauaa

SEQ ID NO: 1502101 - RNA, 19 nt, Homo sapiens
  misc_RNA (1)...(19): siRNA sense strand
gguaagauaacuuucauca

SEQ ID NO: 1502102 - RNA, 19 nt, Homo sapiens
  misc_RNA (1)...(19): siRNA sense strand
acaaagaacccgaaagaca

SEQ ID NO: 1502103 - RNA, 19 nt, Homo sapiens
  misc_RNA (1)...(19): siRNA sense strand
acaugaacguggacuuuga

SEQ ID NO: 1502104 - RNA, 19 nt, Homo sapiens
  misc_RNA (1)...(19): siRNA sense strand
gaacguggacuuugaugcu

SEQ ID NO: 1502105 - RNA, 19 nt, Homo sapiens
  misc_RNA (1)...(19): siRNA sense strand
cgacuuaacauuaccuauc

SEQ ID NO: 1502106 - RNA, 19 nt, Homo sapiens
  misc_RNA (1)...(19): siRNA sense strand
caaacugaccaauaagaau

SEQ ID NO: 1502107 - RNA, 19 nt, Homo sapiens
  misc_RNA (1)...(19): siRNA sense strand
ucaaacugaccaauaagaa

SEQ ID NO: 1502108 - RNA, 19 nt, Homo sapiens
  misc_RNA (1)...(19): siRNA sense strand
caggucagauguggagaaa

SEQ ID NO: 1502109 - RNA, 19 nt, Homo sapiens
  misc_RNA (1)...(19): siRNA sense strand
ccaaucaagccuggagaua

SEQ ID NO: 1502110 - RNA, 19 nt, Homo sapiens
  misc_RNA (1)...(19): siRNA sense strand
ugacaugaacguggacuuu

SEQ ID NO: 1502111 - RNA, 19 nt, Homo sapiens
  misc_RNA (1)...(19): siRNA sense strand
caaucaagccuggagauau

SEQ ID NO: 1502112 - RNA, 19 nt, Homo sapiens
  misc_RNA (1)...(19): siRNA sense strand
ggagggaagauaauuaugc

SEQ ID NO: 1502113 - RNA, 19 nt, Homo sapiens
  misc_RNA (1)...(19): siRNA sense strand
gaggcagauucgucgcuuu

SEQ ID NO: 1502114 - RNA, 19 nt, Homo sapiens
  misc_RNA (1)...(19): siRNA sense strand
ggcaauagacuggauggaa

SEQ ID NO: 1502115 - RNA, 19 nt, Homo sapiens
  misc_RNA (1)...(19): siRNA sense strand
gcagaacuuacucuuggaa

SEQ ID NO: 1502116 - RNA, 19 nt, Homo sapiens
  misc_RNA (1)...(19): siRNA sense strand
ccaaagccguauuagaaaa

SEQ ID NO: 1502117 - RNA, 19 nt, Homo sapiens
  misc_RNA (1)...(19): siRNA sense strand
aaacgcacuuaggaacuuu

SEQ ID NO: 1502118 - RNA, 19 nt, Homo sapiens
  misc_RNA (1)...(19): siRNA sense strand
cccaugcuguucaaacuga

SEQ ID NO: 1502119 - RNA, 19 nt, Homo sapiens
  misc_RNA (1)...(19): siRNA sense strand
cacacuggaugaugcagaa

SEQ ID NO: 1502120 - RNA, 19 nt, Homo sapiens
  misc_RNA (1)...(19): siRNA sense strand
caaggcaguguccaucauu

SEQ ID NO: 1502121 - RNA, 19 nt, Homo sapiens
  misc_RNA (1)...(19): siRNA sense strand
gcagauucgucgcuuucuc

SEQ ID NO: 1502122 - RNA, 19 nt, Homo sapiens
  misc_RNA (1)...(19): siRNA sense strand
gaugcagaacuuacucuug

SEQ ID NO: 1502123 - RNA, 19 nt, Homo sapiens
  misc_RNA (1)...(19): siRNA sense strand
caugaggagucgacagaag

SEQ ID NO: 1502124 - RNA, 19 nt, Homo sapiens
  misc_RNA (1)...(19): siRNA sense strand
gacaugaacguggacuuug

SEQ ID NO: 1502125 - RNA, 19 nt, Homo sapiens
  misc_RNA (1)...(19): siRNA sense strand
ggagaaggacagucauugc

SEQ ID NO: 1502126 - RNA, 19 nt, Homo sapiens
  misc_RNA (1)...(19): siRNA sense strand
uagacuggauggaaagaag

SEQ ID NO: 1502127 - RNA, 19 nt, Homo sapiens
  misc_RNA (1)...(19): siRNA sense strand
gacuuaacauuaccuaucc

SEQ ID NO: 1502128 - RNA, 19 nt, Homo sapiens
  misc_RNA (1)...(19): siRNA sense strand
cccaaagccguauuagaaa

SEQ ID NO: 1502129 - RNA, 19 nt, Homo sapiens
  misc_RNA (1)...(19): siRNA sense strand
ggacaucaccaaccccaaa

SEQ ID NO: 1502130 - RNA, 19 nt, Homo sapiens
  misc_RNA (1)...(19): siRNA sense strand
cgaaagacaaguccagcau

SEQ ID NO: 1502131 - RNA, 19 nt, Homo sapiens
  misc_RNA (1)...(19): siRNA sense strand
cauguucgaccacccuauu

SEQ ID NO: 1502132 - RNA, 19 nt, Homo sapiens
  misc_RNA (1)...(19): siRNA sense strand
ggagucgacagaaggugaa

SEQ ID NO: 1502133 - RNA, 19 nt, Homo sapiens
  misc_RNA (1)...(19): siRNA sense strand
caucauugagugugacaug

SEQ ID NO: 1502134 - RNA, 19 nt, Homo sapiens
  misc_RNA (1)...(19): siRNA sense strand
uuaccuaucccaugcuguu

SEQ ID NO: 1502135 - RNA, 19 nt, Homo sapiens
  misc_RNA (1)...(19): siRNA sense strand
ggccaccuacuccaaauuc

SEQ ID NO: 1502136 - RNA, 19 nt, Homo sapiens
  misc_RNA (1)...(19): siRNA sense strand
agaaaggagggaagauaau

SEQ ID NO: 1502137 - RNA, 19 nt, Homo sapiens
  misc_RNA (1)...(19): siRNA sense strand
aaggagggaagauaauuau

SEQ ID NO: 1502138 - RNA, 19 nt, Homo sapiens
  misc_RNA (1)...(19): siRNA sense strand
acaaggcaguguccaucau

SEQ ID NO: 1502139 - RNA, 19 nt, Homo sapiens
  misc_RNA (1)...(19): siRNA sense strand
ucagccgacuuaacauuac

SEQ ID NO: 1502140 - RNA, 19 nt, Homo sapiens
  misc_RNA (1)...(19): siRNA sense strand
gcaguguccaucauugagu

SEQ ID NO: 1502141 - RNA, 19 nt, Homo sapiens
  misc_RNA (1)...(19): siRNA sense strand
cucagccgacuuaacauua

SEQ ID NO: 1502142 - RNA, 19 nt, Homo sapiens
  misc_RNA (1)...(19): siRNA sense strand
ccccaaagccguauuagaa

SEQ ID NO: 1502143 - RNA, 19 nt, Homo sapiens
  misc_RNA (1)...(19): siRNA sense strand
gaaauucacguccccuugu

SEQ ID NO: 1502144 - RNA, 19 nt, Homo sapiens
  misc_RNA (1)...(19): siRNA sense strand
uuaggaacuuugccugucu

SEQ ID NO: 1502145 - RNA, 19 nt, Homo sapiens
  misc_RNA (1)...(19): siRNA sense strand
aaggcaguguccaucauug

SEQ ID NO: 1502146 - RNA, 19 nt, Homo sapiens
  misc_RNA (1)...(19): siRNA sense strand
ccuaucccaugcuguucaa

SEQ ID NO: 1502147 - RNA, 19 nt, Homo sapiens
  misc_RNA (1)...(19): siRNA sense strand
ucaagccuggagauauuaa

SEQ ID NO: 1502148 - RNA, 19 nt, Homo sapiens
  misc_RNA (1)...(19): siRNA sense strand
caauagacuggauggaaag

SEQ ID NO: 1502149 - RNA, 19 nt, Homo sapiens
  misc_RNA (1)...(19): siRNA sense strand
uaccgcugcuucucugugu

SEQ ID NO: 1502150 - RNA, 19 nt, Homo sapiens
  misc_RNA (1)...(19): siRNA sense strand
gcccugacuuccuggacau

SEQ ID NO: 1502151 - RNA, 19 nt, Homo sapiens
  misc_RNA (1)...(19): siRNA sense strand
ggaccaacucagccgacuu

SEQ ID NO: 1502152 - RNA, 19 nt, Homo sapiens
  misc_RNA (1)...(19): siRNA sense strand
cucuggaucuggcaauaga

SEQ ID NO: 1502153 - RNA, 19 nt, Homo sapiens
  misc_RNA (1)...(19): siRNA sense strand
uguccaucauugaguguga

SEQ ID NO: 1502154 - RNA, 19 nt, Homo sapiens
  misc_RNA (1)...(19): siRNA sense strand
gcacagaggccgacaagaa

SEQ ID NO: 1502155 - RNA, 19 nt, Homo sapiens
  misc_RNA (1)...(19): siRNA sense strand
acaagaagcucucugaguu

SEQ ID NO: 1502156 - RNA, 19 nt, Homo sapiens
  misc_RNA (1)...(19): siRNA sense strand
gaacugcgcuauccucaag

SEQ ID NO: 1502157 - RNA, 19 nt, Homo sapiens
  misc_RNA (1)...(19): siRNA sense strand
uagaugagcuggcgcagaa

SEQ ID NO: 1502158 - RNA, 19 nt, Homo sapiens
  misc_RNA (1)...(19): siRNA sense strand
ucaaacgcaucaagaagaa

SEQ ID NO: 1502159 - RNA, 19 nt, Homo sapiens
  misc_RNA (1)...(19): siRNA sense strand
ucaaggcgcuggccgaugu

SEQ ID NO: 1502160 - RNA, 19 nt, Homo sapiens
  misc_RNA (1)...(19): siRNA sense strand
gcaagguuggcauggauua

SEQ ID NO: 1502161 - RNA, 19 nt, Homo sapiens
  misc_RNA (1)...(19): siRNA sense strand
gcaucgacuucaacaagaa

SEQ ID NO: 1502162 - RNA, 19 nt, Homo sapiens
  misc_RNA (1)...(19): siRNA sense strand
ggagcgagguguauuccau

SEQ ID NO: 1502163 - RNA, 19 nt, Homo sapiens
  misc_RNA (1)...(19): siRNA sense strand
gaaggucacccucaaguac

SEQ ID NO: 1502164 - RNA, 19 nt, Homo sapiens
  misc_RNA (1)...(19): siRNA sense strand
agaccaagcgcguguauga

SEQ ID NO: 1502165 - RNA, 19 nt, Homo sapiens
  misc_RNA (1)...(19): siRNA sense strand
gcgcguguaugaccagguu

SEQ ID NO: 1502166 - RNA, 19 nt, Homo sapiens
  misc_RNA (1)...(19): siRNA sense strand
gcaggagcgugcggugauu

SEQ ID NO: 1502167 - RNA, 19 nt, Homo sapiens
  misc_RNA (1)...(19): siRNA sense strand
gauggaggacggcaaguug

SEQ ID NO: 1502168 - RNA, 19 nt, Homo sapiens
  misc_RNA (1)...(19): siRNA sense strand
gaggagaacugcgcuaucc

SEQ ID NO: 1502169 - RNA, 19 nt, Homo sapiens
  misc_RNA (1)...(19): siRNA sense strand
agaaccugcucaaggagua

SEQ ID NO: 1502170 - RNA, 19 nt, Homo sapiens
  misc_RNA (1)...(19): siRNA sense strand
caacacaggccucuucaac

SEQ ID NO: 1502171 - RNA, 19 nt, Homo sapiens
  misc_RNA (1)...(19): siRNA sense strand
cgucgcagaugcuggagaa

SEQ ID NO: 1502172 - RNA, 19 nt, Homo sapiens
  misc_RNA (1)...(19): siRNA sense strand
gagaugaacauggccaaga

SEQ ID NO: 1502173 - RNA, 19 nt, Homo sapiens
  misc_RNA (1)...(19): siRNA sense strand
cagcaagguuggcauggau

SEQ ID NO: 1502174 - RNA, 19 nt, Homo sapiens
  misc_RNA (1)...(19): siRNA sense strand
gacaagaagcucucugagu

SEQ ID NO: 1502175 - RNA, 19 nt, Homo sapiens
  misc_RNA (1)...(19): siRNA sense strand
aggagaaaguucagaagga

SEQ ID NO: 1502176 - RNA, 19 nt, Homo sapiens
  misc_RNA (1)...(19): siRNA sense strand
gaccuacuuccaugaguuu

SEQ ID NO: 1502177 - RNA, 19 nt, Homo sapiens
  misc_RNA (1)...(19): siRNA sense strand
gcuacugcguggaccagaa

SEQ ID NO: 1502178 - RNA, 19 nt, Homo sapiens
  misc_RNA (1)...(19): siRNA sense strand
gcuacgacgcccaguacua

SEQ ID NO: 1502179 - RNA, 19 nt, Homo sapiens
  misc_RNA (1)...(19): siRNA sense strand
gaccguggccaccuuccua

SEQ ID NO: 1502180 - RNA, 19 nt, Homo sapiens
  misc_RNA (1)...(19): siRNA sense strand
agaccuacuuccaugaguu

SEQ ID NO: 1502181 - RNA, 19 nt, Homo sapiens
  misc_RNA (1)...(19): siRNA sense strand
caagaagcucucugaguuc

SEQ ID NO: 1502182 - RNA, 19 nt, Homo sapiens
  misc_RNA (1)...(19): siRNA sense strand
gaaaacaucaaacgcauca

SEQ ID NO: 1502183 - RNA, 19 nt, Homo sapiens
  misc_RNA (1)...(19): siRNA sense strand
ggaaccaacaugccugcaa

SEQ ID NO: 1502184 - RNA, 19 nt, Homo sapiens
  misc_RNA (1)...(19): siRNA sense strand
ggagguggucggcaaguuc

SEQ ID NO: 1502185 - RNA, 19 nt, Homo sapiens
  misc_RNA (1)...(19): siRNA sense strand
ugaaggucacccucaagua

SEQ ID NO: 1502186 - RNA, 19 nt, Homo sapiens
  misc_RNA (1)...(19): siRNA sense strand
accagaaccugcucaagga

SEQ ID NO: 1502187 - RNA, 19 nt, Homo sapiens
  misc_RNA (1)...(19): siRNA sense strand
ccagagagacucaggaaaa

SEQ ID NO: 1502188 - RNA, 19 nt, Homo sapiens
  misc_RNA (1)...(19): siRNA sense strand
acacaggccucuucaaccu

SEQ ID NO: 1502189 - RNA, 19 nt, Homo sapiens
  misc_RNA (1)...(19): siRNA sense strand
gggagguggucggcaaguu

SEQ ID NO: 1502190 - RNA, 19 nt, Homo sapiens
  misc_RNA (1)...(19): siRNA sense strand
gcaugagggaggacgugua

SEQ ID NO: 1502191 - RNA, 19 nt, Homo sapiens
  misc_RNA (1)...(19): siRNA sense strand
cuacacaguucagaggaau

SEQ ID NO: 1502192 - RNA, 19 nt, Homo sapiens
  misc_RNA (1)...(19): siRNA sense strand
gcagaccaagcgcguguau

SEQ ID NO: 1502193 - RNA, 19 nt, Homo sapiens
  misc_RNA (1)...(19): siRNA sense strand
gugcaucgacuucaacaag

SEQ ID NO: 1502194 - RNA, 19 nt, Homo sapiens
  misc_RNA (1)...(19): siRNA sense strand
gagaccuacuuccaugagu

SEQ ID NO: 1502195 - RNA, 19 nt, Homo sapiens
  misc_RNA (1)...(19): siRNA sense strand
ccugggacaugcgcuacua

SEQ ID NO: 1502196 - RNA, 19 nt, Homo sapiens
  misc_RNA (1)...(19): siRNA sense strand
ccuacacaguucagaggaa

SEQ ID NO: 1502197 - RNA, 19 nt, Homo sapiens
  misc_RNA (1)...(19): siRNA sense strand
guggccaccuuccuagaug

SEQ ID NO: 1502198 - RNA, 19 nt, Homo sapiens
  misc_RNA (1)...(19): siRNA sense strand
ccacacgcacgccgacuau

SEQ ID NO: 1502199 - RNA, 19 nt, Homo sapiens
  misc_RNA (1)...(19): siRNA sense strand
caucaaacgcaucaagaag

SEQ ID NO: 1502200 - RNA, 19 nt, Homo sapiens
  misc_RNA (1)...(19): siRNA sense strand
ccacguggagcgggacuuu

SEQ ID NO: 1502201 - RNA, 19 nt, Homo sapiens
  misc_RNA (1)...(19): siRNA sense strand
aaacaucaaacgcaucaag

SEQ ID NO: 1502202 - RNA, 19 nt, Homo sapiens
  misc_RNA (1)...(19): siRNA sense strand
acuauguccuggagaugaa

SEQ ID NO: 1502203 - RNA, 19 nt, Homo sapiens
  misc_RNA (1)...(19): siRNA sense strand
gacuauguccuggagauga

SEQ ID NO: 1502204 - RNA, 19 nt, Homo sapiens
  misc_RNA (1)...(19): siRNA sense strand
ucaacaagaaccugaacga

SEQ ID NO: 1502205 - RNA, 19 nt, Homo sapiens
  misc_RNA (1)...(19): siRNA sense strand
ugcaucgacuucaacaaga

SEQ ID NO: 1502206 - RNA, 19 nt, Homo sapiens
  misc_RNA (1)...(19): siRNA sense strand
ccgacuauguccuggagau

SEQ ID NO: 1502207 - RNA, 19 nt, Homo sapiens
  misc_RNA (1)...(19): siRNA sense strand
ccaacaugccugcaaccuu

SEQ ID NO: 1502208 - RNA, 19 nt, Homo sapiens
  misc_RNA (1)...(19): siRNA sense strand
ccgacaagaagcucucuga

SEQ ID NO: 1502209 - RNA, 19 nt, Homo sapiens
  misc_RNA (1)...(19): siRNA sense strand
ccugagugcccagcagaua

SEQ ID NO: 1502210 - RNA, 19 nt, Homo sapiens
  misc_RNA (1)...(19): siRNA sense strand
ggaggagaacugcgcuauc

SEQ ID NO: 1502211 - RNA, 19 nt, Homo sapiens
  misc_RNA (1)...(19): siRNA sense strand
cgcagaugcuggagaacug

SEQ ID NO: 1502212 - RNA, 19 nt, Homo sapiens
  misc_RNA (1)...(19): siRNA sense strand
cagaagcugcauccugaga

SEQ ID NO: 1502213 - RNA, 19 nt, Homo sapiens
  misc_RNA (1)...(19): siRNA sense strand
acacaguucagaggaauau

SEQ ID NO: 1502214 - RNA, 19 nt, Homo sapiens
  misc_RNA (1)...(19): siRNA sense strand
acaucaaacgcaucaagaa

SEQ ID NO: 1502215 - RNA, 19 nt, Homo sapiens
  misc_RNA (1)...(19): siRNA sense strand
ggagaccuacuuccaugag

SEQ ID NO: 1502216 - RNA, 19 nt, Homo sapiens
  misc_RNA (1)...(19): siRNA sense strand
aguucuaccuggaccugua

SEQ ID NO: 1502217 - RNA, 19 nt, Homo sapiens
  misc_RNA (1)...(19): siRNA sense strand
ccgaggacuuucugaacuc

SEQ ID NO: 1502218 - RNA, 19 nt, Homo sapiens
  misc_RNA (1)...(19): siRNA sense strand
cacagaggccgacaagaag

SEQ ID NO: 1502219 - RNA, 19 nt, Homo sapiens
  misc_RNA (1)...(19): siRNA sense strand
acagcaagguuggcaugga

SEQ ID NO: 1502220 - RNA, 19 nt, Homo sapiens
  misc_RNA (1)...(19): siRNA sense strand
ugagugcccagcagauaga

SEQ ID NO: 1502221 - RNA, 19 nt, Homo sapiens
  misc_RNA (1)...(19): siRNA sense strand
acacgcacgccgacuaugu

SEQ ID NO: 1502222 - RNA, 19 nt, Homo sapiens
  misc_RNA (1)...(19): siRNA sense strand
ucuccgugcucugugguaa

SEQ ID NO: 1502223 - RNA, 19 nt, Homo sapiens
  misc_RNA (1)...(19): siRNA sense strand
gguuggcacccaggaguuu

SEQ ID NO: 1502224 - RNA, 19 nt, Homo sapiens
  misc_RNA (1)...(19): siRNA sense strand
gcaccagggagcucaucga

SEQ ID NO: 1502225 - RNA, 19 nt, Homo sapiens
  misc_RNA (1)...(19): siRNA sense strand
gacguggagaugagcauga

SEQ ID NO: 1502226 - RNA, 19 nt, Homo sapiens
  misc_RNA (1)...(19): siRNA sense strand
ugaacgaggacacgaccuu

SEQ ID NO: 1502227 - RNA, 19 nt, Homo sapiens
  misc_RNA (1)...(19): siRNA sense strand
ggagaacgcugcagaaauu

SEQ ID NO: 1502228 - RNA, 19 nt, Homo sapiens
  misc_RNA (1)...(19): siRNA sense strand
gcaagauucugucaacauu

SEQ ID NO: 1502229 - RNA, 19 nt, Homo sapiens
  misc_RNA (1)...(19): siRNA sense strand
aagauuaccugucacuuua

SEQ ID NO: 1502230 - RNA, 19 nt, Homo sapiens
  misc_RNA (1)...(19): siRNA sense strand
gaaaugguguuugcgagua

SEQ ID NO: 1502231 - RNA, 19 nt, Homo sapiens
  misc_RNA (1)...(19): siRNA sense strand
gcuuaaaggucauguguga

SEQ ID NO: 1502232 - RNA, 19 nt, Homo sapiens
  misc_RNA (1)...(19): siRNA sense strand
gcaaacgccugaagcaauc

SEQ ID NO: 1502233 - RNA, 19 nt, Homo sapiens
  misc_RNA (1)...(19): siRNA sense strand
aagcaaagauuaccuguca

SEQ ID NO: 1502234 - RNA, 19 nt, Homo sapiens
  misc_RNA (1)...(19): siRNA sense strand
gagaagaaaccaaagcuau

SEQ ID NO: 1502235 - RNA, 19 nt, Homo sapiens
  misc_RNA (1)...(19): siRNA sense strand
ccaaagcuauggagaguca

SEQ ID NO: 1502236 - RNA, 19 nt, Homo sapiens
  misc_RNA (1)...(19): siRNA sense strand
ccaaaggguuagaugaaga

SEQ ID NO: 1502237 - RNA, 19 nt, Homo sapiens
  misc_RNA (1)...(19): siRNA sense strand
gagcaaaugauaaacugaa

SEQ ID NO: 1502238 - RNA, 19 nt, Homo sapiens
  misc_RNA (1)...(19): siRNA sense strand
gcagcucguucuccgguuu

SEQ ID NO: 1502239 - RNA, 19 nt, Homo sapiens
  misc_RNA (1)...(19): siRNA sense strand
caacgggcauauagguuug

SEQ ID NO: 1502240 - RNA, 19 nt, Homo sapiens
  misc_RNA (1)...(19): siRNA sense strand
gugaaauucuccuacaugu

SEQ ID NO: 1502241 - RNA, 19 nt, Homo sapiens
  misc_RNA (1)...(19): siRNA sense strand
ggaggacugugggagaauu

SEQ ID NO: 1502242 - RNA, 19 nt, Homo sapiens
  misc_RNA (1)...(19): siRNA sense strand
caagggagaagaaaccaaa

SEQ ID NO: 1502243 - RNA, 19 nt, Homo sapiens
  misc_RNA (1)...(19): siRNA sense strand
ggagaagaaaccaaagcua

SEQ ID NO: 1502244 - RNA, 19 nt, Homo sapiens
  misc_RNA (1)...(19): siRNA sense strand
uuaaggaaaugaugugcuu

SEQ ID NO: 1502245 - RNA, 19 nt, Homo sapiens
  misc_RNA (1)...(19): siRNA sense strand
gaugaagaaagcaaagauu

SEQ ID NO: 1502246 - RNA, 19 nt, Homo sapiens
  misc_RNA (1)...(19): siRNA sense strand
ccacagugcagaucaguug

SEQ ID NO: 1502247 - RNA, 19 nt, Homo sapiens
  misc_RNA (1)...(19): siRNA sense strand
gaagaaaccaaagcuaugg

SEQ ID NO: 1502248 - RNA, 19 nt, Homo sapiens
  misc_RNA (1)...(19): siRNA sense strand
ggucagcuguccaaagagu

SEQ ID NO: 1502249 - RNA, 19 nt, Homo sapiens
  misc_RNA (1)...(19): siRNA sense strand
ccugucacuuuaccuguua

SEQ ID NO: 1502250 - RNA, 19 nt, Homo sapiens
  misc_RNA (1)...(19): siRNA sense strand
gaaauucauccguagagau

SEQ ID NO: 1502251 - RNA, 19 nt, Homo sapiens
  misc_RNA (1)...(19): siRNA sense strand
aaacucaggcaguggauuu

SEQ ID NO: 1502252 - RNA, 19 nt, Homo sapiens
  misc_RNA (1)...(19): siRNA sense strand
gagauuuucuuuuggauga

SEQ ID NO: 1502253 - RNA, 19 nt, Homo sapiens
  misc_RNA (1)...(19): siRNA sense strand
acacacagaucaagguagu

SEQ ID NO: 1502254 - RNA, 19 nt, Homo sapiens
  misc_RNA (1)...(19): siRNA sense strand
agaucaagguagugaaauu

SEQ ID NO: 1502255 - RNA, 19 nt, Homo sapiens
  misc_RNA (1)...(19): siRNA sense strand
caguggauuucaucaacua

SEQ ID NO: 1502256 - RNA, 19 nt, Homo sapiens
  misc_RNA (1)...(19): siRNA sense strand
gcugagaguuggugcuaca

SEQ ID NO: 1502257 - RNA, 19 nt, Homo sapiens
  misc_RNA (1)...(19): siRNA sense strand
gagagucaacgggcauaua

SEQ ID NO: 1502258 - RNA, 19 nt, Homo sapiens
  misc_RNA (1)...(19): siRNA sense strand
cuggucagcuguccaaaga

SEQ ID NO: 1502259 - RNA, 19 nt, Homo sapiens
  misc_RNA (1)...(19): siRNA sense strand
acauguggaccaucaauaa

SEQ ID NO: 1502260 - RNA, 19 nt, Homo sapiens
  misc_RNA (1)...(19): siRNA sense strand
aagauucugucaacauuuc

SEQ ID NO: 1502261 - RNA, 19 nt, Homo sapiens
  misc_RNA (1)...(19): siRNA sense strand
ucaacgggcauauagguuu

SEQ ID NO: 1502262 - RNA, 19 nt, Homo sapiens
  misc_RNA (1)...(19): siRNA sense strand
aaaugguguuugcgaguaa

SEQ ID NO: 1502263 - RNA, 19 nt, Homo sapiens
  misc_RNA (1)...(19): siRNA sense strand
caaaggguuagaugaagaa

SEQ ID NO: 1502264 - RNA, 19 nt, Homo sapiens
  misc_RNA (1)...(19): siRNA sense strand
aaauucauccguagagauu

SEQ ID NO: 1502265 - RNA, 19 nt, Homo sapiens
  misc_RNA (1)...(19): siRNA sense strand
cgaggugaguguugugcaa

SEQ ID NO: 1502266 - RNA, 19 nt, Homo sapiens
  misc_RNA (1)...(19): siRNA sense strand
gaucaagguagugaaauuc

SEQ ID NO: 1502267 - RNA, 19 nt, Homo sapiens
  misc_RNA (1)...(19): siRNA sense strand
ugacaagcuuacccucuuc

SEQ ID NO: 1502268 - RNA, 19 nt, Homo sapiens
  misc_RNA (1)...(19): siRNA sense strand
gcaguggauuucaucaacu

SEQ ID NO: 1502269 - RNA, 19 nt, Homo sapiens
  misc_RNA (1)...(19): siRNA sense strand
gcuggcagaugaguuagga

SEQ ID NO: 1502270 - RNA, 19 nt, Homo sapiens
  misc_RNA (1)...(19): siRNA sense strand
caagauucugucaacauuu

SEQ ID NO: 1502271 - RNA, 19 nt, Homo sapiens
  misc_RNA (1)...(19): siRNA sense strand
gggaggaaaugggugaagu

SEQ ID NO: 1502272 - RNA, 19 nt, Homo sapiens
  misc_RNA (1)...(19): siRNA sense strand
caagaaauucauccguaga

SEQ ID NO: 1502273 - RNA, 19 nt, Homo sapiens
  misc_RNA (1)...(19): siRNA sense strand
gcaaagauuaccugucacu

SEQ ID NO: 1502274 - RNA, 19 nt, Homo sapiens
  misc_RNA (1)...(19): siRNA sense strand
gacugcugcuuguguguug

SEQ ID NO: 1502275 - RNA, 19 nt, Homo sapiens
  misc_RNA (1)...(19): siRNA sense strand
ggcaguggauuucaucaac

SEQ ID NO: 1502276 - RNA, 19 nt, Homo sapiens
  misc_RNA (1)...(19): siRNA sense strand
agaagaaaccaaagcuaug

SEQ ID NO: 1502277 - RNA, 19 nt, Homo sapiens
  misc_RNA (1)...(19): siRNA sense strand
uaggaggacugugggagaa

SEQ ID NO: 1502278 - RNA, 19 nt, Homo sapiens
  misc_RNA (1)...(19): siRNA sense strand
guagagauuuucuuuugga

SEQ ID NO: 1502279 - RNA, 19 nt, Homo sapiens
  misc_RNA (1)...(19): siRNA sense strand
gauaaacugaaaugguguu

SEQ ID NO: 1502280 - RNA, 19 nt, Homo sapiens
  misc_RNA (1)...(19): siRNA sense strand
uggauuucaucaacuauca

SEQ ID NO: 1502281 - RNA, 19 nt, Homo sapiens
  misc_RNA (1)...(19): siRNA sense strand
cagugcagaucaguugaaa

SEQ ID NO: 1502282 - RNA, 19 nt, Homo sapiens
  misc_RNA (1)...(19): siRNA sense strand
aggaugcccucugcaguaa

SEQ ID NO: 1502283 - RNA, 19 nt, Homo sapiens
  misc_RNA (1)...(19): siRNA sense strand
gcgcuuaaaggucaugugu

SEQ ID NO: 1502284 - RNA, 19 nt, Homo sapiens
  misc_RNA (1)...(19): siRNA sense strand
gauguggagccugaaguuu

SEQ ID NO: 1502285 - RNA, 19 nt, Homo sapiens
  misc_RNA (1)...(19): siRNA sense strand
agagugaaguucgggcaaa

SEQ ID NO: 1502286 - RNA, 19 nt, Homo sapiens
  misc_RNA (1)...(19): siRNA sense strand
ugaguguugugcaagauuc

SEQ ID NO: 1502287 - RNA, 19 nt, Homo sapiens
  misc_RNA (1)...(19): siRNA sense strand
caacgggcuucucccugau

SEQ ID NO: 1502288 - RNA, 19 nt, Homo sapiens
  misc_RNA (1)...(19): siRNA sense strand
agaaauucauccguagaga

SEQ ID NO: 1502289 - RNA, 19 nt, Homo sapiens
  misc_RNA (1)...(19): siRNA sense strand
ggagcaaaugauaaacuga

SEQ ID NO: 1502290 - RNA, 19 nt, Homo sapiens
  misc_RNA (1)...(19): siRNA sense strand
gaccaucaauaacuuuagc

SEQ ID NO: 1502291 - RNA, 19 nt, Homo sapiens
  misc_RNA (1)...(19): siRNA sense strand
ggaauuccaggcucacaag

SEQ ID NO: 1502292 - RNA, 19 nt, Homo sapiens
  misc_RNA (1)...(19): siRNA sense strand
gaaugccaagggagaagaa

SEQ ID NO: 1502293 - RNA, 19 nt, Homo sapiens
  misc_RNA (1)...(19): siRNA sense strand
acacagaucaagguaguga

SEQ ID NO: 1502294 - RNA, 19 nt, Homo sapiens
  misc_RNA (1)...(19): siRNA sense strand
gaagaaagcaaagauuacc

SEQ ID NO: 1502295 - RNA, 19 nt, Homo sapiens
  misc_RNA (1)...(19): siRNA sense strand
ccggcuggcagaugaguua

SEQ ID NO: 1502296 - RNA, 19 nt, Homo sapiens
  misc_RNA (1)...(19): siRNA sense strand
aaccaaagcuauggagagu

SEQ ID NO: 1502297 - RNA, 19 nt, Homo sapiens
  misc_RNA (1)...(19): siRNA sense strand
cuacacacagaucaaggua

SEQ ID NO: 1502298 - RNA, 19 nt, Homo sapiens
  misc_RNA (1)...(19): siRNA sense strand
gaggaaaugggugaaguca

SEQ ID NO: 1502299 - RNA, 19 nt, Homo sapiens
  misc_RNA (1)...(19): siRNA sense strand
ugaaauggaggagagcaaa

SEQ ID NO: 1502300 - RNA, 19 nt, Homo sapiens
  misc_RNA (1)...(19): siRNA sense strand
acagaucaagguagugaaa

SEQ ID NO: 1502301 - RNA, 19 nt, Homo sapiens
  misc_RNA (1)...(19): siRNA sense strand
ccguagagauuuucuuuug

SEQ ID NO: 1502302 - RNA, 19 nt, Homo sapiens
  misc_RNA (1)...(19): siRNA sense strand
ugaagaaagcaaagauuac

SEQ ID NO: 1502303 - RNA, 19 nt, Homo sapiens
  misc_RNA (1)...(19): siRNA sense strand
agaauucccgguucacaga

SEQ ID NO: 1502304 - RNA, 19 nt, Homo sapiens
  misc_RNA (1)...(19): siRNA sense strand
uguggaccaucaauaacuu

SEQ ID NO: 1502305 - RNA, 19 nt, Homo sapiens
  misc_RNA (1)...(19): siRNA sense strand
ggaggaaaugggugaaguc

SEQ ID NO: 1502306 - RNA, 19 nt, Homo sapiens
  misc_RNA (1)...(19): siRNA sense strand
gccagaauaccaugaacau

SEQ ID NO: 1502307 - RNA, 19 nt, Homo sapiens
  misc_RNA (1)...(19): siRNA sense strand
guggagaacgcugcagaaa

SEQ ID NO: 1502308 - RNA, 19 nt, Homo sapiens
  misc_RNA (1)...(19): siRNA sense strand
ggagaauucccgguucaca

SEQ ID NO: 1502309 - RNA, 19 nt, Homo sapiens
  misc_RNA (1)...(19): siRNA sense strand
uaucuuagcagcucguucu

SEQ ID NO: 1502310 - RNA, 19 nt, Homo sapiens
  misc_RNA (1)...(19): siRNA sense strand
gauuucaucaacuaucaug

SEQ ID NO: 1502311 - RNA, 19 nt, Homo sapiens
  misc_RNA (1)...(19): siRNA sense strand
gaaguucgggcaaaauuca

SEQ ID NO: 1502312 - RNA, 19 nt, Homo sapiens
  misc_RNA (1)...(19): siRNA sense strand
cgcaaacgccugaagcaau

SEQ ID NO: 1502313 - RNA, 19 nt, Homo sapiens
  misc_RNA (1)...(19): siRNA sense strand
gcucacaaggcuaucuuag

SEQ ID NO: 1502314 - RNA, 19 nt, Homo sapiens
  misc_RNA (1)...(19): siRNA sense strand
aggagcaaaugauaaacug

SEQ ID NO: 1502315 - RNA, 19 nt, Homo sapiens
  misc_RNA (1)...(19): siRNA sense strand
gcuucucccugaugacaag

SEQ ID NO: 1502316 - RNA, 19 nt, Homo sapiens
  misc_RNA (1)...(19): siRNA sense strand
aagaaucgaguugaaauca

SEQ ID NO: 1502317 - RNA, 19 nt, Homo sapiens
  misc_RNA (1)...(19): siRNA sense strand
ggaccaucaauaacuuuag

SEQ ID NO: 1502318 - RNA, 19 nt, Homo sapiens
  misc_RNA (1)...(19): siRNA sense strand
ggugaguguugugcaagau

SEQ ID NO: 1502319 - RNA, 19 nt, Homo sapiens
  misc_RNA (1)...(19): siRNA sense strand
augacaagcuuacccucuu

SEQ ID NO: 1502320 - RNA, 19 nt, Homo sapiens
  misc_RNA (1)...(19): siRNA sense strand
ucaagguagugaaauucuc

SEQ ID NO: 1502321 - RNA, 19 nt, Homo sapiens
  misc_RNA (1)...(19): siRNA sense strand
agucaaugguggugucaca

SEQ ID NO: 1502322 - RNA, 19 nt, Homo sapiens
  misc_RNA (1)...(19): siRNA sense strand
aggguuagaugaagaaagc

SEQ ID NO: 1502323 - RNA, 19 nt, Homo sapiens
  misc_RNA (1)...(19): siRNA sense strand
gaaauggaggagagcaaaa

SEQ ID NO: 1502324 - RNA, 19 nt, Homo sapiens
  misc_RNA (1)...(19): siRNA sense strand
gugcaagauucugucaaca

SEQ ID NO: 1502325 - RNA, 19 nt, Homo sapiens
  misc_RNA (1)...(19): siRNA sense strand
agagucaacgggcauauag

SEQ ID NO: 1502326 - RNA, 19 nt, Homo sapiens
  misc_RNA (1)...(19): siRNA sense strand
cuccaaaccucgacaaaau

SEQ ID NO: 1502327 - RNA, 19 nt, Homo sapiens
  misc_RNA (1)...(19): siRNA sense strand
gagcaaagaugcauuggaa

SEQ ID NO: 1502328 - RNA, 19 nt, Homo sapiens
  misc_RNA (1)...(19): siRNA sense strand
gcaacgaccucucccagua

SEQ ID NO: 1502329 - RNA, 19 nt, Homo sapiens
  misc_RNA (1)...(19): siRNA sense strand
gaugugagcuuucuaguca

SEQ ID NO: 1502330 - RNA, 19 nt, Homo sapiens
  misc_RNA (1)...(19): siRNA sense strand
ggaaaugccugaaccaaag

SEQ ID NO: 1502331 - RNA, 19 nt, Homo sapiens
  misc_RNA (1)...(19): siRNA sense strand
gcaauuaugugucugaaca

SEQ ID NO: 1502332 - RNA, 19 nt, Homo sapiens
  misc_RNA (1)...(19): siRNA sense strand
caauggaucuucaguauuc

SEQ ID NO: 1502333 - RNA, 19 nt, Homo sapiens
  misc_RNA (1)...(19): siRNA sense strand
ugaaggagguguagacuug

SEQ ID NO: 1502334 - RNA, 19 nt, Homo sapiens
  misc_RNA (1)...(19): siRNA sense strand
ggaauaacaucaccaaacu

SEQ ID NO: 1502335 - RNA, 19 nt, Homo sapiens
  misc_RNA (1)...(19): siRNA sense strand
ggaaagcaauuaugugucu

SEQ ID NO: 1502336 - RNA, 19 nt, Homo sapiens
  misc_RNA (1)...(19): siRNA sense strand
gcauagagccaaucacauu

SEQ ID NO: 1502337 - RNA, 19 nt, Homo sapiens
  misc_RNA (1)...(19): siRNA sense strand
gaaggcacagugaauauuu

SEQ ID NO: 1502338 - RNA, 19 nt, Homo sapiens
  misc_RNA (1)...(19): siRNA sense strand
cgaguggauugaucuaaua

SEQ ID NO: 1502339 - RNA, 19 nt, Homo sapiens
  misc_RNA (1)...(19): siRNA sense strand
ggaagacagacaaauuaua

SEQ ID NO: 1502340 - RNA, 19 nt, Homo sapiens
  misc_RNA (1)...(19): siRNA sense strand
gcaagcacacuguuaguuu

SEQ ID NO: 1502341 - RNA, 19 nt, Homo sapiens
  misc_RNA (1)...(19): siRNA sense strand
gaccaaaccgccaugauaa

SEQ ID NO: 1502342 - RNA, 19 nt, Homo sapiens
  misc_RNA (1)...(19): siRNA sense strand
ucccagaccuccaguuaua

SEQ ID NO: 1502343 - RNA, 19 nt, Homo sapiens
  misc_RNA (1)...(19): siRNA sense strand
ggauugaucuaauauuugg

SEQ ID NO: 1502344 - RNA, 19 nt, Homo sapiens
  misc_RNA (1)...(19): siRNA sense strand
ucuggaaauugcaguauua

SEQ ID NO: 1502345 - RNA, 19 nt, Homo sapiens
  misc_RNA (1)...(19): siRNA sense strand
cauccugccuugacaaauu

SEQ ID NO: 1502346 - RNA, 19 nt, Homo sapiens
  misc_RNA (1)...(19): siRNA sense strand
gcuagaacaucauuugaca

SEQ ID NO: 1502347 - RNA, 19 nt, Homo sapiens
  misc_RNA (1)...(19): siRNA sense strand
gaagagcaaagaugcauug

SEQ ID NO: 1502348 - RNA, 19 nt, Homo sapiens
  misc_RNA (1)...(19): siRNA sense strand
cagaauggaagauuugaua

SEQ ID NO: 1502349 - RNA, 19 nt, Homo sapiens
  misc_RNA (1)...(19): siRNA sense strand
gcucagaacuagauuuguc

SEQ ID NO: 1502350 - RNA, 19 nt, Homo sapiens
  misc_RNA (1)...(19): siRNA sense strand
ugacgccucuggugacuaa

SEQ ID NO: 1502351 - RNA, 19 nt, Homo sapiens
  misc_RNA (1)...(19): siRNA sense strand
gagaagguagccaugcuua

SEQ ID NO: 1502352 - RNA, 19 nt, Homo sapiens
  misc_RNA (1)...(19): siRNA sense strand
guauauggaugaaugaaca

SEQ ID NO: 1502353 - RNA, 19 nt, Homo sapiens
  misc_RNA (1)...(19): siRNA sense strand
gaaguuggauuugggaaag

SEQ ID NO: 1502354 - RNA, 19 nt, Homo sapiens
  misc_RNA (1)...(19): siRNA sense strand
ugaccaaaccgccaugaua

SEQ ID NO: 1502355 - RNA, 19 nt, Homo sapiens
  misc_RNA (1)...(19): siRNA sense strand
gcaaaacacuggccuggaa

SEQ ID NO: 1502356 - RNA, 19 nt, Homo sapiens
  misc_RNA (1)...(19): siRNA sense strand
ucaauagccugaaguugga

SEQ ID NO: 1502357 - RNA, 19 nt, Homo sapiens
  misc_RNA (1)...(19): siRNA sense strand
gaaaguggaagauguugug

SEQ ID NO: 1502358 - RNA, 19 nt, Homo sapiens
  misc_RNA (1)...(19): siRNA sense strand
gaacaguguagcaguauca

SEQ ID NO: 1502359 - RNA, 19 nt, Homo sapiens
  misc_RNA (1)...(19): siRNA sense strand
ggagaugccacugucauaa

SEQ ID NO: 1502360 - RNA, 19 nt, Homo sapiens
  misc_RNA (1)...(19): siRNA sense strand
caagggcagucaccaugaa

SEQ ID NO: 1502361 - RNA, 19 nt, Homo sapiens
  misc_RNA (1)...(19): siRNA sense strand
caaagaaggcacagugaau

SEQ ID NO: 1502362 - RNA, 19 nt, Homo sapiens
  misc_RNA (1)...(19): siRNA sense strand
caagcacacuguuaguuuc

SEQ ID NO: 1502363 - RNA, 19 nt, Homo sapiens
  misc_RNA (1)...(19): siRNA sense strand
uggccgagcuggaacauga

SEQ ID NO: 1502364 - RNA, 19 nt, Homo sapiens
  misc_RNA (1)...(19): siRNA sense strand
gcaaagaugcauuggaaag

SEQ ID NO: 1502365 - RNA, 19 nt, Homo sapiens
  misc_RNA (1)...(19): siRNA sense strand
ccaauagacacuucacaaa

SEQ ID NO: 1502366 - RNA, 19 nt, Homo sapiens
  misc_RNA (1)...(19): siRNA sense strand
gcugugacauguauaugga

SEQ ID NO: 1502367 - RNA, 19 nt, Homo sapiens
  misc_RNA (1)...(19): siRNA sense strand
aaagaaggcacagugaaua

SEQ ID NO: 1502368 - RNA, 19 nt, Homo sapiens
  misc_RNA (1)...(19): siRNA sense strand
acacuggccuggaauaaca

SEQ ID NO: 1502369 - RNA, 19 nt, Homo sapiens
  misc_RNA (1)...(19): siRNA sense strand
ggaaugcaaagcagaaaug

SEQ ID NO: 1502370 - RNA, 19 nt, Homo sapiens
  misc_RNA (1)...(19): siRNA sense strand
gcacauggaaugcaaagca

SEQ ID NO: 1502371 - RNA, 19 nt, Homo sapiens
  misc_RNA (1)...(19): siRNA sense strand
gaucuaauauuuggcuaca

SEQ ID NO: 1502372 - RNA, 19 nt, Homo sapiens
  misc_RNA (1)...(19): siRNA sense strand
cgcaauggaucuucaguau

SEQ ID NO: 1502373 - RNA, 19 nt, Homo sapiens
  misc_RNA (1)...(19): siRNA sense strand
gaaaaucagaggcuccuua

SEQ ID NO: 1502374 - RNA, 19 nt, Homo sapiens
  misc_RNA (1)...(19): siRNA sense strand
aaugaacaguguagcagua

SEQ ID NO: 1502375 - RNA, 19 nt, Homo sapiens
  misc_RNA (1)...(19): siRNA sense strand
uugaagaccugaccgaaga

SEQ ID NO: 1502376 - RNA, 19 nt, Homo sapiens
  misc_RNA (1)...(19): siRNA sense strand
acacaaaccuguauuuuca

SEQ ID NO: 1502377 - RNA, 19 nt, Homo sapiens
  misc_RNA (1)...(19): siRNA sense strand
ggaaguauuuugcacagaa

SEQ ID NO: 1502378 - RNA, 19 nt, Homo sapiens
  misc_RNA (1)...(19): siRNA sense strand
ccagauaacacuccaagau

SEQ ID NO: 1502379 - RNA, 19 nt, Homo sapiens
  misc_RNA (1)...(19): siRNA sense strand
gcaauggaucuucaguauu

SEQ ID NO: 1502380 - RNA, 19 nt, Homo sapiens
  misc_RNA (1)...(19): siRNA sense strand
cgacaucuaccuaaaguuc

SEQ ID NO: 1502381 - RNA, 19 nt, Homo sapiens
  misc_RNA (1)...(19): siRNA sense strand
gcagucaccaugaaaggaa

SEQ ID NO: 1502382 - RNA, 19 nt, Homo sapiens
  misc_RNA (1)...(19): siRNA sense strand
guucaacaguauugcagaa

SEQ ID NO: 1502383 - RNA, 19 nt, Homo sapiens
  misc_RNA (1)...(19): siRNA sense strand
uaaugcagauagaauguuc

SEQ ID NO: 1502384 - RNA, 19 nt, Homo sapiens
  misc_RNA (1)...(19): siRNA sense strand
ggauugcaccagaguauau

SEQ ID NO: 1502385 - RNA, 19 nt, Homo sapiens
  misc_RNA (1)...(19): siRNA sense strand
agauaacacuccaagaugu

SEQ ID NO: 1502386 - RNA, 19 nt, Homo sapiens
  misc_RNA (1)...(19): siRNA sense strand
ggacaccuuuccaacuauc

SEQ ID NO: 1502387 - RNA, 19 nt, Homo sapiens
  misc_RNA (1)...(19): siRNA sense strand
ggacaugaugaugcuguua

SEQ ID NO: 1502388 - RNA, 19 nt, Homo sapiens
  misc_RNA (1)...(19): siRNA sense strand
gaagacgccaggacacguu

SEQ ID NO: 1502389 - RNA, 19 nt, Homo sapiens
  misc_RNA (1)...(19): siRNA sense strand
guuccgacaucuaccuaaa

SEQ ID NO: 1502390 - RNA, 19 nt, Homo sapiens
  misc_RNA (1)...(19): siRNA sense strand
auucagggauuguauguga

SEQ ID NO: 1502391 - RNA, 19 nt, Homo sapiens
  misc_RNA (1)...(19): siRNA sense strand
gacagaugguugacgaugu

SEQ ID NO: 1502392 - RNA, 19 nt, Homo sapiens
  misc_RNA (1)...(19): siRNA sense strand
ccucugggcuuggaaguau

SEQ ID NO: 1502393 - RNA, 19 nt, Homo sapiens
  misc_RNA (1)...(19): siRNA sense strand
acauguauauggaugaaug

SEQ ID NO: 1502394 - RNA, 19 nt, Homo sapiens
  misc_RNA (1)...(19): siRNA sense strand
gauuccaccuugaagaugu

SEQ ID NO: 1502395 - RNA, 19 nt, Homo sapiens
  misc_RNA (1)...(19): siRNA sense strand
caacggauuuuaaagaguu

SEQ ID NO: 1502396 - RNA, 19 nt, Homo sapiens
  misc_RNA (1)...(19): siRNA sense strand
caacaguauugcagaaacu

SEQ ID NO: 1502397 - RNA, 19 nt, Homo sapiens
  misc_RNA (1)...(19): siRNA sense strand
gauaaugcagauagaaugu

SEQ ID NO: 1502398 - RNA, 19 nt, Homo sapiens
  misc_RNA (1)...(19): siRNA sense strand
aaccaaaguucauguaugg

SEQ ID NO: 1502399 - RNA, 19 nt, Homo sapiens
  misc_RNA (1)...(19): siRNA sense strand
agacguugcuucagcuuca

SEQ ID NO: 1502400 - RNA, 19 nt, Homo sapiens
  misc_RNA (1)...(19): siRNA sense strand
ccaguuauaaugcuucuau

SEQ ID NO: 1502401 - RNA, 19 nt, Homo sapiens
  misc_RNA (1)...(19): siRNA sense strand
gggaagacagacaaauuau

SEQ ID NO: 1502402 - RNA, 19 nt, Homo sapiens
  misc_RNA (1)...(19): siRNA sense strand
ugacauguauauggaugaa

SEQ ID NO: 1502403 - RNA, 19 nt, Homo sapiens
  misc_RNA (1)...(19): siRNA sense strand
ucacaacggccaccuuaau

SEQ ID NO: 1502404 - RNA, 19 nt, Homo sapiens
  misc_RNA (1)...(19): siRNA sense strand
ccucacaacggccaccuua

SEQ ID NO: 1502405 - RNA, 19 nt, Homo sapiens
  misc_RNA (1)...(19): siRNA sense strand
ggcuuuaucgucuuguuua

SEQ ID NO: 1502406 - RNA, 19 nt, Homo sapiens
  misc_RNA (1)...(19): siRNA sense strand
caauagacacuucacaaag

SEQ ID NO: 1502407 - RNA, 19 nt, Homo sapiens
  misc_RNA (1)...(19): siRNA sense strand
caggugcugugacauguau

SEQ ID NO: 1502408 - RNA, 19 nt, Homo sapiens
  misc_RNA (1)...(19): siRNA sense strand
gagaauacagggccacaca

SEQ ID NO: 1502409 - RNA, 19 nt, Homo sapiens
  misc_RNA (1)...(19): siRNA sense strand
ccaaagaaggcacagugaa

SEQ ID NO: 1502410 - RNA, 19 nt, Homo sapiens
  misc_RNA (1)...(19): siRNA sense strand
agaauucuauggugaugau

SEQ ID NO: 1502411 - RNA, 19 nt, Homo sapiens
  misc_RNA (1)...(19): siRNA sense strand
cgaaaccugugguccagau

SEQ ID NO: 1502412 - RNA, 19 nt, Homo sapiens
  misc_RNA (1)...(19): siRNA sense strand
aauagacacuucacaaagg

SEQ ID NO: 1502413 - RNA, 19 nt, Homo sapiens
  misc_RNA (1)...(19): siRNA sense strand
guacuacuuugaacagcau

SEQ ID NO: 1502414 - RNA, 19 nt, Homo sapiens
  misc_RNA (1)...(19): siRNA sense strand
caugacaacaggcuauauu

SEQ ID NO: 1502415 - RNA, 19 nt, Homo sapiens
  misc_RNA (1)...(19): siRNA sense strand
gaucuucaguauucacaac

SEQ ID NO: 1502416 - RNA, 19 nt, Homo sapiens
  misc_RNA (1)...(19): siRNA sense strand
cagauaacacuccaagaug

SEQ ID NO: 1502417 - RNA, 19 nt, Homo sapiens
  misc_RNA (1)...(19): siRNA sense strand
auaauguuguugcaccaua

SEQ ID NO: 1502418 - RNA, 19 nt, Homo sapiens
  misc_RNA (1)...(19): siRNA sense strand
uaauguuguugcaccauau

SEQ ID NO: 1502419 - RNA, 19 nt, Homo sapiens
  misc_RNA (1)...(19): siRNA sense strand
ggggaagacagacaaauua

SEQ ID NO: 1502420 - RNA, 19 nt, Homo sapiens
  misc_RNA (1)...(19): siRNA sense strand
gagacaaggaggacagaug

SEQ ID NO: 1502421 - RNA, 19 nt, Homo sapiens
  misc_RNA (1)...(19): siRNA sense strand
gccaauagacacuucacaa

SEQ ID NO: 1502422 - RNA, 19 nt, Homo sapiens
  misc_RNA (1)...(19): siRNA sense strand
caugaugucaguguagaua

SEQ ID NO: 1502423 - RNA, 19 nt, Homo sapiens
  misc_RNA (1)...(19): siRNA sense strand
gacaacaggcuauauucug

SEQ ID NO: 1502424 - RNA, 19 nt, Homo sapiens
  misc_RNA (1)...(19): siRNA sense strand
gaugaugcuguuaguaaga

SEQ ID NO: 1502425 - RNA, 19 nt, Homo sapiens
  misc_RNA (1)...(19): siRNA sense strand
ccacaaagaagcaguuacu

SEQ ID NO: 1502426 - RNA, 19 nt, Homo sapiens
  misc_RNA (1)...(19): siRNA sense strand
ccccaaaguuuaaaaguuu

SEQ ID NO: 1502427 - RNA, 19 nt, Homo sapiens
  misc_RNA (1)...(19): siRNA sense strand
cagccaaucugaaaggaua

SEQ ID NO: 1502428 - RNA, 19 nt, Homo sapiens
  misc_RNA (1)...(19): siRNA sense strand
gcaccaaccacguggaaua

SEQ ID NO: 1502429 - RNA, 19 nt, Homo sapiens
  misc_RNA (1)...(19): siRNA sense strand
gcuaugacccuuaugcaaa

SEQ ID NO: 1502430 - RNA, 19 nt, Homo sapiens
  misc_RNA (1)...(19): siRNA sense strand
agaagugccugccugugua

SEQ ID NO: 1502431 - RNA, 19 nt, Homo sapiens
  misc_RNA (1)...(19): siRNA sense strand
cagcaccuccucccacuua

SEQ ID NO: 1502432 - RNA, 19 nt, Homo sapiens
  misc_RNA (1)...(19): siRNA sense strand
gagaagugccugccugugu

SEQ ID NO: 1502433 - RNA, 19 nt, Homo sapiens
  misc_RNA (1)...(19): siRNA sense strand
gcucggcuaugacccuuau

SEQ ID NO: 1502434 - RNA, 19 nt, Homo sapiens
  misc_RNA (1)...(19): siRNA sense strand
uggcucagcucggcuauga

SEQ ID NO: 1502435 - RNA, 19 nt, Homo sapiens
  misc_RNA (1)...(19): siRNA sense strand
gcuuugaccucagcagcua

SEQ ID NO: 1502436 - RNA, 19 nt, Homo sapiens
  misc_RNA (1)...(19): siRNA sense strand
gaaaggggacuauaaaaca

SEQ ID NO: 1502437 - RNA, 19 nt, Homo sapiens
  misc_RNA (1)...(19): siRNA sense strand
gcauggagguaggcaagga

SEQ ID NO: 1502438 - RNA, 19 nt, Homo sapiens
  misc_RNA (1)...(19): siRNA sense strand
gcaacaaggacccauuuac

SEQ ID NO: 1502439 - RNA, 19 nt, Homo sapiens
  misc_RNA (1)...(19): siRNA sense strand
acacacagcgggucuugaa

SEQ ID NO: 1502440 - RNA, 19 nt, Homo sapiens
  misc_RNA (1)...(19): siRNA sense strand
gcaaggccaugccgcucau

SEQ ID NO: 1502441 - RNA, 19 nt, Homo sapiens
  misc_RNA (1)...(19): siRNA sense strand
caacaaggacccauuuacg

SEQ ID NO: 1502442 - RNA, 19 nt, Homo sapiens
  misc_RNA (1)...(19): siRNA sense strand
ccaaguuccugcugauggu

SEQ ID NO: 1502443 - RNA, 19 nt, Homo sapiens
  misc_RNA (1)...(19): siRNA sense strand
aggaggagcuggugauggu

SEQ ID NO: 1502444 - RNA, 19 nt, Homo sapiens
  misc_RNA (1)...(19): siRNA sense strand
caacacacagcgggucuug

SEQ ID NO: 1502445 - RNA, 19 nt, Homo sapiens
  misc_RNA (1)...(19): siRNA sense strand
ccacguggaauaccgcuau

SEQ ID NO: 1502446 - RNA, 19 nt, Homo sapiens
  misc_RNA (1)...(19): siRNA sense strand
ccaugccgcucaucuucga

SEQ ID NO: 1502447 - RNA, 19 nt, Homo sapiens
  misc_RNA (1)...(19): siRNA sense strand
ggacugcaggugcuagagu

SEQ ID NO: 1502448 - RNA, 19 nt, Homo sapiens
  misc_RNA (1)...(19): siRNA sense strand
aaacaccagccaaucugaa

SEQ ID NO: 1502449 - RNA, 19 nt, Homo sapiens
  misc_RNA (1)...(19): siRNA sense strand
acgcuguccuccaccauga

SEQ ID NO: 1502450 - RNA, 19 nt, Homo sapiens
  misc_RNA (1)...(19): siRNA sense strand
ggccaugccgcucaucuuc

SEQ ID NO: 1502451 - RNA, 19 nt, Homo sapiens
  misc_RNA (1)...(19): siRNA sense strand
cgaggagacccgcaucauc

SEQ ID NO: 1502452 - RNA, 19 nt, Homo sapiens
  misc_RNA (1)...(19): siRNA sense strand
gggcaccaaccacguggaa

SEQ ID NO: 1502453 - RNA, 19 nt, Homo sapiens
  misc_RNA (1)...(19): siRNA sense strand
cuaugacccuuaugcaaac

SEQ ID NO: 1502454 - RNA, 19 nt, Homo sapiens
  misc_RNA (1)...(19): siRNA sense strand
gcucaaguccucggucuac

SEQ ID NO: 1502455 - RNA, 19 nt, Homo sapiens
  misc_RNA (1)...(19): siRNA sense strand
ggagguaggcaaggagaag

SEQ ID NO: 1502456 - RNA, 19 nt, Homo sapiens
  misc_RNA (1)...(19): siRNA sense strand
acaaggccaucgaggugau

SEQ ID NO: 1502457 - RNA, 19 nt, Homo sapiens
  misc_RNA (1)...(19): siRNA sense strand
gcaggaggagcuggugaug

SEQ ID NO: 1502458 - RNA, 19 nt, Homo sapiens
  misc_RNA (1)...(19): siRNA sense strand
cugcaacaaggacccauuu

SEQ ID NO: 1502459 - RNA, 19 nt, Homo sapiens
  misc_RNA (1)...(19): siRNA sense strand
uccgugcacuccaugauca

SEQ ID NO: 1502460 - RNA, 19 nt, Homo sapiens
  misc_RNA (1)...(19): siRNA sense strand
acacagcgggucuugaaag

SEQ ID NO: 1502461 - RNA, 19 nt, Homo sapiens
  misc_RNA (1)...(19): siRNA sense strand
ucaagcucauccucgacuu

SEQ ID NO: 1502462 - RNA, 19 nt, Homo sapiens
  misc_RNA (1)...(19): siRNA sense strand
caugaucacgcgcaaaguc

SEQ ID NO: 1502463 - RNA, 19 nt, Homo sapiens
  misc_RNA (1)...(19): siRNA sense strand
gcucugaggugaccgcaua

SEQ ID NO: 1502464 - RNA, 19 nt, Homo sapiens
  misc_RNA (1)...(19): siRNA sense strand
cuuccuaccucuucuauua

SEQ ID NO: 1502465 - RNA, 19 nt, Homo sapiens
  misc_RNA (1)...(19): siRNA sense strand
ugaacaagaugcuggagua

SEQ ID NO: 1502466 - RNA, 19 nt, Homo sapiens
  misc_RNA (1)...(19): siRNA sense strand
gaaccugcgcuccacguua

SEQ ID NO: 1502467 - RNA, 19 nt, Homo sapiens
  misc_RNA (1)...(19): siRNA sense strand
guuaauggcccucaugauu

SEQ ID NO: 1502468 - RNA, 19 nt, Homo sapiens
  misc_RNA (1)...(19): siRNA sense strand
gaagcucugucuccguuga

SEQ ID NO: 1502469 - RNA, 19 nt, Homo sapiens
  misc_RNA (1)...(19): siRNA sense strand
gaagucaauuacacgaaga

SEQ ID NO: 1502470 - RNA, 19 nt, Homo sapiens
  misc_RNA (1)...(19): siRNA sense strand
cuacauggcugcugugaac

SEQ ID NO: 1502471 - RNA, 19 nt, Homo sapiens
  misc_RNA (1)...(19): siRNA sense strand
ucaccugucucaucaacaa

SEQ ID NO: 1502472 - RNA, 19 nt, Homo sapiens
  misc_RNA (1)...(19): siRNA sense strand
ggcaucaccugucucauca

SEQ ID NO: 1502473 - RNA, 19 nt, Homo sapiens
  misc_RNA (1)...(19): siRNA sense strand
gccaggagcaugagacaaa

SEQ ID NO: 1502474 - RNA, 19 nt, Homo sapiens
  misc_RNA (1)...(19): siRNA sense strand
ugagacaaaugaacagcaa

SEQ ID NO: 1502475 - RNA, 19 nt, Homo sapiens
  misc_RNA (1)...(19): siRNA sense strand
aaccugggcuucaccauug

SEQ ID NO: 1502476 - RNA, 19 nt, Homo sapiens
  misc_RNA (1)...(19): siRNA sense strand
ugaccaaccugcugcuugu

SEQ ID NO: 1502477 - RNA, 19 nt, Homo sapiens
  misc_RNA (1)...(19): siRNA sense strand
aaccugcgcuccacguuaa

SEQ ID NO: 1502478 - RNA, 19 nt, Homo sapiens
  misc_RNA (1)...(19): siRNA sense strand
ucaauuacacgaagaagau

SEQ ID NO: 1502479 - RNA, 19 nt, Homo sapiens
  misc_RNA (1)...(19): siRNA sense strand
ugagaggucuguccccuua

SEQ ID NO: 1502480 - RNA, 19 nt, Homo sapiens
  misc_RNA (1)...(19): siRNA sense strand
caaaugaacagcaacaaaa

SEQ ID NO: 1502481 - RNA, 19 nt, Homo sapiens
  misc_RNA (1)...(19): siRNA sense strand
ccucaucagugcuguguuc

SEQ ID NO: 1502482 - RNA, 19 nt, Homo sapiens
  misc_RNA (1)...(19): siRNA sense strand
caaccugggcuucaccauu

SEQ ID NO: 1502483 - RNA, 19 nt, Homo sapiens
  misc_RNA (1)...(19): siRNA sense strand
agaccacgcuacugcaaga

SEQ ID NO: 1502484 - RNA, 19 nt, Homo sapiens
  misc_RNA (1)...(19): siRNA sense strand
gaacgagggcuucuauucc

SEQ ID NO: 1502485 - RNA, 19 nt, Homo sapiens
  misc_RNA (1)...(19): siRNA sense strand
uaauggcccucaugauugg

SEQ ID NO: 1502486 - RNA, 19 nt, Homo sapiens
  misc_RNA (1)...(19): siRNA sense strand
uuaauggcccucaugauug

SEQ ID NO: 1502487 - RNA, 19 nt, Homo sapiens
  misc_RNA (1)...(19): siRNA sense strand
uuacgccucuucugccauu

SEQ ID NO: 1502488 - RNA, 19 nt, Homo sapiens
  misc_RNA (1)...(19): siRNA sense strand
gaaucugggccuccugcua

SEQ ID NO: 1502489 - RNA, 19 nt, Homo sapiens
  misc_RNA (1)...(19): siRNA sense strand
ucucuaugcugcaguguuc

SEQ ID NO: 1502490 - RNA, 19 nt, Homo sapiens
  misc_RNA (1)...(19): siRNA sense strand
acaaaugaacagcaacaaa

SEQ ID NO: 1502491 - RNA, 19 nt, Homo sapiens
  misc_RNA (1)...(19): siRNA sense strand
gcucaccaaugccaucagu

SEQ ID NO: 1502492 - RNA, 19 nt, Homo sapiens
  misc_RNA (1)...(19): siRNA sense strand
ggacgggguugcuaccaaa

SEQ ID NO: 1502493 - RNA, 19 nt, Homo sapiens
  misc_RNA (1)...(19): siRNA sense strand
cagagacaguuggguucua

SEQ ID NO: 1502494 - RNA, 19 nt, Homo sapiens
  misc_RNA (1)...(19): siRNA sense strand
ggacguggaagcucugucu

SEQ ID NO: 1502495 - RNA, 19 nt, Homo sapiens
  misc_RNA (1)...(19): siRNA sense strand
ggccugcagucccucauca

SEQ ID NO: 1502496 - RNA, 19 nt, Homo sapiens
  misc_RNA (1)...(19): siRNA sense strand
guucuacuccuccgucuuc

SEQ ID NO: 1502497 - RNA, 19 nt, Homo sapiens
  misc_RNA (1)...(19): siRNA sense strand
ccaggagcaugagacaaau

SEQ ID NO: 1502498 - RNA, 19 nt, Homo sapiens
  misc_RNA (1)...(19): siRNA sense strand
cagcuguugugccuucuca

SEQ ID NO: 1502499 - RNA, 19 nt, Homo sapiens
  misc_RNA (1)...(19): siRNA sense strand
ugccuuaucuuucugaacu

SEQ ID NO: 1502500 - RNA, 19 nt, Homo sapiens
  misc_RNA (1)...(19): siRNA sense strand
ccaacaccacccaggauga

SEQ ID NO: 1502501 - RNA, 19 nt, Homo sapiens
  misc_RNA (1)...(19): siRNA sense strand
uuacaccuccaguuuguga

SEQ ID NO: 1502502 - RNA, 19 nt, Homo sapiens
  misc_RNA (1)...(19): siRNA sense strand
aaucugggccuccugcuau

SEQ ID NO: 1502503 - RNA, 19 nt, Homo sapiens
  misc_RNA (1)...(19): siRNA sense strand
uggcugcugugaacaagau

SEQ ID NO: 1502504 - RNA, 19 nt, Homo sapiens
  misc_RNA (1)...(19): siRNA sense strand
guucccauccaaccacuuu

SEQ ID NO: 1502505 - RNA, 19 nt, Homo sapiens
  misc_RNA (1)...(19): siRNA sense strand
caucaccugucucaucaac

SEQ ID NO: 1502506 - RNA, 19 nt, Homo sapiens
  misc_RNA (1)...(19): siRNA sense strand
gagcaugagacaaaugaac

SEQ ID NO: 1502507 - RNA, 19 nt, Homo sapiens
  misc_RNA (1)...(19): siRNA sense strand
gaacaagaugcuggaguac

SEQ ID NO: 1502508 - RNA, 19 nt, Homo sapiens
  misc_RNA (1)...(19): siRNA sense strand
gcggaucaucuucuacaug

SEQ ID NO: 1502509 - RNA, 19 nt, Homo sapiens
  misc_RNA (1)...(19): siRNA sense strand
uauucucacuccugggauu

SEQ ID NO: 1502510 - RNA, 19 nt, Homo sapiens
  misc_RNA (1)...(19): siRNA sense strand
caccauuguucgagguuuc

SEQ ID NO: 1502511 - RNA, 19 nt, Homo sapiens
  misc_RNA (1)...(19): siRNA sense strand
acuuacaccuccaguuugu

SEQ ID NO: 1502512 - RNA, 19 nt, Homo sapiens
  misc_RNA (1)...(19): siRNA sense strand
acaagaugcuggaguaccu

SEQ ID NO: 1502513 - RNA, 19 nt, Homo sapiens
  misc_RNA (1)...(19): siRNA sense strand
ucacgcugcccaacauguu

SEQ ID NO: 1502514 - RNA, 19 nt, Homo sapiens
  misc_RNA (1)...(19): siRNA sense strand
cuucuucucugcuguacuc

SEQ ID NO: 1502515 - RNA, 19 nt, Homo sapiens
  misc_RNA (1)...(19): siRNA sense strand
ccucauuggcuacaucaug

SEQ ID NO: 1502516 - RNA, 19 nt, Homo sapiens
  misc_RNA (1)...(19): siRNA sense strand
ggaaccugcgcuccacguu

SEQ ID NO: 1502517 - RNA, 19 nt, Homo sapiens
  misc_RNA (1)...(19): siRNA sense strand
aacgagggcuucuauucca

SEQ ID NO: 1502518 - RNA, 19 nt, Homo sapiens
  misc_RNA (1)...(19): siRNA sense strand
uggcaucaccugucucauc

SEQ ID NO: 1502519 - RNA, 19 nt, Homo sapiens
  misc_RNA (1)...(19): siRNA sense strand
aaagguggcagagacaguu

SEQ ID NO: 1502520 - RNA, 19 nt, Homo sapiens
  misc_RNA (1)...(19): siRNA sense strand
agacaaaugaacagcaaca

SEQ ID NO: 1502521 - RNA, 19 nt, Homo sapiens
  misc_RNA (1)...(19): siRNA sense strand
ugacccagcugcggaucau

SEQ ID NO: 1502522 - RNA, 19 nt, Homo sapiens
  misc_RNA (1)...(19): siRNA sense strand
ccucaugauuggcucuuac

SEQ ID NO: 1502523 - RNA, 19 nt, Homo sapiens
  misc_RNA (1)...(19): siRNA sense strand
gacaaaugaacagcaacaa

SEQ ID NO: 1502524 - RNA, 19 nt, Homo sapiens
  misc_RNA (1)...(19): siRNA sense strand
gaagaagaucaagcugagu

SEQ ID NO: 1502525 - RNA, 19 nt, Homo sapiens
  misc_RNA (1)...(19): siRNA sense strand
ggacgucuucuaccuguuu

SEQ ID NO: 1502526 - RNA, 19 nt, Homo sapiens
  misc_RNA (1)...(19): siRNA sense strand
gcucggaacccuaugaaga

SEQ ID NO: 1502527 - RNA, 19 nt, Homo sapiens
  misc_RNA (1)...(19): siRNA sense strand
gguggaagacccgcgauua

SEQ ID NO: 1502528 - RNA, 19 nt, Homo sapiens
  misc_RNA (1)...(19): siRNA sense strand
gaagaagaccgaggagauc

SEQ ID NO: 1502529 - RNA, 19 nt, Homo sapiens
  misc_RNA (1)...(19): siRNA sense strand
guggaagacccgcgauuaa

SEQ ID NO: 1502530 - RNA, 19 nt, Homo sapiens
  misc_RNA (1)...(19): siRNA sense strand
ggaagacccgcgauuaaac

SEQ ID NO: 1502531 - RNA, 19 nt, Homo sapiens
  misc_RNA (1)...(19): siRNA sense strand
cgacugcgaccucuacuuc

SEQ ID NO: 1502532 - RNA, 19 nt, Homo sapiens
  misc_RNA (1)...(19): siRNA sense strand
ugaagaagaccgaggagau

SEQ ID NO: 1502533 - RNA, 19 nt, Homo sapiens
  misc_RNA (1)...(19): siRNA sense strand
uacaaccucucccgcaaga

SEQ ID NO: 1502534 - RNA, 19 nt, Homo sapiens
  misc_RNA (1)...(19): siRNA sense strand
caagggcaaguacauguug

SEQ ID NO: 1502535 - RNA, 19 nt, Homo sapiens
  misc_RNA (1)...(19): siRNA sense strand
ggaggaaacccuacaaccu

SEQ ID NO: 1502536 - RNA, 19 nt, Homo sapiens
  misc_RNA (1)...(19): siRNA sense strand
gcaccuggacgucuucuac

SEQ ID NO: 1502537 - RNA, 19 nt, Homo sapiens
  misc_RNA (1)...(19): siRNA sense strand
gcgaggacuucuccaacuc

SEQ ID NO: 1502538 - RNA, 19 nt, Homo sapiens
  misc_RNA (1)...(19): siRNA sense strand
ggaacccuaugaagaagac

SEQ ID NO: 1502539 - RNA, 19 nt, Homo sapiens
  misc_RNA (1)...(19): siRNA sense strand
ucuacuuccuggagaacua

SEQ ID NO: 1502540 - RNA, 19 nt, Homo sapiens
  misc_RNA (1)...(19): siRNA sense strand
uggaagacccgcgauuaaa

SEQ ID NO: 1502541 - RNA, 19 nt, Homo sapiens
  misc_RNA (1)...(19): siRNA sense strand
guacggcaccgggaggaaa

SEQ ID NO: 1502542 - RNA, 19 nt, Homo sapiens
  misc_RNA (1)...(19): siRNA sense strand
cggaggaggagcugaagaa

SEQ ID NO: 1502543 - RNA, 19 nt, Homo sapiens
  misc_RNA (1)...(19): siRNA sense strand
gcaagacccacauccucau

SEQ ID NO: 1502544 - RNA, 19 nt, Homo sapiens
  misc_RNA (1)...(19): siRNA sense strand
gcaagugcgggcuacucaa

SEQ ID NO: 1502545 - RNA, 19 nt, Homo sapiens
  misc_RNA (1)...(19): siRNA sense strand
gcucaagggcaaguacaug

SEQ ID NO: 1502546 - RNA, 19 nt, Homo sapiens
  misc_RNA (1)...(19): siRNA sense strand
gaagaccgaggagaucuac

SEQ ID NO: 1502547 - RNA, 19 nt, Homo sapiens
  misc_RNA (1)...(19): siRNA sense strand
ucaagggcaaguacauguu

SEQ ID NO: 1502548 - RNA, 19 nt, Homo sapiens
  misc_RNA (1)...(19): siRNA sense strand
gacgucuucuaccuguuug

SEQ ID NO: 1502549 - RNA, 19 nt, Homo sapiens
  misc_RNA (1)...(19): siRNA sense strand
gaagacccgcgauuaaacc

SEQ ID NO: 1502550 - RNA, 19 nt, Homo sapiens
  misc_RNA (1)...(19): siRNA sense strand
gggacugugugcgcaagug

SEQ ID NO: 1502551 - RNA, 19 nt, Homo sapiens
  misc_RNA (1)...(19): siRNA sense strand
caacuucgcuccguacuuu

SEQ ID NO: 1502552 - RNA, 19 nt, Homo sapiens
  misc_RNA (1)...(19): siRNA sense strand
cugcaucacucucacuuua

SEQ ID NO: 1502553 - RNA, 19 nt, Homo sapiens
  misc_RNA (1)...(19): siRNA sense strand
gagcgucugggaacuguuu

SEQ ID NO: 1502554 - RNA, 19 nt, Homo sapiens
  misc_RNA (1)...(19): siRNA sense strand
caagauccacccugacuuc

SEQ ID NO: 1502555 - RNA, 19 nt, Homo sapiens
  misc_RNA (1)...(19): siRNA sense strand
gcaucacucucacuuuaac

SEQ ID NO: 1502556 - RNA, 19 nt, Homo sapiens
  misc_RNA (1)...(19): siRNA sense strand
ccgugacgcugcugcauug

SEQ ID NO: 1502557 - RNA, 19 nt, Homo sapiens
  misc_RNA (1)...(19): siRNA sense strand
ccggucaucuucuccauca

SEQ ID NO: 1502558 - RNA, 19 nt, Homo sapiens
  misc_RNA (1)...(19): siRNA sense strand
cuaccagcaugugauguuu

SEQ ID NO: 1502559 - RNA, 19 nt, Homo sapiens
  misc_RNA (1)...(19): siRNA sense strand
ucugggaacuguuuucuuu

SEQ ID NO: 1502560 - RNA, 19 nt, Homo sapiens
  misc_RNA (1)...(19): siRNA sense strand
ccacuccggcuacaacuuc

SEQ ID NO: 1502561 - RNA, 19 nt, Homo sapiens
  misc_RNA (1)...(19): siRNA sense strand
gcgcuggcaacgcaguaua

SEQ ID NO: 1502562 - RNA, 19 nt, Homo sapiens
  misc_RNA (1)...(19): siRNA sense strand
ggaccacuccggcuacaac

SEQ ID NO: 1502563 - RNA, 19 nt, Homo sapiens
  misc_RNA (1)...(19): siRNA sense strand
cagcaugugauguuugugu

SEQ ID NO: 1502564 - RNA, 19 nt, Homo sapiens
  misc_RNA (1)...(19): siRNA sense strand
gcaacuucgcuccguacuu

SEQ ID NO: 1502565 - RNA, 19 nt, Homo sapiens
  misc_RNA (1)...(19): siRNA sense strand
guaccgcaccuuccacaag

SEQ ID NO: 1502566 - RNA, 19 nt, Homo sapiens
  misc_RNA (1)...(19): siRNA sense strand
guggucaacaucuggcuuu

SEQ ID NO: 1502567 - RNA, 19 nt, Homo sapiens
  misc_RNA (1)...(19): siRNA sense strand
ucacuuuaacugcaacuuc

SEQ ID NO: 1502568 - RNA, 19 nt, Homo sapiens
  misc_RNA (1)...(19): siRNA sense strand
ggcuacaacuucccuuggu

SEQ ID NO: 1502569 - RNA, 19 nt, Homo sapiens
  misc_RNA (1)...(19): siRNA sense strand
gaggaccacuccggcuaca

SEQ ID NO: 1502570 - RNA, 19 nt, Homo sapiens
  misc_RNA (1)...(19): siRNA sense strand
ucuucuccaucaccacaua

SEQ ID NO: 1502571 - RNA, 19 nt, Homo sapiens
  misc_RNA (1)...(19): siRNA sense strand
gcuccguacuuuacacacu

SEQ ID NO: 1502572 - RNA, 19 nt, Homo sapiens
  misc_RNA (1)...(19): siRNA sense strand
gggcuucuucgacaugaug

SEQ ID NO: 1502573 - RNA, 19 nt, Homo sapiens
  misc_RNA (1)...(19): siRNA sense strand
ucaccacccugaccuucca

SEQ ID NO: 1502574 - RNA, 19 nt, Homo sapiens
  misc_RNA (1)...(19): siRNA sense strand
gcaugugauguuuguguuc

SEQ ID NO: 1502575 - RNA, 19 nt, Homo sapiens
  misc_RNA (1)...(19): siRNA sense strand
gaacacgccuuugaucuuu

SEQ ID NO: 1502576 - RNA, 19 nt, Homo sapiens
  misc_RNA (1)...(19): siRNA sense strand
ccaguucaccgaaagauua

SEQ ID NO: 1502577 - RNA, 19 nt, Homo sapiens
  misc_RNA (1)...(19): siRNA sense strand
ggagagagcaucccuuuag

SEQ ID NO: 1502578 - RNA, 19 nt, Homo sapiens
  misc_RNA (1)...(19): siRNA sense strand
caacauccuuucuuagcuu

SEQ ID NO: 1502579 - RNA, 19 nt, Homo sapiens
  misc_RNA (1)...(19): siRNA sense strand
gagagagcaucccuuuaga

SEQ ID NO: 1502580 - RNA, 19 nt, Homo sapiens
  misc_RNA (1)...(19): siRNA sense strand
cagggcagguucuggguua

SEQ ID NO: 1502581 - RNA, 19 nt, Homo sapiens
  misc_RNA (1)...(19): siRNA sense strand
gaggagagagcaucccuuu

SEQ ID NO: 1502582 - RNA, 19 nt, Homo sapiens
  misc_RNA (1)...(19): siRNA sense strand
cugccaacauccuuucuua

SEQ ID NO: 1502583 - RNA, 19 nt, Homo sapiens
  misc_RNA (1)...(19): siRNA sense strand
ggaacacgccuuugaucuu

SEQ ID NO: 1502584 - RNA, 19 nt, Homo sapiens
  misc_RNA (1)...(19): siRNA sense strand
gagagcaucccuuuagaau

SEQ ID NO: 1502585 - RNA, 19 nt, Homo sapiens
  misc_RNA (1)...(19): siRNA sense strand
ggaggaacacgccuuugau

SEQ ID NO: 1502586 - RNA, 19 nt, Homo sapiens
  misc_RNA (1)...(19): siRNA sense strand
ccaccuccaaggacuauuu

SEQ ID NO: 1502587 - RNA, 19 nt, Homo sapiens
  misc_RNA (1)...(19): siRNA sense strand
cagcagcauucuucagagu

SEQ ID NO: 1502588 - RNA, 19 nt, Homo sapiens
  misc_RNA (1)...(19): siRNA sense strand
gaggaacacgccuuugauc

SEQ ID NO: 1502589 - RNA, 19 nt, Homo sapiens
  misc_RNA (1)...(19): siRNA sense strand
gccagcagcauucuucaga

SEQ ID NO: 1502590 - RNA, 19 nt, Homo sapiens
  misc_RNA (1)...(19): siRNA sense strand
gauuaaccaccuccaagga

SEQ ID NO: 1502591 - RNA, 19 nt, Homo sapiens
  misc_RNA (1)...(19): siRNA sense strand
gggcuuccuucaggcguuu

SEQ ID NO: 1502592 - RNA, 19 nt, Homo sapiens
  misc_RNA (1)...(19): siRNA sense strand
gcucugcccuuggaaacuc

SEQ ID NO: 1502593 - RNA, 19 nt, Homo sapiens
  misc_RNA (1)...(19): siRNA sense strand
ccaacauccuuucuuagcu

SEQ ID NO: 1502594 - RNA, 19 nt, Homo sapiens
  misc_RNA (1)...(19): siRNA sense strand
uggaggaacacgccuuuga

SEQ ID NO: 1502595 - RNA, 19 nt, Homo sapiens
  misc_RNA (1)...(19): siRNA sense strand
cuccaaggacuauuuaaga

SEQ ID NO: 1502596 - RNA, 19 nt, Homo sapiens
  misc_RNA (1)...(19): siRNA sense strand
uccaaggacuauuuaagag

SEQ ID NO: 1502597 - RNA, 19 nt, Homo sapiens
  misc_RNA (1)...(19): siRNA sense strand
caccuccaaggacuauuua

SEQ ID NO: 1502598 - RNA, 19 nt, Homo sapiens
  misc_RNA (1)...(19): siRNA sense strand
agagagcaucccuuuagaa

SEQ ID NO: 1502599 - RNA, 19 nt, Homo sapiens
  misc_RNA (1)...(19): siRNA sense strand
uaaccaccuccaaggacua

SEQ ID NO: 1502600 - RNA, 19 nt, Homo sapiens
  misc_RNA (1)...(19): siRNA sense strand
ccacccuccuuccaguuca

SEQ ID NO: 1502601 - RNA, 19 nt, Homo sapiens
  misc_RNA (1)...(19): siRNA sense strand
gagaaagggugggaaaagg

SEQ ID NO: 1502602 - RNA, 19 nt, Homo sapiens
  misc_RNA (1)...(19): siRNA sense strand
caguucaccgaaagauuaa

SEQ ID NO: 1502603 - RNA, 19 nt, Homo sapiens
  misc_RNA (1)...(19): siRNA sense strand
uugcauccuucgcuccaaa

SEQ ID NO: 1502604 - RNA, 19 nt, Homo sapiens
  misc_RNA (1)...(19): siRNA sense strand
aaagauuaaccaccuccaa

SEQ ID NO: 1502605 - RNA, 19 nt, Homo sapiens
  misc_RNA (1)...(19): siRNA sense strand
aacauccuuucuuagcuuu

SEQ ID NO: 1502606 - RNA, 19 nt, Homo sapiens
  misc_RNA (1)...(19): siRNA sense strand
aaaucgagcuccauacuaa

SEQ ID NO: 1502607 - RNA, 19 nt, Homo sapiens
  misc_RNA (1)...(19): siRNA sense strand
ccacgcagcugaccaugaa

SEQ ID NO: 1502608 - RNA, 19 nt, Homo sapiens
  misc_RNA (1)...(19): siRNA sense strand
ucuaugaguucuucaagua

SEQ ID NO: 1502609 - RNA, 19 nt, Homo sapiens
  misc_RNA (1)...(19): siRNA sense strand
gguaaugaauccagcagaa

SEQ ID NO: 1502610 - RNA, 19 nt, Homo sapiens
  misc_RNA (1)...(19): siRNA sense strand
cuacggagcccucaagaaa

SEQ ID NO: 1502611 - RNA, 19 nt, Homo sapiens
  misc_RNA (1)...(19): siRNA sense strand
agacacgaaugcagaguuu

SEQ ID NO: 1502612 - RNA, 19 nt, Homo sapiens
  misc_RNA (1)...(19): siRNA sense strand
cagcagaaguggugaagca

SEQ ID NO: 1502613 - RNA, 19 nt, Homo sapiens
  misc_RNA (1)...(19): siRNA sense strand
gaagggaucauagaaucuu

SEQ ID NO: 1502614 - RNA, 19 nt, Homo sapiens
  misc_RNA (1)...(19): siRNA sense strand
guaagacccuucugaacac

SEQ ID NO: 1502615 - RNA, 19 nt, Homo sapiens
  misc_RNA (1)...(19): siRNA sense strand
uaaaggaagggaucauaga

SEQ ID NO: 1502616 - RNA, 19 nt, Homo sapiens
  misc_RNA (1)...(19): siRNA sense strand
ggucggaggacuacgagaa

SEQ ID NO: 1502617 - RNA, 19 nt, Homo sapiens
  misc_RNA (1)...(19): siRNA sense strand
ccaaggaaacagccaccua

SEQ ID NO: 1502618 - RNA, 19 nt, Homo sapiens
  misc_RNA (1)...(19): siRNA sense strand
aggaagggaucauagaauc

SEQ ID NO: 1502619 - RNA, 19 nt, Homo sapiens
  misc_RNA (1)...(19): siRNA sense strand
aaaggaagggaucauagaa

SEQ ID NO: 1502620 - RNA, 19 nt, Homo sapiens
  misc_RNA (1)...(19): siRNA sense strand
cagcaccggucagcaauca

SEQ ID NO: 1502621 - RNA, 19 nt, Homo sapiens
  misc_RNA (1)...(19): siRNA sense strand
gcuccacgaugcgguaaug

SEQ ID NO: 1502622 - RNA, 19 nt, Homo sapiens
  misc_RNA (1)...(19): siRNA sense strand
acgagaaccugccgacuag

SEQ ID NO: 1502623 - RNA, 19 nt, Homo sapiens
  misc_RNA (1)...(19): siRNA sense strand
uguaagacccuucugaaca

SEQ ID NO: 1502624 - RNA, 19 nt, Homo sapiens
  misc_RNA (1)...(19): siRNA sense strand
acacgaaugcagaguuuga

SEQ ID NO: 1502625 - RNA, 19 nt, Homo sapiens
  misc_RNA (1)...(19): siRNA sense strand
ccaaagcccaguacacaag

SEQ ID NO: 1502626 - RNA, 19 nt, Homo sapiens
  misc_RNA (1)...(19): siRNA sense strand
aaagcccaguacacaagua

SEQ ID NO: 1502627 - RNA, 19 nt, Homo sapiens
  misc_RNA (1)...(19): siRNA sense strand
ccacgaugcgguaaugaau

SEQ ID NO: 1502628 - RNA, 19 nt, Homo sapiens
  misc_RNA (1)...(19): siRNA sense strand
uacgagaaccugccgacua

SEQ ID NO: 1502629 - RNA, 19 nt, Homo sapiens
  misc_RNA (1)...(19): siRNA sense strand
gcuugcagauguacaacuc

SEQ ID NO: 1502630 - RNA, 19 nt, Homo sapiens
  misc_RNA (1)...(19): siRNA sense strand
ggaagggaucauagaaucu

SEQ ID NO: 1502631 - RNA, 19 nt, Homo sapiens
  misc_RNA (1)...(19): siRNA sense strand
cgagcuccauacuaaagga

SEQ ID NO: 1502632 - RNA, 19 nt, Homo sapiens
  misc_RNA (1)...(19): siRNA sense strand
uaaugaauccagcagaagu

SEQ ID NO: 1502633 - RNA, 19 nt, Homo sapiens
  misc_RNA (1)...(19): siRNA sense strand
cuaaaggaagggaucauag

SEQ ID NO: 1502634 - RNA, 19 nt, Homo sapiens
  misc_RNA (1)...(19): siRNA sense strand
aagggaucauagaaucuuu

SEQ ID NO: 1502635 - RNA, 19 nt, Homo sapiens
  misc_RNA (1)...(19): siRNA sense strand
ccauccacuucaucaccua

SEQ ID NO: 1502636 - RNA, 19 nt, Homo sapiens
  misc_RNA (1)...(19): siRNA sense strand
acuaaaggaagggaucaua

SEQ ID NO: 1502637 - RNA, 19 nt, Homo sapiens
  misc_RNA (1)...(19): siRNA sense strand
cuuggucugucuaugaguu

SEQ ID NO: 1502638 - RNA, 19 nt, Homo sapiens
  misc_RNA (1)...(19): siRNA sense strand
gaaaaucgagcuccauacu

SEQ ID NO: 1502639 - RNA, 19 nt, Homo sapiens
  misc_RNA (1)...(19): siRNA sense strand
gaaaacaugaaaaggacuu

SEQ ID NO: 1502640 - RNA, 19 nt, Homo sapiens
  misc_RNA (1)...(19): siRNA sense strand
uaugaguucuucaaguacu

SEQ ID NO: 1502641 - RNA, 19 nt, Homo sapiens
  misc_RNA (1)...(19): siRNA sense strand
uuucuuggucugucuauga

SEQ ID NO: 1502642 - RNA, 19 nt, Homo sapiens
  misc_RNA (1)...(19): siRNA sense strand
agacccuucugaacacuca

SEQ ID NO: 1502643 - RNA, 19 nt, Homo sapiens
  misc_RNA (1)...(19): siRNA sense strand
guaaugaauccagcagaag

SEQ ID NO: 1502644 - RNA, 19 nt, Homo sapiens
  misc_RNA (1)...(19): siRNA sense strand
ggagcacucggucauguac

SEQ ID NO: 1502645 - RNA, 19 nt, Homo sapiens
  misc_RNA (1)...(19): siRNA sense strand
gacuuuaaaugacguuuuc

SEQ ID NO: 1502646 - RNA, 19 nt, Homo sapiens
  misc_RNA (1)...(19): siRNA sense strand
gcagucccacaucaucuca

SEQ ID NO: 1502647 - RNA, 19 nt, Homo sapiens
  misc_RNA (1)...(19): siRNA sense strand
ucuguaagacccuucugaa

SEQ ID NO: 1502648 - RNA, 19 nt, Homo sapiens
  misc_RNA (1)...(19): siRNA sense strand
cuacggagcccucaagaaa

SEQ ID NO: 1502649 - RNA, 19 nt, Homo sapiens
  misc_RNA (1)...(19): siRNA sense strand
agacacgaaugcagaguuu

SEQ ID NO: 1502650 - RNA, 19 nt, Homo sapiens
  misc_RNA (1)...(19): siRNA sense strand
ggucggaggacuacgagaa

SEQ ID NO: 1502651 - RNA, 19 nt, Homo sapiens
  misc_RNA (1)...(19): siRNA sense strand
ccaaggaaacagccaccua

SEQ ID NO: 1502652 - RNA, 19 nt, Homo sapiens
  misc_RNA (1)...(19): siRNA sense strand
acgagaaccugccgacuag

SEQ ID NO: 1502653 - RNA, 19 nt, Homo sapiens
  misc_RNA (1)...(19): siRNA sense strand
acacgaaugcagaguuuga

SEQ ID NO: 1502654 - RNA, 19 nt, Homo sapiens
  misc_RNA (1)...(19): siRNA sense strand
ccaaagcccaguacacaag

SEQ ID NO: 1502655 - RNA, 19 nt, Homo sapiens
  misc_RNA (1)...(19): siRNA sense strand
aaagcccaguacacaagua

SEQ ID NO: 1502656 - RNA, 19 nt, Homo sapiens
  misc_RNA (1)...(19): siRNA sense strand
uacgagaaccugccgacua

SEQ ID NO: 1502657 - RNA, 19 nt, Homo sapiens
  misc_RNA (1)...(19): siRNA sense strand
ggagcacucggucauguac

SEQ ID NO: 1502658 - RNA, 19 nt, Homo sapiens
  misc_RNA (1)...(19): siRNA sense strand
gacuuuaaaugacguuuuc

SEQ ID NO: 1502659 - RNA, 19 nt, Homo sapiens
  misc_RNA (1)...(19): siRNA sense strand
gaaaacaugaaaaggacuu

SEQ ID NO: 1502660 - RNA, 19 nt, Homo sapiens
  misc_RNA (1)...(19): siRNA sense strand
gggaauggauuucagaaga

SEQ ID NO: 1502661 - RNA, 19 nt, Homo sapiens
  misc_RNA (1)...(19): siRNA sense strand
gaagagaccagaagauguu

SEQ ID NO: 1502662 - RNA, 19 nt, Homo sapiens
  misc_RNA (1)...(19): siRNA sense strand
ggacaauuguauaagcauu

SEQ ID NO: 1502663 - RNA, 19 nt, Homo sapiens
  misc_RNA (1)...(19): siRNA sense strand
agaacugccugcuucauaa

SEQ ID NO: 1502664 - RNA, 19 nt, Homo sapiens
  misc_RNA (1)...(19): siRNA sense strand
cugcagagacuaaagguua

SEQ ID NO: 1502665 - RNA, 19 nt, Homo sapiens
  misc_RNA (1)...(19): siRNA sense strand
ggaauggauuucagaagag

SEQ ID NO: 1502666 - RNA, 19 nt, Homo sapiens
  misc_RNA (1)...(19): siRNA sense strand
gaauggauuucagaagaga

SEQ ID NO: 1502667 - RNA, 19 nt, Homo sapiens
  misc_RNA (1)...(19): siRNA sense strand
caaagacugcagagacuaa

SEQ ID NO: 1502668 - RNA, 19 nt, Homo sapiens
  misc_RNA (1)...(19): siRNA sense strand
gaauccaucuaaggacgua

SEQ ID NO: 1502669 - RNA, 19 nt, Homo sapiens
  misc_RNA (1)...(19): siRNA sense strand
gaacugccugcuucauaaa

SEQ ID NO: 1502670 - RNA, 19 nt, Homo sapiens
  misc_RNA (1)...(19): siRNA sense strand
aaaguucuccucuuauuug

SEQ ID NO: 1502671 - RNA, 19 nt, Homo sapiens
  misc_RNA (1)...(19): siRNA sense strand
cagaacugccugcuucaua

SEQ ID NO: 1502672 - RNA, 19 nt, Homo sapiens
  misc_RNA (1)...(19): siRNA sense strand
gcagaaaccaugaagaaaa

SEQ ID NO: 1502673 - RNA, 19 nt, Homo sapiens
  misc_RNA (1)...(19): siRNA sense strand
caagagguuuccaccaaca

SEQ ID NO: 1502674 - RNA, 19 nt, Homo sapiens
  misc_RNA (1)...(19): siRNA sense strand
aagcagaaaccaugaagaa

SEQ ID NO: 1502675 - RNA, 19 nt, Homo sapiens
  misc_RNA (1)...(19): siRNA sense strand
cagccacucucucaaaaua

SEQ ID NO: 1502676 - RNA, 19 nt, Homo sapiens
  misc_RNA (1)...(19): siRNA sense strand
ccucuaccaugugaaauug

SEQ ID NO: 1502677 - RNA, 19 nt, Homo sapiens
  misc_RNA (1)...(19): siRNA sense strand
acaugaugcuggccucaaa

SEQ ID NO: 1502678 - RNA, 19 nt, Homo sapiens
  misc_RNA (1)...(19): siRNA sense strand
cagaagagaccagaagaug

SEQ ID NO: 1502679 - RNA, 19 nt, Homo sapiens
  misc_RNA (1)...(19): siRNA sense strand
caacccguauggcccaaga

SEQ ID NO: 1502680 - RNA, 19 nt, Homo sapiens
  misc_RNA (1)...(19): siRNA sense strand
uaaagguuauuugccucua

SEQ ID NO: 1502681 - RNA, 19 nt, Homo sapiens
  misc_RNA (1)...(19): siRNA sense strand
ccaggugccuccuucacau

SEQ ID NO: 1502682 - RNA, 19 nt, Homo sapiens
  misc_RNA (1)...(19): siRNA sense strand
uuauuugccucuaccaugu

SEQ ID NO: 1502683 - RNA, 19 nt, Homo sapiens
  misc_RNA (1)...(19): siRNA sense strand
gcaagcagaaaccaugaag

SEQ ID NO: 1502684 - RNA, 19 nt, Homo sapiens
  misc_RNA (1)...(19): siRNA sense strand
gcagagacuaaagguuauu

SEQ ID NO: 1502685 - RNA, 19 nt, Homo sapiens
  misc_RNA (1)...(19): siRNA sense strand
gagcauuggcaacccguau

SEQ ID NO: 1502686 - RNA, 19 nt, Homo sapiens
  misc_RNA (1)...(19): siRNA sense strand
cagcccagcuagugauugg

SEQ ID NO: 1502687 - RNA, 19 nt, Homo sapiens
  misc_RNA (1)...(19): siRNA sense strand
caagacacaugcaaaagca

SEQ ID NO: 1502688 - RNA, 19 nt, Homo sapiens
  misc_RNA (1)...(19): siRNA sense strand
caccaacaccauagaacaa

SEQ ID NO: 1502689 - RNA, 19 nt, Homo sapiens
  misc_RNA (1)...(19): siRNA sense strand
ccaccaacaccauagaaca

SEQ ID NO: 1502690 - RNA, 19 nt, Homo sapiens
  misc_RNA (1)...(19): siRNA sense strand
aagcagccacucucucaaa

SEQ ID NO: 1502691 - RNA, 19 nt, Homo sapiens
  misc_RNA (1)...(19): siRNA sense strand
ccaaagacugcagagacua

SEQ ID NO: 1502692 - RNA, 19 nt, Homo sapiens
  misc_RNA (1)...(19): siRNA sense strand
aucaagagguuuccaccaa

SEQ ID NO: 1502693 - RNA, 19 nt, Homo sapiens
  misc_RNA (1)...(19): siRNA sense strand
ggaccaaagacugcagaga

SEQ ID NO: 1502694 - RNA, 19 nt, Homo sapiens
  misc_RNA (1)...(19): siRNA sense strand
cagcaagcagaaaccauga

SEQ ID NO: 1502695 - RNA, 19 nt, Homo sapiens
  misc_RNA (1)...(19): siRNA sense strand
caaccacaagcccaagaga

SEQ ID NO: 1502696 - RNA, 19 nt, Homo sapiens
  misc_RNA (1)...(19): siRNA sense strand
agaagagaccagaagaugu

SEQ ID NO: 1502697 - RNA, 19 nt, Homo sapiens
  misc_RNA (1)...(19): siRNA sense strand
cacaagcccaagagaaaga

SEQ ID NO: 1502698 - RNA, 19 nt, Homo sapiens
  misc_RNA (1)...(19): siRNA sense strand
ugcagagacuaaagguuau

SEQ ID NO: 1502699 - RNA, 19 nt, Homo sapiens
  misc_RNA (1)...(19): siRNA sense strand
cagcaagggcaucucuguu

SEQ ID NO: 1502700 - RNA, 19 nt, Homo sapiens
  misc_RNA (1)...(19): siRNA sense strand
gccucuaccaugugaaauu

SEQ ID NO: 1502701 - RNA, 19 nt, Homo sapiens
  misc_RNA (1)...(19): siRNA sense strand
gagacuaaagguuauuugc

SEQ ID NO: 1502702 - RNA, 19 nt, Homo sapiens
  misc_RNA (1)...(19): siRNA sense strand
accacaagcccaagagaaa

SEQ ID NO: 1502703 - RNA, 19 nt, Homo sapiens
  misc_RNA (1)...(19): siRNA sense strand
caagcagaaaccaugaaga

SEQ ID NO: 1502704 - RNA, 19 nt, Homo sapiens
  misc_RNA (1)...(19): siRNA sense strand
gcccagcuagugauuggaa

SEQ ID NO: 1502705 - RNA, 19 nt, Homo sapiens
  misc_RNA (1)...(19): siRNA sense strand
cagagacuaaagguuauuu

SEQ ID NO: 1502706 - RNA, 19 nt, Homo sapiens
  misc_RNA (1)...(19): siRNA sense strand
gaagauguucucguguucu

SEQ ID NO: 1502707 - RNA, 19 nt, Homo sapiens
  misc_RNA (1)...(19): siRNA sense strand
ccagcaagggcaucucugu

SEQ ID NO: 1502708 - RNA, 19 nt, Homo sapiens
  misc_RNA (1)...(19): siRNA sense strand
ggcccaagacacaugcaaa

SEQ ID NO: 1502709 - RNA, 19 nt, Homo sapiens
  misc_RNA (1)...(19): siRNA sense strand
ucagaagagaccagaagau

SEQ ID NO: 1502710 - RNA, 19 nt, Homo sapiens
  misc_RNA (1)...(19): siRNA sense strand
gugccuccuucacaugaug

SEQ ID NO: 1502711 - RNA, 19 nt, Homo sapiens
  misc_RNA (1)...(19): siRNA sense strand
gaacugcagcugcuuguua

SEQ ID NO: 1502712 - RNA, 19 nt, Homo sapiens
  misc_RNA (1)...(19): siRNA sense strand
gaaagaagaaaccagaaug

SEQ ID NO: 1502713 - RNA, 19 nt, Homo sapiens
  misc_RNA (1)...(19): siRNA sense strand
uagagaaacugcucagaga

SEQ ID NO: 1502714 - RNA, 19 nt, Homo sapiens
  misc_RNA (1)...(19): siRNA sense strand
gagcaaagcaaaucuuauc

SEQ ID NO: 1502715 - RNA, 19 nt, Homo sapiens
  misc_RNA (1)...(19): siRNA sense strand
aagcaaaucuuauccucaa

SEQ ID NO: 1502716 - RNA, 19 nt, Homo sapiens
  misc_RNA (1)...(19): siRNA sense strand
gcucagagaaccugccuuu

SEQ ID NO: 1502717 - RNA, 19 nt, Homo sapiens
  misc_RNA (1)...(19): siRNA sense strand
gggagcaaagcaaaucuua

SEQ ID NO: 1502718 - RNA, 19 nt, Homo sapiens
  misc_RNA (1)...(19): siRNA sense strand
ggccacauguacccaguaa

SEQ ID NO: 1502719 - RNA, 19 nt, Homo sapiens
  misc_RNA (1)...(19): siRNA sense strand
agaagaaaccagaauguug

SEQ ID NO: 1502720 - RNA, 19 nt, Homo sapiens
  misc_RNA (1)...(19): siRNA sense strand
ccacauguacccaguaaca

SEQ ID NO: 1502721 - RNA, 19 nt, Homo sapiens
  misc_RNA (1)...(19): siRNA sense strand
ucagagaaccugccuuuac

SEQ ID NO: 1502722 - RNA, 19 nt, Homo sapiens
  misc_RNA (1)...(19): siRNA sense strand
uaacagagggagcaaagca

SEQ ID NO: 1502723 - RNA, 19 nt, Homo sapiens
  misc_RNA (1)...(19): siRNA sense strand
gcaaaucuuauccucaaag

SEQ ID NO: 1502724 - RNA, 19 nt, Homo sapiens
  misc_RNA (1)...(19): siRNA sense strand
ggagcaaagcaaaucuuau

SEQ ID NO: 1502725 - RNA, 19 nt, Homo sapiens
  misc_RNA (1)...(19): siRNA sense strand
caguuucggccuugcaaua

SEQ ID NO: 1502726 - RNA, 19 nt, Homo sapiens
  misc_RNA (1)...(19): siRNA sense strand
aaagaagaaaccagaaugu

SEQ ID NO: 1502727 - RNA, 19 nt, Homo sapiens
  misc_RNA (1)...(19): siRNA sense strand
gccauauggaugaauuuaa

SEQ ID NO: 1502728 - RNA, 19 nt, Homo sapiens
  misc_RNA (1)...(19): siRNA sense strand
ugaaagaagaaaccagaau

SEQ ID NO: 1502729 - RNA, 19 nt, Homo sapiens
  misc_RNA (1)...(19): siRNA sense strand
gagaaacugcucagagaac

SEQ ID NO: 1502730 - RNA, 19 nt, Homo sapiens
  misc_RNA (1)...(19): siRNA sense strand
gcagcugcuuguuagaucu

SEQ ID NO: 1502731 - RNA, 19 nt, Homo sapiens
  misc_RNA (1)...(19): siRNA sense strand
cagagaaccugccuuuacc

SEQ ID NO: 1502732 - RNA, 19 nt, Homo sapiens
  misc_RNA (1)...(19): siRNA sense strand
uuucggccuugcaauaauu

SEQ ID NO: 1502733 - RNA, 19 nt, Homo sapiens
  misc_RNA (1)...(19): siRNA sense strand
ccuggugguuccauagaga

SEQ ID NO: 1502734 - RNA, 19 nt, Homo sapiens
  misc_RNA (1)...(19): siRNA sense strand
aagaagaaaccagaauguu

SEQ ID NO: 1502735 - RNA, 19 nt, Homo sapiens
  misc_RNA (1)...(19): siRNA sense strand
acagagggagcaaagcaaa

SEQ ID NO: 1502736 - RNA, 19 nt, Homo sapiens
  misc_RNA (1)...(19): siRNA sense strand
acuauucaguggccacaug

SEQ ID NO: 1502737 - RNA, 19 nt, Homo sapiens
  misc_RNA (1)...(19): siRNA sense strand
gcaaagcaaaucuuauccu

SEQ ID NO: 1502738 - RNA, 19 nt, Homo sapiens
  misc_RNA (1)...(19): siRNA sense strand
guuucggccuugcaauaau

SEQ ID NO: 1502739 - RNA, 19 nt, Homo sapiens
  misc_RNA (1)...(19): siRNA sense strand
acauuguguugaaagaaga

SEQ ID NO: 1502740 - RNA, 19 nt, Homo sapiens
  misc_RNA (1)...(19): siRNA sense strand
gcaugugaaauuauacucu

SEQ ID NO: 1502741 - RNA, 19 nt, Homo sapiens
  misc_RNA (1)...(19): siRNA sense strand
acauguacccaguaacaga

SEQ ID NO: 1502742 - RNA, 19 nt, Homo sapiens
  misc_RNA (1)...(19): siRNA sense strand
agagaaacugcucagagaa

SEQ ID NO: 1502743 - RNA, 19 nt, Homo sapiens
  misc_RNA (1)...(19): siRNA sense strand
ugccauauggaugaauuua

SEQ ID NO: 1502744 - RNA, 19 nt, Homo sapiens
  misc_RNA (1)...(19): siRNA sense strand
gaaacggccucauguauuu

SEQ ID NO: 1502745 - RNA, 19 nt, Homo sapiens
  misc_RNA (1)...(19): siRNA sense strand
gcaaguggauccugacuga

SEQ ID NO: 1502746 - RNA, 19 nt, Homo sapiens
  misc_RNA (1)...(19): siRNA sense strand
uaguauagcucaucuugua

SEQ ID NO: 1502747 - RNA, 19 nt, Homo sapiens
  misc_RNA (1)...(19): siRNA sense strand
ggaaacggccucauguauu

SEQ ID NO: 1502748 - RNA, 19 nt, Homo sapiens
  misc_RNA (1)...(19): siRNA sense strand
gcaaauguccggagugaug

SEQ ID NO: 1502749 - RNA, 19 nt, Homo sapiens
  misc_RNA (1)...(19): siRNA sense strand
ucccagagaugcucaagua

SEQ ID NO: 1502750 - RNA, 19 nt, Homo sapiens
  misc_RNA (1)...(19): siRNA sense strand
gagccacguuagaugaaua

SEQ ID NO: 1502751 - RNA, 19 nt, Homo sapiens
  misc_RNA (1)...(19): siRNA sense strand
gggcaaauguccggaguga

SEQ ID NO: 1502752 - RNA, 19 nt, Homo sapiens
  misc_RNA (1)...(19): siRNA sense strand
gcuaauggccucuuuaugg

SEQ ID NO: 1502753 - RNA, 19 nt, Homo sapiens
  misc_RNA (1)...(19): siRNA sense strand
gcagggagcuacagucacu

SEQ ID NO: 1502754 - RNA, 19 nt, Homo sapiens
  misc_RNA (1)...(19): siRNA sense strand
gaacacggagugacccaaa

SEQ ID NO: 1502755 - RNA, 19 nt, Homo sapiens
  misc_RNA (1)...(19): siRNA sense strand
cacaggagguuaacucaga

SEQ ID NO: 1502756 - RNA, 19 nt, Homo sapiens
  misc_RNA (1)...(19): siRNA sense strand
ggagugauguccgcacaga

SEQ ID NO: 1502757 - RNA, 19 nt, Homo sapiens
  misc_RNA (1)...(19): siRNA sense strand
gggcaacaguagccacauu

SEQ ID NO: 1502758 - RNA, 19 nt, Homo sapiens
  misc_RNA (1)...(19): siRNA sense strand
gaagaucagcaaacgcaaa

SEQ ID NO: 1502759 - RNA, 19 nt, Homo sapiens
  misc_RNA (1)...(19): siRNA sense strand
ggacaccucuuacgaugac

SEQ ID NO: 1502760 - RNA, 19 nt, Homo sapiens
  misc_RNA (1)...(19): siRNA sense strand
aaaccuaacccugucuuua

SEQ ID NO: 1502761 - RNA, 19 nt, Homo sapiens
  misc_RNA (1)...(19): siRNA sense strand
uggagaauguggugcguaa

SEQ ID NO: 1502762 - RNA, 19 nt, Homo sapiens
  misc_RNA (1)...(19): siRNA sense strand
cacauuggcugaugcuuca

SEQ ID NO: 1502763 - RNA, 19 nt, Homo sapiens
  misc_RNA (1)...(19): siRNA sense strand
gaaacuucgagccacguua

SEQ ID NO: 1502764 - RNA, 19 nt, Homo sapiens
  misc_RNA (1)...(19): siRNA sense strand
agaauguggugcguaagua

SEQ ID NO: 1502765 - RNA, 19 nt, Homo sapiens
  misc_RNA (1)...(19): siRNA sense strand
aaccuaacccugucuuuaa

SEQ ID NO: 1502766 - RNA, 19 nt, Homo sapiens
  misc_RNA (1)...(19): siRNA sense strand
gcuauuguccucuguaucu

SEQ ID NO: 1502767 - RNA, 19 nt, Homo sapiens
  misc_RNA (1)...(19): siRNA sense strand
gacccaaaccgaacauaug

SEQ ID NO: 1502768 - RNA, 19 nt, Homo sapiens
  misc_RNA (1)...(19): siRNA sense strand
ggucaccguugcccaagug

SEQ ID NO: 1502769 - RNA, 19 nt, Homo sapiens
  misc_RNA (1)...(19): siRNA sense strand
cauaguauagcucaucuug

SEQ ID NO: 1502770 - RNA, 19 nt, Homo sapiens
  misc_RNA (1)...(19): siRNA sense strand
gggaagaccuuuuguaugc

SEQ ID NO: 1502771 - RNA, 19 nt, Homo sapiens
  misc_RNA (1)...(19): siRNA sense strand
gcugagugcugaugaagac

SEQ ID NO: 1502772 - RNA, 19 nt, Homo sapiens
  misc_RNA (1)...(19): siRNA sense strand
ucacuuauccagguuggua

SEQ ID NO: 1502773 - RNA, 19 nt, Homo sapiens
  misc_RNA (1)...(19): siRNA sense strand
gauggcacugucucacuua

SEQ ID NO: 1502774 - RNA, 19 nt, Homo sapiens
  misc_RNA (1)...(19): siRNA sense strand
uuacgaugacucagauaua

SEQ ID NO: 1502775 - RNA, 19 nt, Homo sapiens
  misc_RNA (1)...(19): siRNA sense strand
cagagaugcucaaguacuc

SEQ ID NO: 1502776 - RNA, 19 nt, Homo sapiens
  misc_RNA (1)...(19): siRNA sense strand
aaacggaaacggccucaug

SEQ ID NO: 1502777 - RNA, 19 nt, Homo sapiens
  misc_RNA (1)...(19): siRNA sense strand
gggcauuuaucccagagau

SEQ ID NO: 1502778 - RNA, 19 nt, Homo sapiens
  misc_RNA (1)...(19): siRNA sense strand
cagcaccuuuggagaaugu

SEQ ID NO: 1502779 - RNA, 19 nt, Homo sapiens
  misc_RNA (1)...(19): siRNA sense strand
ccacagccacacauaguau

SEQ ID NO: 1502780 - RNA, 19 nt, Homo sapiens
  misc_RNA (1)...(19): siRNA sense strand
gagaauguggugcguaagu

SEQ ID NO: 1502781 - RNA, 19 nt, Homo sapiens
  misc_RNA (1)...(19): siRNA sense strand
ugacucagauauacucaac

SEQ ID NO: 1502782 - RNA, 19 nt, Homo sapiens
  misc_RNA (1)...(19): siRNA sense strand
gaugcuaauggccucuuua

SEQ ID NO: 1502783 - RNA, 19 nt, Homo sapiens
  misc_RNA (1)...(19): siRNA sense strand
gcaagcuauuguccucugu

SEQ ID NO: 1502784 - RNA, 19 nt, Homo sapiens
  misc_RNA (1)...(19): siRNA sense strand
cggaaacggccucauguau

SEQ ID NO: 1502785 - RNA, 19 nt, Homo sapiens
  misc_RNA (1)...(19): siRNA sense strand
cacguuagaugaauauacu

SEQ ID NO: 1502786 - RNA, 19 nt, Homo sapiens
  misc_RNA (1)...(19): siRNA sense strand
ugauggcacugucucacuu

SEQ ID NO: 1502787 - RNA, 19 nt, Homo sapiens
  misc_RNA (1)...(19): siRNA sense strand
guauuugagucuaauccau

SEQ ID NO: 1502788 - RNA, 19 nt, Homo sapiens
  misc_RNA (1)...(19): siRNA sense strand
gagaugcucaaguacucua

SEQ ID NO: 1502789 - RNA, 19 nt, Homo sapiens
  misc_RNA (1)...(19): siRNA sense strand
cuacuuacaccgagcauag

SEQ ID NO: 1502790 - RNA, 19 nt, Homo sapiens
  misc_RNA (1)...(19): siRNA sense strand
caucuuguaccaucacaga

SEQ ID NO: 1502791 - RNA, 19 nt, Homo sapiens
  misc_RNA (1)...(19): siRNA sense strand
cuguggagguggugacauu

SEQ ID NO: 1502792 - RNA, 19 nt, Homo sapiens
  misc_RNA (1)...(19): siRNA sense strand
aagcuauuguccucuguau

SEQ ID NO: 1502793 - RNA, 19 nt, Homo sapiens
  misc_RNA (1)...(19): siRNA sense strand
ggagcuacagucacuaugg

SEQ ID NO: 1502794 - RNA, 19 nt, Homo sapiens
  misc_RNA (1)...(19): siRNA sense strand
gccacagccacacauagua

SEQ ID NO: 1502795 - RNA, 19 nt, Homo sapiens
  misc_RNA (1)...(19): siRNA sense strand
caaaccuaacccugucuuu

SEQ ID NO: 1502796 - RNA, 19 nt, Homo sapiens
  misc_RNA (1)...(19): siRNA sense strand
cagcagggagcuacaguca

SEQ ID NO: 1502797 - RNA, 19 nt, Homo sapiens
  misc_RNA (1)...(19): siRNA sense strand
acaggagguuaacucagaa

SEQ ID NO: 1502798 - RNA, 19 nt, Homo sapiens
  misc_RNA (1)...(19): siRNA sense strand
ggaaacuucgagccacguu

SEQ ID NO: 1502799 - RNA, 19 nt, Homo sapiens
  misc_RNA (1)...(19): siRNA sense strand
gcagccgucggagcacuua

SEQ ID NO: 1502800 - RNA, 19 nt, Homo sapiens
  misc_RNA (1)...(19): siRNA sense strand
uacgaugacucagauauac

SEQ ID NO: 1502801 - RNA, 19 nt, Homo sapiens
  misc_RNA (1)...(19): siRNA sense strand
accuaacccugucuuuaaa

SEQ ID NO: 1502802 - RNA, 19 nt, Homo sapiens
  misc_RNA (1)...(19): siRNA sense strand
caagcuauuguccucugua

SEQ ID NO: 1502803 - RNA, 19 nt, Homo sapiens
  misc_RNA (1)...(19): siRNA sense strand
ggcaacaguagccacauug

SEQ ID NO: 1502804 - RNA, 19 nt, Homo sapiens
  misc_RNA (1)...(19): siRNA sense strand
uguaugccuuugaagauca

SEQ ID NO: 1502805 - RNA, 19 nt, Homo sapiens
  misc_RNA (1)...(19): siRNA sense strand
aagcagaggguuucaugga

SEQ ID NO: 1502806 - RNA, 19 nt, Homo sapiens
  misc_RNA (1)...(19): siRNA sense strand
gagcaaaagcagaggguuu

SEQ ID NO: 1502807 - RNA, 19 nt, Homo sapiens
  misc_RNA (1)...(19): siRNA sense strand
ucugguggccugaagauau

SEQ ID NO: 1502808 - RNA, 19 nt, Homo sapiens
  misc_RNA (1)...(19): siRNA sense strand
gcagcaccuuuggagaaug

SEQ ID NO: 1502809 - RNA, 19 nt, Homo sapiens
  misc_RNA (1)...(19): siRNA sense strand
aacccugucuuuaaagugu

SEQ ID NO: 1502810 - RNA, 19 nt, Homo sapiens
  misc_RNA (1)...(19): siRNA sense strand
cuaacccugucuuuaaagu

SEQ ID NO: 1502811 - RNA, 19 nt, Homo sapiens
  misc_RNA (1)...(19): siRNA sense strand
ugacccaaaccgaacauau

SEQ ID NO: 1502812 - RNA, 19 nt, Homo sapiens
  misc_RNA (1)...(19): siRNA sense strand
ggagguuaacucagaacug

SEQ ID NO: 1502813 - RNA, 19 nt, Homo sapiens
  misc_RNA (1)...(19): siRNA sense strand
ggugacauuggaacaguga

SEQ ID NO: 1502814 - RNA, 19 nt, Homo sapiens
  misc_RNA (1)...(19): siRNA sense strand
cagucacuauggcgcuuaa

SEQ ID NO: 1502815 - RNA, 19 nt, Homo sapiens
  misc_RNA (1)...(19): siRNA sense strand
acucagauauacucaacuc

SEQ ID NO: 1502816 - RNA, 19 nt, Homo sapiens
  misc_RNA (1)...(19): siRNA sense strand
ggccacagccacacauagu

SEQ ID NO: 1502817 - RNA, 19 nt, Homo sapiens
  misc_RNA (1)...(19): siRNA sense strand
gaauguggugcguaaguac

SEQ ID NO: 1502818 - RNA, 19 nt, Homo sapiens
  misc_RNA (1)...(19): siRNA sense strand
ggagguggugacauuggaa

SEQ ID NO: 1502819 - RNA, 19 nt, Homo sapiens
  misc_RNA (1)...(19): siRNA sense strand
uaugcugagugcugaugaa

SEQ ID NO: 1502820 - RNA, 19 nt, Homo sapiens
  misc_RNA (1)...(19): siRNA sense strand
gaaagcugcaagcccaucu

SEQ ID NO: 1502821 - RNA, 19 nt, Homo sapiens
  misc_RNA (1)...(19): siRNA sense strand
aaacuucgagccacguuag

SEQ ID NO: 1502822 - RNA, 19 nt, Homo sapiens
  misc_RNA (1)...(19): siRNA sense strand
agacgacgcaagcaucaga

SEQ ID NO: 1502823 - RNA, 19 nt, Homo sapiens
  misc_RNA (1)...(19): siRNA sense strand
ccagacgacgcaagcauca

SEQ ID NO: 1502824 - RNA, 19 nt, Homo sapiens
  misc_RNA (1)...(19): siRNA sense strand
ccguugcccaagugaauua

SEQ ID NO: 1502825 - RNA, 19 nt, Homo sapiens
  misc_RNA (1)...(19): siRNA sense strand
gcacagaagagcaaaagca

SEQ ID NO: 1502826 - RNA, 19 nt, Homo sapiens
  misc_RNA (1)...(19): siRNA sense strand
ucagaacugccgccucuca

SEQ ID NO: 1502827 - RNA, 19 nt, Homo sapiens
  misc_RNA (1)...(19): siRNA sense strand
agagcaugauccuggaaga

SEQ ID NO: 1502828 - RNA, 19 nt, Homo sapiens
  misc_RNA (1)...(19): siRNA sense strand
guaaguacaagagcaugau

SEQ ID NO: 1502829 - RNA, 19 nt, Homo sapiens
  misc_RNA (1)...(19): siRNA sense strand
cacagccacacauaguaua

SEQ ID NO: 1502830 - RNA, 19 nt, Homo sapiens
  misc_RNA (1)...(19): siRNA sense strand
uuacagggaggugagauga

SEQ ID NO: 1502831 - RNA, 19 nt, Homo sapiens
  misc_RNA (1)...(19): siRNA sense strand
ggcacugucucacuuaucc

SEQ ID NO: 1502832 - RNA, 19 nt, Homo sapiens
  misc_RNA (1)...(19): siRNA sense strand
agguccauguggcuacuua

SEQ ID NO: 1502833 - RNA, 19 nt, Homo sapiens
  misc_RNA (1)...(19): siRNA sense strand
gcaacaguagccacauugg

SEQ ID NO: 1502834 - RNA, 19 nt, Homo sapiens
  misc_RNA (1)...(19): siRNA sense strand
gauauccccugggcaaaug

SEQ ID NO: 1502835 - RNA, 19 nt, Homo sapiens
  misc_RNA (1)...(19): siRNA sense strand
ccucuuacgaugacucaga

SEQ ID NO: 1502836 - RNA, 19 nt, Homo sapiens
  misc_RNA (1)...(19): siRNA sense strand
ccagagaugcucaaguacu

SEQ ID NO: 1502837 - RNA, 19 nt, Homo sapiens
  misc_RNA (1)...(19): siRNA sense strand
cgagccacguuagaugaau

SEQ ID NO: 1502838 - RNA, 19 nt, Homo sapiens
  misc_RNA (1)...(19): siRNA sense strand
guggugacauuggaacagu

SEQ ID NO: 1502839 - RNA, 19 nt, Homo sapiens
  misc_RNA (1)...(19): siRNA sense strand
gcugaggccaccuuacaag

SEQ ID NO: 1502840 - RNA, 19 nt, Homo sapiens
  misc_RNA (1)...(19): siRNA sense strand
cacauaguauagcucaucu

SEQ ID NO: 1502841 - RNA, 19 nt, Homo sapiens
  misc_RNA (1)...(19): siRNA sense strand
aaagucagguguucagcua

SEQ ID NO: 1502842 - RNA, 19 nt, Homo sapiens
  misc_RNA (1)...(19): siRNA sense strand
uagaagcaguucgguuaua

SEQ ID NO: 1502843 - RNA, 19 nt, Homo sapiens
  misc_RNA (1)...(19): siRNA sense strand
ucuagaagcaguucgguua

SEQ ID NO: 1502844 - RNA, 19 nt, Homo sapiens
  misc_RNA (1)...(19): siRNA sense strand
guacuacgcccuguauuuc

SEQ ID NO: 1502845 - RNA, 19 nt, Homo sapiens
  misc_RNA (1)...(19): siRNA sense strand
cgaucuugcucugcuguuu

SEQ ID NO: 1502846 - RNA, 19 nt, Homo sapiens
  misc_RNA (1)...(19): siRNA sense strand
ccuccucucugcccacuuc

SEQ ID NO: 1502847 - RNA, 19 nt, Homo sapiens
  misc_RNA (1)...(19): siRNA sense strand
agaagcaguucgguuauac

SEQ ID NO: 1502848 - RNA, 19 nt, Homo sapiens
  misc_RNA (1)...(19): siRNA sense strand
ggcaggcccuaguguugug

SEQ ID NO: 1502849 - RNA, 19 nt, Homo sapiens
  misc_RNA (1)...(19): siRNA sense strand
gaucuugcucugcuguuuc

SEQ ID NO: 1502850 - RNA, 19 nt, Homo sapiens
  misc_RNA (1)...(19): siRNA sense strand
ucgccacgcuccugaugau

SEQ ID NO: 1502851 - RNA, 19 nt, Homo sapiens
  misc_RNA (1)...(19): siRNA sense strand
guauaaaagucagguguuc

SEQ ID NO: 1502852 - RNA, 19 nt, Homo sapiens
  misc_RNA (1)...(19): siRNA sense strand
gaugaucacguauaaaagu

SEQ ID NO: 1502853 - RNA, 19 nt, Homo sapiens
  misc_RNA (1)...(19): siRNA sense strand
gauggaagcugaauuaaau

SEQ ID NO: 1502854 - RNA, 19 nt, Homo sapiens
  misc_RNA (1)...(19): siRNA sense strand
gaaagugaaucaucuagug

SEQ ID NO: 1502855 - RNA, 19 nt, Homo sapiens
  misc_RNA (1)...(19): siRNA sense strand
ggagauggaagcugaauua

SEQ ID NO: 1502856 - RNA, 19 nt, Homo sapiens
  misc_RNA (1)...(19): siRNA sense strand
gaagaaacaacacaagauu

SEQ ID NO: 1502857 - RNA, 19 nt, Homo sapiens
  misc_RNA (1)...(19): siRNA sense strand
aagaggagguucuaagaua

SEQ ID NO: 1502858 - RNA, 19 nt, Homo sapiens
  misc_RNA (1)...(19): siRNA sense strand
caacagcuccgacaaggua

SEQ ID NO: 1502859 - RNA, 19 nt, Homo sapiens
  misc_RNA (1)...(19): siRNA sense strand
uccaacaaaugacgaauua

SEQ ID NO: 1502860 - RNA, 19 nt, Homo sapiens
  misc_RNA (1)...(19): siRNA sense strand
gagcaauguuuguaaugaa

SEQ ID NO: 1502861 - RNA, 19 nt, Homo sapiens
  misc_RNA (1)...(19): siRNA sense strand
ccacagagaucacgucaac

SEQ ID NO: 1502862 - RNA, 19 nt, Homo sapiens
  misc_RNA (1)...(19): siRNA sense strand
gauauaaagccucagagaa

SEQ ID NO: 1502863 - RNA, 19 nt, Homo sapiens
  misc_RNA (1)...(19): siRNA sense strand
caaagaggagguucuaaga

SEQ ID NO: 1502864 - RNA, 19 nt, Homo sapiens
  misc_RNA (1)...(19): siRNA sense strand
caauauagagcaauguuug

SEQ ID NO: 1502865 - RNA, 19 nt, Homo sapiens
  misc_RNA (1)...(19): siRNA sense strand
gaggagguucuaagauaua

SEQ ID NO: 1502866 - RNA, 19 nt, Homo sapiens
  misc_RNA (1)...(19): siRNA sense strand
ggaugaagacagagcagua

SEQ ID NO: 1502867 - RNA, 19 nt, Homo sapiens
  misc_RNA (1)...(19): siRNA sense strand
ggagaaagugaaucaucua

SEQ ID NO: 1502868 - RNA, 19 nt, Homo sapiens
  misc_RNA (1)...(19): siRNA sense strand
caguacaggugaccaagaa

SEQ ID NO: 1502869 - RNA, 19 nt, Homo sapiens
  misc_RNA (1)...(19): siRNA sense strand
uaacaaagaggagguucua

SEQ ID NO: 1502870 - RNA, 19 nt, Homo sapiens
  misc_RNA (1)...(19): siRNA sense strand
gguacuacgaugauauaua

SEQ ID NO: 1502871 - RNA, 19 nt, Homo sapiens
  misc_RNA (1)...(19): siRNA sense strand
caacacaagauuccaacaa

SEQ ID NO: 1502872 - RNA, 19 nt, Homo sapiens
  misc_RNA (1)...(19): siRNA sense strand
caaaugacgaauuacugua

SEQ ID NO: 1502873 - RNA, 19 nt, Homo sapiens
  misc_RNA (1)...(19): siRNA sense strand
aacacaagauuccaacaaa

SEQ ID NO: 1502874 - RNA, 19 nt, Homo sapiens
  misc_RNA (1)...(19): siRNA sense strand
acacaagauuccaacaaau

SEQ ID NO: 1502875 - RNA, 19 nt, Homo sapiens
  misc_RNA (1)...(19): siRNA sense strand
cgacaagguacuacgauga

SEQ ID NO: 1502876 - RNA, 19 nt, Homo sapiens
  misc_RNA (1)...(19): siRNA sense strand
agaggagguucuaagauau

SEQ ID NO: 1502877 - RNA, 19 nt, Homo sapiens
  misc_RNA (1)...(19): siRNA sense strand
agagcaauguuuguaauga

SEQ ID NO: 1502878 - RNA, 19 nt, Homo sapiens
  misc_RNA (1)...(19): siRNA sense strand
gagaucacgucaacaacag

SEQ ID NO: 1502879 - RNA, 19 nt, Homo sapiens
  misc_RNA (1)...(19): siRNA sense strand
aacaauggaggacaaguua

SEQ ID NO: 1502880 - RNA, 19 nt, Homo sapiens
  misc_RNA (1)...(19): siRNA sense strand
caacaaaugacgaauuacu

SEQ ID NO: 1502881 - RNA, 19 nt, Homo sapiens
  misc_RNA (1)...(19): siRNA sense strand
ugaaguggaugugcuuuua

SEQ ID NO: 1502882 - RNA, 19 nt, Homo sapiens
  misc_RNA (1)...(19): siRNA sense strand
uauaaagccucagagaaca

SEQ ID NO: 1502883 - RNA, 19 nt, Homo sapiens
  misc_RNA (1)...(19): siRNA sense strand
acaagguacuacgaugaua

SEQ ID NO: 1502884 - RNA, 19 nt, Homo sapiens
  misc_RNA (1)...(19): siRNA sense strand
aaacaauggaggacaaguu

SEQ ID NO: 1502885 - RNA, 19 nt, Homo sapiens
  misc_RNA (1)...(19): siRNA sense strand
acauggaacuccugaccaa

SEQ ID NO: 1502886 - RNA, 19 nt, Homo sapiens
  misc_RNA (1)...(19): siRNA sense strand
cggagaaagugaaucaucu

SEQ ID NO: 1502887 - RNA, 19 nt, Homo sapiens
  misc_RNA (1)...(19): siRNA sense strand
uaagauauaaagccucaga

SEQ ID NO: 1502888 - RNA, 19 nt, Homo sapiens
  misc_RNA (1)...(19): siRNA sense strand
ccacacucuugccuugauu

SEQ ID NO: 1502889 - RNA, 19 nt, Homo sapiens
  misc_RNA (1)...(19): siRNA sense strand
acagagaucacgucaacaa

SEQ ID NO: 1502890 - RNA, 19 nt, Homo sapiens
  misc_RNA (1)...(19): siRNA sense strand
gagauggaagcugaauuaa

SEQ ID NO: 1502891 - RNA, 19 nt, Homo sapiens
  misc_RNA (1)...(19): siRNA sense strand
caagguacuacgaugauau

SEQ ID NO: 1502892 - RNA, 19 nt, Homo sapiens
  misc_RNA (1)...(19): siRNA sense strand
ccucagagaacaaggaaga

SEQ ID NO: 1502893 - RNA, 19 nt, Homo sapiens
  misc_RNA (1)...(19): siRNA sense strand
cacaagauuccaacaaaug

SEQ ID NO: 1502894 - RNA, 19 nt, Homo sapiens
  misc_RNA (1)...(19): siRNA sense strand
acaagauuccaacaaauga

SEQ ID NO: 1502895 - RNA, 19 nt, Homo sapiens
  misc_RNA (1)...(19): siRNA sense strand
cuagugaagaugaauuuga

SEQ ID NO: 1502896 - RNA, 19 nt, Homo sapiens
  misc_RNA (1)...(19): siRNA sense strand
aaacaacacaagauuccaa

SEQ ID NO: 1502897 - RNA, 19 nt, Homo sapiens
  misc_RNA (1)...(19): siRNA sense strand
gagaaagugaaucaucuag

SEQ ID NO: 1502898 - RNA, 19 nt, Homo sapiens
  misc_RNA (1)...(19): siRNA sense strand
ugaugcuggucuugaauug

SEQ ID NO: 1502899 - RNA, 19 nt, Homo sapiens
  misc_RNA (1)...(19): siRNA sense strand
gcaguacaggugaccaaga

SEQ ID NO: 1502900 - RNA, 19 nt, Homo sapiens
  misc_RNA (1)...(19): siRNA sense strand
gaagaugaauuugaaaagg

SEQ ID NO: 1502901 - RNA, 19 nt, Homo sapiens
  misc_RNA (1)...(19): siRNA sense strand
aaagugaaucaucuaguga

SEQ ID NO: 1502902 - RNA, 19 nt, Homo sapiens
  misc_RNA (1)...(19): siRNA sense strand
uagugaugcuggucuugaa

SEQ ID NO: 1502903 - RNA, 19 nt, Homo sapiens
  misc_RNA (1)...(19): siRNA sense strand
gagaucaggccuggguuga

SEQ ID NO: 1502904 - RNA, 19 nt, Homo sapiens
  misc_RNA (1)...(19): siRNA sense strand
aagaagaaacaacacaaga

SEQ ID NO: 1502905 - RNA, 19 nt, Homo sapiens
  misc_RNA (1)...(19): siRNA sense strand
gacaagguacuacgaugau

SEQ ID NO: 1502906 - RNA, 19 nt, Homo sapiens
  misc_RNA (1)...(19): siRNA sense strand
caauggaggacaaguuauc

SEQ ID NO: 1502907 - RNA, 19 nt, Homo sapiens
  misc_RNA (1)...(19): siRNA sense strand
agauggaagcugaauuaaa

SEQ ID NO: 1502908 - RNA, 19 nt, Homo sapiens
  misc_RNA (1)...(19): siRNA sense strand
ucagagaacaaggaagaaa

SEQ ID NO: 1502909 - RNA, 19 nt, Homo sapiens
  misc_RNA (1)...(19): siRNA sense strand
acaaaugacgaauuacugu

SEQ ID NO: 1502910 - RNA, 19 nt, Homo sapiens
  misc_RNA (1)...(19): siRNA sense strand
agaagaaacaacacaagau

SEQ ID NO: 1502911 - RNA, 19 nt, Homo sapiens
  misc_RNA (1)...(19): siRNA sense strand
gagcaguacaggugaccaa

SEQ ID NO: 1502912 - RNA, 19 nt, Homo sapiens
  misc_RNA (1)...(19): siRNA sense strand
aagguacuacgaugauaua

SEQ ID NO: 1502913 - RNA, 19 nt, Homo sapiens
  misc_RNA (1)...(19): siRNA sense strand
aaauagugaugcuggucuu

SEQ ID NO: 1502914 - RNA, 19 nt, Homo sapiens
  misc_RNA (1)...(19): siRNA sense strand
gagguucuaagauauaaag

SEQ ID NO: 1502915 - RNA, 19 nt, Homo sapiens
  misc_RNA (1)...(19): siRNA sense strand
ggaugaaguggaugugcuu

SEQ ID NO: 1502916 - RNA, 19 nt, Homo sapiens
  misc_RNA (1)...(19): siRNA sense strand
aggagguucuaagauauaa

SEQ ID NO: 1502917 - RNA, 19 nt, Homo sapiens
  misc_RNA (1)...(19): siRNA sense strand
gagaagggguuaccauggu

SEQ ID NO: 1502918 - RNA, 19 nt, Homo sapiens
  misc_RNA (1)...(19): siRNA sense strand
agaaaaggcggguccauaa

SEQ ID NO: 1502919 - RNA, 19 nt, Homo sapiens
  misc_RNA (1)...(19): siRNA sense strand
acaaagaggagguucuaag

SEQ ID NO: 1502920 - RNA, 19 nt, Homo sapiens
  misc_RNA (1)...(19): siRNA sense strand
ugaaaacaauggaggacaa

SEQ ID NO: 1502921 - RNA, 19 nt, Homo sapiens
  misc_RNA (1)...(19): siRNA sense strand
gaaaacucaucagagaaug

SEQ ID NO: 1502922 - RNA, 19 nt, Homo sapiens
  misc_RNA (1)...(19): siRNA sense strand
aaagaggagguucuaagau

SEQ ID NO: 1502923 - RNA, 19 nt, Homo sapiens
  misc_RNA (1)...(19): siRNA sense strand
aaugacgaauuacuguaug

SEQ ID NO: 1502924 - RNA, 19 nt, Homo sapiens
  misc_RNA (1)...(19): siRNA sense strand
gugaugcuggucuugaauu

SEQ ID NO: 1502925 - RNA, 19 nt, Homo sapiens
  misc_RNA (1)...(19): siRNA sense strand
ugaauuguccugccugcau

SEQ ID NO: 1502926 - RNA, 19 nt, Homo sapiens
  misc_RNA (1)...(19): siRNA sense strand
agauauaaagccucagaga

SEQ ID NO: 1502927 - RNA, 19 nt, Homo sapiens
  misc_RNA (1)...(19): siRNA sense strand
aaagaagaaacaacacaag

SEQ ID NO: 1502928 - RNA, 19 nt, Homo sapiens
  misc_RNA (1)...(19): siRNA sense strand
auauaaagccucagagaac

SEQ ID NO: 1502929 - RNA, 19 nt, Homo sapiens
  misc_RNA (1)...(19): siRNA sense strand
agagaucacgucaacaaca

SEQ ID NO: 1502930 - RNA, 19 nt, Homo sapiens
  misc_RNA (1)...(19): siRNA sense strand
aagaaacaacacaagauuc

SEQ ID NO: 1502931 - RNA, 19 nt, Homo sapiens
  misc_RNA (1)...(19): siRNA sense strand
cugcaugaccacacucuug

SEQ ID NO: 1502932 - RNA, 19 nt, Homo sapiens
  misc_RNA (1)...(19): siRNA sense strand
aacgaaaacucaucagaga

SEQ ID NO: 1502933 - RNA, 19 nt, Homo sapiens
  misc_RNA (1)...(19): siRNA sense strand
uuccgaggaugaagacaga

SEQ ID NO: 1502934 - RNA, 19 nt, Homo sapiens
  misc_RNA (1)...(19): siRNA sense strand
gaaugucuuaccggagaaa

SEQ ID NO: 1502935 - RNA, 19 nt, Homo sapiens
  misc_RNA (1)...(19): siRNA sense strand
gaugaaguggaugugcuuu

SEQ ID NO: 1502936 - RNA, 19 nt, Homo sapiens
  misc_RNA (1)...(19): siRNA sense strand
gaaacaacacaagauucca

SEQ ID NO: 1502937 - RNA, 19 nt, Homo sapiens
  misc_RNA (1)...(19): siRNA sense strand
guacaggugaccaagaaaa

SEQ ID NO: 1502938 - RNA, 19 nt, Homo sapiens
  misc_RNA (1)...(19): siRNA sense strand
gaugaagacagagcaguac

SEQ ID NO: 1502939 - RNA, 19 nt, Homo sapiens
  misc_RNA (1)...(19): siRNA sense strand
gaagagacuuugcuuaaua

SEQ ID NO: 1502940 - RNA, 19 nt, Homo sapiens
  misc_RNA (1)...(19): siRNA sense strand
ccaaauaaguguucaggaa

SEQ ID NO: 1502941 - RNA, 19 nt, Homo sapiens
  misc_RNA (1)...(19): siRNA sense strand
ucacuuagcugcacauuca

SEQ ID NO: 1502942 - RNA, 19 nt, Homo sapiens
  misc_RNA (1)...(19): siRNA sense strand
cugguuaucugguuuauua

SEQ ID NO: 1502943 - RNA, 19 nt, Homo sapiens
  misc_RNA (1)...(19): siRNA sense strand
aaaccacccucaucuguua

SEQ ID NO: 1502944 - RNA, 19 nt, Homo sapiens
  misc_RNA (1)...(19): siRNA sense strand
ggaagaugaugaccauuau

SEQ ID NO: 1502945 - RNA, 19 nt, Homo sapiens
  misc_RNA (1)...(19): siRNA sense strand
gaaauugaguuagaagaga

SEQ ID NO: 1502946 - RNA, 19 nt, Homo sapiens
  misc_RNA (1)...(19): siRNA sense strand
uaagaaugcuucauggaaa

SEQ ID NO: 1502947 - RNA, 19 nt, Homo sapiens
  misc_RNA (1)...(19): siRNA sense strand
ugaugaaacuuaccucuuu

SEQ ID NO: 1502948 - RNA, 19 nt, Homo sapiens
  misc_RNA (1)...(19): siRNA sense strand
aaacuuaccucuuugaauc

SEQ ID NO: 1502949 - RNA, 19 nt, Homo sapiens
  misc_RNA (1)...(19): siRNA sense strand
gagaagaucugccucuaag

SEQ ID NO: 1502950 - RNA, 19 nt, Homo sapiens
  misc_RNA (1)...(19): siRNA sense strand
gcaagaagaucugucaauc

SEQ ID NO: 1502951 - RNA, 19 nt, Homo sapiens
  misc_RNA (1)...(19): siRNA sense strand
ggaagaacuugauaaugga

SEQ ID NO: 1502952 - RNA, 19 nt, Homo sapiens
  misc_RNA (1)...(19): siRNA sense strand
caucuucacuugcuucauu

SEQ ID NO: 1502953 - RNA, 19 nt, Homo sapiens
  misc_RNA (1)...(19): siRNA sense strand
gaaguaagaaaccuagaaa

SEQ ID NO: 1502954 - RNA, 19 nt, Homo sapiens
  misc_RNA (1)...(19): siRNA sense strand
gggauacucuucaaggauu

SEQ ID NO: 1502955 - RNA, 19 nt, Homo sapiens
  misc_RNA (1)...(19): siRNA sense strand
gaauuuaaaucagccaguu

SEQ ID NO: 1502956 - RNA, 19 nt, Homo sapiens
  misc_RNA (1)...(19): siRNA sense strand
guacuauuaugucaacuga

SEQ ID NO: 1502957 - RNA, 19 nt, Homo sapiens
  misc_RNA (1)...(19): siRNA sense strand
ggacccagcuccuugaagu

SEQ ID NO: 1502958 - RNA, 19 nt, Homo sapiens
  misc_RNA (1)...(19): siRNA sense strand
ugaaaugaauccuuuguca

SEQ ID NO: 1502959 - RNA, 19 nt, Homo sapiens
  misc_RNA (1)...(19): siRNA sense strand
uggaagaacuugauaaugg

SEQ ID NO: 1502960 - RNA, 19 nt, Homo sapiens
  misc_RNA (1)...(19): siRNA sense strand
gagguaaucugggcucuau

SEQ ID NO: 1502961 - RNA, 19 nt, Homo sapiens
  misc_RNA (1)...(19): siRNA sense strand
gcaguuaacauguuucaga

SEQ ID NO: 1502962 - RNA, 19 nt, Homo sapiens
  misc_RNA (1)...(19): siRNA sense strand
uagaagagacuuugcuuaa

SEQ ID NO: 1502963 - RNA, 19 nt, Homo sapiens
  misc_RNA (1)...(19): siRNA sense strand
gcaugaagccacuuuguug

SEQ ID NO: 1502964 - RNA, 19 nt, Homo sapiens
  misc_RNA (1)...(19): siRNA sense strand
gaaggacgguaccgacuag

SEQ ID NO: 1502965 - RNA, 19 nt, Homo sapiens
  misc_RNA (1)...(19): siRNA sense strand
agacuuugcuuaauacuuc

SEQ ID NO: 1502966 - RNA, 19 nt, Homo sapiens
  misc_RNA (1)...(19): siRNA sense strand
ggaccaggauuggcuaaug

SEQ ID NO: 1502967 - RNA, 19 nt, Homo sapiens
  misc_RNA (1)...(19): siRNA sense strand
ggacaauaccgcaaacuuc

SEQ ID NO: 1502968 - RNA, 19 nt, Homo sapiens
  misc_RNA (1)...(19): siRNA sense strand
gaugaaacuuaccucuuug

SEQ ID NO: 1502969 - RNA, 19 nt, Homo sapiens
  misc_RNA (1)...(19): siRNA sense strand
caaauaaguguucaggaaa

SEQ ID NO: 1502970 - RNA, 19 nt, Homo sapiens
  misc_RNA (1)...(19): siRNA sense strand
ggagaagaucugccucuaa

SEQ ID NO: 1502971 - RNA, 19 nt, Homo sapiens
  misc_RNA (1)...(19): siRNA sense strand
cuuugaaucugaagguuua

SEQ ID NO: 1502972 - RNA, 19 nt, Homo sapiens
  misc_RNA (1)...(19): siRNA sense strand
ggaaguaagaaaccuagaa

SEQ ID NO: 1502973 - RNA, 19 nt, Homo sapiens
  misc_RNA (1)...(19): siRNA sense strand
aaacccagcgugccaguua

SEQ ID NO: 1502974 - RNA, 19 nt, Homo sapiens
  misc_RNA (1)...(19): siRNA sense strand
ggaaaccacccucaucugu

SEQ ID NO: 1502975 - RNA, 19 nt, Homo sapiens
  misc_RNA (1)...(19): siRNA sense strand
uaaagggccucccagaagu

SEQ ID NO: 1502976 - RNA, 19 nt, Homo sapiens
  misc_RNA (1)...(19): siRNA sense strand
gcuaagagccagcauucaa

SEQ ID NO: 1502977 - RNA, 19 nt, Homo sapiens
  misc_RNA (1)...(19): siRNA sense strand
gaaacuuaccucuuugaau

SEQ ID NO: 1502978 - RNA, 19 nt, Homo sapiens
  misc_RNA (1)...(19): siRNA sense strand
gaaaccacccucaucuguu

SEQ ID NO: 1502979 - RNA, 19 nt, Homo sapiens
  misc_RNA (1)...(19): siRNA sense strand
gagccagcauucaacuaaa

SEQ ID NO: 1502980 - RNA, 19 nt, Homo sapiens
  misc_RNA (1)...(19): siRNA sense strand
aaacuuaaaucggccuuga

SEQ ID NO: 1502981 - RNA, 19 nt, Homo sapiens
  misc_RNA (1)...(19): siRNA sense strand
gaccaggauuggcuaaugu

SEQ ID NO: 1502982 - RNA, 19 nt, Homo sapiens
  misc_RNA (1)...(19): siRNA sense strand
gaagaucugccucuaaguc

SEQ ID NO: 1502983 - RNA, 19 nt, Homo sapiens
  misc_RNA (1)...(19): siRNA sense strand
gaagauuccaucagcauuc

SEQ ID NO: 1502984 - RNA, 19 nt, Homo sapiens
  misc_RNA (1)...(19): siRNA sense strand
ggauagcugugaggcauga

SEQ ID NO: 1502985 - RNA, 19 nt, Homo sapiens
  misc_RNA (1)...(19): siRNA sense strand
gcaccgaagucagcacaga

SEQ ID NO: 1502986 - RNA, 19 nt, Homo sapiens
  misc_RNA (1)...(19): siRNA sense strand
gaacugcaccuuguauauc

SEQ ID NO: 1502987 - RNA, 19 nt, Homo sapiens
  misc_RNA (1)...(19): siRNA sense strand
ggaguacuauuaugucaac

SEQ ID NO: 1502988 - RNA, 19 nt, Homo sapiens
  misc_RNA (1)...(19): siRNA sense strand
cauauuucuuccagagaua

SEQ ID NO: 1502989 - RNA, 19 nt, Homo sapiens
  misc_RNA (1)...(19): siRNA sense strand
aaaggaagaugaugaccau

SEQ ID NO: 1502990 - RNA, 19 nt, Homo sapiens
  misc_RNA (1)...(19): siRNA sense strand
uaaaucagccaguuucugu

SEQ ID NO: 1502991 - RNA, 19 nt, Homo sapiens
  misc_RNA (1)...(19): siRNA sense strand
gcaauucaaguaugguuug

SEQ ID NO: 1502992 - RNA, 19 nt, Homo sapiens
  misc_RNA (1)...(19): siRNA sense strand
ucaguacgaugaguggaua

SEQ ID NO: 1502993 - RNA, 19 nt, Homo sapiens
  misc_RNA (1)...(19): siRNA sense strand
ugucgaauauuacaguuug

SEQ ID NO: 1502994 - RNA, 19 nt, Homo sapiens
  misc_RNA (1)...(19): siRNA sense strand
ugcaucagguucauucuuu

SEQ ID NO: 1502995 - RNA, 19 nt, Homo sapiens
  misc_RNA (1)...(19): siRNA sense strand
ggauacucuucaaggauuu

SEQ ID NO: 1502996 - RNA, 19 nt, Homo sapiens
  misc_RNA (1)...(19): siRNA sense strand
caguuaacauguuucagaa

SEQ ID NO: 1502997 - RNA, 19 nt, Homo sapiens
  misc_RNA (1)...(19): siRNA sense strand
aaaagcagccucagaauaa

SEQ ID NO: 1502998 - RNA, 19 nt, Homo sapiens
  misc_RNA (1)...(19): siRNA sense strand
ucacuugcuucauuaaauc

SEQ ID NO: 1502999 - RNA, 19 nt, Homo sapiens
  misc_RNA (1)...(19): siRNA sense strand
gcaggcuccuucaaacaau

SEQ ID NO: 1503000 - RNA, 19 nt, Homo sapiens
  misc_RNA (1)...(19): siRNA sense strand
gucaguccguucuaaauug

SEQ ID NO: 1503001 - RNA, 19 nt, Homo sapiens
  misc_RNA (1)...(19): siRNA sense strand
aaagugcccuguaagaaag

SEQ ID NO: 1503002 - RNA, 19 nt, Homo sapiens
  misc_RNA (1)...(19): siRNA sense strand
gaagaugaugaccauuauu

SEQ ID NO: 1503003 - RNA, 19 nt, Homo sapiens
  misc_RNA (1)...(19): siRNA sense strand
ugagaaaagugcccuguaa

SEQ ID NO: 1503004 - RNA, 19 nt, Homo sapiens
  misc_RNA (1)...(19): siRNA sense strand
caagcugccuaaagcaaau

SEQ ID NO: 1503005 - RNA, 19 nt, Homo sapiens
  misc_RNA (1)...(19): siRNA sense strand
caaccuaaguauuugaaac

SEQ ID NO: 1503006 - RNA, 19 nt, Homo sapiens
  misc_RNA (1)...(19): siRNA sense strand
gaaucugaagguuuaguuu

SEQ ID NO: 1503007 - RNA, 19 nt, Homo sapiens
  misc_RNA (1)...(19): siRNA sense strand
gcaucagguucauucuuug

SEQ ID NO: 1503008 - RNA, 19 nt, Homo sapiens
  misc_RNA (1)...(19): siRNA sense strand
caaaaggcauaacgaagaa

SEQ ID NO: 1503009 - RNA, 19 nt, Homo sapiens
  misc_RNA (1)...(19): siRNA sense strand
aggaagaugaugaccauua

SEQ ID NO: 1503010 - RNA, 19 nt, Homo sapiens
  misc_RNA (1)...(19): siRNA sense strand
gcaaauauaccuguaagac

SEQ ID NO: 1503011 - RNA, 19 nt, Homo sapiens
  misc_RNA (1)...(19): siRNA sense strand
cauuaaauccaguagguaa

SEQ ID NO: 1503012 - RNA, 19 nt, Homo sapiens
  misc_RNA (1)...(19): siRNA sense strand
augcaacucugaagaauca

SEQ ID NO: 1503013 - RNA, 19 nt, Homo sapiens
  misc_RNA (1)...(19): siRNA sense strand
ggaacacagucucaaccau

SEQ ID NO: 1503014 - RNA, 19 nt, Homo sapiens
  misc_RNA (1)...(19): siRNA sense strand
uaaugcaguaucucacuua

SEQ ID NO: 1503015 - RNA, 19 nt, Homo sapiens
  misc_RNA (1)...(19): siRNA sense strand
uuccagagauaaugcagua

SEQ ID NO: 1503016 - RNA, 19 nt, Homo sapiens
  misc_RNA (1)...(19): siRNA sense strand
uggcuaauguuugucagua

SEQ ID NO: 1503017 - RNA, 19 nt, Homo sapiens
  misc_RNA (1)...(19): siRNA sense strand
ugucagcaguuaacauguu

SEQ ID NO: 1503018 - RNA, 19 nt, Homo sapiens
  misc_RNA (1)...(19): siRNA sense strand
agaagagacuuugcuuaau

SEQ ID NO: 1503019 - RNA, 19 nt, Homo sapiens
  misc_RNA (1)...(19): siRNA sense strand
gucgaauugugucaagaua

SEQ ID NO: 1503020 - RNA, 19 nt, Homo sapiens
  misc_RNA (1)...(19): siRNA sense strand
gaaaagugcccuguaagaa

SEQ ID NO: 1503021 - RNA, 19 nt, Homo sapiens
  misc_RNA (1)...(19): siRNA sense strand
ggaugcagauaguggagau

SEQ ID NO: 1503022 - RNA, 19 nt, Homo sapiens
  misc_RNA (1)...(19): siRNA sense strand
aaagcagccucagaauaaa

SEQ ID NO: 1503023 - RNA, 19 nt, Homo sapiens
  misc_RNA (1)...(19): siRNA sense strand
ucaaucugguuaucugguu

SEQ ID NO: 1503024 - RNA, 19 nt, Homo sapiens
  misc_RNA (1)...(19): siRNA sense strand
uaguuguucucaucgauuu

SEQ ID NO: 1503025 - RNA, 19 nt, Homo sapiens
  misc_RNA (1)...(19): siRNA sense strand
uaaugaaaguguaccugau

SEQ ID NO: 1503026 - RNA, 19 nt, Homo sapiens
  misc_RNA (1)...(19): siRNA sense strand
caaacaaugcaucaucuuc

SEQ ID NO: 1503027 - RNA, 19 nt, Homo sapiens
  misc_RNA (1)...(19): siRNA sense strand
gucagcaguuaacauguuu

SEQ ID NO: 1503028 - RNA, 19 nt, Homo sapiens
  misc_RNA (1)...(19): siRNA sense strand
ucucaucgauuuucuauug

SEQ ID NO: 1503029 - RNA, 19 nt, Homo sapiens
  misc_RNA (1)...(19): siRNA sense strand
ucaccagcuuuaccaagaa

SEQ ID NO: 1503030 - RNA, 19 nt, Homo sapiens
  misc_RNA (1)...(19): siRNA sense strand
agaacuugauaauggagua

SEQ ID NO: 1503031 - RNA, 19 nt, Homo sapiens
  misc_RNA (1)...(19): siRNA sense strand
aaacaaugcaucaucuuca

SEQ ID NO: 1503032 - RNA, 19 nt, Homo sapiens
  misc_RNA (1)...(19): siRNA sense strand
cuccugaaaugaauccuuu

SEQ ID NO: 1503033 - RNA, 19 nt, Homo sapiens
  misc_RNA (1)...(19): siRNA sense strand
ucaaguaugguuuggagaa

SEQ ID NO: 1503034 - RNA, 19 nt, Homo sapiens
  misc_RNA (1)...(19): siRNA sense strand
aaucggccuugaauuuaaa

SEQ ID NO: 1503035 - RNA, 19 nt, Homo sapiens
  misc_RNA (1)...(19): siRNA sense strand
caaucugguuaucugguuu

SEQ ID NO: 1503036 - RNA, 19 nt, Homo sapiens
  misc_RNA (1)...(19): siRNA sense strand
gguugagccaccaguguua

SEQ ID NO: 1503037 - RNA, 19 nt, Homo sapiens
  misc_RNA (1)...(19): siRNA sense strand
gagccaccaguguuaguaa

SEQ ID NO: 1503038 - RNA, 19 nt, Homo sapiens
  misc_RNA (1)...(19): siRNA sense strand
cuaaagggccucccagaag

SEQ ID NO: 1503039 - RNA, 19 nt, Homo sapiens
  misc_RNA (1)...(19): siRNA sense strand
gaacaugaucuuaaccaua

SEQ ID NO: 1503040 - RNA, 19 nt, Homo sapiens
  misc_RNA (1)...(19): siRNA sense strand
gaagagaaaugaagaagac

SEQ ID NO: 1503041 - RNA, 19 nt, Homo sapiens
  misc_RNA (1)...(19): siRNA sense strand
gaaaugaagaagacuggua

SEQ ID NO: 1503042 - RNA, 19 nt, Homo sapiens
  misc_RNA (1)...(19): siRNA sense strand
cauacugucuuccaaguga

SEQ ID NO: 1503043 - RNA, 19 nt, Homo sapiens
  misc_RNA (1)...(19): siRNA sense strand
caacccaccuggcaugauc

SEQ ID NO: 1503044 - RNA, 19 nt, Homo sapiens
  misc_RNA (1)...(19): siRNA sense strand
ggaagagaaaugaagaaga

SEQ ID NO: 1503045 - RNA, 19 nt, Homo sapiens
  misc_RNA (1)...(19): siRNA sense strand
ccaaagugcugggauuaca

SEQ ID NO: 1503046 - RNA, 19 nt, Homo sapiens
  misc_RNA (1)...(19): siRNA sense strand
agacagaccugaguucaag

SEQ ID NO: 1503047 - RNA, 19 nt, Homo sapiens
  misc_RNA (1)...(19): siRNA sense strand
gaucuuaaccauacugucu

SEQ ID NO: 1503048 - RNA, 19 nt, Homo sapiens
  misc_RNA (1)...(19): siRNA sense strand
uaaccauacugucuuccaa

SEQ ID NO: 1503049 - RNA, 19 nt, Homo sapiens
  misc_RNA (1)...(19): siRNA sense strand
gaaccuucagugagucuuu

SEQ ID NO: 1503050 - RNA, 19 nt, Homo sapiens
  misc_RNA (1)...(19): siRNA sense strand
aacaugaucuuaaccauac

SEQ ID NO: 1503051 - RNA, 19 nt, Homo sapiens
  misc_RNA (1)...(19): siRNA sense strand
gauucuaccuuucuaagac

SEQ ID NO: 1503052 - RNA, 19 nt, Homo sapiens
  misc_RNA (1)...(19): siRNA sense strand
ccggagaacaugaucuuaa

SEQ ID NO: 1503053 - RNA, 19 nt, Homo sapiens
  misc_RNA (1)...(19): siRNA sense strand
ucuaagacaucuggaguca

SEQ ID NO: 1503054 - RNA, 19 nt, Homo sapiens
  misc_RNA (1)...(19): siRNA sense strand
cggagaacaugaucuuaac

SEQ ID NO: 1503055 - RNA, 19 nt, Homo sapiens
  misc_RNA (1)...(19): siRNA sense strand
gagaacaugaucuuaacca

SEQ ID NO: 1503056 - RNA, 19 nt, Homo sapiens
  misc_RNA (1)...(19): siRNA sense strand
gcccggagaacaugaucuu

SEQ ID NO: 1503057 - RNA, 19 nt, Homo sapiens
  misc_RNA (1)...(19): siRNA sense strand
agaacaugaucuuaaccau

SEQ ID NO: 1503058 - RNA, 19 nt, Homo sapiens
  misc_RNA (1)...(19): siRNA sense strand
gggaagagaaaugaagaag

SEQ ID NO: 1503059 - RNA, 19 nt, Homo sapiens
  misc_RNA (1)...(19): siRNA sense strand
cagacagaccugaguucaa

SEQ ID NO: 1503060 - RNA, 19 nt, Homo sapiens
  misc_RNA (1)...(19): siRNA sense strand
gcaaggaaccagugaccaa

SEQ ID NO: 1503061 - RNA, 19 nt, Homo sapiens
  misc_RNA (1)...(19): siRNA sense strand
gcagaagcccagccaguca

SEQ ID NO: 1503062 - RNA, 19 nt, Homo sapiens
  misc_RNA (1)...(19): siRNA sense strand
gugacaaggccuucucgua

SEQ ID NO: 1503063 - RNA, 19 nt, Homo sapiens
  misc_RNA (1)...(19): siRNA sense strand
gcuuacugcuccuucauca

SEQ ID NO: 1503064 - RNA, 19 nt, Homo sapiens
  misc_RNA (1)...(19): siRNA sense strand
ccccaaggcuuucucauuu

SEQ ID NO: 1503065 - RNA, 19 nt, Homo sapiens
  misc_RNA (1)...(19): siRNA sense strand
caaggaaccagugaccaaa

SEQ ID NO: 1503066 - RNA, 19 nt, Homo sapiens
  misc_RNA (1)...(19): siRNA sense strand
ggaaccagugaccaaagaa

SEQ ID NO: 1503067 - RNA, 19 nt, Homo sapiens
  misc_RNA (1)...(19): siRNA sense strand
gaaccagugaccaaagaag

SEQ ID NO: 1503068 - RNA, 19 nt, Homo sapiens
  misc_RNA (1)...(19): siRNA sense strand
aggaaccagugaccaaaga

SEQ ID NO: 1503069 - RNA, 19 nt, Homo sapiens
  misc_RNA (1)...(19): siRNA sense strand
cccaaggcuuucucauuuc

SEQ ID NO: 1503070 - RNA, 19 nt, Homo sapiens
  misc_RNA (1)...(19): siRNA sense strand
ccaaggcuuucucauuucc

SEQ ID NO: 1503071 - RNA, 19 nt, Homo sapiens
  misc_RNA (1)...(19): siRNA sense strand
gacgcuuacugcuccuuca

SEQ ID NO: 1503072 - RNA, 19 nt, Homo sapiens
  misc_RNA (1)...(19): siRNA sense strand
agucagugcccuucaguua

SEQ ID NO: 1503073 - RNA, 19 nt, Homo sapiens
  misc_RNA (1)...(19): siRNA sense strand
ggagggaguuugggaucga

SEQ ID NO: 1503074 - RNA, 19 nt, Homo sapiens
  misc_RNA (1)...(19): siRNA sense strand
gagcaggcaccuaucuugu

SEQ ID NO: 1503075 - RNA, 19 nt, Homo sapiens
  misc_RNA (1)...(19): siRNA sense strand
agucucagcuuucucaucu

SEQ ID NO: 1503076 - RNA, 19 nt, Homo sapiens
  misc_RNA (1)...(19): siRNA sense strand
ggauucggguccagauucu

SEQ ID NO: 1503077 - RNA, 19 nt, Homo sapiens
  misc_RNA (1)...(19): siRNA sense strand
guugggacaaguacaguaa

SEQ ID NO: 1503078 - RNA, 19 nt, Homo sapiens
  misc_RNA (1)...(19): siRNA sense strand
gucagugcccuucaguuaa

SEQ ID NO: 1503079 - RNA, 19 nt, Homo sapiens
  misc_RNA (1)...(19): siRNA sense strand
ucucagcuuucucaucugu

SEQ ID NO: 1503080 - RNA, 19 nt, Homo sapiens
  misc_RNA (1)...(19): siRNA sense strand
ccuuagagcaggcaccuau

SEQ ID NO: 1503081 - RNA, 19 nt, Homo sapiens
  misc_RNA (1)...(19): siRNA sense strand
ucagcuuucucaucuguac

SEQ ID NO: 1503082 - RNA, 19 nt, Homo sapiens
  misc_RNA (1)...(19): siRNA sense strand
agagcaggcaccuaucuug

SEQ ID NO: 1503083 - RNA, 19 nt, Homo sapiens
  misc_RNA (1)...(19): siRNA sense strand
gcagaaacgugauuauaga

SEQ ID NO: 1503084 - RNA, 19 nt, Homo sapiens
  misc_RNA (1)...(19): siRNA sense strand
gcagaaagaugaugaagca

SEQ ID NO: 1503085 - RNA, 19 nt, Homo sapiens
  misc_RNA (1)...(19): siRNA sense strand
gaaagaugaugaagcagaa

SEQ ID NO: 1503086 - RNA, 19 nt, Homo sapiens
  misc_RNA (1)...(19): siRNA sense strand
gaagaggaagaacaaauua

SEQ ID NO: 1503087 - RNA, 19 nt, Homo sapiens
  misc_RNA (1)...(19): siRNA sense strand
ggaagaagaaggagaagaa

SEQ ID NO: 1503088 - RNA, 19 nt, Homo sapiens
  misc_RNA (1)...(19): siRNA sense strand
guucagggaucgccucuaa

SEQ ID NO: 1503089 - RNA, 19 nt, Homo sapiens
  misc_RNA (1)...(19): siRNA sense strand
ggaagaggaagaacaaauu

SEQ ID NO: 1503090 - RNA, 19 nt, Homo sapiens
  misc_RNA (1)...(19): siRNA sense strand
ggaggaagauguaacugau

SEQ ID NO: 1503091 - RNA, 19 nt, Homo sapiens
  misc_RNA (1)...(19): siRNA sense strand
ccaugaagcuagaacauau

SEQ ID NO: 1503092 - RNA, 19 nt, Homo sapiens
  misc_RNA (1)...(19): siRNA sense strand
gaaagaagaggaggaagaa

SEQ ID NO: 1503093 - RNA, 19 nt, Homo sapiens
  misc_RNA (1)...(19): siRNA sense strand
ggaagaagaagaagaggaa

SEQ ID NO: 1503094 - RNA, 19 nt, Homo sapiens
  misc_RNA (1)...(19): siRNA sense strand
ggaagaggaagaagaagaa

SEQ ID NO: 1503095 - RNA, 19 nt, Homo sapiens
  misc_RNA (1)...(19): siRNA sense strand
cgaagaagcacacaggaaa

SEQ ID NO: 1503096 - RNA, 19 nt, Homo sapiens
  misc_RNA (1)...(19): siRNA sense strand
caaggacacuaaagacaau

SEQ ID NO: 1503097 - RNA, 19 nt, Homo sapiens
  misc_RNA (1)...(19): siRNA sense strand
cagagaagcagaaagauga

SEQ ID NO: 1503098 - RNA, 19 nt, Homo sapiens
  misc_RNA (1)...(19): siRNA sense strand
gaaacgugauuauagacau

SEQ ID NO: 1503099 - RNA, 19 nt, Homo sapiens
  misc_RNA (1)...(19): siRNA sense strand
aagaauacaucgcagagaa

SEQ ID NO: 1503100 - RNA, 19 nt, Homo sapiens
  misc_RNA (1)...(19): siRNA sense strand
gagaagaaacagaagaaga

SEQ ID NO: 1503101 - RNA, 19 nt, Homo sapiens
  misc_RNA (1)...(19): siRNA sense strand
uauugcagcugacauuaaa

SEQ ID NO: 1503102 - RNA, 19 nt, Homo sapiens
  misc_RNA (1)...(19): siRNA sense strand
gagaugaagccgcuacuug

SEQ ID NO: 1503103 - RNA, 19 nt, Homo sapiens
  misc_RNA (1)...(19): siRNA sense strand
ggaggaagaagaaggagaa

SEQ ID NO: 1503104 - RNA, 19 nt, Homo sapiens
  misc_RNA (1)...(19): siRNA sense strand
cagaagagguggcaacaac

SEQ ID NO: 1503105 - RNA, 19 nt, Homo sapiens
  misc_RNA (1)...(19): siRNA sense strand
caucauuucuuccagugaa

SEQ ID NO: 1503106 - RNA, 19 nt, Homo sapiens
  misc_RNA (1)...(19): siRNA sense strand
gcagagaagcagaaagaug

SEQ ID NO: 1503107 - RNA, 19 nt, Homo sapiens
  misc_RNA (1)...(19): siRNA sense strand
ggagaaagaagaggaggaa

SEQ ID NO: 1503108 - RNA, 19 nt, Homo sapiens
  misc_RNA (1)...(19): siRNA sense strand
aaaccaagaacacaauuga

SEQ ID NO: 1503109 - RNA, 19 nt, Homo sapiens
  misc_RNA (1)...(19): siRNA sense strand
guuggaagcucaaguuagg

SEQ ID NO: 1503110 - RNA, 19 nt, Homo sapiens
  misc_RNA (1)...(19): siRNA sense strand
agaagaaggagaagaagaa

SEQ ID NO: 1503111 - RNA, 19 nt, Homo sapiens
  misc_RNA (1)...(19): siRNA sense strand
gaauguccuuaaagaauac

SEQ ID NO: 1503112 - RNA, 19 nt, Homo sapiens
  misc_RNA (1)...(19): siRNA sense strand
gaacacacggggauucaua

SEQ ID NO: 1503113 - RNA, 19 nt, Homo sapiens
  misc_RNA (1)...(19): siRNA sense strand
aggaagauguaacugauga

SEQ ID NO: 1503114 - RNA, 19 nt, Homo sapiens
  misc_RNA (1)...(19): siRNA sense strand
caauugaacgugcuuugaa

SEQ ID NO: 1503115 - RNA, 19 nt, Homo sapiens
  misc_RNA (1)...(19): siRNA sense strand
gcaggaagcgcagcaggaa

SEQ ID NO: 1503116 - RNA, 19 nt, Homo sapiens
  misc_RNA (1)...(19): siRNA sense strand
ccaaggacacuaaagacaa

SEQ ID NO: 1503117 - RNA, 19 nt, Homo sapiens
  misc_RNA (1)...(19): siRNA sense strand
ggaagaacaaauuaaagca

SEQ ID NO: 1503118 - RNA, 19 nt, Homo sapiens
  misc_RNA (1)...(19): siRNA sense strand
gcaggaagcgcagcaggaa

SEQ ID NO: 1503119 - RNA, 19 nt, Homo sapiens
  misc_RNA (1)...(19): siRNA sense strand
gggaggaagauguaacuga

SEQ ID NO: 1503120 - RNA, 19 nt, Homo sapiens
  misc_RNA (1)...(19): siRNA sense strand
cagcagaaguaauaguagu

SEQ ID NO: 1503121 - RNA, 19 nt, Homo sapiens
  misc_RNA (1)...(19): siRNA sense strand
ggcagaaacgugauuauag

SEQ ID NO: 1503122 - RNA, 19 nt, Homo sapiens
  misc_RNA (1)...(19): siRNA sense strand
gaagcuagaacauauugca

SEQ ID NO: 1503123 - RNA, 19 nt, Homo sapiens
  misc_RNA (1)...(19): siRNA sense strand
gaacauauugcagcugaca

SEQ ID NO: 1503124 - RNA, 19 nt, Homo sapiens
  misc_RNA (1)...(19): siRNA sense strand
gccgcuacuugagcaauua

SEQ ID NO: 1503125 - RNA, 19 nt, Homo sapiens
  misc_RNA (1)...(19): siRNA sense strand
aauugaacgugcuuugaaa

SEQ ID NO: 1503126 - RNA, 19 nt, Homo sapiens
  misc_RNA (1)...(19): siRNA sense strand
agaaggagaagaaacagaa

SEQ ID NO: 1503127 - RNA, 19 nt, Homo sapiens
  misc_RNA (1)...(19): siRNA sense strand
agaaggaggaggagaagaa

SEQ ID NO: 1503128 - RNA, 19 nt, Homo sapiens
  misc_RNA (1)...(19): siRNA sense strand
caggaaggcugccaaagcu

SEQ ID NO: 1503129 - RNA, 19 nt, Homo sapiens
  misc_RNA (1)...(19): siRNA sense strand
caggaaggcugccaaagcu

SEQ ID NO: 1503130 - RNA, 19 nt, Homo sapiens
  misc_RNA (1)...(19): siRNA sense strand
ugaugaaugugaggaaaga

SEQ ID NO: 1503131 - RNA, 19 nt, Homo sapiens
  misc_RNA (1)...(19): siRNA sense strand
ggacacuaaagacaauuau

SEQ ID NO: 1503132 - RNA, 19 nt, Homo sapiens
  misc_RNA (1)...(19): siRNA sense strand
gaagaagcacacaggaaag

SEQ ID NO: 1503133 - RNA, 19 nt, Homo sapiens
  misc_RNA (1)...(19): siRNA sense strand
gcgaagaagcacacaggaa

SEQ ID NO: 1503134 - RNA, 19 nt, Homo sapiens
  misc_RNA (1)...(19): siRNA sense strand
aaacaagggaggaagaugu

SEQ ID NO: 1503135 - RNA, 19 nt, Homo sapiens
  misc_RNA (1)...(19): siRNA sense strand
gaagcagaaagaugaugaa

SEQ ID NO: 1503136 - RNA, 19 nt, Homo sapiens
  misc_RNA (1)...(19): siRNA sense strand
cuacuugagcaauuacuaa

SEQ ID NO: 1503137 - RNA, 19 nt, Homo sapiens
  misc_RNA (1)...(19): siRNA sense strand
agaagaagaggaagaggaa

SEQ ID NO: 1503138 - RNA, 19 nt, Homo sapiens
  misc_RNA (1)...(19): siRNA sense strand
agaagaagaggaagaggaa

SEQ ID NO: 1503139 - RNA, 19 nt, Homo sapiens
  misc_RNA (1)...(19): siRNA sense strand
agaaacagaagaagaggaa

SEQ ID NO: 1503140 - RNA, 19 nt, Homo sapiens
  misc_RNA (1)...(19): siRNA sense strand
gaaguaauaguaguagaag

SEQ ID NO: 1503141 - RNA, 19 nt, Homo sapiens
  misc_RNA (1)...(19): siRNA sense strand
agaaggagaagaagaagga

SEQ ID NO: 1503142 - RNA, 19 nt, Homo sapiens
  misc_RNA (1)...(19): siRNA sense strand
guuggaagcucaaguuacg

SEQ ID NO: 1503143 - RNA, 19 nt, Homo sapiens
  misc_RNA (1)...(19): siRNA sense strand
aaacagaagaagaggaaga

SEQ ID NO: 1503144 - RNA, 19 nt, Homo sapiens
  misc_RNA (1)...(19): siRNA sense strand
agaagaaggagaagaagga

SEQ ID NO: 1503145 - RNA, 19 nt, Homo sapiens
  misc_RNA (1)...(19): siRNA sense strand
gaaacaagggaggaagaug

SEQ ID NO: 1503146 - RNA, 19 nt, Homo sapiens
  misc_RNA (1)...(19): siRNA sense strand
agaugaagccgcuacuuga

SEQ ID NO: 1503147 - RNA, 19 nt, Homo sapiens
  misc_RNA (1)...(19): siRNA sense strand
gaggaagaacaaauuaaag

SEQ ID NO: 1503148 - RNA, 19 nt, Homo sapiens
  misc_RNA (1)...(19): siRNA sense strand
agaggaagaggaagaagaa

SEQ ID NO: 1503149 - RNA, 19 nt, Homo sapiens
  misc_RNA (1)...(19): siRNA sense strand
agaaagaagaggaggaaga

SEQ ID NO: 1503150 - RNA, 19 nt, Homo sapiens
  misc_RNA (1)...(19): siRNA sense strand
ucgcagagaagcagaaaga

SEQ ID NO: 1503151 - RNA, 19 nt, Homo sapiens
  misc_RNA (1)...(19): siRNA sense strand
guugcugaauguccuuaaa

SEQ ID NO: 1503152 - RNA, 19 nt, Homo sapiens
  misc_RNA (1)...(19): siRNA sense strand
aagaagaggaggaagaaga

SEQ ID NO: 1503153 - RNA, 19 nt, Homo sapiens
  misc_RNA (1)...(19): siRNA sense strand
agauguaacugaugagcau

SEQ ID NO: 1503154 - RNA, 19 nt, Homo sapiens
  misc_RNA (1)...(19): siRNA sense strand
gcuggaggcugagagagau

SEQ ID NO: 1503155 - RNA, 19 nt, Homo sapiens
  misc_RNA (1)...(19): siRNA sense strand
gagaaggagaagaaacaga

SEQ ID NO: 1503156 - RNA, 19 nt, Homo sapiens
  misc_RNA (1)...(19): siRNA sense strand
agaagaaggaggaggagaa

SEQ ID NO: 1503157 - RNA, 19 nt, Homo sapiens
  misc_RNA (1)...(19): siRNA sense strand
agaagaggaggaagaagaa

SEQ ID NO: 1503158 - RNA, 19 nt, Homo sapiens
  misc_RNA (1)...(19): siRNA sense strand
ggaggaggaggagaaagaa

SEQ ID NO: 1503159 - RNA, 19 nt, Homo sapiens
  misc_RNA (1)...(19): siRNA sense strand
cagaaguaauaguaguaga

SEQ ID NO: 1503160 - RNA, 19 nt, Homo sapiens
  misc_RNA (1)...(19): siRNA sense strand
gcugaauguccuuaaagaa

SEQ ID NO: 1503161 - RNA, 19 nt, Homo sapiens
  misc_RNA (1)...(19): siRNA sense strand
acucggaaguugcugaaug

SEQ ID NO: 1503162 - RNA, 19 nt, Homo sapiens
  misc_RNA (1)...(19): siRNA sense strand
cauauugcagcugacauua

SEQ ID NO: 1503163 - RNA, 19 nt, Homo sapiens
  misc_RNA (1)...(19): siRNA sense strand
ugaagcagaagaagcagaa

SEQ ID NO: 1503164 - RNA, 19 nt, Homo sapiens
  misc_RNA (1)...(19): siRNA sense strand
gaagaaggaggaggagaag

SEQ ID NO: 1503165 - RNA, 19 nt, Homo sapiens
  misc_RNA (1)...(19): siRNA sense strand
gaagcacacaggaaaggau

SEQ ID NO: 1503166 - RNA, 19 nt, Homo sapiens
  misc_RNA (1)...(19): siRNA sense strand
agcagcagcagaaguaaua

SEQ ID NO: 1503167 - RNA, 19 nt, Homo sapiens
  misc_RNA (1)...(19): siRNA sense strand
aggcagaaacgugauuaua

SEQ ID NO: 1503168 - RNA, 19 nt, Homo sapiens
  misc_RNA (1)...(19): siRNA sense strand
aagaaacccuuuuacagaa

SEQ ID NO: 1503169 - RNA, 19 nt, Homo sapiens
  misc_RNA (1)...(19): siRNA sense strand
agaagaaacagaagaagag

SEQ ID NO: 1503170 - RNA, 19 nt, Homo sapiens
  misc_RNA (1)...(19): siRNA sense strand
ggaggaggaggaggagaaa

SEQ ID NO: 1503171 - RNA, 19 nt, Homo sapiens
  misc_RNA (1)...(19): siRNA sense strand
gcagaaguaauaguaguag

SEQ ID NO: 1503172 - RNA, 19 nt, Homo sapiens
  misc_RNA (1)...(19): siRNA sense strand
cugaauguccuuaaagaau

SEQ ID NO: 1503173 - RNA, 19 nt, Homo sapiens
  misc_RNA (1)...(19): siRNA sense strand
ucaguuggaagcucaaguu

SEQ ID NO: 1503174 - RNA, 19 nt, Homo sapiens
  misc_RNA (1)...(19): siRNA sense strand
ucaguuggaagcucaaguu

SEQ ID NO: 1503175 - RNA, 19 nt, Homo sapiens
  misc_RNA (1)...(19): siRNA sense strand
gaagaagaaggagaagaag

SEQ ID NO: 1503176 - RNA, 19 nt, Homo sapiens
  misc_RNA (1)...(19): siRNA sense strand
aaaggcagaaacgugauua

SEQ ID NO: 1503177 - RNA, 19 nt, Homo sapiens
  misc_RNA (1)...(19): siRNA sense strand
agaggaagaggaagaacaa

SEQ ID NO: 1503178 - RNA, 19 nt, Homo sapiens
  misc_RNA (1)...(19): siRNA sense strand
gaagaaggagaagaagaag

SEQ ID NO: 1503179 - RNA, 19 nt, Homo sapiens
  misc_RNA (1)...(19): siRNA sense strand
ggaggagaaggagaagaaa

SEQ ID NO: 1503180 - RNA, 19 nt, Homo sapiens
  misc_RNA (1)...(19): siRNA sense strand
gcuacuugagcaauuacua

SEQ ID NO: 1503181 - RNA, 19 nt, Homo sapiens
  misc_RNA (1)...(19): siRNA sense strand
caguuggaagcucaaguua

SEQ ID NO: 1503182 - RNA, 19 nt, Homo sapiens
  misc_RNA (1)...(19): siRNA sense strand
cgugaugaaugugaggaaa

SEQ ID NO: 1503183 - RNA, 19 nt, Homo sapiens
  misc_RNA (1)...(19): siRNA sense strand
gaccaucacuguuucuuca

SEQ ID NO: 1503184 - RNA, 19 nt, Homo sapiens
  misc_RNA (1)...(19): siRNA sense strand
gcacgaccaucacuguuuc

SEQ ID NO: 1503185 - RNA, 19 nt, Homo sapiens
  misc_RNA (1)...(19): siRNA sense strand
gcaauuacguccuugucau

SEQ ID NO: 1503186 - RNA, 19 nt, Homo sapiens
  misc_RNA (1)...(19): siRNA sense strand
gcaggaacaugcgcaacuu

SEQ ID NO: 1503187 - RNA, 19 nt, Homo sapiens
  misc_RNA (1)...(19): siRNA sense strand
gcaucucccuggugaccuu

SEQ ID NO: 1503188 - RNA, 19 nt, Homo sapiens
  misc_RNA (1)...(19): siRNA sense strand
ggcacgaccaucacuguuu

SEQ ID NO: 1503189 - RNA, 19 nt, Homo sapiens
  misc_RNA (1)...(19): siRNA sense strand
acaccucccuggcgcaaga

SEQ ID NO: 1503190 - RNA, 19 nt, Homo sapiens
  misc_RNA (1)...(19): siRNA sense strand
gcaacuucguccuguucug

SEQ ID NO: 1503191 - RNA, 19 nt, Homo sapiens
  misc_RNA (1)...(19): siRNA sense strand
gcgcaagaacuuacaagag

SEQ ID NO: 1503192 - RNA, 19 nt, Homo sapiens
  misc_RNA (1)...(19): siRNA sense strand
cauguucaaugucggaagu

SEQ ID NO: 1503193 - RNA, 19 nt, Homo sapiens
  misc_RNA (1)...(19): siRNA sense strand
gcgcaacuucguccuguuc

SEQ ID NO: 1503194 - RNA, 19 nt, Homo sapiens
  misc_RNA (1)...(19): siRNA sense strand
gaggcacgaccaucacugu

SEQ ID NO: 1503195 - RNA, 19 nt, Homo sapiens
  misc_RNA (1)...(19): siRNA sense strand
caauuacguccuugucauc

SEQ ID NO: 1503196 - RNA, 19 nt, Homo sapiens
  misc_RNA (1)...(19): siRNA sense strand
ggcaauuacguccuuguca

SEQ ID NO: 1503197 - RNA, 19 nt, Homo sapiens
  misc_RNA (1)...(19): siRNA sense strand
ccugggcaauuacguccuu

SEQ ID NO: 1503198 - RNA, 19 nt, Homo sapiens
  misc_RNA (1)...(19): siRNA sense strand
gcaagagauuggaaacuua

SEQ ID NO: 1503199 - RNA, 19 nt, Homo sapiens
  misc_RNA (1)...(19): siRNA sense strand
gaagauggcuuuacauuuu

SEQ ID NO: 1503200 - RNA, 19 nt, Homo sapiens
  misc_RNA (1)...(19): siRNA sense strand
ggauaaagaugcugaguau

SEQ ID NO: 1503201 - RNA, 19 nt, Homo sapiens
  misc_RNA (1)...(19): siRNA sense strand
gaaagcaccugagucauug

SEQ ID NO: 1503202 - RNA, 19 nt, Homo sapiens
  misc_RNA (1)...(19): siRNA sense strand
ggaaauugaucauuacugu

SEQ ID NO: 1503203 - RNA, 19 nt, Homo sapiens
  misc_RNA (1)...(19): siRNA sense strand
gaagaaagaaguagaugaa

SEQ ID NO: 1503204 - RNA, 19 nt, Homo sapiens
  misc_RNA (1)...(19): siRNA sense strand
ggcauguacugaacaauua

SEQ ID NO: 1503205 - RNA, 19 nt, Homo sapiens
  misc_RNA (1)...(19): siRNA sense strand
agucaaagcuugccaauau

SEQ ID NO: 1503206 - RNA, 19 nt, Homo sapiens
  misc_RNA (1)...(19): siRNA sense strand
cagcagauaucuaggcaua

SEQ ID NO: 1503207 - RNA, 19 nt, Homo sapiens
  misc_RNA (1)...(19): siRNA sense strand
gaagagaugauucaaagaa

SEQ ID NO: 1503208 - RNA, 19 nt, Homo sapiens
  misc_RNA (1)...(19): siRNA sense strand
gaaaagaacugaaagaaag

SEQ ID NO: 1503209 - RNA, 19 nt, Homo sapiens
  misc_RNA (1)...(19): siRNA sense strand
gaaagaaguagaugaaaug

SEQ ID NO: 1503210 - RNA, 19 nt, Homo sapiens
  misc_RNA (1)...(19): siRNA sense strand
aaacaugccagcaaucuua

SEQ ID NO: 1503211 - RNA, 19 nt, Homo sapiens
  misc_RNA (1)...(19): siRNA sense strand
agaaguagaugaaauggaa

SEQ ID NO: 1503212 - RNA, 19 nt, Homo sapiens
  misc_RNA (1)...(19): siRNA sense strand
gaauuugucuuccaguaug

SEQ ID NO: 1503213 - RNA, 19 nt, Homo sapiens
  misc_RNA (1)...(19): siRNA sense strand
ggagauaaagggacaguaa

SEQ ID NO: 1503214 - RNA, 19 nt, Homo sapiens
  misc_RNA (1)...(19): siRNA sense strand
caucagaucaguuuaauga

SEQ ID NO: 1503215 - RNA, 19 nt, Homo sapiens
  misc_RNA (1)...(19): siRNA sense strand
gcagauaucuaggcauaau

SEQ ID NO: 1503216 - RNA, 19 nt, Homo sapiens
  misc_RNA (1)...(19): siRNA sense strand
gagcaagacauaaguacua

SEQ ID NO: 1503217 - RNA, 19 nt, Homo sapiens
  misc_RNA (1)...(19): siRNA sense strand
caacagaugaggaaauuga

SEQ ID NO: 1503218 - RNA, 19 nt, Homo sapiens
  misc_RNA (1)...(19): siRNA sense strand
gaaccaagaguugcagaua

SEQ ID NO: 1503219 - RNA, 19 nt, Homo sapiens
  misc_RNA (1)...(19): siRNA sense strand
ccacagaaacaaucaaauu

SEQ ID NO: 1503220 - RNA, 19 nt, Homo sapiens
  misc_RNA (1)...(19): siRNA sense strand
gaagagagagcugagaauu

SEQ ID NO: 1503221 - RNA, 19 nt, Homo sapiens
  misc_RNA (1)...(19): siRNA sense strand
gaaaagagaacaugaagaa

SEQ ID NO: 1503222 - RNA, 19 nt, Homo sapiens
  misc_RNA (1)...(19): siRNA sense strand
gagaagauggcuuuacauu

SEQ ID NO: 1503223 - RNA, 19 nt, Homo sapiens
  misc_RNA (1)...(19): siRNA sense strand
ggaccaauuuacuguuuau

SEQ ID NO: 1503224 - RNA, 19 nt, Homo sapiens
  misc_RNA (1)...(19): siRNA sense strand
ucagacacuucaacucaua

SEQ ID NO: 1503225 - RNA, 19 nt, Homo sapiens
  misc_RNA (1)...(19): siRNA sense strand
guucacauauuacgacuau

SEQ ID NO: 1503226 - RNA, 19 nt, Homo sapiens
  misc_RNA (1)...(19): siRNA sense strand
gaaaugcaguaccugaagu

SEQ ID NO: 1503227 - RNA, 19 nt, Homo sapiens
  misc_RNA (1)...(19): siRNA sense strand
cgucugaaauuccuauauu

SEQ ID NO: 1503228 - RNA, 19 nt, Homo sapiens
  misc_RNA (1)...(19): siRNA sense strand
gugaggagauuaaagacaa

SEQ ID NO: 1503229 - RNA, 19 nt, Homo sapiens
  misc_RNA (1)...(19): siRNA sense strand
auacagaaaucucaucaga

SEQ ID NO: 1503230 - RNA, 19 nt, Homo sapiens
  misc_RNA (1)...(19): siRNA sense strand
aagaagagaugauucaaag

SEQ ID NO: 1503231 - RNA, 19 nt, Homo sapiens
  misc_RNA (1)...(19): siRNA sense strand
ucaccuggauugaauuuau

SEQ ID NO: 1503232 - RNA, 19 nt, Homo sapiens
  misc_RNA (1)...(19): siRNA sense strand
aaagacaacuguagaaacu

SEQ ID NO: 1503233 - RNA, 19 nt, Homo sapiens
  misc_RNA (1)...(19): siRNA sense strand
ugaaagcaccugagucauu

SEQ ID NO: 1503234 - RNA, 19 nt, Homo sapiens
  misc_RNA (1)...(19): siRNA sense strand
ccacgaacgucugaaauuc

SEQ ID NO: 1503235 - RNA, 19 nt, Homo sapiens
  misc_RNA (1)...(19): siRNA sense strand
guacuucacaagcuauaua

SEQ ID NO: 1503236 - RNA, 19 nt, Homo sapiens
  misc_RNA (1)...(19): siRNA sense strand
aaacuaaggcucuuucaga

SEQ ID NO: 1503237 - RNA, 19 nt, Homo sapiens
  misc_RNA (1)...(19): siRNA sense strand
uagaauuugucuuccagua

SEQ ID NO: 1503238 - RNA, 19 nt, Homo sapiens
  misc_RNA (1)...(19): siRNA sense strand
accaagaguugcagauaua

SEQ ID NO: 1503239 - RNA, 19 nt, Homo sapiens
  misc_RNA (1)...(19): siRNA sense strand
caggaccaauuuacuguuu

SEQ ID NO: 1503240 - RNA, 19 nt, Homo sapiens
  misc_RNA (1)...(19): siRNA sense strand
gaaauucaaagcagagugu

SEQ ID NO: 1503241 - RNA, 19 nt, Homo sapiens
  misc_RNA (1)...(19): siRNA sense strand
ggaagucaauagaaaauga

SEQ ID NO: 1503242 - RNA, 19 nt, Homo sapiens
  misc_RNA (1)...(19): siRNA sense strand
ugauagugaugaaguagaa

SEQ ID NO: 1503243 - RNA, 19 nt, Homo sapiens
  misc_RNA (1)...(19): siRNA sense strand
uagaucaccuggauugaau

SEQ ID NO: 1503244 - RNA, 19 nt, Homo sapiens
  misc_RNA (1)...(19): siRNA sense strand
aaacauagugaggagauua

SEQ ID NO: 1503245 - RNA, 19 nt, Homo sapiens
  misc_RNA (1)...(19): siRNA sense strand
cacuucaacucauacauuu

SEQ ID NO: 1503246 - RNA, 19 nt, Homo sapiens
  misc_RNA (1)...(19): siRNA sense strand
cacaagcuauauauacuga

SEQ ID NO: 1503247 - RNA, 19 nt, Homo sapiens
  misc_RNA (1)...(19): siRNA sense strand
uaaagaugcugaguaugga

SEQ ID NO: 1503248 - RNA, 19 nt, Homo sapiens
  misc_RNA (1)...(19): siRNA sense strand
guaacuauuuguaggauac

SEQ ID NO: 1503249 - RNA, 19 nt, Homo sapiens
  misc_RNA (1)...(19): siRNA sense strand
gaguuauacuucuagauca

SEQ ID NO: 1503250 - RNA, 19 nt, Homo sapiens
  misc_RNA (1)...(19): siRNA sense strand
cauccgaauugaagaaaga

SEQ ID NO: 1503251 - RNA, 19 nt, Homo sapiens
  misc_RNA (1)...(19): siRNA sense strand
gaaacuggaagccaacaug

SEQ ID NO: 1503252 - RNA, 19 nt, Homo sapiens
  misc_RNA (1)...(19): siRNA sense strand
ucacgugaauauuaugaga

SEQ ID NO: 1503253 - RNA, 19 nt, Homo sapiens
  misc_RNA (1)...(19): siRNA sense strand
gggauaaagaugcugagua

SEQ ID NO: 1503254 - RNA, 19 nt, Homo sapiens
  misc_RNA (1)...(19): siRNA sense strand
uaggauacacgaaacuaua

SEQ ID NO: 1503255 - RNA, 19 nt, Homo sapiens
  misc_RNA (1)...(19): siRNA sense strand
acacgaaacuauaaaugca

SEQ ID NO: 1503256 - RNA, 19 nt, Homo sapiens
  misc_RNA (1)...(19): siRNA sense strand
gagauuaaagacaacugua

SEQ ID NO: 1503257 - RNA, 19 nt, Homo sapiens
  misc_RNA (1)...(19): siRNA sense strand
caucagacacuucaacuca

SEQ ID NO: 1503258 - RNA, 19 nt, Homo sapiens
  misc_RNA (1)...(19): siRNA sense strand
gagauuggaaacuuauuug

SEQ ID NO: 1503259 - RNA, 19 nt, Homo sapiens
  misc_RNA (1)...(19): siRNA sense strand
cagaucaguuuaaugaaca

SEQ ID NO: 1503260 - RNA, 19 nt, Homo sapiens
  misc_RNA (1)...(19): siRNA sense strand
gaucaccuggauugaauuu

SEQ ID NO: 1503261 - RNA, 19 nt, Homo sapiens
  misc_RNA (1)...(19): siRNA sense strand
agagagagcugagaauuuu

SEQ ID NO: 1503262 - RNA, 19 nt, Homo sapiens
  misc_RNA (1)...(19): siRNA sense strand
aaauguacuucacaagcua

SEQ ID NO: 1503263 - RNA, 19 nt, Homo sapiens
  misc_RNA (1)...(19): siRNA sense strand
gcagaguguuggcauguac

SEQ ID NO: 1503264 - RNA, 19 nt, Homo sapiens
  misc_RNA (1)...(19): siRNA sense strand
ggacagacuuuugcuagaa

SEQ ID NO: 1503265 - RNA, 19 nt, Homo sapiens
  misc_RNA (1)...(19): siRNA sense strand
gacaguaagacaaguaaga

SEQ ID NO: 1503266 - RNA, 19 nt, Homo sapiens
  misc_RNA (1)...(19): siRNA sense strand
acucaaagcagucaauuau

SEQ ID NO: 1503267 - RNA, 19 nt, Homo sapiens
  misc_RNA (1)...(19): siRNA sense strand
cgaauugaagaaagaagua

SEQ ID NO: 1503268 - RNA, 19 nt, Homo sapiens
  misc_RNA (1)...(19): siRNA sense strand
gauuaaagacaacuguaga

SEQ ID NO: 1503269 - RNA, 19 nt, Homo sapiens
  misc_RNA (1)...(19): siRNA sense strand
agaaggagaagauggcuuu

SEQ ID NO: 1503270 - RNA, 19 nt, Homo sapiens
  misc_RNA (1)...(19): siRNA sense strand
gaacgucugaaauuccuau

SEQ ID NO: 1503271 - RNA, 19 nt, Homo sapiens
  misc_RNA (1)...(19): siRNA sense strand
uuacgacuaucacaaguuc

SEQ ID NO: 1503272 - RNA, 19 nt, Homo sapiens
  misc_RNA (1)...(19): siRNA sense strand
ucacauauuacgacuauca

SEQ ID NO: 1503273 - RNA, 19 nt, Homo sapiens
  misc_RNA (1)...(19): siRNA sense strand
uuccaucacuuacuaaaug

SEQ ID NO: 1503274 - RNA, 19 nt, Homo sapiens
  misc_RNA (1)...(19): siRNA sense strand
ucgagugccugcucccuuu

SEQ ID NO: 1503275 - RNA, 19 nt, Homo sapiens
  misc_RNA (1)...(19): siRNA sense strand
agaagauggcuuuacauuu

SEQ ID NO: 1503276 - RNA, 19 nt, Homo sapiens
  misc_RNA (1)...(19): siRNA sense strand
caagagauuggaaacuuau

SEQ ID NO: 1503277 - RNA, 19 nt, Homo sapiens
  misc_RNA (1)...(19): siRNA sense strand
ggacuuucuuuucuuauga

SEQ ID NO: 1503278 - RNA, 19 nt, Homo sapiens
  misc_RNA (1)...(19): siRNA sense strand
uaaugacucugcuguggau

SEQ ID NO: 1503279 - RNA, 19 nt, Homo sapiens
  misc_RNA (1)...(19): siRNA sense strand
caaagcagucaauuauuuc

SEQ ID NO: 1503280 - RNA, 19 nt, Homo sapiens
  misc_RNA (1)...(19): siRNA sense strand
uaaaccagcagauaucuag

SEQ ID NO: 1503281 - RNA, 19 nt, Homo sapiens
  misc_RNA (1)...(19): siRNA sense strand
ugcaacagaugaggaaauu

SEQ ID NO: 1503282 - RNA, 19 nt, Homo sapiens
  misc_RNA (1)...(19): siRNA sense strand
cauaaguacuaaagaagag

SEQ ID NO: 1503283 - RNA, 19 nt, Homo sapiens
  misc_RNA (1)...(19): siRNA sense strand
gucaaagcuugccaauauu

SEQ ID NO: 1503284 - RNA, 19 nt, Homo sapiens
  misc_RNA (1)...(19): siRNA sense strand
cuaaagaagagaugauuca

SEQ ID NO: 1503285 - RNA, 19 nt, Homo sapiens
  misc_RNA (1)...(19): siRNA sense strand
aaagaugagcauguacuua

SEQ ID NO: 1503286 - RNA, 19 nt, Homo sapiens
  misc_RNA (1)...(19): siRNA sense strand
ucaauaccuucuucuucuu

SEQ ID NO: 1503287 - RNA, 19 nt, Homo sapiens
  misc_RNA (1)...(19): siRNA sense strand
aaaucuaaauccucuguca

SEQ ID NO: 1503288 - RNA, 19 nt, Homo sapiens
  misc_RNA (1)...(19): siRNA sense strand
ucagaucaguuuaaugaac

SEQ ID NO: 1503289 - RNA, 19 nt, Homo sapiens
  misc_RNA (1)...(19): siRNA sense strand
caccuggauugaauuuauu

SEQ ID NO: 1503290 - RNA, 19 nt, Homo sapiens
  misc_RNA (1)...(19): siRNA sense strand
caagacauaaguacuaaag

SEQ ID NO: 1503291 - RNA, 19 nt, Homo sapiens
  misc_RNA (1)...(19): siRNA sense strand
cagaaacaaucaaauucca

SEQ ID NO: 1503292 - RNA, 19 nt, Homo sapiens
  misc_RNA (1)...(19): siRNA sense strand
aacuaaggcucuuucagaa

SEQ ID NO: 1503293 - RNA, 19 nt, Homo sapiens
  misc_RNA (1)...(19): siRNA sense strand
gaaggagaagauggcuuua

SEQ ID NO: 1503294 - RNA, 19 nt, Homo sapiens
  misc_RNA (1)...(19): siRNA sense strand
ugaggaaauugaucauuac

SEQ ID NO: 1503295 - RNA, 19 nt, Homo sapiens
  misc_RNA (1)...(19): siRNA sense strand
uaaagggacaguaagacaa

SEQ ID NO: 1503296 - RNA, 19 nt, Homo sapiens
  misc_RNA (1)...(19): siRNA sense strand
ucaaagcuugccaauauug

SEQ ID NO: 1503297 - RNA, 19 nt, Homo sapiens
  misc_RNA (1)...(19): siRNA sense strand
aaccaagaguugcagauau

SEQ ID NO: 1503298 - RNA, 19 nt, Homo sapiens
  misc_RNA (1)...(19): siRNA sense strand
ggagggcccugagauuugu

SEQ ID NO: 1503299 - RNA, 19 nt, Homo sapiens
  misc_RNA (1)...(19): siRNA sense strand
caagggaaccaguugcaaa

SEQ ID NO: 1503300 - RNA, 19 nt, Homo sapiens
  misc_RNA (1)...(19): siRNA sense strand
gcgccuugguugcgaauug

SEQ ID NO: 1503301 - RNA, 19 nt, Homo sapiens
  misc_RNA (1)...(19): siRNA sense strand
aaacugcagugcugugcuu

SEQ ID NO: 1503302 - RNA, 19 nt, Homo sapiens
  misc_RNA (1)...(19): siRNA sense strand
gcccugagauuuguguugu

SEQ ID NO: 1503303 - RNA, 19 nt, Homo sapiens
  misc_RNA (1)...(19): siRNA sense strand
ggaugauuguuaccugaca

SEQ ID NO: 1503304 - RNA, 19 nt, Homo sapiens
  misc_RNA (1)...(19): siRNA sense strand
gcaggcucccgccaaagaa

SEQ ID NO: 1503305 - RNA, 19 nt, Homo sapiens
  misc_RNA (1)...(19): siRNA sense strand
ccugagauuuguguuguca

SEQ ID NO: 1503306 - RNA, 19 nt, Homo sapiens
  misc_RNA (1)...(19): siRNA sense strand
gcucggagaugaauugguu

SEQ ID NO: 1503307 - RNA, 19 nt, Homo sapiens
  misc_RNA (1)...(19): siRNA sense strand
gcuuucagcucucaaugga

SEQ ID NO: 1503308 - RNA, 19 nt, Homo sapiens
  misc_RNA (1)...(19): siRNA sense strand
caagcucggagaugaauug

SEQ ID NO: 1503309 - RNA, 19 nt, Homo sapiens
  misc_RNA (1)...(19): siRNA sense strand
cgugcaagcucggagauga

SEQ ID NO: 1503310 - RNA, 19 nt, Homo sapiens
  misc_RNA (1)...(19): siRNA sense strand
cggguaagaugccgugcaa

SEQ ID NO: 1503311 - RNA, 19 nt, Homo sapiens
  misc_RNA (1)...(19): siRNA sense strand
ucagguaccucuggagucu

SEQ ID NO: 1503312 - RNA, 19 nt, Homo sapiens
  misc_RNA (1)...(19): siRNA sense strand
ggccugggagucuuuagaa

SEQ ID NO: 1503313 - RNA, 19 nt, Homo sapiens
  misc_RNA (1)...(19): siRNA sense strand
gcccuauguuguccuguuc

SEQ ID NO: 1503314 - RNA, 19 nt, Homo sapiens
  misc_RNA (1)...(19): siRNA sense strand
ucccagagcccuauguugu

SEQ ID NO: 1503315 - RNA, 19 nt, Homo sapiens
  misc_RNA (1)...(19): siRNA sense strand
uguguguucugucuuguuc

SEQ ID NO: 1503316 - RNA, 19 nt, Homo sapiens
  misc_RNA (1)...(19): siRNA sense strand
gguucucgguaucggaaga

SEQ ID NO: 1503317 - RNA, 19 nt, Homo sapiens
  misc_RNA (1)...(19): siRNA sense strand
gguucucgguaucggaaga

SEQ ID NO: 1503318 - RNA, 19 nt, Homo sapiens
  misc_RNA (1)...(19): siRNA sense strand
gagcguggugggaggguau

SEQ ID NO: 1503319 - RNA, 19 nt, Homo sapiens
  misc_RNA (1)...(19): siRNA sense strand
gccugggagucuuuagaau

SEQ ID NO: 1503320 - RNA, 19 nt, Homo sapiens
  misc_RNA (1)...(19): siRNA sense strand
gucuuguucucaccucuga

SEQ ID NO: 1503321 - RNA, 19 nt, Homo sapiens
  misc_RNA (1)...(19): siRNA sense strand
gagaugauuucuucuauga

SEQ ID NO: 1503322 - RNA, 19 nt, Homo sapiens
  misc_RNA (1)...(19): siRNA sense strand
gaacagugcuuugagacaa

SEQ ID NO: 1503323 - RNA, 19 nt, Homo sapiens
  misc_RNA (1)...(19): siRNA sense strand
caauuuagaucaggaagua

SEQ ID NO: 1503324 - RNA, 19 nt, Homo sapiens
  misc_RNA (1)...(19): siRNA sense strand
gcgcucaucucgacacuaa

SEQ ID NO: 1503325 - RNA, 19 nt, Homo sapiens
  misc_RNA (1)...(19): siRNA sense strand
gaacagcguuacacugauc

SEQ ID NO: 1503326 - RNA, 19 nt, Homo sapiens
  misc_RNA (1)...(19): siRNA sense strand
gagagaugauuucuucuau

SEQ ID NO: 1503327 - RNA, 19 nt, Homo sapiens
  misc_RNA (1)...(19): siRNA sense strand
gcaaugaaucuacuuaaug

SEQ ID NO: 1503328 - RNA, 19 nt, Homo sapiens
  misc_RNA (1)...(19): siRNA sense strand
gaugaacagugcuuugaga

SEQ ID NO: 1503329 - RNA, 19 nt, Homo sapiens
  misc_RNA (1)...(19): siRNA sense strand
caaugaaucuacuuaaugg

SEQ ID NO: 1503330 - RNA, 19 nt, Homo sapiens
  misc_RNA (1)...(19): siRNA sense strand
ugaagugucuguuccuuau

SEQ ID NO: 1503331 - RNA, 19 nt, Homo sapiens
  misc_RNA (1)...(19): siRNA sense strand
gaggaaagagagaugauuu

SEQ ID NO: 1503332 - RNA, 19 nt, Homo sapiens
  misc_RNA (1)...(19): siRNA sense strand
ggaaucaaacuuuauggaa

SEQ ID NO: 1503333 - RNA, 19 nt, Homo sapiens
  misc_RNA (1)...(19): siRNA sense strand
gggaacagcguuacacuga

SEQ ID NO: 1503334 - RNA, 19 nt, Homo sapiens
  misc_RNA (1)...(19): siRNA sense strand
gcacagauaauucagagau

SEQ ID NO: 1503335 - RNA, 19 nt, Homo sapiens
  misc_RNA (1)...(19): siRNA sense strand
gggcaaccuugaaacgaaa

SEQ ID NO: 1503336 - RNA, 19 nt, Homo sapiens
  misc_RNA (1)...(19): siRNA sense strand
gauaacagaagagacagua

SEQ ID NO: 1503337 - RNA, 19 nt, Homo sapiens
  misc_RNA (1)...(19): siRNA sense strand
gaagacaggaaucaugaug

SEQ ID NO: 1503338 - RNA, 19 nt, Homo sapiens
  misc_RNA (1)...(19): siRNA sense strand
gaagagacaguaguagaga

SEQ ID NO: 1503339 - RNA, 19 nt, Homo sapiens
  misc_RNA (1)...(19): siRNA sense strand
gaugucaguuugucauauc

SEQ ID NO: 1503340 - RNA, 19 nt, Homo sapiens
  misc_RNA (1)...(19): siRNA sense strand
ccacaucuccuagcaggua

SEQ ID NO: 1503341 - RNA, 19 nt, Homo sapiens
  misc_RNA (1)...(19): siRNA sense strand
gaauucuuaucccuaccua

SEQ ID NO: 1503342 - RNA, 19 nt, Homo sapiens
  misc_RNA (1)...(19): siRNA sense strand
cagcguaaagucagaauga

SEQ ID NO: 1503343 - RNA, 19 nt, Homo sapiens
  misc_RNA (1)...(19): siRNA sense strand
ugacuaugauaacagaaga

SEQ ID NO: 1503344 - RNA, 19 nt, Homo sapiens
  misc_RNA (1)...(19): siRNA sense strand
gcgccaagguacaccauca

SEQ ID NO: 1503345 - RNA, 19 nt, Homo sapiens
  misc_RNA (1)...(19): siRNA sense strand
ccaugacuaugauaacaga

SEQ ID NO: 1503346 - RNA, 19 nt, Homo sapiens
  misc_RNA (1)...(19): siRNA sense strand
ccuagcagauagacauuau

SEQ ID NO: 1503347 - RNA, 19 nt, Homo sapiens
  misc_RNA (1)...(19): siRNA sense strand
ggaucgcacucucuuugug

SEQ ID NO: 1503348 - RNA, 19 nt, Homo sapiens
  misc_RNA (1)...(19): siRNA sense strand
gaccaucauuacagaggaa

SEQ ID NO: 1503349 - RNA, 19 nt, Homo sapiens
  misc_RNA (1)...(19): siRNA sense strand
ggaacagcguuacacugau

SEQ ID NO: 1503350 - RNA, 19 nt, Homo sapiens
  misc_RNA (1)...(19): siRNA sense strand
cguaaagucagaaugaauu

SEQ ID NO: 1503351 - RNA, 19 nt, Homo sapiens
  misc_RNA (1)...(19): siRNA sense strand
gaaucuacuuaauggaauc

SEQ ID NO: 1503352 - RNA, 19 nt, Homo sapiens
  misc_RNA (1)...(19): siRNA sense strand
gcaguuugcguuugugaau

SEQ ID NO: 1503353 - RNA, 19 nt, Homo sapiens
  misc_RNA (1)...(19): siRNA sense strand
acgaaaggacuauggauaa

SEQ ID NO: 1503354 - RNA, 19 nt, Homo sapiens
  misc_RNA (1)...(19): siRNA sense strand
gaaaggacuauggauaaca

SEQ ID NO: 1503355 - RNA, 19 nt, Homo sapiens
  misc_RNA (1)...(19): siRNA sense strand
ggagccaugacuaugauaa

SEQ ID NO: 1503356 - RNA, 19 nt, Homo sapiens
  misc_RNA (1)...(19): siRNA sense strand
agucauaguuucaaucagu

SEQ ID NO: 1503357 - RNA, 19 nt, Homo sapiens
  misc_RNA (1)...(19): siRNA sense strand
gacaagcagugaugaacag

SEQ ID NO: 1503358 - RNA, 19 nt, Homo sapiens
  misc_RNA (1)...(19): siRNA sense strand
caaaagauaaggaugguaa

SEQ ID NO: 1503359 - RNA, 19 nt, Homo sapiens
  misc_RNA (1)...(19): siRNA sense strand
cagaagagacaguaguaga

SEQ ID NO: 1503360 - RNA, 19 nt, Homo sapiens
  misc_RNA (1)...(19): siRNA sense strand
caucagcacagauaauuca

SEQ ID NO: 1503361 - RNA, 19 nt, Homo sapiens
  misc_RNA (1)...(19): siRNA sense strand
aaaggacuauggauaacau

SEQ ID NO: 1503362 - RNA, 19 nt, Homo sapiens
  misc_RNA (1)...(19): siRNA sense strand
caccaucaguucaaucaca

SEQ ID NO: 1503363 - RNA, 19 nt, Homo sapiens
  misc_RNA (1)...(19): siRNA sense strand
gcggaucgcacucucuuug

SEQ ID NO: 1503364 - RNA, 19 nt, Homo sapiens
  misc_RNA (1)...(19): siRNA sense strand
cccacaagaugucaguuug

SEQ ID NO: 1503365 - RNA, 19 nt, Homo sapiens
  misc_RNA (1)...(19): siRNA sense strand
agagagaugauuucuucua

SEQ ID NO: 1503366 - RNA, 19 nt, Homo sapiens
  misc_RNA (1)...(19): siRNA sense strand
uacgaaaggacuauggaua

SEQ ID NO: 1503367 - RNA, 19 nt, Homo sapiens
  misc_RNA (1)...(19): siRNA sense strand
cgaaaggacuauggauaac

SEQ ID NO: 1503368 - RNA, 19 nt, Homo sapiens
  misc_RNA (1)...(19): siRNA sense strand
uaacagaagagacaguagu

SEQ ID NO: 1503369 - RNA, 19 nt, Homo sapiens
  misc_RNA (1)...(19): siRNA sense strand
agagaugauuucuucuaug

SEQ ID NO: 1503370 - RNA, 19 nt, Homo sapiens
  misc_RNA (1)...(19): siRNA sense strand
aaucacacagucauaguuu

SEQ ID NO: 1503371 - RNA, 19 nt, Homo sapiens
  misc_RNA (1)...(19): siRNA sense strand
gacuucaucagcacagaua

SEQ ID NO: 1503372 - RNA, 19 nt, Homo sapiens
  misc_RNA (1)...(19): siRNA sense strand
gaaggccuaucaaaauuca

SEQ ID NO: 1503373 - RNA, 19 nt, Homo sapiens
  misc_RNA (1)...(19): siRNA sense strand
ugggcaaccuugaaacgaa

SEQ ID NO: 1503374 - RNA, 19 nt, Homo sapiens
  misc_RNA (1)...(19): siRNA sense strand
caaaugucauaugguggaa

SEQ ID NO: 1503375 - RNA, 19 nt, Homo sapiens
  misc_RNA (1)...(19): siRNA sense strand
aguuugcguuugugaauuu

SEQ ID NO: 1503376 - RNA, 19 nt, Homo sapiens
  misc_RNA (1)...(19): siRNA sense strand
acacagucauaguuucaau

SEQ ID NO: 1503377 - RNA, 19 nt, Homo sapiens
  misc_RNA (1)...(19): siRNA sense strand
guucuucaccucuggauca

SEQ ID NO: 1503378 - RNA, 19 nt, Homo sapiens
  misc_RNA (1)...(19): siRNA sense strand
uaugauaacagaagagaca

SEQ ID NO: 1503379 - RNA, 19 nt, Homo sapiens
  misc_RNA (1)...(19): siRNA sense strand
ugacuggagccaugacuau

SEQ ID NO: 1503380 - RNA, 19 nt, Homo sapiens
  misc_RNA (1)...(19): siRNA sense strand
guucaaucacacagucaua

SEQ ID NO: 1503381 - RNA, 19 nt, Homo sapiens
  misc_RNA (1)...(19): siRNA sense strand
uagcagauagacauuauag

SEQ ID NO: 1503382 - RNA, 19 nt, Homo sapiens
  misc_RNA (1)...(19): siRNA sense strand
ucacacagucauaguuuca

SEQ ID NO: 1503383 - RNA, 19 nt, Homo sapiens
  misc_RNA (1)...(19): siRNA sense strand
ucagagacaagcagugaug

SEQ ID NO: 1503384 - RNA, 19 nt, Homo sapiens
  misc_RNA (1)...(19): siRNA sense strand
caaucacacagucauaguu

SEQ ID NO: 1503385 - RNA, 19 nt, Homo sapiens
  misc_RNA (1)...(19): siRNA sense strand
gugaugaacagugcuuuga

SEQ ID NO: 1503386 - RNA, 19 nt, Homo sapiens
  misc_RNA (1)...(19): siRNA sense strand
acacugaucaugggucuga

SEQ ID NO: 1503387 - RNA, 19 nt, Homo sapiens
  misc_RNA (1)...(19): siRNA sense strand
caagaugucaguuugucau

SEQ ID NO: 1503388 - RNA, 19 nt, Homo sapiens
  misc_RNA (1)...(19): siRNA sense strand
ggugaaaauuccaaaagau

SEQ ID NO: 1503389 - RNA, 19 nt, Homo sapiens
  misc_RNA (1)...(19): siRNA sense strand
cuucaccucuggaucaauc

SEQ ID NO: 1503390 - RNA, 19 nt, Homo sapiens
  misc_RNA (1)...(19): siRNA sense strand
uggaaggccuaucaaaauu

SEQ ID NO: 1503391 - RNA, 19 nt, Homo sapiens
  misc_RNA (1)...(19): siRNA sense strand
aacagaagagacaguagua

SEQ ID NO: 1503392 - RNA, 19 nt, Homo sapiens
  misc_RNA (1)...(19): siRNA sense strand
caugaagugucuguuccuu

SEQ ID NO: 1503393 - RNA, 19 nt, Homo sapiens
  misc_RNA (1)...(19): siRNA sense strand
gcagugaugaacagugcuu

SEQ ID NO: 1503394 - RNA, 19 nt, Homo sapiens
  misc_RNA (1)...(19): siRNA sense strand
gacuauggauaacaugacu

SEQ ID NO: 1503395 - RNA, 19 nt, Homo sapiens
  misc_RNA (1)...(19): siRNA sense strand
gucauaugguggaaaauuu

SEQ ID NO: 1503396 - RNA, 19 nt, Homo sapiens
  misc_RNA (1)...(19): siRNA sense strand
guacgaaaggacuauggau

SEQ ID NO: 1503397 - RNA, 19 nt, Homo sapiens
  misc_RNA (1)...(19): siRNA sense strand
agacaguaguagagaugga

SEQ ID NO: 1503398 - RNA, 19 nt, Homo sapiens
  misc_RNA (1)...(19): siRNA sense strand
ggccaguaauaaaggugaa

SEQ ID NO: 1503399 - RNA, 19 nt, Homo sapiens
  misc_RNA (1)...(19): siRNA sense strand
gcguaaagucagaaugaau

SEQ ID NO: 1503400 - RNA, 19 nt, Homo sapiens
  misc_RNA (1)...(19): siRNA sense strand
ccaagguacaccaucauca

SEQ ID NO: 1503401 - RNA, 19 nt, Homo sapiens
  misc_RNA (1)...(19): siRNA sense strand
caguuugcguuugugaauu

SEQ ID NO: 1503402 - RNA, 19 nt, Homo sapiens
  misc_RNA (1)...(19): siRNA sense strand
gaagugucuguuccuuaug

SEQ ID NO: 1503403 - RNA, 19 nt, Homo sapiens
  misc_RNA (1)...(19): siRNA sense strand
ucuccuagcagguacgaaa

SEQ ID NO: 1503404 - RNA, 19 nt, Homo sapiens
  misc_RNA (1)...(19): siRNA sense strand
caucauuacagaggaaaga

SEQ ID NO: 1503405 - RNA, 19 nt, Homo sapiens
  misc_RNA (1)...(19): siRNA sense strand
gcagguacgaaaggacuau

SEQ ID NO: 1503406 - RNA, 19 nt, Homo sapiens
  misc_RNA (1)...(19): siRNA sense strand
agaugucaguuugucauau

SEQ ID NO: 1503407 - RNA, 19 nt, Homo sapiens
  misc_RNA (1)...(19): siRNA sense strand
gacaguaguagagauggaa

SEQ ID NO: 1503408 - RNA, 19 nt, Homo sapiens
  misc_RNA (1)...(19): siRNA sense strand
cuaccuagcagauagacau

SEQ ID NO: 1503409 - RNA, 19 nt, Homo sapiens
  misc_RNA (1)...(19): siRNA sense strand
cacagauaauucagagauc

SEQ ID NO: 1503410 - RNA, 19 nt, Homo sapiens
  misc_RNA (1)...(19): siRNA sense strand
gauaauucagagaucuuuc

SEQ ID NO: 1503411 - RNA, 19 nt, Homo sapiens
  misc_RNA (1)...(19): siRNA sense strand
ucaaacaugaagugucugu

SEQ ID NO: 1503412 - RNA, 19 nt, Homo sapiens
  misc_RNA (1)...(19): siRNA sense strand
caucaucacagcguaaagu

SEQ ID NO: 1503413 - RNA, 19 nt, Homo sapiens
  misc_RNA (1)...(19): siRNA sense strand
acagucauaguuucaauca

SEQ ID NO: 1503414 - RNA, 19 nt, Homo sapiens
  misc_RNA (1)...(19): siRNA sense strand
gagacaagcagugaugaac

SEQ ID NO: 1503415 - RNA, 19 nt, Homo sapiens
  misc_RNA (1)...(19): siRNA sense strand
ccuagcagguacgaaagga

SEQ ID NO: 1503416 - RNA, 19 nt, Homo sapiens
  misc_RNA (1)...(19): siRNA sense strand
uaguagagauggaaaaugg

SEQ ID NO: 1503417 - RNA, 19 nt, Homo sapiens
  misc_RNA (1)...(19): siRNA sense strand
aagaugucaguuugucaua

SEQ ID NO: 1503418 - RNA, 19 nt, Homo sapiens
  misc_RNA (1)...(19): siRNA sense strand
gguacgaaaggacuaugga

SEQ ID NO: 1503419 - RNA, 19 nt, Homo sapiens
  misc_RNA (1)...(19): siRNA sense strand
caucauguuggaaauucaa

SEQ ID NO: 1503420 - RNA, 19 nt, Homo sapiens
  misc_RNA (1)...(19): siRNA sense strand
ggaggaacaagaugaguug

SEQ ID NO: 1503421 - RNA, 19 nt, Homo sapiens
  misc_RNA (1)...(19): siRNA sense strand
guaccaugcuucuguccuu

SEQ ID NO: 1503422 - RNA, 19 nt, Homo sapiens
  misc_RNA (1)...(19): siRNA sense strand
ccagaggccaccaccuuua

SEQ ID NO: 1503423 - RNA, 19 nt, Homo sapiens
  misc_RNA (1)...(19): siRNA sense strand
ccacggaggaacaagauga

SEQ ID NO: 1503424 - RNA, 19 nt, Homo sapiens
  misc_RNA (1)...(19): siRNA sense strand
agaagaggcuggagaagcu

SEQ ID NO: 1503425 - RNA, 19 nt, Homo sapiens
  misc_RNA (1)...(19): siRNA sense strand
cagaggccaccaccuuuaa

SEQ ID NO: 1503426 - RNA, 19 nt, Homo sapiens
  misc_RNA (1)...(19): siRNA sense strand
gccaccaccuuuaaugaca

SEQ ID NO: 1503427 - RNA, 19 nt, Homo sapiens
  misc_RNA (1)...(19): siRNA sense strand
agaagaagaggcuggagaa

SEQ ID NO: 1503428 - RNA, 19 nt, Homo sapiens
  misc_RNA (1)...(19): siRNA sense strand
ccuggaaccugccacagau

SEQ ID NO: 1503429 - RNA, 19 nt, Homo sapiens
  misc_RNA (1)...(19): siRNA sense strand
gaagaggcuggagaagcua

SEQ ID NO: 1503430 - RNA, 19 nt, Homo sapiens
  misc_RNA (1)...(19): siRNA sense strand
gaggccaccaccuuuaaug

SEQ ID NO: 1503431 - RNA, 19 nt, Homo sapiens
  misc_RNA (1)...(19): siRNA sense strand
gccaaugccauccaugugu

SEQ ID NO: 1503432 - RNA, 19 nt, Homo sapiens
  misc_RNA (1)...(19): siRNA sense strand
gaagaagaggcuggagaag

SEQ ID NO: 1503433 - RNA, 19 nt, Homo sapiens
  misc_RNA (1)...(19): siRNA sense strand
uuaccgauguggccaaugc

SEQ ID NO: 1503434 - RNA, 19 nt, Homo sapiens
  misc_RNA (1)...(19): siRNA sense strand
uaccaugcuucuguccuuu

SEQ ID NO: 1503435 - RNA, 19 nt, Homo sapiens
  misc_RNA (1)...(19): siRNA sense strand
uguacaggcugcuacuucu

SEQ ID NO: 1503436 - RNA, 19 nt, Homo sapiens
  misc_RNA (1)...(19): siRNA sense strand
cggcguggguaccaugcuu

SEQ ID NO: 1503437 - RNA, 19 nt, Homo sapiens
  misc_RNA (1)...(19): siRNA sense strand
cggaggaacaagaugaguu

SEQ ID NO: 1503438 - RNA, 19 nt, Homo sapiens
  misc_RNA (1)...(19): siRNA sense strand
guggguaccaugcuucugu

SEQ ID NO: 1503439 - RNA, 19 nt, Homo sapiens
  misc_RNA (1)...(19): siRNA sense strand
ggagaaagaccaaccagaa

SEQ ID NO: 1503440 - RNA, 19 nt, Homo sapiens
  misc_RNA (1)...(19): siRNA sense strand
gagaaagaccaaccagaaa

SEQ ID NO: 1503441 - RNA, 19 nt, Homo sapiens
  misc_RNA (1)...(19): siRNA sense strand
cagcuggacuccugaagaa

SEQ ID NO: 1503442 - RNA, 19 nt, Homo sapiens
  misc_RNA (1)...(19): siRNA sense strand
agaaguggcuuuccucauc

SEQ ID NO: 1503443 - RNA, 19 nt, Homo sapiens
  misc_RNA (1)...(19): siRNA sense strand
gcugcgacaugguguguuu

SEQ ID NO: 1503444 - RNA, 19 nt, Homo sapiens
  misc_RNA (1)...(19): siRNA sense strand
ccagaaaguucgccugaag

SEQ ID NO: 1503445 - RNA, 19 nt, Homo sapiens
  misc_RNA (1)...(19): siRNA sense strand
gaaguggcuuuccucaucu

SEQ ID NO: 1503446 - RNA, 19 nt, Homo sapiens
  misc_RNA (1)...(19): siRNA sense strand
gaaagaccaaccagaaagu

SEQ ID NO: 1503447 - RNA, 19 nt, Homo sapiens
  misc_RNA (1)...(19): siRNA sense strand
gcagaggagacaccaguau

SEQ ID NO: 1503448 - RNA, 19 nt, Homo sapiens
  misc_RNA (1)...(19): siRNA sense strand
ucacagaguggcugaagga

SEQ ID NO: 1503449 - RNA, 19 nt, Homo sapiens
  misc_RNA (1)...(19): siRNA sense strand
gcagcuggacuccugaaga

SEQ ID NO: 1503450 - RNA, 19 nt, Homo sapiens
  misc_RNA (1)...(19): siRNA sense strand
caugguguguuuccuguuc

SEQ ID NO: 1503451 - RNA, 19 nt, Homo sapiens
  misc_RNA (1)...(19): siRNA sense strand
ggaguuugcaguggagaaa

SEQ ID NO: 1503452 - RNA, 19 nt, Homo sapiens
  misc_RNA (1)...(19): siRNA sense strand
uggcacaggugacuucaag

SEQ ID NO: 1503453 - RNA, 19 nt, Homo sapiens
  misc_RNA (1)...(19): siRNA sense strand
gaagguggcagaggagaca

SEQ ID NO: 1503454 - RNA, 19 nt, Homo sapiens
  misc_RNA (1)...(19): siRNA sense strand
uaagagcugucuggagaag

SEQ ID NO: 1503455 - RNA, 19 nt, Homo sapiens
  misc_RNA (1)...(19): siRNA sense strand
agagcugucuggagaagug

SEQ ID NO: 1503456 - RNA, 19 nt, Homo sapiens
  misc_RNA (1)...(19): siRNA sense strand
agaggagacaccaguauga

SEQ ID NO: 1503457 - RNA, 19 nt, Homo sapiens
  misc_RNA (1)...(19): siRNA sense strand
uggcuuuccucaucuaaca

SEQ ID NO: 1503458 - RNA, 19 nt, Homo sapiens
  misc_RNA (1)...(19): siRNA sense strand
ggacacaccgagugauggu

SEQ ID NO: 1503459 - RNA, 19 nt, Homo sapiens
  misc_RNA (1)...(19): siRNA sense strand
ucuggacgcuggucuccuu

SEQ ID NO: 1503460 - RNA, 19 nt, Homo sapiens
  misc_RNA (1)...(19): siRNA sense strand
agaaagaccaaccagaaag

SEQ ID NO: 1503461 - RNA, 19 nt, Homo sapiens
  misc_RNA (1)...(19): siRNA sense strand
gaaaguucgccugaagauc

SEQ ID NO: 1503462 - RNA, 19 nt, Homo sapiens
  misc_RNA (1)...(19): siRNA sense strand
cagaaaguucgccugaaga

SEQ ID NO: 1503463 - RNA, 19 nt, Homo sapiens
  misc_RNA (1)...(19): siRNA sense strand
cagaggagacaccaguaug

SEQ ID NO: 1503464 - RNA, 19 nt, Homo sapiens
  misc_RNA (1)...(19): siRNA sense strand
gguccuuucugccggaucu

SEQ ID NO: 1503465 - RNA, 19 nt, Homo sapiens
  misc_RNA (1)...(19): siRNA sense strand
gagaaguggcuuuccucau

SEQ ID NO: 1503466 - RNA, 19 nt, Homo sapiens
  misc_RNA (1)...(19): siRNA sense strand
ggaggccgugggucucauu

SEQ ID NO: 1503467 - RNA, 19 nt, Homo sapiens
  misc_RNA (1)...(19): siRNA sense strand
ccucaucuaacaccagcua

SEQ ID NO: 1503468 - RNA, 19 nt, Homo sapiens
  misc_RNA (1)...(19): siRNA sense strand
agaaaguucgccugaagau

SEQ ID NO: 1503469 - RNA, 19 nt, Homo sapiens
  misc_RNA (1)...(19): siRNA sense strand
ggacggagaagcggacacu

SEQ ID NO: 1503470 - RNA, 19 nt, Homo sapiens
  misc_RNA (1)...(19): siRNA sense strand
ggcagaggagacaccagua

SEQ ID NO: 1503471 - RNA, 19 nt, Homo sapiens
  misc_RNA (1)...(19): siRNA sense strand
aaagaccaaccagaaaguu

SEQ ID NO: 1503472 - RNA, 19 nt, Homo sapiens
  misc_RNA (1)...(19): siRNA sense strand
gcaaagacaaguaguauua

SEQ ID NO: 1503473 - RNA, 19 nt, Homo sapiens
  misc_RNA (1)...(19): siRNA sense strand
gaccaaaucucuuucauga

SEQ ID NO: 1503474 - RNA, 19 nt, Homo sapiens
  misc_RNA (1)...(19): siRNA sense strand
gcaaaugcaccgcuuguua

SEQ ID NO: 1503475 - RNA, 19 nt, Homo sapiens
  misc_RNA (1)...(19): siRNA sense strand
uaccaaagcuggauuuauu

SEQ ID NO: 1503476 - RNA, 19 nt, Homo sapiens
  misc_RNA (1)...(19): siRNA sense strand
caacuucuauagucgaaua

SEQ ID NO: 1503477 - RNA, 19 nt, Homo sapiens
  misc_RNA (1)...(19): siRNA sense strand
acaaguggcuuaagcuaua

SEQ ID NO: 1503478 - RNA, 19 nt, Homo sapiens
  misc_RNA (1)...(19): siRNA sense strand
gcagagcaaugcaaccuuu

SEQ ID NO: 1503479 - RNA, 19 nt, Homo sapiens
  misc_RNA (1)...(19): siRNA sense strand
gggaugagauguugcagaa

SEQ ID NO: 1503480 - RNA, 19 nt, Homo sapiens
  misc_RNA (1)...(19): siRNA sense strand
caaaagagguuguuaauag

SEQ ID NO: 1503481 - RNA, 19 nt, Homo sapiens
  misc_RNA (1)...(19): siRNA sense strand
gcaauacuggaaacaauua

SEQ ID NO: 1503482 - RNA, 19 nt, Homo sapiens
  misc_RNA (1)...(19): siRNA sense strand
gaguuuaugugcacaguuu

SEQ ID NO: 1503483 - RNA, 19 nt, Homo sapiens
  misc_RNA (1)...(19): siRNA sense strand
ggaaugcuguugcagaaug

SEQ ID NO: 1503484 - RNA, 19 nt, Homo sapiens
  misc_RNA (1)...(19): siRNA sense strand
guucaggaauuauacagua

SEQ ID NO: 1503485 - RNA, 19 nt, Homo sapiens
  misc_RNA (1)...(19): siRNA sense strand
gauuaaaccucaugcaaca

SEQ ID NO: 1503486 - RNA, 19 nt, Homo sapiens
  misc_RNA (1)...(19): siRNA sense strand
caagacaguuuacaagaau

SEQ ID NO: 1503487 - RNA, 19 nt, Homo sapiens
  misc_RNA (1)...(19): siRNA sense strand
gaacgaagacgaaauucug

SEQ ID NO: 1503488 - RNA, 19 nt, Homo sapiens
  misc_RNA (1)...(19): siRNA sense strand
gagcagauccugaagauag

SEQ ID NO: 1503489 - RNA, 19 nt, Homo sapiens
  misc_RNA (1)...(19): siRNA sense strand
ugaagaagccauugaauau

SEQ ID NO: 1503490 - RNA, 19 nt, Homo sapiens
  misc_RNA (1)...(19): siRNA sense strand
cagcuaauguugcuaaguu

SEQ ID NO: 1503491 - RNA, 19 nt, Homo sapiens
  misc_RNA (1)...(19): siRNA sense strand
caaaugcaccgcuuguuaa

SEQ ID NO: 1503492 - RNA, 19 nt, Homo sapiens
  misc_RNA (1)...(19): siRNA sense strand
gagagcagauccugaagau

SEQ ID NO: 1503493 - RNA, 19 nt, Homo sapiens
  misc_RNA (1)...(19): siRNA sense strand
caaguaguauuaucggaaa

SEQ ID NO: 1503494 - RNA, 19 nt, Homo sapiens
  misc_RNA (1)...(19): siRNA sense strand
aacaaaggcuuaacaguga

SEQ ID NO: 1503495 - RNA, 19 nt, Homo sapiens
  misc_RNA (1)...(19): siRNA sense strand
cgcagaagcugacaacauu

SEQ ID NO: 1503496 - RNA, 19 nt, Homo sapiens
  misc_RNA (1)...(19): siRNA sense strand
gaagaaaccgaaccacaga

SEQ ID NO: 1503497 - RNA, 19 nt, Homo sapiens
  misc_RNA (1)...(19): siRNA sense strand
agacucagauucagaaguu

SEQ ID NO: 1503498 - RNA, 19 nt, Homo sapiens
  misc_RNA (1)...(19): siRNA sense strand
aagaauaucuggaaagaca

SEQ ID NO: 1503499 - RNA, 19 nt, Homo sapiens
  misc_RNA (1)...(19): siRNA sense strand
gcucagcucugugacauug

SEQ ID NO: 1503500 - RNA, 19 nt, Homo sapiens
  misc_RNA (1)...(19): siRNA sense strand
gaagaagccauugaauauu

SEQ ID NO: 1503501 - RNA, 19 nt, Homo sapiens
  misc_RNA (1)...(19): siRNA sense strand
gacaauggcuugcaauacu

SEQ ID NO: 1503502 - RNA, 19 nt, Homo sapiens
  misc_RNA (1)...(19): siRNA sense strand
guucauggaugcuuucuuc

SEQ ID NO: 1503503 - RNA, 19 nt, Homo sapiens
  misc_RNA (1)...(19): siRNA sense strand
gaugauguuuugcguauua

SEQ ID NO: 1503504 - RNA, 19 nt, Homo sapiens
  misc_RNA (1)...(19): siRNA sense strand
uaaggaggcuggauuugau

SEQ ID NO: 1503505 - RNA, 19 nt, Homo sapiens
  misc_RNA (1)...(19): siRNA sense strand
gaaaggaaagaugauguuu

SEQ ID NO: 1503506 - RNA, 19 nt, Homo sapiens
  misc_RNA (1)...(19): siRNA sense strand
caaaccggaugcugugauu

SEQ ID NO: 1503507 - RNA, 19 nt, Homo sapiens
  misc_RNA (1)...(19): siRNA sense strand
acaagacaguuuacaagaa

SEQ ID NO: 1503508 - RNA, 19 nt, Homo sapiens
  misc_RNA (1)...(19): siRNA sense strand
augcaccgcuuguuaauaa

SEQ ID NO: 1503509 - RNA, 19 nt, Homo sapiens
  misc_RNA (1)...(19): siRNA sense strand
uggcagcgauucauuagaa

SEQ ID NO: 1503510 - RNA, 19 nt, Homo sapiens
  misc_RNA (1)...(19): siRNA sense strand
uacagacagucaucaauaa

SEQ ID NO: 1503511 - RNA, 19 nt, Homo sapiens
  misc_RNA (1)...(19): siRNA sense strand
accaagaacuguugaagaa

SEQ ID NO: 1503512 - RNA, 19 nt, Homo sapiens
  misc_RNA (1)...(19): siRNA sense strand
gaaagggaaauacagcauu

SEQ ID NO: 1503513 - RNA, 19 nt, Homo sapiens
  misc_RNA (1)...(19): siRNA sense strand
gcaaugcaaccuuuauuca

SEQ ID NO: 1503514 - RNA, 19 nt, Homo sapiens
  misc_RNA (1)...(19): siRNA sense strand
cagcauuucuuuccucuuc

SEQ ID NO: 1503515 - RNA, 19 nt, Homo sapiens
  misc_RNA (1)...(19): siRNA sense strand
gaaauuccauuaguagacu

SEQ ID NO: 1503516 - RNA, 19 nt, Homo sapiens
  misc_RNA (1)...(19): siRNA sense strand
gagcaucuaacgccuauga

SEQ ID NO: 1503517 - RNA, 19 nt, Homo sapiens
  misc_RNA (1)...(19): siRNA sense strand
gagagacaauggcuugcaa

SEQ ID NO: 1503518 - RNA, 19 nt, Homo sapiens
  misc_RNA (1)...(19): siRNA sense strand
ggagcaaagacaaguagua

SEQ ID NO: 1503519 - RNA, 19 nt, Homo sapiens
  misc_RNA (1)...(19): siRNA sense strand
acaagaauaucuggaaaga

SEQ ID NO: 1503520 - RNA, 19 nt, Homo sapiens
  misc_RNA (1)...(19): siRNA sense strand
cggaugcugugauuaguaa

SEQ ID NO: 1503521 - RNA, 19 nt, Homo sapiens
  misc_RNA (1)...(19): siRNA sense strand
uuacagacagucaucaaua

SEQ ID NO: 1503522 - RNA, 19 nt, Homo sapiens
  misc_RNA (1)...(19): siRNA sense strand
ucaaggaaguaaacacaau

SEQ ID NO: 1503523 - RNA, 19 nt, Homo sapiens
  misc_RNA (1)...(19): siRNA sense strand
gagacaauggcuugcaaua

SEQ ID NO: 1503524 - RNA, 19 nt, Homo sapiens
  misc_RNA (1)...(19): siRNA sense strand
gagcaaagacaaguaguau

SEQ ID NO: 1503525 - RNA, 19 nt, Homo sapiens
  misc_RNA (1)...(19): siRNA sense strand
gguuacaccuggaaugaug

SEQ ID NO: 1503526 - RNA, 19 nt, Homo sapiens
  misc_RNA (1)...(19): siRNA sense strand
gaacugaacgaagacgaaa

SEQ ID NO: 1503527 - RNA, 19 nt, Homo sapiens
  misc_RNA (1)...(19): siRNA sense strand
agacagucaucaauaauca

SEQ ID NO: 1503528 - RNA, 19 nt, Homo sapiens
  misc_RNA (1)...(19): siRNA sense strand
aaaaugaacugaacgaaga

SEQ ID NO: 1503529 - RNA, 19 nt, Homo sapiens
  misc_RNA (1)...(19): siRNA sense strand
uugcagccauuuagagaua

SEQ ID NO: 1503530 - RNA, 19 nt, Homo sapiens
  misc_RNA (1)...(19): siRNA sense strand
guggaaugcuguugcagaa

SEQ ID NO: 1503531 - RNA, 19 nt, Homo sapiens
  misc_RNA (1)...(19): siRNA sense strand
gcacuuuaggcuugauuaa

SEQ ID NO: 1503532 - RNA, 19 nt, Homo sapiens
  misc_RNA (1)...(19): siRNA sense strand
ugaagaggaugcagcuaau

SEQ ID NO: 1503533 - RNA, 19 nt, Homo sapiens
  misc_RNA (1)...(19): siRNA sense strand
aaagagagcagauccugaa

SEQ ID NO: 1503534 - RNA, 19 nt, Homo sapiens
  misc_RNA (1)...(19): siRNA sense strand
guauggcagcgauucauua

SEQ ID NO: 1503535 - RNA, 19 nt, Homo sapiens
  misc_RNA (1)...(19): siRNA sense strand
gagcaaugcaaccuuuauu

SEQ ID NO: 1503536 - RNA, 19 nt, Homo sapiens
  misc_RNA (1)...(19): siRNA sense strand
ggcuuaagcuauauucuag

SEQ ID NO: 1503537 - RNA, 19 nt, Homo sapiens
  misc_RNA (1)...(19): siRNA sense strand
gaaaagacauuggcauuac

SEQ ID NO: 1503538 - RNA, 19 nt, Homo sapiens
  misc_RNA (1)...(19): siRNA sense strand
ggaaagacaacauuuagcu

SEQ ID NO: 1503539 - RNA, 19 nt, Homo sapiens
  misc_RNA (1)...(19): siRNA sense strand
gaagacgaaauucugcauu

SEQ ID NO: 1503540 - RNA, 19 nt, Homo sapiens
  misc_RNA (1)...(19): siRNA sense strand
gcagaauggagacgauuga

SEQ ID NO: 1503541 - RNA, 19 nt, Homo sapiens
  misc_RNA (1)...(19): siRNA sense strand
guuccuaacuccugagcaa

SEQ ID NO: 1503542 - RNA, 19 nt, Homo sapiens
  misc_RNA (1)...(19): siRNA sense strand
gaagaacaaacaagacagu

SEQ ID NO: 1503543 - RNA, 19 nt, Homo sapiens
  misc_RNA (1)...(19): siRNA sense strand
gaguuugucucuuuuauga

SEQ ID NO: 1503544 - RNA, 19 nt, Homo sapiens
  misc_RNA (1)...(19): siRNA sense strand
caccuggaaugaugaagaa

SEQ ID NO: 1503545 - RNA, 19 nt, Homo sapiens
  misc_RNA (1)...(19): siRNA sense strand
gaggcuggauuugaucuga

SEQ ID NO: 1503546 - RNA, 19 nt, Homo sapiens
  misc_RNA (1)...(19): siRNA sense strand
aaugcaaccuuuauucaga

SEQ ID NO: 1503547 - RNA, 19 nt, Homo sapiens
  misc_RNA (1)...(19): siRNA sense strand
gcuuaacagugauugaugu

SEQ ID NO: 1503548 - RNA, 19 nt, Homo sapiens
  misc_RNA (1)...(19): siRNA sense strand
cuaaguucauggaugcuuu

SEQ ID NO: 1503549 - RNA, 19 nt, Homo sapiens
  misc_RNA (1)...(19): siRNA sense strand
agauaaaugugaaccuguu

SEQ ID NO: 1503550 - RNA, 19 nt, Homo sapiens
  misc_RNA (1)...(19): siRNA sense strand
uugaagaagccauugaaua

SEQ ID NO: 1503551 - RNA, 19 nt, Homo sapiens
  misc_RNA (1)...(19): siRNA sense strand
agaaguuagugaagaauca

SEQ ID NO: 1503552 - RNA, 19 nt, Homo sapiens
  misc_RNA (1)...(19): siRNA sense strand
gcagaacaaaggcuuaaca

SEQ ID NO: 1503553 - RNA, 19 nt, Homo sapiens
  misc_RNA (1)...(19): siRNA sense strand
ugacacaggugaagaaaau

SEQ ID NO: 1503554 - RNA, 19 nt, Homo sapiens
  misc_RNA (1)...(19): siRNA sense strand
gaccaagaacuguugaaga

SEQ ID NO: 1503555 - RNA, 19 nt, Homo sapiens
  misc_RNA (1)...(19): siRNA sense strand
acacaauccucccucugaa

SEQ ID NO: 1503556 - RNA, 19 nt, Homo sapiens
  misc_RNA (1)...(19): siRNA sense strand
cuaguuguaucucaaggaa

SEQ ID NO: 1503557 - RNA, 19 nt, Homo sapiens
  misc_RNA (1)...(19): siRNA sense strand
ggcauuacuucgaccaaau

SEQ ID NO: 1503558 - RNA, 19 nt, Homo sapiens
  misc_RNA (1)...(19): siRNA sense strand
gcauuucuuuccucuucaa

SEQ ID NO: 1503559 - RNA, 19 nt, Homo sapiens
  misc_RNA (1)...(19): siRNA sense strand
gauaaaugugaaccuguuu

SEQ ID NO: 1503560 - RNA, 19 nt, Homo sapiens
  misc_RNA (1)...(19): siRNA sense strand
ugcaacaagugaacaaaga

SEQ ID NO: 1503561 - RNA, 19 nt, Homo sapiens
  misc_RNA (1)...(19): siRNA sense strand
agacugacaccgaaccuaa

SEQ ID NO: 1503562 - RNA, 19 nt, Homo sapiens
  misc_RNA (1)...(19): siRNA sense strand
aaaccgaaccacagacuga

SEQ ID NO: 1503563 - RNA, 19 nt, Homo sapiens
  misc_RNA (1)...(19): siRNA sense strand
caaguggaaugcuguugca

SEQ ID NO: 1503564 - RNA, 19 nt, Homo sapiens
  misc_RNA (1)...(19): siRNA sense strand
caacaagugaacaaagaga

SEQ ID NO: 1503565 - RNA, 19 nt, Homo sapiens
  misc_RNA (1)...(19): siRNA sense strand
gugcacaguuugcgaugga

SEQ ID NO: 1503566 - RNA, 19 nt, Homo sapiens
  misc_RNA (1)...(19): siRNA sense strand
gaggaugcagcuaauguug

SEQ ID NO: 1503567 - RNA, 19 nt, Homo sapiens
  misc_RNA (1)...(19): siRNA sense strand
gcaaaagagguuguuaaua

SEQ ID NO: 1503568 - RNA, 19 nt, Homo sapiens
  misc_RNA (1)...(19): siRNA sense strand
cgagaaguccaguuacaga

SEQ ID NO: 1503569 - RNA, 19 nt, Homo sapiens
  misc_RNA (1)...(19): siRNA sense strand
gaaccuaacgaacgaucug

SEQ ID NO: 1503570 - RNA, 19 nt, Homo sapiens
  misc_RNA (1)...(19): siRNA sense strand
caaagccugugggaugaga

SEQ ID NO: 1503571 - RNA, 19 nt, Homo sapiens
  misc_RNA (1)...(19): siRNA sense strand
caccgaaccuaacgaacga

SEQ ID NO: 1503572 - RNA, 19 nt, Homo sapiens
  misc_RNA (1)...(19): siRNA sense strand
gaauagaguucaaggacaa

SEQ ID NO: 1503573 - RNA, 19 nt, Homo sapiens
  misc_RNA (1)...(19): siRNA sense strand
gccaagaucuuccgaguug

SEQ ID NO: 1503574 - RNA, 19 nt, Homo sapiens
  misc_RNA (1)...(19): siRNA sense strand
gaacaugaccuacgagaag

SEQ ID NO: 1503575 - RNA, 19 nt, Homo sapiens
  misc_RNA (1)...(19): siRNA sense strand
gauaugagcccuacaucaa

SEQ ID NO: 1503576 - RNA, 19 nt, Homo sapiens
  misc_RNA (1)...(19): siRNA sense strand
gaugugaagcucaaauuaa

SEQ ID NO: 1503577 - RNA, 19 nt, Homo sapiens
  misc_RNA (1)...(19): siRNA sense strand
gagggagaauuggcuauuu

SEQ ID NO: 1503578 - RNA, 19 nt, Homo sapiens
  misc_RNA (1)...(19): siRNA sense strand
caaaugggcucgccagacu

SEQ ID NO: 1503579 - RNA, 19 nt, Homo sapiens
  misc_RNA (1)...(19): siRNA sense strand
gcugugggauuacguguau

SEQ ID NO: 1503580 - RNA, 19 nt, Homo sapiens
  misc_RNA (1)...(19): siRNA sense strand
uguaucagcugcuccuuga

SEQ ID NO: 1503581 - RNA, 19 nt, Homo sapiens
  misc_RNA (1)...(19): siRNA sense strand
gaaacuccuguucagauuu

SEQ ID NO: 1503582 - RNA, 19 nt, Homo sapiens
  misc_RNA (1)...(19): siRNA sense strand
agaaacuccuguucagauu

SEQ ID NO: 1503583 - RNA, 19 nt, Homo sapiens
  misc_RNA (1)...(19): siRNA sense strand
ggacaagaggccagaaauc

SEQ ID NO: 1503584 - RNA, 19 nt, Homo sapiens
  misc_RNA (1)...(19): siRNA sense strand
gcccugcgccacuauuaua

SEQ ID NO: 1503585 - RNA, 19 nt, Homo sapiens
  misc_RNA (1)...(19): siRNA sense strand
aaacuccuguucagauuuc

SEQ ID NO: 1503586 - RNA, 19 nt, Homo sapiens
  misc_RNA (1)...(19): siRNA sense strand
gagcaggacagaauagagu

SEQ ID NO: 1503587 - RNA, 19 nt, Homo sapiens
  misc_RNA (1)...(19): siRNA sense strand
gggcagaaacuccuguuca

SEQ ID NO: 1503588 - RNA, 19 nt, Homo sapiens
  misc_RNA (1)...(19): siRNA sense strand
guucagauuucuaaagacu

SEQ ID NO: 1503589 - RNA, 19 nt, Homo sapiens
  misc_RNA (1)...(19): siRNA sense strand
gggcagagcaggaguacuc

SEQ ID NO: 1503590 - RNA, 19 nt, Homo sapiens
  misc_RNA (1)...(19): siRNA sense strand
gcagaaacuccuguucaga

SEQ ID NO: 1503591 - RNA, 19 nt, Homo sapiens
  misc_RNA (1)...(19): siRNA sense strand
ggagggagaauuggcuauu

SEQ ID NO: 1503592 - RNA, 19 nt, Homo sapiens
  misc_RNA (1)...(19): siRNA sense strand
gacaagaggccagaaaucu

SEQ ID NO: 1503593 - RNA, 19 nt, Homo sapiens
  misc_RNA (1)...(19): siRNA sense strand
cagaaacuccuguucagau

SEQ ID NO: 1503594 - RNA, 19 nt, Homo sapiens
  misc_RNA (1)...(19): siRNA sense strand
gcgccacuauuauaagcuu

SEQ ID NO: 1503595 - RNA, 19 nt, Homo sapiens
  misc_RNA (1)...(19): siRNA sense strand
caacuucggccaccuggau

SEQ ID NO: 1503596 - RNA, 19 nt, Homo sapiens
  misc_RNA (1)...(19): siRNA sense strand
agaugugaagcucaaauua

SEQ ID NO: 1503597 - RNA, 19 nt, Homo sapiens
  misc_RNA (1)...(19): siRNA sense strand
ggcagaaacuccuguucag

SEQ ID NO: 1503598 - RNA, 19 nt, Homo sapiens
  misc_RNA (1)...(19): siRNA sense strand
gggugaacaugaccuacga

SEQ ID NO: 1503599 - RNA, 19 nt, Homo sapiens
  misc_RNA (1)...(19): siRNA sense strand
aggagucccucaacuuaug

SEQ ID NO: 1503600 - RNA, 19 nt, Homo sapiens
  misc_RNA (1)...(19): siRNA sense strand
ccaggagcaggacagaaua

SEQ ID NO: 1503601 - RNA, 19 nt, Homo sapiens
  misc_RNA (1)...(19): siRNA sense strand
gccaggagcaggacagaau

SEQ ID NO: 1503602 - RNA, 19 nt, Homo sapiens
  misc_RNA (1)...(19): siRNA sense strand
gaauuggcuauuucuccua

SEQ ID NO: 1503603 - RNA, 19 nt, Homo sapiens
  misc_RNA (1)...(19): siRNA sense strand
uaaagacuccgggaaagau

SEQ ID NO: 1503604 - RNA, 19 nt, Homo sapiens
  misc_RNA (1)...(19): siRNA sense strand
cuguucagauuucuaaaga

SEQ ID NO: 1503605 - RNA, 19 nt, Homo sapiens
  misc_RNA (1)...(19): siRNA sense strand
ccaccagacccagggcuua

SEQ ID NO: 1503606 - RNA, 19 nt, Homo sapiens
  misc_RNA (1)...(19): siRNA sense strand
cagaugugaagcucaaauu

SEQ ID NO: 1503607 - RNA, 19 nt, Homo sapiens
  misc_RNA (1)...(19): siRNA sense strand
uaugagcccuacaucaagu

SEQ ID NO: 1503608 - RNA, 19 nt, Homo sapiens
  misc_RNA (1)...(19): siRNA sense strand
gcuccuugauacccgauau

SEQ ID NO: 1503609 - RNA, 19 nt, Homo sapiens
  misc_RNA (1)...(19): siRNA sense strand
uuggcuauuucuccuauaa

SEQ ID NO: 1503610 - RNA, 19 nt, Homo sapiens
  misc_RNA (1)...(19): siRNA sense strand
ccugguguguggacccuuu

SEQ ID NO: 1503611 - RNA, 19 nt, Homo sapiens
  misc_RNA (1)...(19): siRNA sense strand
ggacagaauagaguucaag

SEQ ID NO: 1503612 - RNA, 19 nt, Homo sapiens
  misc_RNA (1)...(19): siRNA sense strand
agacaaggacgccaagauc

SEQ ID NO: 1503613 - RNA, 19 nt, Homo sapiens
  misc_RNA (1)...(19): siRNA sense strand
acccagggcuuaccagcaa

SEQ ID NO: 1503614 - RNA, 19 nt, Homo sapiens
  misc_RNA (1)...(19): siRNA sense strand
caaggacgccaagaucuuc

SEQ ID NO: 1503615 - RNA, 19 nt, Homo sapiens
  misc_RNA (1)...(19): siRNA sense strand
caagaucuuccgaguugug

SEQ ID NO: 1503616 - RNA, 19 nt, Homo sapiens
  misc_RNA (1)...(19): siRNA sense strand
agggagaauuggcuauuuc

SEQ ID NO: 1503617 - RNA, 19 nt, Homo sapiens
  misc_RNA (1)...(19): siRNA sense strand
cuaaagacuccgggaaaga

SEQ ID NO: 1503618 - RNA, 19 nt, Homo sapiens
  misc_RNA (1)...(19): siRNA sense strand
gacaaggacgccaagaucu

SEQ ID NO: 1503619 - RNA, 19 nt, Homo sapiens
  misc_RNA (1)...(19): siRNA sense strand
gugcccugcgccacuauua

SEQ ID NO: 1503620 - RNA, 19 nt, Homo sapiens
  misc_RNA (1)...(19): siRNA sense strand
cgauaugagcccuacauca

SEQ ID NO: 1503621 - RNA, 19 nt, Homo sapiens
  misc_RNA (1)...(19): siRNA sense strand
ucuaaagacuccgggaaag

SEQ ID NO: 1503622 - RNA, 19 nt, Homo sapiens
  misc_RNA (1)...(19): siRNA sense strand
acaagaaccgggugaacau

SEQ ID NO: 1503623 - RNA, 19 nt, Homo sapiens
  misc_RNA (1)...(19): siRNA sense strand
acaaggacgccaagaucuu

SEQ ID NO: 1503624 - RNA, 19 nt, Homo sapiens
  misc_RNA (1)...(19): siRNA sense strand
gaagacaaggacgccaaga

SEQ ID NO: 1503625 - RNA, 19 nt, Homo sapiens
  misc_RNA (1)...(19): siRNA sense strand
gcaggacagaauagaguuc

SEQ ID NO: 1503626 - RNA, 19 nt, Homo sapiens
  misc_RNA (1)...(19): siRNA sense strand
gccgccugcugugggauua

SEQ ID NO: 1503627 - RNA, 19 nt, Homo sapiens
  misc_RNA (1)...(19): siRNA sense strand
aacaugaccuacgagaaga

SEQ ID NO: 1503628 - RNA, 19 nt, Homo sapiens
  misc_RNA (1)...(19): siRNA sense strand
gaucuuccgaguuguggau

SEQ ID NO: 1503629 - RNA, 19 nt, Homo sapiens
  misc_RNA (1)...(19): siRNA sense strand
gccacuauuauaagcuuaa

SEQ ID NO: 1503630 - RNA, 19 nt, Homo sapiens
  misc_RNA (1)...(19): siRNA sense strand
ucaagugggaagacaagga

SEQ ID NO: 1503631 - RNA, 19 nt, Homo sapiens
  misc_RNA (1)...(19): siRNA sense strand
aauuggcuauuucuccuau

SEQ ID NO: 1503632 - RNA, 19 nt, Homo sapiens
  misc_RNA (1)...(19): siRNA sense strand
ugaacaugaccuacgagaa

SEQ ID NO: 1503633 - RNA, 19 nt, Homo sapiens
  misc_RNA (1)...(19): siRNA sense strand
aagaaccgggugaacauga

SEQ ID NO: 1503634 - RNA, 19 nt, Homo sapiens
  misc_RNA (1)...(19): siRNA sense strand
cacaagaaccgggugaaca

SEQ ID NO: 1503635 - RNA, 19 nt, Homo sapiens
  misc_RNA (1)...(19): siRNA sense strand
agccagaugugaagcucaa

SEQ ID NO: 1503636 - RNA, 19 nt, Homo sapiens
  misc_RNA (1)...(19): siRNA sense strand
ggagcaggacagaauagag

SEQ ID NO: 1503637 - RNA, 19 nt, Homo sapiens
  misc_RNA (1)...(19): siRNA sense strand
gugcaagccagaugugaag

SEQ ID NO: 1503638 - RNA, 19 nt, Homo sapiens
  misc_RNA (1)...(19): siRNA sense strand
caagaaccgggugaacaug

SEQ ID NO: 1503639 - RNA, 19 nt, Homo sapiens
  misc_RNA (1)...(19): siRNA sense strand
guaccagccuuccaaauga

SEQ ID NO: 1503640 - RNA, 19 nt, Homo sapiens
  misc_RNA (1)...(19): siRNA sense strand
gcaaacagaagccuauaaa

SEQ ID NO: 1503641 - RNA, 19 nt, Homo sapiens
  misc_RNA (1)...(19): siRNA sense strand
gcacaggguugcucuucaa

SEQ ID NO: 1503642 - RNA, 19 nt, Homo sapiens
  misc_RNA (1)...(19): siRNA sense strand
aaacagaagccuauaaaga

SEQ ID NO: 1503643 - RNA, 19 nt, Homo sapiens
  misc_RNA (1)...(19): siRNA sense strand
gauagcaugucuccaaauc

SEQ ID NO: 1503644 - RNA, 19 nt, Homo sapiens
  misc_RNA (1)...(19): siRNA sense strand
gaugauagcaugucuccaa

SEQ ID NO: 1503645 - RNA, 19 nt, Homo sapiens
  misc_RNA (1)...(19): siRNA sense strand
ccugggaaauacucacuua

SEQ ID NO: 1503646 - RNA, 19 nt, Homo sapiens
  misc_RNA (1)...(19): siRNA sense strand
agaaguaccugucacaaac

SEQ ID NO: 1503647 - RNA, 19 nt, Homo sapiens
  misc_RNA (1)...(19): siRNA sense strand
gcucaguucacuauaagaa

SEQ ID NO: 1503648 - RNA, 19 nt, Homo sapiens
  misc_RNA (1)...(19): siRNA sense strand
ggacaucagcagcguagug

SEQ ID NO: 1503649 - RNA, 19 nt, Homo sapiens
  misc_RNA (1)...(19): siRNA sense strand
cagaaguaccugucacaaa

SEQ ID NO: 1503650 - RNA, 19 nt, Homo sapiens
  misc_RNA (1)...(19): siRNA sense strand
ccaaaucaguggcguuacu

SEQ ID NO: 1503651 - RNA, 19 nt, Homo sapiens
  misc_RNA (1)...(19): siRNA sense strand
gugaaggugugaugcugaa

SEQ ID NO: 1503652 - RNA, 19 nt, Homo sapiens
  misc_RNA (1)...(19): siRNA sense strand
gacaaagccacaaccagaa

SEQ ID NO: 1503653 - RNA, 19 nt, Homo sapiens
  misc_RNA (1)...(19): siRNA sense strand
uagagacaccugggaaaua

SEQ ID NO: 1503654 - RNA, 19 nt, Homo sapiens
  misc_RNA (1)...(19): siRNA sense strand
cuauaaagacggaauggaa

SEQ ID NO: 1503655 - RNA, 19 nt, Homo sapiens
  misc_RNA (1)...(19): siRNA sense strand
gaaacgugagccucuccua

SEQ ID NO: 1503656 - RNA, 19 nt, Homo sapiens
  misc_RNA (1)...(19): siRNA sense strand
ccggcucaguucacuauaa

SEQ ID NO: 1503657 - RNA, 19 nt, Homo sapiens
  misc_RNA (1)...(19): siRNA sense strand
aaacgugagccucuccuaa

SEQ ID NO: 1503658 - RNA, 19 nt, Homo sapiens
  misc_RNA (1)...(19): siRNA sense strand
uaagucuccuccagcaaga

SEQ ID NO: 1503659 - RNA, 19 nt, Homo sapiens
  misc_RNA (1)...(19): siRNA sense strand
gggaaauacucacuuacac

SEQ ID NO: 1503660 - RNA, 19 nt, Homo sapiens
  misc_RNA (1)...(19): siRNA sense strand
ccauggcugugaaucaguu

SEQ ID NO: 1503661 - RNA, 19 nt, Homo sapiens
  misc_RNA (1)...(19): siRNA sense strand
uagcaugucuccaaaucag

SEQ ID NO: 1503662 - RNA, 19 nt, Homo sapiens
  misc_RNA (1)...(19): siRNA sense strand
agagacaccugggaaauac

SEQ ID NO: 1503663 - RNA, 19 nt, Homo sapiens
  misc_RNA (1)...(19): siRNA sense strand
ggcaaacagaagccuauaa

SEQ ID NO: 1503664 - RNA, 19 nt, Homo sapiens
  misc_RNA (1)...(19): siRNA sense strand
ucaguucacuauaagaaac

SEQ ID NO: 1503665 - RNA, 19 nt, Homo sapiens
  misc_RNA (1)...(19): siRNA sense strand
aaacgaugauagcaugucu

SEQ ID NO: 1503666 - RNA, 19 nt, Homo sapiens
  misc_RNA (1)...(19): siRNA sense strand
cuauauguaucucguggau

SEQ ID NO: 1503667 - RNA, 19 nt, Homo sapiens
  misc_RNA (1)...(19): siRNA sense strand
uaccagccuuccaaaugaa

SEQ ID NO: 1503668 - RNA, 19 nt, Homo sapiens
  misc_RNA (1)...(19): siRNA sense strand
gcagcguaguggaugaaca

SEQ ID NO: 1503669 - RNA, 19 nt, Homo sapiens
  misc_RNA (1)...(19): siRNA sense strand
uauaaagacggaauggaau

SEQ ID NO: 1503670 - RNA, 19 nt, Homo sapiens
  misc_RNA (1)...(19): siRNA sense strand
caaacagaagccuauaaag

SEQ ID NO: 1503671 - RNA, 19 nt, Homo sapiens
  misc_RNA (1)...(19): siRNA sense strand
auauguaucucguggaucu

SEQ ID NO: 1503672 - RNA, 19 nt, Homo sapiens
  misc_RNA (1)...(19): siRNA sense strand
auaaagacggaauggaauu

SEQ ID NO: 1503673 - RNA, 19 nt, Homo sapiens
  misc_RNA (1)...(19): siRNA sense strand
gcccaaaggcaaacagaag

SEQ ID NO: 1503674 - RNA, 19 nt, Homo sapiens
  misc_RNA (1)...(19): siRNA sense strand
gugagccucuccuaagucu

SEQ ID NO: 1503675 - RNA, 19 nt, Homo sapiens
  misc_RNA (1)...(19): siRNA sense strand
cggcucaguucacuauaag

SEQ ID NO: 1503676 - RNA, 19 nt, Homo sapiens
  misc_RNA (1)...(19): siRNA sense strand
caaccagaaguaccuguca

SEQ ID NO: 1503677 - RNA, 19 nt, Homo sapiens
  misc_RNA (1)...(19): siRNA sense strand
guuagagacaccugggaaa

SEQ ID NO: 1503678 - RNA, 19 nt, Homo sapiens
  misc_RNA (1)...(19): siRNA sense strand
ucagcagcguaguggauga

SEQ ID NO: 1503679 - RNA, 19 nt, Homo sapiens
  misc_RNA (1)...(19): siRNA sense strand
aaagccacaaccagaagua

SEQ ID NO: 1503680 - RNA, 19 nt, Homo sapiens
  misc_RNA (1)...(19): siRNA sense strand
gaaggugugaugcugaaaa

SEQ ID NO: 1503681 - RNA, 19 nt, Homo sapiens
  misc_RNA (1)...(19): siRNA sense strand
aacagaagccuauaaagac

SEQ ID NO: 1503682 - RNA, 19 nt, Homo sapiens
  misc_RNA (1)...(19): siRNA sense strand
cuccaaaucaguggcguua

SEQ ID NO: 1503683 - RNA, 19 nt, Homo sapiens
  misc_RNA (1)...(19): siRNA sense strand
caucagcagcguaguggau

SEQ ID NO: 1503684 - RNA, 19 nt, Homo sapiens
  misc_RNA (1)...(19): siRNA sense strand
augauagcaugucuccaaa

SEQ ID NO: 1503685 - RNA, 19 nt, Homo sapiens
  misc_RNA (1)...(19): siRNA sense strand
gaaagaagcuggugaauua

SEQ ID NO: 1503686 - RNA, 19 nt, Homo sapiens
  misc_RNA (1)...(19): siRNA sense strand
gaagagaaauuaucccaaa

SEQ ID NO: 1503687 - RNA, 19 nt, Homo sapiens
  misc_RNA (1)...(19): siRNA sense strand
gaaccaccaucugaaauua

SEQ ID NO: 1503688 - RNA, 19 nt, Homo sapiens
  misc_RNA (1)...(19): siRNA sense strand
ggaauggccuuaagucuug

SEQ ID NO: 1503689 - RNA, 19 nt, Homo sapiens
  misc_RNA (1)...(19): siRNA sense strand
gaucuugucucuucuagaa

SEQ ID NO: 1503690 - RNA, 19 nt, Homo sapiens
  misc_RNA (1)...(19): siRNA sense strand
gaaauugguuacugaaaug

SEQ ID NO: 1503691 - RNA, 19 nt, Homo sapiens
  misc_RNA (1)...(19): siRNA sense strand
gcaacuaacugcuaagaau

SEQ ID NO: 1503692 - RNA, 19 nt, Homo sapiens
  misc_RNA (1)...(19): siRNA sense strand
cauguuaucugcuaaacua

SEQ ID NO: 1503693 - RNA, 19 nt, Homo sapiens
  misc_RNA (1)...(19): siRNA sense strand
ggauggagauuucuuuguu

SEQ ID NO: 1503694 - RNA, 19 nt, Homo sapiens
  misc_RNA (1)...(19): siRNA sense strand
gcaugaagauacugacaaa

SEQ ID NO: 1503695 - RNA, 19 nt, Homo sapiens
  misc_RNA (1)...(19): siRNA sense strand
caaaguagcaucaacagaa

SEQ ID NO: 1503696 - RNA, 19 nt, Homo sapiens
  misc_RNA (1)...(19): siRNA sense strand
ugacagaaauugugugguu

SEQ ID NO: 1503697 - RNA, 19 nt, Homo sapiens
  misc_RNA (1)...(19): siRNA sense strand
ccacaacucugaccaagau

SEQ ID NO: 1503698 - RNA, 19 nt, Homo sapiens
  misc_RNA (1)...(19): siRNA sense strand
cgacacagcuauguuagaa

SEQ ID NO: 1503699 - RNA, 19 nt, Homo sapiens
  misc_RNA (1)...(19): siRNA sense strand
agacagaccucccuugaga

SEQ ID NO: 1503700 - RNA, 19 nt, Homo sapiens
  misc_RNA (1)...(19): siRNA sense strand
ggagagaucccaauuguag

SEQ ID NO: 1503701 - RNA, 19 nt, Homo sapiens
  misc_RNA (1)...(19): siRNA sense strand
ccucaugacuucgcaaaua

SEQ ID NO: 1503702 - RNA, 19 nt, Homo sapiens
  misc_RNA (1)...(19): siRNA sense strand
uauaaggucugucaugcua

SEQ ID NO: 1503703 - RNA, 19 nt, Homo sapiens
  misc_RNA (1)...(19): siRNA sense strand
ugagaaugcuuauuguuga

SEQ ID NO: 1503704 - RNA, 19 nt, Homo sapiens
  misc_RNA (1)...(19): siRNA sense strand
cuacuuacagcacauauua

SEQ ID NO: 1503705 - RNA, 19 nt, Homo sapiens
  misc_RNA (1)...(19): siRNA sense strand
gaagacagaccucccuuga

SEQ ID NO: 1503706 - RNA, 19 nt, Homo sapiens
  misc_RNA (1)...(19): siRNA sense strand
caucuaaacuuaacaaggu

SEQ ID NO: 1503707 - RNA, 19 nt, Homo sapiens
  misc_RNA (1)...(19): siRNA sense strand
cagaauugcuagaaccuuu

SEQ ID NO: 1503708 - RNA, 19 nt, Homo sapiens
  misc_RNA (1)...(19): siRNA sense strand
agaaagagcucguuuuauu

SEQ ID NO: 1503709 - RNA, 19 nt, Homo sapiens
  misc_RNA (1)...(19): siRNA sense strand
gaauugcacauuagaacua

SEQ ID NO: 1503710 - RNA, 19 nt, Homo sapiens
  misc_RNA (1)...(19): siRNA sense strand
gaaaacaaagugacaguua

SEQ ID NO: 1503711 - RNA, 19 nt, Homo sapiens
  misc_RNA (1)...(19): siRNA sense strand
gacugaagcuuugaagaaa

SEQ ID NO: 1503712 - RNA, 19 nt, Homo sapiens
  misc_RNA (1)...(19): siRNA sense strand
ggagagcgacaacaaugua

SEQ ID NO: 1503713 - RNA, 19 nt, Homo sapiens
  misc_RNA (1)...(19): siRNA sense strand
uugaagagcugguuauugu

SEQ ID NO: 1503714 - RNA, 19 nt, Homo sapiens
  misc_RNA (1)...(19): siRNA sense strand
cuaagaagccaauuacuga

SEQ ID NO: 1503715 - RNA, 19 nt, Homo sapiens
  misc_RNA (1)...(19): siRNA sense strand
caagaaagaggaagacaga

SEQ ID NO: 1503716 - RNA, 19 nt, Homo sapiens
  misc_RNA (1)...(19): siRNA sense strand
uuuauucgcugcaucuaua

SEQ ID NO: 1503717 - RNA, 19 nt, Homo sapiens
  misc_RNA (1)...(19): siRNA sense strand
gcuguuaccggccauauaa

SEQ ID NO: 1503718 - RNA, 19 nt, Homo sapiens
  misc_RNA (1)...(19): siRNA sense strand
aaaguagcaucaacagaaa

SEQ ID NO: 1503719 - RNA, 19 nt, Homo sapiens
  misc_RNA (1)...(19): siRNA sense strand
uuaacaaggucacccaauu

SEQ ID NO: 1503720 - RNA, 19 nt, Homo sapiens
  misc_RNA (1)...(19): siRNA sense strand
gcuauuaaaucugucaaga

SEQ ID NO: 1503721 - RNA, 19 nt, Homo sapiens
  misc_RNA (1)...(19): siRNA sense strand
gagcacaccagacuuagaa

SEQ ID NO: 1503722 - RNA, 19 nt, Homo sapiens
  misc_RNA (1)...(19): siRNA sense strand
cagaaaggaucuucaacau

SEQ ID NO: 1503723 - RNA, 19 nt, Homo sapiens
  misc_RNA (1)...(19): siRNA sense strand
agauauggcugcaaauguu

SEQ ID NO: 1503724 - RNA, 19 nt, Homo sapiens
  misc_RNA (1)...(19): siRNA sense strand
acacagcuauguuagaaga

SEQ ID NO: 1503725 - RNA, 19 nt, Homo sapiens
  misc_RNA (1)...(19): siRNA sense strand
ggaucacacuaucaagaaa

SEQ ID NO: 1503726 - RNA, 19 nt, Homo sapiens
  misc_RNA (1)...(19): siRNA sense strand
gcaaagagccagggaaugg

SEQ ID NO: 1503727 - RNA, 19 nt, Homo sapiens
  misc_RNA (1)...(19): siRNA sense strand
gauggagauuucuuuguug

SEQ ID NO: 1503728 - RNA, 19 nt, Homo sapiens
  misc_RNA (1)...(19): siRNA sense strand
gaagaagaaauaacuguag

SEQ ID NO: 1503729 - RNA, 19 nt, Homo sapiens
  misc_RNA (1)...(19): siRNA sense strand
uaauggaauuucucaguga

SEQ ID NO: 1503730 - RNA, 19 nt, Homo sapiens
  misc_RNA (1)...(19): siRNA sense strand
ugaagcugcugggacauua

SEQ ID NO: 1503731 - RNA, 19 nt, Homo sapiens
  misc_RNA (1)...(19): siRNA sense strand
caucgacacagcuauguua

SEQ ID NO: 1503732 - RNA, 19 nt, Homo sapiens
  misc_RNA (1)...(19): siRNA sense strand
agaaugaaaugaacugcaa

SEQ ID NO: 1503733 - RNA, 19 nt, Homo sapiens
  misc_RNA (1)...(19): siRNA sense strand
gguuauggauauccuaaga

SEQ ID NO: 1503734 - RNA, 19 nt, Homo sapiens
  misc_RNA (1)...(19): siRNA sense strand
gauaaccugagaaugcuua

SEQ ID NO: 1503735 - RNA, 19 nt, Homo sapiens
  misc_RNA (1)...(19): siRNA sense strand
gauauggcugcaaauguua

SEQ ID NO: 1503736 - RNA, 19 nt, Homo sapiens
  misc_RNA (1)...(19): siRNA sense strand
caaauguuauuccuguguu

SEQ ID NO: 1503737 - RNA, 19 nt, Homo sapiens
  misc_RNA (1)...(19): siRNA sense strand
gaugugggccgaauuugaa

SEQ ID NO: 1503738 - RNA, 19 nt, Homo sapiens
  misc_RNA (1)...(19): siRNA sense strand
gcaaggaagaucaguuuca

SEQ ID NO: 1503739 - RNA, 19 nt, Homo sapiens
  misc_RNA (1)...(19): siRNA sense strand
aaagaggaaugugacagua

SEQ ID NO: 1503740 - RNA, 19 nt, Homo sapiens
  misc_RNA (1)...(19): siRNA sense strand
ugaagauacugacaaauac

SEQ ID NO: 1503741 - RNA, 19 nt, Homo sapiens
  misc_RNA (1)...(19): siRNA sense strand
gaauguucaccuuuaauga

SEQ ID NO: 1503742 - RNA, 19 nt, Homo sapiens
  misc_RNA (1)...(19): siRNA sense strand
gaggaucuacucuucguuu

SEQ ID NO: 1503743 - RNA, 19 nt, Homo sapiens
  misc_RNA (1)...(19): siRNA sense strand
gugauacuuugcagaauug

SEQ ID NO: 1503744 - RNA, 19 nt, Homo sapiens
  misc_RNA (1)...(19): siRNA sense strand
uaacaaggucacccaauug

SEQ ID NO: 1503745 - RNA, 19 nt, Homo sapiens
  misc_RNA (1)...(19): siRNA sense strand
gaagacauucagaguguga

SEQ ID NO: 1503746 - RNA, 19 nt, Homo sapiens
  misc_RNA (1)...(19): siRNA sense strand
gcucaguguuacauugauu

SEQ ID NO: 1503747 - RNA, 19 nt, Homo sapiens
  misc_RNA (1)...(19): siRNA sense strand
caaaaggaaugcauuuaug

SEQ ID NO: 1503748 - RNA, 19 nt, Homo sapiens
  misc_RNA (1)...(19): siRNA sense strand
cagcacauauuaaagucaa

SEQ ID NO: 1503749 - RNA, 19 nt, Homo sapiens
  misc_RNA (1)...(19): siRNA sense strand
gcaagugacagaaauugug

SEQ ID NO: 1503750 - RNA, 19 nt, Homo sapiens
  misc_RNA (1)...(19): siRNA sense strand
gcugaugucuuggaguuug

SEQ ID NO: 1503751 - RNA, 19 nt, Homo sapiens
  misc_RNA (1)...(19): siRNA sense strand
cuccugaacugauacauga

SEQ ID NO: 1503752 - RNA, 19 nt, Homo sapiens
  misc_RNA (1)...(19): siRNA sense strand
gagcagcaagugacagaaa

SEQ ID NO: 1503753 - RNA, 19 nt, Homo sapiens
  misc_RNA (1)...(19): siRNA sense strand
ucucacauguuaucugcua

SEQ ID NO: 1503754 - RNA, 19 nt, Homo sapiens
  misc_RNA (1)...(19): siRNA sense strand
gaugauguggaucgaauuu

SEQ ID NO: 1503755 - RNA, 19 nt, Homo sapiens
  misc_RNA (1)...(19): siRNA sense strand
uaauuaacgugccaaugga

SEQ ID NO: 1503756 - RNA, 19 nt, Homo sapiens
  misc_RNA (1)...(19): siRNA sense strand
aaggagauguaaagucaaa

SEQ ID NO: 1503757 - RNA, 19 nt, Homo sapiens
  misc_RNA (1)...(19): siRNA sense strand
gaaugcuuauuguugagaa

SEQ ID NO: 1503758 - RNA, 19 nt, Homo sapiens
  misc_RNA (1)...(19): siRNA sense strand
ggaucgagcuuuggauuac

SEQ ID NO: 1503759 - RNA, 19 nt, Homo sapiens
  misc_RNA (1)...(19): siRNA sense strand
gggaauggccuuaagucuu

SEQ ID NO: 1503760 - RNA, 19 nt, Homo sapiens
  misc_RNA (1)...(19): siRNA sense strand
gcagaauuccgucagaugu

SEQ ID NO: 1503761 - RNA, 19 nt, Homo sapiens
  misc_RNA (1)...(19): siRNA sense strand
gucccuuucucacauguua

SEQ ID NO: 1503762 - RNA, 19 nt, Homo sapiens
  misc_RNA (1)...(19): siRNA sense strand
gcagacagucccuuucuca

SEQ ID NO: 1503763 - RNA, 19 nt, Homo sapiens
  misc_RNA (1)...(19): siRNA sense strand
gaaugcagacagucccuuu

SEQ ID NO: 1503764 - RNA, 19 nt, Homo sapiens
  misc_RNA (1)...(19): siRNA sense strand
gaaauggguaccuaugcaa

SEQ ID NO: 1503765 - RNA, 19 nt, Homo sapiens
  misc_RNA (1)...(19): siRNA sense strand
ccauucagcgcuuugauaa

SEQ ID NO: 1503766 - RNA, 19 nt, Homo sapiens
  misc_RNA (1)...(19): siRNA sense strand
aaaaggagauguaaaguca

SEQ ID NO: 1503767 - RNA, 19 nt, Homo sapiens
  misc_RNA (1)...(19): siRNA sense strand
ggccaucuauaccaucuau

SEQ ID NO: 1503768 - RNA, 19 nt, Homo sapiens
  misc_RNA (1)...(19): siRNA sense strand
uauaagaauucgugcaaag

SEQ ID NO: 1503769 - RNA, 19 nt, Homo sapiens
  misc_RNA (1)...(19): siRNA sense strand
caugacuucgcaaauauua

SEQ ID NO: 1503770 - RNA, 19 nt, Homo sapiens
  misc_RNA (1)...(19): siRNA sense strand
uuucucagauccuguauau

SEQ ID NO: 1503771 - RNA, 19 nt, Homo sapiens
  misc_RNA (1)...(19): siRNA sense strand
agaagccaauuacugauga

SEQ ID NO: 1503772 - RNA, 19 nt, Homo sapiens
  misc_RNA (1)...(19): siRNA sense strand
uggcuacuauccugcauuu

SEQ ID NO: 1503773 - RNA, 19 nt, Homo sapiens
  misc_RNA (1)...(19): siRNA sense strand
agacugaagcuuugaagaa

SEQ ID NO: 1503774 - RNA, 19 nt, Homo sapiens
  misc_RNA (1)...(19): siRNA sense strand
uacaggaucugguuaugga

SEQ ID NO: 1503775 - RNA, 19 nt, Homo sapiens
  misc_RNA (1)...(19): siRNA sense strand
caaauugaaagaagcagaa

SEQ ID NO: 1503776 - RNA, 19 nt, Homo sapiens
  misc_RNA (1)...(19): siRNA sense strand
caacuugucacagaagaaa

SEQ ID NO: 1503777 - RNA, 19 nt, Homo sapiens
  misc_RNA (1)...(19): siRNA sense strand
ggagauguaaagucaaaga

SEQ ID NO: 1503778 - RNA, 19 nt, Homo sapiens
  misc_RNA (1)...(19): siRNA sense strand
caugucaaccaauaugaua

SEQ ID NO: 1503779 - RNA, 19 nt, Homo sapiens
  misc_RNA (1)...(19): siRNA sense strand
ucaugcaacuaacugcuaa

SEQ ID NO: 1503780 - RNA, 19 nt, Homo sapiens
  misc_RNA (1)...(19): siRNA sense strand
guuaucugcuaaacuagaa

SEQ ID NO: 1503781 - RNA, 19 nt, Homo sapiens
  misc_RNA (1)...(19): siRNA sense strand
caaauacagacaacuccua

SEQ ID NO: 1503782 - RNA, 19 nt, Homo sapiens
  misc_RNA (1)...(19): siRNA sense strand
gguuauuguugaacugauu

SEQ ID NO: 1503783 - RNA, 19 nt, Homo sapiens
  misc_RNA (1)...(19): siRNA sense strand
gcagcugguuauuguugaa

SEQ ID NO: 1503784 - RNA, 19 nt, Homo sapiens
  misc_RNA (1)...(19): siRNA sense strand
gaauugcuagaaccuuuaa

SEQ ID NO: 1503785 - RNA, 19 nt, Homo sapiens
  misc_RNA (1)...(19): siRNA sense strand
gcacugaccuggauacuga

SEQ ID NO: 1503786 - RNA, 19 nt, Homo sapiens
  misc_RNA (1)...(19): siRNA sense strand
gcaaaugcauuccuguuau

SEQ ID NO: 1503787 - RNA, 19 nt, Homo sapiens
  misc_RNA (1)...(19): siRNA sense strand
gaacaagccauguaugaga

SEQ ID NO: 1503788 - RNA, 19 nt, Homo sapiens
  misc_RNA (1)...(19): siRNA sense strand
ggacuaagcccucuuccuu

SEQ ID NO: 1503789 - RNA, 19 nt, Homo sapiens
  misc_RNA (1)...(19): siRNA sense strand
ugcaugaacucuacaauuu

SEQ ID NO: 1503790 - RNA, 19 nt, Homo sapiens
  misc_RNA (1)...(19): siRNA sense strand
gaauauauagccaauguga

SEQ ID NO: 1503791 - RNA, 19 nt, Homo sapiens
  misc_RNA (1)...(19): siRNA sense strand
ggaccgagcuguggaguuc

SEQ ID NO: 1503792 - RNA, 19 nt, Homo sapiens
  misc_RNA (1)...(19): siRNA sense strand
uguaugagauggugaagaa

SEQ ID NO: 1503793 - RNA, 19 nt, Homo sapiens
  misc_RNA (1)...(19): siRNA sense strand
ggagcgcuauccauaugua

SEQ ID NO: 1503794 - RNA, 19 nt, Homo sapiens
  misc_RNA (1)...(19): siRNA sense strand
ggaaauccagagaaucuaa

SEQ ID NO: 1503795 - RNA, 19 nt, Homo sapiens
  misc_RNA (1)...(19): siRNA sense strand
caaaugcauuccuguuaug

SEQ ID NO: 1503796 - RNA, 19 nt, Homo sapiens
  misc_RNA (1)...(19): siRNA sense strand
uauggaagcccaagaauau

SEQ ID NO: 1503797 - RNA, 19 nt, Homo sapiens
  misc_RNA (1)...(19): siRNA sense strand
ggaagcccaagaauauaua

SEQ ID NO: 1503798 - RNA, 19 nt, Homo sapiens
  misc_RNA (1)...(19): siRNA sense strand
ccaagaauauauagccaau

SEQ ID NO: 1503799 - RNA, 19 nt, Homo sapiens
  misc_RNA (1)...(19): siRNA sense strand
cauccaagcugguaauuuu

SEQ ID NO: 1503800 - RNA, 19 nt, Homo sapiens
  misc_RNA (1)...(19): siRNA sense strand
gagauggugaagaagauua

SEQ ID NO: 1503801 - RNA, 19 nt, Homo sapiens
  misc_RNA (1)...(19): siRNA sense strand
gaaauccagagaaucuaaa

SEQ ID NO: 1503802 - RNA, 19 nt, Homo sapiens
  misc_RNA (1)...(19): siRNA sense strand
aaauaucgguggcgaaagu

SEQ ID NO: 1503803 - RNA, 19 nt, Homo sapiens
  misc_RNA (1)...(19): siRNA sense strand
ggaggaacaagccauguau

SEQ ID NO: 1503804 - RNA, 19 nt, Homo sapiens
  misc_RNA (1)...(19): siRNA sense strand
ggaggacaacaugaaguua

SEQ ID NO: 1503805 - RNA, 19 nt, Homo sapiens
  misc_RNA (1)...(19): siRNA sense strand
gaggacaacaugaaguuau

SEQ ID NO: 1503806 - RNA, 19 nt, Homo sapiens
  misc_RNA (1)...(19): siRNA sense strand
ccaacgugcucaucuucuu

SEQ ID NO: 1503807 - RNA, 19 nt, Homo sapiens
  misc_RNA (1)...(19): siRNA sense strand
ucaccaacgugcucaucuu

SEQ ID NO: 1503808 - RNA, 19 nt, Homo sapiens
  misc_RNA (1)...(19): siRNA sense strand
gcaugaacucuacaauuuc

SEQ ID NO: 1503809 - RNA, 19 nt, Homo sapiens
  misc_RNA (1)...(19): siRNA sense strand
aggacaacaugaaguuauu

SEQ ID NO: 1503810 - RNA, 19 nt, Homo sapiens
  misc_RNA (1)...(19): siRNA sense strand
ggacaacaugaaguuauug

SEQ ID NO: 1503811 - RNA, 19 nt, Homo sapiens
  misc_RNA (1)...(19): siRNA sense strand
ugacgacuguggacaaggu

SEQ ID NO: 1503812 - RNA, 19 nt, Homo sapiens
  misc_RNA (1)...(19): siRNA sense strand
ugcuggagcugcugcauga

SEQ ID NO: 1503813 - RNA, 19 nt, Homo sapiens
  misc_RNA (1)...(19): siRNA sense strand
cagcuccuccgccaaguuu

SEQ ID NO: 1503814 - RNA, 19 nt, Homo sapiens
  misc_RNA (1)...(19): siRNA sense strand
uuauggaagcccaagaaua

SEQ ID NO: 1503815 - RNA, 19 nt, Homo sapiens
  misc_RNA (1)...(19): siRNA sense strand
agcaaaugcauuccuguua

SEQ ID NO: 1503816 - RNA, 19 nt, Homo sapiens
  misc_RNA (1)...(19): siRNA sense strand
gcuccuaauucuccuaaaa

SEQ ID NO: 1503817 - RNA, 19 nt, Homo sapiens
  misc_RNA (1)...(19): siRNA sense strand
gugggcaucugguugaaag

SEQ ID NO: 1503818 - RNA, 19 nt, Homo sapiens
  misc_RNA (1)...(19): siRNA sense strand
caagguggucugccuggaa

SEQ ID NO: 1503819 - RNA, 19 nt, Homo sapiens
  misc_RNA (1)...(19): siRNA sense strand
aggaacaagccauguauga

SEQ ID NO: 1503820 - RNA, 19 nt, Homo sapiens
  misc_RNA (1)...(19): siRNA sense strand
ggaacaagccauguaugag

SEQ ID NO: 1503821 - RNA, 19 nt, Homo sapiens
  misc_RNA (1)...(19): siRNA sense strand
gacgugggcaucugguuga

SEQ ID NO: 1503822 - RNA, 19 nt, Homo sapiens
  misc_RNA (1)...(19): siRNA sense strand
ggacugggagcaggacaug

SEQ ID NO: 1503823 - RNA, 19 nt, Homo sapiens
  misc_RNA (1)...(19): siRNA sense strand
cugaauuggugacgacugu

SEQ ID NO: 1503824 - RNA, 19 nt, Homo sapiens
  misc_RNA (1)...(19): siRNA sense strand
uaugagauggugaagaaga

SEQ ID NO: 1503825 - RNA, 19 nt, Homo sapiens
  misc_RNA (1)...(19): siRNA sense strand
ucacugcugucaccaacgu

SEQ ID NO: 1503826 - RNA, 19 nt, Homo sapiens
  misc_RNA (1)...(19): siRNA sense strand
cugcaugaacucuacaauu

SEQ ID NO: 1503827 - RNA, 19 nt, Homo sapiens
  misc_RNA (1)...(19): siRNA sense strand
uaagcccucuuccuucucu

SEQ ID NO: 1503828 - RNA, 19 nt, Homo sapiens
  misc_RNA (1)...(19): siRNA sense strand
guuccuggccuccaacgaa

SEQ ID NO: 1503829 - RNA, 19 nt, Homo sapiens
  misc_RNA (1)...(19): siRNA sense strand
caugaacucuacaauuucc

SEQ ID NO: 1503830 - RNA, 19 nt, Homo sapiens
  misc_RNA (1)...(19): siRNA sense strand
gauggugaagaagauuaua

SEQ ID NO: 1503831 - RNA, 19 nt, Homo sapiens
  misc_RNA (1)...(19): siRNA sense strand
aacaagccauguaugagau

SEQ ID NO: 1503832 - RNA, 19 nt, Homo sapiens
  misc_RNA (1)...(19): siRNA sense strand
gaggaacaagccauguaug

SEQ ID NO: 1503833 - RNA, 19 nt, Homo sapiens
  misc_RNA (1)...(19): siRNA sense strand
aaaguuagaagaggaggaa

SEQ ID NO: 1503834 - RNA, 19 nt, Homo sapiens
  misc_RNA (1)...(19): siRNA sense strand
uggaagcccaagaauauau

SEQ ID NO: 1503835 - RNA, 19 nt, Homo sapiens
  misc_RNA (1)...(19): siRNA sense strand
cggaggacaacaugaaguu

SEQ ID NO: 1503836 - RNA, 19 nt, Homo sapiens
  misc_RNA (1)...(19): siRNA sense strand
caacgugcucaucuucuuc

SEQ ID NO: 1503837 - RNA, 19 nt, Homo sapiens
  misc_RNA (1)...(19): siRNA sense strand
ggaggcggaggacaacaug

SEQ ID NO: 1503838 - RNA, 19 nt, Homo sapiens
  misc_RNA (1)...(19): siRNA sense strand
gcuccuccgccaaguuuga

SEQ ID NO: 1503839 - RNA, 19 nt, Homo sapiens
  misc_RNA (1)...(19): siRNA sense strand
acuaagcccucuuccuucu

SEQ ID NO: 1503840 - RNA, 19 nt, Homo sapiens
  misc_RNA (1)...(19): siRNA sense strand
cgggaugucuaccgcaaca

SEQ ID NO: 1503841 - RNA, 19 nt, Homo sapiens
  misc_RNA (1)...(19): siRNA sense strand
ggugacgacuguggacaag

SEQ ID NO: 1503842 - RNA, 19 nt, Homo sapiens
  misc_RNA (1)...(19): siRNA sense strand
gaagcccaagaauauauag

SEQ ID NO: 1503843 - RNA, 19 nt, Homo sapiens
  misc_RNA (1)...(19): siRNA sense strand
guguggagauggacuaagc

SEQ ID NO: 1503844 - RNA, 19 nt, Homo sapiens
  misc_RNA (1)...(19): siRNA sense strand
guuagaagaggaggaacaa

SEQ ID NO: 1503845 - RNA, 19 nt, Homo sapiens
  misc_RNA (1)...(19): siRNA sense strand
gggcuccuaauucuccuaa

SEQ ID NO: 1503846 - RNA, 19 nt, Homo sapiens
  misc_RNA (1)...(19): siRNA sense strand
aagguggucugccuggaau

SEQ ID NO: 1503847 - RNA, 19 nt, Homo sapiens
  misc_RNA (1)...(19): siRNA sense strand
gcagcuccuccgccaaguu

SEQ ID NO: 1503848 - RNA, 19 nt, Homo sapiens
  misc_RNA (1)...(19): siRNA sense strand
gauggacuaagcccucuuc

SEQ ID NO: 1503849 - RNA, 19 nt, Homo sapiens
  misc_RNA (1)...(19): siRNA sense strand
gcugcugcaugaacucuac

SEQ ID NO: 1503850 - RNA, 19 nt, Homo sapiens
  misc_RNA (1)...(19): siRNA sense strand
uaaaauaucgguggcgaaa

SEQ ID NO: 1503851 - RNA, 19 nt, Homo sapiens
  misc_RNA (1)...(19): siRNA sense strand
gggcauccuuugggugaag

SEQ ID NO: 1503852 - RNA, 19 nt, Homo sapiens
  misc_RNA (1)...(19): siRNA sense strand
aagcaaaugcauuccuguu

SEQ ID NO: 1503853 - RNA, 19 nt, Homo sapiens
  misc_RNA (1)...(19): siRNA sense strand
ggaugucuaccgcaacaag

SEQ ID NO: 1503854 - RNA, 19 nt, Homo sapiens
  misc_RNA (1)...(19): siRNA sense strand
acaauuuccuggccaucca

SEQ ID NO: 1503855 - RNA, 19 nt, Homo sapiens
  misc_RNA (1)...(19): siRNA sense strand
ggacuuaccuucugagcau

SEQ ID NO: 1503856 - RNA, 19 nt, Homo sapiens
  misc_RNA (1)...(19): siRNA sense strand
agaaagaccuuacaagugu

SEQ ID NO: 1503857 - RNA, 19 nt, Homo sapiens
  misc_RNA (1)...(19): siRNA sense strand
gagaaaggccuuaugaaug

SEQ ID NO: 1503858 - RNA, 19 nt, Homo sapiens
  misc_RNA (1)...(19): siRNA sense strand
gggaaagccuucaaccaaa

SEQ ID NO: 1503859 - RNA, 19 nt, Homo sapiens
  misc_RNA (1)...(19): siRNA sense strand
ccagaaaguucacaauaga

SEQ ID NO: 1503860 - RNA, 19 nt, Homo sapiens
  misc_RNA (1)...(19): siRNA sense strand
gagauaagcucugagaaca

SEQ ID NO: 1503861 - RNA, 19 nt, Homo sapiens
  misc_RNA (1)...(19): siRNA sense strand
caaugaaugugggaaguua

SEQ ID NO: 1503862 - RNA, 19 nt, Homo sapiens
  misc_RNA (1)...(19): siRNA sense strand
gcucugaccucaugaaaca

SEQ ID NO: 1503863 - RNA, 19 nt, Homo sapiens
  misc_RNA (1)...(19): siRNA sense strand
gggaaauucuuuaaccaaa

SEQ ID NO: 1503864 - RNA, 19 nt, Homo sapiens
  misc_RNA (1)...(19): siRNA sense strand
gaacagagggcaaggacuu

SEQ ID NO: 1503865 - RNA, 19 nt, Homo sapiens
  misc_RNA (1)...(19): siRNA sense strand
gcagagaaaggccuuauga

SEQ ID NO: 1503866 - RNA, 19 nt, Homo sapiens
  misc_RNA (1)...(19): siRNA sense strand
ccaaaggccuacccucauu

SEQ ID NO: 1503867 - RNA, 19 nt, Homo sapiens
  misc_RNA (1)...(19): siRNA sense strand
cagcaaauguggaaucuuc

SEQ ID NO: 1503868 - RNA, 19 nt, Homo sapiens
  misc_RNA (1)...(19): siRNA sense strand
gaaaggagcauggagaaug

SEQ ID NO: 1503869 - RNA, 19 nt, Homo sapiens
  misc_RNA (1)...(19): siRNA sense strand
gcagaaaccauuugugugu

SEQ ID NO: 1503870 - RNA, 19 nt, Homo sapiens
  misc_RNA (1)...(19): siRNA sense strand
gaaugugggaaguuauuua

SEQ ID NO: 1503871 - RNA, 19 nt, Homo sapiens
  misc_RNA (1)...(19): siRNA sense strand
gagaaagaccuuacaagug

SEQ ID NO: 1503872 - RNA, 19 nt, Homo sapiens
  misc_RNA (1)...(19): siRNA sense strand
ggagaaagaccuuacaagu

SEQ ID NO: 1503873 - RNA, 19 nt, Homo sapiens
  misc_RNA (1)...(19): siRNA sense strand
guacacaacccuaucagaa

SEQ ID NO: 1503874 - RNA, 19 nt, Homo sapiens
  misc_RNA (1)...(19): siRNA sense strand
gagcauaacguuucuguag

SEQ ID NO: 1503875 - RNA, 19 nt, Homo sapiens
  misc_RNA (1)...(19): siRNA sense strand
gcagagaccacacaucaga

SEQ ID NO: 1503876 - RNA, 19 nt, Homo sapiens
  misc_RNA (1)...(19): siRNA sense strand
ugaaagcccucacgugugu

SEQ ID NO: 1503877 - RNA, 19 nt, Homo sapiens
  misc_RNA (1)...(19): siRNA sense strand
agaaacaggugcagcagaa

SEQ ID NO: 1503878 - RNA, 19 nt, Homo sapiens
  misc_RNA (1)...(19): siRNA sense strand
ggaaagccuucaaccaaag

SEQ ID NO: 1503879 - RNA, 19 nt, Homo sapiens
  misc_RNA (1)...(19): siRNA sense strand
aauaacaaauccacucuug

SEQ ID NO: 1503880 - RNA, 19 nt, Homo sapiens
  misc_RNA (1)...(19): siRNA sense strand
ccgaaggugugguggauuu

SEQ ID NO: 1503881 - RNA, 19 nt, Homo sapiens
  misc_RNA (1)...(19): siRNA sense strand
cauaacaagugcugugaau

SEQ ID NO: 1503882 - RNA, 19 nt, Homo sapiens
  misc_RNA (1)...(19): siRNA sense strand
agaaaggccuuaugaaugc

SEQ ID NO: 1503883 - RNA, 19 nt, Homo sapiens
  misc_RNA (1)...(19): siRNA sense strand
guuccaaccucauucauca

SEQ ID NO: 1503884 - RNA, 19 nt, Homo sapiens
  misc_RNA (1)...(19): siRNA sense strand
gcacuaaggcauaacaagu

SEQ ID NO: 1503885 - RNA, 19 nt, Homo sapiens
  misc_RNA (1)...(19): siRNA sense strand
gaaauucuucagccacauu

SEQ ID NO: 1503886 - RNA, 19 nt, Homo sapiens
  misc_RNA (1)...(19): siRNA sense strand
gagaaaggagcauggagaa

SEQ ID NO: 1503887 - RNA, 19 nt, Homo sapiens
  misc_RNA (1)...(19): siRNA sense strand
guggaaucuucuucacuua

SEQ ID NO: 1503888 - RNA, 19 nt, Homo sapiens
  misc_RNA (1)...(19): siRNA sense strand
ccgaagcucugaccucaug

SEQ ID NO: 1503889 - RNA, 19 nt, Homo sapiens
  misc_RNA (1)...(19): siRNA sense strand
ugacauauguggccuacgu

SEQ ID NO: 1503890 - RNA, 19 nt, Homo sapiens
  misc_RNA (1)...(19): siRNA sense strand
gcaacuccagccuaauuaa

SEQ ID NO: 1503891 - RNA, 19 nt, Homo sapiens
  misc_RNA (1)...(19): siRNA sense strand
caccagaaaguucacaaua

SEQ ID NO: 1503892 - RNA, 19 nt, Homo sapiens
  misc_RNA (1)...(19): siRNA sense strand
agacaggccuuacgaaugc

SEQ ID NO: 1503893 - RNA, 19 nt, Homo sapiens
  misc_RNA (1)...(19): siRNA sense strand
aaaggagcauggagaaugu

SEQ ID NO: 1503894 - RNA, 19 nt, Homo sapiens
  misc_RNA (1)...(19): siRNA sense strand
caacacaucccaggcagaa

SEQ ID NO: 1503895 - RNA, 19 nt, Homo sapiens
  misc_RNA (1)...(19): siRNA sense strand
gcacuccagccuuguuaaa

SEQ ID NO: 1503896 - RNA, 19 nt, Homo sapiens
  misc_RNA (1)...(19): siRNA sense strand
gggaugccuucaauaacaa

SEQ ID NO: 1503897 - RNA, 19 nt, Homo sapiens
  misc_RNA (1)...(19): siRNA sense strand
ucagaagauucacaucaga

SEQ ID NO: 1503898 - RNA, 19 nt, Homo sapiens
  misc_RNA (1)...(19): siRNA sense strand
caacuccagccuaauuaaa

SEQ ID NO: 1503899 - RNA, 19 nt, Homo sapiens
  misc_RNA (1)...(19): siRNA sense strand
gaaugcagcaaauguggaa

SEQ ID NO: 1503900 - RNA, 19 nt, Homo sapiens
  misc_RNA (1)...(19): siRNA sense strand
agaaaccauuuguguguga

SEQ ID NO: 1503901 - RNA, 19 nt, Homo sapiens
  misc_RNA (1)...(19): siRNA sense strand
ccacauugccagccucauu

SEQ ID NO: 1503902 - RNA, 19 nt, Homo sapiens
  misc_RNA (1)...(19): siRNA sense strand
uaacaagugcugugaaucu

SEQ ID NO: 1503903 - RNA, 19 nt, Homo sapiens
  misc_RNA (1)...(19): siRNA sense strand
gaacguacacaacccuauc

SEQ ID NO: 1503904 - RNA, 19 nt, Homo sapiens
  misc_RNA (1)...(19): siRNA sense strand
agagaaaggccuuaugaau

SEQ ID NO: 1503905 - RNA, 19 nt, Homo sapiens
  misc_RNA (1)...(19): siRNA sense strand
ucagggcgcugucaacuac

SEQ ID NO: 1503906 - RNA, 19 nt, Homo sapiens
  misc_RNA (1)...(19): siRNA sense strand
gaagauucacaucagagaa

SEQ ID NO: 1503907 - RNA, 19 nt, Homo sapiens
  misc_RNA (1)...(19): siRNA sense strand
caugaaacaucagcgaguu

SEQ ID NO: 1503908 - RNA, 19 nt, Homo sapiens
  misc_RNA (1)...(19): siRNA sense strand
caucauaagaggguucaua

SEQ ID NO: 1503909 - RNA, 19 nt, Homo sapiens
  misc_RNA (1)...(19): siRNA sense strand
ccgcugaccucacucaaca

SEQ ID NO: 1503910 - RNA, 19 nt, Homo sapiens
  misc_RNA (1)...(19): siRNA sense strand
caaauccacucuuguucag

SEQ ID NO: 1503911 - RNA, 19 nt, Homo sapiens
  misc_RNA (1)...(19): siRNA sense strand
gcccaugagugcagugaau

SEQ ID NO: 1503912 - RNA, 19 nt, Homo sapiens
  misc_RNA (1)...(19): siRNA sense strand
ccaaccucauucaucauaa

SEQ ID NO: 1503913 - RNA, 19 nt, Homo sapiens
  misc_RNA (1)...(19): siRNA sense strand
uguggaaucuucuucacuu

SEQ ID NO: 1503914 - RNA, 19 nt, Homo sapiens
  misc_RNA (1)...(19): siRNA sense strand
gaacaccagacaacacauc

SEQ ID NO: 1503915 - RNA, 19 nt, Homo sapiens
  misc_RNA (1)...(19): siRNA sense strand
caaagcuccagccucaaua

SEQ ID NO: 1503916 - RNA, 19 nt, Homo sapiens
  misc_RNA (1)...(19): siRNA sense strand
gugaaugugggaaaucuuu

SEQ ID NO: 1503917 - RNA, 19 nt, Homo sapiens
  misc_RNA (1)...(19): siRNA sense strand
caggguuucugcaguguga

SEQ ID NO: 1503918 - RNA, 19 nt, Homo sapiens
  misc_RNA (1)...(19): siRNA sense strand
gaaagacauuuugcauuug

SEQ ID NO: 1503919 - RNA, 19 nt, Homo sapiens
  misc_RNA (1)...(19): siRNA sense strand
caucagaagauucacauca

SEQ ID NO: 1503920 - RNA, 19 nt, Homo sapiens
  misc_RNA (1)...(19): siRNA sense strand
ccaaccucauucagcauaa

SEQ ID NO: 1503921 - RNA, 19 nt, Homo sapiens
  misc_RNA (1)...(19): siRNA sense strand
gagaauccacagcagagaa

SEQ ID NO: 1503922 - RNA, 19 nt, Homo sapiens
  misc_RNA (1)...(19): siRNA sense strand
ccacacaucagaucagcuu

SEQ ID NO: 1503923 - RNA, 19 nt, Homo sapiens
  misc_RNA (1)...(19): siRNA sense strand
gcaaugaaugugggaaguu

SEQ ID NO: 1503924 - RNA, 19 nt, Homo sapiens
  misc_RNA (1)...(19): siRNA sense strand
caaccucauucaucauaag

SEQ ID NO: 1503925 - RNA, 19 nt, Homo sapiens
  misc_RNA (1)...(19): siRNA sense strand
gcaaauguggaaucuucuu

SEQ ID NO: 1503926 - RNA, 19 nt, Homo sapiens
  misc_RNA (1)...(19): siRNA sense strand
gugcaaaccuuccccagaa

SEQ ID NO: 1503927 - RNA, 19 nt, Homo sapiens
  misc_RNA (1)...(19): siRNA sense strand
ccaaagcuccagccucaau

SEQ ID NO: 1503928 - RNA, 19 nt, Homo sapiens
  misc_RNA (1)...(19): siRNA sense strand
gcagugaaugugggaaauu

SEQ ID NO: 1503929 - RNA, 19 nt, Homo sapiens
  misc_RNA (1)...(19): siRNA sense strand
ucacagcacacaccagaga

SEQ ID NO: 1503930 - RNA, 19 nt, Homo sapiens
  misc_RNA (1)...(19): siRNA sense strand
ugaguucagugcaaaccuu

SEQ ID NO: 1503931 - RNA, 19 nt, Homo sapiens
  misc_RNA (1)...(19): siRNA sense strand
ggaaucuucuucacuuacg

SEQ ID NO: 1503932 - RNA, 19 nt, Homo sapiens
  misc_RNA (1)...(19): siRNA sense strand
cagcacuccagccuuguua

SEQ ID NO: 1503933 - RNA, 19 nt, Homo sapiens
  misc_RNA (1)...(19): siRNA sense strand
ugggaaagccuucaaccaa

SEQ ID NO: 1503934 - RNA, 19 nt, Homo sapiens
  misc_RNA (1)...(19): siRNA sense strand
gcuccagccucaauaacca

SEQ ID NO: 1503935 - RNA, 19 nt, Homo sapiens
  misc_RNA (1)...(19): siRNA sense strand
ggugagcggccuuaugaau

SEQ ID NO: 1503936 - RNA, 19 nt, Homo sapiens
  misc_RNA (1)...(19): siRNA sense strand
ggccuacguuugaaagaca

SEQ ID NO: 1503937 - RNA, 19 nt, Homo sapiens
  misc_RNA (1)...(19): siRNA sense strand
cagcacacaccagagauaa

SEQ ID NO: 1503938 - RNA, 19 nt, Homo sapiens
  misc_RNA (1)...(19): siRNA sense strand
gaaaggccuuaugaaugca

SEQ ID NO: 1503939 - RNA, 19 nt, Homo sapiens
  misc_RNA (1)...(19): siRNA sense strand
cagacaggccuuacgaaug

SEQ ID NO: 1503940 - RNA, 19 nt, Homo sapiens
  misc_RNA (1)...(19): siRNA sense strand
accagaaaguucacaauag

SEQ ID NO: 1503941 - RNA, 19 nt, Homo sapiens
  misc_RNA (1)...(19): siRNA sense strand
gcaggccuggcucugauuu

SEQ ID NO: 1503942 - RNA, 19 nt, Homo sapiens
  misc_RNA (1)...(19): siRNA sense strand
ccagacaggccuuacgaau

SEQ ID NO: 1503943 - RNA, 19 nt, Homo sapiens
  misc_RNA (1)...(19): siRNA sense strand
caauagccaucggagacuu

SEQ ID NO: 1503944 - RNA, 19 nt, Homo sapiens
  misc_RNA (1)...(19): siRNA sense strand
ccuuaugaaugcaaugaau

SEQ ID NO: 1503945 - RNA, 19 nt, Homo sapiens
  misc_RNA (1)...(19): siRNA sense strand
gaagcucugaccucaugaa

SEQ ID NO: 1503946 - RNA, 19 nt, Homo sapiens
  misc_RNA (1)...(19): siRNA sense strand
acauugcacuaaggcauaa

SEQ ID NO: 1503947 - RNA, 19 nt, Homo sapiens
  misc_RNA (1)...(19): siRNA sense strand
aagauucacaucagagaaa

SEQ ID NO: 1503948 - RNA, 19 nt, Homo sapiens
  misc_RNA (1)...(19): siRNA sense strand
cagagaaaggccuuaugaa

SEQ ID NO: 1503949 - RNA, 19 nt, Homo sapiens
  misc_RNA (1)...(19): siRNA sense strand
ggggaugccuucaauaaca

SEQ ID NO: 1503950 - RNA, 19 nt, Homo sapiens
  misc_RNA (1)...(19): siRNA sense strand
ugugaaaggcucugaguuc

SEQ ID NO: 1503951 - RNA, 19 nt, Homo sapiens
  misc_RNA (1)...(19): siRNA sense strand
gaagcuccaaccucauuca

SEQ ID NO: 1503952 - RNA, 19 nt, Homo sapiens
  misc_RNA (1)...(19): siRNA sense strand
ccgaagcuccaaccucauu

SEQ ID NO: 1503953 - RNA, 19 nt, Homo sapiens
  misc_RNA (1)...(19): siRNA sense strand
ucacucaacaccagaaagu

SEQ ID NO: 1503954 - RNA, 19 nt, Homo sapiens
  misc_RNA (1)...(19): siRNA sense strand
gcauaacaagugcugugaa

SEQ ID NO: 1503955 - RNA, 19 nt, Homo sapiens
  misc_RNA (1)...(19): siRNA sense strand
gaaagacacugccaccuau

SEQ ID NO: 1503956 - RNA, 19 nt, Homo sapiens
  misc_RNA (1)...(19): siRNA sense strand
gaacauugauggaauaggu

SEQ ID NO: 1503957 - RNA, 19 nt, Homo sapiens
  misc_RNA (1)...(19): siRNA sense strand
caaagaggauguuccagaa

SEQ ID NO: 1503958 - RNA, 19 nt, Homo sapiens
  misc_RNA (1)...(19): siRNA sense strand
agacugaacuuaaagacua

SEQ ID NO: 1503959 - RNA, 19 nt, Homo sapiens
  misc_RNA (1)...(19): siRNA sense strand
uggaugggaugcaguauua

SEQ ID NO: 1503960 - RNA, 19 nt, Homo sapiens
  misc_RNA (1)...(19): siRNA sense strand
caagagauuugcugaugaa

SEQ ID NO: 1503961 - RNA, 19 nt, Homo sapiens
  misc_RNA (1)...(19): siRNA sense strand
gagaggacauucagcaguu

SEQ ID NO: 1503962 - RNA, 19 nt, Homo sapiens
  misc_RNA (1)...(19): siRNA sense strand
gaaguuaucaaaccugaaa

SEQ ID NO: 1503963 - RNA, 19 nt, Homo sapiens
  misc_RNA (1)...(19): siRNA sense strand
gaaaauguauggagaucua

SEQ ID NO: 1503964 - RNA, 19 nt, Homo sapiens
  misc_RNA (1)...(19): siRNA sense strand
gcagaacagugaaccaugu

SEQ ID NO: 1503965 - RNA, 19 nt, Homo sapiens
  misc_RNA (1)...(19): siRNA sense strand
acacaguucuggcuuauga

SEQ ID NO: 1503966 - RNA, 19 nt, Homo sapiens
  misc_RNA (1)...(19): siRNA sense strand
gcggaacauugauggaaua

SEQ ID NO: 1503967 - RNA, 19 nt, Homo sapiens
  misc_RNA (1)...(19): siRNA sense strand
gaugaaggcacgguuguua

SEQ ID NO: 1503968 - RNA, 19 nt, Homo sapiens
  misc_RNA (1)...(19): siRNA sense strand
uggaauaggugaucaggaa

SEQ ID NO: 1503969 - RNA, 19 nt, Homo sapiens
  misc_RNA (1)...(19): siRNA sense strand
agacaguguuuaagaauga

SEQ ID NO: 1503970 - RNA, 19 nt, Homo sapiens
  misc_RNA (1)...(19): siRNA sense strand
acaaugauuugaagacuga

SEQ ID NO: 1503971 - RNA, 19 nt, Homo sapiens
  misc_RNA (1)...(19): siRNA sense strand
gaacuuaaagacuaucuca

SEQ ID NO: 1503972 - RNA, 19 nt, Homo sapiens
  misc_RNA (1)...(19): siRNA sense strand
gcacgguuguuaagagaga

SEQ ID NO: 1503973 - RNA, 19 nt, Homo sapiens
  misc_RNA (1)...(19): siRNA sense strand
gaacucauuugugaauaca

SEQ ID NO: 1503974 - RNA, 19 nt, Homo sapiens
  misc_RNA (1)...(19): siRNA sense strand
gaugauguccgggagguua

SEQ ID NO: 1503975 - RNA, 19 nt, Homo sapiens
  misc_RNA (1)...(19): siRNA sense strand
ucaagagauuugcugauga

SEQ ID NO: 1503976 - RNA, 19 nt, Homo sapiens
  misc_RNA (1)...(19): siRNA sense strand
ggaacucauuugugaauac

SEQ ID NO: 1503977 - RNA, 19 nt, Homo sapiens
  misc_RNA (1)...(19): siRNA sense strand
gcaugaaacguuguucuuu

SEQ ID NO: 1503978 - RNA, 19 nt, Homo sapiens
  misc_RNA (1)...(19): siRNA sense strand
gcaaguggaacucauuugu

SEQ ID NO: 1503979 - RNA, 19 nt, Homo sapiens
  misc_RNA (1)...(19): siRNA sense strand
gggcuuaugcugcacaauu

SEQ ID NO: 1503980 - RNA, 19 nt, Homo sapiens
  misc_RNA (1)...(19): siRNA sense strand
aaguggaacucauuuguga

SEQ ID NO: 1503981 - RNA, 19 nt, Homo sapiens
  misc_RNA (1)...(19): siRNA sense strand
guauggagaucuagauguc

SEQ ID NO: 1503982 - RNA, 19 nt, Homo sapiens
  misc_RNA (1)...(19): siRNA sense strand
gcaaacuucaggagcuuaa

SEQ ID NO: 1503983 - RNA, 19 nt, Homo sapiens
  misc_RNA (1)...(19): siRNA sense strand
agaucuagaugucuuauuc

SEQ ID NO: 1503984 - RNA, 19 nt, Homo sapiens
  misc_RNA (1)...(19): siRNA sense strand
ccacugaggaugauggauu

SEQ ID NO: 1503985 - RNA, 19 nt, Homo sapiens
  misc_RNA (1)...(19): siRNA sense strand
aaaucuggcugcaaacuuc

SEQ ID NO: 1503986 - RNA, 19 nt, Homo sapiens
  misc_RNA (1)...(19): siRNA sense strand
cuuaaagacuaucucaaga

SEQ ID NO: 1503987 - RNA, 19 nt, Homo sapiens
  misc_RNA (1)...(19): siRNA sense strand
gaauagaguccagcaagug

SEQ ID NO: 1503988 - RNA, 19 nt, Homo sapiens
  misc_RNA (1)...(19): siRNA sense strand
cgacacaguucuggcuuau

SEQ ID NO: 1503989 - RNA, 19 nt, Homo sapiens
  misc_RNA (1)...(19): siRNA sense strand
agaaagacacugccaccua

SEQ ID NO: 1503990 - RNA, 19 nt, Homo sapiens
  misc_RNA (1)...(19): siRNA sense strand
ggcuuaugcugcacaauug

SEQ ID NO: 1503991 - RNA, 19 nt, Homo sapiens
  misc_RNA (1)...(19): siRNA sense strand
gaacagggaaaggaugaug

SEQ ID NO: 1503992 - RNA, 19 nt, Homo sapiens
  misc_RNA (1)...(19): siRNA sense strand
gauuugaagacugaacuua

SEQ ID NO: 1503993 - RNA, 19 nt, Homo sapiens
  misc_RNA (1)...(19): siRNA sense strand
cagacaguguuuaagaaug

SEQ ID NO: 1503994 - RNA, 19 nt, Homo sapiens
  misc_RNA (1)...(19): siRNA sense strand
ggacauucagcaguucuuu

SEQ ID NO: 1503995 - RNA, 19 nt, Homo sapiens
  misc_RNA (1)...(19): siRNA sense strand
ugaauagaguccagcaagu

SEQ ID NO: 1503996 - RNA, 19 nt, Homo sapiens
  misc_RNA (1)...(19): siRNA sense strand
uaucaaaccugaaaaugga

SEQ ID NO: 1503997 - RNA, 19 nt, Homo sapiens
  misc_RNA (1)...(19): siRNA sense strand
caugaaacguuguucuuuu

SEQ ID NO: 1503998 - RNA, 19 nt, Homo sapiens
  misc_RNA (1)...(19): siRNA sense strand
ucaagauaguacccucaaa

SEQ ID NO: 1503999 - RNA, 19 nt, Homo sapiens
  misc_RNA (1)...(19): siRNA sense strand
ggagagcaucaagauagua

SEQ ID NO: 1504000 - RNA, 19 nt, Homo sapiens
  misc_RNA (1)...(19): siRNA sense strand
caagauaguacccucaaag

SEQ ID NO: 1504001 - RNA, 19 nt, Homo sapiens
  misc_RNA (1)...(19): siRNA sense strand
ggauuggugcggaacauug

SEQ ID NO: 1504002 - RNA, 19 nt, Homo sapiens
  misc_RNA (1)...(19): siRNA sense strand
acccuuagcagcaugaaua

SEQ ID NO: 1504003 - RNA, 19 nt, Homo sapiens
  misc_RNA (1)...(19): siRNA sense strand
gaaggcacgguuguuaaga

SEQ ID NO: 1504004 - RNA, 19 nt, Homo sapiens
  misc_RNA (1)...(19): siRNA sense strand
aaguagagcagaacaguga

SEQ ID NO: 1504005 - RNA, 19 nt, Homo sapiens
  misc_RNA (1)...(19): siRNA sense strand
gacugaacuuaaagacuau

SEQ ID NO: 1504006 - RNA, 19 nt, Homo sapiens
  misc_RNA (1)...(19): siRNA sense strand
gcucuaguucugaaucuga

SEQ ID NO: 1504007 - RNA, 19 nt, Homo sapiens
  misc_RNA (1)...(19): siRNA sense strand
cagaacagggaaaggauga

SEQ ID NO: 1504008 - RNA, 19 nt, Homo sapiens
  misc_RNA (1)...(19): siRNA sense strand
gaguggaugggaugcagua

SEQ ID NO: 1504009 - RNA, 19 nt, Homo sapiens
  misc_RNA (1)...(19): siRNA sense strand
cacugaggaugauggauug

SEQ ID NO: 1504010 - RNA, 19 nt, Homo sapiens
  misc_RNA (1)...(19): siRNA sense strand
ucuuauuccugacagauga

SEQ ID NO: 1504011 - RNA, 19 nt, Homo sapiens
  misc_RNA (1)...(19): siRNA sense strand
uaaccaaaauauccacuga

SEQ ID NO: 1504012 - RNA, 19 nt, Homo sapiens
  misc_RNA (1)...(19): siRNA sense strand
uccagacaguguuuaagaa

SEQ ID NO: 1504013 - RNA, 19 nt, Homo sapiens
  misc_RNA (1)...(19): siRNA sense strand
gaauaggugaucaggaagu

SEQ ID NO: 1504014 - RNA, 19 nt, Homo sapiens
  misc_RNA (1)...(19): siRNA sense strand
acgacacaguucuggcuua

SEQ ID NO: 1504015 - RNA, 19 nt, Homo sapiens
  misc_RNA (1)...(19): siRNA sense strand
cucaagagauuugcugaug

SEQ ID NO: 1504016 - RNA, 19 nt, Homo sapiens
  misc_RNA (1)...(19): siRNA sense strand
caaguggaacucauuugug

SEQ ID NO: 1504017 - RNA, 19 nt, Homo sapiens
  misc_RNA (1)...(19): siRNA sense strand
cagcaaguggaacucauuu

SEQ ID NO: 1504018 - RNA, 19 nt, Homo sapiens
  misc_RNA (1)...(19): siRNA sense strand
gauuggugcggaacauuga

SEQ ID NO: 1504019 - RNA, 19 nt, Homo sapiens
  misc_RNA (1)...(19): siRNA sense strand
gaucaggaaguuaucaaac

SEQ ID NO: 1504020 - RNA, 19 nt, Homo sapiens
  misc_RNA (1)...(19): siRNA sense strand
ccagacaguguuuaagaau

SEQ ID NO: 1504021 - RNA, 19 nt, Homo sapiens
  misc_RNA (1)...(19): siRNA sense strand
gagcagaacagugaaccau

SEQ ID NO: 1504022 - RNA, 19 nt, Homo sapiens
  misc_RNA (1)...(19): siRNA sense strand
uaaaguagagcagaacagu

SEQ ID NO: 1504023 - RNA, 19 nt, Homo sapiens
  misc_RNA (1)...(19): siRNA sense strand
acauucagcaguucuuuga

SEQ ID NO: 1504024 - RNA, 19 nt, Homo sapiens
  misc_RNA (1)...(19): siRNA sense strand
gaucuccagacaguguuua

SEQ ID NO: 1504025 - RNA, 19 nt, Homo sapiens
  misc_RNA (1)...(19): siRNA sense strand
uggaacucauuugugaaua

SEQ ID NO: 1504026 - RNA, 19 nt, Homo sapiens
  misc_RNA (1)...(19): siRNA sense strand
aauaggugaucaggaaguu

SEQ ID NO: 1504027 - RNA, 19 nt, Homo sapiens
  misc_RNA (1)...(19): siRNA sense strand
uaagagagaggacauucag

SEQ ID NO: 1504028 - RNA, 19 nt, Homo sapiens
  misc_RNA (1)...(19): siRNA sense strand
aagauaguacccucaaaga

SEQ ID NO: 1504029 - RNA, 19 nt, Homo sapiens
  misc_RNA (1)...(19): siRNA sense strand
gaagacugaacuuaaagac

SEQ ID NO: 1504030 - RNA, 19 nt, Homo sapiens
  misc_RNA (1)...(19): siRNA sense strand
ugaagacugaacuuaaaga

SEQ ID NO: 1504031 - RNA, 19 nt, Homo sapiens
  misc_RNA (1)...(19): siRNA sense strand
aaauggagagcaucaagau

SEQ ID NO: 1504032 - RNA, 19 nt, Homo sapiens
  misc_RNA (1)...(19): siRNA sense strand
guggaacucauuugugaau

SEQ ID NO: 1504033 - RNA, 19 nt, Homo sapiens
  misc_RNA (1)...(19): siRNA sense strand
ccagcaaguggaacucauu

SEQ ID NO: 1504034 - RNA, 19 nt, Homo sapiens
  misc_RNA (1)...(19): siRNA sense strand
cugccaagacuguaugaaa

SEQ ID NO: 1504035 - RNA, 19 nt, Homo sapiens
  misc_RNA (1)...(19): siRNA sense strand
uggcguagcaaguugugua

SEQ ID NO: 1504036 - RNA, 19 nt, Homo sapiens
  misc_RNA (1)...(19): siRNA sense strand
gagagcaucaagauaguac

SEQ ID NO: 1504037 - RNA, 19 nt, Homo sapiens
  misc_RNA (1)...(19): siRNA sense strand
gacaguguuuaagaaugaa

SEQ ID NO: 1504038 - RNA, 19 nt, Homo sapiens
  misc_RNA (1)...(19): siRNA sense strand
uccgggagguuaaaguaga

SEQ ID NO: 1504039 - RNA, 19 nt, Homo sapiens
  misc_RNA (1)...(19): siRNA sense strand
uaggugaucaggaaguuau

SEQ ID NO: 1504040 - RNA, 19 nt, Homo sapiens
  misc_RNA (1)...(19): siRNA sense strand
gaugaauacgacacaguuc

SEQ ID NO: 1504041 - RNA, 19 nt, Homo sapiens
  misc_RNA (1)...(19): siRNA sense strand
guaccugccaagacuguau

SEQ ID NO: 1504042 - RNA, 19 nt, Homo sapiens
  misc_RNA (1)...(19): siRNA sense strand
gauccagugcguagucugu

SEQ ID NO: 1504043 - RNA, 19 nt, Homo sapiens
  misc_RNA (1)...(19): siRNA sense strand
gagaucuagaugucuuauu

SEQ ID NO: 1504044 - RNA, 19 nt, Homo sapiens
  misc_RNA (1)...(19): siRNA sense strand
gacauucagcaguucuuug

SEQ ID NO: 1504045 - RNA, 19 nt, Homo sapiens
  misc_RNA (1)...(19): siRNA sense strand
caggagcgauccccuaaug

SEQ ID NO: 1504046 - RNA, 19 nt, Homo sapiens
  misc_RNA (1)...(19): siRNA sense strand
gaaagccucaacgcagaau

SEQ ID NO: 1504047 - RNA, 19 nt, Homo sapiens
  misc_RNA (1)...(19): siRNA sense strand
aggcacgguuguuaagaga

SEQ ID NO: 1504048 - RNA, 19 nt, Homo sapiens
  misc_RNA (1)...(19): siRNA sense strand
ugccaagacuguaugaaaa

SEQ ID NO: 1504049 - RNA, 19 nt, Homo sapiens
  misc_RNA (1)...(19): siRNA sense strand
uggagagcaucaagauagu

SEQ ID NO: 1504050 - RNA, 19 nt, Homo sapiens
  misc_RNA (1)...(19): siRNA sense strand
ggagaucuagaugucuuau

SEQ ID NO: 1504051 - RNA, 19 nt, Homo sapiens
  misc_RNA (1)...(19): siRNA sense strand
guggaugggaugcaguauu

SEQ ID NO: 1504052 - RNA, 19 nt, Homo sapiens
  misc_RNA (1)...(19): siRNA sense strand
gugcggaacauugauggaa

SEQ ID NO: 1504053 - RNA, 19 nt, Homo sapiens
  misc_RNA (1)...(19): siRNA sense strand
ugaaggcacgguuguuaag

SEQ ID NO: 1504054 - RNA, 19 nt, Homo sapiens
  misc_RNA (1)...(19): siRNA sense strand
agaugaauacgacacaguu

SEQ ID NO: 1504055 - RNA, 19 nt, Homo sapiens
  misc_RNA (1)...(19): siRNA sense strand
gaaagacacugccaccuau

SEQ ID NO: 1504056 - RNA, 19 nt, Homo sapiens
  misc_RNA (1)...(19): siRNA sense strand
caaauuacuuccugacaaa

SEQ ID NO: 1504057 - RNA, 19 nt, Homo sapiens
  misc_RNA (1)...(19): siRNA sense strand
gaacauugauggaauaggu

SEQ ID NO: 1504058 - RNA, 19 nt, Homo sapiens
  misc_RNA (1)...(19): siRNA sense strand
gcaaauuacuuccugacaa

SEQ ID NO: 1504059 - RNA, 19 nt, Homo sapiens
  misc_RNA (1)...(19): siRNA sense strand
caaagaggauguuccagaa

SEQ ID NO: 1504060 - RNA, 19 nt, Homo sapiens
  misc_RNA (1)...(19): siRNA sense strand
agacugaacuuaaagacua

SEQ ID NO: 1504061 - RNA, 19 nt, Homo sapiens
  misc_RNA (1)...(19): siRNA sense strand
uggaugggaugcaguauua

SEQ ID NO: 1504062 - RNA, 19 nt, Homo sapiens
  misc_RNA (1)...(19): siRNA sense strand
caagagaccuuauccugau

SEQ ID NO: 1504063 - RNA, 19 nt, Homo sapiens
  misc_RNA (1)...(19): siRNA sense strand
gagaggacauucagcaguu

SEQ ID NO: 1504064 - RNA, 19 nt, Homo sapiens
  misc_RNA (1)...(19): siRNA sense strand
caagagauuugcugaugaa

SEQ ID NO: 1504065 - RNA, 19 nt, Homo sapiens
  misc_RNA (1)...(19): siRNA sense strand
gaaguuaucaaaccugaaa

SEQ ID NO: 1504066 - RNA, 19 nt, Homo sapiens
  misc_RNA (1)...(19): siRNA sense strand
gaaaauguauggagaucua

SEQ ID NO: 1504067 - RNA, 19 nt, Homo sapiens
  misc_RNA (1)...(19): siRNA sense strand
gcagaacagugaaccaugu

SEQ ID NO: 1504068 - RNA, 19 nt, Homo sapiens
  misc_RNA (1)...(19): siRNA sense strand
acacaguucuggcuuauga

SEQ ID NO: 1504069 - RNA, 19 nt, Homo sapiens
  misc_RNA (1)...(19): siRNA sense strand
acgaggagcuggagaauga

SEQ ID NO: 1504070 - RNA, 19 nt, Homo sapiens
  misc_RNA (1)...(19): siRNA sense strand
gcggaacauugauggaaua

SEQ ID NO: 1504071 - RNA, 19 nt, Homo sapiens
  misc_RNA (1)...(19): siRNA sense strand
gcaggaauuuguuuagcuu

SEQ ID NO: 1504072 - RNA, 19 nt, Homo sapiens
  misc_RNA (1)...(19): siRNA sense strand
gaugaaggcacgguuguua

SEQ ID NO: 1504073 - RNA, 19 nt, Homo sapiens
  misc_RNA (1)...(19): siRNA sense strand
uggaauaggugaucaggaa

SEQ ID NO: 1504074 - RNA, 19 nt, Homo sapiens
  misc_RNA (1)...(19): siRNA sense strand
agacaguguuuaagaauga

SEQ ID NO: 1504075 - RNA, 19 nt, Homo sapiens
  misc_RNA (1)...(19): siRNA sense strand
acaaugauuugaagacuga

SEQ ID NO: 1504076 - RNA, 19 nt, Homo sapiens
  misc_RNA (1)...(19): siRNA sense strand
gaagaaccagcaggaauuu

SEQ ID NO: 1504077 - RNA, 19 nt, Homo sapiens
  misc_RNA (1)...(19): siRNA sense strand
gcacgguuguuaagagaga

SEQ ID NO: 1504078 - RNA, 19 nt, Homo sapiens
  misc_RNA (1)...(19): siRNA sense strand
gaacuuaaagacuaucuca

SEQ ID NO: 1504079 - RNA, 19 nt, Homo sapiens
  misc_RNA (1)...(19): siRNA sense strand
ucauggaagucacaaacua

SEQ ID NO: 1504080 - RNA, 19 nt, Homo sapiens
  misc_RNA (1)...(19): siRNA sense strand
gcaauaaguacaaugacaa

SEQ ID NO: 1504081 - RNA, 19 nt, Homo sapiens
  misc_RNA (1)...(19): siRNA sense strand
gaacucauuugugaauaca

SEQ ID NO: 1504082 - RNA, 19 nt, Homo sapiens
  misc_RNA (1)...(19): siRNA sense strand
gguaaauucuggcaauaag

SEQ ID NO: 1504083 - RNA, 19 nt, Homo sapiens
  misc_RNA (1)...(19): siRNA sense strand
gaugauguccgggagguua

SEQ ID NO: 1504084 - RNA, 19 nt, Homo sapiens
  misc_RNA (1)...(19): siRNA sense strand
ucaagagauuugcugauga

SEQ ID NO: 1504085 - RNA, 19 nt, Homo sapiens
  misc_RNA (1)...(19): siRNA sense strand
ggaacucauuugugaauac

SEQ ID NO: 1504086 - RNA, 19 nt, Homo sapiens
  misc_RNA (1)...(19): siRNA sense strand
aagacgagauuccagauga

SEQ ID NO: 1504087 - RNA, 19 nt, Homo sapiens
  misc_RNA (1)...(19): siRNA sense strand
guaaagagacaagcacuau

SEQ ID NO: 1504088 - RNA, 19 nt, Homo sapiens
  misc_RNA (1)...(19): siRNA sense strand
aaagguaaauucuggcaau

SEQ ID NO: 1504089 - RNA, 19 nt, Homo sapiens
  misc_RNA (1)...(19): siRNA sense strand
ucucagggcucaguaaaga

SEQ ID NO: 1504090 - RNA, 19 nt, Homo sapiens
  misc_RNA (1)...(19): siRNA sense strand
gcaugaaacguuguucuuu

SEQ ID NO: 1504091 - RNA, 19 nt, Homo sapiens
  misc_RNA (1)...(19): siRNA sense strand
gagaagaaccagcaggaau

SEQ ID NO: 1504092 - RNA, 19 nt, Homo sapiens
  misc_RNA (1)...(19): siRNA sense strand
aaagagacaagcacuauau

SEQ ID NO: 1504093 - RNA, 19 nt, Homo sapiens
  misc_RNA (1)...(19): siRNA sense strand
gcaaguggaacucauuugu

SEQ ID NO: 1504094 - RNA, 19 nt, Homo sapiens
  misc_RNA (1)...(19): siRNA sense strand
gggcuuaugcugcacaauu

SEQ ID NO: 1504095 - RNA, 19 nt, Homo sapiens
  misc_RNA (1)...(19): siRNA sense strand
aaguggaacucauuuguga

SEQ ID NO: 1504096 - RNA, 19 nt, Homo sapiens
  misc_RNA (1)...(19): siRNA sense strand
guauggagaucuagauguc

SEQ ID NO: 1504097 - RNA, 19 nt, Homo sapiens
  misc_RNA (1)...(19): siRNA sense strand
gcaaacuucaggagcuuaa

SEQ ID NO: 1504098 - RNA, 19 nt, Homo sapiens
  misc_RNA (1)...(19): siRNA sense strand
ggcaauaaguacaaugaca

SEQ ID NO: 1504099 - RNA, 19 nt, Homo sapiens
  misc_RNA (1)...(19): siRNA sense strand
agaucuagaugucuuauuc

SEQ ID NO: 1504100 - RNA, 19 nt, Homo sapiens
  misc_RNA (1)...(19): siRNA sense strand
uaaagagacaagcacuaua

SEQ ID NO: 1504101 - RNA, 19 nt, Homo sapiens
  misc_RNA (1)...(19): siRNA sense strand
ccacugaggaugauggauu

SEQ ID NO: 1504102 - RNA, 19 nt, Homo sapiens
  misc_RNA (1)...(19): siRNA sense strand
ugacaaagcaaagguaaau

SEQ ID NO: 1504103 - RNA, 19 nt, Homo sapiens
  misc_RNA (1)...(19): siRNA sense strand
cuuaaagacuaucucaaga

SEQ ID NO: 1504104 - RNA, 19 nt, Homo sapiens
  misc_RNA (1)...(19): siRNA sense strand
gaauagaguccagcaagug

SEQ ID NO: 1504105 - RNA, 19 nt, Homo sapiens
  misc_RNA (1)...(19): siRNA sense strand
cgacacaguucuggcuuau

SEQ ID NO: 1504106 - RNA, 19 nt, Homo sapiens
  misc_RNA (1)...(19): siRNA sense strand
agaaagacacugccaccua

SEQ ID NO: 1504107 - RNA, 19 nt, Homo sapiens
  misc_RNA (1)...(19): siRNA sense strand
aaaucuggcugcaaacuuc

SEQ ID NO: 1504108 - RNA, 19 nt, Homo sapiens
  misc_RNA (1)...(19): siRNA sense strand
ggcuuaugcugcacaauug

SEQ ID NO: 1504109 - RNA, 19 nt, Homo sapiens
  misc_RNA (1)...(19): siRNA sense strand
agaagaaccagcaggaauu

SEQ ID NO: 1504110 - RNA, 19 nt, Homo sapiens
  misc_RNA (1)...(19): siRNA sense strand
gaacagggaaaggaugaug

SEQ ID NO: 1504111 - RNA, 19 nt, Homo sapiens
  misc_RNA (1)...(19): siRNA sense strand
gauuugaagacugaacuua

SEQ ID NO: 1504112 - RNA, 19 nt, Homo sapiens
  misc_RNA (1)...(19): siRNA sense strand
gaaccagcaggaauuuguu

SEQ ID NO: 1504113 - RNA, 19 nt, Homo sapiens
  misc_RNA (1)...(19): siRNA sense strand
cagacaguguuuaagaaug

SEQ ID NO: 1504114 - RNA, 19 nt, Homo sapiens
  misc_RNA (1)...(19): siRNA sense strand
ggacauucagcaguucuuu

SEQ ID NO: 1504115 - RNA, 19 nt, Homo sapiens
  misc_RNA (1)...(19): siRNA sense strand
ugaauagaguccagcaagu

SEQ ID NO: 1504116 - RNA, 19 nt, Homo sapiens
  misc_RNA (1)...(19): siRNA sense strand
gaagacgagauuccagaug

SEQ ID NO: 1504117 - RNA, 19 nt, Homo sapiens
  misc_RNA (1)...(19): siRNA sense strand
uaucaaaccugaaaaugga

SEQ ID NO: 1504118 - RNA, 19 nt, Homo sapiens
  misc_RNA (1)...(19): siRNA sense strand
caugaaacguuguucuuuu

SEQ ID NO: 1504119 - RNA, 19 nt, Homo sapiens
  misc_RNA (1)...(19): siRNA sense strand
ucaagauaguacccucaaa

SEQ ID NO: 1504120 - RNA, 19 nt, Homo sapiens
  misc_RNA (1)...(19): siRNA sense strand
ggagagcaucaagauagua

SEQ ID NO: 1504121 - RNA, 19 nt, Homo sapiens
  misc_RNA (1)...(19): siRNA sense strand
caagauaguacccucaaag

SEQ ID NO: 1504122 - RNA, 19 nt, Homo sapiens
  misc_RNA (1)...(19): siRNA sense strand
acaaagcaaagguaaauuc

SEQ ID NO: 1504123 - RNA, 19 nt, Homo sapiens
  misc_RNA (1)...(19): siRNA sense strand
ggauuggugcggaacauug

SEQ ID NO: 1504124 - RNA, 19 nt, Homo sapiens
  misc_RNA (1)...(19): siRNA sense strand
aagguaaauucuggcaaua

SEQ ID NO: 1504125 - RNA, 19 nt, Homo sapiens
  misc_RNA (1)...(19): siRNA sense strand
acccuuagcagcaugaaua

SEQ ID NO: 1504126 - RNA, 19 nt, Homo sapiens
  misc_RNA (1)...(19): siRNA sense strand
gaaggcacgguuguuaaga

SEQ ID NO: 1504127 - RNA, 19 nt, Homo sapiens
  misc_RNA (1)...(19): siRNA sense strand
uuguuuagcuugcaguuau

SEQ ID NO: 1504128 - RNA, 19 nt, Homo sapiens
  misc_RNA (1)...(19): siRNA sense strand
aaguagagcagaacaguga

SEQ ID NO: 1504129 - RNA, 19 nt, Homo sapiens
  misc_RNA (1)...(19): siRNA sense strand
gacugaacuuaaagacuau

SEQ ID NO: 1504130 - RNA, 19 nt, Homo sapiens
  misc_RNA (1)...(19): siRNA sense strand
ggaauuuguuuagcuugca

SEQ ID NO: 1504131 - RNA, 19 nt, Homo sapiens
  misc_RNA (1)...(19): siRNA sense strand
ggagaagaaccagcaggaa

SEQ ID NO: 1504132 - RNA, 19 nt, Homo sapiens
  misc_RNA (1)...(19): siRNA sense strand
gcucuaguucugaaucuga

SEQ ID NO: 1504133 - RNA, 19 nt, Homo sapiens
  misc_RNA (1)...(19): siRNA sense strand
uaaccaaaauauccacuga

SEQ ID NO: 1504134 - RNA, 19 nt, Homo sapiens
  misc_RNA (1)...(19): siRNA sense strand
gaguggaugggaugcagua

SEQ ID NO: 1504135 - RNA, 19 nt, Homo sapiens
  misc_RNA (1)...(19): siRNA sense strand
ucuuauuccugacagauga

SEQ ID NO: 1504136 - RNA, 19 nt, Homo sapiens
  misc_RNA (1)...(19): siRNA sense strand
uccagacaguguuuaagaa

SEQ ID NO: 1504137 - RNA, 19 nt, Homo sapiens
  misc_RNA (1)...(19): siRNA sense strand
cagaacagggaaaggauga

SEQ ID NO: 1504138 - RNA, 19 nt, Homo sapiens
  misc_RNA (1)...(19): siRNA sense strand
gaauaggugaucaggaagu

SEQ ID NO: 1504139 - RNA, 19 nt, Homo sapiens
  misc_RNA (1)...(19): siRNA sense strand
cacugaggaugauggauug

SEQ ID NO: 1504140 - RNA, 19 nt, Homo sapiens
  misc_RNA (1)...(19): siRNA sense strand
caaagcaaagguaaauucu

SEQ ID NO: 1504141 - RNA, 19 nt, Homo sapiens
  misc_RNA (1)...(19): siRNA sense strand
cucaagagauuugcugaug

SEQ ID NO: 1504142 - RNA, 19 nt, Homo sapiens
  misc_RNA (1)...(19): siRNA sense strand
caaguggaacucauuugug

SEQ ID NO: 1504143 - RNA, 19 nt, Homo sapiens
  misc_RNA (1)...(19): siRNA sense strand
cagcaaguggaacucauuu

SEQ ID NO: 1504144 - RNA, 19 nt, Homo sapiens
  misc_RNA (1)...(19): siRNA sense strand
acgacacaguucuggcuua

SEQ ID NO: 1504145 - RNA, 19 nt, Homo sapiens
  misc_RNA (1)...(19): siRNA sense strand
gcauuugcaagagaccuua

SEQ ID NO: 1504146 - RNA, 19 nt, Homo sapiens
  misc_RNA (1)...(19): siRNA sense strand
gauuggugcggaacauuga

SEQ ID NO: 1504147 - RNA, 19 nt, Homo sapiens
  misc_RNA (1)...(19): siRNA sense strand
ccagacaguguuuaagaau

SEQ ID NO: 1504148 - RNA, 19 nt, Homo sapiens
  misc_RNA (1)...(19): siRNA sense strand
gagcagaacagugaaccau

SEQ ID NO: 1504149 - RNA, 19 nt, Homo sapiens
  misc_RNA (1)...(19): siRNA sense strand
uaaaguagagcagaacagu

SEQ ID NO: 1504150 - RNA, 19 nt, Homo sapiens
  misc_RNA (1)...(19): siRNA sense strand
gaucaggaaguuaucaaac

SEQ ID NO: 1504151 - RNA, 19 nt, Homo sapiens
  misc_RNA (1)...(19): siRNA sense strand
acauucagcaguucuuuga

SEQ ID NO: 1504152 - RNA, 19 nt, Homo sapiens
  misc_RNA (1)...(19): siRNA sense strand
caagcacuauaugccugua

SEQ ID NO: 1504153 - RNA, 19 nt, Homo sapiens
  misc_RNA (1)...(19): siRNA sense strand
uggaacucauuugugaaua

SEQ ID NO: 1504154 - RNA, 19 nt, Homo sapiens
  misc_RNA (1)...(19): siRNA sense strand
gaucuccagacaguguuua

SEQ ID NO: 1504155 - RNA, 19 nt, Homo sapiens
  misc_RNA (1)...(19): siRNA sense strand
gaacuauacugcugacuau

SEQ ID NO: 1504156 - RNA, 19 nt, Homo sapiens
  misc_RNA (1)...(19): siRNA sense strand
gcaaagacauuccuaacau

SEQ ID NO: 1504157 - RNA, 19 nt, Homo sapiens
  misc_RNA (1)...(19): siRNA sense strand
ggaagaaggcgcucauuga

SEQ ID NO: 1504158 - RNA, 19 nt, Homo sapiens
  misc_RNA (1)...(19): siRNA sense strand
gaacgcaguguaugauaua

SEQ ID NO: 1504159 - RNA, 19 nt, Homo sapiens
  misc_RNA (1)...(19): siRNA sense strand
cagaugaggugaagaaugu

SEQ ID NO: 1504160 - RNA, 19 nt, Homo sapiens
  misc_RNA (1)...(19): siRNA sense strand
gaucuacuuugacagaauu

SEQ ID NO: 1504161 - RNA, 19 nt, Homo sapiens
  misc_RNA (1)...(19): siRNA sense strand
agacaaagcuucucauugc

SEQ ID NO: 1504162 - RNA, 19 nt, Homo sapiens
  misc_RNA (1)...(19): siRNA sense strand
gauagaagagggacauauu

SEQ ID NO: 1504163 - RNA, 19 nt, Homo sapiens
  misc_RNA (1)...(19): siRNA sense strand
gugcuacacugcuaugaaa

SEQ ID NO: 1504164 - RNA, 19 nt, Homo sapiens
  misc_RNA (1)...(19): siRNA sense strand
gaaaauagccgaagccaau

SEQ ID NO: 1504165 - RNA, 19 nt, Homo sapiens
  misc_RNA (1)...(19): siRNA sense strand
caaagacauuccuaacaug

SEQ ID NO: 1504166 - RNA, 19 nt, Homo sapiens
  misc_RNA (1)...(19): siRNA sense strand
acauugagcuguuugauca

SEQ ID NO: 1504167 - RNA, 19 nt, Homo sapiens
  misc_RNA (1)...(19): siRNA sense strand
ggcagaaggugauggagaa

SEQ ID NO: 1504168 - RNA, 19 nt, Homo sapiens
  misc_RNA (1)...(19): siRNA sense strand
gaaggagacugagaagaag

SEQ ID NO: 1504169 - RNA, 19 nt, Homo sapiens
  misc_RNA (1)...(19): siRNA sense strand
caacagcaagauuuacuuu

SEQ ID NO: 1504170 - RNA, 19 nt, Homo sapiens
  misc_RNA (1)...(19): siRNA sense strand
ugacaaggcccucaucuuc

SEQ ID NO: 1504171 - RNA, 19 nt, Homo sapiens
  misc_RNA (1)...(19): siRNA sense strand
gguaacaaagcccaacaua

SEQ ID NO: 1504172 - RNA, 19 nt, Homo sapiens
  misc_RNA (1)...(19): siRNA sense strand
agaaggagacugagaagaa

SEQ ID NO: 1504173 - RNA, 19 nt, Homo sapiens
  misc_RNA (1)...(19): siRNA sense strand
cgaacgcaguguaugauau

SEQ ID NO: 1504174 - RNA, 19 nt, Homo sapiens
  misc_RNA (1)...(19): siRNA sense strand
gugaugaucuacuuugaca

SEQ ID NO: 1504175 - RNA, 19 nt, Homo sapiens
  misc_RNA (1)...(19): siRNA sense strand
gaauaucugcagcugauga

SEQ ID NO: 1504176 - RNA, 19 nt, Homo sapiens
  misc_RNA (1)...(19): siRNA sense strand
gaugaucuacuuugacaga

SEQ ID NO: 1504177 - RNA, 19 nt, Homo sapiens
  misc_RNA (1)...(19): siRNA sense strand
acaaggcccucaucuucaa

SEQ ID NO: 1504178 - RNA, 19 nt, Homo sapiens
  misc_RNA (1)...(19): siRNA sense strand
ggugaagaauguaccuugu

SEQ ID NO: 1504179 - RNA, 19 nt, Homo sapiens
  misc_RNA (1)...(19): siRNA sense strand
uaacaaagcccaacauacc

SEQ ID NO: 1504180 - RNA, 19 nt, Homo sapiens
  misc_RNA (1)...(19): siRNA sense strand
ggucuacauugagcuguuu

SEQ ID NO: 1504181 - RNA, 19 nt, Homo sapiens
  misc_RNA (1)...(19): siRNA sense strand
caacaagauccaccacgaa

SEQ ID NO: 1504182 - RNA, 19 nt, Homo sapiens
  misc_RNA (1)...(19): siRNA sense strand
gaagcuaaccccugaauau

SEQ ID NO: 1504183 - RNA, 19 nt, Homo sapiens
  misc_RNA (1)...(19): siRNA sense strand
caacauaccagaggcaauc

SEQ ID NO: 1504184 - RNA, 19 nt, Homo sapiens
  misc_RNA (1)...(19): siRNA sense strand
gauggaaagugagaagaca

SEQ ID NO: 1504185 - RNA, 19 nt, Homo sapiens
  misc_RNA (1)...(19): siRNA sense strand
agacagaugaggugaagaa

SEQ ID NO: 1504186 - RNA, 19 nt, Homo sapiens
  misc_RNA (1)...(19): siRNA sense strand
agaccacacuccagacaga

SEQ ID NO: 1504187 - RNA, 19 nt, Homo sapiens
  misc_RNA (1)...(19): siRNA sense strand
cugaauaucugcagcugau

SEQ ID NO: 1504188 - RNA, 19 nt, Homo sapiens
  misc_RNA (1)...(19): siRNA sense strand
agaaggugauggagaagga

SEQ ID NO: 1504189 - RNA, 19 nt, Homo sapiens
  misc_RNA (1)...(19): siRNA sense strand
gacaaggcccucaucuuca

SEQ ID NO: 1504190 - RNA, 19 nt, Homo sapiens
  misc_RNA (1)...(19): siRNA sense strand
acagcaagauuuacuuugg

SEQ ID NO: 1504191 - RNA, 19 nt, Homo sapiens
  misc_RNA (1)...(19): siRNA sense strand
gcagagacagagcggaaga

SEQ ID NO: 1504192 - RNA, 19 nt, Homo sapiens
  misc_RNA (1)...(19): siRNA sense strand
agacugagaagaagauuuc

SEQ ID NO: 1504193 - RNA, 19 nt, Homo sapiens
  misc_RNA (1)...(19): siRNA sense strand
ccagacagaugaggugaag

SEQ ID NO: 1504194 - RNA, 19 nt, Homo sapiens
  misc_RNA (1)...(19): siRNA sense strand
gugguggugugaugaucua

SEQ ID NO: 1504195 - RNA, 19 nt, Homo sapiens
  misc_RNA (1)...(19): siRNA sense strand
acaaggccauugcuuccaa

SEQ ID NO: 1504196 - RNA, 19 nt, Homo sapiens
  misc_RNA (1)...(19): siRNA sense strand
cagaggcaauccgcagaaa

SEQ ID NO: 1504197 - RNA, 19 nt, Homo sapiens
  misc_RNA (1)...(19): siRNA sense strand
gacuagugguggugugaug

SEQ ID NO: 1504198 - RNA, 19 nt, Homo sapiens
  misc_RNA (1)...(19): siRNA sense strand
ggcaaagacauuccuaaca

SEQ ID NO: 1504199 - RNA, 19 nt, Homo sapiens
  misc_RNA (1)...(19): siRNA sense strand
ucucagcugugcacaagau

SEQ ID NO: 1504200 - RNA, 19 nt, Homo sapiens
  misc_RNA (1)...(19): siRNA sense strand
caagauccaccacgaacug

SEQ ID NO: 1504201 - RNA, 19 nt, Homo sapiens
  misc_RNA (1)...(19): siRNA sense strand
caucacaucauauaagucu

SEQ ID NO: 1504202 - RNA, 19 nt, Homo sapiens
  misc_RNA (1)...(19): siRNA sense strand
guaacaaagcccaacauac

SEQ ID NO: 1504203 - RNA, 19 nt, Homo sapiens
  misc_RNA (1)...(19): siRNA sense strand
ugagcuguuugaucagauu

SEQ ID NO: 1504204 - RNA, 19 nt, Homo sapiens
  misc_RNA (1)...(19): siRNA sense strand
agaacuauacugcugacua

SEQ ID NO: 1504205 - RNA, 19 nt, Homo sapiens
  misc_RNA (1)...(19): siRNA sense strand
gugugaugaucuacuuuga

SEQ ID NO: 1504206 - RNA, 19 nt, Homo sapiens
  misc_RNA (1)...(19): siRNA sense strand
guggugugaugaucuacuu

SEQ ID NO: 1504207 - RNA, 19 nt, Homo sapiens
  misc_RNA (1)...(19): siRNA sense strand
acgaguugauggaaaguga

SEQ ID NO: 1504208 - RNA, 19 nt, Homo sapiens
  misc_RNA (1)...(19): siRNA sense strand
ucccuuucaucacaucaua

SEQ ID NO: 1504209 - RNA, 19 nt, Homo sapiens
  misc_RNA (1)...(19): siRNA sense strand
gagacugagaagaagauuu

SEQ ID NO: 1504210 - RNA, 19 nt, Homo sapiens
  misc_RNA (1)...(19): siRNA sense strand
aaacagaaggugguggaaa

SEQ ID NO: 1504211 - RNA, 19 nt, Homo sapiens
  misc_RNA (1)...(19): siRNA sense strand
ggcuguggcuuccaguuuc

SEQ ID NO: 1504212 - RNA, 19 nt, Homo sapiens
  misc_RNA (1)...(19): siRNA sense strand
caugcucccuuucaucaca

SEQ ID NO: 1504213 - RNA, 19 nt, Homo sapiens
  misc_RNA (1)...(19): siRNA sense strand
cgcaguguaugauauagug

SEQ ID NO: 1504214 - RNA, 19 nt, Homo sapiens
  misc_RNA (1)...(19): siRNA sense strand
gcagaccacacuccagaca

SEQ ID NO: 1504215 - RNA, 19 nt, Homo sapiens
  misc_RNA (1)...(19): siRNA sense strand
gcagugugagcaagcaguu

SEQ ID NO: 1504216 - RNA, 19 nt, Homo sapiens
  misc_RNA (1)...(19): siRNA sense strand
ggagaaggagacugagaag

SEQ ID NO: 1504217 - RNA, 19 nt, Homo sapiens
  misc_RNA (1)...(19): siRNA sense strand
ugauggagaaggagacuga

SEQ ID NO: 1504218 - RNA, 19 nt, Homo sapiens
  misc_RNA (1)...(19): siRNA sense strand
cggaagaaggcgcucauug

SEQ ID NO: 1504219 - RNA, 19 nt, Homo sapiens
  misc_RNA (1)...(19): siRNA sense strand
ggugugaugaucuacuuug

SEQ ID NO: 1504220 - RNA, 19 nt, Homo sapiens
  misc_RNA (1)...(19): siRNA sense strand
ccacacuccagacagauga

SEQ ID NO: 1504221 - RNA, 19 nt, Homo sapiens
  misc_RNA (1)...(19): siRNA sense strand
gaggcaauccgcagaaacu

SEQ ID NO: 1504222 - RNA, 19 nt, Homo sapiens
  misc_RNA (1)...(19): siRNA sense strand
cuuccaacagcaagauuua

SEQ ID NO: 1504223 - RNA, 19 nt, Homo sapiens
  misc_RNA (1)...(19): siRNA sense strand
aaauagccgaagccaauaa

SEQ ID NO: 1504224 - RNA, 19 nt, Homo sapiens
  misc_RNA (1)...(19): siRNA sense strand
cuacacugcuaugaaaaua

SEQ ID NO: 1504225 - RNA, 19 nt, Homo sapiens
  misc_RNA (1)...(19): siRNA sense strand
gaaacagaaggugguggaa

SEQ ID NO: 1504226 - RNA, 19 nt, Homo sapiens
  misc_RNA (1)...(19): siRNA sense strand
ccuuucaucacaucauaua

SEQ ID NO: 1504227 - RNA, 19 nt, Homo sapiens
  misc_RNA (1)...(19): siRNA sense strand
ccuuggagacggccacuaa

SEQ ID NO: 1504228 - RNA, 19 nt, Homo sapiens
  misc_RNA (1)...(19): siRNA sense strand
gagaaggagacugagaaga

SEQ ID NO: 1504229 - RNA, 19 nt, Homo sapiens
  misc_RNA (1)...(19): siRNA sense strand
ugaucuacuuugacagaau

SEQ ID NO: 1504230 - RNA, 19 nt, Homo sapiens
  misc_RNA (1)...(19): siRNA sense strand
gcuuuggcuuagaagauga

SEQ ID NO: 1504231 - RNA, 19 nt, Homo sapiens
  misc_RNA (1)...(19): siRNA sense strand
caagauagaagagggacau

SEQ ID NO: 1504232 - RNA, 19 nt, Homo sapiens
  misc_RNA (1)...(19): siRNA sense strand
aagacaaagcuucucauug

SEQ ID NO: 1504233 - RNA, 19 nt, Homo sapiens
  misc_RNA (1)...(19): siRNA sense strand
gaaagugagaagacaaagc

SEQ ID NO: 1504234 - RNA, 19 nt, Homo sapiens
  misc_RNA (1)...(19): siRNA sense strand
ggcccugguuuccaucuca

SEQ ID NO: 1504235 - RNA, 19 nt, Homo sapiens
  misc_RNA (1)...(19): siRNA sense strand
ucacaucauauaagucugu

SEQ ID NO: 1504236 - RNA, 19 nt, Homo sapiens
  misc_RNA (1)...(19): siRNA sense strand
aucugcagcugaugaagua

SEQ ID NO: 1504237 - RNA, 19 nt, Homo sapiens
  misc_RNA (1)...(19): siRNA sense strand
ggagaaggcaaaggcagau

SEQ ID NO: 1504238 - RNA, 19 nt, Homo sapiens
  misc_RNA (1)...(19): siRNA sense strand
cagcugugcacaagauaga

SEQ ID NO: 1504239 - RNA, 19 nt, Homo sapiens
  misc_RNA (1)...(19): siRNA sense strand
gcuucaagaggucuacauu

SEQ ID NO: 1504240 - RNA, 19 nt, Homo sapiens
  misc_RNA (1)...(19): siRNA sense strand
acuauacugcugacuauga

SEQ ID NO: 1504241 - RNA, 19 nt, Homo sapiens
  misc_RNA (1)...(19): siRNA sense strand
ccgaacgcaguguaugaua

SEQ ID NO: 1504242 - RNA, 19 nt, Homo sapiens
  misc_RNA (1)...(19): siRNA sense strand
caucucaugcucccuuuca

SEQ ID NO: 1504243 - RNA, 19 nt, Homo sapiens
  misc_RNA (1)...(19): siRNA sense strand
aggcagaugcugagugcua

SEQ ID NO: 1504244 - RNA, 19 nt, Homo sapiens
  misc_RNA (1)...(19): siRNA sense strand
uggaaagugagaagacaaa

SEQ ID NO: 1504245 - RNA, 19 nt, Homo sapiens
  misc_RNA (1)...(19): siRNA sense strand
auagaagagggacauauug

SEQ ID NO: 1504246 - RNA, 19 nt, Homo sapiens
  misc_RNA (1)...(19): siRNA sense strand
gcuuccaacagcaagauuu

SEQ ID NO: 1504247 - RNA, 19 nt, Homo sapiens
  misc_RNA (1)...(19): siRNA sense strand
ccagaggcaauccgcagaa

SEQ ID NO: 1504248 - RNA, 19 nt, Homo sapiens
  misc_RNA (1)...(19): siRNA sense strand
ccaacagcaagauuuacuu

SEQ ID NO: 1504249 - RNA, 19 nt, Homo sapiens
  misc_RNA (1)...(19): siRNA sense strand
uggagaaggagacugagaa

SEQ ID NO: 1504250 - RNA, 19 nt, Homo sapiens
  misc_RNA (1)...(19): siRNA sense strand
aacagaaggugguggaaaa

SEQ ID NO: 1504251 - RNA, 19 nt, Homo sapiens
  misc_RNA (1)...(19): siRNA sense strand
agacggccacuaaggagaa

SEQ ID NO: 1504252 - RNA, 19 nt, Homo sapiens
  misc_RNA (1)...(19): siRNA sense strand
uagaagagggacauauugg

SEQ ID NO: 1504253 - RNA, 19 nt, Homo sapiens
  misc_RNA (1)...(19): siRNA sense strand
ugagaagaagauuucagaa

SEQ ID NO: 1504254 - RNA, 19 nt, Homo sapiens
  misc_RNA (1)...(19): siRNA sense strand
ggaaaaggaagcagagaca

SEQ ID NO: 1504255 - RNA, 19 nt, Homo sapiens
  misc_RNA (1)...(19): siRNA sense strand
gaaacuacauccucaugcu

SEQ ID NO: 1504256 - RNA, 19 nt, Homo sapiens
  misc_RNA (1)...(19): siRNA sense strand
ggagagagcagcaaguaca

SEQ ID NO: 1504257 - RNA, 19 nt, Homo sapiens
  misc_RNA (1)...(19): siRNA sense strand
gcgauaugaugcagaagau

SEQ ID NO: 1504258 - RNA, 19 nt, Homo sapiens
  misc_RNA (1)...(19): siRNA sense strand
gagagagcagcaaguacaa

SEQ ID NO: 1504259 - RNA, 19 nt, Homo sapiens
  misc_RNA (1)...(19): siRNA sense strand
gcaaguacaaaaucaagaa

SEQ ID NO: 1504260 - RNA, 19 nt, Homo sapiens
  misc_RNA (1)...(19): siRNA sense strand
cagaaacuacauccucaug

SEQ ID NO: 1504261 - RNA, 19 nt, Homo sapiens
  misc_RNA (1)...(19): siRNA sense strand
cgggagagagcagcaagua

SEQ ID NO: 1504262 - RNA, 19 nt, Homo sapiens
  misc_RNA (1)...(19): siRNA sense strand
gaggcugguuggcgagauc

SEQ ID NO: 1504263 - RNA, 19 nt, Homo sapiens
  misc_RNA (1)...(19): siRNA sense strand
caguugaggcugaagauca

SEQ ID NO: 1504264 - RNA, 19 nt, Homo sapiens
  misc_RNA (1)...(19): siRNA sense strand
ggcgauaugaugcagaaga

SEQ ID NO: 1504265 - RNA, 19 nt, Homo sapiens
  misc_RNA (1)...(19): siRNA sense strand
ugcgcaagcucuccaagau

SEQ ID NO: 1504266 - RNA, 19 nt, Homo sapiens
  misc_RNA (1)...(19): siRNA sense strand
gagagcagcaaguacaaaa

SEQ ID NO: 1504267 - RNA, 19 nt, Homo sapiens
  misc_RNA (1)...(19): siRNA sense strand
agcaggaccuacagcaguu

SEQ ID NO: 1504268 - RNA, 19 nt, Homo sapiens
  misc_RNA (1)...(19): siRNA sense strand
ccacgcagggcgauaugau

SEQ ID NO: 1504269 - RNA, 19 nt, Homo sapiens
  misc_RNA (1)...(19): siRNA sense strand
gaugcacgaccugaaccua

SEQ ID NO: 1504270 - RNA, 19 nt, Homo sapiens
  misc_RNA (1)...(19): siRNA sense strand
gcgcaagcucuccaagauc

SEQ ID NO: 1504271 - RNA, 19 nt, Homo sapiens
  misc_RNA (1)...(19): siRNA sense strand
ucacugagauucaugagua

SEQ ID NO: 1504272 - RNA, 19 nt, Homo sapiens
  misc_RNA (1)...(19): siRNA sense strand
cgaacaagguggugacugu

SEQ ID NO: 1504273 - RNA, 19 nt, Homo sapiens
  misc_RNA (1)...(19): siRNA sense strand
gagugaagcugcagaucug

SEQ ID NO: 1504274 - RNA, 19 nt, Homo sapiens
  misc_RNA (1)...(19): siRNA sense strand
gaauguggaguuagccuuu

SEQ ID NO: 1504275 - RNA, 19 nt, Homo sapiens
  misc_RNA (1)...(19): siRNA sense strand
uggcaugaauguggaguua

SEQ ID NO: 1504276 - RNA, 19 nt, Homo sapiens
  misc_RNA (1)...(19): siRNA sense strand
uguaugacaucaccaacaa

SEQ ID NO: 1504277 - RNA, 19 nt, Homo sapiens
  misc_RNA (1)...(19): siRNA sense strand
gaccacguccugcauaaga

SEQ ID NO: 1504278 - RNA, 19 nt, Homo sapiens
  misc_RNA (1)...(19): siRNA sense strand
agacgucucugcugguuca

SEQ ID NO: 1504279 - RNA, 19 nt, Homo sapiens
  misc_RNA (1)...(19): siRNA sense strand
caaaucuucuuucgacaac

SEQ ID NO: 1504280 - RNA, 19 nt, Homo sapiens
  misc_RNA (1)...(19): siRNA sense strand
gcaacaaggcggauaugag

SEQ ID NO: 1504281 - RNA, 19 nt, Homo sapiens
  misc_RNA (1)...(19): siRNA sense strand
gauccgagacuauguagag

SEQ ID NO: 1504282 - RNA, 19 nt, Homo sapiens
  misc_RNA (1)...(19): siRNA sense strand
gagcuggcccugacuucaa

SEQ ID NO: 1504283 - RNA, 19 nt, Homo sapiens
  misc_RNA (1)...(19): siRNA sense strand
ugacaucaccaacaaaucu

SEQ ID NO: 1504284 - RNA, 19 nt, Homo sapiens
  misc_RNA (1)...(19): siRNA sense strand
gcaugaauguggaguuagc

SEQ ID NO: 1504285 - RNA, 19 nt, Homo sapiens
  misc_RNA (1)...(19): siRNA sense strand
gauaugagcagcgaaagag

SEQ ID NO: 1504286 - RNA, 19 nt, Homo sapiens
  misc_RNA (1)...(19): siRNA sense strand
ggauaugagcagcgaaaga

SEQ ID NO: 1504287 - RNA, 19 nt, Homo sapiens
  misc_RNA (1)...(19): siRNA sense strand
aaagacgucucugcugguu

SEQ ID NO: 1504288 - RNA, 19 nt, Homo sapiens
  misc_RNA (1)...(19): siRNA sense strand
ccagauccgagacuaugua

SEQ ID NO: 1504289 - RNA, 19 nt, Homo sapiens
  misc_RNA (1)...(19): siRNA sense strand
cacccaugcuuauuacaga

SEQ ID NO: 1504290 - RNA, 19 nt, Homo sapiens
  misc_RNA (1)...(19): siRNA sense strand
gcgucacccaugcuuauua

SEQ ID NO: 1504291 - RNA, 19 nt, Homo sapiens
  misc_RNA (1)...(19): siRNA sense strand
gacuguggauggcgugaga

SEQ ID NO: 1504292 - RNA, 19 nt, Homo sapiens
  misc_RNA (1)...(19): siRNA sense strand
guggauggcgugagaguga

SEQ ID NO: 1504293 - RNA, 19 nt, Homo sapiens
  misc_RNA (1)...(19): siRNA sense strand
uauguagagucccagaaga

SEQ ID NO: 1504294 - RNA, 19 nt, Homo sapiens
  misc_RNA (1)...(19): siRNA sense strand
gcaucggauucacgaacaa

SEQ ID NO: 1504295 - RNA, 19 nt, Homo sapiens
  misc_RNA (1)...(19): siRNA sense strand
cgucucugcugguucaguu

SEQ ID NO: 1504296 - RNA, 19 nt, Homo sapiens
  misc_RNA (1)...(19): siRNA sense strand
gcggauaugagcagcgaaa

SEQ ID NO: 1504297 - RNA, 19 nt, Homo sapiens
  misc_RNA (1)...(19): siRNA sense strand
ucaccaacaaaucuucuuu

SEQ ID NO: 1504298 - RNA, 19 nt, Homo sapiens
  misc_RNA (1)...(19): siRNA sense strand
ccaagacuggcaugaaugu

SEQ ID NO: 1504299 - RNA, 19 nt, Homo sapiens
  misc_RNA (1)...(19): siRNA sense strand
ggcaucggauucacgaaca

SEQ ID NO: 1504300 - RNA, 19 nt, Homo sapiens
  misc_RNA (1)...(19): siRNA sense strand
gagcagcgaaagagugauc

SEQ ID NO: 1504301 - RNA, 19 nt, Homo sapiens
  misc_RNA (1)...(19): siRNA sense strand
ucgccaaggaacugaaaua

SEQ ID NO: 1504302 - RNA, 19 nt, Homo sapiens
  misc_RNA (1)...(19): siRNA sense strand
uaugacaucaccaacaaau

SEQ ID NO: 1504303 - RNA, 19 nt, Homo sapiens
  misc_RNA (1)...(19): siRNA sense strand
ugacaguggugugggaaag

SEQ ID NO: 1504304 - RNA, 19 nt, Homo sapiens
  misc_RNA (1)...(19): siRNA sense strand
acaaaucuucuuucgacaa

SEQ ID NO: 1504305 - RNA, 19 nt, Homo sapiens
  misc_RNA (1)...(19): siRNA sense strand
acgaccacguccugcauaa

SEQ ID NO: 1504306 - RNA, 19 nt, Homo sapiens
  misc_RNA (1)...(19): siRNA sense strand
cgucacccaugcuuauuac

SEQ ID NO: 1504307 - RNA, 19 nt, Homo sapiens
  misc_RNA (1)...(19): siRNA sense strand
aggccuugcuucugcugua

SEQ ID NO: 1504308 - RNA, 19 nt, Homo sapiens
  misc_RNA (1)...(19): siRNA sense strand
cugcugcuccuucauguga

SEQ ID NO: 1504309 - RNA, 19 nt, Homo sapiens
  misc_RNA (1)...(19): siRNA sense strand
agagggacguggugaucau

SEQ ID NO: 1504310 - RNA, 19 nt, Homo sapiens
  misc_RNA (1)...(19): siRNA sense strand
ccuugcuucugcuguauga

SEQ ID NO: 1504311 - RNA, 19 nt, Homo sapiens
  misc_RNA (1)...(19): siRNA sense strand
ggagcuggcccugacuuca

SEQ ID NO: 1504312 - RNA, 19 nt, Homo sapiens
  misc_RNA (1)...(19): siRNA sense strand
gacaucaccaacaaaucuu

SEQ ID NO: 1504313 - RNA, 19 nt, Homo sapiens
  misc_RNA (1)...(19): siRNA sense strand
caacgaccacguccugcau

SEQ ID NO: 1504314 - RNA, 19 nt, Homo sapiens
  misc_RNA (1)...(19): siRNA sense strand
aaucuucuuucgacaacau

SEQ ID NO: 1504315 - RNA, 19 nt, Homo sapiens
  misc_RNA (1)...(19): siRNA sense strand
ccaacaaaucuucuuucga

SEQ ID NO: 1504316 - RNA, 19 nt, Homo sapiens
  misc_RNA (1)...(19): siRNA sense strand
gcuuccagauccgagacua

SEQ ID NO: 1504317 - RNA, 19 nt, Homo sapiens
  misc_RNA (1)...(19): siRNA sense strand
ggcaacaaggcggauauga

SEQ ID NO: 1504318 - RNA, 19 nt, Homo sapiens
  misc_RNA (1)...(19): siRNA sense strand
ggccuugcuucugcuguau

SEQ ID NO: 1504319 - RNA, 19 nt, Homo sapiens
  misc_RNA (1)...(19): siRNA sense strand
gcaaagugcugaaagcuua

SEQ ID NO: 1504320 - RNA, 19 nt, Homo sapiens
  misc_RNA (1)...(19): siRNA sense strand
ggacauggcuuuaaaugaa

SEQ ID NO: 1504321 - RNA, 19 nt, Homo sapiens
  misc_RNA (1)...(19): siRNA sense strand
ggagaauguugaagaauua

SEQ ID NO: 1504322 - RNA, 19 nt, Homo sapiens
  misc_RNA (1)...(19): siRNA sense strand
ggagagaugcugaaauuua

SEQ ID NO: 1504323 - RNA, 19 nt, Homo sapiens
  misc_RNA (1)...(19): siRNA sense strand
gaagaggguuaaagaacua

SEQ ID NO: 1504324 - RNA, 19 nt, Homo sapiens
  misc_RNA (1)...(19): siRNA sense strand
gaacuacagaugaagauua

SEQ ID NO: 1504325 - RNA, 19 nt, Homo sapiens
  misc_RNA (1)...(19): siRNA sense strand
gaagaaagacagaaacuga

SEQ ID NO: 1504326 - RNA, 19 nt, Homo sapiens
  misc_RNA (1)...(19): siRNA sense strand
guaguaaccuguauuuaga

SEQ ID NO: 1504327 - RNA, 19 nt, Homo sapiens
  misc_RNA (1)...(19): siRNA sense strand
gauagaaucacaaccuuua

SEQ ID NO: 1504328 - RNA, 19 nt, Homo sapiens
  misc_RNA (1)...(19): siRNA sense strand
cagcauaucuuccuugaga

SEQ ID NO: 1504329 - RNA, 19 nt, Homo sapiens
  misc_RNA (1)...(19): siRNA sense strand
guacaugacugaaaugcaa

SEQ ID NO: 1504330 - RNA, 19 nt, Homo sapiens
  misc_RNA (1)...(19): siRNA sense strand
ucaauaagcuaaaggagaa

SEQ ID NO: 1504331 - RNA, 19 nt, Homo sapiens
  misc_RNA (1)...(19): siRNA sense strand
gaaauugucucaacuuggu

SEQ ID NO: 1504332 - RNA, 19 nt, Homo sapiens
  misc_RNA (1)...(19): siRNA sense strand
gaucaaggcuaauuaugug

SEQ ID NO: 1504333 - RNA, 19 nt, Homo sapiens
  misc_RNA (1)...(19): siRNA sense strand
uaaaugaagucuugcagaa

SEQ ID NO: 1504334 - RNA, 19 nt, Homo sapiens
  misc_RNA (1)...(19): siRNA sense strand
aaacugaaaucuagacuug

SEQ ID NO: 1504335 - RNA, 19 nt, Homo sapiens
  misc_RNA (1)...(19): siRNA sense strand
guggagagaugcugaaauu

SEQ ID NO: 1504336 - RNA, 19 nt, Homo sapiens
  misc_RNA (1)...(19): siRNA sense strand
gacagaaacugaaaucuag

SEQ ID NO: 1504337 - RNA, 19 nt, Homo sapiens
  misc_RNA (1)...(19): siRNA sense strand
uuaagaagaucaaggcuaa

SEQ ID NO: 1504338 - RNA, 19 nt, Homo sapiens
  misc_RNA (1)...(19): siRNA sense strand
gaagguuagugauauaaug

SEQ ID NO: 1504339 - RNA, 19 nt, Homo sapiens
  misc_RNA (1)...(19): siRNA sense strand
caagaaagaagaagaggua

SEQ ID NO: 1504340 - RNA, 19 nt, Homo sapiens
  misc_RNA (1)...(19): siRNA sense strand
ccuccaagcuucuuaugua

SEQ ID NO: 1504341 - RNA, 19 nt, Homo sapiens
  misc_RNA (1)...(19): siRNA sense strand
gcugaauccugcagauaua

SEQ ID NO: 1504342 - RNA, 19 nt, Homo sapiens
  misc_RNA (1)...(19): siRNA sense strand
gaguaugaauccacacuuu

SEQ ID NO: 1504343 - RNA, 19 nt, Homo sapiens
  misc_RNA (1)...(19): siRNA sense strand
gaaugacaaggaaauguua

SEQ ID NO: 1504344 - RNA, 19 nt, Homo sapiens
  misc_RNA (1)...(19): siRNA sense strand
auaaagagcuacugaaaca

SEQ ID NO: 1504345 - RNA, 19 nt, Homo sapiens
  misc_RNA (1)...(19): siRNA sense strand
caagaacuccaguguagua

SEQ ID NO: 1504346 - RNA, 19 nt, Homo sapiens
  misc_RNA (1)...(19): siRNA sense strand
gaaaauuacucaacgaaug

SEQ ID NO: 1504347 - RNA, 19 nt, Homo sapiens
  misc_RNA (1)...(19): siRNA sense strand
ggccacagcuucugcuuug

SEQ ID NO: 1504348 - RNA, 19 nt, Homo sapiens
  misc_RNA (1)...(19): siRNA sense strand
guagaaagcaugucagaau

SEQ ID NO: 1504349 - RNA, 19 nt, Homo sapiens
  misc_RNA (1)...(19): siRNA sense strand
ugagaagguuagugauaua

SEQ ID NO: 1504350 - RNA, 19 nt, Homo sapiens
  misc_RNA (1)...(19): siRNA sense strand
gagagaugcugaaauuuac

SEQ ID NO: 1504351 - RNA, 19 nt, Homo sapiens
  misc_RNA (1)...(19): siRNA sense strand
gaagaucaaggcuaauuau

SEQ ID NO: 1504352 - RNA, 19 nt, Homo sapiens
  misc_RNA (1)...(19): siRNA sense strand
gaaagguacaugacugaaa

SEQ ID NO: 1504353 - RNA, 19 nt, Homo sapiens
  misc_RNA (1)...(19): siRNA sense strand
gcaaauacagaccaacuug

SEQ ID NO: 1504354 - RNA, 19 nt, Homo sapiens
  misc_RNA (1)...(19): siRNA sense strand
gcaagacucauuuaaggaa

SEQ ID NO: 1504355 - RNA, 19 nt, Homo sapiens
  misc_RNA (1)...(19): siRNA sense strand
guaagucaguauuuagaga

SEQ ID NO: 1504356 - RNA, 19 nt, Homo sapiens
  misc_RNA (1)...(19): siRNA sense strand
aaaggagaauguugaagaa

SEQ ID NO: 1504357 - RNA, 19 nt, Homo sapiens
  misc_RNA (1)...(19): siRNA sense strand
gccaggacaucaucaauuc

SEQ ID NO: 1504358 - RNA, 19 nt, Homo sapiens
  misc_RNA (1)...(19): siRNA sense strand
uaaaggagaauguugaaga

SEQ ID NO: 1504359 - RNA, 19 nt, Homo sapiens
  misc_RNA (1)...(19): siRNA sense strand
aaagagcuacugaaacaua

SEQ ID NO: 1504360 - RNA, 19 nt, Homo sapiens
  misc_RNA (1)...(19): siRNA sense strand
guuaaaggaucaauuagag

SEQ ID NO: 1504361 - RNA, 19 nt, Homo sapiens
  misc_RNA (1)...(19): siRNA sense strand
aaagguacaugacugaaau

SEQ ID NO: 1504362 - RNA, 19 nt, Homo sapiens
  misc_RNA (1)...(19): siRNA sense strand
ggaaugacaaggaaauguu

SEQ ID NO: 1504363 - RNA, 19 nt, Homo sapiens
  misc_RNA (1)...(19): siRNA sense strand
ugacagagaagccagaauu

SEQ ID NO: 1504364 - RNA, 19 nt, Homo sapiens
  misc_RNA (1)...(19): siRNA sense strand
gacaaaaccuuaagcaaga

SEQ ID NO: 1504365 - RNA, 19 nt, Homo sapiens
  misc_RNA (1)...(19): siRNA sense strand
cagcaaguguucauugaug

SEQ ID NO: 1504366 - RNA, 19 nt, Homo sapiens
  misc_RNA (1)...(19): siRNA sense strand
caaggaaucugcccucaac

SEQ ID NO: 1504367 - RNA, 19 nt, Homo sapiens
  misc_RNA (1)...(19): siRNA sense strand
cuucagauccuguacauuu

SEQ ID NO: 1504368 - RNA, 19 nt, Homo sapiens
  misc_RNA (1)...(19): siRNA sense strand
gagaguuaauugcuaagga

SEQ ID NO: 1504369 - RNA, 19 nt, Homo sapiens
  misc_RNA (1)...(19): siRNA sense strand
gugagaagguuagugauau

SEQ ID NO: 1504370 - RNA, 19 nt, Homo sapiens
  misc_RNA (1)...(19): siRNA sense strand
guggauacuucucaugaaa

SEQ ID NO: 1504371 - RNA, 19 nt, Homo sapiens
  misc_RNA (1)...(19): siRNA sense strand
uagaagcauuugaugauga

SEQ ID NO: 1504372 - RNA, 19 nt, Homo sapiens
  misc_RNA (1)...(19): siRNA sense strand
agaaauugcucacucaagu

SEQ ID NO: 1504373 - RNA, 19 nt, Homo sapiens
  misc_RNA (1)...(19): siRNA sense strand
aagaggacauggcuuuaaa

SEQ ID NO: 1504374 - RNA, 19 nt, Homo sapiens
  misc_RNA (1)...(19): siRNA sense strand
cagaaauugucucaacuug

SEQ ID NO: 1504375 - RNA, 19 nt, Homo sapiens
  misc_RNA (1)...(19): siRNA sense strand
ggagauuccugagauguca

SEQ ID NO: 1504376 - RNA, 19 nt, Homo sapiens
  misc_RNA (1)...(19): siRNA sense strand
agacagaaacugaaaucua

SEQ ID NO: 1504377 - RNA, 19 nt, Homo sapiens
  misc_RNA (1)...(19): siRNA sense strand
ucaauuagaggaagucuug

SEQ ID NO: 1504378 - RNA, 19 nt, Homo sapiens
  misc_RNA (1)...(19): siRNA sense strand
agacugcaguuccuucaaa

SEQ ID NO: 1504379 - RNA, 19 nt, Homo sapiens
  misc_RNA (1)...(19): siRNA sense strand
caaagagagugagaagguu

SEQ ID NO: 1504380 - RNA, 19 nt, Homo sapiens
  misc_RNA (1)...(19): siRNA sense strand
gaaauugcucacucaaguu

SEQ ID NO: 1504381 - RNA, 19 nt, Homo sapiens
  misc_RNA (1)...(19): siRNA sense strand
guagaagcauuugaugaug

SEQ ID NO: 1504382 - RNA, 19 nt, Homo sapiens
  misc_RNA (1)...(19): siRNA sense strand
gcaaaucaacgaaguaaaa

SEQ ID NO: 1504383 - RNA, 19 nt, Homo sapiens
  misc_RNA (1)...(19): siRNA sense strand
agaugaagauuaccaaaca

SEQ ID NO: 1504384 - RNA, 19 nt, Homo sapiens
  misc_RNA (1)...(19): siRNA sense strand
ggagugaagagcaaaauua

SEQ ID NO: 1504385 - RNA, 19 nt, Homo sapiens
  misc_RNA (1)...(19): siRNA sense strand
gcacuaauucagccaguug

SEQ ID NO: 1504386 - RNA, 19 nt, Homo sapiens
  misc_RNA (1)...(19): siRNA sense strand
agucagauauuaccaagga

SEQ ID NO: 1504387 - RNA, 19 nt, Homo sapiens
  misc_RNA (1)...(19): siRNA sense strand
aggagaauguugaagaauu

SEQ ID NO: 1504388 - RNA, 19 nt, Homo sapiens
  misc_RNA (1)...(19): siRNA sense strand
gguagaagcauuugaugau

SEQ ID NO: 1504389 - RNA, 19 nt, Homo sapiens
  misc_RNA (1)...(19): siRNA sense strand
caagaggacauggcuuuaa

SEQ ID NO: 1504390 - RNA, 19 nt, Homo sapiens
  misc_RNA (1)...(19): siRNA sense strand
gucuugaagucagauauua

SEQ ID NO: 1504391 - RNA, 19 nt, Homo sapiens
  misc_RNA (1)...(19): siRNA sense strand
aaauugcucacucaaguua

SEQ ID NO: 1504392 - RNA, 19 nt, Homo sapiens
  misc_RNA (1)...(19): siRNA sense strand
gaaagaagaagagguagag

SEQ ID NO: 1504393 - RNA, 19 nt, Homo sapiens
  misc_RNA (1)...(19): siRNA sense strand
gaagauuaccaaacagcaa

SEQ ID NO: 1504394 - RNA, 19 nt, Homo sapiens
  misc_RNA (1)...(19): siRNA sense strand
aaugaagucuugcagaaau

SEQ ID NO: 1504395 - RNA, 19 nt, Homo sapiens
  misc_RNA (1)...(19): siRNA sense strand
cggcaccacuugugacuug

SEQ ID NO: 1504396 - RNA, 19 nt, Homo sapiens
  misc_RNA (1)...(19): siRNA sense strand
uaagguauuccaaggagua

SEQ ID NO: 1504397 - RNA, 19 nt, Homo sapiens
  misc_RNA (1)...(19): siRNA sense strand
aaagagagugagaagguua

SEQ ID NO: 1504398 - RNA, 19 nt, Homo sapiens
  misc_RNA (1)...(19): siRNA sense strand
guuaaagaacuacagauga

SEQ ID NO: 1504399 - RNA, 19 nt, Homo sapiens
  misc_RNA (1)...(19): siRNA sense strand
ggcuuuaaaugaagucuug

SEQ ID NO: 1504400 - RNA, 19 nt, Homo sapiens
  misc_RNA (1)...(19): siRNA sense strand
aagcaagacucauuuaagg

SEQ ID NO: 1504401 - RNA, 19 nt, Homo sapiens
  misc_RNA (1)...(19): siRNA sense strand
cagagaagccagaauuuca

SEQ ID NO: 1504402 - RNA, 19 nt, Homo sapiens
  misc_RNA (1)...(19): siRNA sense strand
ugacuugccucagaacgaa

SEQ ID NO: 1504403 - RNA, 19 nt, Homo sapiens
  misc_RNA (1)...(19): siRNA sense strand
gagaagguuagugauauaa

SEQ ID NO: 1504404 - RNA, 19 nt, Homo sapiens
  misc_RNA (1)...(19): siRNA sense strand
gagaagaggguuaaagaac

SEQ ID NO: 1504405 - RNA, 19 nt, Homo sapiens
  misc_RNA (1)...(19): siRNA sense strand
uccaagaacuccaguguag

SEQ ID NO: 1504406 - RNA, 19 nt, Homo sapiens
  misc_RNA (1)...(19): siRNA sense strand
gacagagaagccagaauuu

SEQ ID NO: 1504407 - RNA, 19 nt, Homo sapiens
  misc_RNA (1)...(19): siRNA sense strand
agaguuaauugcuaaggaa

SEQ ID NO: 1504408 - RNA, 19 nt, Homo sapiens
  misc_RNA (1)...(19): siRNA sense strand
gcaaaauuaugucccuaaa

SEQ ID NO: 1504409 - RNA, 19 nt, Homo sapiens
  misc_RNA (1)...(19): siRNA sense strand
gaaagacagaaacugaaau

SEQ ID NO: 1504410 - RNA, 19 nt, Homo sapiens
  misc_RNA (1)...(19): siRNA sense strand
gagacuacaacaacucaaa

SEQ ID NO: 1504411 - RNA, 19 nt, Homo sapiens
  misc_RNA (1)...(19): siRNA sense strand
uaaccuguauuuagagaag

SEQ ID NO: 1504412 - RNA, 19 nt, Homo sapiens
  misc_RNA (1)...(19): siRNA sense strand
uagaaagcaugucagaauc

SEQ ID NO: 1504413 - RNA, 19 nt, Homo sapiens
  misc_RNA (1)...(19): siRNA sense strand
caaucuuucucaaggugua

SEQ ID NO: 1504414 - RNA, 19 nt, Homo sapiens
  misc_RNA (1)...(19): siRNA sense strand
cacaaccuuuagagaguua

SEQ ID NO: 1504415 - RNA, 19 nt, Homo sapiens
  misc_RNA (1)...(19): siRNA sense strand
aagagcuacugaaacauaa

SEQ ID NO: 1504416 - RNA, 19 nt, Homo sapiens
  misc_RNA (1)...(19): siRNA sense strand
uagaggaagucuugaaguc

SEQ ID NO: 1504417 - RNA, 19 nt, Homo sapiens
  misc_RNA (1)...(19): siRNA sense strand
gcagcaaaucaacgaagua

SEQ ID NO: 1504418 - RNA, 19 nt, Homo sapiens
  misc_RNA (1)...(19): siRNA sense strand
gaaaucuagacuugagaaa

SEQ ID NO: 1504419 - RNA, 19 nt, Homo sapiens
  misc_RNA (1)...(19): siRNA sense strand
gaacagccugcuccaccua

SEQ ID NO: 1504420 - RNA, 19 nt, Homo sapiens
  misc_RNA (1)...(19): siRNA sense strand
ccaacaaccucuccaccau

SEQ ID NO: 1504421 - RNA, 19 nt, Homo sapiens
  misc_RNA (1)...(19): siRNA sense strand
ccaacaacuucuccucugu

SEQ ID NO: 1504422 - RNA, 19 nt, Homo sapiens
  misc_RNA (1)...(19): siRNA sense strand
gcucugcaccugcuacuca

SEQ ID NO: 1504423 - RNA, 19 nt, Homo sapiens
  misc_RNA (1)...(19): siRNA sense strand
ccuacaggaugacuuguuc

SEQ ID NO: 1504424 - RNA, 19 nt, Homo sapiens
  misc_RNA (1)...(19): siRNA sense strand
ucacagagcacguguuucg

SEQ ID NO: 1504425 - RNA, 19 nt, Homo sapiens
  misc_RNA (1)...(19): siRNA sense strand
gagaucugccugccgaaga

SEQ ID NO: 1504426 - RNA, 19 nt, Homo sapiens
  misc_RNA (1)...(19): siRNA sense strand
ccaccuacaggaugacuug

SEQ ID NO: 1504427 - RNA, 19 nt, Homo sapiens
  misc_RNA (1)...(19): siRNA sense strand
ucaccauccucuaccuguu

SEQ ID NO: 1504428 - RNA, 19 nt, Homo sapiens
  misc_RNA (1)...(19): siRNA sense strand
caaccugagccaccucuuc

SEQ ID NO: 1504429 - RNA, 19 nt, Homo sapiens
  misc_RNA (1)...(19): siRNA sense strand
cuacugaggacgacuacug

SEQ ID NO: 1504430 - RNA, 19 nt, Homo sapiens
  misc_RNA (1)...(19): siRNA sense strand
caaccucuccaccaucuac

SEQ ID NO: 1504431 - RNA, 19 nt, Homo sapiens
  misc_RNA (1)...(19): siRNA sense strand
gacucuuccugcagaacaa

SEQ ID NO: 1504432 - RNA, 19 nt, Homo sapiens
  misc_RNA (1)...(19): siRNA sense strand
gagcuggaccucggugaca

SEQ ID NO: 1504433 - RNA, 19 nt, Homo sapiens
  misc_RNA (1)...(19): siRNA sense strand
gcacuuuccgccacuugca

SEQ ID NO: 1504434 - RNA, 19 nt, Homo sapiens
  misc_RNA (1)...(19): siRNA sense strand
aacaaccucuccaccaucu

SEQ ID NO: 1504435 - RNA, 19 nt, Homo sapiens
  misc_RNA (1)...(19): siRNA sense strand
gcccauggcuccacguaaa

SEQ ID NO: 1504436 - RNA, 19 nt, Homo sapiens
  misc_RNA (1)...(19): siRNA sense strand
gccuuuagcuggucuagug

SEQ ID NO: 1504437 - RNA, 19 nt, Homo sapiens
  misc_RNA (1)...(19): siRNA sense strand
gaaaucucccgucgaccua

SEQ ID NO: 1504438 - RNA, 19 nt, Homo sapiens
  misc_RNA (1)...(19): siRNA sense strand
gcgcaccagucgacgugaa

SEQ ID NO: 1504439 - RNA, 19 nt, Homo sapiens
  misc_RNA (1)...(19): siRNA sense strand
gguggaaguggcagucuug

SEQ ID NO: 1504440 - RNA, 19 nt, Homo sapiens
  misc_RNA (1)...(19): siRNA sense strand
gugcccaguuugccuccaa

SEQ ID NO: 1504441 - RNA, 19 nt, Homo sapiens
  misc_RNA (1)...(19): siRNA sense strand
acaaagaacugcuggagaa

SEQ ID NO: 1504442 - RNA, 19 nt, Homo sapiens
  misc_RNA (1)...(19): siRNA sense strand
gccagaaccuuauccagaa

SEQ ID NO: 1504443 - RNA, 19 nt, Homo sapiens
  misc_RNA (1)...(19): siRNA sense strand
cuacaaaggacucuucuaa

SEQ ID NO: 1504444 - RNA, 19 nt, Homo sapiens
  misc_RNA (1)...(19): siRNA sense strand
ggauauguguugcuaauac

SEQ ID NO: 1504445 - RNA, 19 nt, Homo sapiens
  misc_RNA (1)...(19): siRNA sense strand
caaacucagccucgaauuu

SEQ ID NO: 1504446 - RNA, 19 nt, Homo sapiens
  misc_RNA (1)...(19): siRNA sense strand
acaaaggacucuucuaaaa

SEQ ID NO: 1504447 - RNA, 19 nt, Homo sapiens
  misc_RNA (1)...(19): siRNA sense strand
caucuuuacuggcauccua

SEQ ID NO: 1504448 - RNA, 19 nt, Homo sapiens
  misc_RNA (1)...(19): siRNA sense strand
ggaaaguguguguguggua

SEQ ID NO: 1504449 - RNA, 19 nt, Homo sapiens
  misc_RNA (1)...(19): siRNA sense strand
aaacucagccucgaauuug

SEQ ID NO: 1504450 - RNA, 19 nt, Homo sapiens
  misc_RNA (1)...(19): siRNA sense strand
gaugguagccacaagaaca

SEQ ID NO: 1504451 - RNA, 19 nt, Homo sapiens
  misc_RNA (1)...(19): siRNA sense strand
cggcaucucuacacgaaga

SEQ ID NO: 1504452 - RNA, 19 nt, Homo sapiens
  misc_RNA (1)...(19): siRNA sense strand
guagugcgcugcguaccuu

SEQ ID NO: 1504453 - RNA, 19 nt, Homo sapiens
  misc_RNA (1)...(19): siRNA sense strand
cgacccacuucacaaagaa

SEQ ID NO: 1504454 - RNA, 19 nt, Homo sapiens
  misc_RNA (1)...(19): siRNA sense strand
ggcuaaggcucaagcuuca

SEQ ID NO: 1504455 - RNA, 19 nt, Homo sapiens
  misc_RNA (1)...(19): siRNA sense strand
acacgaagaaggugacuga

SEQ ID NO: 1504456 - RNA, 19 nt, Homo sapiens
  misc_RNA (1)...(19): siRNA sense strand
agaaggugcuccagagauc

SEQ ID NO: 1504457 - RNA, 19 nt, Homo sapiens
  misc_RNA (1)...(19): siRNA sense strand
aaggauauguguugcuaau

SEQ ID NO: 1504458 - RNA, 19 nt, Homo sapiens
  misc_RNA (1)...(19): siRNA sense strand
gaacugcuggagaaacuag

SEQ ID NO: 1504459 - RNA, 19 nt, Homo sapiens
  misc_RNA (1)...(19): siRNA sense strand
gcuaauacccaucuuuacu

SEQ ID NO: 1504460 - RNA, 19 nt, Homo sapiens
  misc_RNA (1)...(19): siRNA sense strand
ugacauuucauucuacgaa

SEQ ID NO: 1504461 - RNA, 19 nt, Homo sapiens
  misc_RNA (1)...(19): siRNA sense strand
gacuaccgccagaaccuua

SEQ ID NO: 1504462 - RNA, 19 nt, Homo sapiens
  misc_RNA (1)...(19): siRNA sense strand
uugcuaauacccaucuuua

SEQ ID NO: 1504463 - RNA, 19 nt, Homo sapiens
  misc_RNA (1)...(19): siRNA sense strand
ggacucuucuaaaaggaua

SEQ ID NO: 1504464 - RNA, 19 nt, Homo sapiens
  misc_RNA (1)...(19): siRNA sense strand
gagaaggugcuccagagau

SEQ ID NO: 1504465 - RNA, 19 nt, Homo sapiens
  misc_RNA (1)...(19): siRNA sense strand
uaccgaaagucuaaguuca

SEQ ID NO: 1504466 - RNA, 19 nt, Homo sapiens
  misc_RNA (1)...(19): siRNA sense strand
gccgggaguuggaaagugu

SEQ ID NO: 1504467 - RNA, 19 nt, Homo sapiens
  misc_RNA (1)...(19): siRNA sense strand
uacaaaggacucuucuaaa

SEQ ID NO: 1504468 - RNA, 19 nt, Homo sapiens
  misc_RNA (1)...(19): siRNA sense strand
acacguacgcgcagacuga

SEQ ID NO: 1504469 - RNA, 19 nt, Homo sapiens
  misc_RNA (1)...(19): siRNA sense strand
ccuaaagggucacgcuaag

SEQ ID NO: 1504470 - RNA, 19 nt, Homo sapiens
  misc_RNA (1)...(19): siRNA sense strand
guucuucagucuacaaagg

SEQ ID NO: 1504471 - RNA, 19 nt, Homo sapiens
  misc_RNA (1)...(19): siRNA sense strand
caaagaacugcuggagaaa

SEQ ID NO: 1504472 - RNA, 19 nt, Homo sapiens
  misc_RNA (1)...(19): siRNA sense strand
ccgacccacuucacaaaga

SEQ ID NO: 1504473 - RNA, 19 nt, Homo sapiens
  misc_RNA (1)...(19): siRNA sense strand
ggaguuggaaagugugugu

SEQ ID NO: 1504474 - RNA, 19 nt, Homo sapiens
  misc_RNA (1)...(19): siRNA sense strand
aaagguagguuuuauuugg

SEQ ID NO: 1504475 - RNA, 19 nt, Homo sapiens
  misc_RNA (1)...(19): siRNA sense strand
uuacuggcauccuaaaggu

SEQ ID NO: 1504476 - RNA, 19 nt, Homo sapiens
  misc_RNA (1)...(19): siRNA sense strand
gccaagaagagcaggaaga

SEQ ID NO: 1504477 - RNA, 19 nt, Homo sapiens
  misc_RNA (1)...(19): siRNA sense strand
gagccugucauucgcuuug

SEQ ID NO: 1504478 - RNA, 19 nt, Homo sapiens
  misc_RNA (1)...(19): siRNA sense strand
gcacagccgggaguuggaa

SEQ ID NO: 1504479 - RNA, 19 nt, Homo sapiens
  misc_RNA (1)...(19): siRNA sense strand
aaaaggauauguguugcua

SEQ ID NO: 1504480 - RNA, 19 nt, Homo sapiens
  misc_RNA (1)...(19): siRNA sense strand
caucagcgcaggagaaggu

SEQ ID NO: 1504481 - RNA, 19 nt, Homo sapiens
  misc_RNA (1)...(19): siRNA sense strand
uagccagcaugacauuuca

SEQ ID NO: 1504482 - RNA, 19 nt, Homo sapiens
  misc_RNA (1)...(19): siRNA sense strand
ggaacucaccggcuacaac

SEQ ID NO: 1504483 - RNA, 19 nt, Homo sapiens
  misc_RNA (1)...(19): siRNA sense strand
aagaacugcuggagaaacu

SEQ ID NO: 1504484 - RNA, 19 nt, Homo sapiens
  misc_RNA (1)...(19): siRNA sense strand
gagaucuucuguucuucag

SEQ ID NO: 1504485 - RNA, 19 nt, Homo sapiens
  misc_RNA (1)...(19): siRNA sense strand
gcucucauccgcacugucu

SEQ ID NO: 1504486 - RNA, 19 nt, Homo sapiens
  misc_RNA (1)...(19): siRNA sense strand
cuaauacccaucuuuacug

SEQ ID NO: 1504487 - RNA, 19 nt, Homo sapiens
  misc_RNA (1)...(19): siRNA sense strand
ccagaaccuuauccagaag

SEQ ID NO: 1504488 - RNA, 19 nt, Homo sapiens
  misc_RNA (1)...(19): siRNA sense strand
cauccgcacugucucuuac

SEQ ID NO: 1504489 - RNA, 19 nt, Homo sapiens
  misc_RNA (1)...(19): siRNA sense strand
ucggcgauguuaaguacaa

SEQ ID NO: 1504490 - RNA, 19 nt, Homo sapiens
  misc_RNA (1)...(19): siRNA sense strand
gguuucaguucuucagucu

SEQ ID NO: 1504491 - RNA, 19 nt, Homo sapiens
  misc_RNA (1)...(19): siRNA sense strand
cuucuuggacugagacuga

SEQ ID NO: 1504492 - RNA, 19 nt, Homo sapiens
  misc_RNA (1)...(19): siRNA sense strand
cacugucucuuacaacauc

SEQ ID NO: 1504493 - RNA, 19 nt, Homo sapiens
  misc_RNA (1)...(19): siRNA sense strand
gcacugucucuuacaacau

SEQ ID NO: 1504494 - RNA, 19 nt, Homo sapiens
  misc_RNA (1)...(19): siRNA sense strand
gcugaugguagccacaaga

SEQ ID NO: 1504495 - RNA, 19 nt, Homo sapiens
  misc_RNA (1)...(19): siRNA sense strand
uuucaguucuucagucuac

SEQ ID NO: 1504496 - RNA, 19 nt, Homo sapiens
  misc_RNA (1)...(19): siRNA sense strand
gguugaccgcgcaguguuu

SEQ ID NO: 1504497 - RNA, 19 nt, Homo sapiens
  misc_RNA (1)...(19): siRNA sense strand
gaucccgccagcucccuuu

SEQ ID NO: 1504498 - RNA, 19 nt, Homo sapiens
  misc_RNA (1)...(19): siRNA sense strand
gauauguguugcuaauacc

SEQ ID NO: 1504499 - RNA, 19 nt, Homo sapiens
  misc_RNA (1)...(19): siRNA sense strand
cuucuguucuucagguuuc

SEQ ID NO: 1504500 - RNA, 19 nt, Homo sapiens
  misc_RNA (1)...(19): siRNA sense strand
aagcugagccugucauucg

SEQ ID NO: 1504501 - RNA, 19 nt, Homo sapiens
  misc_RNA (1)...(19): siRNA sense strand
gucauucgcuuuggcugau

SEQ ID NO: 1504502 - RNA, 19 nt, Homo sapiens
  misc_RNA (1)...(19): siRNA sense strand
ccaagaagagcaggaagag

SEQ ID NO: 1504503 - RNA, 19 nt, Homo sapiens
  misc_RNA (1)...(19): siRNA sense strand
cuaccgaaagucuaaguuc

SEQ ID NO: 1504504 - RNA, 19 nt, Homo sapiens
  misc_RNA (1)...(19): siRNA sense strand
ccaaacucagccucgaauu

SEQ ID NO: 1504505 - RNA, 19 nt, Homo sapiens
  misc_RNA (1)...(19): siRNA sense strand
cgcacugucucuuacaaca

SEQ ID NO: 1504506 - RNA, 19 nt, Homo sapiens
  misc_RNA (1)...(19): siRNA sense strand
cuucuuagccagcaugaca

SEQ ID NO: 1504507 - RNA, 19 nt, Homo sapiens
  misc_RNA (1)...(19): siRNA sense strand
aaaggacucuucuaaaagg

SEQ ID NO: 1504508 - RNA, 19 nt, Homo sapiens
  misc_RNA (1)...(19): siRNA sense strand
ggagagagcuggccaagau

SEQ ID NO: 1504509 - RNA, 19 nt, Homo sapiens
  misc_RNA (1)...(19): siRNA sense strand
cuacgucccuacugucuuu

SEQ ID NO: 1504510 - RNA, 19 nt, Homo sapiens
  misc_RNA (1)...(19): siRNA sense strand
gaacuauauugcggacauu

SEQ ID NO: 1504511 - RNA, 19 nt, Homo sapiens
  misc_RNA (1)...(19): siRNA sense strand
gcaggaagacuaugaucga

SEQ ID NO: 1504512 - RNA, 19 nt, Homo sapiens
  misc_RNA (1)...(19): siRNA sense strand
ggacacagcagggcaggaa

SEQ ID NO: 1504513 - RNA, 19 nt, Homo sapiens
  misc_RNA (1)...(19): siRNA sense strand
agaaggaccugaggcaaga

SEQ ID NO: 1504514 - RNA, 19 nt, Homo sapiens
  misc_RNA (1)...(19): siRNA sense strand
gauggugccugugggaaga

SEQ ID NO: 1504515 - RNA, 19 nt, Homo sapiens
  misc_RNA (1)...(19): siRNA sense strand
cagcagggcaggaagacua

SEQ ID NO: 1504516 - RNA, 19 nt, Homo sapiens
  misc_RNA (1)...(19): siRNA sense strand
cuacugucuuugagaacua

SEQ ID NO: 1504517 - RNA, 19 nt, Homo sapiens
  misc_RNA (1)...(19): siRNA sense strand
gaagaccugccuccucauc

SEQ ID NO: 1504518 - RNA, 19 nt, Homo sapiens
  misc_RNA (1)...(19): siRNA sense strand
gaaccggaucagugccuuu

SEQ ID NO: 1504519 - RNA, 19 nt, Homo sapiens
  misc_RNA (1)...(19): siRNA sense strand
agaacuauauugcggacau

SEQ ID NO: 1504520 - RNA, 19 nt, Homo sapiens
  misc_RNA (1)...(19): siRNA sense strand
gcucagccaagaccaagga

SEQ ID NO: 1504521 - RNA, 19 nt, Homo sapiens
  misc_RNA (1)...(19): siRNA sense strand
gagagcuggccaagaugaa

SEQ ID NO: 1504522 - RNA, 19 nt, Homo sapiens
  misc_RNA (1)...(19): siRNA sense strand
ucccuacugucuuugagaa

SEQ ID NO: 1504523 - RNA, 19 nt, Homo sapiens
  misc_RNA (1)...(19): siRNA sense strand
ucuccuacccggacacuga

SEQ ID NO: 1504524 - RNA, 19 nt, Homo sapiens
  misc_RNA (1)...(19): siRNA sense strand
cuucagcaaggaucaguuu

SEQ ID NO: 1504525 - RNA, 19 nt, Homo sapiens
  misc_RNA (1)...(19): siRNA sense strand
gccuuuggcuaccuugagu

SEQ ID NO: 1504526 - RNA, 19 nt, Homo sapiens
  misc_RNA (1)...(19): siRNA sense strand
gaucgacugcggccucucu

SEQ ID NO: 1504527 - RNA, 19 nt, Homo sapiens
  misc_RNA (1)...(19): siRNA sense strand
agagagcuggccaagauga

SEQ ID NO: 1504528 - RNA, 19 nt, Homo sapiens
  misc_RNA (1)...(19): siRNA sense strand
cagggcaggaagacuauga

SEQ ID NO: 1504529 - RNA, 19 nt, Homo sapiens
  misc_RNA (1)...(19): siRNA sense strand
gaagagaaagcuaauaaga

SEQ ID NO: 1504530 - RNA, 19 nt, Homo sapiens
  misc_RNA (1)...(19): siRNA sense strand
agagaaagcuaauaagaag

SEQ ID NO: 1504531 - RNA, 19 nt, Homo sapiens
  misc_RNA (1)...(19): siRNA sense strand
gcugcuggaucaaguauca

SEQ ID NO: 1504532 - RNA, 19 nt, Homo sapiens
  misc_RNA (1)...(19): siRNA sense strand
cugaagagaaagcuaauaa

SEQ ID NO: 1504533 - RNA, 19 nt, Homo sapiens
  misc_RNA (1)...(19): siRNA sense strand
gagagaagaggaagagucu

SEQ ID NO: 1504534 - RNA, 19 nt, Homo sapiens
  misc_RNA (1)...(19): siRNA sense strand
gucuuggucuuuggaaaua

SEQ ID NO: 1504535 - RNA, 19 nt, Homo sapiens
  misc_RNA (1)...(19): siRNA sense strand
uaagaaggcagagagaaga

SEQ ID NO: 1504536 - RNA, 19 nt, Homo sapiens
  misc_RNA (1)...(19): siRNA sense strand
gcagagagaagaggaagag

SEQ ID NO: 1504537 - RNA, 19 nt, Homo sapiens
  misc_RNA (1)...(19): siRNA sense strand
gagucuuggucuuuggaaa

SEQ ID NO: 1504538 - RNA, 19 nt, Homo sapiens
  misc_RNA (1)...(19): siRNA sense strand
ggucuuuggaaauaucuuu

SEQ ID NO: 1504539 - RNA, 19 nt, Homo sapiens
  misc_RNA (1)...(19): siRNA sense strand
ggagcugcuggaucaagua

SEQ ID NO: 1504540 - RNA, 19 nt, Homo sapiens
  misc_RNA (1)...(19): siRNA sense strand
uaauaagaaggcagagaga

SEQ ID NO: 1504541 - RNA, 19 nt, Homo sapiens
  misc_RNA (1)...(19): siRNA sense strand
gagcugcuggaucaaguau

SEQ ID NO: 1504542 - RNA, 19 nt, Homo sapiens
  misc_RNA (1)...(19): siRNA sense strand
gcuaauaagaaggcagaga

SEQ ID NO: 1504543 - RNA, 19 nt, Homo sapiens
  misc_RNA (1)...(19): siRNA sense strand
gaagagaaagcuaauaaga

SEQ ID NO: 1504544 - RNA, 19 nt, Homo sapiens
  misc_RNA (1)...(19): siRNA sense strand
agagaaagcuaauaagaag

SEQ ID NO: 1504545 - RNA, 19 nt, Homo sapiens
  misc_RNA (1)...(19): siRNA sense strand
gcugcuggaucaaguauca

SEQ ID NO: 1504546 - RNA, 19 nt, Homo sapiens
  misc_RNA (1)...(19): siRNA sense strand
cugaagagaaagcuaauaa

SEQ ID NO: 1504547 - RNA, 19 nt, Homo sapiens
  misc_RNA (1)...(19): siRNA sense strand
gagagaagaggaagagucu

SEQ ID NO: 1504548 - RNA, 19 nt, Homo sapiens
  misc_RNA (1)...(19): siRNA sense strand
gucuuggucuuuggaaaua

SEQ ID NO: 1504549 - RNA, 19 nt, Homo sapiens
  misc_RNA (1)...(19): siRNA sense strand
uaagaaggcagagagaaga

SEQ ID NO: 1504550 - RNA, 19 nt, Homo sapiens
  misc_RNA (1)...(19): siRNA sense strand
gcagagagaagaggaagag

SEQ ID NO: 1504551 - RNA, 19 nt, Homo sapiens
  misc_RNA (1)...(19): siRNA sense strand
gagucuuggucuuuggaaa

SEQ ID NO: 1504552 - RNA, 19 nt, Homo sapiens
  misc_RNA (1)...(19): siRNA sense strand
ggucuuuggaaauaucuuu

SEQ ID NO: 1504553 - RNA, 19 nt, Homo sapiens
  misc_RNA (1)...(19): siRNA sense strand
ggagcugcuggaucaagua

SEQ ID NO: 1504554 - RNA, 19 nt, Homo sapiens
  misc_RNA (1)...(19): siRNA sense strand
uaauaagaaggcagagaga

SEQ ID NO: 1504555 - RNA, 19 nt, Homo sapiens
  misc_RNA (1)...(19): siRNA sense strand
gagcugcuggaucaaguau

SEQ ID NO: 1504556 - RNA, 19 nt, Homo sapiens
  misc_RNA (1)...(19): siRNA sense strand
gcuaauaagaaggcagaga

SEQ ID NO: 1504557 - RNA, 19 nt, Homo sapiens
  misc_RNA (1)...(19): siRNA sense strand
uggaacagcugcagccauu

SEQ ID NO: 1504558 - RNA, 19 nt, Homo sapiens
  misc_RNA (1)...(19): siRNA sense strand
ccucaccuuucuacaagua

SEQ ID NO: 1504559 - RNA, 19 nt, Homo sapiens
  misc_RNA (1)...(19): siRNA sense strand
ggaaaccugggacaucuga

SEQ ID NO: 1504560 - RNA, 19 nt, Homo sapiens
  misc_RNA (1)...(19): siRNA sense strand
gaacagcugcagccauuuu

SEQ ID NO: 1504561 - RNA, 19 nt, Homo sapiens
  misc_RNA (1)...(19): siRNA sense strand
gaugugaggucuggaacag

SEQ ID NO: 1504562 - RNA, 19 nt, Homo sapiens
  misc_RNA (1)...(19): siRNA sense strand
ccugggacaucugaacuga

SEQ ID NO: 1504563 - RNA, 19 nt, Homo sapiens
  misc_RNA (1)...(19): siRNA sense strand
acucuucccucaccuuucu

SEQ ID NO: 1504564 - RNA, 19 nt, Homo sapiens
  misc_RNA (1)...(19): siRNA sense strand
ugggaaaccugggacaucu

SEQ ID NO: 1504565 - RNA, 19 nt, Homo sapiens
  misc_RNA (1)...(19): siRNA sense strand
ucccucaccuuucuacaag

SEQ ID NO: 1504566 - RNA, 19 nt, Homo sapiens
  misc_RNA (1)...(19): siRNA sense strand
cuacucuucccucaccuuu

SEQ ID NO: 1504567 - RNA, 19 nt, Homo sapiens
  misc_RNA (1)...(19): siRNA sense strand
ggaacagcugcagccauuu

SEQ ID NO: 1504568 - RNA, 19 nt, Homo sapiens
  misc_RNA (1)...(19): siRNA sense strand
uggaacagcugcagccauu

SEQ ID NO: 1504569 - RNA, 19 nt, Homo sapiens
  misc_RNA (1)...(19): siRNA sense strand
ccucaccuuucuacaagua

SEQ ID NO: 1504570 - RNA, 19 nt, Homo sapiens
  misc_RNA (1)...(19): siRNA sense strand
ggaaaccugggacaucuga

SEQ ID NO: 1504571 - RNA, 19 nt, Homo sapiens
  misc_RNA (1)...(19): siRNA sense strand
gaacagcugcagccauuuu

SEQ ID NO: 1504572 - RNA, 19 nt, Homo sapiens
  misc_RNA (1)...(19): siRNA sense strand
gaugugaggucuggaacag

SEQ ID NO: 1504573 - RNA, 19 nt, Homo sapiens
  misc_RNA (1)...(19): siRNA sense strand
ccugggacaucugaacuga

SEQ ID NO: 1504574 - RNA, 19 nt, Homo sapiens
  misc_RNA (1)...(19): siRNA sense strand
acucuucccucaccuuucu

SEQ ID NO: 1504575 - RNA, 19 nt, Homo sapiens
  misc_RNA (1)...(19): siRNA sense strand
ugggaaaccugggacaucu

SEQ ID NO: 1504576 - RNA, 19 nt, Homo sapiens
  misc_RNA (1)...(19): siRNA sense strand
ucccucaccuuucuacaag

SEQ ID NO: 1504577 - RNA, 19 nt, Homo sapiens
  misc_RNA (1)...(19): siRNA sense strand
cuacucuucccucaccuuu

SEQ ID NO: 1504578 - RNA, 19 nt, Homo sapiens
  misc_RNA (1)...(19): siRNA sense strand
ggaacagcugcagccauuu

SEQ ID NO: 1504579 - RNA, 19 nt, Homo sapiens
  misc_RNA (1)...(19): siRNA sense strand
gcaaagaccugaccuugaa

SEQ ID NO: 1504580 - RNA, 19 nt, Homo sapiens
  misc_RNA (1)...(19): siRNA sense strand
ggaguacucuuugcuguug

SEQ ID NO: 1504581 - RNA, 19 nt, Homo sapiens
  misc_RNA (1)...(19): siRNA sense strand
gcaaauuucuugggcaaug

SEQ ID NO: 1504582 - RNA, 19 nt, Homo sapiens
  misc_RNA (1)...(19): siRNA sense strand
auacagagcugaacugcuu

SEQ ID NO: 1504583 - RNA, 19 nt, Homo sapiens
  misc_RNA (1)...(19): siRNA sense strand
guaugaagcagaagucuuu

SEQ ID NO: 1504584 - RNA, 19 nt, Homo sapiens
  misc_RNA (1)...(19): siRNA sense strand
caagaaagaacuucccauu

SEQ ID NO: 1504585 - RNA, 19 nt, Homo sapiens
  misc_RNA (1)...(19): siRNA sense strand
gaucaacagccaugugaaa

SEQ ID NO: 1504586 - RNA, 19 nt, Homo sapiens
  misc_RNA (1)...(19): siRNA sense strand
gaaaccauccucccgaaga

SEQ ID NO: 1504587 - RNA, 19 nt, Homo sapiens
  misc_RNA (1)...(19): siRNA sense strand
gaagaggaaccugcaaaga

SEQ ID NO: 1504588 - RNA, 19 nt, Homo sapiens
  misc_RNA (1)...(19): siRNA sense strand
ggacagggcaggagaagag

SEQ ID NO: 1504589 - RNA, 19 nt, Homo sapiens
  misc_RNA (1)...(19): siRNA sense strand
gcuccaaucuacugugugu

SEQ ID NO: 1504590 - RNA, 19 nt, Homo sapiens
  misc_RNA (1)...(19): siRNA sense strand
gagaagaggaaccugcaaa

SEQ ID NO: 1504591 - RNA, 19 nt, Homo sapiens
  misc_RNA (1)...(19): siRNA sense strand
ggaagguuguagacauaau

SEQ ID NO: 1504592 - RNA, 19 nt, Homo sapiens
  misc_RNA (1)...(19): siRNA sense strand
gaaagaacuucccauuccu

SEQ ID NO: 1504593 - RNA, 19 nt, Homo sapiens
  misc_RNA (1)...(19): siRNA sense strand
agaaagaacuucccauucc

SEQ ID NO: 1504594 - RNA, 19 nt, Homo sapiens
  misc_RNA (1)...(19): siRNA sense strand
gagacucccugcagguuuc

SEQ ID NO: 1504595 - RNA, 19 nt, Homo sapiens
  misc_RNA (1)...(19): siRNA sense strand
agaggaaccugcaaagaca

SEQ ID NO: 1504596 - RNA, 19 nt, Homo sapiens
  misc_RNA (1)...(19): siRNA sense strand
aauggcaucuuaccuuuau

SEQ ID NO: 1504597 - RNA, 19 nt, Homo sapiens
  misc_RNA (1)...(19): siRNA sense strand
gagaugccguggccuucuu

SEQ ID NO: 1504598 - RNA, 19 nt, Homo sapiens
  misc_RNA (1)...(19): siRNA sense strand
agggaagguuguagacaua

SEQ ID NO: 1504599 - RNA, 19 nt, Homo sapiens
  misc_RNA (1)...(19): siRNA sense strand
gcagguuucuaaagugagu

SEQ ID NO: 1504600 - RNA, 19 nt, Homo sapiens
  misc_RNA (1)...(19): siRNA sense strand
gaggcuguaugaagcagaa

SEQ ID NO: 1504601 - RNA, 19 nt, Homo sapiens
  misc_RNA (1)...(19): siRNA sense strand
guuccaaaauggcaucuua

SEQ ID NO: 1504602 - RNA, 19 nt, Homo sapiens
  misc_RNA (1)...(19): siRNA sense strand
gaaccugcaaagacauauu

SEQ ID NO: 1504603 - RNA, 19 nt, Homo sapiens
  misc_RNA (1)...(19): siRNA sense strand
gcaggucacugugcauguc

SEQ ID NO: 1504604 - RNA, 19 nt, Homo sapiens
  misc_RNA (1)...(19): siRNA sense strand
gacuuugccuuccgccuau

SEQ ID NO: 1504605 - RNA, 19 nt, Homo sapiens
  misc_RNA (1)...(19): siRNA sense strand
aaagguggauagagguguu

SEQ ID NO: 1504606 - RNA, 19 nt, Homo sapiens
  misc_RNA (1)...(19): siRNA sense strand
gagccacucacuccagaaa

SEQ ID NO: 1504607 - RNA, 19 nt, Homo sapiens
  misc_RNA (1)...(19): siRNA sense strand
caagaugaggcaacuggaa

SEQ ID NO: 1504608 - RNA, 19 nt, Homo sapiens
  misc_RNA (1)...(19): siRNA sense strand
caaauuucuugggcaaugu

SEQ ID NO: 1504609 - RNA, 19 nt, Homo sapiens
  misc_RNA (1)...(19): siRNA sense strand
aaaauggcaucuuaccuuu

SEQ ID NO: 1504610 - RNA, 19 nt, Homo sapiens
  misc_RNA (1)...(19): siRNA sense strand
cugcagguuucuaaaguga

SEQ ID NO: 1504611 - RNA, 19 nt, Homo sapiens
  misc_RNA (1)...(19): siRNA sense strand
gaagguuguagacauaauc

SEQ ID NO: 1504612 - RNA, 19 nt, Homo sapiens
  misc_RNA (1)...(19): siRNA sense strand
aaaccauccucccgaagau

SEQ ID NO: 1504613 - RNA, 19 nt, Homo sapiens
  misc_RNA (1)...(19): siRNA sense strand
ccuacaaucuggaaaccau

SEQ ID NO: 1504614 - RNA, 19 nt, Homo sapiens
  misc_RNA (1)...(19): siRNA sense strand
gcuuugugcugcagaugga

SEQ ID NO: 1504615 - RNA, 19 nt, Homo sapiens
  misc_RNA (1)...(19): siRNA sense strand
ccucugugcuccaaucuac

SEQ ID NO: 1504616 - RNA, 19 nt, Homo sapiens
  misc_RNA (1)...(19): siRNA sense strand
gagagacucccugcagguu

SEQ ID NO: 1504617 - RNA, 19 nt, Homo sapiens
  misc_RNA (1)...(19): siRNA sense strand
caaaauggcaucuuaccuu

SEQ ID NO: 1504618 - RNA, 19 nt, Homo sapiens
  misc_RNA (1)...(19): siRNA sense strand
ccacuucccuggccaugcu

SEQ ID NO: 1504619 - RNA, 19 nt, Homo sapiens
  misc_RNA (1)...(19): siRNA sense strand
aaauggcaucuuaccuuua

SEQ ID NO: 1504620 - RNA, 19 nt, Homo sapiens
  misc_RNA (1)...(19): siRNA sense strand
gucaagaggcuguaugaag

SEQ ID NO: 1504621 - RNA, 19 nt, Homo sapiens
  misc_RNA (1)...(19): siRNA sense strand
gccagaacacugagaaagu

SEQ ID NO: 1504622 - RNA, 19 nt, Homo sapiens
  misc_RNA (1)...(19): siRNA sense strand
aagggaagguuguagacau

SEQ ID NO: 1504623 - RNA, 19 nt, Homo sapiens
  misc_RNA (1)...(19): siRNA sense strand
gugcuccaaucuacugugu

SEQ ID NO: 1504624 - RNA, 19 nt, Homo sapiens
  misc_RNA (1)...(19): siRNA sense strand
cacccugaauauacaagaa

SEQ ID NO: 1504625 - RNA, 19 nt, Homo sapiens
  misc_RNA (1)...(19): siRNA sense strand
gggaagguuguagacauaa

SEQ ID NO: 1504626 - RNA, 19 nt, Homo sapiens
  misc_RNA (1)...(19): siRNA sense strand
aagaaagaacuucccauuc

SEQ ID NO: 1504627 - RNA, 19 nt, Homo sapiens
  misc_RNA (1)...(19): siRNA sense strand
ucaccaagacccagauucu

SEQ ID NO: 1504628 - RNA, 19 nt, Homo sapiens
  misc_RNA (1)...(19): siRNA sense strand
gaagucuuuucuacagauu

SEQ ID NO: 1504629 - RNA, 19 nt, Homo sapiens
  misc_RNA (1)...(19): siRNA sense strand
ccaugaugcaccagaaaga

SEQ ID NO: 1504630 - RNA, 19 nt, Homo sapiens
  misc_RNA (1)...(19): siRNA sense strand
gguuguagacauaauccaa

SEQ ID NO: 1504631 - RNA, 19 nt, Homo sapiens
  misc_RNA (1)...(19): siRNA sense strand
ggagaagaggaaccugcaa

SEQ ID NO: 1504632 - RNA, 19 nt, Homo sapiens
  misc_RNA (1)...(19): siRNA sense strand
caaggacagggcaggagaa

SEQ ID NO: 1504633 - RNA, 19 nt, Homo sapiens
  misc_RNA (1)...(19): siRNA sense strand
gaagacccaagggaagguu

SEQ ID NO: 1504634 - RNA, 19 nt, Homo sapiens
  misc_RNA (1)...(19): siRNA sense strand
gcugcaggcaaauuucuug

SEQ ID NO: 1504635 - RNA, 19 nt, Homo sapiens
  misc_RNA (1)...(19): siRNA sense strand
aaccugcaaagacauauuu

SEQ ID NO: 1504636 - RNA, 19 nt, Homo sapiens
  misc_RNA (1)...(19): siRNA sense strand
ugacuguucccagcaaaga

SEQ ID NO: 1504637 - RNA, 19 nt, Homo sapiens
  misc_RNA (1)...(19): siRNA sense strand
gaggaucaacagccaugug

SEQ ID NO: 1504638 - RNA, 19 nt, Homo sapiens
  misc_RNA (1)...(19): siRNA sense strand
gcagcugcaggcaaauuuc

SEQ ID NO: 1504639 - RNA, 19 nt, Homo sapiens
  misc_RNA (1)...(19): siRNA sense strand
cuauaccgcaggcugguuu

SEQ ID NO: 1504640 - RNA, 19 nt, Homo sapiens
  misc_RNA (1)...(19): siRNA sense strand
gcaaugucaagaggcugua

SEQ ID NO: 1504641 - RNA, 19 nt, Homo sapiens
  misc_RNA (1)...(19): siRNA sense strand
caagaggcuguaugaagca

SEQ ID NO: 1504642 - RNA, 19 nt, Homo sapiens
  misc_RNA (1)...(19): siRNA sense strand
ccugcagguuucuaaagug

SEQ ID NO: 1504643 - RNA, 19 nt, Homo sapiens
  misc_RNA (1)...(19): siRNA sense strand
ggaucaacagccaugugaa

SEQ ID NO: 1504644 - RNA, 19 nt, Homo sapiens
  misc_RNA (1)...(19): siRNA sense strand
gcacgagccugaacgguua

SEQ ID NO: 1504645 - RNA, 19 nt, Homo sapiens
  misc_RNA (1)...(19): siRNA sense strand
gaacauauuuguggaaaga

SEQ ID NO: 1504646 - RNA, 19 nt, Homo sapiens
  misc_RNA (1)...(19): siRNA sense strand
ggagggagcuuuauuuaca

SEQ ID NO: 1504647 - RNA, 19 nt, Homo sapiens
  misc_RNA (1)...(19): siRNA sense strand
gcaauaagcuggaaauacu

SEQ ID NO: 1504648 - RNA, 19 nt, Homo sapiens
  misc_RNA (1)...(19): siRNA sense strand
guaggaaugcuaacaauua

SEQ ID NO: 1504649 - RNA, 19 nt, Homo sapiens
  misc_RNA (1)...(19): siRNA sense strand
ccacaacauugccuucaua

SEQ ID NO: 1504650 - RNA, 19 nt, Homo sapiens
  misc_RNA (1)...(19): siRNA sense strand
guucaaagcuuguugucuu

SEQ ID NO: 1504651 - RNA, 19 nt, Homo sapiens
  misc_RNA (1)...(19): siRNA sense strand
ggaaugcacuuuauauacu

SEQ ID NO: 1504652 - RNA, 19 nt, Homo sapiens
  misc_RNA (1)...(19): siRNA sense strand
aaacauggagggagcuuua

SEQ ID NO: 1504653 - RNA, 19 nt, Homo sapiens
  misc_RNA (1)...(19): siRNA sense strand
guagaagacucagaaagug

SEQ ID NO: 1504654 - RNA, 19 nt, Homo sapiens
  misc_RNA (1)...(19): siRNA sense strand
gauaguauuguggguauua

SEQ ID NO: 1504655 - RNA, 19 nt, Homo sapiens
  misc_RNA (1)...(19): siRNA sense strand
ggagcuuuauuuacaagaa

SEQ ID NO: 1504656 - RNA, 19 nt, Homo sapiens
  misc_RNA (1)...(19): siRNA sense strand
caacauugccuucauacau

SEQ ID NO: 1504657 - RNA, 19 nt, Homo sapiens
  misc_RNA (1)...(19): siRNA sense strand
gaaccuggaugagcuugga

SEQ ID NO: 1504658 - RNA, 19 nt, Homo sapiens
  misc_RNA (1)...(19): siRNA sense strand
gaaagcauuccucucgaaa

SEQ ID NO: 1504659 - RNA, 19 nt, Homo sapiens
  misc_RNA (1)...(19): siRNA sense strand
gaacguaccacaacauugc

SEQ ID NO: 1504660 - RNA, 19 nt, Homo sapiens
  misc_RNA (1)...(19): siRNA sense strand
agaaagugguguuuacaug

SEQ ID NO: 1504661 - RNA, 19 nt, Homo sapiens
  misc_RNA (1)...(19): siRNA sense strand
ggacgaagcaguagaagac

SEQ ID NO: 1504662 - RNA, 19 nt, Homo sapiens
  misc_RNA (1)...(19): siRNA sense strand
guaaaugaagcagauagua

SEQ ID NO: 1504663 - RNA, 19 nt, Homo sapiens
  misc_RNA (1)...(19): siRNA sense strand
acacuaugcucccuccaaa

SEQ ID NO: 1504664 - RNA, 19 nt, Homo sapiens
  misc_RNA (1)...(19): siRNA sense strand
caccuaugguacagauuua

SEQ ID NO: 1504665 - RNA, 19 nt, Homo sapiens
  misc_RNA (1)...(19): siRNA sense strand
gaagugcaauaagcuggaa

SEQ ID NO: 1504666 - RNA, 19 nt, Homo sapiens
  misc_RNA (1)...(19): siRNA sense strand
caaguguuaugacaucguu

SEQ ID NO: 1504667 - RNA, 19 nt, Homo sapiens
  misc_RNA (1)...(19): siRNA sense strand
uaaucuugcugcugagaaa

SEQ ID NO: 1504668 - RNA, 19 nt, Homo sapiens
  misc_RNA (1)...(19): siRNA sense strand
gagggagcuuuauuuacaa

SEQ ID NO: 1504669 - RNA, 19 nt, Homo sapiens
  misc_RNA (1)...(19): siRNA sense strand
gcuaacaauuacagauuuc

SEQ ID NO: 1504670 - RNA, 19 nt, Homo sapiens
  misc_RNA (1)...(19): siRNA sense strand
gaccaucguggacagaaua

SEQ ID NO: 1504671 - RNA, 19 nt, Homo sapiens
  misc_RNA (1)...(19): siRNA sense strand
cagauaguauuguggguau

SEQ ID NO: 1504672 - RNA, 19 nt, Homo sapiens
  misc_RNA (1)...(19): siRNA sense strand
cuauaaaucaccuauggua

SEQ ID NO: 1504673 - RNA, 19 nt, Homo sapiens
  misc_RNA (1)...(19): siRNA sense strand
ggugguaaaugaagcagau

SEQ ID NO: 1504674 - RNA, 19 nt, Homo sapiens
  misc_RNA (1)...(19): siRNA sense strand
uaucagcucugccuguugu

SEQ ID NO: 1504675 - RNA, 19 nt, Homo sapiens
  misc_RNA (1)...(19): siRNA sense strand
gaauaggaacguaccacaa

SEQ ID NO: 1504676 - RNA, 19 nt, Homo sapiens
  misc_RNA (1)...(19): siRNA sense strand
ugaagcagauaguauugug

SEQ ID NO: 1504677 - RNA, 19 nt, Homo sapiens
  misc_RNA (1)...(19): siRNA sense strand
gcuguauacuccuugauca

SEQ ID NO: 1504678 - RNA, 19 nt, Homo sapiens
  misc_RNA (1)...(19): siRNA sense strand
gguugguggugguaaauga

SEQ ID NO: 1504679 - RNA, 19 nt, Homo sapiens
  misc_RNA (1)...(19): siRNA sense strand
caucguggacagaauagua

SEQ ID NO: 1504680 - RNA, 19 nt, Homo sapiens
  misc_RNA (1)...(19): siRNA sense strand
uggagaagcuggaguucga

SEQ ID NO: 1504681 - RNA, 19 nt, Homo sapiens
  misc_RNA (1)...(19): siRNA sense strand
ggaugagcuuggaauagga

SEQ ID NO: 1504682 - RNA, 19 nt, Homo sapiens
  misc_RNA (1)...(19): siRNA sense strand
ggccuucuuugcuuuggua

SEQ ID NO: 1504683 - RNA, 19 nt, Homo sapiens
  misc_RNA (1)...(19): siRNA sense strand
gggaaugcacuuuauauac

SEQ ID NO: 1504684 - RNA, 19 nt, Homo sapiens
  misc_RNA (1)...(19): siRNA sense strand
gagcuucagugggaucuuc

SEQ ID NO: 1504685 - RNA, 19 nt, Homo sapiens
  misc_RNA (1)...(19): siRNA sense strand
ccucuucgaugcuguauac

SEQ ID NO: 1504686 - RNA, 19 nt, Homo sapiens
  misc_RNA (1)...(19): siRNA sense strand
cagcaccguucacaguauu

SEQ ID NO: 1504687 - RNA, 19 nt, Homo sapiens
  misc_RNA (1)...(19): siRNA sense strand
ccacagauugcccguuauu

SEQ ID NO: 1504688 - RNA, 19 nt, Homo sapiens
  misc_RNA (1)...(19): siRNA sense strand
cauuuaagccuuuagugaa

SEQ ID NO: 1504689 - RNA, 19 nt, Homo sapiens
  misc_RNA (1)...(19): siRNA sense strand
acagauugcccguuauuga

SEQ ID NO: 1504690 - RNA, 19 nt, Homo sapiens
  misc_RNA (1)...(19): siRNA sense strand
ucaccuaugguacagauuu

SEQ ID NO: 1504691 - RNA, 19 nt, Homo sapiens
  misc_RNA (1)...(19): siRNA sense strand
cauggagggagcuuuauuu

SEQ ID NO: 1504692 - RNA, 19 nt, Homo sapiens
  misc_RNA (1)...(19): siRNA sense strand
auccacagauugcccguua

SEQ ID NO: 1504693 - RNA, 19 nt, Homo sapiens
  misc_RNA (1)...(19): siRNA sense strand
ugaccaagcagcacacguu

SEQ ID NO: 1504694 - RNA, 19 nt, Homo sapiens
  misc_RNA (1)...(19): siRNA sense strand
caggaaaaguuguagauau

SEQ ID NO: 1504695 - RNA, 19 nt, Homo sapiens
  misc_RNA (1)...(19): siRNA sense strand
ggaacguaccacaacauug

SEQ ID NO: 1504696 - RNA, 19 nt, Homo sapiens
  misc_RNA (1)...(19): siRNA sense strand
ugaagcagaaccuggauga

SEQ ID NO: 1504697 - RNA, 19 nt, Homo sapiens
  misc_RNA (1)...(19): siRNA sense strand
gaugcuguauacuccuuga

SEQ ID NO: 1504698 - RNA, 19 nt, Homo sapiens
  misc_RNA (1)...(19): siRNA sense strand
gcaguagaagacucagaaa

SEQ ID NO: 1504699 - RNA, 19 nt, Homo sapiens
  misc_RNA (1)...(19): siRNA sense strand
caaagccuugaacauauuu

SEQ ID NO: 1504700 - RNA, 19 nt, Homo sapiens
  misc_RNA (1)...(19): siRNA sense strand
gaccaagcagcacacguuu

SEQ ID NO: 1504701 - RNA, 19 nt, Homo sapiens
  misc_RNA (1)...(19): siRNA sense strand
acaaaagaauccucaaguu

SEQ ID NO: 1504702 - RNA, 19 nt, Homo sapiens
  misc_RNA (1)...(19): siRNA sense strand
ugggaaugcacuuuauaua

SEQ ID NO: 1504703 - RNA, 19 nt, Homo sapiens
  misc_RNA (1)...(19): siRNA sense strand
cuuguugucuuugauacua

SEQ ID NO: 1504704 - RNA, 19 nt, Homo sapiens
  misc_RNA (1)...(19): siRNA sense strand
aauaucagcucugccuguu

SEQ ID NO: 1504705 - RNA, 19 nt, Homo sapiens
  misc_RNA (1)...(19): siRNA sense strand
uacuauaaaucaccuaugg

SEQ ID NO: 1504706 - RNA, 19 nt, Homo sapiens
  misc_RNA (1)...(19): siRNA sense strand
uaggaaugcuaacaauuac

SEQ ID NO: 1504707 - RNA, 19 nt, Homo sapiens
  misc_RNA (1)...(19): siRNA sense strand
ucagcaccguucacaguau

SEQ ID NO: 1504708 - RNA, 19 nt, Homo sapiens
  misc_RNA (1)...(19): siRNA sense strand
cgaggacgaagcaguagaa

SEQ ID NO: 1504709 - RNA, 19 nt, Homo sapiens
  misc_RNA (1)...(19): siRNA sense strand
ggagacagaaacggaguga

SEQ ID NO: 1504710 - RNA, 19 nt, Homo sapiens
  misc_RNA (1)...(19): siRNA sense strand
aacauugccuucauacauc

SEQ ID NO: 1504711 - RNA, 19 nt, Homo sapiens
  misc_RNA (1)...(19): siRNA sense strand
acauuuaagccuuuaguga

SEQ ID NO: 1504712 - RNA, 19 nt, Homo sapiens
  misc_RNA (1)...(19): siRNA sense strand
uaaaucaccuaugguacag

SEQ ID NO: 1504713 - RNA, 19 nt, Homo sapiens
  misc_RNA (1)...(19): siRNA sense strand
uggcaucaccgacacacua

SEQ ID NO: 1504714 - RNA, 19 nt, Homo sapiens
  misc_RNA (1)...(19): siRNA sense strand
aguaagagcugagguccau

SEQ ID NO: 1504715 - RNA, 19 nt, Homo sapiens
  misc_RNA (1)...(19): siRNA sense strand
acaauaaccuagauaucac

SEQ ID NO: 1504716 - RNA, 19 nt, Homo sapiens
  misc_RNA (1)...(19): siRNA sense strand
ccacccaagugaccaagca

SEQ ID NO: 1504717 - RNA, 19 nt, Homo sapiens
  misc_RNA (1)...(19): siRNA sense strand
ggaaugcuaacaauuacag

SEQ ID NO: 1504718 - RNA, 19 nt, Homo sapiens
  misc_RNA (1)...(19): siRNA sense strand
gaaacauggagggagcuuu

SEQ ID NO: 1504719 - RNA, 19 nt, Homo sapiens
  misc_RNA (1)...(19): siRNA sense strand
uugaagguguugugaagug

SEQ ID NO: 1504720 - RNA, 19 nt, Homo sapiens
  misc_RNA (1)...(19): siRNA sense strand
gcugagaaaacauacaaua

SEQ ID NO: 1504721 - RNA, 19 nt, Homo sapiens
  misc_RNA (1)...(19): siRNA sense strand
gugggaaugcacuuuauau

SEQ ID NO: 1504722 - RNA, 19 nt, Homo sapiens
  misc_RNA (1)...(19): siRNA sense strand
gagccugaacgguuagaga

SEQ ID NO: 1504723 - RNA, 19 nt, Homo sapiens
  misc_RNA (1)...(19): siRNA sense strand
guugugaagugcaauaagc

SEQ ID NO: 1504724 - RNA, 19 nt, Homo sapiens
  misc_RNA (1)...(19): siRNA sense strand
aagcauuccucucgaaagg

SEQ ID NO: 1504725 - RNA, 19 nt, Homo sapiens
  misc_RNA (1)...(19): siRNA sense strand
uggaugagcuuggaauagg

SEQ ID NO: 1504726 - RNA, 19 nt, Homo sapiens
  misc_RNA (1)...(19): siRNA sense strand
caaaagaauccucaaguuc

SEQ ID NO: 1504727 - RNA, 19 nt, Homo sapiens
  misc_RNA (1)...(19): siRNA sense strand
gaugagcuuggaauaggaa

SEQ ID NO: 1504728 - RNA, 19 nt, Homo sapiens
  misc_RNA (1)...(19): siRNA sense strand
cuucauacauccagacacu

SEQ ID NO: 1504729 - RNA, 19 nt, Homo sapiens
  misc_RNA (1)...(19): siRNA sense strand
cgaagcaguagaagacuca

SEQ ID NO: 1504730 - RNA, 19 nt, Homo sapiens
  misc_RNA (1)...(19): siRNA sense strand
gguguugugaagugcaaua

SEQ ID NO: 1504731 - RNA, 19 nt, Homo sapiens
  misc_RNA (1)...(19): siRNA sense strand
ucaaguuccuccagcuuuu

SEQ ID NO: 1504732 - RNA, 19 nt, Homo sapiens
  misc_RNA (1)...(19): siRNA sense strand
ucaacacccacccaaguga

SEQ ID NO: 1504733 - RNA, 19 nt, Homo sapiens
  misc_RNA (1)...(19): siRNA sense strand
aaucaccuaugguacagau

SEQ ID NO: 1504734 - RNA, 19 nt, Homo sapiens
  misc_RNA (1)...(19): siRNA sense strand
aguagaagacucagaaagu

SEQ ID NO: 1504735 - RNA, 19 nt, Homo sapiens
  misc_RNA (1)...(19): siRNA sense strand
auaaaucaccuaugguaca

SEQ ID NO: 1504736 - RNA, 19 nt, Homo sapiens
  misc_RNA (1)...(19): siRNA sense strand
gugcaauaagcuggaaaua

SEQ ID NO: 1504737 - RNA, 19 nt, Homo sapiens
  misc_RNA (1)...(19): siRNA sense strand
ccugaacgguuagagaauc

SEQ ID NO: 1504738 - RNA, 19 nt, Homo sapiens
  misc_RNA (1)...(19): siRNA sense strand
acucagaaagugguguuua

SEQ ID NO: 1504739 - RNA, 19 nt, Homo sapiens
  misc_RNA (1)...(19): siRNA sense strand
gguaaaugaagcagauagu

SEQ ID NO: 1504740 - RNA, 19 nt, Homo sapiens
  misc_RNA (1)...(19): siRNA sense strand
gcagaaccuggaugagcuu

SEQ ID NO: 1504741 - RNA, 19 nt, Homo sapiens
  misc_RNA (1)...(19): siRNA sense strand
guauacuccuugaucaaaa

SEQ ID NO: 1504742 - RNA, 19 nt, Homo sapiens
  misc_RNA (1)...(19): siRNA sense strand
uguauacuccuugaucaaa

SEQ ID NO: 1504743 - RNA, 19 nt, Homo sapiens
  misc_RNA (1)...(19): siRNA sense strand
auggagggagcuuuauuua

SEQ ID NO: 1504744 - RNA, 19 nt, Homo sapiens
  misc_RNA (1)...(19): siRNA sense strand
gcaauaagguuagaugaaa

SEQ ID NO: 1504745 - RNA, 19 nt, Homo sapiens
  misc_RNA (1)...(19): siRNA sense strand
gaucaaggcucacucgaaa

SEQ ID NO: 1504746 - RNA, 19 nt, Homo sapiens
  misc_RNA (1)...(19): siRNA sense strand
caacaacccucgaaucuug

SEQ ID NO: 1504747 - RNA, 19 nt, Homo sapiens
  misc_RNA (1)...(19): siRNA sense strand
gaaauaaccacacgcuaua

SEQ ID NO: 1504748 - RNA, 19 nt, Homo sapiens
  misc_RNA (1)...(19): siRNA sense strand
caagagaguuguuagcuaa

SEQ ID NO: 1504749 - RNA, 19 nt, Homo sapiens
  misc_RNA (1)...(19): siRNA sense strand
aagcauaccugauugauaa

SEQ ID NO: 1504750 - RNA, 19 nt, Homo sapiens
  misc_RNA (1)...(19): siRNA sense strand
caaacuggcugaagagaaa

SEQ ID NO: 1504751 - RNA, 19 nt, Homo sapiens
  misc_RNA (1)...(19): siRNA sense strand
ggauuaaacuggaauacaa

SEQ ID NO: 1504752 - RNA, 19 nt, Homo sapiens
  misc_RNA (1)...(19): siRNA sense strand
gaaugaaagucacccacua

SEQ ID NO: 1504753 - RNA, 19 nt, Homo sapiens
  misc_RNA (1)...(19): siRNA sense strand
gcaagagaguuguuagcua

SEQ ID NO: 1504754 - RNA, 19 nt, Homo sapiens
  misc_RNA (1)...(19): siRNA sense strand
gagaagcgcugaacuggau

SEQ ID NO: 1504755 - RNA, 19 nt, Homo sapiens
  misc_RNA (1)...(19): siRNA sense strand
gaagagcuauauggucuaa

SEQ ID NO: 1504756 - RNA, 19 nt, Homo sapiens
  misc_RNA (1)...(19): siRNA sense strand
guucuacucuuaucaauug

SEQ ID NO: 1504757 - RNA, 19 nt, Homo sapiens
  misc_RNA (1)...(19): siRNA sense strand
caaaggcuauuaugcauuc

SEQ ID NO: 1504758 - RNA, 19 nt, Homo sapiens
  misc_RNA (1)...(19): siRNA sense strand
gaagaaaccacugauauuc

SEQ ID NO: 1504759 - RNA, 19 nt, Homo sapiens
  misc_RNA (1)...(19): siRNA sense strand
aggcacagcugauuucuuu

SEQ ID NO: 1504760 - RNA, 19 nt, Homo sapiens
  misc_RNA (1)...(19): siRNA sense strand
caacacauaccauuaaaga

SEQ ID NO: 1504761 - RNA, 19 nt, Homo sapiens
  misc_RNA (1)...(19): siRNA sense strand
ggacagggacauccaguuu

SEQ ID NO: 1504762 - RNA, 19 nt, Homo sapiens
  misc_RNA (1)...(19): siRNA sense strand
aaacagaucauacgagaaa

SEQ ID NO: 1504763 - RNA, 19 nt, Homo sapiens
  misc_RNA (1)...(19): siRNA sense strand
gaacuggauuaaacuggaa

SEQ ID NO: 1504764 - RNA, 19 nt, Homo sapiens
  misc_RNA (1)...(19): siRNA sense strand
gaaauacgaguguuugguu

SEQ ID NO: 1504765 - RNA, 19 nt, Homo sapiens
  misc_RNA (1)...(19): siRNA sense strand
aaagucagcuguuucucua

SEQ ID NO: 1504766 - RNA, 19 nt, Homo sapiens
  misc_RNA (1)...(19): siRNA sense strand
caaaaggucugcaguacua

SEQ ID NO: 1504767 - RNA, 19 nt, Homo sapiens
  misc_RNA (1)...(19): siRNA sense strand
agaaagagcggaaaccuaa

SEQ ID NO: 1504768 - RNA, 19 nt, Homo sapiens
  misc_RNA (1)...(19): siRNA sense strand
gcuaaauccucaauacaau

SEQ ID NO: 1504769 - RNA, 19 nt, Homo sapiens
  misc_RNA (1)...(19): siRNA sense strand
gggaauacauugccuccaa

SEQ ID NO: 1504770 - RNA, 19 nt, Homo sapiens
  misc_RNA (1)...(19): siRNA sense strand
gcugaaagcauaccugauu

SEQ ID NO: 1504771 - RNA, 19 nt, Homo sapiens
  misc_RNA (1)...(19): siRNA sense strand
agagugcacugucugcuua

SEQ ID NO: 1504772 - RNA, 19 nt, Homo sapiens
  misc_RNA (1)...(19): siRNA sense strand
gcgcugaacuggauuaaac

SEQ ID NO: 1504773 - RNA, 19 nt, Homo sapiens
  misc_RNA (1)...(19): siRNA sense strand
gcagaagaaaccacugaua

SEQ ID NO: 1504774 - RNA, 19 nt, Homo sapiens
  misc_RNA (1)...(19): siRNA sense strand
gaagaaggauggaaaagga

SEQ ID NO: 1504775 - RNA, 19 nt, Homo sapiens
  misc_RNA (1)...(19): siRNA sense strand
gcacacuacuacaaacaga

SEQ ID NO: 1504776 - RNA, 19 nt, Homo sapiens
  misc_RNA (1)...(19): siRNA sense strand
gcacgaaugguuccaguga

SEQ ID NO: 1504777 - RNA, 19 nt, Homo sapiens
  misc_RNA (1)...(19): siRNA sense strand
aaauacgaguguuugguua

SEQ ID NO: 1504778 - RNA, 19 nt, Homo sapiens
  misc_RNA (1)...(19): siRNA sense strand
ggacaaaauguuucacuua

SEQ ID NO: 1504779 - RNA, 19 nt, Homo sapiens
  misc_RNA (1)...(19): siRNA sense strand
cagaagaaaccacugauau

SEQ ID NO: 1504780 - RNA, 19 nt, Homo sapiens
  misc_RNA (1)...(19): siRNA sense strand
cgugucaaauauuggauua

SEQ ID NO: 1504781 - RNA, 19 nt, Homo sapiens
  misc_RNA (1)...(19): siRNA sense strand
cgauggauauauucaaaug

SEQ ID NO: 1504782 - RNA, 19 nt, Homo sapiens
  misc_RNA (1)...(19): siRNA sense strand
ggagagaagggaaauuuag

SEQ ID NO: 1504783 - RNA, 19 nt, Homo sapiens
  misc_RNA (1)...(19): siRNA sense strand
ugucaacaauccaugguuu

SEQ ID NO: 1504784 - RNA, 19 nt, Homo sapiens
  misc_RNA (1)...(19): siRNA sense strand
ugaaauaaccacacgcuau

SEQ ID NO: 1504785 - RNA, 19 nt, Homo sapiens
  misc_RNA (1)...(19): siRNA sense strand
aaaugaaagucagcuguuu

SEQ ID NO: 1504786 - RNA, 19 nt, Homo sapiens
  misc_RNA (1)...(19): siRNA sense strand
gauaaagucagaaucaaag

SEQ ID NO: 1504787 - RNA, 19 nt, Homo sapiens
  misc_RNA (1)...(19): siRNA sense strand
cacgauggauauauucaaa

SEQ ID NO: 1504788 - RNA, 19 nt, Homo sapiens
  misc_RNA (1)...(19): siRNA sense strand
ggagauggaagagcuauau

SEQ ID NO: 1504789 - RNA, 19 nt, Homo sapiens
  misc_RNA (1)...(19): siRNA sense strand
cacccugguucuacucuua

SEQ ID NO: 1504790 - RNA, 19 nt, Homo sapiens
  misc_RNA (1)...(19): siRNA sense strand
uauaugggaucauuucauc

SEQ ID NO: 1504791 - RNA, 19 nt, Homo sapiens
  misc_RNA (1)...(19): siRNA sense strand
gauggaauaguaacaguug

SEQ ID NO: 1504792 - RNA, 19 nt, Homo sapiens
  misc_RNA (1)...(19): siRNA sense strand
agaagaaaccacugauauu

SEQ ID NO: 1504793 - RNA, 19 nt, Homo sapiens
  misc_RNA (1)...(19): siRNA sense strand
gaaguuguucuccguucua

SEQ ID NO: 1504794 - RNA, 19 nt, Homo sapiens
  misc_RNA (1)...(19): siRNA sense strand
ccacugggauuugccuuug

SEQ ID NO: 1504795 - RNA, 19 nt, Homo sapiens
  misc_RNA (1)...(19): siRNA sense strand
aaagcuaaauccucaauac

SEQ ID NO: 1504796 - RNA, 19 nt, Homo sapiens
  misc_RNA (1)...(19): siRNA sense strand
gauguuggcaagaaugaaa

SEQ ID NO: 1504797 - RNA, 19 nt, Homo sapiens
  misc_RNA (1)...(19): siRNA sense strand
gcacagauuuuguaaacau

SEQ ID NO: 1504798 - RNA, 19 nt, Homo sapiens
  misc_RNA (1)...(19): siRNA sense strand
ggcaggaucuccagggaau

SEQ ID NO: 1504799 - RNA, 19 nt, Homo sapiens
  misc_RNA (1)...(19): siRNA sense strand
gagccaaaccggucggaaa

SEQ ID NO: 1504800 - RNA, 19 nt, Homo sapiens
  misc_RNA (1)...(19): siRNA sense strand
gaagcgcugaacuggauua

SEQ ID NO: 1504801 - RNA, 19 nt, Homo sapiens
  misc_RNA (1)...(19): siRNA sense strand
ucacugaaucuguucuuaa

SEQ ID NO: 1504802 - RNA, 19 nt, Homo sapiens
  misc_RNA (1)...(19): siRNA sense strand
aagguuagaugaaauacga

SEQ ID NO: 1504803 - RNA, 19 nt, Homo sapiens
  misc_RNA (1)...(19): siRNA sense strand
gggaccgugucaaauauug

SEQ ID NO: 1504804 - RNA, 19 nt, Homo sapiens
  misc_RNA (1)...(19): siRNA sense strand
gcuuauuccuugugcagaa

SEQ ID NO: 1504805 - RNA, 19 nt, Homo sapiens
  misc_RNA (1)...(19): siRNA sense strand
gaauacaacaacccucgaa

SEQ ID NO: 1504806 - RNA, 19 nt, Homo sapiens
  misc_RNA (1)...(19): siRNA sense strand
gcagagaagcaugagauga

SEQ ID NO: 1504807 - RNA, 19 nt, Homo sapiens
  misc_RNA (1)...(19): siRNA sense strand
cuaugacacuuucccuaaa

SEQ ID NO: 1504808 - RNA, 19 nt, Homo sapiens
  misc_RNA (1)...(19): siRNA sense strand
gaaaggcaagagaguuguu

SEQ ID NO: 1504809 - RNA, 19 nt, Homo sapiens
  misc_RNA (1)...(19): siRNA sense strand
gaugaaauacgaguguuug

SEQ ID NO: 1504810 - RNA, 19 nt, Homo sapiens
  misc_RNA (1)...(19): siRNA sense strand
uagcagcugucuacacugu

SEQ ID NO: 1504811 - RNA, 19 nt, Homo sapiens
  misc_RNA (1)...(19): siRNA sense strand
ggaagggaguuggaagaag

SEQ ID NO: 1504812 - RNA, 19 nt, Homo sapiens
  misc_RNA (1)...(19): siRNA sense strand
ucacaacccauaucuagug

SEQ ID NO: 1504813 - RNA, 19 nt, Homo sapiens
  misc_RNA (1)...(19): siRNA sense strand
auacgaguguuugguuaua

SEQ ID NO: 1504814 - RNA, 19 nt, Homo sapiens
  misc_RNA (1)...(19): siRNA sense strand
aaggcucacucgaaaguuu

SEQ ID NO: 1504815 - RNA, 19 nt, Homo sapiens
  misc_RNA (1)...(19): siRNA sense strand
guucagcgauccucaucug

SEQ ID NO: 1504816 - RNA, 19 nt, Homo sapiens
  misc_RNA (1)...(19): siRNA sense strand
uaaaugaaagucagcuguu

SEQ ID NO: 1504817 - RNA, 19 nt, Homo sapiens
  misc_RNA (1)...(19): siRNA sense strand
gcggaaaccuaagucuuca

SEQ ID NO: 1504818 - RNA, 19 nt, Homo sapiens
  misc_RNA (1)...(19): siRNA sense strand
ccacggccaucuacaugau

SEQ ID NO: 1504819 - RNA, 19 nt, Homo sapiens
  misc_RNA (1)...(19): siRNA sense strand
gaaauuuagcagcugucua

SEQ ID NO: 1504820 - RNA, 19 nt, Homo sapiens
  misc_RNA (1)...(19): siRNA sense strand
gaaagcauaccugauugau

SEQ ID NO: 1504821 - RNA, 19 nt, Homo sapiens
  misc_RNA (1)...(19): siRNA sense strand
uugaauggcaggaugcuua

SEQ ID NO: 1504822 - RNA, 19 nt, Homo sapiens
  misc_RNA (1)...(19): siRNA sense strand
uaagagaagcgcugaacug

SEQ ID NO: 1504823 - RNA, 19 nt, Homo sapiens
  misc_RNA (1)...(19): siRNA sense strand
cagaaggguugguuaucga

SEQ ID NO: 1504824 - RNA, 19 nt, Homo sapiens
  misc_RNA (1)...(19): siRNA sense strand
acucgaaaguuuggcauaa

SEQ ID NO: 1504825 - RNA, 19 nt, Homo sapiens
  misc_RNA (1)...(19): siRNA sense strand
gagaggcacagcugauuuc

SEQ ID NO: 1504826 - RNA, 19 nt, Homo sapiens
  misc_RNA (1)...(19): siRNA sense strand
cgacauggacauuuacauc

SEQ ID NO: 1504827 - RNA, 19 nt, Homo sapiens
  misc_RNA (1)...(19): siRNA sense strand
acggcgacauggacauuua

SEQ ID NO: 1504828 - RNA, 19 nt, Homo sapiens
  misc_RNA (1)...(19): siRNA sense strand
cacauacuguuuccagaug

SEQ ID NO: 1504829 - RNA, 19 nt, Homo sapiens
  misc_RNA (1)...(19): siRNA sense strand
aaagcauaccugauugaua

SEQ ID NO: 1504830 - RNA, 19 nt, Homo sapiens
  misc_RNA (1)...(19): siRNA sense strand
gacauggacauuuacauca

SEQ ID NO: 1504831 - RNA, 19 nt, Homo sapiens
  misc_RNA (1)...(19): siRNA sense strand
gagauguuggcaagaauga

SEQ ID NO: 1504832 - RNA, 19 nt, Homo sapiens
  misc_RNA (1)...(19): siRNA sense strand
gggugucacugaaucuguu

SEQ ID NO: 1504833 - RNA, 19 nt, Homo sapiens
  misc_RNA (1)...(19): siRNA sense strand
cagaaagagcggaaaccua

SEQ ID NO: 1504834 - RNA, 19 nt, Homo sapiens
  misc_RNA (1)...(19): siRNA sense strand
uauugggacuggagcauug

SEQ ID NO: 1504835 - RNA, 19 nt, Homo sapiens
  misc_RNA (1)...(19): siRNA sense strand
gagcggaaaccuaagucuu

SEQ ID NO: 1504836 - RNA, 19 nt, Homo sapiens
  misc_RNA (1)...(19): siRNA sense strand
ccacuagguucgugaugca

SEQ ID NO: 1504837 - RNA, 19 nt, Homo sapiens
  misc_RNA (1)...(19): siRNA sense strand
aaacacgacccgcucaaug

SEQ ID NO: 1504838 - RNA, 19 nt, Homo sapiens
  misc_RNA (1)...(19): siRNA sense strand
gucacugaaucuguucuua

SEQ ID NO: 1504839 - RNA, 19 nt, Homo sapiens
  misc_RNA (1)...(19): siRNA sense strand
uuacaauucacaacccaua

SEQ ID NO: 1504840 - RNA, 19 nt, Homo sapiens
  misc_RNA (1)...(19): siRNA sense strand
cagaaucaaaggcuauuau

SEQ ID NO: 1504841 - RNA, 19 nt, Homo sapiens
  misc_RNA (1)...(19): siRNA sense strand
cgauggucacccuguauua

SEQ ID NO: 1504842 - RNA, 19 nt, Homo sapiens
  misc_RNA (1)...(19): siRNA sense strand
acaggugcguggucaguga

SEQ ID NO: 1504843 - RNA, 19 nt, Homo sapiens
  misc_RNA (1)...(19): siRNA sense strand
ucagcgauccucaucugua

SEQ ID NO: 1504844 - RNA, 19 nt, Homo sapiens
  misc_RNA (1)...(19): siRNA sense strand
gcagggagcuggaggaaga

SEQ ID NO: 1504845 - RNA, 19 nt, Homo sapiens
  misc_RNA (1)...(19): siRNA sense strand
gaagugaagaugccuccaa

SEQ ID NO: 1504846 - RNA, 19 nt, Homo sapiens
  misc_RNA (1)...(19): siRNA sense strand
cgaauccaguguucuguca

SEQ ID NO: 1504847 - RNA, 19 nt, Homo sapiens
  misc_RNA (1)...(19): siRNA sense strand
acuucuggcucuucuauuu

SEQ ID NO: 1504848 - RNA, 19 nt, Homo sapiens
  misc_RNA (1)...(19): siRNA sense strand
uuucaucuguuccuacuga

SEQ ID NO: 1504849 - RNA, 19 nt, Homo sapiens
  misc_RNA (1)...(19): siRNA sense strand
cuucagacguuuagucaag

SEQ ID NO: 1504850 - RNA, 19 nt, Homo sapiens
  misc_RNA (1)...(19): siRNA sense strand
caccagagcaggagaugga

SEQ ID NO: 1504851 - RNA, 19 nt, Homo sapiens
  misc_RNA (1)...(19): siRNA sense strand
ugccagauaugguggacaa

SEQ ID NO: 1504852 - RNA, 19 nt, Homo sapiens
  misc_RNA (1)...(19): siRNA sense strand
agacuuccuuucaucuguu

SEQ ID NO: 1504853 - RNA, 19 nt, Homo sapiens
  misc_RNA (1)...(19): siRNA sense strand
cauccacaacuucaauauu

SEQ ID NO: 1504854 - RNA, 19 nt, Homo sapiens
  misc_RNA (1)...(19): siRNA sense strand
cgagcccacugccucagaa

SEQ ID NO: 1504855 - RNA, 19 nt, Homo sapiens
  misc_RNA (1)...(19): siRNA sense strand
agucaagcuugguuuacuu

SEQ ID NO: 1504856 - RNA, 19 nt, Homo sapiens
  misc_RNA (1)...(19): siRNA sense strand
aagacuuccuuucaucugu

SEQ ID NO: 1504857 - RNA, 19 nt, Homo sapiens
  misc_RNA (1)...(19): siRNA sense strand
agacgcugccugaggauga

SEQ ID NO: 1504858 - RNA, 19 nt, Homo sapiens
  misc_RNA (1)...(19): siRNA sense strand
gagacuuccaccuuugaga

SEQ ID NO: 1504859 - RNA, 19 nt, Homo sapiens
  misc_RNA (1)...(19): siRNA sense strand
uaucgaauccaguguucug

SEQ ID NO: 1504860 - RNA, 19 nt, Homo sapiens
  misc_RNA (1)...(19): siRNA sense strand
uuucugcucuucaucuaag

SEQ ID NO: 1504861 - RNA, 19 nt, Homo sapiens
  misc_RNA (1)...(19): siRNA sense strand
ggaaguacaucauugaacu

SEQ ID NO: 1504862 - RNA, 19 nt, Homo sapiens
  misc_RNA (1)...(19): siRNA sense strand
gaacucaaccacaugauca

SEQ ID NO: 1504863 - RNA, 19 nt, Homo sapiens
  misc_RNA (1)...(19): siRNA sense strand
ggagagagcagcccagugu

SEQ ID NO: 1504864 - RNA, 19 nt, Homo sapiens
  misc_RNA (1)...(19): siRNA sense strand
gggagugccucgcaugugu

SEQ ID NO: 1504865 - RNA, 19 nt, Homo sapiens
  misc_RNA (1)...(19): siRNA sense strand
ucaaccacaugaucaaaga

SEQ ID NO: 1504866 - RNA, 19 nt, Homo sapiens
  misc_RNA (1)...(19): siRNA sense strand
gaaauaugaacaggccuuu

SEQ ID NO: 1504867 - RNA, 19 nt, Homo sapiens
  misc_RNA (1)...(19): siRNA sense strand
gauugucaccggagguaua

SEQ ID NO: 1504868 - RNA, 19 nt, Homo sapiens
  misc_RNA (1)...(19): siRNA sense strand
uuucaaagcccaagacguu

SEQ ID NO: 1504869 - RNA, 19 nt, Homo sapiens
  misc_RNA (1)...(19): siRNA sense strand
gaacugcaagaccacuuug

SEQ ID NO: 1504870 - RNA, 19 nt, Homo sapiens
  misc_RNA (1)...(19): siRNA sense strand
gcagccagaaguacaaaga

SEQ ID NO: 1504871 - RNA, 19 nt, Homo sapiens
  misc_RNA (1)...(19): siRNA sense strand
aauaugaacaggccuuuga

SEQ ID NO: 1504872 - RNA, 19 nt, Homo sapiens
  misc_RNA (1)...(19): siRNA sense strand
gggcgugccuaccucuuca

SEQ ID NO: 1504873 - RNA, 19 nt, Homo sapiens
  misc_RNA (1)...(19): siRNA sense strand
gugccuaccucuucaacuc

SEQ ID NO: 1504874 - RNA, 19 nt, Homo sapiens
  misc_RNA (1)...(19): siRNA sense strand
ccacuuugggcuggaaaua

SEQ ID NO: 1504875 - RNA, 19 nt, Homo sapiens
  misc_RNA (1)...(19): siRNA sense strand
gagagcagccagaaguaca

SEQ ID NO: 1504876 - RNA, 19 nt, Homo sapiens
  misc_RNA (1)...(19): siRNA sense strand
caaccacgacgaccucauc

SEQ ID NO: 1504877 - RNA, 19 nt, Homo sapiens
  misc_RNA (1)...(19): siRNA sense strand
gaggggaaguacaucauug

SEQ ID NO: 1504878 - RNA, 19 nt, Homo sapiens
  misc_RNA (1)...(19): siRNA sense strand
acuuugggcuggaaauaug

SEQ ID NO: 1504879 - RNA, 19 nt, Homo sapiens
  misc_RNA (1)...(19): siRNA sense strand
agacaacggcugggacuga

SEQ ID NO: 1504880 - RNA, 19 nt, Homo sapiens
  misc_RNA (1)...(19): siRNA sense strand
acgacgaccucaucuccaa

SEQ ID NO: 1504881 - RNA, 19 nt, Homo sapiens
  misc_RNA (1)...(19): siRNA sense strand
agagagcagcccaguguga

SEQ ID NO: 1504882 - RNA, 19 nt, Homo sapiens
  misc_RNA (1)...(19): siRNA sense strand
ccauggugcggauuucaaa

SEQ ID NO: 1504883 - RNA, 19 nt, Homo sapiens
  misc_RNA (1)...(19): siRNA sense strand
gagcagccagaaguacaaa

SEQ ID NO: 1504884 - RNA, 19 nt, Homo sapiens
  misc_RNA (1)...(19): siRNA sense strand
gaaguacaucauugaacuc

SEQ ID NO: 1504885 - RNA, 19 nt, Homo sapiens
  misc_RNA (1)...(19): siRNA sense strand
caaagcccaagacguuuca

SEQ ID NO: 1504886 - RNA, 19 nt, Homo sapiens
  misc_RNA (1)...(19): siRNA sense strand
ucaaagcccaagacguuuc

SEQ ID NO: 1504887 - RNA, 19 nt, Homo sapiens
  misc_RNA (1)...(19): siRNA sense strand
aggccuacuuggaugauug

SEQ ID NO: 1504888 - RNA, 19 nt, Homo sapiens
  misc_RNA (1)...(19): siRNA sense strand
ucaacucaguggugaacgu

SEQ ID NO: 1504889 - RNA, 19 nt, Homo sapiens
  misc_RNA (1)...(19): siRNA sense strand
gcugcuggcucugggaaag

SEQ ID NO: 1504890 - RNA, 19 nt, Homo sapiens
  misc_RNA (1)...(19): siRNA sense strand
gagaacugcaagaccacuu

SEQ ID NO: 1504891 - RNA, 19 nt, Homo sapiens
  misc_RNA (1)...(19): siRNA sense strand
cgacauccacugcgagaac

SEQ ID NO: 1504892 - RNA, 19 nt, Homo sapiens
  misc_RNA (1)...(19): siRNA sense strand
gguccugacagcccaccua

SEQ ID NO: 1504893 - RNA, 19 nt, Homo sapiens
  misc_RNA (1)...(19): siRNA sense strand
agaacugcaagaccacuuu

SEQ ID NO: 1504894 - RNA, 19 nt, Homo sapiens
  misc_RNA (1)...(19): siRNA sense strand
gggaugcccuccagccauu

SEQ ID NO: 1504895 - RNA, 19 nt, Homo sapiens
  misc_RNA (1)...(19): siRNA sense strand
uaagaaugcaccaaacaaa

SEQ ID NO: 1504896 - RNA, 19 nt, Homo sapiens
  misc_RNA (1)...(19): siRNA sense strand
gagccucagcccuguauuu

SEQ ID NO: 1504897 - RNA, 19 nt, Homo sapiens
  misc_RNA (1)...(19): siRNA sense strand
aaacaaacaacgccagguu

SEQ ID NO: 1504898 - RNA, 19 nt, Homo sapiens
  misc_RNA (1)...(19): siRNA sense strand
ccucagcccuguauuuguc

SEQ ID NO: 1504899 - RNA, 19 nt, Homo sapiens
  misc_RNA (1)...(19): siRNA sense strand
gaaugcaccaaacaaacaa

SEQ ID NO: 1504900 - RNA, 19 nt, Homo sapiens
  misc_RNA (1)...(19): siRNA sense strand
ugacccucaucauauuuaa

SEQ ID NO: 1504901 - RNA, 19 nt, Homo sapiens
  misc_RNA (1)...(19): siRNA sense strand
cgaauauccugcaggugau

SEQ ID NO: 1504902 - RNA, 19 nt, Homo sapiens
  misc_RNA (1)...(19): siRNA sense strand
ccaacguacucugguuuga

SEQ ID NO: 1504903 - RNA, 19 nt, Homo sapiens
  misc_RNA (1)...(19): siRNA sense strand
gcuguggccuuccuagucu

SEQ ID NO: 1504904 - RNA, 19 nt, Homo sapiens
  misc_RNA (1)...(19): siRNA sense strand
cagcagugggcaccaagua

SEQ ID NO: 1504905 - RNA, 19 nt, Homo sapiens
  misc_RNA (1)...(19): siRNA sense strand
cuccagccauucccaguuu

SEQ ID NO: 1504906 - RNA, 19 nt, Homo sapiens
  misc_RNA (1)...(19): siRNA sense strand
gugacccucaucauauuua

SEQ ID NO: 1504907 - RNA, 19 nt, Homo sapiens
  misc_RNA (1)...(19): siRNA sense strand
uuucgugacccucaucaua

SEQ ID NO: 1504908 - RNA, 19 nt, Homo sapiens
  misc_RNA (1)...(19): siRNA sense strand
ucgugacccucaucauauu

SEQ ID NO: 1504909 - RNA, 19 nt, Homo sapiens
  misc_RNA (1)...(19): siRNA sense strand
gcacacgaucuccuuccuu

SEQ ID NO: 1504910 - RNA, 19 nt, Homo sapiens
  misc_RNA (1)...(19): siRNA sense strand
agaaugcaccaaacaaaca

SEQ ID NO: 1504911 - RNA, 19 nt, Homo sapiens
  misc_RNA (1)...(19): siRNA sense strand
uuaagaaugcaccaaacaa

SEQ ID NO: 1504912 - RNA, 19 nt, Homo sapiens
  misc_RNA (1)...(19): siRNA sense strand
ggucaacuggcugaucaaa

SEQ ID NO: 1504913 - RNA, 19 nt, Homo sapiens
  misc_RNA (1)...(19): siRNA sense strand
gccaucgccugguucaucu

SEQ ID NO: 1504914 - RNA, 19 nt, Homo sapiens
  misc_RNA (1)...(19): siRNA sense strand
acacagcagugggcaccaa

SEQ ID NO: 1504915 - RNA, 19 nt, Homo sapiens
  misc_RNA (1)...(19): siRNA sense strand
ggcagaagccaggaacaga

SEQ ID NO: 1504916 - RNA, 19 nt, Homo sapiens
  misc_RNA (1)...(19): siRNA sense strand
aagccucauucccaacgua

SEQ ID NO: 1504917 - RNA, 19 nt, Homo sapiens
  misc_RNA (1)...(19): siRNA sense strand
cgagacacaagccucauuc

SEQ ID NO: 1504918 - RNA, 19 nt, Homo sapiens
  misc_RNA (1)...(19): siRNA sense strand
ucauggccaucgccugguu

SEQ ID NO: 1504919 - RNA, 19 nt, Homo sapiens
  misc_RNA (1)...(19): siRNA sense strand
gggucuaccugcuguacca

SEQ ID NO: 1504920 - RNA, 19 nt, Homo sapiens
  misc_RNA (1)...(19): siRNA sense strand
gacccucacccacgucgaa

SEQ ID NO: 1504921 - RNA, 19 nt, Homo sapiens
  misc_RNA (1)...(19): siRNA sense strand
caguuuaugugguucuucu

SEQ ID NO: 1504922 - RNA, 19 nt, Homo sapiens
  misc_RNA (1)...(19): siRNA sense strand
ccucacccacgucgaauau

SEQ ID NO: 1504923 - RNA, 19 nt, Homo sapiens
  misc_RNA (1)...(19): siRNA sense strand
ucuccgaguucuuccuaau

SEQ ID NO: 1504924 - RNA, 19 nt, Homo sapiens
  misc_RNA (1)...(19): siRNA sense strand
uauuugucaucgucgguuu

SEQ ID NO: 1504925 - RNA, 19 nt, Homo sapiens
  misc_RNA (1)...(19): siRNA sense strand
ggccaucgccugguucauc

SEQ ID NO: 1504926 - RNA, 19 nt, Homo sapiens
  misc_RNA (1)...(19): siRNA sense strand
ggaaauggcucuaaauuau

SEQ ID NO: 1504927 - RNA, 19 nt, Homo sapiens
  misc_RNA (1)...(19): siRNA sense strand
ggagauagcauucauaaga

SEQ ID NO: 1504928 - RNA, 19 nt, Homo sapiens
  misc_RNA (1)...(19): siRNA sense strand
gaaaagaucucccuaaauc

SEQ ID NO: 1504929 - RNA, 19 nt, Homo sapiens
  misc_RNA (1)...(19): siRNA sense strand
gcaguuggaugaaguaaau

SEQ ID NO: 1504930 - RNA, 19 nt, Homo sapiens
  misc_RNA (1)...(19): siRNA sense strand
gcacaugaaauuuccaaua

SEQ ID NO: 1504931 - RNA, 19 nt, Homo sapiens
  misc_RNA (1)...(19): siRNA sense strand
uauagaagcuucaggagaa

SEQ ID NO: 1504932 - RNA, 19 nt, Homo sapiens
  misc_RNA (1)...(19): siRNA sense strand
ccucaagccucaacauuaa

SEQ ID NO: 1504933 - RNA, 19 nt, Homo sapiens
  misc_RNA (1)...(19): siRNA sense strand
caaguugaguacuagguua

SEQ ID NO: 1504934 - RNA, 19 nt, Homo sapiens
  misc_RNA (1)...(19): siRNA sense strand
gaaauacuaaucccaaaga

SEQ ID NO: 1504935 - RNA, 19 nt, Homo sapiens
  misc_RNA (1)...(19): siRNA sense strand
uggaaaggcucaaguguga

SEQ ID NO: 1504936 - RNA, 19 nt, Homo sapiens
  misc_RNA (1)...(19): siRNA sense strand
gaugaugccuugaaagaag

SEQ ID NO: 1504937 - RNA, 19 nt, Homo sapiens
  misc_RNA (1)...(19): siRNA sense strand
gcucuaaauuaucuuggua

SEQ ID NO: 1504938 - RNA, 19 nt, Homo sapiens
  misc_RNA (1)...(19): siRNA sense strand
ggagccaaguugaguacua

SEQ ID NO: 1504939 - RNA, 19 nt, Homo sapiens
  misc_RNA (1)...(19): siRNA sense strand
gaaaggcucaagugugaaa

SEQ ID NO: 1504940 - RNA, 19 nt, Homo sapiens
  misc_RNA (1)...(19): siRNA sense strand
gagaugaugccuugaaaga

SEQ ID NO: 1504941 - RNA, 19 nt, Homo sapiens
  misc_RNA (1)...(19): siRNA sense strand
agaagcagaugaaauggaa

SEQ ID NO: 1504942 - RNA, 19 nt, Homo sapiens
  misc_RNA (1)...(19): siRNA sense strand
guacagauuccaauuacuu

SEQ ID NO: 1504943 - RNA, 19 nt, Homo sapiens
  misc_RNA (1)...(19): siRNA sense strand
uggaaauggcucuaaauua

SEQ ID NO: 1504944 - RNA, 19 nt, Homo sapiens
  misc_RNA (1)...(19): siRNA sense strand
gaaaaucugucauguacau

SEQ ID NO: 1504945 - RNA, 19 nt, Homo sapiens
  misc_RNA (1)...(19): siRNA sense strand
gcucaagugugaaagagau

SEQ ID NO: 1504946 - RNA, 19 nt, Homo sapiens
  misc_RNA (1)...(19): siRNA sense strand
ucauguacaucacuuauag

SEQ ID NO: 1504947 - RNA, 19 nt, Homo sapiens
  misc_RNA (1)...(19): siRNA sense strand
gaaauggcucuaaauuauc

SEQ ID NO: 1504948 - RNA, 19 nt, Homo sapiens
  misc_RNA (1)...(19): siRNA sense strand
gcaaguacaagcagacuca

SEQ ID NO: 1504949 - RNA, 19 nt, Homo sapiens
  misc_RNA (1)...(19): siRNA sense strand
gagauagcauucauaagac

SEQ ID NO: 1504950 - RNA, 19 nt, Homo sapiens
  misc_RNA (1)...(19): siRNA sense strand
caacaaaacaguacagauu

SEQ ID NO: 1504951 - RNA, 19 nt, Homo sapiens
  misc_RNA (1)...(19): siRNA sense strand
guacuguggguuugucuaa

SEQ ID NO: 1504952 - RNA, 19 nt, Homo sapiens
  misc_RNA (1)...(19): siRNA sense strand
acaguacagauuccaauua

SEQ ID NO: 1504953 - RNA, 19 nt, Homo sapiens
  misc_RNA (1)...(19): siRNA sense strand
uaauacagauguugcuucu

SEQ ID NO: 1504954 - RNA, 19 nt, Homo sapiens
  misc_RNA (1)...(19): siRNA sense strand
acuguggguuugucuaaua

SEQ ID NO: 1504955 - RNA, 19 nt, Homo sapiens
  misc_RNA (1)...(19): siRNA sense strand
gcagagaaacuggaaaugg

SEQ ID NO: 1504956 - RNA, 19 nt, Homo sapiens
  misc_RNA (1)...(19): siRNA sense strand
gccucaacauuaagucuuu

SEQ ID NO: 1504957 - RNA, 19 nt, Homo sapiens
  misc_RNA (1)...(19): siRNA sense strand
gaaauggaaaggcucaagu

SEQ ID NO: 1504958 - RNA, 19 nt, Homo sapiens
  misc_RNA (1)...(19): siRNA sense strand
guauucagcccacaaagga

SEQ ID NO: 1504959 - RNA, 19 nt, Homo sapiens
  misc_RNA (1)...(19): siRNA sense strand
gagccaaguugaguacuag

SEQ ID NO: 1504960 - RNA, 19 nt, Homo sapiens
  misc_RNA (1)...(19): siRNA sense strand
aagagaugaugccuugaaa

SEQ ID NO: 1504961 - RNA, 19 nt, Homo sapiens
  misc_RNA (1)...(19): siRNA sense strand
cgacaacauucagccagaa

SEQ ID NO: 1504962 - RNA, 19 nt, Homo sapiens
  misc_RNA (1)...(19): siRNA sense strand
caguacagauuccaauuac

SEQ ID NO: 1504963 - RNA, 19 nt, Homo sapiens
  misc_RNA (1)...(19): siRNA sense strand
gcuucugccuggacugaaa

SEQ ID NO: 1504964 - RNA, 19 nt, Homo sapiens
  misc_RNA (1)...(19): siRNA sense strand
aagaaaagaucucccuaaa

SEQ ID NO: 1504965 - RNA, 19 nt, Homo sapiens
  misc_RNA (1)...(19): siRNA sense strand
aaagagaugaugccuugaa

SEQ ID NO: 1504966 - RNA, 19 nt, Homo sapiens
  misc_RNA (1)...(19): siRNA sense strand
gaccucaagccucaacauu

SEQ ID NO: 1504967 - RNA, 19 nt, Homo sapiens
  misc_RNA (1)...(19): siRNA sense strand
cugaaauacuaaucccaaa

SEQ ID NO: 1504968 - RNA, 19 nt, Homo sapiens
  misc_RNA (1)...(19): siRNA sense strand
ugggagauagcauucauaa

SEQ ID NO: 1504969 - RNA, 19 nt, Homo sapiens
  misc_RNA (1)...(19): siRNA sense strand
aaaucccucuguucgcuuu

SEQ ID NO: 1504970 - RNA, 19 nt, Homo sapiens
  misc_RNA (1)...(19): siRNA sense strand
ggguuugucuaauacagau

SEQ ID NO: 1504971 - RNA, 19 nt, Homo sapiens
  misc_RNA (1)...(19): siRNA sense strand
gacaacauucagccagaaa

SEQ ID NO: 1504972 - RNA, 19 nt, Homo sapiens
  misc_RNA (1)...(19): siRNA sense strand
ccagguugccagaaacuug

SEQ ID NO: 1504973 - RNA, 19 nt, Homo sapiens
  misc_RNA (1)...(19): siRNA sense strand
gaccucauccacucccaaa

SEQ ID NO: 1504974 - RNA, 19 nt, Homo sapiens
  misc_RNA (1)...(19): siRNA sense strand
guugaguacuagguuagaa

SEQ ID NO: 1504975 - RNA, 19 nt, Homo sapiens
  misc_RNA (1)...(19): siRNA sense strand
caagaaaagaucucccuaa

SEQ ID NO: 1504976 - RNA, 19 nt, Homo sapiens
  misc_RNA (1)...(19): siRNA sense strand
aaacaguacagauuccaau

SEQ ID NO: 1504977 - RNA, 19 nt, Homo sapiens
  misc_RNA (1)...(19): siRNA sense strand
ccaaguugaguacuagguu

SEQ ID NO: 1504978 - RNA, 19 nt, Homo sapiens
  misc_RNA (1)...(19): siRNA sense strand
aaacuggaaauggcucuaa

SEQ ID NO: 1504979 - RNA, 19 nt, Homo sapiens
  misc_RNA (1)...(19): siRNA sense strand
aauuaugggcuacaagaaa

SEQ ID NO: 1504980 - RNA, 19 nt, Homo sapiens
  misc_RNA (1)...(19): siRNA sense strand
gucauguacaucacuuaua

SEQ ID NO: 1504981 - RNA, 19 nt, Homo sapiens
  misc_RNA (1)...(19): siRNA sense strand
cuggaaauggcucuaaauu

SEQ ID NO: 1504982 - RNA, 19 nt, Homo sapiens
  misc_RNA (1)...(19): siRNA sense strand
cagcuucuuccuugugauu

SEQ ID NO: 1504983 - RNA, 19 nt, Homo sapiens
  misc_RNA (1)...(19): siRNA sense strand
gauagcauucauaagacaa

SEQ ID NO: 1504984 - RNA, 19 nt, Homo sapiens
  misc_RNA (1)...(19): siRNA sense strand
gaaacuggaaauggcucua

SEQ ID NO: 1504985 - RNA, 19 nt, Homo sapiens
  misc_RNA (1)...(19): siRNA sense strand
aggagaauauggaccucaa

SEQ ID NO: 1504986 - RNA, 19 nt, Homo sapiens
  misc_RNA (1)...(19): siRNA sense strand
gcuugcaguuggaugaagu

SEQ ID NO: 1504987 - RNA, 19 nt, Homo sapiens
  misc_RNA (1)...(19): siRNA sense strand
uaaggcagagaaacuggaa

SEQ ID NO: 1504988 - RNA, 19 nt, Homo sapiens
  misc_RNA (1)...(19): siRNA sense strand
agauagcauucauaagaca

SEQ ID NO: 1504989 - RNA, 19 nt, Homo sapiens
  misc_RNA (1)...(19): siRNA sense strand
agauuccaauuacuucaga

SEQ ID NO: 1504990 - RNA, 19 nt, Homo sapiens
  misc_RNA (1)...(19): siRNA sense strand
accucaagccucaacauua

SEQ ID NO: 1504991 - RNA, 19 nt, Homo sapiens
  misc_RNA (1)...(19): siRNA sense strand
gauuccaauuacuucagaa

SEQ ID NO: 1504992 - RNA, 19 nt, Homo sapiens
  misc_RNA (1)...(19): siRNA sense strand
uguaucauuugaagaagca

SEQ ID NO: 1504993 - RNA, 19 nt, Homo sapiens
  misc_RNA (1)...(19): siRNA sense strand
gaaagagaugaugccuuga

SEQ ID NO: 1504994 - RNA, 19 nt, Homo sapiens
  misc_RNA (1)...(19): siRNA sense strand
cagaagcagaugaaaugga

SEQ ID NO: 1504995 - RNA, 19 nt, Homo sapiens
  misc_RNA (1)...(19): siRNA sense strand
cacaaaggaacaacaccaa

SEQ ID NO: 1504996 - RNA, 19 nt, Homo sapiens
  misc_RNA (1)...(19): siRNA sense strand
gaagcagaugaaauggaaa

SEQ ID NO: 1504997 - RNA, 19 nt, Homo sapiens
  misc_RNA (1)...(19): siRNA sense strand
ugguguaucauuugaagaa

SEQ ID NO: 1504998 - RNA, 19 nt, Homo sapiens
  misc_RNA (1)...(19): siRNA sense strand
aacuggaaauggcucuaaa

SEQ ID NO: 1504999 - RNA, 19 nt, Homo sapiens
  misc_RNA (1)...(19): siRNA sense strand
ggaaaggcucaagugugaa

SEQ ID NO: 1505000 - RNA, 19 nt, Homo sapiens
  misc_RNA (1)...(19): siRNA sense strand
ccugagacagcaaguacaa

SEQ ID NO: 1505001 - RNA, 19 nt, Homo sapiens
  misc_RNA (1)...(19): siRNA sense strand
gguauucagcccacaaagg

SEQ ID NO: 1505002 - RNA, 19 nt, Homo sapiens
  misc_RNA (1)...(19): siRNA sense strand
ccaauuacuucagaaaaca

SEQ ID NO: 1505003 - RNA, 19 nt, Homo sapiens
  misc_RNA (1)...(19): siRNA sense strand
ggaccucaagccucaacau

SEQ ID NO: 1505004 - RNA, 19 nt, Homo sapiens
  misc_RNA (1)...(19): siRNA sense strand
ggaaugauguguucaguga

SEQ ID NO: 1505005 - RNA, 19 nt, Homo sapiens
  misc_RNA (1)...(19): siRNA sense strand
cgaaagaguuuguaaagaa

SEQ ID NO: 1505006 - RNA, 19 nt, Homo sapiens
  misc_RNA (1)...(19): siRNA sense strand
gcaacaagcacaucaaauu

SEQ ID NO: 1505007 - RNA, 19 nt, Homo sapiens
  misc_RNA (1)...(19): siRNA sense strand
gaagaugcuuacagaguuu

SEQ ID NO: 1505008 - RNA, 19 nt, Homo sapiens
  misc_RNA (1)...(19): siRNA sense strand
aaacauagguggccugaga

SEQ ID NO: 1505009 - RNA, 19 nt, Homo sapiens
  misc_RNA (1)...(19): siRNA sense strand
gaccagaccuucuuucuca

SEQ ID NO: 1505010 - RNA, 19 nt, Homo sapiens
  misc_RNA (1)...(19): siRNA sense strand
agaaaucgguuugaaguua

SEQ ID NO: 1505011 - RNA, 19 nt, Homo sapiens
  misc_RNA (1)...(19): siRNA sense strand
gaaaaucgcugcugagaau

SEQ ID NO: 1505012 - RNA, 19 nt, Homo sapiens
  misc_RNA (1)...(19): siRNA sense strand
gagaauagacuucaucaug

SEQ ID NO: 1505013 - RNA, 19 nt, Homo sapiens
  misc_RNA (1)...(19): siRNA sense strand
caacaagcacaucaaauuu

SEQ ID NO: 1505014 - RNA, 19 nt, Homo sapiens
  misc_RNA (1)...(19): siRNA sense strand
gaauagacuucaucaugug

SEQ ID NO: 1505015 - RNA, 19 nt, Homo sapiens
  misc_RNA (1)...(19): siRNA sense strand
gagcugggauggccacuga

SEQ ID NO: 1505016 - RNA, 19 nt, Homo sapiens
  misc_RNA (1)...(19): siRNA sense strand
caucaaguguccuacguaa

SEQ ID NO: 1505017 - RNA, 19 nt, Homo sapiens
  misc_RNA (1)...(19): siRNA sense strand
gaaaucgguuugaaguuag

SEQ ID NO: 1505018 - RNA, 19 nt, Homo sapiens
  misc_RNA (1)...(19): siRNA sense strand
guaaaggaguauuggaaug

SEQ ID NO: 1505019 - RNA, 19 nt, Homo sapiens
  misc_RNA (1)...(19): siRNA sense strand
cgacaaagacugugaagau

SEQ ID NO: 1505020 - RNA, 19 nt, Homo sapiens
  misc_RNA (1)...(19): siRNA sense strand
gaacauuuccuucuucagu

SEQ ID NO: 1505021 - RNA, 19 nt, Homo sapiens
  misc_RNA (1)...(19): siRNA sense strand
ugacauaguuugcaacaag

SEQ ID NO: 1505022 - RNA, 19 nt, Homo sapiens
  misc_RNA (1)...(19): siRNA sense strand
ugaagaugcuuacagaguu

SEQ ID NO: 1505023 - RNA, 19 nt, Homo sapiens
  misc_RNA (1)...(19): siRNA sense strand
agaauagacuucaucaugu

SEQ ID NO: 1505024 - RNA, 19 nt, Homo sapiens
  misc_RNA (1)...(19): siRNA sense strand
gacaaagacugugaagaug

SEQ ID NO: 1505025 - RNA, 19 nt, Homo sapiens
  misc_RNA (1)...(19): siRNA sense strand
agacaucccuuuccaucaa

SEQ ID NO: 1505026 - RNA, 19 nt, Homo sapiens
  misc_RNA (1)...(19): siRNA sense strand
ggucuguacugccgacaaa

SEQ ID NO: 1505027 - RNA, 19 nt, Homo sapiens
  misc_RNA (1)...(19): siRNA sense strand
aaagguugguuccuguaua

SEQ ID NO: 1505028 - RNA, 19 nt, Homo sapiens
  misc_RNA (1)...(19): siRNA sense strand
gggauuaacgaaagaguuu

SEQ ID NO: 1505029 - RNA, 19 nt, Homo sapiens
  misc_RNA (1)...(19): siRNA sense strand
gaacugggacucacuggau

SEQ ID NO: 1505030 - RNA, 19 nt, Homo sapiens
  misc_RNA (1)...(19): siRNA sense strand
uuacagaguuugccagauc

SEQ ID NO: 1505031 - RNA, 19 nt, Homo sapiens
  misc_RNA (1)...(19): siRNA sense strand
gaaguuagaaaugcgguaa

SEQ ID NO: 1505032 - RNA, 19 nt, Homo sapiens
  misc_RNA (1)...(19): siRNA sense strand
uaaaggaguauuggaauga

SEQ ID NO: 1505033 - RNA, 19 nt, Homo sapiens
  misc_RNA (1)...(19): siRNA sense strand
acaagcacaucaaauuuag

SEQ ID NO: 1505034 - RNA, 19 nt, Homo sapiens
  misc_RNA (1)...(19): siRNA sense strand
guauuggaaugauguguuc

SEQ ID NO: 1505035 - RNA, 19 nt, Homo sapiens
  misc_RNA (1)...(19): siRNA sense strand
gaucuuagacaucccuuuc

SEQ ID NO: 1505036 - RNA, 19 nt, Homo sapiens
  misc_RNA (1)...(19): siRNA sense strand
gaagaggaauuuugaacau

SEQ ID NO: 1505037 - RNA, 19 nt, Homo sapiens
  misc_RNA (1)...(19): siRNA sense strand
cauagaagacaauaagguu

SEQ ID NO: 1505038 - RNA, 19 nt, Homo sapiens
  misc_RNA (1)...(19): siRNA sense strand
gggacucacuggaugaaca

SEQ ID NO: 1505039 - RNA, 19 nt, Homo sapiens
  misc_RNA (1)...(19): siRNA sense strand
gagcagaagcacguuaaga

SEQ ID NO: 1505040 - RNA, 19 nt, Homo sapiens
  misc_RNA (1)...(19): siRNA sense strand
ccuggaagaugaagaaguc

SEQ ID NO: 1505041 - RNA, 19 nt, Homo sapiens
  misc_RNA (1)...(19): siRNA sense strand
aacauuuccuucuucagua

SEQ ID NO: 1505042 - RNA, 19 nt, Homo sapiens
  misc_RNA (1)...(19): siRNA sense strand
gcagaagcacguuaagaag

SEQ ID NO: 1505043 - RNA, 19 nt, Homo sapiens
  misc_RNA (1)...(19): siRNA sense strand
caaagacugugaagaugcu

SEQ ID NO: 1505044 - RNA, 19 nt, Homo sapiens
  misc_RNA (1)...(19): siRNA sense strand
gaacacauaaagguugguu

SEQ ID NO: 1505045 - RNA, 19 nt, Homo sapiens
  misc_RNA (1)...(19): siRNA sense strand
ucaaguguccuacguaaag

SEQ ID NO: 1505046 - RNA, 19 nt, Homo sapiens
  misc_RNA (1)...(19): siRNA sense strand
ucagaaaucgguuugaagu

SEQ ID NO: 1505047 - RNA, 19 nt, Homo sapiens
  misc_RNA (1)...(19): siRNA sense strand
ugacagggguguuuaugaa

SEQ ID NO: 1505048 - RNA, 19 nt, Homo sapiens
  misc_RNA (1)...(19): siRNA sense strand
ccagagagcaaacauaggu

SEQ ID NO: 1505049 - RNA, 19 nt, Homo sapiens
  misc_RNA (1)...(19): siRNA sense strand
ucccaauccugacauaguu

SEQ ID NO: 1505050 - RNA, 19 nt, Homo sapiens
  misc_RNA (1)...(19): siRNA sense strand
ggccagagagcaaacauag

SEQ ID NO: 1505051 - RNA, 19 nt, Homo sapiens
  misc_RNA (1)...(19): siRNA sense strand
acgaaagaguuuguaaaga

SEQ ID NO: 1505052 - RNA, 19 nt, Homo sapiens
  misc_RNA (1)...(19): siRNA sense strand
ggagaaggacagcgucaag

SEQ ID NO: 1505053 - RNA, 19 nt, Homo sapiens
  misc_RNA (1)...(19): siRNA sense strand
gguacgugguggagaagga

SEQ ID NO: 1505054 - RNA, 19 nt, Homo sapiens
  misc_RNA (1)...(19): siRNA sense strand
ccugguacgugguggagaa

SEQ ID NO: 1505055 - RNA, 19 nt, Homo sapiens
  misc_RNA (1)...(19): siRNA sense strand
gugaagaugcuuacagagu

SEQ ID NO: 1505056 - RNA, 19 nt, Homo sapiens
  misc_RNA (1)...(19): siRNA sense strand
acaggucacuaugcaagaa

SEQ ID NO: 1505057 - RNA, 19 nt, Homo sapiens
  misc_RNA (1)...(19): siRNA sense strand
gugcugacccucaaucaag

SEQ ID NO: 1505058 - RNA, 19 nt, Homo sapiens
  misc_RNA (1)...(19): siRNA sense strand
gacucccaauccugacaua

SEQ ID NO: 1505059 - RNA, 19 nt, Homo sapiens
  misc_RNA (1)...(19): siRNA sense strand
gaguuugccagaucuuaga

SEQ ID NO: 1505060 - RNA, 19 nt, Homo sapiens
  misc_RNA (1)...(19): siRNA sense strand
gggccagagagcaaacaua

SEQ ID NO: 1505061 - RNA, 19 nt, Homo sapiens
  misc_RNA (1)...(19): siRNA sense strand
guugguuccuguauaccuu

SEQ ID NO: 1505062 - RNA, 19 nt, Homo sapiens
  misc_RNA (1)...(19): siRNA sense strand
gaacauggggucuguacug

SEQ ID NO: 1505063 - RNA, 19 nt, Homo sapiens
  misc_RNA (1)...(19): siRNA sense strand
cagaguuugccagaucuua

SEQ ID NO: 1505064 - RNA, 19 nt, Homo sapiens
  misc_RNA (1)...(19): siRNA sense strand
acauuuccuucuucaguau

SEQ ID NO: 1505065 - RNA, 19 nt, Homo sapiens
  misc_RNA (1)...(19): siRNA sense strand
aaaggaguauuggaaugau

SEQ ID NO: 1505066 - RNA, 19 nt, Homo sapiens
  misc_RNA (1)...(19): siRNA sense strand
uaaagguugguuccuguau

SEQ ID NO: 1505067 - RNA, 19 nt, Homo sapiens
  misc_RNA (1)...(19): siRNA sense strand
gauuaacgaaagaguuugu

SEQ ID NO: 1505068 - RNA, 19 nt, Homo sapiens
  misc_RNA (1)...(19): siRNA sense strand
gguuugaaguuagaaaugc

SEQ ID NO: 1505069 - RNA, 19 nt, Homo sapiens
  misc_RNA (1)...(19): siRNA sense strand
cagaaaucgguuugaaguu

SEQ ID NO: 1505070 - RNA, 19 nt, Homo sapiens
  misc_RNA (1)...(19): siRNA sense strand
agcagaagcacguuaagaa

SEQ ID NO: 1505071 - RNA, 19 nt, Homo sapiens
  misc_RNA (1)...(19): siRNA sense strand
aaaggaaggacucccaauc

SEQ ID NO: 1505072 - RNA, 19 nt, Homo sapiens
  misc_RNA (1)...(19): siRNA sense strand
ccagugacagcccagaaga

SEQ ID NO: 1505073 - RNA, 19 nt, Homo sapiens
  misc_RNA (1)...(19): siRNA sense strand
cguaaaggaguauuggaau

SEQ ID NO: 1505074 - RNA, 19 nt, Homo sapiens
  misc_RNA (1)...(19): siRNA sense strand
aagguugguuccuguauac

SEQ ID NO: 1505075 - RNA, 19 nt, Homo sapiens
  misc_RNA (1)...(19): siRNA sense strand
ccauagaagacaauaaggu

SEQ ID NO: 1505076 - RNA, 19 nt, Homo sapiens
  misc_RNA (1)...(19): siRNA sense strand
ggacucacuggaugaacau

SEQ ID NO: 1505077 - RNA, 19 nt, Homo sapiens
  misc_RNA (1)...(19): siRNA sense strand
aaaucgguuugaaguuaga

SEQ ID NO: 1505078 - RNA, 19 nt, Homo sapiens
  misc_RNA (1)...(19): siRNA sense strand
ugagagagcccugguacgu

SEQ ID NO: 1505079 - RNA, 19 nt, Homo sapiens
  misc_RNA (1)...(19): siRNA sense strand
ccaucaaguguccuacgua

SEQ ID NO: 1505080 - RNA, 19 nt, Homo sapiens
  misc_RNA (1)...(19): siRNA sense strand
ccuggucacuuuauuucca

SEQ ID NO: 1505081 - RNA, 19 nt, Homo sapiens
  misc_RNA (1)...(19): siRNA sense strand
gcugagaauagacuucauc

SEQ ID NO: 1505082 - RNA, 19 nt, Homo sapiens
  misc_RNA (1)...(19): siRNA sense strand
gacaucccuuuccaucaag

SEQ ID NO: 1505083 - RNA, 19 nt, Homo sapiens
  misc_RNA (1)...(19): siRNA sense strand
caaguguccuacguaaagg

SEQ ID NO: 1505084 - RNA, 19 nt, Homo sapiens
  misc_RNA (1)...(19): siRNA sense strand
ccaauccugacauaguuug

SEQ ID NO: 1505085 - RNA, 19 nt, Homo sapiens
  misc_RNA (1)...(19): siRNA sense strand
aaugauguguucagugacu

SEQ ID NO: 1505086 - RNA, 19 nt, Homo sapiens
  misc_RNA (1)...(19): siRNA sense strand
ugacagcccagaagauggu

SEQ ID NO: 1505087 - RNA, 19 nt, Homo sapiens
  misc_RNA (1)...(19): siRNA sense strand
gcugggauggccacugaga

SEQ ID NO: 1505088 - RNA, 19 nt, Homo sapiens
  misc_RNA (1)...(19): siRNA sense strand
uuugaacauuuccuucuuc

SEQ ID NO: 1505089 - RNA, 19 nt, Homo sapiens
  misc_RNA (1)...(19): siRNA sense strand
ggaagaggaauuuugaaca

SEQ ID NO: 1505090 - RNA, 19 nt, Homo sapiens
  misc_RNA (1)...(19): siRNA sense strand
aaucgcugcugagaauaga

SEQ ID NO: 1505091 - RNA, 19 nt, Homo sapiens
  misc_RNA (1)...(19): siRNA sense strand
aacgaaagaguuuguaaag

SEQ ID NO: 1505092 - RNA, 19 nt, Homo sapiens
  misc_RNA (1)...(19): siRNA sense strand
cagccagguuucccaggau

SEQ ID NO: 1505093 - RNA, 19 nt, Homo sapiens
  misc_RNA (1)...(19): siRNA sense strand
ugccacaggucacuaugca

SEQ ID NO: 1505094 - RNA, 19 nt, Homo sapiens
  misc_RNA (1)...(19): siRNA sense strand
gugcauaccuggacaguga

SEQ ID NO: 1505095 - RNA, 19 nt, Homo sapiens
  misc_RNA (1)...(19): siRNA sense strand
gcagagaucaccuucaaga

SEQ ID NO: 1505096 - RNA, 19 nt, Homo sapiens
  misc_RNA (1)...(19): siRNA sense strand
uggcagagaucaccuucaa

SEQ ID NO: 1505097 - RNA, 19 nt, Homo sapiens
  misc_RNA (1)...(19): siRNA sense strand
agaagagggugcagaagga

SEQ ID NO: 1505098 - RNA, 19 nt, Homo sapiens
  misc_RNA (1)...(19): siRNA sense strand
agauggaggugcuggagaa

SEQ ID NO: 1505099 - RNA, 19 nt, Homo sapiens
  misc_RNA (1)...(19): siRNA sense strand
gaaggaggccaacccuaca

SEQ ID NO: 1505100 - RNA, 19 nt, Homo sapiens
  misc_RNA (1)...(19): siRNA sense strand
guaagacgugcggagaaua

SEQ ID NO: 1505101 - RNA, 19 nt, Homo sapiens
  misc_RNA (1)...(19): siRNA sense strand
cagcaacggcagcaacuga

SEQ ID NO: 1505102 - RNA, 19 nt, Homo sapiens
  misc_RNA (1)...(19): siRNA sense strand
ugagccaacugggugcaua

SEQ ID NO: 1505103 - RNA, 19 nt, Homo sapiens
  misc_RNA (1)...(19): siRNA sense strand
ccaaagaccggcaguacgu

SEQ ID NO: 1505104 - RNA, 19 nt, Homo sapiens
  misc_RNA (1)...(19): siRNA sense strand
ggacuccgacucagaggau

SEQ ID NO: 1505105 - RNA, 19 nt, Homo sapiens
  misc_RNA (1)...(19): siRNA sense strand
caucaaagauccccaaacu

SEQ ID NO: 1505106 - RNA, 19 nt, Homo sapiens
  misc_RNA (1)...(19): siRNA sense strand
ucaaagauccccaaacuca

SEQ ID NO: 1505107 - RNA, 19 nt, Homo sapiens
  misc_RNA (1)...(19): siRNA sense strand
uguaagacgugcggagaau

SEQ ID NO: 1505108 - RNA, 19 nt, Homo sapiens
  misc_RNA (1)...(19): siRNA sense strand
agagaucaccuucaagaca

SEQ ID NO: 1505109 - RNA, 19 nt, Homo sapiens
  misc_RNA (1)...(19): siRNA sense strand
gcggagaauacaucuacaa

SEQ ID NO: 1505110 - RNA, 19 nt, Homo sapiens
  misc_RNA (1)...(19): siRNA sense strand
ggaccaaggacuccaagcu

SEQ ID NO: 1505111 - RNA, 19 nt, Homo sapiens
  misc_RNA (1)...(19): siRNA sense strand
uaagacgugcggagaauac

SEQ ID NO: 1505112 - RNA, 19 nt, Homo sapiens
  misc_RNA (1)...(19): siRNA sense strand
gaauuuccaggcugagaag

SEQ ID NO: 1505113 - RNA, 19 nt, Homo sapiens
  misc_RNA (1)...(19): siRNA sense strand
gacagacccugaaaacaca

SEQ ID NO: 1505114 - RNA, 19 nt, Homo sapiens
  misc_RNA (1)...(19): siRNA sense strand
ccuucaacaugagguguaa

SEQ ID NO: 1505115 - RNA, 19 nt, Homo sapiens
  misc_RNA (1)...(19): siRNA sense strand
gugcggagaauacaucuac

SEQ ID NO: 1505116 - RNA, 19 nt, Homo sapiens
  misc_RNA (1)...(19): siRNA sense strand
gcauggagccacgcggaau

SEQ ID NO: 1505117 - RNA, 19 nt, Homo sapiens
  misc_RNA (1)...(19): siRNA sense strand
gagcgaaaaguauuaaaca

SEQ ID NO: 1505118 - RNA, 19 nt, Homo sapiens
  misc_RNA (1)...(19): siRNA sense strand
cauggagccacgcggaauu

SEQ ID NO: 1505119 - RNA, 19 nt, Homo sapiens
  misc_RNA (1)...(19): siRNA sense strand
gggaggacgaggagcugaa

SEQ ID NO: 1505120 - RNA, 19 nt, Homo sapiens
  misc_RNA (1)...(19): siRNA sense strand
cgaggcuggucguggugaa

SEQ ID NO: 1505121 - RNA, 19 nt, Homo sapiens
  misc_RNA (1)...(19): siRNA sense strand
uggagaaccggaccaagga

SEQ ID NO: 1505122 - RNA, 19 nt, Homo sapiens
  misc_RNA (1)...(19): siRNA sense strand
ggaaaugccuucagcaaga

SEQ ID NO: 1505123 - RNA, 19 nt, Homo sapiens
  misc_RNA (1)...(19): siRNA sense strand
ugacaaaucugcccuuauu

SEQ ID NO: 1505124 - RNA, 19 nt, Homo sapiens
  misc_RNA (1)...(19): siRNA sense strand
gaaaucguaucuuguugua

SEQ ID NO: 1505125 - RNA, 19 nt, Homo sapiens
  misc_RNA (1)...(19): siRNA sense strand
gguagaaucuccauuguga

SEQ ID NO: 1505126 - RNA, 19 nt, Homo sapiens
  misc_RNA (1)...(19): siRNA sense strand
uaagagaucuacccucauu

SEQ ID NO: 1505127 - RNA, 19 nt, Homo sapiens
  misc_RNA (1)...(19): siRNA sense strand
acaaggaaauccaagauaa

SEQ ID NO: 1505128 - RNA, 19 nt, Homo sapiens
  misc_RNA (1)...(19): siRNA sense strand
agagaaaccuuaugaaugu

SEQ ID NO: 1505129 - RNA, 19 nt, Homo sapiens
  misc_RNA (1)...(19): siRNA sense strand
guaagagaaugaacacaaa

SEQ ID NO: 1505130 - RNA, 19 nt, Homo sapiens
  misc_RNA (1)...(19): siRNA sense strand
gaaagauuccugauggaua

SEQ ID NO: 1505131 - RNA, 19 nt, Homo sapiens
  misc_RNA (1)...(19): siRNA sense strand
gaaaggaaaccaaaugaau

SEQ ID NO: 1505132 - RNA, 19 nt, Homo sapiens
  misc_RNA (1)...(19): siRNA sense strand
gcacaucagauaacucaua

SEQ ID NO: 1505133 - RNA, 19 nt, Homo sapiens
  misc_RNA (1)...(19): siRNA sense strand
ggagaaauccuaugagugu

SEQ ID NO: 1505134 - RNA, 19 nt, Homo sapiens
  misc_RNA (1)...(19): siRNA sense strand
ggaaauccuucugccauaa

SEQ ID NO: 1505135 - RNA, 19 nt, Homo sapiens
  misc_RNA (1)...(19): siRNA sense strand
ggagaaaccauaugaaugu

SEQ ID NO: 1505136 - RNA, 19 nt, Homo sapiens
  misc_RNA (1)...(19): siRNA sense strand
gaacuucacccaagaggaa

SEQ ID NO: 1505137 - RNA, 19 nt, Homo sapiens
  misc_RNA (1)...(19): siRNA sense strand
gagagaagcccuaugaaug

SEQ ID NO: 1505138 - RNA, 19 nt, Homo sapiens
  misc_RNA (1)...(19): siRNA sense strand
agacauugaugaugccuua

SEQ ID NO: 1505139 - RNA, 19 nt, Homo sapiens
  misc_RNA (1)...(19): siRNA sense strand
gggaaauccuucugccaua

SEQ ID NO: 1505140 - RNA, 19 nt, Homo sapiens
  misc_RNA (1)...(19): siRNA sense strand
gcaauucucauuacacaaa

SEQ ID NO: 1505141 - RNA, 19 nt, Homo sapiens
  misc_RNA (1)...(19): siRNA sense strand
ggagaagccuuacgaaugc

SEQ ID NO: 1505142 - RNA, 19 nt, Homo sapiens
  misc_RNA (1)...(19): siRNA sense strand
gagagaaaccuuaugaaug

SEQ ID NO: 1505143 - RNA, 19 nt, Homo sapiens
  misc_RNA (1)...(19): siRNA sense strand
gaaguucuccuuuguugaa

SEQ ID NO: 1505144 - RNA, 19 nt, Homo sapiens
  misc_RNA (1)...(19): siRNA sense strand
gacacaaacuguauucuuc

SEQ ID NO: 1505145 - RNA, 19 nt, Homo sapiens
  misc_RNA (1)...(19): siRNA sense strand
gaggaauucucaaaucaga

SEQ ID NO: 1505146 - RNA, 19 nt, Homo sapiens
  misc_RNA (1)...(19): siRNA sense strand
ggagagagacccuaugaau

SEQ ID NO: 1505147 - RNA, 19 nt, Homo sapiens
  misc_RNA (1)...(19): siRNA sense strand
gagacagacugaaaggaaa

SEQ ID NO: 1505148 - RNA, 19 nt, Homo sapiens
  misc_RNA (1)...(19): siRNA sense strand
ggacagagacccuaugagu

SEQ ID NO: 1505149 - RNA, 19 nt, Homo sapiens
  misc_RNA (1)...(19): siRNA sense strand
gaggagagaagccaaauga

SEQ ID NO: 1505150 - RNA, 19 nt, Homo sapiens
  misc_RNA (1)...(19): siRNA sense strand
gaaaugccuucagcaagaa

SEQ ID NO: 1505151 - RNA, 19 nt, Homo sapiens
  misc_RNA (1)...(19): siRNA sense strand
guacaucagagaauucaua

SEQ ID NO: 1505152 - RNA, 19 nt, Homo sapiens
  misc_RNA (1)...(19): siRNA sense strand
gagagaagccaaaugaaug

SEQ ID NO: 1505153 - RNA, 19 nt, Homo sapiens
  misc_RNA (1)...(19): siRNA sense strand
ucuuacaucuccuuucuua

SEQ ID NO: 1505154 - RNA, 19 nt, Homo sapiens
  misc_RNA (1)...(19): siRNA sense strand
gaaaucagcccucauugca

SEQ ID NO: 1505155 - RNA, 19 nt, Homo sapiens
  misc_RNA (1)...(19): siRNA sense strand
gguccaaguucuguaauuu

SEQ ID NO: 1505156 - RNA, 19 nt, Homo sapiens
  misc_RNA (1)...(19): siRNA sense strand
ggagagaaaccuuaugaau

SEQ ID NO: 1505157 - RNA, 19 nt, Homo sapiens
  misc_RNA (1)...(19): siRNA sense strand
gagaaaccauaugaaugua

SEQ ID NO: 1505158 - RNA, 19 nt, Homo sapiens
  misc_RNA (1)...(19): siRNA sense strand
ggagagaaaccauaugaau

SEQ ID NO: 1505159 - RNA, 19 nt, Homo sapiens
  misc_RNA (1)...(19): siRNA sense strand
gagaaaccauaugaaugua

SEQ ID NO: 1505160 - RNA, 19 nt, Homo sapiens
  misc_RNA (1)...(19): siRNA sense strand
ggaaaccaaaugaauguaa

SEQ ID NO: 1505161 - RNA, 19 nt, Homo sapiens
  misc_RNA (1)...(19): siRNA sense strand
ccaaaugaauguaaggaau

SEQ ID NO: 1505162 - RNA, 19 nt, Homo sapiens
  misc_RNA (1)...(19): siRNA sense strand
gaugaugccuuagagaaga

SEQ ID NO: 1505163 - RNA, 19 nt, Homo sapiens
  misc_RNA (1)...(19): siRNA sense strand
ggagacagacugaaaggaa

SEQ ID NO: 1505164 - RNA, 19 nt, Homo sapiens
  misc_RNA (1)...(19): siRNA sense strand
gaauaguguucccucaaga

SEQ ID NO: 1505165 - RNA, 19 nt, Homo sapiens
  misc_RNA (1)...(19): siRNA sense strand
ggagagaagccaaaugaau

SEQ ID NO: 1505166 - RNA, 19 nt, Homo sapiens
  misc_RNA (1)...(19): siRNA sense strand
gggagaagccuuacgaaug

SEQ ID NO: 1505167 - RNA, 19 nt, Homo sapiens
  misc_RNA (1)...(19): siRNA sense strand
gaacaaggaaauccaagau

SEQ ID NO: 1505168 - RNA, 19 nt, Homo sapiens
  misc_RNA (1)...(19): siRNA sense strand
gaacaucagcgaacucaca

SEQ ID NO: 1505169 - RNA, 19 nt, Homo sapiens
  misc_RNA (1)...(19): siRNA sense strand
gaucuacccucauuguaca

SEQ ID NO: 1505170 - RNA, 19 nt, Homo sapiens
  misc_RNA (1)...(19): siRNA sense strand
caaaucugcccuuauugua

SEQ ID NO: 1505171 - RNA, 19 nt, Homo sapiens
  misc_RNA (1)...(19): siRNA sense strand
gagagaaaccauaugaaug

SEQ ID NO: 1505172 - RNA, 19 nt, Homo sapiens
  misc_RNA (1)...(19): siRNA sense strand
ggagagaagcccuaugaau

SEQ ID NO: 1505173 - RNA, 19 nt, Homo sapiens
  misc_RNA (1)...(19): siRNA sense strand
guacaucagagaacuauau

SEQ ID NO: 1505174 - RNA, 19 nt, Homo sapiens
  misc_RNA (1)...(19): siRNA sense strand
agaaaucccacaaggaaua

SEQ ID NO: 1505175 - RNA, 19 nt, Homo sapiens
  misc_RNA (1)...(19): siRNA sense strand
caccagaacauucagauuu

SEQ ID NO: 1505176 - RNA, 19 nt, Homo sapiens
  misc_RNA (1)...(19): siRNA sense strand
gaggaaagccagcaaucaa

SEQ ID NO: 1505177 - RNA, 19 nt, Homo sapiens
  misc_RNA (1)...(19): siRNA sense strand
ucagaaaucccacaaggaa

SEQ ID NO: 1505178 - RNA, 19 nt, Homo sapiens
  misc_RNA (1)...(19): siRNA sense strand
gagaaaccuuaugaaugua

SEQ ID NO: 1505179 - RNA, 19 nt, Homo sapiens
  misc_RNA (1)...(19): siRNA sense strand
ggaccugacugugaacuuc

SEQ ID NO: 1505180 - RNA, 19 nt, Homo sapiens
  misc_RNA (1)...(19): siRNA sense strand
cgacaccgaagaauucaua

SEQ ID NO: 1505181 - RNA, 19 nt, Homo sapiens
  misc_RNA (1)...(19): siRNA sense strand
gggcaauucucauuacaca

SEQ ID NO: 1505182 - RNA, 19 nt, Homo sapiens
  misc_RNA (1)...(19): siRNA sense strand
caagagggcaauucucauu

SEQ ID NO: 1505183 - RNA, 19 nt, Homo sapiens
  misc_RNA (1)...(19): siRNA sense strand
gaacuacccagacauugau

SEQ ID NO: 1505184 - RNA, 19 nt, Homo sapiens
  misc_RNA (1)...(19): siRNA sense strand
gaauguaacaaaugugaga

SEQ ID NO: 1505185 - RNA, 19 nt, Homo sapiens
  misc_RNA (1)...(19): siRNA sense strand
ggagagaccauaugaaugc

SEQ ID NO: 1505186 - RNA, 19 nt, Homo sapiens
  misc_RNA (1)...(19): siRNA sense strand
gagaaauccuaugagugua

SEQ ID NO: 1505187 - RNA, 19 nt, Homo sapiens
  misc_RNA (1)...(19): siRNA sense strand
caaggaaauccaagauaaa

SEQ ID NO: 1505188 - RNA, 19 nt, Homo sapiens
  misc_RNA (1)...(19): siRNA sense strand
ggagaaucuuuaugagugu

SEQ ID NO: 1505189 - RNA, 19 nt, Homo sapiens
  misc_RNA (1)...(19): siRNA sense strand
gaacauuucaggucacaca

SEQ ID NO: 1505190 - RNA, 19 nt, Homo sapiens
  misc_RNA (1)...(19): siRNA sense strand
gaaauccuaugaguguaau

SEQ ID NO: 1505191 - RNA, 19 nt, Homo sapiens
  misc_RNA (1)...(19): siRNA sense strand
aaagauaccaguuucauuc

SEQ ID NO: 1505192 - RNA, 19 nt, Homo sapiens
  misc_RNA (1)...(19): siRNA sense strand
gagagagacccuaugaaug

SEQ ID NO: 1505193 - RNA, 19 nt, Homo sapiens
  misc_RNA (1)...(19): siRNA sense strand
uagcaaaccagaugugauu

SEQ ID NO: 1505194 - RNA, 19 nt, Homo sapiens
  misc_RNA (1)...(19): siRNA sense strand
gaaaucccacaaggaauaa

SEQ ID NO: 1505195 - RNA, 19 nt, Homo sapiens
  misc_RNA (1)...(19): siRNA sense strand
cagaaguaauuguugcaaa

SEQ ID NO: 1505196 - RNA, 19 nt, Homo sapiens
  misc_RNA (1)...(19): siRNA sense strand
gaagaacaaggaaauccaa

SEQ ID NO: 1505197 - RNA, 19 nt, Homo sapiens
  misc_RNA (1)...(19): siRNA sense strand
gugcaucgaagaagucaua

SEQ ID NO: 1505198 - RNA, 19 nt, Homo sapiens
  misc_RNA (1)...(19): siRNA sense strand
ccauaugaaugcaaugaau

SEQ ID NO: 1505199 - RNA, 19 nt, Homo sapiens
  misc_RNA (1)...(19): siRNA sense strand
uaagucaacacucacuaua

SEQ ID NO: 1505200 - RNA, 19 nt, Homo sapiens
  misc_RNA (1)...(19): siRNA sense strand
caaauuggagcaaggagaa

SEQ ID NO: 1505201 - RNA, 19 nt, Homo sapiens
  misc_RNA (1)...(19): siRNA sense strand
caucuccuuucuuacauaa

SEQ ID NO: 1505202 - RNA, 19 nt, Homo sapiens
  misc_RNA (1)...(19): siRNA sense strand
gaagccaaaugaauguaag

SEQ ID NO: 1505203 - RNA, 19 nt, Homo sapiens
  misc_RNA (1)...(19): siRNA sense strand
aacaaccguuugacuauaa

SEQ ID NO: 1505204 - RNA, 19 nt, Homo sapiens
  misc_RNA (1)...(19): siRNA sense strand
gauacaauccaaugaggaa

SEQ ID NO: 1505205 - RNA, 19 nt, Homo sapiens
  misc_RNA (1)...(19): siRNA sense strand
ggaaauccaagauaaacau

SEQ ID NO: 1505206 - RNA, 19 nt, Homo sapiens
  misc_RNA (1)...(19): siRNA sense strand
gagaaucuuuaugagugua

SEQ ID NO: 1505207 - RNA, 19 nt, Homo sapiens
  misc_RNA (1)...(19): siRNA sense strand
gaaugaacacaaaggagaa

SEQ ID NO: 1505208 - RNA, 19 nt, Homo sapiens
  misc_RNA (1)...(19): siRNA sense strand
ggagaacuacagcaacuug

SEQ ID NO: 1505209 - RNA, 19 nt, Homo sapiens
  misc_RNA (1)...(19): siRNA sense strand
aaucguaucuuguuguaca

SEQ ID NO: 1505210 - RNA, 19 nt, Homo sapiens
  misc_RNA (1)...(19): siRNA sense strand
ccacaaaucaaacuuucuu

SEQ ID NO: 1505211 - RNA, 19 nt, Homo sapiens
  misc_RNA (1)...(19): siRNA sense strand
agagaaaccauaugaaugu

SEQ ID NO: 1505212 - RNA, 19 nt, Homo sapiens
  misc_RNA (1)...(19): siRNA sense strand
cagaguccauagaagaauu

SEQ ID NO: 1505213 - RNA, 19 nt, Homo sapiens
  misc_RNA (1)...(19): siRNA sense strand
gggagaaaccauaugaaug

SEQ ID NO: 1505214 - RNA, 19 nt, Homo sapiens
  misc_RNA (1)...(19): siRNA sense strand
aaacucacaccucauugua

SEQ ID NO: 1505215 - RNA, 19 nt, Homo sapiens
  misc_RNA (1)...(19): siRNA sense strand
gggaugugaugcuggagaa

SEQ ID NO: 1505216 - RNA, 19 nt, Homo sapiens
  misc_RNA (1)...(19): siRNA sense strand
caggagagaagcccuauga

SEQ ID NO: 1505217 - RNA, 19 nt, Homo sapiens
  misc_RNA (1)...(19): siRNA sense strand
gaaguaauuguugcaaaga

SEQ ID NO: 1505218 - RNA, 19 nt, Homo sapiens
  misc_RNA (1)...(19): siRNA sense strand
gagaccauaugaaugcaau

SEQ ID NO: 1505219 - RNA, 19 nt, Homo sapiens
  misc_RNA (1)...(19): siRNA sense strand
gaaucuccauugugaaguc

SEQ ID NO: 1505220 - RNA, 19 nt, Homo sapiens
  misc_RNA (1)...(19): siRNA sense strand
caaaugaauguaaggaaug

SEQ ID NO: 1505221 - RNA, 19 nt, Homo sapiens
  misc_RNA (1)...(19): siRNA sense strand
gcaaagaaaagcaaagaaa

SEQ ID NO: 1505222 - RNA, 19 nt, Homo sapiens
  misc_RNA (1)...(19): siRNA sense strand
gaaguugucuccaccauaa

SEQ ID NO: 1505223 - RNA, 19 nt, Homo sapiens
  misc_RNA (1)...(19): siRNA sense strand
ggacauaccuauuccuuca

SEQ ID NO: 1505224 - RNA, 19 nt, Homo sapiens
  misc_RNA (1)...(19): siRNA sense strand
gaagaaaucgguuauugaa

SEQ ID NO: 1505225 - RNA, 19 nt, Homo sapiens
  misc_RNA (1)...(19): siRNA sense strand
gaaagguuacgaacacuua

SEQ ID NO: 1505226 - RNA, 19 nt, Homo sapiens
  misc_RNA (1)...(19): siRNA sense strand
gaagaaagguuacgaacac

SEQ ID NO: 1505227 - RNA, 19 nt, Homo sapiens
  misc_RNA (1)...(19): siRNA sense strand
gaagagagagaggcauuua

SEQ ID NO: 1505228 - RNA, 19 nt, Homo sapiens
  misc_RNA (1)...(19): siRNA sense strand
gggaagaaaucgguuauug

SEQ ID NO: 1505229 - RNA, 19 nt, Homo sapiens
  misc_RNA (1)...(19): siRNA sense strand
ggaaaacacugaagacauu

SEQ ID NO: 1505230 - RNA, 19 nt, Homo sapiens
  misc_RNA (1)...(19): siRNA sense strand
gaaaacagcugguggacaa

SEQ ID NO: 1505231 - RNA, 19 nt, Homo sapiens
  misc_RNA (1)...(19): siRNA sense strand
ggacugggcuaaugcuaau

SEQ ID NO: 1505232 - RNA, 19 nt, Homo sapiens
  misc_RNA (1)...(19): siRNA sense strand
agauaaagcucuucauuca

SEQ ID NO: 1505233 - RNA, 19 nt, Homo sapiens
  misc_RNA (1)...(19): siRNA sense strand
gaacaacacauucaaacga

SEQ ID NO: 1505234 - RNA, 19 nt, Homo sapiens
  misc_RNA (1)...(19): siRNA sense strand
caacacauucaaacgauua

SEQ ID NO: 1505235 - RNA, 19 nt, Homo sapiens
  misc_RNA (1)...(19): siRNA sense strand
gcauugcuguuuguaauuu

SEQ ID NO: 1505236 - RNA, 19 nt, Homo sapiens
  misc_RNA (1)...(19): siRNA sense strand
ugaagacauugaagaagua

SEQ ID NO: 1505237 - RNA, 19 nt, Homo sapiens
  misc_RNA (1)...(19): siRNA sense strand
gaaaucgguuauugaagga

SEQ ID NO: 1505238 - RNA, 19 nt, Homo sapiens
  misc_RNA (1)...(19): siRNA sense strand
ggaagaaaucgguuauuga

SEQ ID NO: 1505239 - RNA, 19 nt, Homo sapiens
  misc_RNA (1)...(19): siRNA sense strand
aaagugaagucccuauuug

SEQ ID NO: 1505240 - RNA, 19 nt, Homo sapiens
  misc_RNA (1)...(19): siRNA sense strand
cacacuagcuacaugauuu

SEQ ID NO: 1505241 - RNA, 19 nt, Homo sapiens
  misc_RNA (1)...(19): siRNA sense strand
gagagaggcauuuagaauu

SEQ ID NO: 1505242 - RNA, 19 nt, Homo sapiens
  misc_RNA (1)...(19): siRNA sense strand
gcaggaauucgaaauauug

SEQ ID NO: 1505243 - RNA, 19 nt, Homo sapiens
  misc_RNA (1)...(19): siRNA sense strand
aaacggcacucaaguauac

SEQ ID NO: 1505244 - RNA, 19 nt, Homo sapiens
  misc_RNA (1)...(19): siRNA sense strand
gauugaggacacuguauua

SEQ ID NO: 1505245 - RNA, 19 nt, Homo sapiens
  misc_RNA (1)...(19): siRNA sense strand
ugaagucccuauuugaaga

SEQ ID NO: 1505246 - RNA, 19 nt, Homo sapiens
  misc_RNA (1)...(19): siRNA sense strand
gaugagcccucugucuauu

SEQ ID NO: 1505247 - RNA, 19 nt, Homo sapiens
  misc_RNA (1)...(19): siRNA sense strand
aaagagaugugaugcagau

SEQ ID NO: 1505248 - RNA, 19 nt, Homo sapiens
  misc_RNA (1)...(19): siRNA sense strand
caauugcacuuaucacauc

SEQ ID NO: 1505249 - RNA, 19 nt, Homo sapiens
  misc_RNA (1)...(19): siRNA sense strand
gugcauauucggccucuua

SEQ ID NO: 1505250 - RNA, 19 nt, Homo sapiens
  misc_RNA (1)...(19): siRNA sense strand
ucucugaccuugauuggaa

SEQ ID NO: 1505251 - RNA, 19 nt, Homo sapiens
  misc_RNA (1)...(19): siRNA sense strand
agagaggcauuuagaauuc

SEQ ID NO: 1505252 - RNA, 19 nt, Homo sapiens
  misc_RNA (1)...(19): siRNA sense strand
ggcaggaauucgaaauauu

SEQ ID NO: 1505253 - RNA, 19 nt, Homo sapiens
  misc_RNA (1)...(19): siRNA sense strand
uguaauuucucucuucuug

SEQ ID NO: 1505254 - RNA, 19 nt, Homo sapiens
  misc_RNA (1)...(19): siRNA sense strand
gcaugauacuucugcuuau

SEQ ID NO: 1505255 - RNA, 19 nt, Homo sapiens
  misc_RNA (1)...(19): siRNA sense strand
ggagcuaaccugaguaauc

SEQ ID NO: 1505256 - RNA, 19 nt, Homo sapiens
  misc_RNA (1)...(19): siRNA sense strand
gggauaaacgcgccuuaaa

SEQ ID NO: 1505257 - RNA, 19 nt, Homo sapiens
  misc_RNA (1)...(19): siRNA sense strand
gcauucugcuggauauaug

SEQ ID NO: 1505258 - RNA, 19 nt, Homo sapiens
  misc_RNA (1)...(19): siRNA sense strand
gaccuugauuggaauguug

SEQ ID NO: 1505259 - RNA, 19 nt, Homo sapiens
  misc_RNA (1)...(19): siRNA sense strand
gugaucggcuggugcauau

SEQ ID NO: 1505260 - RNA, 19 nt, Homo sapiens
  misc_RNA (1)...(19): siRNA sense strand
gcaauucaacccuuucugu

SEQ ID NO: 1505261 - RNA, 19 nt, Homo sapiens
  misc_RNA (1)...(19): siRNA sense strand
ugaguaauccacugaauau

SEQ ID NO: 1505262 - RNA, 19 nt, Homo sapiens
  misc_RNA (1)...(19): siRNA sense strand
uggaaguagucaugguuua

SEQ ID NO: 1505263 - RNA, 19 nt, Homo sapiens
  misc_RNA (1)...(19): siRNA sense strand
agacauaagugaugaugag

SEQ ID NO: 1505264 - RNA, 19 nt, Homo sapiens
  misc_RNA (1)...(19): siRNA sense strand
agaaguagaacaacacauu

SEQ ID NO: 1505265 - RNA, 19 nt, Homo sapiens
  misc_RNA (1)...(19): siRNA sense strand
cuucagugcugcuuacuau

SEQ ID NO: 1505266 - RNA, 19 nt, Homo sapiens
  misc_RNA (1)...(19): siRNA sense strand
cccaauauguuauguaugg

SEQ ID NO: 1505267 - RNA, 19 nt, Homo sapiens
  misc_RNA (1)...(19): siRNA sense strand
cuagcuacaugauuuauag

SEQ ID NO: 1505268 - RNA, 19 nt, Homo sapiens
  misc_RNA (1)...(19): siRNA sense strand
gagcuaaccugaguaaucc

SEQ ID NO: 1505269 - RNA, 19 nt, Homo sapiens
  misc_RNA (1)...(19): siRNA sense strand
cauauucggccucuuacua

SEQ ID NO: 1505270 - RNA, 19 nt, Homo sapiens
  misc_RNA (1)...(19): siRNA sense strand
gaaguagaacaacacauuc

SEQ ID NO: 1505271 - RNA, 19 nt, Homo sapiens
  misc_RNA (1)...(19): siRNA sense strand
guagaacaacacauucaaa

SEQ ID NO: 1505272 - RNA, 19 nt, Homo sapiens
  misc_RNA (1)...(19): siRNA sense strand
ucagugcugcuuacuauuu

SEQ ID NO: 1505273 - RNA, 19 nt, Homo sapiens
  misc_RNA (1)...(19): siRNA sense strand
caugauacuucugcuuauu

SEQ ID NO: 1505274 - RNA, 19 nt, Homo sapiens
  misc_RNA (1)...(19): siRNA sense strand
cuggauauauguucguaaa

SEQ ID NO: 1505275 - RNA, 19 nt, Homo sapiens
  misc_RNA (1)...(19): siRNA sense strand
ugguuuagcugcauuguca

SEQ ID NO: 1505276 - RNA, 19 nt, Homo sapiens
  misc_RNA (1)...(19): siRNA sense strand
gauuaauuguauccuguug

SEQ ID NO: 1505277 - RNA, 19 nt, Homo sapiens
  misc_RNA (1)...(19): siRNA sense strand
uaauuucucucuucuuguc

SEQ ID NO: 1505278 - RNA, 19 nt, Homo sapiens
  misc_RNA (1)...(19): siRNA sense strand
gaacacuuaagaagagaga

SEQ ID NO: 1505279 - RNA, 19 nt, Homo sapiens
  misc_RNA (1)...(19): siRNA sense strand
gagagagaggcauuuagaa

SEQ ID NO: 1505280 - RNA, 19 nt, Homo sapiens
  misc_RNA (1)...(19): siRNA sense strand
ugaauaugcuuuugccuuu

SEQ ID NO: 1505281 - RNA, 19 nt, Homo sapiens
  misc_RNA (1)...(19): siRNA sense strand
gagaggcauuuagaauuca

SEQ ID NO: 1505282 - RNA, 19 nt, Homo sapiens
  misc_RNA (1)...(19): siRNA sense strand
gaauaugcuuuugccuuua

SEQ ID NO: 1505283 - RNA, 19 nt, Homo sapiens
  misc_RNA (1)...(19): siRNA sense strand
gaugaugaugauacuagua

SEQ ID NO: 1505284 - RNA, 19 nt, Homo sapiens
  misc_RNA (1)...(19): siRNA sense strand
guaauccacugaauaugcu

SEQ ID NO: 1505285 - RNA, 19 nt, Homo sapiens
  misc_RNA (1)...(19): siRNA sense strand
gcaauugcacuuaucacau

SEQ ID NO: 1505286 - RNA, 19 nt, Homo sapiens
  misc_RNA (1)...(19): siRNA sense strand
guucguaaauaccaaaguc

SEQ ID NO: 1505287 - RNA, 19 nt, Homo sapiens
  misc_RNA (1)...(19): siRNA sense strand
ucucucuucuugucaaauu

SEQ ID NO: 1505288 - RNA, 19 nt, Homo sapiens
  misc_RNA (1)...(19): siRNA sense strand
cugaagacauugaagaagu

SEQ ID NO: 1505289 - RNA, 19 nt, Homo sapiens
  misc_RNA (1)...(19): siRNA sense strand
gcaugucugcguuaccuuu

SEQ ID NO: 1505290 - RNA, 19 nt, Homo sapiens
  misc_RNA (1)...(19): siRNA sense strand
ggaauguuggcagcuauaa

SEQ ID NO: 1505291 - RNA, 19 nt, Homo sapiens
  misc_RNA (1)...(19): siRNA sense strand
gcguuaccuuuaaaucuga

SEQ ID NO: 1505292 - RNA, 19 nt, Homo sapiens
  misc_RNA (1)...(19): siRNA sense strand
uggcaggaauucgaaauau

SEQ ID NO: 1505293 - RNA, 19 nt, Homo sapiens
  misc_RNA (1)...(19): siRNA sense strand
gaagaaguagaacaacaca

SEQ ID NO: 1505294 - RNA, 19 nt, Homo sapiens
  misc_RNA (1)...(19): siRNA sense strand
ggaugaugaugauacuagu

SEQ ID NO: 1505295 - RNA, 19 nt, Homo sapiens
  misc_RNA (1)...(19): siRNA sense strand
aaagggaagaaaucgguua

SEQ ID NO: 1505296 - RNA, 19 nt, Homo sapiens
  misc_RNA (1)...(19): siRNA sense strand
uagauaaagcucuucauuc

SEQ ID NO: 1505297 - RNA, 19 nt, Homo sapiens
  misc_RNA (1)...(19): siRNA sense strand
uuacgaacacuuaagaaga

SEQ ID NO: 1505298 - RNA, 19 nt, Homo sapiens
  misc_RNA (1)...(19): siRNA sense strand
uaucacaucagcacuucua

SEQ ID NO: 1505299 - RNA, 19 nt, Homo sapiens
  misc_RNA (1)...(19): siRNA sense strand
gcgggaaagugaaguuguc

SEQ ID NO: 1505300 - RNA, 19 nt, Homo sapiens
  misc_RNA (1)...(19): siRNA sense strand
cacaaguucugguucuuca

SEQ ID NO: 1505301 - RNA, 19 nt, Homo sapiens
  misc_RNA (1)...(19): siRNA sense strand
acacuagcuacaugauuua

SEQ ID NO: 1505302 - RNA, 19 nt, Homo sapiens
  misc_RNA (1)...(19): siRNA sense strand
agagagagaggcauuuaga

SEQ ID NO: 1505303 - RNA, 19 nt, Homo sapiens
  misc_RNA (1)...(19): siRNA sense strand
ggauaaacgcgccuuaaaa

SEQ ID NO: 1505304 - RNA, 19 nt, Homo sapiens
  misc_RNA (1)...(19): siRNA sense strand
uaacuuacacagccuaugg

SEQ ID NO: 1505305 - RNA, 19 nt, Homo sapiens
  misc_RNA (1)...(19): siRNA sense strand
gaagucccuauuugaagaa

SEQ ID NO: 1505306 - RNA, 19 nt, Homo sapiens
  misc_RNA (1)...(19): siRNA sense strand
cagaugcuccugaagauca

SEQ ID NO: 1505307 - RNA, 19 nt, Homo sapiens
  misc_RNA (1)...(19): siRNA sense strand
gcuacaugauuuauagucu

SEQ ID NO: 1505308 - RNA, 19 nt, Homo sapiens
  misc_RNA (1)...(19): siRNA sense strand
gaucggcuggugcauauuc

SEQ ID NO: 1505309 - RNA, 19 nt, Homo sapiens
  misc_RNA (1)...(19): siRNA sense strand
ggaaguagucaugguuuag

SEQ ID NO: 1505310 - RNA, 19 nt, Homo sapiens
  misc_RNA (1)...(19): siRNA sense strand
uugaggacacuguauuaua

SEQ ID NO: 1505311 - RNA, 19 nt, Homo sapiens
  misc_RNA (1)...(19): siRNA sense strand
gaagauucagacauaagug

SEQ ID NO: 1505312 - RNA, 19 nt, Homo sapiens
  misc_RNA (1)...(19): siRNA sense strand
ugcaugauacuucugcuua

SEQ ID NO: 1505313 - RNA, 19 nt, Homo sapiens
  misc_RNA (1)...(19): siRNA sense strand
uuaguugcauugcuguuug

SEQ ID NO: 1505314 - RNA, 19 nt, Homo sapiens
  misc_RNA (1)...(19): siRNA sense strand
uacgaacacuuaagaagag

SEQ ID NO: 1505315 - RNA, 19 nt, Homo sapiens
  misc_RNA (1)...(19): siRNA sense strand
agacauugaagaaguagaa

SEQ ID NO: 1505316 - RNA, 19 nt, Homo sapiens
  misc_RNA (1)...(19): siRNA sense strand
guuauauuguucugugugu

SEQ ID NO: 1505317 - RNA, 19 nt, Homo sapiens
  misc_RNA (1)...(19): siRNA sense strand
agagagaggcauuuagaau

SEQ ID NO: 1505318 - RNA, 19 nt, Homo sapiens
  misc_RNA (1)...(19): siRNA sense strand
uuacuucaauggcaggaau

SEQ ID NO: 1505319 - RNA, 19 nt, Homo sapiens
  misc_RNA (1)...(19): siRNA sense strand
ggugaucggcuggugcaua

SEQ ID NO: 1505320 - RNA, 19 nt, Homo sapiens
  misc_RNA (1)...(19): siRNA sense strand
ugaugcagaugcuccugaa

SEQ ID NO: 1505321 - RNA, 19 nt, Homo sapiens
  misc_RNA (1)...(19): siRNA sense strand
uuuaaggacugggcuaaug

SEQ ID NO: 1505322 - RNA, 19 nt, Homo sapiens
  misc_RNA (1)...(19): siRNA sense strand
gaacagaaccacugauuua

SEQ ID NO: 1505323 - RNA, 19 nt, Homo sapiens
  misc_RNA (1)...(19): siRNA sense strand
ggaaauaugugaaucugaa

SEQ ID NO: 1505324 - RNA, 19 nt, Homo sapiens
  misc_RNA (1)...(19): siRNA sense strand
gcagagaccuuaccauuuc

SEQ ID NO: 1505325 - RNA, 19 nt, Homo sapiens
  misc_RNA (1)...(19): siRNA sense strand
gaguuaagcugaaauaugu

SEQ ID NO: 1505326 - RNA, 19 nt, Homo sapiens
  misc_RNA (1)...(19): siRNA sense strand
ggaaaggcaucucuucaga

SEQ ID NO: 1505327 - RNA, 19 nt, Homo sapiens
  misc_RNA (1)...(19): siRNA sense strand
gaaugacaauaguggaaua

SEQ ID NO: 1505328 - RNA, 19 nt, Homo sapiens
  misc_RNA (1)...(19): siRNA sense strand
gacaguaacucagaaauug

SEQ ID NO: 1505329 - RNA, 19 nt, Homo sapiens
  misc_RNA (1)...(19): siRNA sense strand
ccaaaugucagccaucuua

SEQ ID NO: 1505330 - RNA, 19 nt, Homo sapiens
  misc_RNA (1)...(19): siRNA sense strand
gaccuuaccauuucaauaa

SEQ ID NO: 1505331 - RNA, 19 nt, Homo sapiens
  misc_RNA (1)...(19): siRNA sense strand
gaaaagcccuuacagaaga

SEQ ID NO: 1505332 - RNA, 19 nt, Homo sapiens
  misc_RNA (1)...(19): siRNA sense strand
ggagggagaagauggaaua

SEQ ID NO: 1505333 - RNA, 19 nt, Homo sapiens
  misc_RNA (1)...(19): siRNA sense strand
gacacacagugcuuaaaua

SEQ ID NO: 1505334 - RNA, 19 nt, Homo sapiens
  misc_RNA (1)...(19): siRNA sense strand
caacagcauuauugagaaa

SEQ ID NO: 1505335 - RNA, 19 nt, Homo sapiens
  misc_RNA (1)...(19): siRNA sense strand
gggaacauauugaaguuga

SEQ ID NO: 1505336 - RNA, 19 nt, Homo sapiens
  misc_RNA (1)...(19): siRNA sense strand
gcaacagcauuauugagaa

SEQ ID NO: 1505337 - RNA, 19 nt, Homo sapiens
  misc_RNA (1)...(19): siRNA sense strand
gaacaagaaguuucaagug

SEQ ID NO: 1505338 - RNA, 19 nt, Homo sapiens
  misc_RNA (1)...(19): siRNA sense strand
aaagauagccugggacuaa

SEQ ID NO: 1505339 - RNA, 19 nt, Homo sapiens
  misc_RNA (1)...(19): siRNA sense strand
aagaggaacugacagauga

SEQ ID NO: 1505340 - RNA, 19 nt, Homo sapiens
  misc_RNA (1)...(19): siRNA sense strand
ggaaguaacacacgucaug

SEQ ID NO: 1505341 - RNA, 19 nt, Homo sapiens
  misc_RNA (1)...(19): siRNA sense strand
gacaagagcaagaaagaaa

SEQ ID NO: 1505342 - RNA, 19 nt, Homo sapiens
  misc_RNA (1)...(19): siRNA sense strand
gaaaauaaguggucucaag

SEQ ID NO: 1505343 - RNA, 19 nt, Homo sapiens
  misc_RNA (1)...(19): siRNA sense strand
uguccaagcucaugucgua

SEQ ID NO: 1505344 - RNA, 19 nt, Homo sapiens
  misc_RNA (1)...(19): siRNA sense strand
gggagaagauggaauagag

SEQ ID NO: 1505345 - RNA, 19 nt, Homo sapiens
  misc_RNA (1)...(19): siRNA sense strand
gcagaguuaagcugaaaua

SEQ ID NO: 1505346 - RNA, 19 nt, Homo sapiens
  misc_RNA (1)...(19): siRNA sense strand
gaauagaggccuuaaaauu

SEQ ID NO: 1505347 - RNA, 19 nt, Homo sapiens
  misc_RNA (1)...(19): siRNA sense strand
gggaagguguuucagauca

SEQ ID NO: 1505348 - RNA, 19 nt, Homo sapiens
  misc_RNA (1)...(19): siRNA sense strand
gcaagaguaauuuaucuga

SEQ ID NO: 1505349 - RNA, 19 nt, Homo sapiens
  misc_RNA (1)...(19): siRNA sense strand
gagaacagaaccacugauu

SEQ ID NO: 1505350 - RNA, 19 nt, Homo sapiens
  misc_RNA (1)...(19): siRNA sense strand
cgauaccaguuucagaaua

SEQ ID NO: 1505351 - RNA, 19 nt, Homo sapiens
  misc_RNA (1)...(19): siRNA sense strand
guacacuucaccacaaaua

SEQ ID NO: 1505352 - RNA, 19 nt, Homo sapiens
  misc_RNA (1)...(19): siRNA sense strand
ggucagcuauucacaguag

SEQ ID NO: 1505353 - RNA, 19 nt, Homo sapiens
  misc_RNA (1)...(19): siRNA sense strand
gcccagagcaguaauguga

SEQ ID NO: 1505354 - RNA, 19 nt, Homo sapiens
  misc_RNA (1)...(19): siRNA sense strand
cagaaccacugauuuaaag

SEQ ID NO: 1505355 - RNA, 19 nt, Homo sapiens
  misc_RNA (1)...(19): siRNA sense strand
caugagagauuucaguaca

SEQ ID NO: 1505356 - RNA, 19 nt, Homo sapiens
  misc_RNA (1)...(19): siRNA sense strand
aaacagaagccuaucaguu

SEQ ID NO: 1505357 - RNA, 19 nt, Homo sapiens
  misc_RNA (1)...(19): siRNA sense strand
aacugaagcucgaauauga

SEQ ID NO: 1505358 - RNA, 19 nt, Homo sapiens
  misc_RNA (1)...(19): siRNA sense strand
gacaaagacagcuaacaaa

SEQ ID NO: 1505359 - RNA, 19 nt, Homo sapiens
  misc_RNA (1)...(19): siRNA sense strand
aagagaaccuggacaaaca

SEQ ID NO: 1505360 - RNA, 19 nt, Homo sapiens
  misc_RNA (1)...(19): siRNA sense strand
ccuaagcucuccugauuca

SEQ ID NO: 1505361 - RNA, 19 nt, Homo sapiens
  misc_RNA (1)...(19): siRNA sense strand
cagcagagaccuuaccauu

SEQ ID NO: 1505362 - RNA, 19 nt, Homo sapiens
  misc_RNA (1)...(19): siRNA sense strand
ggaugagucugaugacagu

SEQ ID NO: 1505363 - RNA, 19 nt, Homo sapiens
  misc_RNA (1)...(19): siRNA sense strand
gaagagauuggaccuggaa

SEQ ID NO: 1505364 - RNA, 19 nt, Homo sapiens
  misc_RNA (1)...(19): siRNA sense strand
gagaaaagcccuuacagaa

SEQ ID NO: 1505365 - RNA, 19 nt, Homo sapiens
  misc_RNA (1)...(19): siRNA sense strand
ucagccaucuuaagcauga

SEQ ID NO: 1505366 - RNA, 19 nt, Homo sapiens
  misc_RNA (1)...(19): siRNA sense strand
uaacaccgaugauucugau

SEQ ID NO: 1505367 - RNA, 19 nt, Homo sapiens
  misc_RNA (1)...(19): siRNA sense strand
gagacaagagcaagaaaga

SEQ ID NO: 1505368 - RNA, 19 nt, Homo sapiens
  misc_RNA (1)...(19): siRNA sense strand
gauaccaguuucagaauac

SEQ ID NO: 1505369 - RNA, 19 nt, Homo sapiens
  misc_RNA (1)...(19): siRNA sense strand
acacacagugcuuaaauaa

SEQ ID NO: 1505370 - RNA, 19 nt, Homo sapiens
  misc_RNA (1)...(19): siRNA sense strand
agaagaggcaacagcauua

SEQ ID NO: 1505371 - RNA, 19 nt, Homo sapiens
  misc_RNA (1)...(19): siRNA sense strand
gaaaccauaacaccgauga

SEQ ID NO: 1505372 - RNA, 19 nt, Homo sapiens
  misc_RNA (1)...(19): siRNA sense strand
acccuaagcucuccugauu

SEQ ID NO: 1505373 - RNA, 19 nt, Homo sapiens
  misc_RNA (1)...(19): siRNA sense strand
ugacaauaguggaauaaag

SEQ ID NO: 1505374 - RNA, 19 nt, Homo sapiens
  misc_RNA (1)...(19): siRNA sense strand
agaaacccgugaucaauuc

SEQ ID NO: 1505375 - RNA, 19 nt, Homo sapiens
  misc_RNA (1)...(19): siRNA sense strand
caaccagcaacaaucuuua

SEQ ID NO: 1505376 - RNA, 19 nt, Homo sapiens
  misc_RNA (1)...(19): siRNA sense strand
gaguugcccuauccacuga

SEQ ID NO: 1505377 - RNA, 19 nt, Homo sapiens
  misc_RNA (1)...(19): siRNA sense strand
gauuuaaagugugacaguu

SEQ ID NO: 1505378 - RNA, 19 nt, Homo sapiens
  misc_RNA (1)...(19): siRNA sense strand
aaauguggcugcagauauc

SEQ ID NO: 1505379 - RNA, 19 nt, Homo sapiens
  misc_RNA (1)...(19): siRNA sense strand
ggaacaagaaguuucaagu

SEQ ID NO: 1505380 - RNA, 19 nt, Homo sapiens
  misc_RNA (1)...(19): siRNA sense strand
ggccguaggucagcuauuc

SEQ ID NO: 1505381 - RNA, 19 nt, Homo sapiens
  misc_RNA (1)...(19): siRNA sense strand
gaacaugauaauucuguca

SEQ ID NO: 1505382 - RNA, 19 nt, Homo sapiens
  misc_RNA (1)...(19): siRNA sense strand
ucaagaggauuguaucaac

SEQ ID NO: 1505383 - RNA, 19 nt, Homo sapiens
  misc_RNA (1)...(19): siRNA sense strand
ugacaguaacucagaaauu

SEQ ID NO: 1505384 - RNA, 19 nt, Homo sapiens
  misc_RNA (1)...(19): siRNA sense strand
cuaaugcccucugggauga

SEQ ID NO: 1505385 - RNA, 19 nt, Homo sapiens
  misc_RNA (1)...(19): siRNA sense strand
agacaaagacagcuaacaa

SEQ ID NO: 1505386 - RNA, 19 nt, Homo sapiens
  misc_RNA (1)...(19): siRNA sense strand
gaaggaaauaugugaaucu

SEQ ID NO: 1505387 - RNA, 19 nt, Homo sapiens
  misc_RNA (1)...(19): siRNA sense strand
ggcaacagcauuauugaga

SEQ ID NO: 1505388 - RNA, 19 nt, Homo sapiens
  misc_RNA (1)...(19): siRNA sense strand
ggagauaggaaguaacaca

SEQ ID NO: 1505389 - RNA, 19 nt, Homo sapiens
  misc_RNA (1)...(19): siRNA sense strand
gcuuggagauaggaaguaa

SEQ ID NO: 1505390 - RNA, 19 nt, Homo sapiens
  misc_RNA (1)...(19): siRNA sense strand
gaaagauuaaguccagaga

SEQ ID NO: 1505391 - RNA, 19 nt, Homo sapiens
  misc_RNA (1)...(19): siRNA sense strand
agaauacugugaaucugaa

SEQ ID NO: 1505392 - RNA, 19 nt, Homo sapiens
  misc_RNA (1)...(19): siRNA sense strand
gauuggaccuggaaaagaa

SEQ ID NO: 1505393 - RNA, 19 nt, Homo sapiens
  misc_RNA (1)...(19): siRNA sense strand
agaaauugaggcugcuuua

SEQ ID NO: 1505394 - RNA, 19 nt, Homo sapiens
  misc_RNA (1)...(19): siRNA sense strand
aacagaagccuaucaguug

SEQ ID NO: 1505395 - RNA, 19 nt, Homo sapiens
  misc_RNA (1)...(19): siRNA sense strand
ucaaguggcuguggagaca

SEQ ID NO: 1505396 - RNA, 19 nt, Homo sapiens
  misc_RNA (1)...(19): siRNA sense strand
gaagguguuucagaucauc

SEQ ID NO: 1505397 - RNA, 19 nt, Homo sapiens
  misc_RNA (1)...(19): siRNA sense strand
ggaagguguuucagaucau

SEQ ID NO: 1505398 - RNA, 19 nt, Homo sapiens
  misc_RNA (1)...(19): siRNA sense strand
gggauuaacucaggaacag

SEQ ID NO: 1505399 - RNA, 19 nt, Homo sapiens
  misc_RNA (1)...(19): siRNA sense strand
cggaucagagggagaaaua

SEQ ID NO: 1505400 - RNA, 19 nt, Homo sapiens
  misc_RNA (1)...(19): siRNA sense strand
aaagucugcugaacucaau

SEQ ID NO: 1505401 - RNA, 19 nt, Homo sapiens
  misc_RNA (1)...(19): siRNA sense strand
cgucauggcaagaguaauu

SEQ ID NO: 1505402 - RNA, 19 nt, Homo sapiens
  misc_RNA (1)...(19): siRNA sense strand
ugagagauuucaguacaga

SEQ ID NO: 1505403 - RNA, 19 nt, Homo sapiens
  misc_RNA (1)...(19): siRNA sense strand
guacaaacuaguaaugaca

SEQ ID NO: 1505404 - RNA, 19 nt, Homo sapiens
  misc_RNA (1)...(19): siRNA sense strand
gaagaggcaacagcauuau

SEQ ID NO: 1505405 - RNA, 19 nt, Homo sapiens
  misc_RNA (1)...(19): siRNA sense strand
gacaaacaccagacucaga

SEQ ID NO: 1505406 - RNA, 19 nt, Homo sapiens
  misc_RNA (1)...(19): siRNA sense strand
agaaagaguugcccuaucc

SEQ ID NO: 1505407 - RNA, 19 nt, Homo sapiens
  misc_RNA (1)...(19): siRNA sense strand
caagaaagaguugcccuau

SEQ ID NO: 1505408 - RNA, 19 nt, Homo sapiens
  misc_RNA (1)...(19): siRNA sense strand
caagauggagggagaagau

SEQ ID NO: 1505409 - RNA, 19 nt, Homo sapiens
  misc_RNA (1)...(19): siRNA sense strand
gaggaggaacaaacucauu

SEQ ID NO: 1505410 - RNA, 19 nt, Homo sapiens
  misc_RNA (1)...(19): siRNA sense strand
aaagaaacccgugaucaau

SEQ ID NO: 1505411 - RNA, 19 nt, Homo sapiens
  misc_RNA (1)...(19): siRNA sense strand
agaagaugcuaugcucaaa

SEQ ID NO: 1505412 - RNA, 19 nt, Homo sapiens
  misc_RNA (1)...(19): siRNA sense strand
gcggugcauucgagacaaa

SEQ ID NO: 1505413 - RNA, 19 nt, Homo sapiens
  misc_RNA (1)...(19): siRNA sense strand
ugucacacuugucagguuu

SEQ ID NO: 1505414 - RNA, 19 nt, Homo sapiens
  misc_RNA (1)...(19): siRNA sense strand
ucaaccagcaacaaucuuu

SEQ ID NO: 1505415 - RNA, 19 nt, Homo sapiens
  misc_RNA (1)...(19): siRNA sense strand
acagaaccacugauuuaaa

SEQ ID NO: 1505416 - RNA, 19 nt, Homo sapiens
  misc_RNA (1)...(19): siRNA sense strand
ccgaugauucugaugauuu

SEQ ID NO: 1505417 - RNA, 19 nt, Homo sapiens
  misc_RNA (1)...(19): siRNA sense strand
gcauguugccaccuugaaa

SEQ ID NO: 1505418 - RNA, 19 nt, Homo sapiens
  misc_RNA (1)...(19): siRNA sense strand
ugacacacagugcuuaaau

SEQ ID NO: 1505419 - RNA, 19 nt, Homo sapiens
  misc_RNA (1)...(19): siRNA sense strand
agccaaaccugcuguaugg

SEQ ID NO: 1505420 - RNA, 19 nt, Homo sapiens
  misc_RNA (1)...(19): siRNA sense strand
gacaauaguggaauaaagg

SEQ ID NO: 1505421 - RNA, 19 nt, Homo sapiens
  misc_RNA (1)...(19): siRNA sense strand
gcccagaaccacagccaaa

SEQ ID NO: 1505422 - RNA, 19 nt, Homo sapiens
  misc_RNA (1)...(19): siRNA sense strand
ggaggugggugauggcuua

SEQ ID NO: 1505423 - RNA, 19 nt, Homo sapiens
  misc_RNA (1)...(19): siRNA sense strand
gcacucacccucaggauuu

SEQ ID NO: 1505424 - RNA, 19 nt, Homo sapiens
  misc_RNA (1)...(19): siRNA sense strand
caagggcucuggacauuuc

SEQ ID NO: 1505425 - RNA, 19 nt, Homo sapiens
  misc_RNA (1)...(19): siRNA sense strand
ccucaggauuugauauuaa

SEQ ID NO: 1505426 - RNA, 19 nt, Homo sapiens
  misc_RNA (1)...(19): siRNA sense strand
ggacacagccacaucaaag

SEQ ID NO: 1505427 - RNA, 19 nt, Homo sapiens
  misc_RNA (1)...(19): siRNA sense strand
gaucagaugaacugcauga

SEQ ID NO: 1505428 - RNA, 19 nt, Homo sapiens
  misc_RNA (1)...(19): siRNA sense strand
ugacagcaaacaucuuuaa

SEQ ID NO: 1505429 - RNA, 19 nt, Homo sapiens
  misc_RNA (1)...(19): siRNA sense strand
gcucacagaaggucaagaa

SEQ ID NO: 1505430 - RNA, 19 nt, Homo sapiens
  misc_RNA (1)...(19): siRNA sense strand
ucgacagccucugguguua

SEQ ID NO: 1505431 - RNA, 19 nt, Homo sapiens
  misc_RNA (1)...(19): siRNA sense strand
ccugacagcaaacaucuuu

SEQ ID NO: 1505432 - RNA, 19 nt, Homo sapiens
  misc_RNA (1)...(19): siRNA sense strand
uggaacagcuggagaucuc

SEQ ID NO: 1505433 - RNA, 19 nt, Homo sapiens
  misc_RNA (1)...(19): siRNA sense strand
gucaagaagcggagccuuu

SEQ ID NO: 1505434 - RNA, 19 nt, Homo sapiens
  misc_RNA (1)...(19): siRNA sense strand
gugaccggcugcugaagga

SEQ ID NO: 1505435 - RNA, 19 nt, Homo sapiens
  misc_RNA (1)...(19): siRNA sense strand
ucagaugaacugcaugaug

SEQ ID NO: 1505436 - RNA, 19 nt, Homo sapiens
  misc_RNA (1)...(19): siRNA sense strand
gguucgcccugacagcaaa

SEQ ID NO: 1505437 - RNA, 19 nt, Homo sapiens
  misc_RNA (1)...(19): siRNA sense strand
cccucaggauuugauauua

SEQ ID NO: 1505438 - RNA, 19 nt, Homo sapiens
  misc_RNA (1)...(19): siRNA sense strand
cauaggagugucuguggaa

SEQ ID NO: 1505439 - RNA, 19 nt, Homo sapiens
  misc_RNA (1)...(19): siRNA sense strand
gacagccucugguguuagg

SEQ ID NO: 1505440 - RNA, 19 nt, Homo sapiens
  misc_RNA (1)...(19): siRNA sense strand
ucaagaagcggagccuuuc

SEQ ID NO: 1505441 - RNA, 19 nt, Homo sapiens
  misc_RNA (1)...(19): siRNA sense strand
gcuuacaggaucagaugaa

SEQ ID NO: 1505442 - RNA, 19 nt, Homo sapiens
  misc_RNA (1)...(19): siRNA sense strand
gcagacagcacuggaacag

SEQ ID NO: 1505443 - RNA, 19 nt, Homo sapiens
  misc_RNA (1)...(19): siRNA sense strand
gggcaauuggcuagacuug

SEQ ID NO: 1505444 - RNA, 19 nt, Homo sapiens
  misc_RNA (1)...(19): siRNA sense strand
ccaggacacagccacauca

SEQ ID NO: 1505445 - RNA, 19 nt, Homo sapiens
  misc_RNA (1)...(19): siRNA sense strand
ccaagggcucuggacauuu

SEQ ID NO: 1505446 - RNA, 19 nt, Homo sapiens
  misc_RNA (1)...(19): siRNA sense strand
ccaaguuuccaucccauag

SEQ ID NO: 1505447 - RNA, 19 nt, Homo sapiens
  misc_RNA (1)...(19): siRNA sense strand
ggcagcagcaccaaguuuc

SEQ ID NO: 1505448 - RNA, 19 nt, Homo sapiens
  misc_RNA (1)...(19): siRNA sense strand
ggaccuccacguugauguc

SEQ ID NO: 1505449 - RNA, 19 nt, Homo sapiens
  misc_RNA (1)...(19): siRNA sense strand
uggcagcagcaccaaguuu

SEQ ID NO: 1505450 - RNA, 19 nt, Homo sapiens
  misc_RNA (1)...(19): siRNA sense strand
aggaucagaugaacugcau

SEQ ID NO: 1505451 - RNA, 19 nt, Homo sapiens
  misc_RNA (1)...(19): siRNA sense strand
gcagaccuggugggcaauu

SEQ ID NO: 1505452 - RNA, 19 nt, Homo sapiens
  misc_RNA (1)...(19): siRNA sense strand
ggaggugggugauggcuua

SEQ ID NO: 1505453 - RNA, 19 nt, Homo sapiens
  misc_RNA (1)...(19): siRNA sense strand
gcacucacccucaggauuu

SEQ ID NO: 1505454 - RNA, 19 nt, Homo sapiens
  misc_RNA (1)...(19): siRNA sense strand
caagggcucuggacauuuc

SEQ ID NO: 1505455 - RNA, 19 nt, Homo sapiens
  misc_RNA (1)...(19): siRNA sense strand
ccucaggauuugauauuaa

SEQ ID NO: 1505456 - RNA, 19 nt, Homo sapiens
  misc_RNA (1)...(19): siRNA sense strand
ggacacagccacaucaaag

SEQ ID NO: 1505457 - RNA, 19 nt, Homo sapiens
  misc_RNA (1)...(19): siRNA sense strand
gaucagaugaacugcauga

SEQ ID NO: 1505458 - RNA, 19 nt, Homo sapiens
  misc_RNA (1)...(19): siRNA sense strand
ugacagcaaacaucuuuaa

SEQ ID NO: 1505459 - RNA, 19 nt, Homo sapiens
  misc_RNA (1)...(19): siRNA sense strand
gcucacagaaggucaagaa

SEQ ID NO: 1505460 - RNA, 19 nt, Homo sapiens
  misc_RNA (1)...(19): siRNA sense strand
ucgacagccucugguguua

SEQ ID NO: 1505461 - RNA, 19 nt, Homo sapiens
  misc_RNA (1)...(19): siRNA sense strand
ccugacagcaaacaucuuu

SEQ ID NO: 1505462 - RNA, 19 nt, Homo sapiens
  misc_RNA (1)...(19): siRNA sense strand
uggaacagcuggagaucuc

SEQ ID NO: 1505463 - RNA, 19 nt, Homo sapiens
  misc_RNA (1)...(19): siRNA sense strand
gucaagaagcggagccuuu

SEQ ID NO: 1505464 - RNA, 19 nt, Homo sapiens
  misc_RNA (1)...(19): siRNA sense strand
gugaccggcugcugaagga

SEQ ID NO: 1505465 - RNA, 19 nt, Homo sapiens
  misc_RNA (1)...(19): siRNA sense strand
ucagaugaacugcaugaug

SEQ ID NO: 1505466 - RNA, 19 nt, Homo sapiens
  misc_RNA (1)...(19): siRNA sense strand
gguucgcccugacagcaaa

SEQ ID NO: 1505467 - RNA, 19 nt, Homo sapiens
  misc_RNA (1)...(19): siRNA sense strand
cccucaggauuugauauua

SEQ ID NO: 1505468 - RNA, 19 nt, Homo sapiens
  misc_RNA (1)...(19): siRNA sense strand
cauaggagugucuguggaa

SEQ ID NO: 1505469 - RNA, 19 nt, Homo sapiens
  misc_RNA (1)...(19): siRNA sense strand
gacagccucugguguuagg

SEQ ID NO: 1505470 - RNA, 19 nt, Homo sapiens
  misc_RNA (1)...(19): siRNA sense strand
ucaagaagcggagccuuuc

SEQ ID NO: 1505471 - RNA, 19 nt, Homo sapiens
  misc_RNA (1)...(19): siRNA sense strand
gcuuacaggaucagaugaa

SEQ ID NO: 1505472 - RNA, 19 nt, Homo sapiens
  misc_RNA (1)...(19): siRNA sense strand
gcagacagcacuggaacag

SEQ ID NO: 1505473 - RNA, 19 nt, Homo sapiens
  misc_RNA (1)...(19): siRNA sense strand
gggcaauuggcuagacuug

SEQ ID NO: 1505474 - RNA, 19 nt, Homo sapiens
  misc_RNA (1)...(19): siRNA sense strand
ccaggacacagccacauca

SEQ ID NO: 1505475 - RNA, 19 nt, Homo sapiens
  misc_RNA (1)...(19): siRNA sense strand
ccaagggcucuggacauuu

SEQ ID NO: 1505476 - RNA, 19 nt, Homo sapiens
  misc_RNA (1)...(19): siRNA sense strand
ccaaguuuccaucccauag

SEQ ID NO: 1505477 - RNA, 19 nt, Homo sapiens
  misc_RNA (1)...(19): siRNA sense strand
ggcagcagcaccaaguuuc

SEQ ID NO: 1505478 - RNA, 19 nt, Homo sapiens
  misc_RNA (1)...(19): siRNA sense strand
ggaccuccacguugauguc

SEQ ID NO: 1505479 - RNA, 19 nt, Homo sapiens
  misc_RNA (1)...(19): siRNA sense strand
uggcagcagcaccaaguuu

SEQ ID NO: 1505480 - RNA, 19 nt, Homo sapiens
  misc_RNA (1)...(19): siRNA sense strand
aggaucagaugaacugcau

SEQ ID NO: 1505481 - RNA, 19 nt, Homo sapiens
  misc_RNA (1)...(19): siRNA sense strand
gcagaccuggugggcaauu

SEQ ID NO: 1505482 - RNA, 19 nt, Homo sapiens
  misc_RNA (1)...(19): siRNA sense strand
ucaagaagcuggagaaaga

SEQ ID NO: 1505483 - RNA, 19 nt, Homo sapiens
  misc_RNA (1)...(19): siRNA sense strand
gcaaugaccugaacaagag

SEQ ID NO: 1505484 - RNA, 19 nt, Homo sapiens
  misc_RNA (1)...(19): siRNA sense strand
ggaccuauguggcaaggaa

SEQ ID NO: 1505485 - RNA, 19 nt, Homo sapiens
  misc_RNA (1)...(19): siRNA sense strand
gacaaagucuucaaacaca

SEQ ID NO: 1505486 - RNA, 19 nt, Homo sapiens
  misc_RNA (1)...(19): siRNA sense strand
gaaagaaaccaccauguac

SEQ ID NO: 1505487 - RNA, 19 nt, Homo sapiens
  misc_RNA (1)...(19): siRNA sense strand
gaacggggcugccaaacaa

SEQ ID NO: 1505488 - RNA, 19 nt, Homo sapiens
  misc_RNA (1)...(19): siRNA sense strand
cauacuguguggacaauaa

SEQ ID NO: 1505489 - RNA, 19 nt, Homo sapiens
  misc_RNA (1)...(19): siRNA sense strand
ugagauggcugaggagaaa

SEQ ID NO: 1505490 - RNA, 19 nt, Homo sapiens
  misc_RNA (1)...(19): siRNA sense strand
ggaaggagaucacguugcu

SEQ ID NO: 1505491 - RNA, 19 nt, Homo sapiens
  misc_RNA (1)...(19): siRNA sense strand
caagaaguaugcugaacug

SEQ ID NO: 1505492 - RNA, 19 nt, Homo sapiens
  misc_RNA (1)...(19): siRNA sense strand
agaugaagcuccuacagaa

SEQ ID NO: 1505493 - RNA, 19 nt, Homo sapiens
  misc_RNA (1)...(19): siRNA sense strand
cagagaaguuugaggaguu

SEQ ID NO: 1505494 - RNA, 19 nt, Homo sapiens
  misc_RNA (1)...(19): siRNA sense strand
agaaagaaaccaccaugua

SEQ ID NO: 1505495 - RNA, 19 nt, Homo sapiens
  misc_RNA (1)...(19): siRNA sense strand
ugacuaagaagaucaagaa

SEQ ID NO: 1505496 - RNA, 19 nt, Homo sapiens
  misc_RNA (1)...(19): siRNA sense strand
cuaagaagaucaagaagcu

SEQ ID NO: 1505497 - RNA, 19 nt, Homo sapiens
  misc_RNA (1)...(19): siRNA sense strand
gaaaagaugacuaagaaga

SEQ ID NO: 1505498 - RNA, 19 nt, Homo sapiens
  misc_RNA (1)...(19): siRNA sense strand
ucacagaagcgccuugcua

SEQ ID NO: 1505499 - RNA, 19 nt, Homo sapiens
  misc_RNA (1)...(19): siRNA sense strand
gaaggccacaggagaagaa

SEQ ID NO: 1505500 - RNA, 19 nt, Homo sapiens
  misc_RNA (1)...(19): siRNA sense strand
gccaaacaauccaauccaa

SEQ ID NO: 1505501 - RNA, 19 nt, Homo sapiens
  misc_RNA (1)...(19): siRNA sense strand
gcaccggaauucacagaag

SEQ ID NO: 1505502 - RNA, 19 nt, Homo sapiens
  misc_RNA (1)...(19): siRNA sense strand
ggaauucacagaagcagau

SEQ ID NO: 1505503 - RNA, 19 nt, Homo sapiens
  misc_RNA (1)...(19): siRNA sense strand
gcaagagacccaccugaag

SEQ ID NO: 1505504 - RNA, 19 nt, Homo sapiens
  misc_RNA (1)...(19): siRNA sense strand
gaagacauacugagcacau

SEQ ID NO: 1505505 - RNA, 19 nt, Homo sapiens
  misc_RNA (1)...(19): siRNA sense strand
gcgaggagcauaucgacaa

SEQ ID NO: 1505506 - RNA, 19 nt, Homo sapiens
  misc_RNA (1)...(19): siRNA sense strand
cgaggagcauaucgacaaa

SEQ ID NO: 1505507 - RNA, 19 nt, Homo sapiens
  misc_RNA (1)...(19): siRNA sense strand
ugugugagcugaugaagca

SEQ ID NO: 1505508 - RNA, 19 nt, Homo sapiens
  misc_RNA (1)...(19): siRNA sense strand
cccaggagaugcuaaagga

SEQ ID NO: 1505509 - RNA, 19 nt, Homo sapiens
  misc_RNA (1)...(19): siRNA sense strand
agaagcugauugagcagua

SEQ ID NO: 1505510 - RNA, 19 nt, Homo sapiens
  misc_RNA (1)...(19): siRNA sense strand
uggaaaagaugacuaagaa

SEQ ID NO: 1505511 - RNA, 19 nt, Homo sapiens
  misc_RNA (1)...(19): siRNA sense strand
gaggaugugugagcugaug

SEQ ID NO: 1505512 - RNA, 19 nt, Homo sapiens
  misc_RNA (1)...(19): siRNA sense strand
gcauaucgacaaagucuuc

SEQ ID NO: 1505513 - RNA, 19 nt, Homo sapiens
  misc_RNA (1)...(19): siRNA sense strand
gagcauaucgacaaagucu

SEQ ID NO: 1505514 - RNA, 19 nt, Homo sapiens
  misc_RNA (1)...(19): siRNA sense strand
gaagcugauugagcaguau

SEQ ID NO: 1505515 - RNA, 19 nt, Homo sapiens
  misc_RNA (1)...(19): siRNA sense strand
ugaaccaacuccaguaguc

SEQ ID NO: 1505516 - RNA, 19 nt, Homo sapiens
  misc_RNA (1)...(19): siRNA sense strand
ccaaacaauccaauccaaa

SEQ ID NO: 1505517 - RNA, 19 nt, Homo sapiens
  misc_RNA (1)...(19): siRNA sense strand
ccagaacacacuuuccaaa

SEQ ID NO: 1505518 - RNA, 19 nt, Homo sapiens
  misc_RNA (1)...(19): siRNA sense strand
gaugaagcuccuacagaaa

SEQ ID NO: 1505519 - RNA, 19 nt, Homo sapiens
  misc_RNA (1)...(19): siRNA sense strand
caacuccaguagucaaugg

SEQ ID NO: 1505520 - RNA, 19 nt, Homo sapiens
  misc_RNA (1)...(19): siRNA sense strand
aaacaguccgggauaaaga

SEQ ID NO: 1505521 - RNA, 19 nt, Homo sapiens
  misc_RNA (1)...(19): siRNA sense strand
gagaaagaaaccaccaugu

SEQ ID NO: 1505522 - RNA, 19 nt, Homo sapiens
  misc_RNA (1)...(19): siRNA sense strand
caaccgcucccucaaggaa

SEQ ID NO: 1505523 - RNA, 19 nt, Homo sapiens
  misc_RNA (1)...(19): siRNA sense strand
gcacaaccgcucccucaag

SEQ ID NO: 1505524 - RNA, 19 nt, Homo sapiens
  misc_RNA (1)...(19): siRNA sense strand
agagccagcuggugcaaga

SEQ ID NO: 1505525 - RNA, 19 nt, Homo sapiens
  misc_RNA (1)...(19): siRNA sense strand
aaagaugacuaagaagauc

SEQ ID NO: 1505526 - RNA, 19 nt, Homo sapiens
  misc_RNA (1)...(19): siRNA sense strand
acaaugagcgcaacuccaa

SEQ ID NO: 1505527 - RNA, 19 nt, Homo sapiens
  misc_RNA (1)...(19): siRNA sense strand
acauucagcugcagaugga

SEQ ID NO: 1505528 - RNA, 19 nt, Homo sapiens
  misc_RNA (1)...(19): siRNA sense strand
cagaugaagcuccuacaga

SEQ ID NO: 1505529 - RNA, 19 nt, Homo sapiens
  misc_RNA (1)...(19): siRNA sense strand
gaucaagaagcuggagaaa

SEQ ID NO: 1505530 - RNA, 19 nt, Homo sapiens
  misc_RNA (1)...(19): siRNA sense strand
gcgagguauucaccacauu

SEQ ID NO: 1505531 - RNA, 19 nt, Homo sapiens
  misc_RNA (1)...(19): siRNA sense strand
caacuggaagacauacuga

SEQ ID NO: 1505532 - RNA, 19 nt, Homo sapiens
  misc_RNA (1)...(19): siRNA sense strand
gcaagaaguaugcugaacu

SEQ ID NO: 1505533 - RNA, 19 nt, Homo sapiens
  misc_RNA (1)...(19): siRNA sense strand
gaaccaacuccaguaguca

SEQ ID NO: 1505534 - RNA, 19 nt, Homo sapiens
  misc_RNA (1)...(19): siRNA sense strand
uggagggccugcagguaaa

SEQ ID NO: 1505535 - RNA, 19 nt, Homo sapiens
  misc_RNA (1)...(19): siRNA sense strand
agauggaacagcacaauga

SEQ ID NO: 1505536 - RNA, 19 nt, Homo sapiens
  misc_RNA (1)...(19): siRNA sense strand
ucgacaaagucuucaaaca

SEQ ID NO: 1505537 - RNA, 19 nt, Homo sapiens
  misc_RNA (1)...(19): siRNA sense strand
gauccaaacacagaagaga

SEQ ID NO: 1505538 - RNA, 19 nt, Homo sapiens
  misc_RNA (1)...(19): siRNA sense strand
cgacaaagucuucaaacac

SEQ ID NO: 1505539 - RNA, 19 nt, Homo sapiens
  misc_RNA (1)...(19): siRNA sense strand
gcagauggaacagcacaau

SEQ ID NO: 1505540 - RNA, 19 nt, Homo sapiens
  misc_RNA (1)...(19): siRNA sense strand
gagagaaggaacccuccaa

SEQ ID NO: 1505541 - RNA, 19 nt, Homo sapiens
  misc_RNA (1)...(19): siRNA sense strand
gaaaacaguccgggauaaa

SEQ ID NO: 1505542 - RNA, 19 nt, Homo sapiens
  misc_RNA (1)...(19): siRNA sense strand
gagaaaacaguccgggaua

SEQ ID NO: 1505543 - RNA, 19 nt, Homo sapiens
  misc_RNA (1)...(19): siRNA sense strand
agacccaccugaagcaaca

SEQ ID NO: 1505544 - RNA, 19 nt, Homo sapiens
  misc_RNA (1)...(19): siRNA sense strand
acaaagucuucaaacacaa

SEQ ID NO: 1505545 - RNA, 19 nt, Homo sapiens
  misc_RNA (1)...(19): siRNA sense strand
uggcugcucugugcaagaa

SEQ ID NO: 1505546 - RNA, 19 nt, Homo sapiens
  misc_RNA (1)...(19): siRNA sense strand
caaacaauccaauccaaaa

SEQ ID NO: 1505547 - RNA, 19 nt, Homo sapiens
  misc_RNA (1)...(19): siRNA sense strand
gagcugcgcgaggagcaua

SEQ ID NO: 1505548 - RNA, 19 nt, Homo sapiens
  misc_RNA (1)...(19): siRNA sense strand
aagacauacugagcacaua

SEQ ID NO: 1505549 - RNA, 19 nt, Homo sapiens
  misc_RNA (1)...(19): siRNA sense strand
caaacacaaggaccuacaa

SEQ ID NO: 1505550 - RNA, 19 nt, Homo sapiens
  misc_RNA (1)...(19): siRNA sense strand
gcuaaaggaggcagaagag

SEQ ID NO: 1505551 - RNA, 19 nt, Homo sapiens
  misc_RNA (1)...(19): siRNA sense strand
cgcaaugaccugaacaaga

SEQ ID NO: 1505552 - RNA, 19 nt, Homo sapiens
  misc_RNA (1)...(19): siRNA sense strand
ggagaccgagaccaucgaa

SEQ ID NO: 1505553 - RNA, 19 nt, Homo sapiens
  misc_RNA (1)...(19): siRNA sense strand
gguauucaccacauucaag

SEQ ID NO: 1505554 - RNA, 19 nt, Homo sapiens
  misc_RNA (1)...(19): siRNA sense strand
gagcaccggaauucacaga

SEQ ID NO: 1505555 - RNA, 19 nt, Homo sapiens
  misc_RNA (1)...(19): siRNA sense strand
uaucgacaaagucuucaaa

SEQ ID NO: 1505556 - RNA, 19 nt, Homo sapiens
  misc_RNA (1)...(19): siRNA sense strand
cuggagggccugcagguaa

SEQ ID NO: 1505557 - RNA, 19 nt, Homo sapiens
  misc_RNA (1)...(19): siRNA sense strand
caacagcuugcccuauaca

SEQ ID NO: 1505558 - RNA, 19 nt, Homo sapiens
  misc_RNA (1)...(19): siRNA sense strand
acuccaagcugcgccaaga

SEQ ID NO: 1505559 - RNA, 19 nt, Homo sapiens
  misc_RNA (1)...(19): siRNA sense strand
gcaccgagcacagaagcau

SEQ ID NO: 1505560 - RNA, 19 nt, Homo sapiens
  misc_RNA (1)...(19): siRNA sense strand
ccuauacacagagaaguuu

SEQ ID NO: 1505561 - RNA, 19 nt, Homo sapiens
  misc_RNA (1)...(19): siRNA sense strand
gcugagccgccaacuggaa

SEQ ID NO: 1505562 - RNA, 19 nt, Homo sapiens
  misc_RNA (1)...(19): siRNA sense strand
gccagcuggugcaagagaa

SEQ ID NO: 1505563 - RNA, 19 nt, Homo sapiens
  misc_RNA (1)...(19): siRNA sense strand
gagguauucaccacauuca

SEQ ID NO: 1505564 - RNA, 19 nt, Homo sapiens
  misc_RNA (1)...(19): siRNA sense strand
ggaugugugagcugaugaa

SEQ ID NO: 1505565 - RNA, 19 nt, Homo sapiens
  misc_RNA (1)...(19): siRNA sense strand
augcagacauugaauacuc

SEQ ID NO: 1505566 - RNA, 19 nt, Homo sapiens
  misc_RNA (1)...(19): siRNA sense strand
agaaaacaguccgggauaa

SEQ ID NO: 1505567 - RNA, 19 nt, Homo sapiens
  misc_RNA (1)...(19): siRNA sense strand
caagaagcuggagaaagaa

SEQ ID NO: 1505568 - RNA, 19 nt, Homo sapiens
  misc_RNA (1)...(19): siRNA sense strand
guagagucccagaggaugu

SEQ ID NO: 1505569 - RNA, 19 nt, Homo sapiens
  misc_RNA (1)...(19): siRNA sense strand
acacaaggaccuacaacag

SEQ ID NO: 1505570 - RNA, 19 nt, Homo sapiens
  misc_RNA (1)...(19): siRNA sense strand
aggagcauaucgacaaagu

SEQ ID NO: 1505571 - RNA, 19 nt, Homo sapiens
  misc_RNA (1)...(19): siRNA sense strand
gcagaugaagcuccuacag

SEQ ID NO: 1505572 - RNA, 19 nt, Homo sapiens
  misc_RNA (1)...(19): siRNA sense strand
agagaaguuugaggaguuc

SEQ ID NO: 1505573 - RNA, 19 nt, Homo sapiens
  misc_RNA (1)...(19): siRNA sense strand
gcagacagagcgcaaugac

SEQ ID NO: 1505574 - RNA, 19 nt, Homo sapiens
  misc_RNA (1)...(19): siRNA sense strand
ggcggcuccugcaguagaa

SEQ ID NO: 1505575 - RNA, 19 nt, Homo sapiens
  misc_RNA (1)...(19): siRNA sense strand
caaagucuucaaacacaag

SEQ ID NO: 1505576 - RNA, 19 nt, Homo sapiens
  misc_RNA (1)...(19): siRNA sense strand
ccaagcugcgccaagagaa

SEQ ID NO: 1505577 - RNA, 19 nt, Homo sapiens
  misc_RNA (1)...(19): siRNA sense strand
ggaggagcaccggaauuca

SEQ ID NO: 1505578 - RNA, 19 nt, Homo sapiens
  misc_RNA (1)...(19): siRNA sense strand
gcugcucugugcaagaagu

SEQ ID NO: 1505579 - RNA, 19 nt, Homo sapiens
  misc_RNA (1)...(19): siRNA sense strand
cugaugcagacauugaaua

SEQ ID NO: 1505580 - RNA, 19 nt, Homo sapiens
  misc_RNA (1)...(19): siRNA sense strand
caggugacacugaaugaca

SEQ ID NO: 1505581 - RNA, 19 nt, Homo sapiens
  misc_RNA (1)...(19): siRNA sense strand
acccgaagaugcagagaag

SEQ ID NO: 1505582 - RNA, 19 nt, Homo sapiens
  misc_RNA (1)...(19): siRNA sense strand
gaacuaagguggcauguua

SEQ ID NO: 1505583 - RNA, 19 nt, Homo sapiens
  misc_RNA (1)...(19): siRNA sense strand
gcaaacaacuguggauuua

SEQ ID NO: 1505584 - RNA, 19 nt, Homo sapiens
  misc_RNA (1)...(19): siRNA sense strand
gcaaggaacuguuauugaa

SEQ ID NO: 1505585 - RNA, 19 nt, Homo sapiens
  misc_RNA (1)...(19): siRNA sense strand
gaaaggauggugacuauua

SEQ ID NO: 1505586 - RNA, 19 nt, Homo sapiens
  misc_RNA (1)...(19): siRNA sense strand
caaaccagaugaagaaaua

SEQ ID NO: 1505587 - RNA, 19 nt, Homo sapiens
  misc_RNA (1)...(19): siRNA sense strand
gacaaaggauuacauauug

SEQ ID NO: 1505588 - RNA, 19 nt, Homo sapiens
  misc_RNA (1)...(19): siRNA sense strand
ccacuuccaucauuuguua

SEQ ID NO: 1505589 - RNA, 19 nt, Homo sapiens
  misc_RNA (1)...(19): siRNA sense strand
ggaaacacguccuguaaau

SEQ ID NO: 1505590 - RNA, 19 nt, Homo sapiens
  misc_RNA (1)...(19): siRNA sense strand
ggaaaggucucgagaaucu

SEQ ID NO: 1505591 - RNA, 19 nt, Homo sapiens
  misc_RNA (1)...(19): siRNA sense strand
gaacugggaugaagauauc

SEQ ID NO: 1505592 - RNA, 19 nt, Homo sapiens
  misc_RNA (1)...(19): siRNA sense strand
gaacggugaauauuucuua

SEQ ID NO: 1505593 - RNA, 19 nt, Homo sapiens
  misc_RNA (1)...(19): siRNA sense strand
cuacaaagauccaaguauu

SEQ ID NO: 1505594 - RNA, 19 nt, Homo sapiens
  misc_RNA (1)...(19): siRNA sense strand
uaaagaaugugaccacuug

SEQ ID NO: 1505595 - RNA, 19 nt, Homo sapiens
  misc_RNA (1)...(19): siRNA sense strand
ugagguggcuuccaagaua

SEQ ID NO: 1505596 - RNA, 19 nt, Homo sapiens
  misc_RNA (1)...(19): siRNA sense strand
gauggugacuauuaccuua

SEQ ID NO: 1505597 - RNA, 19 nt, Homo sapiens
  misc_RNA (1)...(19): siRNA sense strand
caagaacuaugccauggua

SEQ ID NO: 1505598 - RNA, 19 nt, Homo sapiens
  misc_RNA (1)...(19): siRNA sense strand
caacaagccacaucuuaua

SEQ ID NO: 1505599 - RNA, 19 nt, Homo sapiens
  misc_RNA (1)...(19): siRNA sense strand
gaauguagaucacuugagu

SEQ ID NO: 1505600 - RNA, 19 nt, Homo sapiens
  misc_RNA (1)...(19): siRNA sense strand
gaaagugucuuccucacau

SEQ ID NO: 1505601 - RNA, 19 nt, Homo sapiens
  misc_RNA (1)...(19): siRNA sense strand
cagccaagcuauuaucuaa

SEQ ID NO: 1505602 - RNA, 19 nt, Homo sapiens
  misc_RNA (1)...(19): siRNA sense strand
gaauacaguggaucaaaua

SEQ ID NO: 1505603 - RNA, 19 nt, Homo sapiens
  misc_RNA (1)...(19): siRNA sense strand
gaacuaccaucagccaauu

SEQ ID NO: 1505604 - RNA, 19 nt, Homo sapiens
  misc_RNA (1)...(19): siRNA sense strand
caacaugaaugaagaucuu

SEQ ID NO: 1505605 - RNA, 19 nt, Homo sapiens
  misc_RNA (1)...(19): siRNA sense strand
cgaauggagugcacagaua

SEQ ID NO: 1505606 - RNA, 19 nt, Homo sapiens
  misc_RNA (1)...(19): siRNA sense strand
uaccauaugugauccuuua

SEQ ID NO: 1505607 - RNA, 19 nt, Homo sapiens
  misc_RNA (1)...(19): siRNA sense strand
uaacgcaguugaaagaauu

SEQ ID NO: 1505608 - RNA, 19 nt, Homo sapiens
  misc_RNA (1)...(19): siRNA sense strand
gaagaaacauaacuugcau

SEQ ID NO: 1505609 - RNA, 19 nt, Homo sapiens
  misc_RNA (1)...(19): siRNA sense strand
ucacuuccaugcaaauuaa

SEQ ID NO: 1505610 - RNA, 19 nt, Homo sapiens
  misc_RNA (1)...(19): siRNA sense strand
gaauugaucucacuuccau

SEQ ID NO: 1505611 - RNA, 19 nt, Homo sapiens
  misc_RNA (1)...(19): siRNA sense strand
gaagaaaugugugaucagu

SEQ ID NO: 1505612 - RNA, 19 nt, Homo sapiens
  misc_RNA (1)...(19): siRNA sense strand
gccaauagcuggaaugagu

SEQ ID NO: 1505613 - RNA, 19 nt, Homo sapiens
  misc_RNA (1)...(19): siRNA sense strand
gcacacagccacuuuccua

SEQ ID NO: 1505614 - RNA, 19 nt, Homo sapiens
  misc_RNA (1)...(19): siRNA sense strand
gaugcgagauguuaaaugu

SEQ ID NO: 1505615 - RNA, 19 nt, Homo sapiens
  misc_RNA (1)...(19): siRNA sense strand
caagccaccuagcguaaua

SEQ ID NO: 1505616 - RNA, 19 nt, Homo sapiens
  misc_RNA (1)...(19): siRNA sense strand
ggagaacccuaaggaauau

SEQ ID NO: 1505617 - RNA, 19 nt, Homo sapiens
  misc_RNA (1)...(19): siRNA sense strand
gagggaggcugaauuguuc

SEQ ID NO: 1505618 - RNA, 19 nt, Homo sapiens
  misc_RNA (1)...(19): siRNA sense strand
ggagaaguguucccucaga

SEQ ID NO: 1505619 - RNA, 19 nt, Homo sapiens
  misc_RNA (1)...(19): siRNA sense strand
ggauuuaguuacagacaaa

SEQ ID NO: 1505620 - RNA, 19 nt, Homo sapiens
  misc_RNA (1)...(19): siRNA sense strand
gaaaguaccgugaaguguu

SEQ ID NO: 1505621 - RNA, 19 nt, Homo sapiens
  misc_RNA (1)...(19): siRNA sense strand
acaccuugcucauuuauuu

SEQ ID NO: 1505622 - RNA, 19 nt, Homo sapiens
  misc_RNA (1)...(19): siRNA sense strand
caagaacugucccgaguga

SEQ ID NO: 1505623 - RNA, 19 nt, Homo sapiens
  misc_RNA (1)...(19): siRNA sense strand
ggacauccauugcaugaag

SEQ ID NO: 1505624 - RNA, 19 nt, Homo sapiens
  misc_RNA (1)...(19): siRNA sense strand
ggacagaacggugaauauu

SEQ ID NO: 1505625 - RNA, 19 nt, Homo sapiens
  misc_RNA (1)...(19): siRNA sense strand
gagagagaauugcaaugaa

SEQ ID NO: 1505626 - RNA, 19 nt, Homo sapiens
  misc_RNA (1)...(19): siRNA sense strand
agaaugaccuugaugaugu

SEQ ID NO: 1505627 - RNA, 19 nt, Homo sapiens
  misc_RNA (1)...(19): siRNA sense strand
gaaggcagaugggaaugaa

SEQ ID NO: 1505628 - RNA, 19 nt, Homo sapiens
  misc_RNA (1)...(19): siRNA sense strand
gaaagagggaggcugaauu

SEQ ID NO: 1505629 - RNA, 19 nt, Homo sapiens
  misc_RNA (1)...(19): siRNA sense strand
ugaaggauaugguugaaga

SEQ ID NO: 1505630 - RNA, 19 nt, Homo sapiens
  misc_RNA (1)...(19): siRNA sense strand
acacaagacuuucgagaga

SEQ ID NO: 1505631 - RNA, 19 nt, Homo sapiens
  misc_RNA (1)...(19): siRNA sense strand
gguuacagcugaugcuaaa

SEQ ID NO: 1505632 - RNA, 19 nt, Homo sapiens
  misc_RNA (1)...(19): siRNA sense strand
guacagcuauucuggacaa

SEQ ID NO: 1505633 - RNA, 19 nt, Homo sapiens
  misc_RNA (1)...(19): siRNA sense strand
cagggacaguuuagcauua

SEQ ID NO: 1505634 - RNA, 19 nt, Homo sapiens
  misc_RNA (1)...(19): siRNA sense strand
uagaaaggauggugacuau

SEQ ID NO: 1505635 - RNA, 19 nt, Homo sapiens
  misc_RNA (1)...(19): siRNA sense strand
gaucccaucuacuaagaaa

SEQ ID NO: 1505636 - RNA, 19 nt, Homo sapiens
  misc_RNA (1)...(19): siRNA sense strand
uauguaagcugucgugaug

SEQ ID NO: 1505637 - RNA, 19 nt, Homo sapiens
  misc_RNA (1)...(19): siRNA sense strand
ugaaaugcauuaccaaaca

SEQ ID NO: 1505638 - RNA, 19 nt, Homo sapiens
  misc_RNA (1)...(19): siRNA sense strand
gaaugaauaugaagauggu

SEQ ID NO: 1505639 - RNA, 19 nt, Homo sapiens
  misc_RNA (1)...(19): siRNA sense strand
acacuuagcugcuggauac

SEQ ID NO: 1505640 - RNA, 19 nt, Homo sapiens
  misc_RNA (1)...(19): siRNA sense strand
gauguauacugcagacuga

SEQ ID NO: 1505641 - RNA, 19 nt, Homo sapiens
  misc_RNA (1)...(19): siRNA sense strand
uagaauagcagaugaauca

SEQ ID NO: 1505642 - RNA, 19 nt, Homo sapiens
  misc_RNA (1)...(19): siRNA sense strand
agugauggcuucuguaauu

SEQ ID NO: 1505643 - RNA, 19 nt, Homo sapiens
  misc_RNA (1)...(19): siRNA sense strand
caagauggcauuauucaga

SEQ ID NO: 1505644 - RNA, 19 nt, Homo sapiens
  misc_RNA (1)...(19): siRNA sense strand
guuguaaacucuauuguca

SEQ ID NO: 1505645 - RNA, 19 nt, Homo sapiens
  misc_RNA (1)...(19): siRNA sense strand
ugacaaaccagaugaagaa

SEQ ID NO: 1505646 - RNA, 19 nt, Homo sapiens
  misc_RNA (1)...(19): siRNA sense strand
ggaaggaccagucauuaau

SEQ ID NO: 1505647 - RNA, 19 nt, Homo sapiens
  misc_RNA (1)...(19): siRNA sense strand
ggagauugcuacagugcuu

SEQ ID NO: 1505648 - RNA, 19 nt, Homo sapiens
  misc_RNA (1)...(19): siRNA sense strand
aaaguaccgugaaguguuu

SEQ ID NO: 1505649 - RNA, 19 nt, Homo sapiens
  misc_RNA (1)...(19): siRNA sense strand
gaugauaauccuagaugua

SEQ ID NO: 1505650 - RNA, 19 nt, Homo sapiens
  misc_RNA (1)...(19): siRNA sense strand
gaaggaccagucauuaauu

SEQ ID NO: 1505651 - RNA, 19 nt, Homo sapiens
  misc_RNA (1)...(19): siRNA sense strand
gaggaaggaccagucauua

SEQ ID NO: 1505652 - RNA, 19 nt, Homo sapiens
  misc_RNA (1)...(19): siRNA sense strand
gaauggagugcacagauaa

SEQ ID NO: 1505653 - RNA, 19 nt, Homo sapiens
  misc_RNA (1)...(19): siRNA sense strand
caaaggaaauuagaagaca

SEQ ID NO: 1505654 - RNA, 19 nt, Homo sapiens
  misc_RNA (1)...(19): siRNA sense strand
gaauuacugugauccugaa

SEQ ID NO: 1505655 - RNA, 19 nt, Homo sapiens
  misc_RNA (1)...(19): siRNA sense strand
gcgagugccuuguuacaug

SEQ ID NO: 1505656 - RNA, 19 nt, Homo sapiens
  misc_RNA (1)...(19): siRNA sense strand
agacaaauguggagugugu

SEQ ID NO: 1505657 - RNA, 19 nt, Homo sapiens
  misc_RNA (1)...(19): siRNA sense strand
aaacuccagugccaagaua

SEQ ID NO: 1505658 - RNA, 19 nt, Homo sapiens
  misc_RNA (1)...(19): siRNA sense strand
caacaguucucauuauggu

SEQ ID NO: 1505659 - RNA, 19 nt, Homo sapiens
  misc_RNA (1)...(19): siRNA sense strand
gagaaaagauucacaucaa

SEQ ID NO: 1505660 - RNA, 19 nt, Homo sapiens
  misc_RNA (1)...(19): siRNA sense strand
ggacacagaaugccaugaa

SEQ ID NO: 1505661 - RNA, 19 nt, Homo sapiens
  misc_RNA (1)...(19): siRNA sense strand
gacagaacggugaauauuu

SEQ ID NO: 1505662 - RNA, 19 nt, Homo sapiens
  misc_RNA (1)...(19): siRNA sense strand
ggaauugggauaaugaaga

SEQ ID NO: 1505663 - RNA, 19 nt, Homo sapiens
  misc_RNA (1)...(19): siRNA sense strand
gccuauaguuuaucaagaa

SEQ ID NO: 1505664 - RNA, 19 nt, Homo sapiens
  misc_RNA (1)...(19): siRNA sense strand
cgacuucggccuauaguuu

SEQ ID NO: 1505665 - RNA, 19 nt, Homo sapiens
  misc_RNA (1)...(19): siRNA sense strand
ggaacccuccuugcaauua

SEQ ID NO: 1505666 - RNA, 19 nt, Homo sapiens
  misc_RNA (1)...(19): siRNA sense strand
ucacaaagccuguagaucu

SEQ ID NO: 1505667 - RNA, 19 nt, Homo sapiens
  misc_RNA (1)...(19): siRNA sense strand
ggugucagcugaauguaga

SEQ ID NO: 1505668 - RNA, 19 nt, Homo sapiens
  misc_RNA (1)...(19): siRNA sense strand
ccaauguggucaaggauau

SEQ ID NO: 1505669 - RNA, 19 nt, Homo sapiens
  misc_RNA (1)...(19): siRNA sense strand
gaacugaaacucaugacau

SEQ ID NO: 1505670 - RNA, 19 nt, Homo sapiens
  misc_RNA (1)...(19): siRNA sense strand
caagaaacggaggaaauua

SEQ ID NO: 1505671 - RNA, 19 nt, Homo sapiens
  misc_RNA (1)...(19): siRNA sense strand
ggaaugcauugccgucaug

SEQ ID NO: 1505672 - RNA, 19 nt, Homo sapiens
  misc_RNA (1)...(19): siRNA sense strand
gauguuaaaugugucaaug

SEQ ID NO: 1505673 - RNA, 19 nt, Homo sapiens
  misc_RNA (1)...(19): siRNA sense strand
gaaaugcauuaccaaacau

SEQ ID NO: 1505674 - RNA, 19 nt, Homo sapiens
  misc_RNA (1)...(19): siRNA sense strand
cagaugcccuucauggaaa

SEQ ID NO: 1505675 - RNA, 19 nt, Homo sapiens
  misc_RNA (1)...(19): siRNA sense strand
acagaacggugaauauuuc

SEQ ID NO: 1505676 - RNA, 19 nt, Homo sapiens
  misc_RNA (1)...(19): siRNA sense strand
caagugaaaugcauuacca

SEQ ID NO: 1505677 - RNA, 19 nt, Homo sapiens
  misc_RNA (1)...(19): siRNA sense strand
aaacaacuguggauuuagu

SEQ ID NO: 1505678 - RNA, 19 nt, Homo sapiens
  misc_RNA (1)...(19): siRNA sense strand
ccauaucucuuacauccaa

SEQ ID NO: 1505679 - RNA, 19 nt, Homo sapiens
  misc_RNA (1)...(19): siRNA sense strand
cuccaagccuccagaguua

SEQ ID NO: 1505680 - RNA, 19 nt, Homo sapiens
  misc_RNA (1)...(19): siRNA sense strand
gcacgaauuugccauuaac

SEQ ID NO: 1505681 - RNA, 19 nt, Homo sapiens
  misc_RNA (1)...(19): siRNA sense strand
gcuauuaucuaagcacgaa

SEQ ID NO: 1505682 - RNA, 19 nt, Homo sapiens
  misc_RNA (1)...(19): siRNA sense strand
gaacaugggagccaaauuu

SEQ ID NO: 1505683 - RNA, 19 nt, Homo sapiens
  misc_RNA (1)...(19): siRNA sense strand
ggucucaagugaugaauug

SEQ ID NO: 1505684 - RNA, 19 nt, Homo sapiens
  misc_RNA (1)...(19): siRNA sense strand
ggacccagauaaagcuuga

SEQ ID NO: 1505685 - RNA, 19 nt, Homo sapiens
  misc_RNA (1)...(19): siRNA sense strand
gaacuugcccucacuagca

SEQ ID NO: 1505686 - RNA, 19 nt, Homo sapiens
  misc_RNA (1)...(19): siRNA sense strand
gcacagcucuauggaucaa

SEQ ID NO: 1505687 - RNA, 19 nt, Homo sapiens
  misc_RNA (1)...(19): siRNA sense strand
gaauugccaccuccucaua

SEQ ID NO: 1505688 - RNA, 19 nt, Homo sapiens
  misc_RNA (1)...(19): siRNA sense strand
ccacaagguuggguaugaa

SEQ ID NO: 1505689 - RNA, 19 nt, Homo sapiens
  misc_RNA (1)...(19): siRNA sense strand
ugacugugcugacacgaau

SEQ ID NO: 1505690 - RNA, 19 nt, Homo sapiens
  misc_RNA (1)...(19): siRNA sense strand
cgaauguacuaccgaagga

SEQ ID NO: 1505691 - RNA, 19 nt, Homo sapiens
  misc_RNA (1)...(19): siRNA sense strand
ggccaacggugggcagauu

SEQ ID NO: 1505692 - RNA, 19 nt, Homo sapiens
  misc_RNA (1)...(19): siRNA sense strand
gaaggaaagaccacaaggu

SEQ ID NO: 1505693 - RNA, 19 nt, Homo sapiens
  misc_RNA (1)...(19): siRNA sense strand
ucacuagcauccugaccuu

SEQ ID NO: 1505694 - RNA, 19 nt, Homo sapiens
  misc_RNA (1)...(19): siRNA sense strand
aaccaggucucaagugaug

SEQ ID NO: 1505695 - RNA, 19 nt, Homo sapiens
  misc_RNA (1)...(19): siRNA sense strand
cuacagcccuccaucuucu

SEQ ID NO: 1505696 - RNA, 19 nt, Homo sapiens
  misc_RNA (1)...(19): siRNA sense strand
gugggcagauugcuuguuc

SEQ ID NO: 1505697 - RNA, 19 nt, Homo sapiens
  misc_RNA (1)...(19): siRNA sense strand
ccgucuaccuguacaagaa

SEQ ID NO: 1505698 - RNA, 19 nt, Homo sapiens
  misc_RNA (1)...(19): siRNA sense strand
ggucaugguggaaggcuuu

SEQ ID NO: 1505699 - RNA, 19 nt, Homo sapiens
  misc_RNA (1)...(19): siRNA sense strand
ggcggacucugcucuggaa

SEQ ID NO: 1505700 - RNA, 19 nt, Homo sapiens
  misc_RNA (1)...(19): siRNA sense strand
aaaugaccaucaccucguu

SEQ ID NO: 1505701 - RNA, 19 nt, Homo sapiens
  misc_RNA (1)...(19): siRNA sense strand
aaggaaagaccacaagguu

SEQ ID NO: 1505702 - RNA, 19 nt, Homo sapiens
  misc_RNA (1)...(19): siRNA sense strand
gggcaucauuucccgucaa

SEQ ID NO: 1505703 - RNA, 19 nt, Homo sapiens
  misc_RNA (1)...(19): siRNA sense strand
cucuauggaucaacacuuu

SEQ ID NO: 1505704 - RNA, 19 nt, Homo sapiens
  misc_RNA (1)...(19): siRNA sense strand
gcagaacaugggagccaaa

SEQ ID NO: 1505705 - RNA, 19 nt, Homo sapiens
  misc_RNA (1)...(19): siRNA sense strand
aaaaccaggucucaaguga

SEQ ID NO: 1505706 - RNA, 19 nt, Homo sapiens
  misc_RNA (1)...(19): siRNA sense strand
ucuaaugacugugcugaca

SEQ ID NO: 1505707 - RNA, 19 nt, Homo sapiens
  misc_RNA (1)...(19): siRNA sense strand
uggaggugcugaagaccaa

SEQ ID NO: 1505708 - RNA, 19 nt, Homo sapiens
  misc_RNA (1)...(19): siRNA sense strand
gggcaggacccagauaaag

SEQ ID NO: 1505709 - RNA, 19 nt, Homo sapiens
  misc_RNA (1)...(19): siRNA sense strand
gggcuccauugccaucuuc

SEQ ID NO: 1505710 - RNA, 19 nt, Homo sapiens
  misc_RNA (1)...(19): siRNA sense strand
agccaaauuugcucuguuc

SEQ ID NO: 1505711 - RNA, 19 nt, Homo sapiens
  misc_RNA (1)...(19): siRNA sense strand
aggaugccgucuaccugua

SEQ ID NO: 1505712 - RNA, 19 nt, Homo sapiens
  misc_RNA (1)...(19): siRNA sense strand
cauccugacugcccuacag

SEQ ID NO: 1505713 - RNA, 19 nt, Homo sapiens
  misc_RNA (1)...(19): siRNA sense strand
accacaagguuggguauga

SEQ ID NO: 1505714 - RNA, 19 nt, Homo sapiens
  misc_RNA (1)...(19): siRNA sense strand
gaauguacuaccgaaggaa

SEQ ID NO: 1505715 - RNA, 19 nt, Homo sapiens
  misc_RNA (1)...(19): siRNA sense strand
gcaggacccagauaaagcu

SEQ ID NO: 1505716 - RNA, 19 nt, Homo sapiens
  misc_RNA (1)...(19): siRNA sense strand
uccaauacgccuucuugaa

SEQ ID NO: 1505717 - RNA, 19 nt, Homo sapiens
  misc_RNA (1)...(19): siRNA sense strand
cuuguucgccucccuauuc

SEQ ID NO: 1505718 - RNA, 19 nt, Homo sapiens
  misc_RNA (1)...(19): siRNA sense strand
guacaagaacacccuuugc

SEQ ID NO: 1505719 - RNA, 19 nt, Homo sapiens
  misc_RNA (1)...(19): siRNA sense strand
guuccagguucuccucauc

SEQ ID NO: 1505720 - RNA, 19 nt, Homo sapiens
  misc_RNA (1)...(19): siRNA sense strand
ggcaucauuucccgucaag

SEQ ID NO: 1505721 - RNA, 19 nt, Homo sapiens
  misc_RNA (1)...(19): siRNA sense strand
ccaggucucaagugaugaa

SEQ ID NO: 1505722 - RNA, 19 nt, Homo sapiens
  misc_RNA (1)...(19): siRNA sense strand
gaggugcugaagaccaauu

SEQ ID NO: 1505723 - RNA, 19 nt, Homo sapiens
  misc_RNA (1)...(19): siRNA sense strand
ccuggaggaugccgucuac

SEQ ID NO: 1505724 - RNA, 19 nt, Homo sapiens
  misc_RNA (1)...(19): siRNA sense strand
acagcucuauggaucaaca

SEQ ID NO: 1505725 - RNA, 19 nt, Homo sapiens
  misc_RNA (1)...(19): siRNA sense strand
ucugugcugugcugcuuug

SEQ ID NO: 1505726 - RNA, 19 nt, Homo sapiens
  misc_RNA (1)...(19): siRNA sense strand
ucacagaccugccagauuc

SEQ ID NO: 1505727 - RNA, 19 nt, Homo sapiens
  misc_RNA (1)...(19): siRNA sense strand
ggagaacaagcccaaguua

SEQ ID NO: 1505728 - RNA, 19 nt, Homo sapiens
  misc_RNA (1)...(19): siRNA sense strand
ggaguuagauuaccacacu

SEQ ID NO: 1505729 - RNA, 19 nt, Homo sapiens
  misc_RNA (1)...(19): siRNA sense strand
ggagacagccauccaaaga

SEQ ID NO: 1505730 - RNA, 19 nt, Homo sapiens
  misc_RNA (1)...(19): siRNA sense strand
caugaugccuuugagcuua

SEQ ID NO: 1505731 - RNA, 19 nt, Homo sapiens
  misc_RNA (1)...(19): siRNA sense strand
caagacaucugccuacucu

SEQ ID NO: 1505732 - RNA, 19 nt, Homo sapiens
  misc_RNA (1)...(19): siRNA sense strand
gcagaguucuaccuucuca

SEQ ID NO: 1505733 - RNA, 19 nt, Homo sapiens
  misc_RNA (1)...(19): siRNA sense strand
gaaauggaggcacgacuug

SEQ ID NO: 1505734 - RNA, 19 nt, Homo sapiens
  misc_RNA (1)...(19): siRNA sense strand
ccaccguucucaccucuuu

SEQ ID NO: 1505735 - RNA, 19 nt, Homo sapiens
  misc_RNA (1)...(19): siRNA sense strand
caguacggcuguaagaauu

SEQ ID NO: 1505736 - RNA, 19 nt, Homo sapiens
  misc_RNA (1)...(19): siRNA sense strand
cgacaagaccagaugauug

SEQ ID NO: 1505737 - RNA, 19 nt, Homo sapiens
  misc_RNA (1)...(19): siRNA sense strand
gagugacccuccaggacua

SEQ ID NO: 1505738 - RNA, 19 nt, Homo sapiens
  misc_RNA (1)...(19): siRNA sense strand
ggaaauggaggcacgacuu

SEQ ID NO: 1505739 - RNA, 19 nt, Homo sapiens
  misc_RNA (1)...(19): siRNA sense strand
ugagguggcuaucgaugaa

SEQ ID NO: 1505740 - RNA, 19 nt, Homo sapiens
  misc_RNA (1)...(19): siRNA sense strand
ggucaccaccucagaacua

SEQ ID NO: 1505741 - RNA, 19 nt, Homo sapiens
  misc_RNA (1)...(19): siRNA sense strand
gcaguacggcuguaagaau

SEQ ID NO: 1505742 - RNA, 19 nt, Homo sapiens
  misc_RNA (1)...(19): siRNA sense strand
gggcagaguucuaccuucu

SEQ ID NO: 1505743 - RNA, 19 nt, Homo sapiens
  misc_RNA (1)...(19): siRNA sense strand
gaacaagcccaaguuaguc

SEQ ID NO: 1505744 - RNA, 19 nt, Homo sapiens
  misc_RNA (1)...(19): siRNA sense strand
cagcugagguggcuaucga

SEQ ID NO: 1505745 - RNA, 19 nt, Homo sapiens
  misc_RNA (1)...(19): siRNA sense strand
cgccagaccucucaagauc

SEQ ID NO: 1505746 - RNA, 19 nt, Homo sapiens
  misc_RNA (1)...(19): siRNA sense strand
gaggagacagccauccaaa

SEQ ID NO: 1505747 - RNA, 19 nt, Homo sapiens
  misc_RNA (1)...(19): siRNA sense strand
agacagccauccaaagagu

SEQ ID NO: 1505748 - RNA, 19 nt, Homo sapiens
  misc_RNA (1)...(19): siRNA sense strand
caccaccucagaacuauaa

SEQ ID NO: 1505749 - RNA, 19 nt, Homo sapiens
  misc_RNA (1)...(19): siRNA sense strand
gagaacaagcccaaguuag

SEQ ID NO: 1505750 - RNA, 19 nt, Homo sapiens
  misc_RNA (1)...(19): siRNA sense strand
cugccucucuccagaauga

SEQ ID NO: 1505751 - RNA, 19 nt, Homo sapiens
  misc_RNA (1)...(19): siRNA sense strand
gcucuacugaugauggaua

SEQ ID NO: 1505752 - RNA, 19 nt, Homo sapiens
  misc_RNA (1)...(19): siRNA sense strand
agagggccaugaugccuuu

SEQ ID NO: 1505753 - RNA, 19 nt, Homo sapiens
  misc_RNA (1)...(19): siRNA sense strand
ggaugaggcaaguggcuuu

SEQ ID NO: 1505754 - RNA, 19 nt, Homo sapiens
  misc_RNA (1)...(19): siRNA sense strand
ugcagcagcucacugaaga

SEQ ID NO: 1505755 - RNA, 19 nt, Homo sapiens
  misc_RNA (1)...(19): siRNA sense strand
uggcugcccuaaaggauga

SEQ ID NO: 1505756 - RNA, 19 nt, Homo sapiens
  misc_RNA (1)...(19): siRNA sense strand
uuaaagagcaccaagacau

SEQ ID NO: 1505757 - RNA, 19 nt, Homo sapiens
  misc_RNA (1)...(19): siRNA sense strand
cgacgaggaugaggagaca

SEQ ID NO: 1505758 - RNA, 19 nt, Homo sapiens
  misc_RNA (1)...(19): siRNA sense strand
ugaggcagcacuugaguug

SEQ ID NO: 1505759 - RNA, 19 nt, Homo sapiens
  misc_RNA (1)...(19): siRNA sense strand
agaacaagcccaaguuagu

SEQ ID NO: 1505760 - RNA, 19 nt, Homo sapiens
  misc_RNA (1)...(19): siRNA sense strand
gaugaggcaaguggcuuua

SEQ ID NO: 1505761 - RNA, 19 nt, Homo sapiens
  misc_RNA (1)...(19): siRNA sense strand
ggucgcuggaguuagauua

SEQ ID NO: 1505762 - RNA, 19 nt, Homo sapiens
  misc_RNA (1)...(19): siRNA sense strand
guacggcuguaagaauugu

SEQ ID NO: 1505763 - RNA, 19 nt, Homo sapiens
  misc_RNA (1)...(19): siRNA sense strand
gacaagaccagaugauugc

SEQ ID NO: 1505764 - RNA, 19 nt, Homo sapiens
  misc_RNA (1)...(19): siRNA sense strand
uaaagagcaccaagacauc

SEQ ID NO: 1505765 - RNA, 19 nt, Homo sapiens
  misc_RNA (1)...(19): siRNA sense strand
gcccagggagcacuaauuc

SEQ ID NO: 1505766 - RNA, 19 nt, Homo sapiens
  misc_RNA (1)...(19): siRNA sense strand
ccaagaggcaggccaacug

SEQ ID NO: 1505767 - RNA, 19 nt, Homo sapiens
  misc_RNA (1)...(19): siRNA sense strand
ugacuguccugucccuauc

SEQ ID NO: 1505768 - RNA, 19 nt, Homo sapiens
  misc_RNA (1)...(19): siRNA sense strand
aaacugcaguacggcugua

SEQ ID NO: 1505769 - RNA, 19 nt, Homo sapiens
  misc_RNA (1)...(19): siRNA sense strand
gggaacacccaacagaaag

SEQ ID NO: 1505770 - RNA, 19 nt, Homo sapiens
  misc_RNA (1)...(19): siRNA sense strand
ccagaccucucaagaucag

SEQ ID NO: 1505771 - RNA, 19 nt, Homo sapiens
  misc_RNA (1)...(19): siRNA sense strand
caccucagaacuauaagaa

SEQ ID NO: 1505772 - RNA, 19 nt, Homo sapiens
  misc_RNA (1)...(19): siRNA sense strand
ggaacacccaacagaaagu

SEQ ID NO: 1505773 - RNA, 19 nt, Homo sapiens
  misc_RNA (1)...(19): siRNA sense strand
agaguucuaccuucucaaa

SEQ ID NO: 1505774 - RNA, 19 nt, Homo sapiens
  misc_RNA (1)...(19): siRNA sense strand
gugaugacgacgaggauga

SEQ ID NO: 1505775 - RNA, 19 nt, Homo sapiens
  misc_RNA (1)...(19): siRNA sense strand
gaacacccaacagaaaguc

SEQ ID NO: 1505776 - RNA, 19 nt, Homo sapiens
  misc_RNA (1)...(19): siRNA sense strand
gccaagagcacugaagaca

SEQ ID NO: 1505777 - RNA, 19 nt, Homo sapiens
  misc_RNA (1)...(19): siRNA sense strand
gacuaucgccucccagaca

SEQ ID NO: 1505778 - RNA, 19 nt, Homo sapiens
  misc_RNA (1)...(19): siRNA sense strand
uggcagggccuucuguuca

SEQ ID NO: 1505779 - RNA, 19 nt, Homo sapiens
  misc_RNA (1)...(19): siRNA sense strand
ggagaacacgaggcaggaa

SEQ ID NO: 1505780 - RNA, 19 nt, Homo sapiens
  misc_RNA (1)...(19): siRNA sense strand
gaaagucugcaagcaaugc

SEQ ID NO: 1505781 - RNA, 19 nt, Homo sapiens
  misc_RNA (1)...(19): siRNA sense strand
ccagggagcacuaauucca

SEQ ID NO: 1505782 - RNA, 19 nt, Homo sapiens
  misc_RNA (1)...(19): siRNA sense strand
gaggcaaguggcuuuaaca

SEQ ID NO: 1505783 - RNA, 19 nt, Homo sapiens
  misc_RNA (1)...(19): siRNA sense strand
gaguuagauuaccacacuu

SEQ ID NO: 1505784 - RNA, 19 nt, Homo sapiens
  misc_RNA (1)...(19): siRNA sense strand
ugaggcaaguggcuuuaac

SEQ ID NO: 1505785 - RNA, 19 nt, Homo sapiens
  misc_RNA (1)...(19): siRNA sense strand
ccucacaggcagagauaga

SEQ ID NO: 1505786 - RNA, 19 nt, Homo sapiens
  misc_RNA (1)...(19): siRNA sense strand
agauuccucugguaaacug

SEQ ID NO: 1505787 - RNA, 19 nt, Homo sapiens
  misc_RNA (1)...(19): siRNA sense strand
ggcaaguggcuuuaacauc

SEQ ID NO: 1505788 - RNA, 19 nt, Homo sapiens
  misc_RNA (1)...(19): siRNA sense strand
gucaccaccucagaacuau

SEQ ID NO: 1505789 - RNA, 19 nt, Homo sapiens
  misc_RNA (1)...(19): siRNA sense strand
ggcagggccuucuguucag

SEQ ID NO: 1505790 - RNA, 19 nt, Homo sapiens
  misc_RNA (1)...(19): siRNA sense strand
aagaagcuucccuggauga

SEQ ID NO: 1505791 - RNA, 19 nt, Homo sapiens
  misc_RNA (1)...(19): siRNA sense strand
gagacagccauccaaagag

SEQ ID NO: 1505792 - RNA, 19 nt, Homo sapiens
  misc_RNA (1)...(19): siRNA sense strand
gacccaagcccagcagaca

SEQ ID NO: 1505793 - RNA, 19 nt, Homo sapiens
  misc_RNA (1)...(19): siRNA sense strand
gacacgacaagaccagaug

SEQ ID NO: 1505794 - RNA, 19 nt, Homo sapiens
  misc_RNA (1)...(19): siRNA sense strand
ccaugaugccuuugagcuu

SEQ ID NO: 1505795 - RNA, 19 nt, Homo sapiens
  misc_RNA (1)...(19): siRNA sense strand
ggcccagggagcacuaauu

SEQ ID NO: 1505796 - RNA, 19 nt, Homo sapiens
  misc_RNA (1)...(19): siRNA sense strand
aaacaaagauggcuauguc

SEQ ID NO: 1505797 - RNA, 19 nt, Homo sapiens
  misc_RNA (1)...(19): siRNA sense strand
gcaccacgaugagcuguga

SEQ ID NO: 1505798 - RNA, 19 nt, Homo sapiens
  misc_RNA (1)...(19): siRNA sense strand
gcagucaggccaccaacua

SEQ ID NO: 1505799 - RNA, 19 nt, Homo sapiens
  misc_RNA (1)...(19): siRNA sense strand
uggaggaccuggacagaaa

SEQ ID NO: 1505800 - RNA, 19 nt, Homo sapiens
  misc_RNA (1)...(19): siRNA sense strand
gcggaaauccuggguaauu

SEQ ID NO: 1505801 - RNA, 19 nt, Homo sapiens
  misc_RNA (1)...(19): siRNA sense strand
ggaaguggccaaggaauuc

SEQ ID NO: 1505802 - RNA, 19 nt, Homo sapiens
  misc_RNA (1)...(19): siRNA sense strand
aagcggaaauccuggguaa

SEQ ID NO: 1505803 - RNA, 19 nt, Homo sapiens
  misc_RNA (1)...(19): siRNA sense strand
ggaccuggacagaaacaaa

SEQ ID NO: 1505804 - RNA, 19 nt, Homo sapiens
  misc_RNA (1)...(19): siRNA sense strand
gaaacaaagauggcuaugu

SEQ ID NO: 1505805 - RNA, 19 nt, Homo sapiens
  misc_RNA (1)...(19): siRNA sense strand
guaauuggaacauguuugu

SEQ ID NO: 1505806 - RNA, 19 nt, Homo sapiens
  misc_RNA (1)...(19): siRNA sense strand
gacgggaaguggccaagga

SEQ ID NO: 1505807 - RNA, 19 nt, Homo sapiens
  misc_RNA (1)...(19): siRNA sense strand
cggaaauccuggguaauug

SEQ ID NO: 1505808 - RNA, 19 nt, Homo sapiens
  misc_RNA (1)...(19): siRNA sense strand
gggaaguggccaaggaauu

SEQ ID NO: 1505809 - RNA, 19 nt, Homo sapiens
  misc_RNA (1)...(19): siRNA sense strand
gaaauccuggguaauugga

SEQ ID NO: 1505810 - RNA, 19 nt, Homo sapiens
  misc_RNA (1)...(19): siRNA sense strand
ccaaggaauucgaccaacu

SEQ ID NO: 1505811 - RNA, 19 nt, Homo sapiens
  misc_RNA (1)...(19): siRNA sense strand
guacgaccaugaggcuuuc

SEQ ID NO: 1505812 - RNA, 19 nt, Homo sapiens
  misc_RNA (1)...(19): siRNA sense strand
ggacaucgugauugcugaa

SEQ ID NO: 1505813 - RNA, 19 nt, Homo sapiens
  misc_RNA (1)...(19): siRNA sense strand
gaacuuccaguacgaccau

SEQ ID NO: 1505814 - RNA, 19 nt, Homo sapiens
  misc_RNA (1)...(19): siRNA sense strand
cugcuucuguugcuacuga

SEQ ID NO: 1505815 - RNA, 19 nt, Homo sapiens
  misc_RNA (1)...(19): siRNA sense strand
caucaguucugcugcuucu

SEQ ID NO: 1505816 - RNA, 19 nt, Homo sapiens
  misc_RNA (1)...(19): siRNA sense strand
ggaaauccuggguaauugg

SEQ ID NO: 1505817 - RNA, 19 nt, Homo sapiens
  misc_RNA (1)...(19): siRNA sense strand
ggaugcagagaccuacaaa

SEQ ID NO: 1505818 - RNA, 19 nt, Homo sapiens
  misc_RNA (1)...(19): siRNA sense strand
uccgggaucugaacaagga

SEQ ID NO: 1505819 - RNA, 19 nt, Homo sapiens
  misc_RNA (1)...(19): siRNA sense strand
cagaaacaaagauggcuau

SEQ ID NO: 1505820 - RNA, 19 nt, Homo sapiens
  misc_RNA (1)...(19): siRNA sense strand
agacggagaggcagcaguu

SEQ ID NO: 1505821 - RNA, 19 nt, Homo sapiens
  misc_RNA (1)...(19): siRNA sense strand
caucgcggaucuguacuca

SEQ ID NO: 1505822 - RNA, 19 nt, Homo sapiens
  misc_RNA (1)...(19): siRNA sense strand
gguaauuggaacauguuug

SEQ ID NO: 1505823 - RNA, 19 nt, Homo sapiens
  misc_RNA (1)...(19): siRNA sense strand
caaggaauucgaccaacuc

SEQ ID NO: 1505824 - RNA, 19 nt, Homo sapiens
  misc_RNA (1)...(19): siRNA sense strand
gaccuggacagaaacaaag

SEQ ID NO: 1505825 - RNA, 19 nt, Homo sapiens
  misc_RNA (1)...(19): siRNA sense strand
ggccaaggaauucgaccaa

SEQ ID NO: 1505826 - RNA, 19 nt, Homo sapiens
  misc_RNA (1)...(19): siRNA sense strand
ggacuuccgggaucugaac

SEQ ID NO: 1505827 - RNA, 19 nt, Homo sapiens
  misc_RNA (1)...(19): siRNA sense strand
aggaguacaucgcggaucu

SEQ ID NO: 1505828 - RNA, 19 nt, Homo sapiens
  misc_RNA (1)...(19): siRNA sense strand
ugacccggcaccacgauga

SEQ ID NO: 1505829 - RNA, 19 nt, Homo sapiens
  misc_RNA (1)...(19): siRNA sense strand
cuggguaauuggaacaugu

SEQ ID NO: 1505830 - RNA, 19 nt, Homo sapiens
  misc_RNA (1)...(19): siRNA sense strand
gcacagcgauuaaugcaau

SEQ ID NO: 1505831 - RNA, 19 nt, Homo sapiens
  misc_RNA (1)...(19): siRNA sense strand
gcagauauaucagcauuug

SEQ ID NO: 1505832 - RNA, 19 nt, Homo sapiens
  misc_RNA (1)...(19): siRNA sense strand
uaaagccacuguuggauuu

SEQ ID NO: 1505833 - RNA, 19 nt, Homo sapiens
  misc_RNA (1)...(19): siRNA sense strand
caaccgaaguaacagauuu

SEQ ID NO: 1505834 - RNA, 19 nt, Homo sapiens
  misc_RNA (1)...(19): siRNA sense strand
gaaguuggcaguagagaaa

SEQ ID NO: 1505835 - RNA, 19 nt, Homo sapiens
  misc_RNA (1)...(19): siRNA sense strand
gcaaagaaguuggcaguag

SEQ ID NO: 1505836 - RNA, 19 nt, Homo sapiens
  misc_RNA (1)...(19): siRNA sense strand
agaaggauaucgacucuuu

SEQ ID NO: 1505837 - RNA, 19 nt, Homo sapiens
  misc_RNA (1)...(19): siRNA sense strand
caaagaaguuggcaguaga

SEQ ID NO: 1505838 - RNA, 19 nt, Homo sapiens
  misc_RNA (1)...(19): siRNA sense strand
ggauugaucuuacacaagu

SEQ ID NO: 1505839 - RNA, 19 nt, Homo sapiens
  misc_RNA (1)...(19): siRNA sense strand
ggacacaguuauaagacaa

SEQ ID NO: 1505840 - RNA, 19 nt, Homo sapiens
  misc_RNA (1)...(19): siRNA sense strand
gaaagggauugaucuuaca

SEQ ID NO: 1505841 - RNA, 19 nt, Homo sapiens
  misc_RNA (1)...(19): siRNA sense strand
ggacucaucacaccuauug

SEQ ID NO: 1505842 - RNA, 19 nt, Homo sapiens
  misc_RNA (1)...(19): siRNA sense strand
gagaaagggauugaucuua

SEQ ID NO: 1505843 - RNA, 19 nt, Homo sapiens
  misc_RNA (1)...(19): siRNA sense strand
acaggugucuucacagaua

SEQ ID NO: 1505844 - RNA, 19 nt, Homo sapiens
  misc_RNA (1)...(19): siRNA sense strand
guacggaaagaacuuaaua

SEQ ID NO: 1505845 - RNA, 19 nt, Homo sapiens
  misc_RNA (1)...(19): siRNA sense strand
gcaaucaaagcaaaccaua

SEQ ID NO: 1505846 - RNA, 19 nt, Homo sapiens
  misc_RNA (1)...(19): siRNA sense strand
uggcagagauagaaacuga

SEQ ID NO: 1505847 - RNA, 19 nt, Homo sapiens
  misc_RNA (1)...(19): siRNA sense strand
guaaauaugggagaaguuu

SEQ ID NO: 1505848 - RNA, 19 nt, Homo sapiens
  misc_RNA (1)...(19): siRNA sense strand
uugcagagguugaaacuga

SEQ ID NO: 1505849 - RNA, 19 nt, Homo sapiens
  misc_RNA (1)...(19): siRNA sense strand
gaagggagaagcaaaauuu

SEQ ID NO: 1505850 - RNA, 19 nt, Homo sapiens
  misc_RNA (1)...(19): siRNA sense strand
gaucuccaauuuaggaaug

SEQ ID NO: 1505851 - RNA, 19 nt, Homo sapiens
  misc_RNA (1)...(19): siRNA sense strand
aaagauacuuguugcugaa

SEQ ID NO: 1505852 - RNA, 19 nt, Homo sapiens
  misc_RNA (1)...(19): siRNA sense strand
uaacccaccucaagcaugu

SEQ ID NO: 1505853 - RNA, 19 nt, Homo sapiens
  misc_RNA (1)...(19): siRNA sense strand
caagaaggauaucgacucu

SEQ ID NO: 1505854 - RNA, 19 nt, Homo sapiens
  misc_RNA (1)...(19): siRNA sense strand
caacauucgucggguuauu

SEQ ID NO: 1505855 - RNA, 19 nt, Homo sapiens
  misc_RNA (1)...(19): siRNA sense strand
cuacaggugucuucacaga

SEQ ID NO: 1505856 - RNA, 19 nt, Homo sapiens
  misc_RNA (1)...(19): siRNA sense strand
gcgacgggcucagaaugua

SEQ ID NO: 1505857 - RNA, 19 nt, Homo sapiens
  misc_RNA (1)...(19): siRNA sense strand
gcuagcaugaugucuguua

SEQ ID NO: 1505858 - RNA, 19 nt, Homo sapiens
  misc_RNA (1)...(19): siRNA sense strand
ggagcgaucaucuguauca

SEQ ID NO: 1505859 - RNA, 19 nt, Homo sapiens
  misc_RNA (1)...(19): siRNA sense strand
ugacaaagccacuauaggu

SEQ ID NO: 1505860 - RNA, 19 nt, Homo sapiens
  misc_RNA (1)...(19): siRNA sense strand
aaccauaccucauuauuac

SEQ ID NO: 1505861 - RNA, 19 nt, Homo sapiens
  misc_RNA (1)...(19): siRNA sense strand
agaaagggauugaucuuac

SEQ ID NO: 1505862 - RNA, 19 nt, Homo sapiens
  misc_RNA (1)...(19): siRNA sense strand
ccaguggcuugcugaguuu

SEQ ID NO: 1505863 - RNA, 19 nt, Homo sapiens
  misc_RNA (1)...(19): siRNA sense strand
gauggacacaguuauaaga

SEQ ID NO: 1505864 - RNA, 19 nt, Homo sapiens
  misc_RNA (1)...(19): siRNA sense strand
caaaccauaccucauuauu

SEQ ID NO: 1505865 - RNA, 19 nt, Homo sapiens
  misc_RNA (1)...(19): siRNA sense strand
ggugguggauggagcaguu

SEQ ID NO: 1505866 - RNA, 19 nt, Homo sapiens
  misc_RNA (1)...(19): siRNA sense strand
gaagguaccagggauguuc

SEQ ID NO: 1505867 - RNA, 19 nt, Homo sapiens
  misc_RNA (1)...(19): siRNA sense strand
gauguuguuucuuuagcaa

SEQ ID NO: 1505868 - RNA, 19 nt, Homo sapiens
  misc_RNA (1)...(19): siRNA sense strand
gcaggacucaucacaccua

SEQ ID NO: 1505869 - RNA, 19 nt, Homo sapiens
  misc_RNA (1)...(19): siRNA sense strand
ucacagauaucccaaucag

SEQ ID NO: 1505870 - RNA, 19 nt, Homo sapiens
  misc_RNA (1)...(19): siRNA sense strand
aaacuggucccugcagaua

SEQ ID NO: 1505871 - RNA, 19 nt, Homo sapiens
  misc_RNA (1)...(19): siRNA sense strand
aagcaaaccauaccucauu

SEQ ID NO: 1505872 - RNA, 19 nt, Homo sapiens
  misc_RNA (1)...(19): siRNA sense strand
gacaaagccacuauagguu

SEQ ID NO: 1505873 - RNA, 19 nt, Homo sapiens
  misc_RNA (1)...(19): siRNA sense strand
gcagagguugaaacugaua

SEQ ID NO: 1505874 - RNA, 19 nt, Homo sapiens
  misc_RNA (1)...(19): siRNA sense strand
gaguggaaaccauugcuaa

SEQ ID NO: 1505875 - RNA, 19 nt, Homo sapiens
  misc_RNA (1)...(19): siRNA sense strand
acaaagccacuauagguuu

SEQ ID NO: 1505876 - RNA, 19 nt, Homo sapiens
  misc_RNA (1)...(19): siRNA sense strand
aagggaaggguguuuguua

SEQ ID NO: 1505877 - RNA, 19 nt, Homo sapiens
  misc_RNA (1)...(19): siRNA sense strand
caagagaggguaaacuaca

SEQ ID NO: 1505878 - RNA, 19 nt, Homo sapiens
  misc_RNA (1)...(19): siRNA sense strand
ucggagcgaucaucuguau

SEQ ID NO: 1505879 - RNA, 19 nt, Homo sapiens
  misc_RNA (1)...(19): siRNA sense strand
agcaaaccauaccucauua

SEQ ID NO: 1505880 - RNA, 19 nt, Homo sapiens
  misc_RNA (1)...(19): siRNA sense strand
ccacaagugccaccaccua

SEQ ID NO: 1505881 - RNA, 19 nt, Homo sapiens
  misc_RNA (1)...(19): siRNA sense strand
ggauauugaggccuuuaaa

SEQ ID NO: 1505882 - RNA, 19 nt, Homo sapiens
  misc_RNA (1)...(19): siRNA sense strand
cuucagcuuuggcauguuu

SEQ ID NO: 1505883 - RNA, 19 nt, Homo sapiens
  misc_RNA (1)...(19): siRNA sense strand
uugcugaguuuagaaagua

SEQ ID NO: 1505884 - RNA, 19 nt, Homo sapiens
  misc_RNA (1)...(19): siRNA sense strand
cccaguggcuugcugaguu

SEQ ID NO: 1505885 - RNA, 19 nt, Homo sapiens
  misc_RNA (1)...(19): siRNA sense strand
uggcaagccugaggauauu

SEQ ID NO: 1505886 - RNA, 19 nt, Homo sapiens
  misc_RNA (1)...(19): siRNA sense strand
ugauguggcuagcaugaug

SEQ ID NO: 1505887 - RNA, 19 nt, Homo sapiens
  misc_RNA (1)...(19): siRNA sense strand
ccaccucaagcauguauuu

SEQ ID NO: 1505888 - RNA, 19 nt, Homo sapiens
  misc_RNA (1)...(19): siRNA sense strand
cagcgugacuacaggguau

SEQ ID NO: 1505889 - RNA, 19 nt, Homo sapiens
  misc_RNA (1)...(19): siRNA sense strand
cacuauagguuuugaagua

SEQ ID NO: 1505890 - RNA, 19 nt, Homo sapiens
  misc_RNA (1)...(19): siRNA sense strand
gcaagccugaggauauuga

SEQ ID NO: 1505891 - RNA, 19 nt, Homo sapiens
  misc_RNA (1)...(19): siRNA sense strand
guaaacuacagccacauga

SEQ ID NO: 1505892 - RNA, 19 nt, Homo sapiens
  misc_RNA (1)...(19): siRNA sense strand
gcaaaccauaccucauuau

SEQ ID NO: 1505893 - RNA, 19 nt, Homo sapiens
  misc_RNA (1)...(19): siRNA sense strand
agagauagaaacugacaaa

SEQ ID NO: 1505894 - RNA, 19 nt, Homo sapiens
  misc_RNA (1)...(19): siRNA sense strand
gagacuuacuggcagagau

SEQ ID NO: 1505895 - RNA, 19 nt, Homo sapiens
  misc_RNA (1)...(19): siRNA sense strand
gcagagauagaaacugaca

SEQ ID NO: 1505896 - RNA, 19 nt, Homo sapiens
  misc_RNA (1)...(19): siRNA sense strand
ggaauguuuggaauuaaga

SEQ ID NO: 1505897 - RNA, 19 nt, Homo sapiens
  misc_RNA (1)...(19): siRNA sense strand
ggaguggaaaccauugcua

SEQ ID NO: 1505898 - RNA, 19 nt, Homo sapiens
  misc_RNA (1)...(19): siRNA sense strand
guagagaaagggauugauc

SEQ ID NO: 1505899 - RNA, 19 nt, Homo sapiens
  misc_RNA (1)...(19): siRNA sense strand
aggcagauauaucagcauu

SEQ ID NO: 1505900 - RNA, 19 nt, Homo sapiens
  misc_RNA (1)...(19): siRNA sense strand
gauugaucuuacacaagua

SEQ ID NO: 1505901 - RNA, 19 nt, Homo sapiens
  misc_RNA (1)...(19): siRNA sense strand
agacuuacuggcagagaua

SEQ ID NO: 1505902 - RNA, 19 nt, Homo sapiens
  misc_RNA (1)...(19): siRNA sense strand
gaagcaaaauuucugucaa

SEQ ID NO: 1505903 - RNA, 19 nt, Homo sapiens
  misc_RNA (1)...(19): siRNA sense strand
ucagcacccugcccagcua

SEQ ID NO: 1505904 - RNA, 19 nt, Homo sapiens
  misc_RNA (1)...(19): siRNA sense strand
caaagccacuauagguuuu

SEQ ID NO: 1505905 - RNA, 19 nt, Homo sapiens
  misc_RNA (1)...(19): siRNA sense strand
ugauaaagccacuguugga

SEQ ID NO: 1505906 - RNA, 19 nt, Homo sapiens
  misc_RNA (1)...(19): siRNA sense strand
gguuauugcacagcgauua

SEQ ID NO: 1505907 - RNA, 19 nt, Homo sapiens
  misc_RNA (1)...(19): siRNA sense strand
cuaucacuauguuguugua

SEQ ID NO: 1505908 - RNA, 19 nt, Homo sapiens
  misc_RNA (1)...(19): siRNA sense strand
uuuacgaucuccaauuuag

SEQ ID NO: 1505909 - RNA, 19 nt, Homo sapiens
  misc_RNA (1)...(19): siRNA sense strand
uaaacuacagccacaugaa

SEQ ID NO: 1505910 - RNA, 19 nt, Homo sapiens
  misc_RNA (1)...(19): siRNA sense strand
uuaccuuucuaucgaugua

SEQ ID NO: 1505911 - RNA, 19 nt, Homo sapiens
  misc_RNA (1)...(19): siRNA sense strand
gaaacugacaaagccacua

SEQ ID NO: 1505912 - RNA, 19 nt, Homo sapiens
  misc_RNA (1)...(19): siRNA sense strand
ccaaagcaagagaggguaa

SEQ ID NO: 1505913 - RNA, 19 nt, Homo sapiens
  misc_RNA (1)...(19): siRNA sense strand
ggugagaagcuaagugaag

SEQ ID NO: 1505914 - RNA, 19 nt, Homo sapiens
  misc_RNA (1)...(19): siRNA sense strand
aaacuacagccacaugaau

SEQ ID NO: 1505915 - RNA, 19 nt, Homo sapiens
  misc_RNA (1)...(19): siRNA sense strand
gcaagagaggguaaacuac

SEQ ID NO: 1505916 - RNA, 19 nt, Homo sapiens
  misc_RNA (1)...(19): siRNA sense strand
guagaaucaccaagaagga

SEQ ID NO: 1505917 - RNA, 19 nt, Homo sapiens
  misc_RNA (1)...(19): siRNA sense strand
aaaccuaucacuauguugu

SEQ ID NO: 1505918 - RNA, 19 nt, Homo sapiens
  misc_RNA (1)...(19): siRNA sense strand
gggagaaguuuuguuggua

SEQ ID NO: 1505919 - RNA, 19 nt, Homo sapiens
  misc_RNA (1)...(19): siRNA sense strand
agaaucaccaagaaggaua

SEQ ID NO: 1505920 - RNA, 19 nt, Homo sapiens
  misc_RNA (1)...(19): siRNA sense strand
aguguuauauggcaaagau

SEQ ID NO: 1505921 - RNA, 19 nt, Homo sapiens
  misc_RNA (1)...(19): siRNA sense strand
gguaaacuacagccacaug

SEQ ID NO: 1505922 - RNA, 19 nt, Homo sapiens
  misc_RNA (1)...(19): siRNA sense strand
gcaaaauuucugucaauga

SEQ ID NO: 1505923 - RNA, 19 nt, Homo sapiens
  misc_RNA (1)...(19): siRNA sense strand
guuauugcacagcgauuaa

SEQ ID NO: 1505924 - RNA, 19 nt, Homo sapiens
  misc_RNA (1)...(19): siRNA sense strand
gaaucaccaagaaggauau

SEQ ID NO: 1505925 - RNA, 19 nt, Homo sapiens
  misc_RNA (1)...(19): siRNA sense strand
gauacuuguugcugaaggu

SEQ ID NO: 1505926 - RNA, 19 nt, Homo sapiens
  misc_RNA (1)...(19): siRNA sense strand
aaacugacaaagccacuau

SEQ ID NO: 1505927 - RNA, 19 nt, Homo sapiens
  misc_RNA (1)...(19): siRNA sense strand
gauaaagccacuguuggau

SEQ ID NO: 1505928 - RNA, 19 nt, Homo sapiens
  misc_RNA (1)...(19): siRNA sense strand
cgauguaaauaugggagaa

SEQ ID NO: 1505929 - RNA, 19 nt, Homo sapiens
  misc_RNA (1)...(19): siRNA sense strand
gaggauauugaggccuuua

SEQ ID NO: 1505930 - RNA, 19 nt, Homo sapiens
  misc_RNA (1)...(19): siRNA sense strand
gaucggaaauugcauagua

SEQ ID NO: 1505931 - RNA, 19 nt, Homo sapiens
  misc_RNA (1)...(19): siRNA sense strand
caugagagaucaagagaua

SEQ ID NO: 1505932 - RNA, 19 nt, Homo sapiens
  misc_RNA (1)...(19): siRNA sense strand
gaacgggaaugucauauag

SEQ ID NO: 1505933 - RNA, 19 nt, Homo sapiens
  misc_RNA (1)...(19): siRNA sense strand
gaagugaucuacaacuaug

SEQ ID NO: 1505934 - RNA, 19 nt, Homo sapiens
  misc_RNA (1)...(19): siRNA sense strand
gaaaugauccucccucuca

SEQ ID NO: 1505935 - RNA, 19 nt, Homo sapiens
  misc_RNA (1)...(19): siRNA sense strand
agaaggagcucggaauaua

SEQ ID NO: 1505936 - RNA, 19 nt, Homo sapiens
  misc_RNA (1)...(19): siRNA sense strand
ggagaagaauauucacaaa

SEQ ID NO: 1505937 - RNA, 19 nt, Homo sapiens
  misc_RNA (1)...(19): siRNA sense strand
gagcgauucuggauuacua

SEQ ID NO: 1505938 - RNA, 19 nt, Homo sapiens
  misc_RNA (1)...(19): siRNA sense strand
guaaaucuaucaccaaucu

SEQ ID NO: 1505939 - RNA, 19 nt, Homo sapiens
  misc_RNA (1)...(19): siRNA sense strand
gcaugugacuaucuuugua

SEQ ID NO: 1505940 - RNA, 19 nt, Homo sapiens
  misc_RNA (1)...(19): siRNA sense strand
gauccucccucucauggua

SEQ ID NO: 1505941 - RNA, 19 nt, Homo sapiens
  misc_RNA (1)...(19): siRNA sense strand
gagagaagcaugugacuau

SEQ ID NO: 1505942 - RNA, 19 nt, Homo sapiens
  misc_RNA (1)...(19): siRNA sense strand
gaugguaacuccagugauc

SEQ ID NO: 1505943 - RNA, 19 nt, Homo sapiens
  misc_RNA (1)...(19): siRNA sense strand
cagaagugaucuacaacua

SEQ ID NO: 1505944 - RNA, 19 nt, Homo sapiens
  misc_RNA (1)...(19): siRNA sense strand
gaaggagcucggaauauaa

SEQ ID NO: 1505945 - RNA, 19 nt, Homo sapiens
  misc_RNA (1)...(19): siRNA sense strand
cuacaacuauguccaaaga

SEQ ID NO: 1505946 - RNA, 19 nt, Homo sapiens
  misc_RNA (1)...(19): siRNA sense strand
ggaaagagucggcauguag

SEQ ID NO: 1505947 - RNA, 19 nt, Homo sapiens
  misc_RNA (1)...(19): siRNA sense strand
gggagaugguguuuguaua

SEQ ID NO: 1505948 - RNA, 19 nt, Homo sapiens
  misc_RNA (1)...(19): siRNA sense strand
ggaacgggaaugucauaua

SEQ ID NO: 1505949 - RNA, 19 nt, Homo sapiens
  misc_RNA (1)...(19): siRNA sense strand
gaguaaaucuaucaccaau

SEQ ID NO: 1505950 - RNA, 19 nt, Homo sapiens
  misc_RNA (1)...(19): siRNA sense strand
gcccagaagugaucuacaa

SEQ ID NO: 1505951 - RNA, 19 nt, Homo sapiens
  misc_RNA (1)...(19): siRNA sense strand
ggagaugguguuuguauau

SEQ ID NO: 1505952 - RNA, 19 nt, Homo sapiens
  misc_RNA (1)...(19): siRNA sense strand
ugauugggaugaagaauau

SEQ ID NO: 1505953 - RNA, 19 nt, Homo sapiens
  misc_RNA (1)...(19): siRNA sense strand
gauugggaauagaagguua

SEQ ID NO: 1505954 - RNA, 19 nt, Homo sapiens
  misc_RNA (1)...(19): siRNA sense strand
gaaagagucggcauguaga

SEQ ID NO: 1505955 - RNA, 19 nt, Homo sapiens
  misc_RNA (1)...(19): siRNA sense strand
uauccuaccuacaaagaaa

SEQ ID NO: 1505956 - RNA, 19 nt, Homo sapiens
  misc_RNA (1)...(19): siRNA sense strand
uaguagaccucguaaacuu

SEQ ID NO: 1505957 - RNA, 19 nt, Homo sapiens
  misc_RNA (1)...(19): siRNA sense strand
gaaggaagaaggaaagagu

SEQ ID NO: 1505958 - RNA, 19 nt, Homo sapiens
  misc_RNA (1)...(19): siRNA sense strand
ggaauagaagguuauccua

SEQ ID NO: 1505959 - RNA, 19 nt, Homo sapiens
  misc_RNA (1)...(19): siRNA sense strand
gcucacuccuuguauuaga

SEQ ID NO: 1505960 - RNA, 19 nt, Homo sapiens
  misc_RNA (1)...(19): siRNA sense strand
gcauguagacuuucagugu

SEQ ID NO: 1505961 - RNA, 19 nt, Homo sapiens
  misc_RNA (1)...(19): siRNA sense strand
ccagugauccagagaauug

SEQ ID NO: 1505962 - RNA, 19 nt, Homo sapiens
  misc_RNA (1)...(19): siRNA sense strand
aaagaaggagcucggaaua

SEQ ID NO: 1505963 - RNA, 19 nt, Homo sapiens
  misc_RNA (1)...(19): siRNA sense strand
gaugguguuuguauaugaa

SEQ ID NO: 1505964 - RNA, 19 nt, Homo sapiens
  misc_RNA (1)...(19): siRNA sense strand
gagaugguguuuguauaug

SEQ ID NO: 1505965 - RNA, 19 nt, Homo sapiens
  misc_RNA (1)...(19): siRNA sense strand
ugacagaucacgagauuca

SEQ ID NO: 1505966 - RNA, 19 nt, Homo sapiens
  misc_RNA (1)...(19): siRNA sense strand
uggaugagcuggauauucu

SEQ ID NO: 1505967 - RNA, 19 nt, Homo sapiens
  misc_RNA (1)...(19): siRNA sense strand
gcauccaacuccacaagug

SEQ ID NO: 1505968 - RNA, 19 nt, Homo sapiens
  misc_RNA (1)...(19): siRNA sense strand
gaagauuagauugggaaua

SEQ ID NO: 1505969 - RNA, 19 nt, Homo sapiens
  misc_RNA (1)...(19): siRNA sense strand
cagcucacuccuuguauua

SEQ ID NO: 1505970 - RNA, 19 nt, Homo sapiens
  misc_RNA (1)...(19): siRNA sense strand
gcaccauguugaacgagaa

SEQ ID NO: 1505971 - RNA, 19 nt, Homo sapiens
  misc_RNA (1)...(19): siRNA sense strand
aagauuagauugggaauag

SEQ ID NO: 1505972 - RNA, 19 nt, Homo sapiens
  misc_RNA (1)...(19): siRNA sense strand
ucagugcccuaaugcauga

SEQ ID NO: 1505973 - RNA, 19 nt, Homo sapiens
  misc_RNA (1)...(19): siRNA sense strand
uggcauaucuauuccugaa

SEQ ID NO: 1505974 - RNA, 19 nt, Homo sapiens
  misc_RNA (1)...(19): siRNA sense strand
gaucuggccgagaacauaa

SEQ ID NO: 1505975 - RNA, 19 nt, Homo sapiens
  misc_RNA (1)...(19): siRNA sense strand
ccagcucacuccuuguauu

SEQ ID NO: 1505976 - RNA, 19 nt, Homo sapiens
  misc_RNA (1)...(19): siRNA sense strand
gaugggagaagaauauuca

SEQ ID NO: 1505977 - RNA, 19 nt, Homo sapiens
  misc_RNA (1)...(19): siRNA sense strand
gcuuacagaugaugaugug

SEQ ID NO: 1505978 - RNA, 19 nt, Homo sapiens
  misc_RNA (1)...(19): siRNA sense strand
gcauaucuauuccugaacu

SEQ ID NO: 1505979 - RNA, 19 nt, Homo sapiens
  misc_RNA (1)...(19): siRNA sense strand
gaacagcagcagaaacagu

SEQ ID NO: 1505980 - RNA, 19 nt, Homo sapiens
  misc_RNA (1)...(19): siRNA sense strand
gggaacagcagcagaaaca

SEQ ID NO: 1505981 - RNA, 19 nt, Homo sapiens
  misc_RNA (1)...(19): siRNA sense strand
guggauaacacuagauuug

SEQ ID NO: 1505982 - RNA, 19 nt, Homo sapiens
  misc_RNA (1)...(19): siRNA sense strand
gcacagccaaauacaaugu

SEQ ID NO: 1505983 - RNA, 19 nt, Homo sapiens
  misc_RNA (1)...(19): siRNA sense strand
cagaaacaguagucaguca

SEQ ID NO: 1505984 - RNA, 19 nt, Homo sapiens
  misc_RNA (1)...(19): siRNA sense strand
uucgagcgauucuggauua

SEQ ID NO: 1505985 - RNA, 19 nt, Homo sapiens
  misc_RNA (1)...(19): siRNA sense strand
gcucguagacaauuugaau

SEQ ID NO: 1505986 - RNA, 19 nt, Homo sapiens
  misc_RNA (1)...(19): siRNA sense strand
ggaucuggccgagaacaua

SEQ ID NO: 1505987 - RNA, 19 nt, Homo sapiens
  misc_RNA (1)...(19): siRNA sense strand
gggagaagaauauucacaa

SEQ ID NO: 1505988 - RNA, 19 nt, Homo sapiens
  misc_RNA (1)...(19): siRNA sense strand
ugcaugaguuaucaaauga

SEQ ID NO: 1505989 - RNA, 19 nt, Homo sapiens
  misc_RNA (1)...(19): siRNA sense strand
guuuggaucuggccgagaa

SEQ ID NO: 1505990 - RNA, 19 nt, Homo sapiens
  misc_RNA (1)...(19): siRNA sense strand
acagagauguggccaaguc

SEQ ID NO: 1505991 - RNA, 19 nt, Homo sapiens
  misc_RNA (1)...(19): siRNA sense strand
gaagaauauccaccacaga

SEQ ID NO: 1505992 - RNA, 19 nt, Homo sapiens
  misc_RNA (1)...(19): siRNA sense strand
ccuaaugcaugaguuauca

SEQ ID NO: 1505993 - RNA, 19 nt, Homo sapiens
  misc_RNA (1)...(19): siRNA sense strand
gauagacgaaggucaagug

SEQ ID NO: 1505994 - RNA, 19 nt, Homo sapiens
  misc_RNA (1)...(19): siRNA sense strand
ggagaaggaagaaggaaag

SEQ ID NO: 1505995 - RNA, 19 nt, Homo sapiens
  misc_RNA (1)...(19): siRNA sense strand
gaucuacaacuauguccaa

SEQ ID NO: 1505996 - RNA, 19 nt, Homo sapiens
  misc_RNA (1)...(19): siRNA sense strand
guuguagacccauccauuu

SEQ ID NO: 1505997 - RNA, 19 nt, Homo sapiens
  misc_RNA (1)...(19): siRNA sense strand
aaaugugacuucuccaaca

SEQ ID NO: 1505998 - RNA, 19 nt, Homo sapiens
  misc_RNA (1)...(19): siRNA sense strand
ggacaugagagaucaagag

SEQ ID NO: 1505999 - RNA, 19 nt, Homo sapiens
  misc_RNA (1)...(19): siRNA sense strand
gauuagauugggaauagaa

SEQ ID NO: 1506000 - RNA, 19 nt, Homo sapiens
  misc_RNA (1)...(19): siRNA sense strand
agaagcaugugacuaucuu

SEQ ID NO: 1506001 - RNA, 19 nt, Homo sapiens
  misc_RNA (1)...(19): siRNA sense strand
uauaagaacgucagaacga

SEQ ID NO: 1506002 - RNA, 19 nt, Homo sapiens
  misc_RNA (1)...(19): siRNA sense strand
gaacugagagaagcaugug

SEQ ID NO: 1506003 - RNA, 19 nt, Homo sapiens
  misc_RNA (1)...(19): siRNA sense strand
uaguggugcuuacagauga

SEQ ID NO: 1506004 - RNA, 19 nt, Homo sapiens
  misc_RNA (1)...(19): siRNA sense strand
caacacgacagcaccaugu

SEQ ID NO: 1506005 - RNA, 19 nt, Homo sapiens
  misc_RNA (1)...(19): siRNA sense strand
gauguggccaagucaguuu

SEQ ID NO: 1506006 - RNA, 19 nt, Homo sapiens
  misc_RNA (1)...(19): siRNA sense strand
acagaugggagaagaauau

SEQ ID NO: 1506007 - RNA, 19 nt, Homo sapiens
  misc_RNA (1)...(19): siRNA sense strand
ccugauggcauaucuauuc

SEQ ID NO: 1506008 - RNA, 19 nt, Homo sapiens
  misc_RNA (1)...(19): siRNA sense strand
ugagagaucaagagauaga

SEQ ID NO: 1506009 - RNA, 19 nt, Homo sapiens
  misc_RNA (1)...(19): siRNA sense strand
cauaguagaccucguaaac

SEQ ID NO: 1506010 - RNA, 19 nt, Homo sapiens
  misc_RNA (1)...(19): siRNA sense strand
gaauauaagaacgucagaa

SEQ ID NO: 1506011 - RNA, 19 nt, Homo sapiens
  misc_RNA (1)...(19): siRNA sense strand
gacaugagagaucaagaga

SEQ ID NO: 1506012 - RNA, 19 nt, Homo sapiens
  misc_RNA (1)...(19): siRNA sense strand
ggagaggggucuuaagaag

SEQ ID NO: 1506013 - RNA, 19 nt, Homo sapiens
  misc_RNA (1)...(19): siRNA sense strand
caccacagaugggagaaga

SEQ ID NO: 1506014 - RNA, 19 nt, Homo sapiens
  misc_RNA (1)...(19): siRNA sense strand
augaugaugugguugauug

SEQ ID NO: 1506015 - RNA, 19 nt, Homo sapiens
  misc_RNA (1)...(19): siRNA sense strand
augcaugaguuaucaaaug

SEQ ID NO: 1506016 - RNA, 19 nt, Homo sapiens
  misc_RNA (1)...(19): siRNA sense strand
ccaaugagaaaggagagua

SEQ ID NO: 1506017 - RNA, 19 nt, Homo sapiens
  misc_RNA (1)...(19): siRNA sense strand
acacuagauuuguuguaga

SEQ ID NO: 1506018 - RNA, 19 nt, Homo sapiens
  misc_RNA (1)...(19): siRNA sense strand
guucagaugguagcuguaa

SEQ ID NO: 1506019 - RNA, 19 nt, Homo sapiens
  misc_RNA (1)...(19): siRNA sense strand
agaauccaaugcugugaug

SEQ ID NO: 1506020 - RNA, 19 nt, Homo sapiens
  misc_RNA (1)...(19): siRNA sense strand
agaugguguuuguauauga

SEQ ID NO: 1506021 - RNA, 19 nt, Homo sapiens
  misc_RNA (1)...(19): siRNA sense strand
gaaacaguagucagucaag

SEQ ID NO: 1506022 - RNA, 19 nt, Homo sapiens
  misc_RNA (1)...(19): siRNA sense strand
gggagaaggaagaaggaaa

SEQ ID NO: 1506023 - RNA, 19 nt, Homo sapiens
  misc_RNA (1)...(19): siRNA sense strand
ccgagaacauaacuuuaca

SEQ ID NO: 1506024 - RNA, 19 nt, Homo sapiens
  misc_RNA (1)...(19): siRNA sense strand
ggagcucggaauauaagaa

SEQ ID NO: 1506025 - RNA, 19 nt, Homo sapiens
  misc_RNA (1)...(19): siRNA sense strand
ggccgagaacauaacuuua

SEQ ID NO: 1506026 - RNA, 19 nt, Homo sapiens
  misc_RNA (1)...(19): siRNA sense strand
agagauagacgaaggucaa

SEQ ID NO: 1506027 - RNA, 19 nt, Homo sapiens
  misc_RNA (1)...(19): siRNA sense strand
ugauggugcucguagacaa

SEQ ID NO: 1506028 - RNA, 19 nt, Homo sapiens
  misc_RNA (1)...(19): siRNA sense strand
cagaugaugaugugguuga

SEQ ID NO: 1506029 - RNA, 19 nt, Homo sapiens
  misc_RNA (1)...(19): siRNA sense strand
aaaucuaucaccaaucuug

SEQ ID NO: 1506030 - RNA, 19 nt, Homo sapiens
  misc_RNA (1)...(19): siRNA sense strand
gaaccgugaugguauuaua

SEQ ID NO: 1506031 - RNA, 19 nt, Homo sapiens
  misc_RNA (1)...(19): siRNA sense strand
ggaguuggaugccaugaug

SEQ ID NO: 1506032 - RNA, 19 nt, Homo sapiens
  misc_RNA (1)...(19): siRNA sense strand
ggaaagggcaccaucaaga

SEQ ID NO: 1506033 - RNA, 19 nt, Homo sapiens
  misc_RNA (1)...(19): siRNA sense strand
gaaagggcaccaucaagaa

SEQ ID NO: 1506034 - RNA, 19 nt, Homo sapiens
  misc_RNA (1)...(19): siRNA sense strand
ccagaaccgugaugguauu

SEQ ID NO: 1506035 - RNA, 19 nt, Homo sapiens
  misc_RNA (1)...(19): siRNA sense strand
ucaaagaggccuucacugu

SEQ ID NO: 1506036 - RNA, 19 nt, Homo sapiens
  misc_RNA (1)...(19): siRNA sense strand
gugaugguauuauagacaa

SEQ ID NO: 1506037 - RNA, 19 nt, Homo sapiens
  misc_RNA (1)...(19): siRNA sense strand
gaagccagcggucccauca

SEQ ID NO: 1506038 - RNA, 19 nt, Homo sapiens
  misc_RNA (1)...(19): siRNA sense strand
gaggagaucaagaacaugu

SEQ ID NO: 1506039 - RNA, 19 nt, Homo sapiens
  misc_RNA (1)...(19): siRNA sense strand
gccucaaugugaagaauga

SEQ ID NO: 1506040 - RNA, 19 nt, Homo sapiens
  misc_RNA (1)...(19): siRNA sense strand
gcggcaacgucgacuacaa

SEQ ID NO: 1506041 - RNA, 19 nt, Homo sapiens
  misc_RNA (1)...(19): siRNA sense strand
gccaagagaaggacaguag

SEQ ID NO: 1506042 - RNA, 19 nt, Homo sapiens
  misc_RNA (1)...(19): siRNA sense strand
aaacaucugcuacgucauc

SEQ ID NO: 1506043 - RNA, 19 nt, Homo sapiens
  misc_RNA (1)...(19): siRNA sense strand
aggaggagaucaagaacau

SEQ ID NO: 1506044 - RNA, 19 nt, Homo sapiens
  misc_RNA (1)...(19): siRNA sense strand
uggaugccaugaugaagga

SEQ ID NO: 1506045 - RNA, 19 nt, Homo sapiens
  misc_RNA (1)...(19): siRNA sense strand
cggcaacgucgacuacaaa

SEQ ID NO: 1506046 - RNA, 19 nt, Homo sapiens
  misc_RNA (1)...(19): siRNA sense strand
ccaagagggccaagagaag

SEQ ID NO: 1506047 - RNA, 19 nt, Homo sapiens
  misc_RNA (1)...(19): siRNA sense strand
gcaccaucaagaagaaguu

SEQ ID NO: 1506048 - RNA, 19 nt, Homo sapiens
  misc_RNA (1)...(19): siRNA sense strand
gagggaaagggcaccauca

SEQ ID NO: 1506049 - RNA, 19 nt, Homo sapiens
  misc_RNA (1)...(19): siRNA sense strand
ugaagaaugaggaguugga

SEQ ID NO: 1506050 - RNA, 19 nt, Homo sapiens
  misc_RNA (1)...(19): siRNA sense strand
gaagaaugaggaguuggau

SEQ ID NO: 1506051 - RNA, 19 nt, Homo sapiens
  misc_RNA (1)...(19): siRNA sense strand
ugugaagaaugaggaguug

SEQ ID NO: 1506052 - RNA, 19 nt, Homo sapiens
  misc_RNA (1)...(19): siRNA sense strand
caagagaaggacaguagag

SEQ ID NO: 1506053 - RNA, 19 nt, Homo sapiens
  misc_RNA (1)...(19): siRNA sense strand
cagaaccgugaugguauua

SEQ ID NO: 1506054 - RNA, 19 nt, Homo sapiens
  misc_RNA (1)...(19): siRNA sense strand
gggaaagggcaccaucaag

SEQ ID NO: 1506055 - RNA, 19 nt, Homo sapiens
  misc_RNA (1)...(19): siRNA sense strand
gaucaccggagccuucaag

SEQ ID NO: 1506056 - RNA, 19 nt, Homo sapiens
  misc_RNA (1)...(19): siRNA sense strand
guucaaagaggccuucacu

SEQ ID NO: 1506057 - RNA, 19 nt, Homo sapiens
  misc_RNA (1)...(19): siRNA sense strand
cccaggaggagaucaagaa

SEQ ID NO: 1506058 - RNA, 19 nt, Homo sapiens
  misc_RNA (1)...(19): siRNA sense strand
cccaagagggccaagagaa

SEQ ID NO: 1506059 - RNA, 19 nt, Homo sapiens
  misc_RNA (1)...(19): siRNA sense strand
ccagcggucccaucaacuu

SEQ ID NO: 1506060 - RNA, 19 nt, Homo sapiens
  misc_RNA (1)...(19): siRNA sense strand
gauccaggaguucaaagag

SEQ ID NO: 1506061 - RNA, 19 nt, Homo sapiens
  misc_RNA (1)...(19): siRNA sense strand
ccaagagaaggacaguaga

SEQ ID NO: 1506062 - RNA, 19 nt, Homo sapiens
  misc_RNA (1)...(19): siRNA sense strand
gugccgacccugaggaugu

SEQ ID NO: 1506063 - RNA, 19 nt, Homo sapiens
  misc_RNA (1)...(19): siRNA sense strand
gcuccagcgucuucuccau

SEQ ID NO: 1506064 - RNA, 19 nt, Homo sapiens
  misc_RNA (1)...(19): siRNA sense strand
uaaauaaccuccuugauga

SEQ ID NO: 1506065 - RNA, 19 nt, Homo sapiens
  misc_RNA (1)...(19): siRNA sense strand
aaagagagguuccugaaua

SEQ ID NO: 1506066 - RNA, 19 nt, Homo sapiens
  misc_RNA (1)...(19): siRNA sense strand
uaaaccagcugaacuuaua

SEQ ID NO: 1506067 - RNA, 19 nt, Homo sapiens
  misc_RNA (1)...(19): siRNA sense strand
uaacaaacgucuagaagaa

SEQ ID NO: 1506068 - RNA, 19 nt, Homo sapiens
  misc_RNA (1)...(19): siRNA sense strand
caaagaagcuacagaugaa

SEQ ID NO: 1506069 - RNA, 19 nt, Homo sapiens
  misc_RNA (1)...(19): siRNA sense strand
ggagaacacugcagucauu

SEQ ID NO: 1506070 - RNA, 19 nt, Homo sapiens
  misc_RNA (1)...(19): siRNA sense strand
gaaagaaacgguugaagaa

SEQ ID NO: 1506071 - RNA, 19 nt, Homo sapiens
  misc_RNA (1)...(19): siRNA sense strand
gaaggaauguuuaaagaca

SEQ ID NO: 1506072 - RNA, 19 nt, Homo sapiens
  misc_RNA (1)...(19): siRNA sense strand
gaagcagacagacuuauua

SEQ ID NO: 1506073 - RNA, 19 nt, Homo sapiens
  misc_RNA (1)...(19): siRNA sense strand
cagacagacuuauuacuua

SEQ ID NO: 1506074 - RNA, 19 nt, Homo sapiens
  misc_RNA (1)...(19): siRNA sense strand
ucaaugcuguccaaacuua

SEQ ID NO: 1506075 - RNA, 19 nt, Homo sapiens
  misc_RNA (1)...(19): siRNA sense strand
gaucagaaagugcagaaua

SEQ ID NO: 1506076 - RNA, 19 nt, Homo sapiens
  misc_RNA (1)...(19): siRNA sense strand
gcagcacuauuguaauuaa

SEQ ID NO: 1506077 - RNA, 19 nt, Homo sapiens
  misc_RNA (1)...(19): siRNA sense strand
gaaagacacuuagccacaa

SEQ ID NO: 1506078 - RNA, 19 nt, Homo sapiens
  misc_RNA (1)...(19): siRNA sense strand
aauagaggauggagaguua

SEQ ID NO: 1506079 - RNA, 19 nt, Homo sapiens
  misc_RNA (1)...(19): siRNA sense strand
ggaaaggaauggugaagca

SEQ ID NO: 1506080 - RNA, 19 nt, Homo sapiens
  misc_RNA (1)...(19): siRNA sense strand
cuaaagacaucaugauuca

SEQ ID NO: 1506081 - RNA, 19 nt, Homo sapiens
  misc_RNA (1)...(19): siRNA sense strand
gaagaagcagacagacuua

SEQ ID NO: 1506082 - RNA, 19 nt, Homo sapiens
  misc_RNA (1)...(19): siRNA sense strand
gaaaaucucuguucuuaca

SEQ ID NO: 1506083 - RNA, 19 nt, Homo sapiens
  misc_RNA (1)...(19): siRNA sense strand
gaaagaagcauuugaaacg

SEQ ID NO: 1506084 - RNA, 19 nt, Homo sapiens
  misc_RNA (1)...(19): siRNA sense strand
ggacaugggacuggaguua

SEQ ID NO: 1506085 - RNA, 19 nt, Homo sapiens
  misc_RNA (1)...(19): siRNA sense strand
ggagaggaguucaguuuag

SEQ ID NO: 1506086 - RNA, 19 nt, Homo sapiens
  misc_RNA (1)...(19): siRNA sense strand
gggcucauauuauaaguga

SEQ ID NO: 1506087 - RNA, 19 nt, Homo sapiens
  misc_RNA (1)...(19): siRNA sense strand
gcagacaaaugaucaugau

SEQ ID NO: 1506088 - RNA, 19 nt, Homo sapiens
  misc_RNA (1)...(19): siRNA sense strand
gauaucugcuuucugaaga

SEQ ID NO: 1506089 - RNA, 19 nt, Homo sapiens
  misc_RNA (1)...(19): siRNA sense strand
gcagacagacuuauuacuu

SEQ ID NO: 1506090 - RNA, 19 nt, Homo sapiens
  misc_RNA (1)...(19): siRNA sense strand
uaagcaugcugucugauuu

SEQ ID NO: 1506091 - RNA, 19 nt, Homo sapiens
  misc_RNA (1)...(19): siRNA sense strand
aagcacagauucaucaauu

SEQ ID NO: 1506092 - RNA, 19 nt, Homo sapiens
  misc_RNA (1)...(19): siRNA sense strand
gaaacuaaccggcucuaug

SEQ ID NO: 1506093 - RNA, 19 nt, Homo sapiens
  misc_RNA (1)...(19): siRNA sense strand
aagauaagguugaccauau

SEQ ID NO: 1506094 - RNA, 19 nt, Homo sapiens
  misc_RNA (1)...(19): siRNA sense strand
gaagauggcugaggaaucc

SEQ ID NO: 1506095 - RNA, 19 nt, Homo sapiens
  misc_RNA (1)...(19): siRNA sense strand
ggugaacacuuaacagcaa

SEQ ID NO: 1506096 - RNA, 19 nt, Homo sapiens
  misc_RNA (1)...(19): siRNA sense strand
caguugaaauuuccaguaa

SEQ ID NO: 1506097 - RNA, 19 nt, Homo sapiens
  misc_RNA (1)...(19): siRNA sense strand
gcaggcaacuggaauagag

SEQ ID NO: 1506098 - RNA, 19 nt, Homo sapiens
  misc_RNA (1)...(19): siRNA sense strand
gagaggaguucaguuuaga

SEQ ID NO: 1506099 - RNA, 19 nt, Homo sapiens
  misc_RNA (1)...(19): siRNA sense strand
ccaaaccaguacaacuaua

SEQ ID NO: 1506100 - RNA, 19 nt, Homo sapiens
  misc_RNA (1)...(19): siRNA sense strand
gacagacaguaucaaauug

SEQ ID NO: 1506101 - RNA, 19 nt, Homo sapiens
  misc_RNA (1)...(19): siRNA sense strand
caacaaagaagcuacagau

SEQ ID NO: 1506102 - RNA, 19 nt, Homo sapiens
  misc_RNA (1)...(19): siRNA sense strand
gaagaacaagcaagcacua

SEQ ID NO: 1506103 - RNA, 19 nt, Homo sapiens
  misc_RNA (1)...(19): siRNA sense strand
uguccaaacuuaaacauga

SEQ ID NO: 1506104 - RNA, 19 nt, Homo sapiens
  misc_RNA (1)...(19): siRNA sense strand
ggaaagagugcaucuguag

SEQ ID NO: 1506105 - RNA, 19 nt, Homo sapiens
  misc_RNA (1)...(19): siRNA sense strand
ucgaauauaucaaggcauu

SEQ ID NO: 1506106 - RNA, 19 nt, Homo sapiens
  misc_RNA (1)...(19): siRNA sense strand
caagcaagcacuacagaaa

SEQ ID NO: 1506107 - RNA, 19 nt, Homo sapiens
  misc_RNA (1)...(19): siRNA sense strand
ucaaucaaauccagaugaa

SEQ ID NO: 1506108 - RNA, 19 nt, Homo sapiens
  misc_RNA (1)...(19): siRNA sense strand
cagcaaacuugaaggaaug

SEQ ID NO: 1506109 - RNA, 19 nt, Homo sapiens
  misc_RNA (1)...(19): siRNA sense strand
agauaagguugaccauaua

SEQ ID NO: 1506110 - RNA, 19 nt, Homo sapiens
  misc_RNA (1)...(19): siRNA sense strand
uggcagcacuauuguaauu

SEQ ID NO: 1506111 - RNA, 19 nt, Homo sapiens
  misc_RNA (1)...(19): siRNA sense strand
gcauuuggcagcacuauug

SEQ ID NO: 1506112 - RNA, 19 nt, Homo sapiens
  misc_RNA (1)...(19): siRNA sense strand
uaagacaauugauggcauu

SEQ ID NO: 1506113 - RNA, 19 nt, Homo sapiens
  misc_RNA (1)...(19): siRNA sense strand
caagacagacaguaucaaa

SEQ ID NO: 1506114 - RNA, 19 nt, Homo sapiens
  misc_RNA (1)...(19): siRNA sense strand
gauggagaguuaaggagaa

SEQ ID NO: 1506115 - RNA, 19 nt, Homo sapiens
  misc_RNA (1)...(19): siRNA sense strand
gcuauuggccgacauaugu

SEQ ID NO: 1506116 - RNA, 19 nt, Homo sapiens
  misc_RNA (1)...(19): siRNA sense strand
aaaccgaauucaagauuug

SEQ ID NO: 1506117 - RNA, 19 nt, Homo sapiens
  misc_RNA (1)...(19): siRNA sense strand
uuaaauaaccuccuugaug

SEQ ID NO: 1506118 - RNA, 19 nt, Homo sapiens
  misc_RNA (1)...(19): siRNA sense strand
cugcgaagaucacaucaaa

SEQ ID NO: 1506119 - RNA, 19 nt, Homo sapiens
  misc_RNA (1)...(19): siRNA sense strand
ggaguucaguuuagaagag

SEQ ID NO: 1506120 - RNA, 19 nt, Homo sapiens
  misc_RNA (1)...(19): siRNA sense strand
acaaagaagcuacagauga

SEQ ID NO: 1506121 - RNA, 19 nt, Homo sapiens
  misc_RNA (1)...(19): siRNA sense strand
guucaagaauugcuggauu

SEQ ID NO: 1506122 - RNA, 19 nt, Homo sapiens
  misc_RNA (1)...(19): siRNA sense strand
gcacagauucaucaauuca

SEQ ID NO: 1506123 - RNA, 19 nt, Homo sapiens
  misc_RNA (1)...(19): siRNA sense strand
agacagacaguaucaaauu

SEQ ID NO: 1506124 - RNA, 19 nt, Homo sapiens
  misc_RNA (1)...(19): siRNA sense strand
ugaaagaaacgguugaaga

SEQ ID NO: 1506125 - RNA, 19 nt, Homo sapiens
  misc_RNA (1)...(19): siRNA sense strand
gaacuccaggucucucuuu

SEQ ID NO: 1506126 - RNA, 19 nt, Homo sapiens
  misc_RNA (1)...(19): siRNA sense strand
cagaagucauuaauugcua

SEQ ID NO: 1506127 - RNA, 19 nt, Homo sapiens
  misc_RNA (1)...(19): siRNA sense strand
gcauucuucucuugauuga

SEQ ID NO: 1506128 - RNA, 19 nt, Homo sapiens
  misc_RNA (1)...(19): siRNA sense strand
gaagacacccuggaguuug

SEQ ID NO: 1506129 - RNA, 19 nt, Homo sapiens
  misc_RNA (1)...(19): siRNA sense strand
gggacuacauggaaagaga

SEQ ID NO: 1506130 - RNA, 19 nt, Homo sapiens
  misc_RNA (1)...(19): siRNA sense strand
gacaauugauggcauucuu

SEQ ID NO: 1506131 - RNA, 19 nt, Homo sapiens
  misc_RNA (1)...(19): siRNA sense strand
aaaccuggcucugcuaaga

SEQ ID NO: 1506132 - RNA, 19 nt, Homo sapiens
  misc_RNA (1)...(19): siRNA sense strand
gaauauaucaaggcauuug

SEQ ID NO: 1506133 - RNA, 19 nt, Homo sapiens
  misc_RNA (1)...(19): siRNA sense strand
gagaugggaaugaugauga

SEQ ID NO: 1506134 - RNA, 19 nt, Homo sapiens
  misc_RNA (1)...(19): siRNA sense strand
ccaagaagagaaaguuaaa

SEQ ID NO: 1506135 - RNA, 19 nt, Homo sapiens
  misc_RNA (1)...(19): siRNA sense strand
acccagaagucauuaauug

SEQ ID NO: 1506136 - RNA, 19 nt, Homo sapiens
  misc_RNA (1)...(19): siRNA sense strand
uuaaacagcagcagcagua

SEQ ID NO: 1506137 - RNA, 19 nt, Homo sapiens
  misc_RNA (1)...(19): siRNA sense strand
gggagaggaguucaguuua

SEQ ID NO: 1506138 - RNA, 19 nt, Homo sapiens
  misc_RNA (1)...(19): siRNA sense strand
gugaauauccugacaaugg

SEQ ID NO: 1506139 - RNA, 19 nt, Homo sapiens
  misc_RNA (1)...(19): siRNA sense strand
ccagcaaacuugaaggaau

SEQ ID NO: 1506140 - RNA, 19 nt, Homo sapiens
  misc_RNA (1)...(19): siRNA sense strand
auugauaucugcuuucuga

SEQ ID NO: 1506141 - RNA, 19 nt, Homo sapiens
  misc_RNA (1)...(19): siRNA sense strand
gauaagguugaccauauaa

SEQ ID NO: 1506142 - RNA, 19 nt, Homo sapiens
  misc_RNA (1)...(19): siRNA sense strand
caaacggccuagccaaauc

SEQ ID NO: 1506143 - RNA, 19 nt, Homo sapiens
  misc_RNA (1)...(19): siRNA sense strand
ugauucaguucaaacagua

SEQ ID NO: 1506144 - RNA, 19 nt, Homo sapiens
  misc_RNA (1)...(19): siRNA sense strand
uguaucagcucuucaguag

SEQ ID NO: 1506145 - RNA, 19 nt, Homo sapiens
  misc_RNA (1)...(19): siRNA sense strand
gaaagagagguuccugaau

SEQ ID NO: 1506146 - RNA, 19 nt, Homo sapiens
  misc_RNA (1)...(19): siRNA sense strand
agagaggauucauuggaua

SEQ ID NO: 1506147 - RNA, 19 nt, Homo sapiens
  misc_RNA (1)...(19): siRNA sense strand
acaaacagcugagacagau

SEQ ID NO: 1506148 - RNA, 19 nt, Homo sapiens
  misc_RNA (1)...(19): siRNA sense strand
gaccgggacuacauggaaa

SEQ ID NO: 1506149 - RNA, 19 nt, Homo sapiens
  misc_RNA (1)...(19): siRNA sense strand
uaacaguaguaacgagaga

SEQ ID NO: 1506150 - RNA, 19 nt, Homo sapiens
  misc_RNA (1)...(19): siRNA sense strand
gggcaaagacauugaagau

SEQ ID NO: 1506151 - RNA, 19 nt, Homo sapiens
  misc_RNA (1)...(19): siRNA sense strand
cggaaagagugcaucugua

SEQ ID NO: 1506152 - RNA, 19 nt, Homo sapiens
  misc_RNA (1)...(19): siRNA sense strand
gaucugccacugaugguaa

SEQ ID NO: 1506153 - RNA, 19 nt, Homo sapiens
  misc_RNA (1)...(19): siRNA sense strand
gcaaacggccuagccaaau

SEQ ID NO: 1506154 - RNA, 19 nt, Homo sapiens
  misc_RNA (1)...(19): siRNA sense strand
ugaagauggugacaaguuc

SEQ ID NO: 1506155 - RNA, 19 nt, Homo sapiens
  misc_RNA (1)...(19): siRNA sense strand
gaauagaggauggagaguu

SEQ ID NO: 1506156 - RNA, 19 nt, Homo sapiens
  misc_RNA (1)...(19): siRNA sense strand
ugaguuaacugugaauauc

SEQ ID NO: 1506157 - RNA, 19 nt, Homo sapiens
  misc_RNA (1)...(19): siRNA sense strand
gaucagaccacccagaagu

SEQ ID NO: 1506158 - RNA, 19 nt, Homo sapiens
  misc_RNA (1)...(19): siRNA sense strand
acaaacgucuagaagaaga

SEQ ID NO: 1506159 - RNA, 19 nt, Homo sapiens
  misc_RNA (1)...(19): siRNA sense strand
aagccuaaauuaccagaaa

SEQ ID NO: 1506160 - RNA, 19 nt, Homo sapiens
  misc_RNA (1)...(19): siRNA sense strand
aagagagguuccugaauau

SEQ ID NO: 1506161 - RNA, 19 nt, Homo sapiens
  misc_RNA (1)...(19): siRNA sense strand
guugaaauuuccaguaaag

SEQ ID NO: 1506162 - RNA, 19 nt, Homo sapiens
  misc_RNA (1)...(19): siRNA sense strand
aagaaacgguugaagaaca

SEQ ID NO: 1506163 - RNA, 19 nt, Homo sapiens
  misc_RNA (1)...(19): siRNA sense strand
agauuugucucuucuguau

SEQ ID NO: 1506164 - RNA, 19 nt, Homo sapiens
  misc_RNA (1)...(19): siRNA sense strand
ucagucagcuaaagaagua

SEQ ID NO: 1506165 - RNA, 19 nt, Homo sapiens
  misc_RNA (1)...(19): siRNA sense strand
uaaacacacugacugaauu

SEQ ID NO: 1506166 - RNA, 19 nt, Homo sapiens
  misc_RNA (1)...(19): siRNA sense strand
gauaaagacuauggaaaug

SEQ ID NO: 1506167 - RNA, 19 nt, Homo sapiens
  misc_RNA (1)...(19): siRNA sense strand
gaaagccagugacaaguag

SEQ ID NO: 1506168 - RNA, 19 nt, Homo sapiens
  misc_RNA (1)...(19): siRNA sense strand
gaucuugcuucugucauaa

SEQ ID NO: 1506169 - RNA, 19 nt, Homo sapiens
  misc_RNA (1)...(19): siRNA sense strand
gaugcaaucuguaguggau

SEQ ID NO: 1506170 - RNA, 19 nt, Homo sapiens
  misc_RNA (1)...(19): siRNA sense strand
cacacugacugaauuguuu

SEQ ID NO: 1506171 - RNA, 19 nt, Homo sapiens
  misc_RNA (1)...(19): siRNA sense strand
ccaaagagcaaucagaugu

SEQ ID NO: 1506172 - RNA, 19 nt, Homo sapiens
  misc_RNA (1)...(19): siRNA sense strand
ggauaaagagagacugauu

SEQ ID NO: 1506173 - RNA, 19 nt, Homo sapiens
  misc_RNA (1)...(19): siRNA sense strand
caaagucagcagcagauuu

SEQ ID NO: 1506174 - RNA, 19 nt, Homo sapiens
  misc_RNA (1)...(19): siRNA sense strand
uaagaaagccagugacaag

SEQ ID NO: 1506175 - RNA, 19 nt, Homo sapiens
  misc_RNA (1)...(19): siRNA sense strand
cgauaaagacuauggaaau

SEQ ID NO: 1506176 - RNA, 19 nt, Homo sapiens
  misc_RNA (1)...(19): siRNA sense strand
guagaggaguugcaucagu

SEQ ID NO: 1506177 - RNA, 19 nt, Homo sapiens
  misc_RNA (1)...(19): siRNA sense strand
aaacagcaguaacauccuu

SEQ ID NO: 1506178 - RNA, 19 nt, Homo sapiens
  misc_RNA (1)...(19): siRNA sense strand
ucuggaaucuucucuuuca

SEQ ID NO: 1506179 - RNA, 19 nt, Homo sapiens
  misc_RNA (1)...(19): siRNA sense strand
gauaaagagagacugauuc

SEQ ID NO: 1506180 - RNA, 19 nt, Homo sapiens
  misc_RNA (1)...(19): siRNA sense strand
aaagagagacugauucaag

SEQ ID NO: 1506181 - RNA, 19 nt, Homo sapiens
  misc_RNA (1)...(19): siRNA sense strand
agaucuugcuucugucaua

SEQ ID NO: 1506182 - RNA, 19 nt, Homo sapiens
  misc_RNA (1)...(19): siRNA sense strand
aaucuucucuuucacacuu

SEQ ID NO: 1506183 - RNA, 19 nt, Homo sapiens
  misc_RNA (1)...(19): siRNA sense strand
uaugauagacaccuugaaa

SEQ ID NO: 1506184 - RNA, 19 nt, Homo sapiens
  misc_RNA (1)...(19): siRNA sense strand
agucuggaaucuucucuuu

SEQ ID NO: 1506185 - RNA, 19 nt, Homo sapiens
  misc_RNA (1)...(19): siRNA sense strand
agaaagccagugacaagua

SEQ ID NO: 1506186 - RNA, 19 nt, Homo sapiens
  misc_RNA (1)...(19): siRNA sense strand
aaagucagcagcagauuug

SEQ ID NO: 1506187 - RNA, 19 nt, Homo sapiens
  misc_RNA (1)...(19): siRNA sense strand
caucaucucugugcuaaac

SEQ ID NO: 1506188 - RNA, 19 nt, Homo sapiens
  misc_RNA (1)...(19): siRNA sense strand
guucuucuuucauguacaa

SEQ ID NO: 1506189 - RNA, 19 nt, Homo sapiens
  misc_RNA (1)...(19): siRNA sense strand
gcgauaaagacuauggaaa

SEQ ID NO: 1506190 - RNA, 19 nt, Homo sapiens
  misc_RNA (1)...(19): siRNA sense strand
gauucaagcugccaaaaug

SEQ ID NO: 1506191 - RNA, 19 nt, Homo sapiens
  misc_RNA (1)...(19): siRNA sense strand
aaagagcaaucagauguca

SEQ ID NO: 1506192 - RNA, 19 nt, Homo sapiens
  misc_RNA (1)...(19): siRNA sense strand
gucaucaucucugugcuaa

SEQ ID NO: 1506193 - RNA, 19 nt, Homo sapiens
  misc_RNA (1)...(19): siRNA sense strand
gcugugagaaacaauaguu

SEQ ID NO: 1506194 - RNA, 19 nt, Homo sapiens
  misc_RNA (1)...(19): siRNA sense strand
ggcuaugggaccaaucuua

SEQ ID NO: 1506195 - RNA, 19 nt, Homo sapiens
  misc_RNA (1)...(19): siRNA sense strand
gcaucagucagcuaaagaa

SEQ ID NO: 1506196 - RNA, 19 nt, Homo sapiens
  misc_RNA (1)...(19): siRNA sense strand
ggaugcaagacaugacaaa

SEQ ID NO: 1506197 - RNA, 19 nt, Homo sapiens
  misc_RNA (1)...(19): siRNA sense strand
auacagaagacaccaaaga

SEQ ID NO: 1506198 - RNA, 19 nt, Homo sapiens
  misc_RNA (1)...(19): siRNA sense strand
ucauaaacacacugacuga

SEQ ID NO: 1506199 - RNA, 19 nt, Homo sapiens
  misc_RNA (1)...(19): siRNA sense strand
acacugacugaauuguuua

SEQ ID NO: 1506200 - RNA, 19 nt, Homo sapiens
  misc_RNA (1)...(19): siRNA sense strand
gcuaugggaccaaucuuag

SEQ ID NO: 1506201 - RNA, 19 nt, Homo sapiens
  misc_RNA (1)...(19): siRNA sense strand
aaacacacugacugaauug

SEQ ID NO: 1506202 - RNA, 19 nt, Homo sapiens
  misc_RNA (1)...(19): siRNA sense strand
gaagacaccaaagagcaau

SEQ ID NO: 1506203 - RNA, 19 nt, Homo sapiens
  misc_RNA (1)...(19): siRNA sense strand
gucagcagcagauuuguug

SEQ ID NO: 1506204 - RNA, 19 nt, Homo sapiens
  misc_RNA (1)...(19): siRNA sense strand
gccaaaauguucuucuuuc

SEQ ID NO: 1506205 - RNA, 19 nt, Homo sapiens
  misc_RNA (1)...(19): siRNA sense strand
agaaaaggauaaagagaga

SEQ ID NO: 1506206 - RNA, 19 nt, Homo sapiens
  misc_RNA (1)...(19): siRNA sense strand
gucuuuauguuccaagguu

SEQ ID NO: 1506207 - RNA, 19 nt, Homo sapiens
  misc_RNA (1)...(19): siRNA sense strand
ugcaagacaugacaaaauu

SEQ ID NO: 1506208 - RNA, 19 nt, Homo sapiens
  misc_RNA (1)...(19): siRNA sense strand
uuguuuagccgcaguauga

SEQ ID NO: 1506209 - RNA, 19 nt, Homo sapiens
  misc_RNA (1)...(19): siRNA sense strand
auaaagagagacugauuca

SEQ ID NO: 1506210 - RNA, 19 nt, Homo sapiens
  misc_RNA (1)...(19): siRNA sense strand
ccaaaauguucuucuuuca

SEQ ID NO: 1506211 - RNA, 19 nt, Homo sapiens
  misc_RNA (1)...(19): siRNA sense strand
caccaaagagcaaucagau

SEQ ID NO: 1506212 - RNA, 19 nt, Homo sapiens
  misc_RNA (1)...(19): siRNA sense strand
gcuaaacagcaguaacauc

SEQ ID NO: 1506213 - RNA, 19 nt, Homo sapiens
  misc_RNA (1)...(19): siRNA sense strand
auaaacacacugacugaau

SEQ ID NO: 1506214 - RNA, 19 nt, Homo sapiens
  misc_RNA (1)...(19): siRNA sense strand
ggccaugugcucugugguu

SEQ ID NO: 1506215 - RNA, 19 nt, Homo sapiens
  misc_RNA (1)...(19): siRNA sense strand
caauggccaugugcucugu

SEQ ID NO: 1506216 - RNA, 19 nt, Homo sapiens
  misc_RNA (1)...(19): siRNA sense strand
uguaguggaugcaagacau

SEQ ID NO: 1506217 - RNA, 19 nt, Homo sapiens
  misc_RNA (1)...(19): siRNA sense strand
gaauuguuuagccgcagua

SEQ ID NO: 1506218 - RNA, 19 nt, Homo sapiens
  misc_RNA (1)...(19): siRNA sense strand
uuuagccgcaguaugaaua

SEQ ID NO: 1506219 - RNA, 19 nt, Homo sapiens
  misc_RNA (1)...(19): siRNA sense strand
ucaaggcuaugggaccaau

SEQ ID NO: 1506220 - RNA, 19 nt, Homo sapiens
  misc_RNA (1)...(19): siRNA sense strand
caaagagcaaucagauguc

SEQ ID NO: 1506221 - RNA, 19 nt, Homo sapiens
  misc_RNA (1)...(19): siRNA sense strand
gugagaaacaauaguuaca

SEQ ID NO: 1506222 - RNA, 19 nt, Homo sapiens
  misc_RNA (1)...(19): siRNA sense strand
acacacugacugaauuguu

SEQ ID NO: 1506223 - RNA, 19 nt, Homo sapiens
  misc_RNA (1)...(19): siRNA sense strand
guaacauccuugggagucu

SEQ ID NO: 1506224 - RNA, 19 nt, Homo sapiens
  misc_RNA (1)...(19): siRNA sense strand
ucuuagagauccuccaaaa

SEQ ID NO: 1506225 - RNA, 19 nt, Homo sapiens
  misc_RNA (1)...(19): siRNA sense strand
caaauugucaaggcuaugg

SEQ ID NO: 1506226 - RNA, 19 nt, Homo sapiens
  misc_RNA (1)...(19): siRNA sense strand
cuauacagaagacaccaaa

SEQ ID NO: 1506227 - RNA, 19 nt, Homo sapiens
  misc_RNA (1)...(19): siRNA sense strand
uugggagucuggaaucuuc

SEQ ID NO: 1506228 - RNA, 19 nt, Homo sapiens
  misc_RNA (1)...(19): siRNA sense strand
cauaaacacacugacugaa

SEQ ID NO: 1506229 - RNA, 19 nt, Homo sapiens
  misc_RNA (1)...(19): siRNA sense strand
agaagacaccaaagagcaa

SEQ ID NO: 1506230 - RNA, 19 nt, Homo sapiens
  misc_RNA (1)...(19): siRNA sense strand
gcccauacgccagucauca

SEQ ID NO: 1506231 - RNA, 19 nt, Homo sapiens
  misc_RNA (1)...(19): siRNA sense strand
ugauggcugugagaaacaa

SEQ ID NO: 1506232 - RNA, 19 nt, Homo sapiens
  misc_RNA (1)...(19): siRNA sense strand
cagcagcagauuuguugga

SEQ ID NO: 1506233 - RNA, 19 nt, Homo sapiens
  misc_RNA (1)...(19): siRNA sense strand
aaacugcaggauguacuaa

SEQ ID NO: 1506234 - RNA, 19 nt, Homo sapiens
  misc_RNA (1)...(19): siRNA sense strand
aaggauaaagagagacuga

SEQ ID NO: 1506235 - RNA, 19 nt, Homo sapiens
  misc_RNA (1)...(19): siRNA sense strand
cagcuaaagaaguauucaa

SEQ ID NO: 1506236 - RNA, 19 nt, Homo sapiens
  misc_RNA (1)...(19): siRNA sense strand
gaucuugacagucuuauua

SEQ ID NO: 1506237 - RNA, 19 nt, Homo sapiens
  misc_RNA (1)...(19): siRNA sense strand
ggaacaacaugccagaauu

SEQ ID NO: 1506238 - RNA, 19 nt, Homo sapiens
  misc_RNA (1)...(19): siRNA sense strand
gaacaacaugccagaauuu

SEQ ID NO: 1506239 - RNA, 19 nt, Homo sapiens
  misc_RNA (1)...(19): siRNA sense strand
gcauaugccugccagugua

SEQ ID NO: 1506240 - RNA, 19 nt, Homo sapiens
  misc_RNA (1)...(19): siRNA sense strand
ugucagagcuuccauugaa

SEQ ID NO: 1506241 - RNA, 19 nt, Homo sapiens
  misc_RNA (1)...(19): siRNA sense strand
caguguagcuggagaacua

SEQ ID NO: 1506242 - RNA, 19 nt, Homo sapiens
  misc_RNA (1)...(19): siRNA sense strand
ggagaacuauugaagaagu

SEQ ID NO: 1506243 - RNA, 19 nt, Homo sapiens
  misc_RNA (1)...(19): siRNA sense strand
gaaagagacgcucagauca

SEQ ID NO: 1506244 - RNA, 19 nt, Homo sapiens
  misc_RNA (1)...(19): siRNA sense strand
gggauuggaacaaauauuu

SEQ ID NO: 1506245 - RNA, 19 nt, Homo sapiens
  misc_RNA (1)...(19): siRNA sense strand
gaaaggaacacgggcauau

SEQ ID NO: 1506246 - RNA, 19 nt, Homo sapiens
  misc_RNA (1)...(19): siRNA sense strand
uggacgagcucuuggauga

SEQ ID NO: 1506247 - RNA, 19 nt, Homo sapiens
  misc_RNA (1)...(19): siRNA sense strand
ggugggagcucuauuccau

SEQ ID NO: 1506248 - RNA, 19 nt, Homo sapiens
  misc_RNA (1)...(19): siRNA sense strand
gaaccaagccaaggcgaaa

SEQ ID NO: 1506249 - RNA, 19 nt, Homo sapiens
  misc_RNA (1)...(19): siRNA sense strand
ucagacagaucaucagcuu

SEQ ID NO: 1506250 - RNA, 19 nt, Homo sapiens
  misc_RNA (1)...(19): siRNA sense strand
cgaaagagacgcucagauc

SEQ ID NO: 1506251 - RNA, 19 nt, Homo sapiens
  misc_RNA (1)...(19): siRNA sense strand
cagaucaacagaaacauuu

SEQ ID NO: 1506252 - RNA, 19 nt, Homo sapiens
  misc_RNA (1)...(19): siRNA sense strand
cuggagaacuauugaagaa

SEQ ID NO: 1506253 - RNA, 19 nt, Homo sapiens
  misc_RNA (1)...(19): siRNA sense strand
gcaaaguugauaaagaaga

SEQ ID NO: 1506254 - RNA, 19 nt, Homo sapiens
  misc_RNA (1)...(19): siRNA sense strand
cagcuaugaugacuauaug

SEQ ID NO: 1506255 - RNA, 19 nt, Homo sapiens
  misc_RNA (1)...(19): siRNA sense strand
ugaagucgaguccaaguuu

SEQ ID NO: 1506256 - RNA, 19 nt, Homo sapiens
  misc_RNA (1)...(19): siRNA sense strand
gcucagaucaacagaaaca

SEQ ID NO: 1506257 - RNA, 19 nt, Homo sapiens
  misc_RNA (1)...(19): siRNA sense strand
gaugaucuugacagucuua

SEQ ID NO: 1506258 - RNA, 19 nt, Homo sapiens
  misc_RNA (1)...(19): siRNA sense strand
acgcucagaucaacagaaa

SEQ ID NO: 1506259 - RNA, 19 nt, Homo sapiens
  misc_RNA (1)...(19): siRNA sense strand
gagaacuauugaagaagug

SEQ ID NO: 1506260 - RNA, 19 nt, Homo sapiens
  misc_RNA (1)...(19): siRNA sense strand
gagagcaugugaccaucug

SEQ ID NO: 1506261 - RNA, 19 nt, Homo sapiens
  misc_RNA (1)...(19): siRNA sense strand
caugugggauuggaacaaa

SEQ ID NO: 1506262 - RNA, 19 nt, Homo sapiens
  misc_RNA (1)...(19): siRNA sense strand
gaccaucugcguuguauag

SEQ ID NO: 1506263 - RNA, 19 nt, Homo sapiens
  misc_RNA (1)...(19): siRNA sense strand
uauagccugugauuucuug

SEQ ID NO: 1506264 - RNA, 19 nt, Homo sapiens
  misc_RNA (1)...(19): siRNA sense strand
uugcacaccugaccuucua

SEQ ID NO: 1506265 - RNA, 19 nt, Homo sapiens
  misc_RNA (1)...(19): siRNA sense strand
gaagucgaguccaaguuuu

SEQ ID NO: 1506266 - RNA, 19 nt, Homo sapiens
  misc_RNA (1)...(19): siRNA sense strand
gacuauaugugggacaaau

SEQ ID NO: 1506267 - RNA, 19 nt, Homo sapiens
  misc_RNA (1)...(19): siRNA sense strand
aaagagacgcucagaucaa

SEQ ID NO: 1506268 - RNA, 19 nt, Homo sapiens
  misc_RNA (1)...(19): siRNA sense strand
ggaacaaauauuucaugga

SEQ ID NO: 1506269 - RNA, 19 nt, Homo sapiens
  misc_RNA (1)...(19): siRNA sense strand
ucagguaacacaucuguca

SEQ ID NO: 1506270 - RNA, 19 nt, Homo sapiens
  misc_RNA (1)...(19): siRNA sense strand
ucagaucaacagaaacauu

SEQ ID NO: 1506271 - RNA, 19 nt, Homo sapiens
  misc_RNA (1)...(19): siRNA sense strand
gacgagcucuuggaugaag

SEQ ID NO: 1506272 - RNA, 19 nt, Homo sapiens
  misc_RNA (1)...(19): siRNA sense strand
ggaccuggacgagcucuug

SEQ ID NO: 1506273 - RNA, 19 nt, Homo sapiens
  misc_RNA (1)...(19): siRNA sense strand
gcuaugaugacuauaugug

SEQ ID NO: 1506274 - RNA, 19 nt, Homo sapiens
  misc_RNA (1)...(19): siRNA sense strand
gauaaagaagaaaggaaca

SEQ ID NO: 1506275 - RNA, 19 nt, Homo sapiens
  misc_RNA (1)...(19): siRNA sense strand
ggauuggaacaaauauuuc

SEQ ID NO: 1506276 - RNA, 19 nt, Homo sapiens
  misc_RNA (1)...(19): siRNA sense strand
gugaccaucugcguuguau

SEQ ID NO: 1506277 - RNA, 19 nt, Homo sapiens
  misc_RNA (1)...(19): siRNA sense strand
cauugaaggccuugguaaa

SEQ ID NO: 1506278 - RNA, 19 nt, Homo sapiens
  misc_RNA (1)...(19): siRNA sense strand
ucgcuggguuugugguaaa

SEQ ID NO: 1506279 - RNA, 19 nt, Homo sapiens
  misc_RNA (1)...(19): siRNA sense strand
ucagcuaugaugacuauau

SEQ ID NO: 1506280 - RNA, 19 nt, Homo sapiens
  misc_RNA (1)...(19): siRNA sense strand
gcuggagaacuauugaaga

SEQ ID NO: 1506281 - RNA, 19 nt, Homo sapiens
  misc_RNA (1)...(19): siRNA sense strand
ccauugaaggccuugguaa

SEQ ID NO: 1506282 - RNA, 19 nt, Homo sapiens
  misc_RNA (1)...(19): siRNA sense strand
ugggagcucuauuccaugu

SEQ ID NO: 1506283 - RNA, 19 nt, Homo sapiens
  misc_RNA (1)...(19): siRNA sense strand
ucuauuccaugugggauug

SEQ ID NO: 1506284 - RNA, 19 nt, Homo sapiens
  misc_RNA (1)...(19): siRNA sense strand
caacaugccagaauuucac

SEQ ID NO: 1506285 - RNA, 19 nt, Homo sapiens
  misc_RNA (1)...(19): siRNA sense strand
ugugggauuggaacaaaua

SEQ ID NO: 1506286 - RNA, 19 nt, Homo sapiens
  misc_RNA (1)...(19): siRNA sense strand
ggacgagcucuuggaugaa

SEQ ID NO: 1506287 - RNA, 19 nt, Homo sapiens
  misc_RNA (1)...(19): siRNA sense strand
agccugugauuucuuggua

SEQ ID NO: 1506288 - RNA, 19 nt, Homo sapiens
  misc_RNA (1)...(19): siRNA sense strand
uuguauagccugugauuuc

SEQ ID NO: 1506289 - RNA, 19 nt, Homo sapiens
  misc_RNA (1)...(19): siRNA sense strand
gaugaagucgaguccaagu

SEQ ID NO: 1506290 - RNA, 19 nt, Homo sapiens
  misc_RNA (1)...(19): siRNA sense strand
guagcuggagaacuauuga

SEQ ID NO: 1506291 - RNA, 19 nt, Homo sapiens
  misc_RNA (1)...(19): siRNA sense strand
cuugacagucuuauuaaug

SEQ ID NO: 1506292 - RNA, 19 nt, Homo sapiens
  misc_RNA (1)...(19): siRNA sense strand
aagagacgcucagaucaac

SEQ ID NO: 1506293 - RNA, 19 nt, Homo sapiens
  misc_RNA (1)...(19): siRNA sense strand
caugccagaauuucacaaa

SEQ ID NO: 1506294 - RNA, 19 nt, Homo sapiens
  misc_RNA (1)...(19): siRNA sense strand
uguauagccugugauuucu

SEQ ID NO: 1506295 - RNA, 19 nt, Homo sapiens
  misc_RNA (1)...(19): siRNA sense strand
gcacaccugaccuucuaag

SEQ ID NO: 1506296 - RNA, 19 nt, Homo sapiens
  misc_RNA (1)...(19): siRNA sense strand
ugugauuucuugguaguca

SEQ ID NO: 1506297 - RNA, 19 nt, Homo sapiens
  misc_RNA (1)...(19): siRNA sense strand
aaaguugcaguccggugua

SEQ ID NO: 1506298 - RNA, 19 nt, Homo sapiens
  misc_RNA (1)...(19): siRNA sense strand
gcgaaagagacgcucagau

SEQ ID NO: 1506299 - RNA, 19 nt, Homo sapiens
  misc_RNA (1)...(19): siRNA sense strand
ggagagcaugugaccaucu

SEQ ID NO: 1506300 - RNA, 19 nt, Homo sapiens
  misc_RNA (1)...(19): siRNA sense strand
caaagggucuggagcauua

SEQ ID NO: 1506301 - RNA, 19 nt, Homo sapiens
  misc_RNA (1)...(19): siRNA sense strand
ccaaaggacuggacuguua

SEQ ID NO: 1506302 - RNA, 19 nt, Homo sapiens
  misc_RNA (1)...(19): siRNA sense strand
gcacagaacuuuacagaag

SEQ ID NO: 1506303 - RNA, 19 nt, Homo sapiens
  misc_RNA (1)...(19): siRNA sense strand
uaagagagcugaugcuuga

SEQ ID NO: 1506304 - RNA, 19 nt, Homo sapiens
  misc_RNA (1)...(19): siRNA sense strand
ggaaauagaugugauagug

SEQ ID NO: 1506305 - RNA, 19 nt, Homo sapiens
  misc_RNA (1)...(19): siRNA sense strand
caagacagaugcagaauau

SEQ ID NO: 1506306 - RNA, 19 nt, Homo sapiens
  misc_RNA (1)...(19): siRNA sense strand
gaucugggauuccuacuuu

SEQ ID NO: 1506307 - RNA, 19 nt, Homo sapiens
  misc_RNA (1)...(19): siRNA sense strand
gcucagagauaguaaaguu

SEQ ID NO: 1506308 - RNA, 19 nt, Homo sapiens
  misc_RNA (1)...(19): siRNA sense strand
ucaaagugcucaaauggua

SEQ ID NO: 1506309 - RNA, 19 nt, Homo sapiens
  misc_RNA (1)...(19): siRNA sense strand
guacagaggauuugccuua

SEQ ID NO: 1506310 - RNA, 19 nt, Homo sapiens
  misc_RNA (1)...(19): siRNA sense strand
aagauuggcugcacaguua

SEQ ID NO: 1506311 - RNA, 19 nt, Homo sapiens
  misc_RNA (1)...(19): siRNA sense strand
caaggucucucaguuauaa

SEQ ID NO: 1506312 - RNA, 19 nt, Homo sapiens
  misc_RNA (1)...(19): siRNA sense strand
gaacaaaucagaagggaau

SEQ ID NO: 1506313 - RNA, 19 nt, Homo sapiens
  misc_RNA (1)...(19): siRNA sense strand
gccaaacccugaaggauuu

SEQ ID NO: 1506314 - RNA, 19 nt, Homo sapiens
  misc_RNA (1)...(19): siRNA sense strand
auacagagaucucaucaaa

SEQ ID NO: 1506315 - RNA, 19 nt, Homo sapiens
  misc_RNA (1)...(19): siRNA sense strand
gaaugcacguuauaacuug

SEQ ID NO: 1506316 - RNA, 19 nt, Homo sapiens
  misc_RNA (1)...(19): siRNA sense strand
gaaaugaguccucuggaaa

SEQ ID NO: 1506317 - RNA, 19 nt, Homo sapiens
  misc_RNA (1)...(19): siRNA sense strand
ggaagagcguggccagaaa

SEQ ID NO: 1506318 - RNA, 19 nt, Homo sapiens
  misc_RNA (1)...(19): siRNA sense strand
ggagaaaauugcacgauua

SEQ ID NO: 1506319 - RNA, 19 nt, Homo sapiens
  misc_RNA (1)...(19): siRNA sense strand
uuacugagcucuaccgauu

SEQ ID NO: 1506320 - RNA, 19 nt, Homo sapiens
  misc_RNA (1)...(19): siRNA sense strand
agacagaugcagaauauua

SEQ ID NO: 1506321 - RNA, 19 nt, Homo sapiens
  misc_RNA (1)...(19): siRNA sense strand
gcaaaggugacgaaacaua

SEQ ID NO: 1506322 - RNA, 19 nt, Homo sapiens
  misc_RNA (1)...(19): siRNA sense strand
gcagugagcuaagaaagga

SEQ ID NO: 1506323 - RNA, 19 nt, Homo sapiens
  misc_RNA (1)...(19): siRNA sense strand
cuacggagcacgagaaaua

SEQ ID NO: 1506324 - RNA, 19 nt, Homo sapiens
  misc_RNA (1)...(19): siRNA sense strand
gauggaagccucuuuguau

SEQ ID NO: 1506325 - RNA, 19 nt, Homo sapiens
  misc_RNA (1)...(19): siRNA sense strand
cgacauugcucccucuuug

SEQ ID NO: 1506326 - RNA, 19 nt, Homo sapiens
  misc_RNA (1)...(19): siRNA sense strand
gcugcaagauagcaaauuu

SEQ ID NO: 1506327 - RNA, 19 nt, Homo sapiens
  misc_RNA (1)...(19): siRNA sense strand
ggucuaaaguguuugauuc

SEQ ID NO: 1506328 - RNA, 19 nt, Homo sapiens
  misc_RNA (1)...(19): siRNA sense strand
gaacaucgacaucggaaga

SEQ ID NO: 1506329 - RNA, 19 nt, Homo sapiens
  misc_RNA (1)...(19): siRNA sense strand
agacugaacugaacaagga

SEQ ID NO: 1506330 - RNA, 19 nt, Homo sapiens
  misc_RNA (1)...(19): siRNA sense strand
gcagauauuuacuguguuc

SEQ ID NO: 1506331 - RNA, 19 nt, Homo sapiens
  misc_RNA (1)...(19): siRNA sense strand
ccacaaaacucacacaaaa

SEQ ID NO: 1506332 - RNA, 19 nt, Homo sapiens
  misc_RNA (1)...(19): siRNA sense strand
acacaaaucuucaggauac

SEQ ID NO: 1506333 - RNA, 19 nt, Homo sapiens
  misc_RNA (1)...(19): siRNA sense strand
gaaaggacauuuauaucac

SEQ ID NO: 1506334 - RNA, 19 nt, Homo sapiens
  misc_RNA (1)...(19): siRNA sense strand
ggaguucucugcuuguaug

SEQ ID NO: 1506335 - RNA, 19 nt, Homo sapiens
  misc_RNA (1)...(19): siRNA sense strand
gaaguuacgauguucauug

SEQ ID NO: 1506336 - RNA, 19 nt, Homo sapiens
  misc_RNA (1)...(19): siRNA sense strand
acagagaucucaucaaagu

SEQ ID NO: 1506337 - RNA, 19 nt, Homo sapiens
  misc_RNA (1)...(19): siRNA sense strand
ggcagaagcucaguauuug

SEQ ID NO: 1506338 - RNA, 19 nt, Homo sapiens
  misc_RNA (1)...(19): siRNA sense strand
acacaaacauucccgagaa

SEQ ID NO: 1506339 - RNA, 19 nt, Homo sapiens
  misc_RNA (1)...(19): siRNA sense strand
gcagauauaugcugugacu

SEQ ID NO: 1506340 - RNA, 19 nt, Homo sapiens
  misc_RNA (1)...(19): siRNA sense strand
cuucugaacuucuauaaga

SEQ ID NO: 1506341 - RNA, 19 nt, Homo sapiens
  misc_RNA (1)...(19): siRNA sense strand
gcugaaguaagcaauauua

SEQ ID NO: 1506342 - RNA, 19 nt, Homo sapiens
  misc_RNA (1)...(19): siRNA sense strand
ggagagaacgucauuauac

SEQ ID NO: 1506343 - RNA, 19 nt, Homo sapiens
  misc_RNA (1)...(19): siRNA sense strand
ccaagaacaugucggauag

SEQ ID NO: 1506344 - RNA, 19 nt, Homo sapiens
  misc_RNA (1)...(19): siRNA sense strand
gagagugagugguaccaaa

SEQ ID NO: 1506345 - RNA, 19 nt, Homo sapiens
  misc_RNA (1)...(19): siRNA sense strand
ccagaguucuucagaguug

SEQ ID NO: 1506346 - RNA, 19 nt, Homo sapiens
  misc_RNA (1)...(19): siRNA sense strand
gcauauacccuccucuuau

SEQ ID NO: 1506347 - RNA, 19 nt, Homo sapiens
  misc_RNA (1)...(19): siRNA sense strand
gcaguuuccuuacagcuau

SEQ ID NO: 1506348 - RNA, 19 nt, Homo sapiens
  misc_RNA (1)...(19): siRNA sense strand
gagaggagcuggaggucau

SEQ ID NO: 1506349 - RNA, 19 nt, Homo sapiens
  misc_RNA (1)...(19): siRNA sense strand
gaacaaggaggagauguau

SEQ ID NO: 1506350 - RNA, 19 nt, Homo sapiens
  misc_RNA (1)...(19): siRNA sense strand
uggagagguuguuagauua

SEQ ID NO: 1506351 - RNA, 19 nt, Homo sapiens
  misc_RNA (1)...(19): siRNA sense strand
ggucugaacugcugaaacu

SEQ ID NO: 1506352 - RNA, 19 nt, Homo sapiens
  misc_RNA (1)...(19): siRNA sense strand
gcacggagacauugaacaa

SEQ ID NO: 1506353 - RNA, 19 nt, Homo sapiens
  misc_RNA (1)...(19): siRNA sense strand
uaacuugacuggcuccaau

SEQ ID NO: 1506354 - RNA, 19 nt, Homo sapiens
  misc_RNA (1)...(19): siRNA sense strand
ugaagagccucauguguuc

SEQ ID NO: 1506355 - RNA, 19 nt, Homo sapiens
  misc_RNA (1)...(19): siRNA sense strand
gcagugggauuucuucucu

SEQ ID NO: 1506356 - RNA, 19 nt, Homo sapiens
  misc_RNA (1)...(19): siRNA sense strand
ggaaaagcgugaaguggua

SEQ ID NO: 1506357 - RNA, 19 nt, Homo sapiens
  misc_RNA (1)...(19): siRNA sense strand
gcccggagauguuuccaaa

SEQ ID NO: 1506358 - RNA, 19 nt, Homo sapiens
  misc_RNA (1)...(19): siRNA sense strand
gugcauaagugugaagaaa

SEQ ID NO: 1506359 - RNA, 19 nt, Homo sapiens
  misc_RNA (1)...(19): siRNA sense strand
ggaggaaauagaugugaua

SEQ ID NO: 1506360 - RNA, 19 nt, Homo sapiens
  misc_RNA (1)...(19): siRNA sense strand
gaacagaaggaccugauca

SEQ ID NO: 1506361 - RNA, 19 nt, Homo sapiens
  misc_RNA (1)...(19): siRNA sense strand
ugaagacucuguuaucaca

SEQ ID NO: 1506362 - RNA, 19 nt, Homo sapiens
  misc_RNA (1)...(19): siRNA sense strand
gaaggaagccaagaacaug

SEQ ID NO: 1506363 - RNA, 19 nt, Homo sapiens
  misc_RNA (1)...(19): siRNA sense strand
agaaagcucugaugaaguc

SEQ ID NO: 1506364 - RNA, 19 nt, Homo sapiens
  misc_RNA (1)...(19): siRNA sense strand
gaacuucuauaagacugaa

SEQ ID NO: 1506365 - RNA, 19 nt, Homo sapiens
  misc_RNA (1)...(19): siRNA sense strand
acacuuacauugagaguca

SEQ ID NO: 1506366 - RNA, 19 nt, Homo sapiens
  misc_RNA (1)...(19): siRNA sense strand
caagauagcaaauuucauc

SEQ ID NO: 1506367 - RNA, 19 nt, Homo sapiens
  misc_RNA (1)...(19): siRNA sense strand
aaacacaaaucuucaggau

SEQ ID NO: 1506368 - RNA, 19 nt, Homo sapiens
  misc_RNA (1)...(19): siRNA sense strand
caaugcagguuuagcaguu

SEQ ID NO: 1506369 - RNA, 19 nt, Homo sapiens
  misc_RNA (1)...(19): siRNA sense strand
aaagagaaccggccaauca

SEQ ID NO: 1506370 - RNA, 19 nt, Homo sapiens
  misc_RNA (1)...(19): siRNA sense strand
gaagacaucagcauuacug

SEQ ID NO: 1506371 - RNA, 19 nt, Homo sapiens
  misc_RNA (1)...(19): siRNA sense strand
gaaaggagagaagaaguug

SEQ ID NO: 1506372 - RNA, 19 nt, Homo sapiens
  misc_RNA (1)...(19): siRNA sense strand
gaaauuggagauacaguuc

SEQ ID NO: 1506373 - RNA, 19 nt, Homo sapiens
  misc_RNA (1)...(19): siRNA sense strand
gcaauugaagugcuagaaa

SEQ ID NO: 1506374 - RNA, 19 nt, Homo sapiens
  misc_RNA (1)...(19): siRNA sense strand
gagagaacgucauuauacu

SEQ ID NO: 1506375 - RNA, 19 nt, Homo sapiens
  misc_RNA (1)...(19): siRNA sense strand
agaaggaccugaucaugug

SEQ ID NO: 1506376 - RNA, 19 nt, Homo sapiens
  misc_RNA (1)...(19): siRNA sense strand
ucacagaaaugacaucaac

SEQ ID NO: 1506377 - RNA, 19 nt, Homo sapiens
  misc_RNA (1)...(19): siRNA sense strand
ugccagagcuucuccuuug

SEQ ID NO: 1506378 - RNA, 19 nt, Homo sapiens
  misc_RNA (1)...(19): siRNA sense strand
ugaaucacaucuggaaauu

SEQ ID NO: 1506379 - RNA, 19 nt, Homo sapiens
  misc_RNA (1)...(19): siRNA sense strand
aaauaugggucuaaagugu

SEQ ID NO: 1506380 - RNA, 19 nt, Homo sapiens
  misc_RNA (1)...(19): siRNA sense strand
gaagaaguuguuuggguuu

SEQ ID NO: 1506381 - RNA, 19 nt, Homo sapiens
  misc_RNA (1)...(19): siRNA sense strand
gacgugaagcgccacauua

SEQ ID NO: 1506382 - RNA, 19 nt, Homo sapiens
  misc_RNA (1)...(19): siRNA sense strand
gccaagaacaugucggaua

SEQ ID NO: 1506383 - RNA, 19 nt, Homo sapiens
  misc_RNA (1)...(19): siRNA sense strand
cagcugaagacucugauua

SEQ ID NO: 1506384 - RNA, 19 nt, Homo sapiens
  misc_RNA (1)...(19): siRNA sense strand
agaaaugaguccucuggaa

SEQ ID NO: 1506385 - RNA, 19 nt, Homo sapiens
  misc_RNA (1)...(19): siRNA sense strand
gagaacgucauuauacuug

SEQ ID NO: 1506386 - RNA, 19 nt, Homo sapiens
  misc_RNA (1)...(19): siRNA sense strand
ccucuuauaugacgagcua

SEQ ID NO: 1506387 - RNA, 19 nt, Homo sapiens
  misc_RNA (1)...(19): siRNA sense strand
gaucaugugugcacguauc

SEQ ID NO: 1506388 - RNA, 19 nt, Homo sapiens
  misc_RNA (1)...(19): siRNA sense strand
gaaggcacaagaauacauu

SEQ ID NO: 1506389 - RNA, 19 nt, Homo sapiens
  misc_RNA (1)...(19): siRNA sense strand
cuggauaccuuauuuggaa

SEQ ID NO: 1506390 - RNA, 19 nt, Homo sapiens
  misc_RNA (1)...(19): siRNA sense strand
ggcugucucucuaaauuaa

SEQ ID NO: 1506391 - RNA, 19 nt, Homo sapiens
  misc_RNA (1)...(19): siRNA sense strand
aagggaauauucaucagua

SEQ ID NO: 1506392 - RNA, 19 nt, Homo sapiens
  misc_RNA (1)...(19): siRNA sense strand
gcuaagaaaggacauuuau

SEQ ID NO: 1506393 - RNA, 19 nt, Homo sapiens
  misc_RNA (1)...(19): siRNA sense strand
ggaaauuggagauacaguu

SEQ ID NO: 1506394 - RNA, 19 nt, Homo sapiens
  misc_RNA (1)...(19): siRNA sense strand
agaggaugcuguuuaauca

SEQ ID NO: 1506395 - RNA, 19 nt, Homo sapiens
  misc_RNA (1)...(19): siRNA sense strand
uggcaucucucgcugguuu

SEQ ID NO: 1506396 - RNA, 19 nt, Homo sapiens
  misc_RNA (1)...(19): siRNA sense strand
agagaaugcugaacgaguu

SEQ ID NO: 1506397 - RNA, 19 nt, Homo sapiens
  misc_RNA (1)...(19): siRNA sense strand
gcacuugcauacagagauc

SEQ ID NO: 1506398 - RNA, 19 nt, Homo sapiens
  misc_RNA (1)...(19): siRNA sense strand
acacagagagugaguggua

SEQ ID NO: 1506399 - RNA, 19 nt, Homo sapiens
  misc_RNA (1)...(19): siRNA sense strand
gaagucgagcuuagggaua

SEQ ID NO: 1506400 - RNA, 19 nt, Homo sapiens
  misc_RNA (1)...(19): siRNA sense strand
gaagagaaagcuaauaaga

SEQ ID NO: 1506401 - RNA, 19 nt, Homo sapiens
  misc_RNA (1)...(19): siRNA sense strand
agagaaagcuaauaagaag

SEQ ID NO: 1506402 - RNA, 19 nt, Homo sapiens
  misc_RNA (1)...(19): siRNA sense strand
gcugcuggaucaaguauca

SEQ ID NO: 1506403 - RNA, 19 nt, Homo sapiens
  misc_RNA (1)...(19): siRNA sense strand
cugaagagaaagcuaauaa

SEQ ID NO: 1506404 - RNA, 19 nt, Homo sapiens
  misc_RNA (1)...(19): siRNA sense strand
gagagaagaggaagagucu

SEQ ID NO: 1506405 - RNA, 19 nt, Homo sapiens
  misc_RNA (1)...(19): siRNA sense strand
gucuuggucuuuggaaaua

SEQ ID NO: 1506406 - RNA, 19 nt, Homo sapiens
  misc_RNA (1)...(19): siRNA sense strand
uaagaaggcagagagaaga

SEQ ID NO: 1506407 - RNA, 19 nt, Homo sapiens
  misc_RNA (1)...(19): siRNA sense strand
gcagagagaagaggaagag

SEQ ID NO: 1506408 - RNA, 19 nt, Homo sapiens
  misc_RNA (1)...(19): siRNA sense strand
gagucuuggucuuuggaaa

SEQ ID NO: 1506409 - RNA, 19 nt, Homo sapiens
  misc_RNA (1)...(19): siRNA sense strand
ggucuuuggaaauaucuuu

SEQ ID NO: 1506410 - RNA, 19 nt, Homo sapiens
  misc_RNA (1)...(19): siRNA sense strand
ggagcugcuggaucaagua

SEQ ID NO: 1506411 - RNA, 19 nt, Homo sapiens
  misc_RNA (1)...(19): siRNA sense strand
uaauaagaaggcagagaga

SEQ ID NO: 1506412 - RNA, 19 nt, Homo sapiens
  misc_RNA (1)...(19): siRNA sense strand
gagcugcuggaucaaguau

SEQ ID NO: 1506413 - RNA, 19 nt, Homo sapiens
  misc_RNA (1)...(19): siRNA sense strand
gcuaauaagaaggcagaga

SEQ ID NO: 1506414 - RNA, 19 nt, Homo sapiens
  misc_RNA (1)...(19): siRNA sense strand
gaagagaaagcuaauaaga

SEQ ID NO: 1506415 - RNA, 19 nt, Homo sapiens
  misc_RNA (1)...(19): siRNA sense strand
agagaaagcuaauaagaag

SEQ ID NO: 1506416 - RNA, 19 nt, Homo sapiens
  misc_RNA (1)...(19): siRNA sense strand
gcugcuggaucaaguauca

SEQ ID NO: 1506417 - RNA, 19 nt, Homo sapiens
  misc_RNA (1)...(19): siRNA sense strand
cugaagagaaagcuaauaa

SEQ ID NO: 1506418 - RNA, 19 nt, Homo sapiens
  misc_RNA (1)...(19): siRNA sense strand
gagagaagaggaagagucu

SEQ ID NO: 1506419 - RNA, 19 nt, Homo sapiens
  misc_RNA (1)...(19): siRNA sense strand
gucuuggucuuuggaaaua

SEQ ID NO: 1506420 - RNA, 19 nt, Homo sapiens
  misc_RNA (1)...(19): siRNA sense strand
uaagaaggcagagagaaga

SEQ ID NO: 1506421 - RNA, 19 nt, Homo sapiens
  misc_RNA (1)...(19): siRNA sense strand
gcagagagaagaggaagag

SEQ ID NO: 1506422 - RNA, 19 nt, Homo sapiens
  misc_RNA (1)...(19): siRNA sense strand
gagucuuggucuuuggaaa

SEQ ID NO: 1506423 - RNA, 19 nt, Homo sapiens
  misc_RNA (1)...(19): siRNA sense strand
ggucuuuggaaauaucuuu

SEQ ID NO: 1506424 - RNA, 19 nt, Homo sapiens
  misc_RNA (1)...(19): siRNA sense strand
ggagcugcuggaucaagua

SEQ ID NO: 1506425 - RNA, 19 nt, Homo sapiens
  misc_RNA (1)...(19): siRNA sense strand
uaauaagaaggcagagaga

SEQ ID NO: 1506426 - RNA, 19 nt, Homo sapiens
  misc_RNA (1)...(19): siRNA sense strand
gagcugcuggaucaaguau

SEQ ID NO: 1506427 - RNA, 19 nt, Homo sapiens
  misc_RNA (1)...(19): siRNA sense strand
gcuaauaagaaggcagaga

SEQ ID NO: 1506428 - RNA, 19 nt, Homo sapiens
  misc_RNA (1)...(19): siRNA sense strand
uggaacagcugcagccauu

SEQ ID NO: 1506429 - RNA, 19 nt, Homo sapiens
  misc_RNA (1)...(19): siRNA sense strand
ccucaccuuucuacaagua

SEQ ID NO: 1506430 - RNA, 19 nt, Homo sapiens
  misc_RNA (1)...(19): siRNA sense strand
ggaaaccugggacaucuga

SEQ ID NO: 1506431 - RNA, 19 nt, Homo sapiens
  misc_RNA (1)...(19): siRNA sense strand
gaacagcugcagccauuuu

SEQ ID NO: 1506432 - RNA, 19 nt, Homo sapiens
  misc_RNA (1)...(19): siRNA sense strand
gaugugaggucuggaacag

SEQ ID NO: 1506433 - RNA, 19 nt, Homo sapiens
  misc_RNA (1)...(19): siRNA sense strand
ccugggacaucugaacuga

SEQ ID NO: 1506434 - RNA, 19 nt, Homo sapiens
  misc_RNA (1)...(19): siRNA sense strand
acucuucccucaccuuucu

SEQ ID NO: 1506435 - RNA, 19 nt, Homo sapiens
  misc_RNA (1)...(19): siRNA sense strand
ugggaaaccugggacaucu

SEQ ID NO: 1506436 - RNA, 19 nt, Homo sapiens
  misc_RNA (1)...(19): siRNA sense strand
ucccucaccuuucuacaag

SEQ ID NO: 1506437 - RNA, 19 nt, Homo sapiens
  misc_RNA (1)...(19): siRNA sense strand
cuacucuucccucaccuuu

SEQ ID NO: 1506438 - RNA, 19 nt, Homo sapiens
  misc_RNA (1)...(19): siRNA sense strand
ggaacagcugcagccauuu

SEQ ID NO: 1506439 - RNA, 19 nt, Homo sapiens
  misc_RNA (1)...(19): siRNA sense strand
uggaacagcugcagccauu

SEQ ID NO: 1506440 - RNA, 19 nt, Homo sapiens
  misc_RNA (1)...(19): siRNA sense strand
ccucaccuuucuacaagua

SEQ ID NO: 1506441 - RNA, 19 nt, Homo sapiens
  misc_RNA (1)...(19): siRNA sense strand
ggaaaccugggacaucuga

SEQ ID NO: 1506442 - RNA, 19 nt, Homo sapiens
  misc_RNA (1)...(19): siRNA sense strand
gaacagcugcagccauuuu

SEQ ID NO: 1506443 - RNA, 19 nt, Homo sapiens
  misc_RNA (1)...(19): siRNA sense strand
gaugugaggucuggaacag

SEQ ID NO: 1506444 - RNA, 19 nt, Homo sapiens
  misc_RNA (1)...(19): siRNA sense strand
ccugggacaucugaacuga

SEQ ID NO: 1506445 - RNA, 19 nt, Homo sapiens
  misc_RNA (1)...(19): siRNA sense strand
acucuucccucaccuuucu

SEQ ID NO: 1506446 - RNA, 19 nt, Homo sapiens
  misc_RNA (1)...(19): siRNA sense strand
ugggaaaccugggacaucu

SEQ ID NO: 1506447 - RNA, 19 nt, Homo sapiens
  misc_RNA (1)...(19): siRNA sense strand
ucccucaccuuucuacaag

SEQ ID NO: 1506448 - RNA, 19 nt, Homo sapiens
  misc_RNA (1)...(19): siRNA sense strand
cuacucuucccucaccuuu

SEQ ID NO: 1506449 - RNA, 19 nt, Homo sapiens
  misc_RNA (1)...(19): siRNA sense strand
ggaacagcugcagccauuu

SEQ ID NO: 1506450 - RNA, 19 nt, Homo sapiens
  misc_RNA (1)...(19): siRNA sense strand
caacuuccuugucugcuuu

SEQ ID NO: 1506451 - RNA, 19 nt, Homo sapiens
  misc_RNA (1)...(19): siRNA sense strand
ggaccgaccagcugaaaga

SEQ ID NO: 1506452 - RNA, 19 nt, Homo sapiens
  misc_RNA (1)...(19): siRNA sense strand
cgguguaccuucucacuuu

SEQ ID NO: 1506453 - RNA, 19 nt, Homo sapiens
  misc_RNA (1)...(19): siRNA sense strand
ggcuauaucugcggugaaa

SEQ ID NO: 1506454 - RNA, 19 nt, Homo sapiens
  misc_RNA (1)...(19): siRNA sense strand
gaaagaaagaccagugaac

SEQ ID NO: 1506455 - RNA, 19 nt, Homo sapiens
  misc_RNA (1)...(19): siRNA sense strand
gcaccaaugggaccugcua

SEQ ID NO: 1506456 - RNA, 19 nt, Homo sapiens
  misc_RNA (1)...(19): siRNA sense strand
cagcguggucuacgucaua

SEQ ID NO: 1506457 - RNA, 19 nt, Homo sapiens
  misc_RNA (1)...(19): siRNA sense strand
gcaggcaggucuggugagu

SEQ ID NO: 1506458 - RNA, 19 nt, Homo sapiens
  misc_RNA (1)...(19): siRNA sense strand
cggccacgcugcucaacuu

SEQ ID NO: 1506459 - RNA, 19 nt, Homo sapiens
  misc_RNA (1)...(19): siRNA sense strand
aggcaggucuggugagugu

SEQ ID NO: 1506460 - RNA, 19 nt, Homo sapiens
  misc_RNA (1)...(19): siRNA sense strand
aaagaaagaccagugaaca

SEQ ID NO: 1506461 - RNA, 19 nt, Homo sapiens
  misc_RNA (1)...(19): siRNA sense strand
ccgaccagcugaaagaaag

SEQ ID NO: 1506462 - RNA, 19 nt, Homo sapiens
  misc_RNA (1)...(19): siRNA sense strand
ucaacuuccuugucugcuu

SEQ ID NO: 1506463 - RNA, 19 nt, Homo sapiens
  misc_RNA (1)...(19): siRNA sense strand
ccuacaacgugucccaugu

SEQ ID NO: 1506464 - RNA, 19 nt, Homo sapiens
  misc_RNA (1)...(19): siRNA sense strand
ggaucuacgugacgcuucu

SEQ ID NO: 1506465 - RNA, 19 nt, Homo sapiens
  misc_RNA (1)...(19): siRNA sense strand
ccuggcagcugugagcauu

SEQ ID NO: 1506466 - RNA, 19 nt, Homo sapiens
  misc_RNA (1)...(19): siRNA sense strand
ugaaagaaagaccagugaa

SEQ ID NO: 1506467 - RNA, 19 nt, Homo sapiens
  misc_RNA (1)...(19): siRNA sense strand
gguguaccuucucacuuuc

SEQ ID NO: 1506468 - RNA, 19 nt, Homo sapiens
  misc_RNA (1)...(19): siRNA sense strand
uggcagcugugagcauuga

SEQ ID NO: 1506469 - RNA, 19 nt, Homo sapiens
  misc_RNA (1)...(19): siRNA sense strand
cugcucaacuuccuugucu

SEQ ID NO: 1506470 - RNA, 19 nt, Homo sapiens
  misc_RNA (1)...(19): siRNA sense strand
guuccaagccgacuuucau

SEQ ID NO: 1506471 - RNA, 19 nt, Homo sapiens
  misc_RNA (1)...(19): siRNA sense strand
gcaaucacugguucgucuu

SEQ ID NO: 1506472 - RNA, 19 nt, Homo sapiens
  misc_RNA (1)...(19): siRNA sense strand
uggcugugguccucuuugu

SEQ ID NO: 1506473 - RNA, 19 nt, Homo sapiens
  misc_RNA (1)...(19): siRNA sense strand
ucucuggauucaucuucuu

SEQ ID NO: 1506474 - RNA, 19 nt, Homo sapiens
  misc_RNA (1)...(19): siRNA sense strand
gcagcguggucuacgucau

SEQ ID NO: 1506475 - RNA, 19 nt, Homo sapiens
  misc_RNA (1)...(19): siRNA sense strand
ggaagcagguggucauuga

SEQ ID NO: 1506476 - RNA, 19 nt, Homo sapiens
  misc_RNA (1)...(19): siRNA sense strand
ucaacaacaccaagucuuu

SEQ ID NO: 1506477 - RNA, 19 nt, Homo sapiens
  misc_RNA (1)...(19): siRNA sense strand
ccauccagcugauccagaa

SEQ ID NO: 1506478 - RNA, 19 nt, Homo sapiens
  misc_RNA (1)...(19): siRNA sense strand
gaacccuccugaugagagu

SEQ ID NO: 1506479 - RNA, 19 nt, Homo sapiens
  misc_RNA (1)...(19): siRNA sense strand
guacagggagcagaucaaa

SEQ ID NO: 1506480 - RNA, 19 nt, Homo sapiens
  misc_RNA (1)...(19): siRNA sense strand
uugaggacauccaccagua

SEQ ID NO: 1506481 - RNA, 19 nt, Homo sapiens
  misc_RNA (1)...(19): siRNA sense strand
gcugaacccuccugaugag

SEQ ID NO: 1506482 - RNA, 19 nt, Homo sapiens
  misc_RNA (1)...(19): siRNA sense strand
agacgugccuguuggacau

SEQ ID NO: 1506483 - RNA, 19 nt, Homo sapiens
  misc_RNA (1)...(19): siRNA sense strand
gaguggaggaugccuucua

SEQ ID NO: 1506484 - RNA, 19 nt, Homo sapiens
  misc_RNA (1)...(19): siRNA sense strand
gggagggcuuccugugugu

SEQ ID NO: 1506485 - RNA, 19 nt, Homo sapiens
  misc_RNA (1)...(19): siRNA sense strand
aagcugaacccuccugaug

SEQ ID NO: 1506486 - RNA, 19 nt, Homo sapiens
  misc_RNA (1)...(19): siRNA sense strand
gcaagagugcgcugaccau

SEQ ID NO: 1506487 - RNA, 19 nt, Homo sapiens
  misc_RNA (1)...(19): siRNA sense strand
gggugaaggacucggauga

SEQ ID NO: 1506488 - RNA, 19 nt, Homo sapiens
  misc_RNA (1)...(19): siRNA sense strand
gggcuuccuguguguguuu

SEQ ID NO: 1506489 - RNA, 19 nt, Homo sapiens
  misc_RNA (1)...(19): siRNA sense strand
agagugcgcugaccaucca

SEQ ID NO: 1506490 - RNA, 19 nt, Homo sapiens
  misc_RNA (1)...(19): siRNA sense strand
cgaauacgaccccacuaua

SEQ ID NO: 1506491 - RNA, 19 nt, Homo sapiens
  misc_RNA (1)...(19): siRNA sense strand
gaggacauccaccaguaca

SEQ ID NO: 1506492 - RNA, 19 nt, Homo sapiens
  misc_RNA (1)...(19): siRNA sense strand
gaauacgaccccacuauag

SEQ ID NO: 1506493 - RNA, 19 nt, Homo sapiens
  misc_RNA (1)...(19): siRNA sense strand
gaagcagguggucauugau

SEQ ID NO: 1506494 - RNA, 19 nt, Homo sapiens
  misc_RNA (1)...(19): siRNA sense strand
caacaacaccaagucuuuu

SEQ ID NO: 1506495 - RNA, 19 nt, Homo sapiens
  misc_RNA (1)...(19): siRNA sense strand
gaagcugaacccuccugau

SEQ ID NO: 1506496 - RNA, 19 nt, Homo sapiens
  misc_RNA (1)...(19): siRNA sense strand
cggaugacgugcccauggu

SEQ ID NO: 1506497 - RNA, 19 nt, Homo sapiens
  misc_RNA (1)...(19): siRNA sense strand
ggaagcagguggucauuga

SEQ ID NO: 1506498 - RNA, 19 nt, Homo sapiens
  misc_RNA (1)...(19): siRNA sense strand
ucaacaacaccaagucuuu

SEQ ID NO: 1506499 - RNA, 19 nt, Homo sapiens
  misc_RNA (1)...(19): siRNA sense strand
ccauccagcugauccagaa

SEQ ID NO: 1506500 - RNA, 19 nt, Homo sapiens
  misc_RNA (1)...(19): siRNA sense strand
guacagggagcagaucaaa

SEQ ID NO: 1506501 - RNA, 19 nt, Homo sapiens
  misc_RNA (1)...(19): siRNA sense strand
uugaggacauccaccagua

SEQ ID NO: 1506502 - RNA, 19 nt, Homo sapiens
  misc_RNA (1)...(19): siRNA sense strand
agacgugccuguuggacau

SEQ ID NO: 1506503 - RNA, 19 nt, Homo sapiens
  misc_RNA (1)...(19): siRNA sense strand
gggagggcuuccugugugu

SEQ ID NO: 1506504 - RNA, 19 nt, Homo sapiens
  misc_RNA (1)...(19): siRNA sense strand
gcaagagugcgcugaccau

SEQ ID NO: 1506505 - RNA, 19 nt, Homo sapiens
  misc_RNA (1)...(19): siRNA sense strand
gggugaaggacucggauga

SEQ ID NO: 1506506 - RNA, 19 nt, Homo sapiens
  misc_RNA (1)...(19): siRNA sense strand
gggcuuccuguguguguuu

SEQ ID NO: 1506507 - RNA, 19 nt, Homo sapiens
  misc_RNA (1)...(19): siRNA sense strand
agagugcgcugaccaucca

SEQ ID NO: 1506508 - RNA, 19 nt, Homo sapiens
  misc_RNA (1)...(19): siRNA sense strand
cgaauacgaccccacuaua

SEQ ID NO: 1506509 - RNA, 19 nt, Homo sapiens
  misc_RNA (1)...(19): siRNA sense strand
gaggacauccaccaguaca

SEQ ID NO: 1506510 - RNA, 19 nt, Homo sapiens
  misc_RNA (1)...(19): siRNA sense strand
gaauacgaccccacuauag

SEQ ID NO: 1506511 - RNA, 19 nt, Homo sapiens
  misc_RNA (1)...(19): siRNA sense strand
gaagcagguggucauugau

SEQ ID NO: 1506512 - RNA, 19 nt, Homo sapiens
  misc_RNA (1)...(19): siRNA sense strand
caacaacaccaagucuuuu

SEQ ID NO: 1506513 - RNA, 19 nt, Homo sapiens
  misc_RNA (1)...(19): siRNA sense strand
cggaugacgugcccauggu

SEQ ID NO: 1506514 - RNA, 19 nt, Homo sapiens
  misc_RNA (1)...(19): siRNA sense strand
ucaaacagcucacaguuaa

SEQ ID NO: 1506515 - RNA, 19 nt, Homo sapiens
  misc_RNA (1)...(19): siRNA sense strand
ccacugagguguugaugug

SEQ ID NO: 1506516 - RNA, 19 nt, Homo sapiens
  misc_RNA (1)...(19): siRNA sense strand
uaaggaagcugugcugaau

SEQ ID NO: 1506517 - RNA, 19 nt, Homo sapiens
  misc_RNA (1)...(19): siRNA sense strand
aagcugugcugaaugguuu

SEQ ID NO: 1506518 - RNA, 19 nt, Homo sapiens
  misc_RNA (1)...(19): siRNA sense strand
ggugaacgcugcugugacu

SEQ ID NO: 1506519 - RNA, 19 nt, Homo sapiens
  misc_RNA (1)...(19): siRNA sense strand
ugaacgcugcugugacuua

SEQ ID NO: 1506520 - RNA, 19 nt, Homo sapiens
  misc_RNA (1)...(19): siRNA sense strand
gaacgcugcugugacuuac

SEQ ID NO: 1506521 - RNA, 19 nt, Homo sapiens
  misc_RNA (1)...(19): siRNA sense strand
gaagcugugcugaaugguu

SEQ ID NO: 1506522 - RNA, 19 nt, Homo sapiens
  misc_RNA (1)...(19): siRNA sense strand
cauuggcuaugauguuuga

SEQ ID NO: 1506523 - RNA, 19 nt, Homo sapiens
  misc_RNA (1)...(19): siRNA sense strand
uccguaaccuuguggagaa

SEQ ID NO: 1506524 - RNA, 19 nt, Homo sapiens
  misc_RNA (1)...(19): siRNA sense strand
gguacuacgccaagguuga

SEQ ID NO: 1506525 - RNA, 19 nt, Homo sapiens
  misc_RNA (1)...(19): siRNA sense strand
gguggccacugagguguug

SEQ ID NO: 1506526 - RNA, 19 nt, Homo sapiens
  misc_RNA (1)...(19): siRNA sense strand
uucaaacagcucacaguua

SEQ ID NO: 1506527 - RNA, 19 nt, Homo sapiens
  misc_RNA (1)...(19): siRNA sense strand
aggaagcugugcugaaugg

SEQ ID NO: 1506528 - RNA, 19 nt, Homo sapiens
  misc_RNA (1)...(19): siRNA sense strand
uuaaggaagcugugcugaa

SEQ ID NO: 1506529 - RNA, 19 nt, Homo sapiens
  misc_RNA (1)...(19): siRNA sense strand
cuucaaacagcucacaguu

SEQ ID NO: 1506530 - RNA, 19 nt, Homo sapiens
  misc_RNA (1)...(19): siRNA sense strand
ccaauuuguccguaaccuu

SEQ ID NO: 1506531 - RNA, 19 nt, Homo sapiens
  misc_RNA (1)...(19): siRNA sense strand
aaacagcucacaguuaagg

SEQ ID NO: 1506532 - RNA, 19 nt, Homo sapiens
  misc_RNA (1)...(19): siRNA sense strand
gaagauggcagaaauuaga

SEQ ID NO: 1506533 - RNA, 19 nt, Homo sapiens
  misc_RNA (1)...(19): siRNA sense strand
caaagugaaugcccaguga

SEQ ID NO: 1506534 - RNA, 19 nt, Homo sapiens
  misc_RNA (1)...(19): siRNA sense strand
caacauguaucacaagagu

SEQ ID NO: 1506535 - RNA, 19 nt, Homo sapiens
  misc_RNA (1)...(19): siRNA sense strand
ggaugaaguuggaggugua

SEQ ID NO: 1506536 - RNA, 19 nt, Homo sapiens
  misc_RNA (1)...(19): siRNA sense strand
gaaauggaguccgaagaug

SEQ ID NO: 1506537 - RNA, 19 nt, Homo sapiens
  misc_RNA (1)...(19): siRNA sense strand
caucaacgcuguaucuauc

SEQ ID NO: 1506538 - RNA, 19 nt, Homo sapiens
  misc_RNA (1)...(19): siRNA sense strand
ggaagaaugggaugaaguu

SEQ ID NO: 1506539 - RNA, 19 nt, Homo sapiens
  misc_RNA (1)...(19): siRNA sense strand
ggaucgaucuagccugaaa

SEQ ID NO: 1506540 - RNA, 19 nt, Homo sapiens
  misc_RNA (1)...(19): siRNA sense strand
gaucuagccugaaauccau

SEQ ID NO: 1506541 - RNA, 19 nt, Homo sapiens
  misc_RNA (1)...(19): siRNA sense strand
uagacgaacuggugaguga

SEQ ID NO: 1506542 - RNA, 19 nt, Homo sapiens
  misc_RNA (1)...(19): siRNA sense strand
ggaaauggaguccgaagau

SEQ ID NO: 1506543 - RNA, 19 nt, Homo sapiens
  misc_RNA (1)...(19): siRNA sense strand
gaccaacugugauggcuau

SEQ ID NO: 1506544 - RNA, 19 nt, Homo sapiens
  misc_RNA (1)...(19): siRNA sense strand
ccagagacuuccaugauca

SEQ ID NO: 1506545 - RNA, 19 nt, Homo sapiens
  misc_RNA (1)...(19): siRNA sense strand
gaaauuagaaggaaaugac

SEQ ID NO: 1506546 - RNA, 19 nt, Homo sapiens
  misc_RNA (1)...(19): siRNA sense strand
ucaccuuccucuacaauga

SEQ ID NO: 1506547 - RNA, 19 nt, Homo sapiens
  misc_RNA (1)...(19): siRNA sense strand
ggucaucacuuccuacaac

SEQ ID NO: 1506548 - RNA, 19 nt, Homo sapiens
  misc_RNA (1)...(19): siRNA sense strand
ggacaucaacgcuguaucu

SEQ ID NO: 1506549 - RNA, 19 nt, Homo sapiens
  misc_RNA (1)...(19): siRNA sense strand
acuccuacauccugaaaua

SEQ ID NO: 1506550 - RNA, 19 nt, Homo sapiens
  misc_RNA (1)...(19): siRNA sense strand
gaaguucuccuuggcuaaa

SEQ ID NO: 1506551 - RNA, 19 nt, Homo sapiens
  misc_RNA (1)...(19): siRNA sense strand
gaucugccaucacauagag

SEQ ID NO: 1506552 - RNA, 19 nt, Homo sapiens
  misc_RNA (1)...(19): siRNA sense strand
gagaaugccaaccacaauu

SEQ ID NO: 1506553 - RNA, 19 nt, Homo sapiens
  misc_RNA (1)...(19): siRNA sense strand
gagaacaacauguaucaca

SEQ ID NO: 1506554 - RNA, 19 nt, Homo sapiens
  misc_RNA (1)...(19): siRNA sense strand
gcagaaauuagaaggaaau

SEQ ID NO: 1506555 - RNA, 19 nt, Homo sapiens
  misc_RNA (1)...(19): siRNA sense strand
agaaugggaugaaguugga

SEQ ID NO: 1506556 - RNA, 19 nt, Homo sapiens
  misc_RNA (1)...(19): siRNA sense strand
gcuaaaaccuccucaaucu

SEQ ID NO: 1506557 - RNA, 19 nt, Homo sapiens
  misc_RNA (1)...(19): siRNA sense strand
caaauucaccuuccucuac
